United States Patent Application Publication US 2011/0014706 A2 - sequence listing, part 17

SEQ ID NO: 32574 - DNA, 4024 bp, Arabidopsis thaliana landsberg
  unsure (1)..(4024): unsure at all n locations
caccttcacagcttgtgaggagcagaggaacgcaacgagctgttcaagcagctaagaaacagaatcgagatggttctgagggagaaaagtgaagatggaatcagtgaagaagacgtgaaagaagcgataaagagagtgctctgtttggacaaagcttacccacttcctctagttggcaccatgctcgagaagttccctcaagaattcaagccagcgacttggtggcctgaaacaaaacccgaacccactcattccagaacggaagctaacgggtggaactcggagctagagatggagatgagagaggtggttgaggtaattaagagtagagatgcagaggagtacgagaggttaggtaacgtggccttgaagttaaatcgggttttggcaatctctggaccggtgttaaccggaattgctgctgtaagttccggttttataggtcacggttcaggtttagctggagtagtagcaacaacgtgtgcttcattggctgccgtagtgaacacgttagagcacggaggtcaagtagggatggtggttgagatgtatagaaactccgccggattcttctctcttatggaagatacgatcaaaacagagagacgagagaatggacaagttttcgagaccaaagtagcgttgaaacttgggagaagcttgtctgaattgagagatctggccagaagatctagcttgtctaggttacaaggatcagccatagatgaatgcgcaagcaagctcttttaattagtctacatacaaattgatattcattaattatttttgtgtatagagaaaatgatagatgatttttgagtttctatacaaacctgaatataactatgcaaattagttttggttacttatcttttaatatattacgcttttactctccctgtgatataacctagtgcagatcatacaaagctaaaacaaaagttttgtatatacacggttaatatttagacatgtaagttatcactacaagaaaacatgacatttgtgagggacaaaaccgtagctaatccctcgcaaaacgctattagcgaggaaactgcgacgaacgacacttcctcgcaaatcgcgcgtcgcaaattagaaacagtcgtaattccctcgcaaatttgcgacggaataaatgtcttgctaaacgctcgcaatttgcaagggatataaaacgtcgcaaattcgtcgcaaatgagctgtcttgctaattcctcgcaaagtttgcgagggatttgcaattaatatttctgtagcaaacctgcgagggagttgcgagttgcagcattcgtagtagcacatccctcgcaaaatttgcgagggatttgcaattaatatttctgtagcaaacctgcgagggagttgcgagttgcagagttcgtagtagcaaatacctcgcaagttttgcgatggacttgctaggtttttgcaacgttcttaattattagataaacgtgattactgttctgtttagcttaattatattcttaattattttcttaggttaatctaatattaatttttggtattaacactgaattagaaacttaattgatagcctaactcatattattaatactgaaactttggtgttcaaataaaattagaaagctaacaaaataaatatacacaatgttgcaagttttagggtttagatgaaacaaaataaaatagagggatgcaagtttttttagaaagcaagagagggagaggatccagtgttgtttgcctcagtctcaactgcctcctcagccctaactgtttcagcttcaacagcttcagttgttgtgatcccagcttcaggcatctcaggtggctggttggagccttcaggctctgtcctagaagatccagctcgaaagatggcagcaaagtctggatctttctccgcaaggtagtcgaagtacacatggaagctactaatcttctctgcttggtttgcaatgagagcttcagcggcagccagcttttgagagagttcacccggatcatctcgaggaactgaaggaccgatgtgagctgatgcggcttctagctgcaatgaaccagccccatatatcctccctttcttctttggagccacctaagagaaactcaaaaccaaaaacaaaaacaagtcactattacataatgtaaccaaaactgagacaaacaaatcaagacaataacaaatccaattacataatgaaaccatcgacaaatacagctaagtaacaatgccaagacaaatacaactacaacaaacaaaaaccaattcatgacaaaacattgaacacaatgccaagttacaatgcattctaattgcgttgactacacacacaaacaaaggcagaaaaaaactgacaaacacaaagccaagtcgctatagtaaatgtgttgacaaaacacacaaacaaagcagaaaattactaacatcatcaaagccaagtcaccggatcaacagacacaaacaaatgaggacaaaacacagctgaaactatatagaagagagagagagagagaaatttaccgaagcatatatcttgttcttggcctgaacagataaaccgcctgaagctgtgctctccgttgtgttctcggaacacagctgagacgtctcctcttgaatcctagatgacacttcattgtagatctcctctgattttccatcaatgaaactaccatcaggttttctatgtgtctcatctaagagcacaagaaaatctggagtagtttctccggtgagttcacactacaacagaaacaagtcttggttagttctttgagtaagtaataaaattgacaaagtaagagagtaaaataacttacatgttttcgggcccgggctttgtaagaggtctggccagacctgtgtttatgaatcccgaggccatccggatcatgtaatcttgcattcctactattgatactcttcagttctgacttaggatctcgccaaaaactaataagaccggcccacactacaggatcaaaccagcgaggcattgctacatctcccttctctctccactttcccttccaccgacaaacttgatcagtcatcctctccttcagctttgcttcaaactcagtcttaactctcttgtttattgttttatcccaattatacatttgctacaaaacagacacaagtgacagcaaaaattagacttaatattacagcaactaaaaagctttacacaacaaaatataatttagtggacttacagcaaaggtttcaaaccagcgatcaaccacatgttggggtgtcattgaccagttagcatgaggctccttgaaatctctttcaaagatgctccggacagtagctggaactgaagggtcatcctcaaacctacaaacacaaggttccattaggcaataaactgataactgagactagtactatgaacgcttaaggaatatgtttacaaaagtggcttaccagaaagttccgggaggacggttagggtctaatctcagtaacccagcacgaccaagactatcaagcaactcatccagagtcatttcgtgagccgagaagctagaggattagcatggtggacggtgccgttgggtgactgatttccctgctgaggagaagcaccgcttgcttggttgataggcgtttgaggtctggagnnnnnnnnnnnnnnnnnnnnnnnnnnagtattcccttcactgctatgagggtttccacgctgctgttgagaccgaaacctcgagtagtcctttccattgaacgacatcttgcaatgaagaaatcattgtgttagtcaaatggataagcaaacccaaaaccctaaatagatctagaaggaaaaatagatcgaaaccctaaatagatctatgaatgaaaccctaattaacacaaaagaaaccgaatgaagaactgagaggtaagagacattaccttgtttggttagaaaccgacgatgggaagaagacacggcggagatcgccaactcgccggagaagagaaaagactcgattagggtttactagaacaagacggcgaagataaccgagaagacagcag

SEQ ID NO: 32575 - DNA, 1287 bp, Arabidopsis thaliana landsberg
aaaacgtcgaacagagagctaatttgatatatccgtctcatttaaattttagcttcttgatccttaatcctcatgctcagggtcaagagtaatttcaaacccatgtggcaagaatttgttaaatacgagaattaaatggttatgtccctttaacagctctttgactcgtgcaatcacgacagaagtatcggtcctgataaaatgcaagatgaagaatgggttcagaggctaaatatgatacttaatgaaacaaaacaaaaagatgttatacctttgtgccttgaagtcgctcataatctcgagaaacatatcatatttgtctcgctgatcatgaaacatctcctttacttcctttaagtaggtcaaagcatcatcggtagtcaatttctgagtgttgattcccccttcaccaatgctccctcctccagtgattggagattgctcatatctgcaccaaacaaactctaatcacttagtaactttcatgcaaacaagctataatgtctcatcgccagaaattttaaattttcgaagtctgacgaaaagggaaactcacgattcgccacgagaagagcccaaaggacgtttaaattgagacccggttgcgtaaatatcatccctaattcgcttcattgctgctctgagtaaaacaaacaagaaagatcatcgattagagaagagaaatgaagaaatttgaaggtaaacccaaaatcccaatttagaaactccattactgagcatctaaaaaaggaaaattcagatgaagttgataaaacctactttctcgttctccagatttcccagagatataacttcgggaagagattaatcagatctctcgagtaagagcggaatcgataagaaacacttccgatcaaattccggcgaaaacttcaaatttcccgaattgtgccaaaccccaagaacaattccgatgagaacagagtggaattcagaagaagattaaaaaacaaatgagagagaaatgttttgaattggagttgctacgactgagaagcaagagagagaaagtaattttcgaataatgaagaagaagaagaaacgaggacggaatttgcctatgaggtctctcccggcaccttctttagaattgtttcagcgagaccaaattattattatttccttttttctatttttgggccgttaaaatttataatgggcttaataaaaggccctgattattaggcccattaaataaaaacgtaaggtaattagggttttgcttcatcatattcgccgaggaagatatataaagaggaaacagat

SEQ ID NO: 32576 - DNA, 5004 bp, Arabidopsis thaliana landsberg
tttagcagaaccctacatggtaatcaaaaagctcaacaagcactttgttttttaggatttttattatctacaaatcgaaagctcgtgcctttcgaaacagaatctaccaaaatccaatttatattcataagcatgaagggagaagagaagatgacgaaccggcgagcgaattccgacatatgttttgaaattagatttggtcgcggagagaatgagataaacggaccagaccaggaattagatttggggatctcttgagattggttgcgaagaagaagatggactcgaaacttgggtttgcacagttttcagattcttgaaatccagagctttagagttgcaattacgggaacgttatcacacttttctcgccatctattattcatcatcttccccataacacatacgcagaatcatttgacttgcaaagccaagttcaaccgatccgaaccgagccaaaccgaagctgcaaatttaattggattaccggtttggttgggttcggaattgatttggtttaagctctgctataatgaggtatgtttacaccaacaaaacatggatatagaacaataaatgaccgttaaacatgctttaaaagtaaaaaacaaaaaggaaattacaaagaaaaatagtcaattaggttaacgcgttacaacaaattataatcacaaatttttgcttatataacaacaatacactttgtgtgacatctccacagttacaattttctcaacaatctctcttccttacgaatcatcatcatctttcactctgtctctgatcagttttgtctaatttcactcgctcgacaatggcaactgaatctttcaaactcgatgttcatgtacaggctctgtctcaagatcggtcattagggttcataagtacgaaactaatcagtctacatagagaagtcgaggaatttctcattaacgacaaggatgattgtgtcacgagtctcggatcttacccggatgattcttctacttgtcacgacccactaatctctctgacactcccaagtttcaaaccaaacgacgtctatcaacatctccagacccaactccacgatcatgacttgtccgagcaaatatcttctaagattgtcgaagcccaacaacggcaaacaagtcaaagtttttactcacaacaacaacctttattcatgattgtctctgtcaaattgactcaaaaggtatacagtgttgtcccttgtatttcttctccgtcagcaacagatgtggaccaagaagaagaatcggagacttgtgcaatctgtttggagaatatgtcgagatctgagaattattgccagatgccttattgtaagcattgttatcatgaaggatgtgtcaccaagtgggtgattggtcataataactcttgccctctctgtcgcaaacctgttgacaaatagcagagtctaattagggttttattttgtggtctttagtgattttgttaacttagcttgtttcggaagtgtgtttagggttttcacttttatgtttcattgttttgtctagaggcaaattagggttttcagagtttatgtatctgtttttgttggtaacatgtaattgcagtttcatttacaagtttgattatagtatgagacattgcaacacaaaacgctgtcttaaaccaaatatagtttcagattaaacaaaaaatcaactttgaacttttgaagttggcttaccaaattgaaagaaacaaggaaacaatccaacaccagaattaagcatgacactaccaaagtttcagaagtgaactagacgtgatcctaatagttatggatattgaaacatcttttaaatcaccagacaatactaatgactctatctgcggattaaccaaactctagatgactattagatatatcaaagctccacgtgcttgaagtgatactcatccattgtcgagtatattagaccatctccttccagtgattgaacaacgcccctataaacacatcagtaaaaaaaacaaagcaaactcatgagctcaacaactctgaatgtaataaagagagatagatgttataaggagaaagaaagaaaaaaagcatactctagcttgttttttgggatcttcaactgctgagcaatttcatcgatatgtatcccctgttgtcttgcactgcagtgaacagataactattattagaccagttttttaagtggagcaatgggggcagcaatgagaaaattcaaactcacgtgcaagcaggttgctttagatagtctagaatcatatcatccaagttcttgcgcccattgccatcattgttttgagaagaaaccacctaaaaacgagcaacaataatgagattctatttctaagtacagaaacaaatgtcatgaagaaaaccaaaaaaaaaaaaacttggtgaattcaacatacagggttcaatagtgttgcctggtttgtgtttgatccaccttgaaatgtggtgttaaccgactgagtgacatcaccgacttgttgtccttattgagaaagcacaagtcagagagggagagtcgatcgattgcaaattgtgaaatacaacatcacaatttaatcatttgccatattacattttctgtacctgtgattcagagttctgggagtagaagtgtatacactcaatgtagtgaaaagtgacctcattgaaatccataataggcctgcaccacaaaacaactcaagtacgtttaacatatatctaacaaagcttatatagaacataccaaaacctatttccaatggtaaatgaatcaaaagcatttcaaaaccaaaaatacaaaacatacctcacagagaaaacaagaagctgtttttcaccctgaaaagtcttcaaatgaccattgagacgcacataagttccatctctgtttcacaatctcaccattagaaaacacctccaaaacaaatctgatatcaccacataaatcaaacaaaaaccaaagatactaaccgcacgaactccatctctctagcgacaagagtttcattcaccctacagttgttgctttttgttttgttttgcttacagttgttgctctgttggcatatactactcatcagatacagaacattctacaagaagcagagccagtctttcctataaattaataaaataacataaacagatgtgttaaagcgcaagtacctctgtggatagtatatcattagcactgtactccattcttggatttatagtagccaacttcatagataagaactggagaaagtaaagcatttcagcaataagagatgaacgcaactccatgttttaaaaaaactgttacaataaaatgagcaccactataaaatgagactgaacatagagtagcttgtagttgtagattagaacttagaagtagagcaactcggttcaccggttcaatccgcagaatctagctggtatttgtgggtcaatgaacattccattttagaatgtaccagatccggtcggcgtgtctggtttggttcggttttgacgcatttcgtttcacttatccggtcaatttgatcgtgattcaattttccgatcgttgatctctaaatctccttacgatctctcctctcacgagtctccaagtcgtccaactccaaggtatgcaattgctcacgatcaaggttttaggccttttgatctgtctgattgattcctaggactctaattgatttctctttctcacattttccaaaagtttcagactttcagtagattggcttatttctctaattgggtctctcaataatcattgccttattgttgcttcgagttgattacatagaaactctagcctccgggatcttgctgttacttgatttttgttttgttctcttcctatctagttaaaacagggttttgttttcttgtagacattttgttcctaaagttgctttcttgttgatgtttagtgtaaaaaagttggtaaccaaaattctatgatactaaagatgcttttttgtttatgtttggattattttttcagcccataaagattcatcgaaaagaaagataaaatcctaagtctggtgcaagtcttgagtagaataacatcatttctaggacatggtaagaactttgactgtaattctaattttgattcttctcatacttgacaaagactgtttttcattcaaacatgtccagtttagaaacaattcttttaaacaacgtctatcgcatactgatttactgcagatattgtttaaaatttgcttctgatgggtctttgatgttccaggcaaactcattacggctgtatctagcatgcataaaaaatacactcgaggcggcaatgtgcttacaggtacaaattatttttggttcaaggtatcatgacataggtctcaaagtctccatctttatggttaagtttgtttaaggcagttaaagcttcatgtttgcgttctatctcattcatccacctttggtctgttattctcatgtattagttgtttactttttgattagacatgatgtaccatcattcacttactttttgacatttttctcgcaatatttggtgtcagaacctaccgatttcgttaaagtaggtgaaaggggccatgtggagtctttgaaaacattcagatttacatggtttatattcctgaaagcttctatacttctctacttgcagaattttccttgtcaagaagttgaaaggcataataaaccagaggttgaattaaagtatgtaagcttctcacaagaagatgcatgtgagaatggggtgctcttcttccatttttatttcaagcatagaatcttattatcaccatgtgtttgctaaattttgtaggacgagcccagaacttttgctaaatcctgtaagaagtttacttgtttccctcccagtttagcgttgatattgcattgtcttcttacctaggttttgtagttgactgctaagtttttgcaacttgcaggttttaatatgccgaaatgaggcttgaaagtgtttaatagaaacatctattaattcactccggataagc

SEQ ID NO: 32577 - DNA, 3480 bp, Arabidopsis thaliana landsberg
acttacacacaactctatatatatatatatatatatatatatatatatatatatattctgcttttaaataaaaagtctttgaaaggtgtagtagtcgtggtagtttttttttttatagatgagatatcaaactttgaaaataaataacttttctgtaagcggtaggatgtcggaaaaagaaatcgatagattttgttaggggatcgtactttaccaaacctcgggaatagcgatgtgagagaaggatcttcttattcttacaaaccgcgacgggtgtggctggctcaaccctatccttcttgctccaatcaaattgatcacgcttctcagtccgagaagaaggacaggtatgctaaaaatcttttcccatgtgtcttctgatggtttcaacctccaaatatcttggatcatagtatctttctcccttttcgacatagacaaactattatccagagtgcacatgtcaatatggtgaggatctgaaccagcaatagccggattaatcttgggcagcaaccggaatgtttccgtgtgaatatcaaaagccactacttcgattctttcattatatggttctgtaaaccaataaaccgacccgtttgcagatgctggcttttggtaatagaatatccgatgacttggagtgcaagccaagtacctccaagcatttttcctaaagtcaaaaatctcgcactttgtgactcccacgtttggactcgacgcatcagcaatgtacttatcacaattgtacaaccacactaatttgtaatcggtggccttcacgaatgctagatgaaagattgatttcatcactacattccactcacgttcagtggggttaaacttgtggatcaaaatctgaaaccctgccggaggaagtagctttcagatatgtagatccagttgaagaacccttgagggaaattgagacgagtaaaagatagaagagaagccgattccaagcagaacaacctaaaaccaatgtcagtgtctggacgaatcccggttcctcttaagggatcttcttctcctacgagcatgaccttgggatgatccacgaaggctttcttaccgatcgtcaagtgtctctcttcaaaactgcgagattcgatcgtcgatctccattgtttcgagagagacgacttgagtcggattagtgctttcaccggaaatcttaaaaagatctcctctaggacgtcgtttggtaatgatgatggaaccattagtactcgcttctcgtttcttcttcttcttttccttagtgttcttcctctgtttctctttctttgtaatgatgatgatgcaatcacctctcgcttctctgcgtcctccatcgtatgtgttaaacaacaatctctttcgtcgtatatatgacctaaatttaaaccatccatgatagggatctcgtaattaatccccacgagtcacgcttggaaagaaaaatcaaaagaaaaaatggaactaaatcaatcatttaaatctctagatctctcagaatttggaatcaattttcaatatgtaaggttttctattctactaaatgtactaaatagaatacagaaatataacttcttttttagcaagtggcgattgtatacattatatgtaaagattactttcctattgttaaggtgtacatatttataacacgtttctatctatgagataaaaaaaatacatggggcggggttattaaagtatagaaaccatctaccgtataaaaaaactaaaaggaacaacattgtttgtagttacatctcttatgactaagtcaagaaaaatggcttgcgattaatcaatgacaaaaagtgtagatgttaaaaaaagatgaagagtatatatatatcaattataaatacaattaaattgaaagacaaatcgtgatctacaagaaaaaaaagctacatacaaataagtatacgagtgaagcgaaccctttttgatgacttttcaggcaagcaatcacaacatataaaagagccctagctttccccagattgatagctatatatacaagtacatatgcacaaacgctgagacattcgtacacttctcttcagaaagcaatgaaattcttgttgagctgatcatgaaacctaccggaccgccgtacactagcggctcttctcgcagtgaaaccaaccgtcgtgggccgaatcgatctctgcctaaccatttccacaaactcgggatcattagaatgaccctcgtaccgaatccactgaatcatttgatggtatcccgggaagaatctcatctgaactgacttgaagacgaagaaagggatcaaagcgaagaacatcacgaagagagtggtgagccagtaggatggagctggagctaaggcttcaatgaagactttgtaagcatctgtggagaagctaggagtgatggctccatagatcatgaggaagatgtaccagaatgctactgagccccatattacaatgtgttggagccaagtgaaatagcttatggctaaagccatttggaggttgacgacccagactacgcaagtgtacattgtcccgccgagaatttctctgccggcggttttgccattagggttatagagttggtgtttgagagattccttgcataggaagaaaatggctagtgcggtaaagactccgttgaacatccatccgatgattctcttccagctgaagagaagattctgaactccttcttggtatagcaacgggaactgcaagaacaaaaaacaaaaacagagtttaattagcgattatgaggagtttgaggtttttatagggtttatgggagataatgtttgggtaccttgtaacagtatcgagctgagacgtcttgatcgaaaacgccgagagcaatgacgggaagcgaagagaaggaaacgttgaaaagcgataaaaaccagtcgttatatgcaggttgagcagagaatgatgtgtaggcttcgtataagaacacggtgacaccaaaagtgatattcttgtagaagaagtaacatatctgcaatagcggaaacagaaccgcgttagagaaaagtttgatgaatgtatagagtttatatggagattgtttctgagagagaaaaaattgtaccattgatgagattctgctgtagcaccagtgaccatggacgagcaagagacgctctaagtaacggaattgagcaatggctatatcgctagacataaccgcttgcattccttcaacaccgctgattccaacaccaatatccgcttcttgaagcattccaacatcatttgctccatctccaatcgctaaacgttgtcttcccggttccagatttgaccaaccgcgtaacctgaaaacagaatcttctattaacaaaacagaatcttttattaactaaaccgaaaccgcaatagtagaactcataaaaagctacttgcataggaaaagacattaccaatgccttttgtttaggagatgatctgctgaaaatgacaaccgcacctactggggctccatcaa

SEQ ID NO: 32578 - DNA, 1206 bp, Arabidopsis thaliana landsberg
  unsure (1)..(1206): unsure at all n locations
ctaaaggagcccaagactgtttactgtttataccatatcaagtctgaagtataccacatgaaagtaacaattgaataaaaaaaaagatgtggtcatggcaaaatttgaagaagtagggctactacacaatgaattgaacttttccttgtttttatctaatcatgaatttgaaaacttaaggaggaaaaagtaaaaggggattaccagatcagagacaaactggaaactcctagtctgcttaccatcaccataaacagtcaaaggctcttttcttaatgcctgcacaacaatcatcattacttaataaaaggtataattccgttgatcatttattaagccacttaatctaacacaaagtcctccgcacctgggcaacgaagttgctaaccacacgaccgtcatcgatacacatccttgggccataagtgttgaatatcctagcaatcctaacctgttgaggaataataaatcagtcaaaatctgcatctgcattttctagcagcgaaatataatgaaaaagaaaacagacctcaacattagcgcctttgtgatagtccatggtcaaagtctcagccgtacgtttgtcttcgtcgtaacaactccgaacacctgttccaatttgccatatcactactctttcaatattctaccaaacacaaattgctcaatctattatttcagaaagaagaaaatttgattaaaatgtgggaaggggggtaaaagcgtcaaataaggaggataaaaatatctcctgcgggtgcgtctatgaaagagacacacgtctgagagccgtacgattaaaggacccacaatctacgcttcaaatggaaggaactttgaccagatcttaaaaaagaactctctctctctgtgtttcttctgctaacgtgcgcttaattgttgtttcaaaatgaggaagaagaagaagaaacagagagggagatcaaggggtagtaccgatgggattaacgttgccccagtaagtctcaacctgaggatgttgaagaggatctccatagacctcactcgtactcgtcagcaagaatcttgctcccactctcttcgctagtcccaacatgttcaatgttcccaccacattcgtcttgtatacacacacacagagttaaggacaagagcangcaagatccatactacatataacaacattgatgatgataaactgaaatttctatagaaggaaaagaa

SEQ ID NO: 32579 - DNA, 1104 bp, Arabidopsis thaliana landsberg
gaaattcacaaactgtagacaaaatttttggaaaataattagacgtgattggtgacagagcgtaaaggtaaatatagagttacataccctatcaaacaatcagcatcactaaccatacatgtaaaaagctaagagcaaatcattacctttcttcattctgattgctctttttctattgctcaaaaaaaaaaatcaccaagaaatgaaattaggaatctgacgagcttaggagtggacacaatcagagggtaagaggatcaacttccgagtttcgctccttcatcggactccaatcttctggctctgcaataaacaacagagagataagtaagacattaccattcaccacaaacaaacaatggcttctattatgctgctctctttgaatataaaaggccgcactttcttcagaggtttggattatatatgtatgcaagaccgtaagagaaaagaaaaggaacatacttggcttttcggagatgaccataagccgccgtggtatatggaggctacgaagaggaagattgagcgcataccaaacatgattgtgatcggaaatgcgtccacctgcagaaccataaaacaaattttccagattattagcttttttccagataaagaggatgaagatatgaattttcttacgttgtacaagacgatgcagacaaagatgttgagtggaacacggaagaaattcattatggtgcttcgtgcttcttcaggtatatactgcgacctcatcttcattatcgaaggccaaaatattccgacacaagactcaaaaacacagaaaccaagcagctgaatggagctatttaacgacaatccttcgtctttcacctttgacggtgtcaccaagacctgtgccacacgttaatatagggtcaatgtgcaaattgtacaaacttaagagtaacaatgaagtttcagactcttgagacatacacttgttgtaatgggaagaagaagtgaagcagccgagactagaaagacaatttgcatgtagtttcgactctgagagatgagcgagacatgagacgagctgcaagggagcttccaacattgaggcttacatgaaggttgcaaagacgaagccatgtggaa

SEQ ID NO: 32580 - DNA, 562 bp, Arabidopsis thaliana landsberg
agaaaccacgtcgtaacgaaatcgttggtagatcatctgtttttcaccagtaatagcaaaacaacaccatgaagatacacaaaaagaattagactcaataagagaataaaatccaatgcacggcttgtcacttttaatagtagcttatgaacttagatgtaatgattaacgttaaatgtttattctagtactaaaaaaagagtaaaaactctgccatgcgacatacacgagactccaaaagattcaccgtcttctggcgccggtgtagctatgtctccccggcgtcgaattttgtcttctctttgttgctccgctcctctcccgcagaatccaaactggtttcgcctcacgtataaagtctttcgtttgtcctcttcgtttccttccgatgtgtcttgttgtttgcagatctgggtggtttctcttctccttgaagatctgtaggtctcttgtttgacgtcctccacctctctatggaaaatccaacaactacttcgtgttaacggcaagaacacggcaacggaaaagccgtgttgatagcaaaatcagatctcgtctgggc

SEQ ID NO: 32581 - DNA, 1349 bp, Arabidopsis thaliana landsberg
ggcccaaacacatagcaagcattgcaacatcatccactttttggacttctgatgcgtccaaacaccaggggcgcagtgggaactgagcgagaggctatagaagtgttgctctccaaacggataacagaacatgtcaatagagttgtgacatctgttcaactaggcacctaaccttactctggccggagcattgctgaatacatttggattggaggatctggaattgaccttagaagcaagtcaagggtatgaaggatactctacattgtatagtaaccttttaatgtcaagaactatgatactaatactgtttatgaatggtttcagactatcgaaaagccggtggaggatccttctgagctacctaagtggaactatgatggttcgagtaccggtcaagcacctggtgaagatagtgaagtgattctatagtaagaattttttgtcacatttataatctcattctctcttttatttcacaatctcatacaccattgttttatttagcccgcaagctatcttcagagatcctttccgtggaggcaataacatcttggtacgtgtcattaattgagtttgatagtataagcaatttttttcataatgatatactaattattgagattttgttatttgaaggttatctgtgatacttggacaccagctggtgagccaattccaacaaacaaacgtgctaaagctgctgagatcttcagtaacaagaaggtctctggcgaggttccatggttcgtcaccacccttaaatttcattgtaaatcacatttacttacaatttggtgcttaagtttgaatacttgatcatggttataggttcggcattgaacaagagtacactttacttcagcaaaacgtcaaatggcctttaggttggcctgttggagcgttccctggtcctcaggtgataaatcaagtcaagccaaaacagtgttttcttgtggtgttggtaacaaaaaaagtgaccaattctgttttgttgtcagggtccttactactgtggagttggagctgacaagatttgggggcgtgacatttcagatgctcattacaaagcttgtttatatgctggaattaacattagtggtactaatggggaagttatgcctggacaggtctctttccaaatggagctctgataataaattccgttatttggtagtcaatcctctgatgttattaaaacatttgtgcagtgggagtttcaagttggcccgagcgtatgaatcgatgcaggtgatcatgtttaggtgtgctatgatccttcttgaggtaatcaaaagtctgtttgtagtgaggaatgcttgataatgtgagttagcttttgtaatggt

SEQ ID NO: 32582 - DNA, 3658 bp, Arabidopsis thaliana landsberg
atccattgtgatggtcactggaaaacccagctatgctgatatgatatgtatcattgagaagtttttacaagctaaggtttttaagcttctaccctttatttgattccttatgttggagataaatgaagctatttttcttctcgagggcgtgcttatttcttcccagtatgttgttccttcaaatattcattgagcatgtagaaaatatttactttcgaggcattctctcgttgctcggtcataggcaatgttcaggaaagctcattcaaactttttttttttttgtcattccacagtatgcggagaagttatttgttcggagatcaagagacagcgatttcccacaatcagttgcacaacaaatgtgggacgcagtgagtggcaatgataaaaaagctgtttaccggctcattgtcaatggtgatgcggatgtgaattatgtgtatgaccaaacttccagtttttcgttaacactttccagagtaatattagtaccagaaaggccaaagcgtgaggatgttctactcagattaagaaatgagttacttgatagaacaggtagttcttcaaatatatctcctgagggaagcggaggttcctctctgcttcactgtgcttgtgagaaggcagaccttgggatggtagagcttttgctgcagtatggtgcaaatgtaaacgcctcagattcaagtggtcaatcgccgctgcactgttgtcttctcagaggaaaagtgacaatagcaagattgcttctcactaggtgagttggtcttcttagatccgcttatccaaaatgtccctaacattttctctggctaaatcctttggaaatgttaaaagttttcacacaagttgtgtgtatgttgcaggggagcagacccggaagctatgaacagagaaggcaaaaccgctcttgatattgctgcagagtcaaattttactgatccagaagttcttgctctcctttcagacacaaatggatacaatcacagacagtgctgataaagatgcataggcttgcggacataaaaattccggagctatgtttcatcgttgctttcacggtctgaagagccaatcaacactaaagaaggacctctaatggtctctagcaagtttagcccccaattaagtattgtattgatgtttttgtgatggatggatataggctgcatattgggaaattatagtgtattgtgttgtgtcgtgttgtgtgtatgtgggactatagcatcctgagtttgtcatgtccagacgttgtaacttgtaagcaattacttatggttttgttcacttcgtattaacgtatttaatttgtggcttgattttggttttgaatctgtgtcaaaactaagataatttacgtgttaaaccaggcccaagtttgaaagttaattgtcaattttcagaccagagtacatattggtccacttattcccattacattcatagttttgagtcttttgataatagtgttaccatttcaattaggctaatcttttttcaacccaagatatttttataaaaaggaatgtggttcaaatcggaaaacaagacctaactttgaataaaagcactacagcataaagcttttacctttaacaaaaaaaatataataattttttacaaggaaaaagaagagaaagcaattattctcagacaaacaaaggaaccacttttgtaggtgtagtagtaatctcacacgctaagacaaaagtgcacaaattctcgagactctcttctatccaacggtccatatctcactaacctcatctaaataacggacaagatcttcttttggcttcagctctctttagtctttaccttccctcaagctcggtactcgatgtcttgctttcggccactcatgaaagcaacgagagcttcccctttcatccgcctacgtggctgtgggacccagtctaaccacgaccacctgacatcgtgggccccactgtaaggcgggaaccccatttttttttggctgtaagtaacggattctcggtcatgcttttttgtgaggatagagagagagactgagagagagagagagtgtgtcacggtctcgcagatactgtgtattgaaaagagagttctagagagagagtgtgttatgtgtgtgtgtgtgtgtgtgtttggttactgggattaattgagctgaaacagtttggatagttttgtttgttctgtttcatctttcaaccacagatatagtaatattgtgaaaacccctcattgaagtttgttctctgctctctctttttgggtttagcactgagttttggggtttatttcgagacatacccatacaaagtttgatacttttgtgtccccccttatcaagaaaattgtggtttttttttttttttaataagcttcctttaaattttcaatttttattttggaggaaaagagtgagaatttcagataagaatctatgagccaatgatattctaattcatcttctttgtgaagattttgagttgaattccattttcctttttgtcttggtggtttctcattggttttctcgagaatatttgtggttttgggagaagaggcttcactgtagcattgaaaaagtcttaaacttttctgtgtctttttatgtaagctttgaacagcttcacctttctgggttttctcagattgtgtctaatcttgaaaaaccttttattcgtagaagcagcaatgaagcaaagaagaagaagaaatggatgtagtagtagcaacactatctctctactcttattattcttcttagtcttcttttcaagaacaagcacaagtacaagttgtcgtagaagaactgttaaacacttatccacaacttcaaaatcatctacaccacttgaatcaagaatcacttccaaggttattgtgattagtatcgtctcagggattttaacagggttggtttcagctttggtgttagctttcttggttcgtagcattgtcaaattcatgaaacagacgccaattctcaaaggtccagtggtgttttctcctaagattactcctaaatctctccacgcagctctcagtaatggtattcagttgcttggctctgaccttaatggtaaatactataagatggttcttgataatggtctagtggttgcagtcaagagactaggctcacttgaaggatttggttcaccagaaagtagtagtagcaagtcggttaagagaaggttgcagaaggaacttgagcttcttgctgggttaaggcataggaaccttatgagtttacgagcttatgttcgcgaatctgatgagttctctctggtctatgattacatgcctaatggtagccttgaggatgtgatgaataaagttagaacgaaagaggtagagcttggatgggagattaggcttagagttgcagttggaattgtgaaagggcttcagtatcttcatttcagttgtgagacccagattcttcattataacctgaaacctacaaatgtgatgttggattctgagtttgagcctcggcttgctgattgtggattggccaagatcatgcctagttcacacacagcggtatcttgctactctgcccctgagtcctctcaaaagtacaggtgcttcaaatatcaacaccatagcctttgagtaactccttttcatctctttactaacacggatgcaaatc

SEQ ID NO: 32583 - DNA, 2345 bp, Arabidopsis thaliana landsberg
aaacttatagctaactttctccaataatgggttcgtcagtggtactggaacatctcacgtcattgtaggaaatgcattcgataaatgttgttgtaaatttactcagtcaattgcttaaatctagaagtaatttgataagaatgacatttggtagcgaaatgaggttacaaagccgtttaaattagttgatgtgctcctatagtattcaaactgataaagaacatgaatcaaagagatatgtgaaattttttctgtatttctcatcgtaacaggatgtacaaatatgagtttatatactctacactaaaccgaataaaccaattacaatctaagttaaccggctaaaccggactgtctatatatacaatctaatacaaactaacactgatgacctaagtaaaaaactgaagatctcaaggttgaaactgacactacagacttaagtaatattcgagatcgtaaagttgtggcggtagttcccttcattaaacagagtctttatgttccaatttttttaatcaacatgtctgcttctatttcagcttctgcaatcttagcgcaacatggttgttaatcctttagagattgttcttccgaataaacaaataggtcaatcttagataaagaggttgttcgttcgaaaaaattcttttatgtctagtttttctaaagttttttttctttcattttcttcatcagcttcaaagcaaaagaatgatattttcctcattaacttgtgacgcactaaatagaatagttttgtttattagtcaacatgttgcttgattttatttttaaaaaatatatttattggaaaataagaaaataaactaatttgagtggtgtttgggctttaatcaggttcaatccagcctttgctattcctcctgttcctagtctgctcgtctaaacctttgtatcacattattgagtttgtttccttgctaagaagaagtttcgttttgtttgtttagatcgatggacctctaagtttacaaggccttcttctccatgatgttgtttgttgtggttgttatctatctcggttcttcgttattcttggtcttaagagtggtgatttcgagaggttaggcctttcctcttgtcgttgccttcctgatctgttttgataggatcatcttttgaaggtttctagtacgcaattggacgcagcagtcgtcggtcgtcgtattcggaagtgtgctcgaggttcgcttaactcatttgtcttgcttaccgagttatgaagtgttggttcttggtttggagagattagctctcattttgataggaggaggtagatgttatcttcgggttggccgcgagcatccttggtaaatctctatcgcttgagcttttgaagattgggttacttgtctttttgggtcttttgttttttttaaagatataggcttggtgcttctttcttagtttttggtttcgacctcttgcgtttgtggtttgaagtattatgttttgttctattactatgtttagtttcacttttttagagccaatttccgaggaaattttgttttttgtcggctttgactctggagacttttatgtcgtccgctggctttaatttcccttctttgggttttgtatttcactttggtatcatttcaagatcaataaactaatagtttgagtaaaaaaaaaaatggtataaagagcccaggcaggctcatgtcatgtgaatcttgccacatcactaacataatcaatatcggaaaacttcaatgggtgttatcggcatttccctaaaaagaacaacgagacaatcgacggttacggcggcgtaaaccttatcggacgaatgaagatctgtcgctctccttcctccgtcgtactctctctattcatccaagtccttactctagccgtcgctctcgatccttcgcagccagacgaatccaacatcaccgcaacaccgattctacaggtaaatcaaatcaaatcaatcttcttctctggtgtttgatcgtctgaccaattggcattcgctactttaggatgtgctgaaggagatatcggtgaagcagaagtggaatctagaggaagttagattttcgaaattggaagttaagaagattcgtattggtacgagtcggagatttgagatccggatccgattagggaagagcagattcgtattcatcttcccagatgaaataacagattggagaagaagcggcgggggtagtgatgttgagttgcaggaactagttcgggaagttaattcgagtaaggttcttgatccgccgcttgtattgaaaggtccatttgagctacttgtcgatggcaatgatcgtctctcgctttcgttaccggtaaaaatgttc

SEQ ID NO: 32584 - DNA, 5477 bp, Arabidopsis thaliana landsberg
gttgcagtttgacatcgagagagggttcacatgggtcaacagaagatggaaaaatctctagaaatgatagagtggggaaggatatgagactgaaagagttgaagaaacttaaaaagaggtgtaattagcaagaagaaactatagagaggctagcccactctgttcaggaacttaggagtaagctgaatcagatgcagaaggaagctcaacctaaaggcgggattaacactatcccgagaaaaaaattcacttcaatatggtctgaagagacagattaccctctagaagagaaggaagcctattttgagaaaggggaattgagtattctgctgtagacctctcaagggaggacgctgagtatgatgatgatattagagaggattgtgcagaccctctctatcattcattttcttcttgataagtgtgaggagtcaagctagagactttaaacaagctcacttgggaggagtcccatgattatcattgtaaataatttttactttcttgttatttttgatttgttttagttgtgtttgtggttctcagaaaaaaaaaaaatgggaataacgtgaaggtaaagtagaaaatcaaaacttttactctactgatggcctagagatcgagtacattggtcgagtgtgagtgatgcttaaaacctaaaaacttttaaatcatcatttcactcgaccaacagaagctacagagtcttacagggagtttataaagtttacaaaagattgttggatttcctgagactttcctagtgaagaaagaataataactcataacaaggagacaaacgaggaacccactgctgcaccctatgtctcccatgctcctaaccaacagacaagaaatccaacaccttcttctcacaaccactcgactccctcaccctatcctatctcaacccatcactcgacctcgacgccatcaccatccctcacctatcacttactcgacctcgttatcttctccacacctattaaactctaccacatccctcctcattcatcatcaccaacaaatcaactctcatactctcaaccactcgacctcctcaccatcttcttcatatactcgacctcaacatctttttccacacaccaaacttttcgcaactctctcatttcccatcgtcactcattgcaattcaagtcctcaagtgttcgattccatcactcgatcgccgctgctttcgtctctttgccaccacatcctctcattcgtctctgtttcactcgaccgtcacattcgcttcactcgacttcaccacaagaacacctctgcctttcaagctcacagtcactcgaccacgagttcaccaaaccgaaaaaaagaagaaaaaatttggtacactcgatcggtttactctgttggattgtgtttttggttttgttggaactaacgtattaacgttaattttttagttacatttgttttcaggtttcatcatgagtaactacagtggagaatcctctttggaccctgattataatgtggatgaagctaagtcctggtccgctagaccgagagagcaacatgtttaccagagcttcagggatgaatttgaacgctctacaactcgacgtaatcagagaagtgctgaaatcgccagaggaaagagggcgatgtcgagtagatatgagctgattgatgaggacatcggaactgagtatgagccagagtcttggcgtaaggagacgaagctgcggaacaaacctgacgaggttacagtggaggagtatatcagattctttaagatgaatgacttctggggaacgaggtatccgtactatgagactttagcccagctggggttactagaggacgtgcagcatctgttcgagaagtgtcatctggagacactcatgtcttacccttacgttgcttataaggaggagacaatcgagtttctttccacacttcaagtggagatgtatgagggactcacagactttgagctggataccatggggttaggcttcttgacgttctcagtggatgaacagcggtatcagcttgtgatcaagaagttggaagaactgtttggtttccctagtggaaagggaaccaaacccagatttgacagagaggagcttaaggatttgtaggccactatagggaacaatctaccgctaaacttggcgcggtctaaaagcaaccaaatccgaagtcctgtgatccgctactttcagcgctcggttgccaacgtcttttactccagggagtctacaggcaccgtgtctaacacggacatggagatgatagattccgcgcttacagggattctccgccgtacgaagggaaagaatgtcttgagaggcgatctcaacaacgcaccaccagaaatgtctgttgatccacttgtgtggatataggaagtgggcgttgatgaacggcaaaaagaaggtgagaggagcattatgcgtgggaggcgttgtgatgccaattctggaagcttgtggagtccgctcaaggaaccaggtttagcaccgaggatgatggacttggatcatttgcgccgatgtgagttcttggagtttgacatggctggcgactttcaccgctacaggttcgagcattcatcgattagaatcgccaacattctcctcccctgcattgacgctactaggattctcgagggcaggaacattgacttcaagcctgcgcttgaagatctttatttcgagggcagtccgccaactgaggtgatcagtcacaccgaaggagctacaacagaagatgttgatgagacagatgatatagatgaggcggagtttgacacaagcatgtatcatttcagtgagcacatacctccagcgagggaaagcaagagtttgagcgaagcacacaggaacaacagcaagctgcagaagtggtgcgagaaacaggacaagttactcgccaagtgcctcaggacaagtttcttcattttttgtttctgtgattggatttgtcctgagtactctcttcaaagtttattcacacagtggactgtgtgatttaagtttgggggagggctcaggaagtgtgtgttacattgtgtattttttgagtctgcattcatctaaggcatagaaaaaccaaaaaacattgaaaaatttcagaaaatgatttcacaaaaaaagagtgttcatgtagttgcattatatttaggatcgagtctagagtgtttcatttaggattgttgcatatgcataggggatgatgatgagatagccttgtaagcattttgattcatcggataaactcagtgccctcgttgctagttgtttgttgcgtagtcaatgaatttgaaataaaactgtaccatgcctagattgctctactcgagcacactgtcatgatctgataccattccctatcaatttgaacctgaatctgatctttaattatcatgtctgcatcaaatttaaactcatggataccctaaaatacttggattttcttattcattttgatcactcttattaatccaagtagctgactctccttattagagcagttaacccaaacccaaacctaaactttctttcaagccctatatcacttgtgagtgtttgtgaggtcttattccgattaagcttggtagaaagtgttaggttcgtaacgacagagatagtgtctcatgtagttctagttcgcattttttggattggataggactaggtgggcgcttatactttgggttgagatgtgtttaaaagaaaaaaaaagggttgattcattgatgagaaaaggtaaaagaatctaggtgaagtaagctaaagaaggagaaaaagtctagtaaaggttttgggatttgtaaagaaaagaaagagttcttgttaactattgaagatgggcaaaaacccttggttttaaaatgttaaaaacaggaaccttagttgttaaagaaatccaaaattcgctagatatatcaaagtgttgaagcttcgcctagagttaagagaaaagaaaagaatgattagaaaaagggcttaaaagattcatgaatgcaaagggtagagtttagttcttatattgggattggagatgggattaccattagagcttcatttgatgtactctgggtagatgggatcttatctctgtatgcatagcttgggacttacctttagcattctactaaagcttaatcattttttaagagatcccctgttactgaagcctattctgtaagggaccatctttgtctcttgaccttttaccttagccaaatgagttctttgatgatgcattgcttgattcgttccagaactaatgaatgttaaagggattggtggatttgaaaacttatgtaggtcgagcatatgagtcggattgattgattgatgaggcatggctactgtttttaagtagaattcgatcttgcagcttagaactttcaacttggacattgatttcatctagtctatctggtgctttggctctgagtccccgctttcaaacctcacttccagcttgttcttgattgtttgcagtagggcaagcaaagtctaagttcgggggagttgataagtgtgtattttgcatgttttgagcatccatttgtcatcattttagcatcatatcatcactgttttataccatttcacatcatttgtcatcactttgcatgtttaggatagttttgcatgcatgttacatatttgtgttgttttcaggtgatttggagctgtcgacgagctaactggaagaagcggacctgatcatgacaaaccactcgacccagaggtcgagtaggagcttcaagatctgaagagaccactcgacccccaggtcgagtagaagacaccaccactcgatcacatcactcgacccccaggtcgagtgacttcatctccatcttctgaccaccactcgatcacatcactcgaccccctggtcgagtgacttcatctccatcttctgaccaccactcgatcacatcactcgaccacgaggtcgagtgtcttcacctccattaccagaccactactcgaccacatcactcaaccttgaagtcgagtattaccatcaccaccactcgactacatactcgattgcaagcttcagagtcttcttcattctgcactcaactagacactcgagcacaaggaagaaaagaagactccagctattcactcgacctcgcactcgacctcccactcgaccacatgggtcgagtacagttcttaatccgtcctcatacttcgtcgttttgagtattagggtttcgaaatatttggctataagtagcatgtacttcacatttgcgcagacaagaagtttttatctagttttattccgcagaccttgtgttctagaccttttgtaatccggatttctctttatctattcagtatttagtattcagcttttgttcttgattttcgtttcctgttgttcattcttatatcatcctgctgataacactactgttatcatgtcttcaacctgttcaacatttatgctttttgttatgatgtctg

SEQ ID NO: 32585 - DNA, 6548 bp, Arabidopsis thaliana landsberg
cagatttgtaattaagcaatcctgcaagaaacccctaaagaaaactcacaagcacacatcaaggcatagagataataagcagcggaaataaacaatagagggtctcatcatagattgcataaacaagtttttaaggttcaaaatacatcatccagtacttagaaacaaaaacctactaaaaccaaaaggacatgattaacaaacacagcttaaaaactcccccttaatcctaaactcccccacaactagatctagccttcttcgttatcaacatctagagagtttacaaaggaattagagttctcagggactagttcataatctccccctgcttgcatgacataattgatcaaaaactctatctagacactctaccaattaaaccagacactgagtacaggacaaggacaccataccttccatacgtgttgctattgtcgtcaacaaggtagagacatgccttaagtctccaggtaaggacgtgccaaacacatactctcctcgacgctttggatgttcaatcccaccacgaacgtctggattaaacagctttgggcgaggaccaggcttctcatagttttccagtgttatcactcgctgaaacatcaacactctgtagatgagatttggaaatggcaggatgttctgaatttgtccaggagagcgagcagccttttctacttgatcatagactagctttccaaaattaaaaggaatccgctcattcagaggatacagcatcttagcacgatcaacagtgacattcgagttattcttcgaaggaatccagttgatgcaacaaatcaaatacagaccagcgagatgagtaggcatgaccggagtgcgaagatccttccaagtgacgactttcccatcagataggtacttagcgagagcatgtttggacatagtcactctctcgaattcagcctttgcatgccacttaatagccggagatctgaacgtcttgttaatcatctgaggagagaactcatacagtttgcctctaacaaagactttggacttcttagtttcctcattgaaaatatggaaattagcataaaactcccaaatcacttctttcacaaacggatcgatctcagctacagtgtctagcaagtgattatcctctatcactttcatcatgtcacgcatctctggaggaccacgcggcacatacctttgctcatagggatcacgaagcttgaaatccttgtacctctcaaccccttggcttgtgagaaattgaatcgtcagtggctcataaggaggtgtccaaatggatggatctgccgcatctctctcagcctgatgatgtcgatggatgctacatcgatccgacgggtcataaggcagacgccctcgagatgaaaatactctgaagtagctcagatttggcttcttacccttccaaatttcgtatggtgtcttgtcagatcccaaccttacgtagactcgatttatcacgtaacatgctgtactaatagcctcagcccaaaatttctcaggaactccatttccatgaatcatggctctggccatttcttgaagtgtccggttctttctctcaacaacttcgtttgactgtggagttctaggtgctgagtattgatgaaagattgcttgagactcacaaaaactgttgaatgtttcgttcataaactctcctcctcgatcacttctgatttgcttaattcccatcttcttctcatttttcagttgaagagccagaattttgaagctgttggcagtttctgatttttccctgataaaacgaacccaagcatatcgtgagaaatcatcaaccaaaacaaaaacataccttttgccagcaatgctttctgtctgcattggtcccataaggtccatgtgaatcaggtcaagaacttgagttgtctgaattccttcaaccctcttgtgttgaactctaatctgttttccttggttacaggcaccacacacaattttctcaatgtgcttcaactcatgcactcctctaaccatttccttgttcactagctttgacatgctccttgcattcatgtgacccagacgttgatgccacagcaccggatcctctttctcagctctaagacagattttaggttcttcccacatataacagttgttcccagttctaactcctgtgagagtattttggtttctctcattggtagcccaacattttactttgttgaaacttacagtcagaccttcatcacaaagttgacttacactaatcagattagctgtaagtccttccacaaaatagacattagtgagatgtggtttttctgtttcagtcagatcacctttccctttgattctgccttttgctcccccaccaaacgtaacgttactttctttgatagatgagtaattatttagattagcttgacttcctgtcatatgtctagaagctccactgtcaaagtaccacggttttttcaccccttctgcaatagaagtgtatgcaacatggcaatagagatcctctcttctcacatacatcttggaatttcttccctgatgtggatatagcttcccttgtctcttcagcttgctcaacctaactgcatatctgtagcagggggctgtgaatatgaccatgtcttccacagtagtagcattcgtaacctgtcacagttcttcgggaatgatagtgatcgtgattctggtacacgcgtcttgctggaacagcatcatagttgcttcgaaaacctgtttgactttttgttggagcagcagcttcgcttcgtacaaaatttgtctttgtacctgatccagcaccattgtatcctaaaccaaaatttgattttcccactcttccagcagcaagtatactatccaaatcttttgttccactgttcagcatgtggatattcttgcgagtgtcactaagctcttgagaaagttctctgtttttctcttcagccacactgcatttctgaatcagctcagagttcttctgatttgcagcagttaactctcctttcagcttttctgttagttcttgaacttttagcttctcttccagccaggcaactttctctttactcagcatcaaccagctgtcatacagtttcctgaactcttcattgatgttaacgtccttttcgatgtcagaatcctcatcagctgagttgtcctcatcctcaccatctgcttcactgtctgaactttcatctttttcttcaatgattcctacaaaagacacgaaaccttttatataatcttccaagtctccatcatttgagtcactttcactttcagaactgcaggatctatcaggcttagactttgatccaacacagtcgaacttagtgtgtccaagacccttacactcagagcacttgagatcttttctctttaaggagggacattcagctttaatatgtccgtatccttgacattaatgacattgaatctcatccctttttgagcttcggtctcgatatctatcagttccctgatttcttctgaatcctttcttctcaactctcctcattgctctactgaagtcttttgccatcatgctcattgtatccttcaattcctttatctcattctttttgccgatgcagctaaagcaagtcctttggagtaacctccctttccggaagtgatttctaattcatatgcttggagcattcccactacttcttcaaaatcgattgagtcagtgtccaacgacgttcccatggccgttctcttactttcaaaccttgatgggagacacctcaacagtttcttgaccagtttcttatctttgtatttctttcctagattgtgtgcttcactcgctatcgcactgattttcccactgaactcctcaatgttctctgtttcttccatagtgagattttcaaactgagatgctaacatgtcgattctggatcttttgacactacttgtcccttcatatgctttagcaagtttatcccatgcttctttagctgattcacagttttgaatttgcttgaattgattttgattcacggagttgaatatcaaagacagtgcccttgaattagctatggcctttgcctcttcagcatcattccattgatcttcagtttttagcacatcttctccatcttctcccttgatgaccggagccttccatccaatgctcgtagcaatacaggcttcctttcctagaccacgtatgagagctctcatcttcactttccagtgtccgtaatttcctttttccaacatgattgctttaccgaccgcaacgaactcttcggggtagtccatcctctccgcaggatctgcacctgttgttaagtacaacttggttcagatgcccgctctgataccaaatgaaattcaacatgaaccaagaatcgtattccccaaactcagaaccactgagtatcactttattagaaatctgattaagaagtttacaactaccttaattagttttacacaagatctaaactactttagcttgtcacttgagatttccctaaacacacaagagcagatcacaagaacacactctttcatctctctagaattccaatcagactaaatcttagtctctaacaatgaaaagcgttgcaccagctttttcactcacaatcacggccaagtctaacaagaactttagcacctctatttataccatcgaggtcttcggtcttctaggttagccttcaagatcttggatcactccaaatcttcgcgtgaatatcttctttccaaactgaactcctcctgttgtggtctccacgtcattcgttcatttggcggcatatccacgtcagcatcaattacttgatcttcactttagtcctctgaaacagcttccagcttgttccagcaatcagcactccttctgattgtcctgacagagggtgcactaacatttttatctcccaaaattgtctacttctttgtttccaaaactcttattctgctttgtaggctattattgatggtagaaatcagattttggtcagcgtctgggcttgccattgcctcctctagcttttgcctattctcttcagtggctttttgactattttgatgcttagtcctagttcaggtaatgatttcttgtataaatctactgacattttcctcaacatcctccatagcgtcaaagttccaagctgcttaaattaaaatagagacttcctcattgtctttcaatcttttatcgtacttaaaaactccttttttcttttcctcgaatacattaaagtgagtaagaagtggttgacggtctgagctttcaaaccttaaatactcccaacgactggatgggtaagccttagcccatgttccatttgacatagccctatatagtgtgcaatgaacaatgagctcatgtctctttcctctccaagagaagaagttgctcaagtgtctgagatcgtataagtcacattctgacatgaataacctaatgttcacaaaaataccttcatgtatgattggtcctccttgtttttctgatgcatcagtgatgtcattaaaatctcttgttaagtgccaaggttcttctctattcccatgaataattaagatctcattttttcaacaagtattactaaaactattatttttattcttcaaactcaaaaaatagagctatatagtgacaaaaaaactgttgcatgtaaatttatcgtcataaaaatgacttttaacataacacgtgaattacacattgtttaatgatacgttactaaaaaagataacgttatttttttgaccaccgacttttaagtaataaatacatgaattgttacaagcaaaaaaatgttgagagcttattcaatttcatcatactagtgtgacatcattgctacatatattgaatatattgcacgtttttagttacacatataaacactcgtatgcataactacgtcaggtatcccgacaacaaaattcacctaatttgttttagttagcaaacctgatctaaaaactcaacattatgggtctttcaacttgagttaaattcacaaactctcccataccaagctgtgaggagatccaaaaaacaatatccaatgtctacatttatttttatttctattttaaaaaaatataatcgatttagcttcaataactctaaaatagagaaaaaaaagatattactatatatagattactcttaaattttcaatcaaaatctaaaaacaatatttctcaacataacacatcttactactttaaaaacctcacaaaatagttattatattattcttagtcaaattcataacctatattccctattttccggtcagtcatatgcttttgctaataaacttatatatagatagatctgataaattcttttcgagaccaattattttcttcccttaatttattagttgttaccctttaaatgatcttaattctaaaaaacagaccaacaactttattagctacccttaaatgatctttagttttcaacaaactcatcaacaattttataaattcttaaacccaacatcatccacccaaacacaattattaaaaaaacaatctatatgtttataaacatataataaaataaaata

SEQ ID NO: 32586 - DNA, 1009 bp, Arabidopsis thaliana landsberg
  unsure (1)..(1009): unsure at all n locations
gagccgaaactcatatgaaaattgtagaaaatcgaatctattaaaattttgataagaaaattgattttatttagtattctgcataagtacatttaaatctgcaggttaataaaattcgactagtttaggagacacattgatcttgtcaataaaaagggtgcattattccgtcgatgtattattcatgtttactctaaacacaaaacattttttctattcaatttttatgctggaaattcaataatcttttaggaagtttttaagaaaagagagaaagaaaaaaaccattaattagataatttaaattcttaaattttagaaaaaaaaaaaaacattacttatttagttagatcaaatttacatgtcaagtcgctacaaaaactttgtttattatcaatgtcactttggtgatattatttttccttatcttttttgtcacaccttatgtaaaggttcaacaaagtgaaattgttggagatgaatttatagctgccactaaaaaagtgacacgtggacaagagacaaaatgaatataccaactcctcctgaaaatagaacctataacaataaagtatcagaagcacaccatgaaaatggaacaaaaaatgagacagattnnnnnnnnnnnnnnnnnnnnnnnnnnnncgaaccacaaaacaagaataaggtcgattaagagagagaaagcacccatataatatcgaacatatgttatcctcatactcttccacttgtatatttgattccaaatgctataagattaatatgttattggttatttatgcttcattgtaggaatagttatggattagcaaacatatttctgcatgttggtaaaattcgaataaattatgaggaatgtttaaaataaatcgattaatgatgagtttttttcactaaaatcccaaaagcatcttatgaattnntatttatcttgctaagaaacaagatccgacactgacactatattcttatttcattgaatgggaattcaatcatcttagcatct

SEQ ID NO: 32587 - DNA, 726 bp, Arabidopsis thaliana landsberg
ggatatagtgatgggtctttaccggtttatcatgtattccaagctgagcccatgttatgacctccaaaagctcttcaagtgttccatatccacctgcaatttttttaaagcagaagacattataatccattaacattattattattaagagaaatggtcaatttacagaactatgcttcatatgcagaaactgtcctctgactctatatacatatggacatgattacaaaaaagcaggtcctattgaagaacaagacttccttagatgggcaaaacacgcatttttctgagactgtttcaggtttttgtcttttaacatgaaacaggtaagaaaagtaaaaccttggtcacagttacactacacacaagctaaatagagaagtagctcccaagtaaaaggcaaagagaaaaagaaacagagactgggctaattttcagtgcgagatgtcgatgggtcaaggaatatatggttattatattcaacacttgggccatatctatgccgctgaaatcattgcacagcataccaatatacttttaaagaatgtaactcgaaacagtctgctttaacactgcagcttgagttagaccaagaaacaaagaaaacatgtttttacaaccatgtgcttcttccatcttgctttggataatcagtctaagagttaaacgcttgtcgaggctgtatgttaatgagcatattgcttctttattacttagattttccac

SEQ ID NO: 32588 - DNA, 3262 bp, Arabidopsis thaliana landsberg
gaagccaaaaaaaggatgatgtcagaagttaaggaatattctgacaaggataggatgcccttaagggaatctagagtcttgaatgggcttttagaattccaagaagctagggaatctcgagtctttaatgggcttttaaagtttcaagaatcaaaggcccaaattgcatatttgtagcccgtcggaaacgcaatgaaaatgatgaatctgaagactgactcaaacaacatctctgtagggttcttcttccttgcttcttcgagtctcgatctcctctctcaatctcaggtaacgccaaaatcctcttttttattcatgggatcttttataccaaattcgatttcttcattttgagatctgtgaatatcatcgtcccacgaaccaatcgaatctgttgttgtctgacattaattttcatttctatctcttgcagtcttcagcttccaattgactttcaacatgtaagcttattccttaaactcgataccttcttaccaatctccaatctccaatcatgttgtgtagatggatctctaacatatgtagaccctttagtattcgtgtctgaatctctagactggaatcatttttttttttattgtggctctatagttgtgtaggggtcggtctatgattagatccgattctattcatttttctggcttatgttttcgcatcatataatcagagctttatcttgtaaggaagagtgataaaactagataattatgttctttctagttttgctcgtaaagacgattcttgtatgtcatcattcacacgggagtagtttatatatctagccattgatgttgcatcctcgatgcctgtggtttttctgaatatttcagggcagatgatgaagttgttgatccaaagaagtaccttgaggaatcttgcaaaccaaaatgtgtgaagccacttctcgaatatcaggtgaaactggttgatgttgtgactaattatgaattgtgttataagttttgacacagtgccatgttttgtgaagatcattgtttgactgatacaaggcttgtttgtggttctcaggcatgtgtcaagagaatccaaagtgatgattctggccacaagcattgcactggccagtattttgactactggcaatgcattgacaaatgtgtaagttacttgaattatgttattttgctgtttcatcatatgatatcttctaaagtttgatactgagatgaaattggattttggatcttcaggttgcaccaaagctgtttgcgaaactaaaatgaaaagaggtgaagctggagactctattgtcttgagtttgctacatgtggtttaaaattgatgtataaaatgcagtggatgttgaacttttttttactgcaaaccagattgccaaatggctctgcttcttggttttgtttccatcgcaagtttgcgcttactacatttttttgctacttgagtaattgcatggcctaataacaagatatgttgtgcctttctttggtccaattgtcgtaggcaatgcgtcaaacaaatcattaggcttgaagtttcaataaagagagattttcaagctctgctattaggtggcctggtactatggccattgattaggatttcttagagcttgccaaagtttatgatcggactaactctgaagcttattggtcttaaaaagataactatctaatgatggcggctacaagaagatattttcttttaaaaaattttgaaggtgaaagaaggttgaatagtcttatggtgaaatcacatgtgactggaatgaagtgaagaactgtttagtggagtgtgtgatgcatgcagcagccacttttgaaggacagcttggactttggagtgagagtgagatgtatggcccgcggcggctgcattagactgaatcttatccttgacactctacagcaattatgtagattctcccgtttgaccctctatttaagggttagcaagtgtaataccagtccatacaataccagtacatagccatgaacggtggagacggtgcttctagctatgctcgcaactcttcctatcaggttttaattatatacatcactcttccactaccttttttcctgagctagcttactaatatgttacttgggtgtacgcctgtagaggggagccattgaggctgcggaacactcctcaggaacgagatcaacgcacggctcgacatcactaaccattccttttcatcttttacaatcgcagactttggttgctcctccggccccaacaccgtaattgctgtcgacatcatcatccaagccctctaccacaagttcacctcttctctgcctaatactacaactcctcagtttcaagtcttcttcaacgacgtctcccacactgatttcaatgcactctttgctttgctccctccacaacgcccctacttcgttgcaggttcctatttccctttgcatctccttcagttagtggttcctacttcgttgcaactctaatggttcattgcttgcaggtgtccccggttccttttatggaaacttgtttccaaaggcacatctcaacttggcctactcctcttgcgccctctgctggctctccgacttgccatccgagctaactgatacaagctctcctgcttacaacagaggcaggattcactacacgggagcatcagcagaggttgcacaagcttactcctctcagtacaagaaggatatcaagttgtttttgcatgctaggtcacaggagctcgcagaaaacgggttgatggcactgattgtgcccggtgtaccagatggttttctcgattgtcaggaggcttcaacgggatccgagttcgatctgttgggttcatgcctcatggacatggccaaagaggtacttgctttgttttccgtaagaaataagaatccatgacatattaaaaatttctaaaagacttgactgtgcagggaataatagaggaggaggaggtgaacagtttcaaccttcccatatattacacaactccaaaggaactggaagacatcatcagaagcaacggagagttgaaaattgataaaatggagacactggggagcatggacgcacaagacactatgcctgacctcgagtcaagggttctgtacctgagagctgtgctggaaggtctagttcgtacccactttggccaccaaatcctcgacgacctgtttgatcgctacgccctcaaacccgctcattcctctttcatccttcagcatcaaaaacacaaatccatcatgatctttgcccttctcagtcg

SEQ ID NO: 32589 - DNA, 2553 bp, Arabidopsis thaliana landsberg
gaaatgatttactaagagaattgatccgatcatgttttctcactatttttccaatgttatataaaaaactgaaggttccgaagttatttgaggaacaaaacttcatctaacgttccaaattatcttcattttggataaaatttccaaactaacactataagatatatacattgcttgatacttactttcattgatctagtattctttgaagttgttagttgttactttatacttgaacactgaaacccactcccttttttcttaaaaagcatacttttattaactagatagataagattacataaagatccaaatggacgcaaggaaacaacatcagaaagtagcaggaatgagaattaaaaccccaaatttattaaacacaagtcgaagaggggaattaattagaaaagaagtccaaggtgcttgcttagtggcttttgttcatgccggtcttgtccttgacgacatcagcagctccttgcgccttctccttcatttgttgtccagtctacaattcacaatttgatttaaaagttcaatattatggttttactacaagggagcaaaatgaaatgaaagaatcaaaactgaacctgttgcaaggagtcttgagctgaagcagcagcatccttggccttgtccatcattccaccggccttctcctatattcacataagtttaacattatacattattagatcaaccttgtctaaaaagaacaccctatcgtaatccgtaagtatttgcgggaaaactatatgaatttagaaatgtagagatcttttacatatatttcaacaaattgatacgaaatgtgtaacaaaagaaagagagagagagagagaccttagtctggccagtggcttgaccggcttggtagctcgcgttttgcttgttgtccattttctctcgttctggttttgcttacactttgaattttatgtttttgattgattgttttgtgtttgatgatggaaaatgattggagcattgggttgctatttataacccagagacgtgcttgggagtctccacgtgtcgaggacacgtgcatcggttcgagaaacttgctgcagtcggtggctagttttgggatccacgtgttggataaccgtttgaccaggacataaaagacacatacgtggttctctcgatttctgatccgcaaacgacacggtattatttcccttagactcctctgttgcacgataataggattctgagtgatagaaaatgtttccttcttcttgtactgtcgttttaagcaattttttcttaatttaactaaacgcaattatggcagaataaggttctaagtgaaaacaagaaattgtggttttgaagttttttttgcctactattattcataggagtcatcatccttttgttgaattatactaccactttctttttagttcttaaaattttaaatagtcagctctaaaactaatttactcatgcaagttgttctcttcttttgatcaaaagtccacttctccctttttttttggtttaatactcaaattctccctttttgttttattttcgtctttttttttttttttaatatagtactatttacgtaaccataatttgtcatcggaaataaaaagattaagacaactgaattttgtaatgttttgaagataatattgcacattttgctacattagtgtcaatctcgtttatttttcaacgaatcgttaaaaaaaacaaatataatagtaaaaatcgataatagtaatcatcatagcagcaacatttaagaataataacataacaagtctttaggtatataaaacccatattcataaagtagaaaacaccaatacaacttgcttgtgaaggagacgaactcaaacttcacaagtcattattcataagaacttaataagttttttaaaaagaaagaacaaaaacagaaagctcgaaaatagttattaggaagaaaaattctgctagattccctcgtccttctcgtcctcgctgctgcagctattgttgctgctccattcacacttcaaggtagatctaggcgatccacagtacttaccaagcttctcaaacgtctgatacatcactgttccactctcttctcctagagactcaaatgtcctctctctgcacccatagtcttccaagtctacagtaatctctggcttgtatgagttcgctccaacgctcgagtgcacagctacagagaattgcttgggctcgaagcaagagagaacccttgtcaccagctggctaaggtcaagggtgttgaagtcgtaacccacagcttcgaagctagcgtagctaaacccatcttcaggggtcacatggatcgtggagattgcatccccttcaattgagttcatagagtagccgcagggctcgaattcaaagtcgcagatctcagacttgggaaggatctttctgattccagagttatcagtcattgacccagtcgtgtcagcttcatcaatgtcccaaacagcccctttctgtctgtccagaccaatcatgcacatctcgagagtgtagaccttgttgttgccgccgccccaggcc

SEQ ID NO: 32590 - DNA, 1113 bp, Arabidopsis thaliana landsberg
  unsure (1)..(1113): unsure at all n locations
gcagcgtttaaattgaacagtgtaatttaccttgaaattttaagatttcatgctgtttagaatttcagatgaaaacgtcgtgatgttttagaaatccacgtgggaatagcgtaaaatcttatccaacgaacttattttggttttgttgtatttgtgcaagtcgtcacgttaatcgaaaaaagaaaagaaaaaaagaagccgtcatgatcggccatttctcggccgagtctgagtctgactctgcgtccgtgtcaccattatcagatcgagcctgtcttatctcgttgcgattccctatgcaaaaatcttcttcttttttttattcccccatttatctctgatctcttctctcttctcaagtaaacctctctgcttcacgtctcttctttgcttgtcgattttccccagataatcaggtaaataaggctactttcttatttgatctggtggtctttgagttgaaatctctgggttttctctgttgatttcaaagttctctctttttttcttggtttactgggtgctgtgaaaaatgatcttgtaaagtctcctcttttcatcgaattgaaactctaattagaaaaaagatcataacttttatgtaaaaagagtgagtttgctttgcttaattttgcgaattgcttcatagattcattgattagcctaatttggggtaacaaaaaaaagctgacacggtttcagattccaaaaatagatcatgactctgtttcttctctgcagaggttttaataaatatatgcttcttctcatgagttctcgttttttttgtcaccttcgcagttgaaaacacacccaaattcatcttcgaatcaataatggatatnnnnnnnnnnnnnnnnnnnnnnnnnntttcgattggaccatcatctatcatgggtcgaaccattgctttcagagtcttgttctgtagatcaatgtcacagctttagcgtgatctctttcggttcttgttgcattggtttcttagatttaagctgaccgtttcaccttntgtgtcgtggtttcatcctcggaaccctcaagggattttagcggtgggtacaatcattgcctttgtgttgaaacgatacacgaatgtgaaaataaaggcgg

SEQ ID NO: 32591 - DNA, 491 bp, Arabidopsis thaliana landsberg
tcttctatatgtgtctcatattacatgttcaaaatctgaaaagggaagaggcaatatgtcattggctttgcttcctgttgtagattgtagtctgattcctattggcacattcaccacgaggtcctgatgatatatatgttaacaaatatttattgaccaagactgagttaatgcagaagatgaggcaatgagcgttgaagtggaagtttgagttcatgtctagatggtctaacaaagatagagtgattttgtgtgtatagatgctatactgtcaaactatttattttaggacatgttttcagtaatttaggaaggtcttccctaaactatgaatttgaagcatttgatttttattcgatcatctaatgattagaatgatatcttcatatgtagtaatgatattctttgttccaaagtaaaactatggtttattccttacacccgaattcagtttttgctctagatatcattcctgaatatctaggattcct

SEQ ID NO: 32592 - DNA, 448 bp, Arabidopsis thaliana landsberg
ggaccagtttggaacttttaagggtgtttcattcgaaagttgttttgttggaaccttgggcttaaaaaacaaaacccacttttgaacttacacttctaaagcccaaagttaaaatctttggacaggaactagattttgggtgtataagtttaaagtttgtgtcctataataaaggcccaaaccattacttgtcactgaagagagatggagccactgaaatatcaaatggttgtttgaagataaggccagattgtgagtgttgtcttcttcttctttctctatggctaaactctgaaacgttttcagagccgtaacaatggctttggttcattacatgaatgtttcacgtagcacttttcctttgagtagatcttcaaagattaatttgagctcatcttttgcttctttgccacttcagtttcataaaaacattaagagattagaatcc

SEQ ID NO: 32593 - DNA, 3204 bp, Arabidopsis thaliana landsberg
ttgattacagattttacaagagaaaactagtataaagacacaaaatacgacggtgagagaactcacgaggatgaataattgaaagggtccgtcagctcagggaaacccttgtcactgtcccgttctgataattccggccttcgttttttactccttcgctatggttttttcttggagaagaaaaatagagaaggagcagattctgatgaaagacggcgataatcgataaataataggagacgtttagggttcacacttactttttcctatttctttaattccatctttttttttcttcactattgtcgtcattacatcaaattttgttttctatgtttctgtcgtgtgacaaacacaaatttttacttaatttaagtaagtgaactatagacattatttttggttaattggtctactttgattgctcacataaccataactaaataagaccaaaccagatatatataaaccaaaacgagaaaagattagggccaacacacatacaaattagtttctcattacaatttttacacccaaaacaacagacaaaagagcaatcaaagccagcggatacgaaaagaaaacaactccatttaaagatctaaaaatctcaagcatcgagctcagcatcttcatccatctcctctttatactcctcttcatcagctgtagcatcttgatattgctgatactcagccacaagatcgttcatgttactctctgcttcattaaactccatctcgtccattccttcttctgtgtaccaatgcaagaaagcttatctcaacatcaggctgatataaccaatatcttacttcttttacatttgtgaaatggaaccaacccatttttctggaaaaagtgctaaccaaacatttgattaaccgtatcactactactttcatttctatcttctgtttcattatgctgactatttaagctccgttgtcaaatctctaagttagacataaaagacaaagactaatcaattgtcatcacaccagcgtcgtcgagtgagctattaatcgtggattttaagcattaaagaaacattctatagtactaatttcttaagcaaataaaataattataatcaaacactatgcttgacactggtcacgtatactggtagtgaatgattctacatcataagaggccgcatcaaaatcctaaaaataagcataatgaattaatcatttacaaattttattttactcaataagaaaatcgaaagtatgattattatctagctgccacaatcttcgaatttaatatttactcaagaagagaccgactttaatccttgactttctcattgctctatggaaaatgattaaagcagtcaataaaatcttttgacattgttggcagaagaccaataattcgaagtctaaaatgtaatcgtccacacagtgtatgagtatcctagtattttttttcttttccatataagttgaatttgtaatatatatagtgtaatgttgtttatttgtggcaacgtacaaaattgggaatcctataagtgcgacgacaagtgacaagacgaggctatgaacagctaatgtatgaagagagccaaaagagcaacaacctggcacagccgttgttttttttgaatatattgacgattcgttggcctccgagatctaaggcatctctcacaatcaacggtccagattccatctagaagatatattacaccgaccttgttttctctatctaattctcacacacacaccaacgcaaacctccaaaacagggccggggcgattcattcacaatctcggcgattctctcttccgtctcgagtcgctgagatccatcaggttcgtttctattcgaatctattctcttgaatccgtatttgtttcctttcctccctagatagatttcatttttctggaaacattgagatttccattgatttgatgtttagtggtttagatcggataatttttgttgttgactctcaaaaaacgaatcataactatcttaaaactttgtttacgcattgttattgaaggctaaataaaaaatgctcaattgttgctagaaaggaaggtgtctcgaaaacatgtgaatttatttcttgagcctcagtgtttctccctgcaacaatagtgaatgattcaattgaaaagactttttggttaagccatttttctctttaatagattatgtgtttcaactcaattaggaactgtgtgtttttttgtttccttgatgtaacttgtgagttgatttatttgggtagttaacttgtatatatatttggtggtgggtcctggaggaaaatgagtcagagggagctctgttcatacattctatgtttttaaatgattagtatttttctttcatctaatacttgctttttgtgctaggaatttcgatttttgggactaatttatcgagtatatataattggataagtgagtttggtattaatattaagagcaattaggttggttatcttgccaaacagtagacccctgtcgttttcttagtcatttaagaagtaatgcttaagattcaggcctctaatctggttatgatagtgaagaggatctgtaaatttacctatacgacctgttgaaaaggacctctggtgtttgttactatgcgtttctgatcaatatagacatagttggatcatattcttctcttgatcgtctgtttcattttttttcaaaatcagtaaaaggtctgcaaaatggttgctcagggattcactgtggatcttaaaaagccccttgtatttcaggtaattactgtttcccagggttttaaatagtttatgtcaacattttccttgagaccatagtcacccaagattgtcttcgtttctttcttagagctaatcaaagtaacgctctctctttaacccctcctgccattgctttggatgttttacaggttggtcatgttgctgtttactatgaggaatgggcccaccaacctatggcgaccaaggaaggccctcggtatcttgagagcgactcttgggcggtatatattttatatgcatcttttgtgattcttcacgctcattctcaatactaagcggtgtcaatgagactctgaccttcactctgtgacgtattggcaatgaaccagttcttgacacttacagtttggcgaggagactctgtcattggattgcctgacaaggaatcactccttaggctgtcaggatgcatgggctgt

SEQ ID NO: 32594 - DNA, 871 bp, Arabidopsis thaliana landsberg
ttatattctttattgtgctatgactggaaaacagggacactgctaaatattgttgccattgtccttatgaaaattctaatacaattgggtattttgttttacaacttaacccttcatatcaagtaaatgcatgtcaatactataatcttaaaagtcgccaacaatatacctttggacgtgtattaatctttcaaactttataaattagtatatatgttattaaaactacatcaccaacaatgaaagtttatatttttaaaaattaaaaacaaaaatttcaagattaggatcacaaaataaagacattcaacatcatgcgattcaaaaagaggatctgtctcccacggaggcaccgaaccaaactcgtcgtcacacttatgcgaagataacctatttttttaacaatgtcatcaagagaagaaacctagaaagcaaaagagatttggttttccacagtatatatttatcggtttgttaaattataaaaacaattgccgcacaatttgttaaatatgtaaattagggggatttgcaaaagtaccctttttctattaccctattacaacaatagttttttatgttgtccaaattatcctcaaaaagaaatttttcccgccaaactttgttttcccgccaaaattttattttctccaaaatattgttttccgagccaaatttttccccagccaaaaatgcatttaaatttttttatatattttcttagaaccctttaaaaactcttaaaaacttaaagtttttaaaaggtatgtaaagttgttaaaacccttataaatcattttaaacctttaaaatcttgataaagtccttaaatacatatgtaagtacttgaaacccccttggaaaacctgtg

SEQ ID NO: 32595 - DNA, 625 bp, Arabidopsis thaliana landsberg
  unsure (1)..(625): unsure at all n locations
ccgcccgacagctccccgtacgtcacccgcgcttcccccctgccaccgccaccgcgtccggcgagggtccgttggacgacccgcgatcagctccggcaccaggacgtccgccaccggcaccgtcgtgtcattgcactcggtcaggacatgcccccgctcatccgcgcccagcaccggcaccgcgtgcacccggacacccggatccgccgccaccgccgccagcacccgcccgaaccagcccgcgatccgccccgccgactccacgtcgaacaagtccgccgccaccgtcacccacccgcgcagatccgtcgagcggctgtccccgtcaccagcgccacgctcaggtcgaaccgcgccgcccctgttccggcctgcaacgccgtggcccgcagcccggccagccgcgtgccggtcgcgggcgcggcaccgtcaggcacggcgccgtcgcggacgctgccgtcggagacagtgccgtcgggcacgttgccgctgggcgcgctgctctcggccgcgttgccgctctgcagtgtgagcatgccctggancagcgggtggaaaaccagcgaccactccggcgccagcacctccaccagccgctcgaacggcacgtcctagttccccagcg

SEQ ID NO: 32596 - DNA, 1153 bp, Arabidopsis thaliana landsberg
atttttaaaaaatggggccacagaccaaatttttttgttgaaaaaattgggttatggaacggtcaactcttaattggtaaattaactgaagggttcaaaagcaaagtcaacccattgtttattcctttttttatccaattttaatttggtatcgaacccacatatttagtatttacgatgtaacattagtcgattgtacaaataaatgaccaatatagtcatttagtgtgtcgtcttgttttttattattattttgcattattactagaaatataaatgtagttttaccatgataatttgaaaataataataaggtctttgagaaaatagataagttaaatattgtaatttgtaaaacaagaataattcttgattttcttcacctaacgtaattttgtgtattaagaaattataacaatggagaagacatgcggttgacctattccgtcttggtgtttatgaaaaattgtcttatataggacccatatatagttaaggcctcttatgtcaaccataataatcacccaaggaatattacaatagttcaaagtaatataaaatttatatgaaaatcttatcctttcatatatctctctggactctggccctaaataaaattcttcgaatgcttcagctttctttgaagacctttcccatattcaaaccaactctgcaataggattaacatgtttttgcatcactatatctctcgtatatattgtttgaattttcttcctttgcctgattgggtgatttatcttaccttttgtcgatagccttacacaaacgccaatgtctctatgttttagtcaatttatattagaaaatctaccgacacattaacaaaatatttacatatagaggaataaagtcagtatgattgcatatgaaagttaaattataggccctgcataaaggagttaaatcattgagaggagcaatgccaacttgtattaataaataataataataataactgttgacttgattaactcatttattagtttttaatgacacgattacacatcaaggacccttaaccagtgttgccgtcagggaaaaaacgagtgtccacatttttcttaaaagagagtaactatttctcatattaattaaaaatatatggaaaagaattatcccaatagaaaattag

SEQ ID NO: 32597 - DNA, 601 bp, Arabidopsis thaliana landsberg
ttttagttacattctcgaatatctcaacagcggaatccaccattccaaatgacatgtaagctgtgatcatctccgggaaagtaacagcatcttgcgccatcatcatctcgtataaactctctacctttttcatatcccaaaatttagaataaaacccaatcagagcgttgttcacactcaactcctgcatcaaccctatcctaattgcacgaccatggagttctctacctctcaataagtcactagaatcagtacaagagctcaaaagcgttgaaagcgtaaaactatcaactccaaatccttcgactctattcatctcataaaacaattcgaaagctttatgagacttgccctctttcactaaactcgaaaccacagtgttccaagacgccacatctctctgaggaatttcatcgaacaacttaagcacatcatcacacgaagacccagaatccttatcatacaaactcatcagcgaattactaacaaacacagaattcaaaaaccctgatttaactatcaatccatgaatctgaatcccaagcgagaatcgggaaactctcacgcaagcagtcaaaatcgctacaaaagtatactcatt

SEQ ID NO: 32598 - DNA, 3238 bp, Arabidopsis thaliana landsberg
agacgccttaattttcttattatcatgtacattacctgacaaaatagttagtgttatagtcaaaataattaatttcaataggatgcatgcatgtacgtatttgactattgtctatatagtagagtttctctctagaatctagaatcttttttttcgttatacaattcagttttcgtgagcttgttatcaaaacaaagtgtccaacgttaatgaattatgacttcaaaatatttgtcttttcagatgttttaactcttgtaaagtgtccatgacgtggcatggatgttgagattcgtttagtgagaatgtgtcattaatcacagaatgcgttaggtgacgattactataataacttctaactaattggtcttctggtggcgcacgaactaatttatgataattataccaaatacatgatagagcatatacttttcacgtatctgtccgtgaggattgatttttcaaatattctctttgttttgctaattattgatttaaaacaaagtttggatgcattttaaattcaagttaaattaattagaaacatttaagaaaaaactattgatggaagatagaaatgaagtagaattggttcaatattataagaaaataatatttagagttgaaaataaaatcttttaatctacttaaaaatcgttgaagtatacatgtgtagaggccttactattgatcaaatattcaatagaggccttcatttgaaaaaaaaaaaaaaaagatcagagtcaaagactcaaagattgaaactctgctataagactcacaaacaagtaaccaaattgttaagaaggcgcaactaaagtgattgtgaacttctcagcccaaaagaataatgtgggcttcttggataaaacataaaacgaatgcacttataagtgttcttagccttcttcataacctttcaagttaaaatcggccccaatgtccaaaccctatcattggcccactttcatcatacaccaacaacttatgtttatatgtttcaatataatgttttcgtttacgtgagctcagagaattctgttgaaaaacgtggttacttttccgtaaattatgtcacactaattagatccatacaatcaatttcaaacacataatacatttcaatcgatatgaaccaatctccggaacgttaccgttacacaatcttaactcttctagttcactttcttcttttcgattacacttggcctgggaattctttatcacatgaatggttatacaccgtccgatcaaaacctaccacctcttcaatcatctggcacgtggcttgaccaacgtatttattacgaccgatcaaaatagctttattccacgtcagcaaaacacggtcgtgccttcctccaccgtccgatgttacaatcagctatcagagatcaacggtgaataacgaaacagatcataaggagcccataacgaatccaacggacacggtcgtctcgagtcaagccttagccatggtttccctttcccgctccaatgcaacaaactcaccggacctggatgcaaattccggcaaagtccttccaagttatcaccaccaagaccatgctgattccacctatgctccaccggctcgacatctccggcgaaaacgagcagaaacggaggcaaagatcccaattcgtaaatacgatgtcgtttttgaatcctcatccatgtctctagcttcaccgtgactctcctttctctccattttccgagatcaatcaccatcactccggtgttgaaataacacggtttcctatctttcaacgccgatttgtaaccttgactcgaccagaatcttgaagtgaagtagttagtgaaattcgcgtgacagtactccggagctccgccgacgtgccgacgtagatcgattctccagagtttagccacgtcatcgacgactacgagatcggagtcaaagtagattacgcggcggacggcgattgggaggagatcggcgaggtagatccgagcgtagtttaacggttggtctaaagcacgacgaatagaggaagatattttgctgcggacgaggttagggtcaaaatggtaaatgtggtaggttaggtatgggaatgttgaggagattatgcggcggagatcggcgctgcgacggtgagtggcgatgaagtggaaaacgatgttttcaggacaagaagcgtgttggagaacggagaagacgccggcgactgagccacggaggtaaattgcgtcgagagtcatagcgatgtggatgattgatgggttgtgttcgtgatccgaaggtatccatgtcgttttggagcattctctgccgtttcgaaacgccggagcttcacgaaacgcggggaggtcagtgagagtgactgtgacgcagctaattgtgataggtaagagtagaagaagacataaacgcaaacgcagagaagacatttttttaggtctgtgttgtgtagtctgtgagtgagtggagaggcaagagagagtgaactgtgaaagagatggaggttttttgtgtcggtgttaatggcagattaggggtagtttcgacattttagactttttgtggtttatgcttaagcgttaattgatgattgtcgttacttgtaataaaaagttaagtcatgaaagttagtgaataagtatgttttgggataattttaacaataattatgaagtctttcggtgattttgaaaatgcgtacgaaatgggtaaccgactcgtgagggtacaatcgtctatttccacgtgttaaacatgttgaccatgattttctaatcatcggacggctataaatcgtatggagattttaacgatcgattaaaaatttaaaataaataaaaattactacagagaaactgaatatctcaagaacattgacatcgattgaaccaaaagcattcatgttatcatcattttcttttctttgtttttacattgatattggtcaattggattttaaatacgccaaacatatctgatataaactgattaaagataaagaaaaacaggagatacagataggctttatcactcaaaatgataccactcctcagttagatatcaccaccattaatgcacttctctcagctaacttatatgccataaatgataccaaatctaatttggttattgcagaacggtaaagccattttttttttatcataagtaaaaaagtaaagttgtgaattttcaaaatgtactagtaaaatcttttgttttttcattcgaagaaaccacaagacttaggta

SEQ ID NO: 32599 - DNA, 700 bp, Arabidopsis thaliana landsberg
catatagcttttatgcatgatatactatatatatctctatatatctatccatcactcccctactcctttttttttttttggcacctctcttccgggaccaagggctattgtcctctcttaaaccggggccttgtcaccaacttgctatccgctgtacatcatatatattaagagcatgagtctaaaatactcacttttggtgactagtaactttgctgtaccttcattttttttaaaaagagctacaagactctgtaagagtgaaacgaagcccaatcccattatctgttatgaaaagttcataaaagcccaattaatatacaaattcactacacgaggagaaacgacgtcgttagtggagtggtaagtgttgacaaagtgacgagtgacgacgaccttttgaattaacaatcgaagcagtgactgagtttgatatcaatggaggctacggcggcgccattctcttcaattgtctcttccagacaaaacttctcttcatcttcttcgattcgcgcttcttctccggcttctttattcctctcccagaagagtattggcaatgttaatcgcaaattcaaatctcccagaagcctctccgtccgcgcatcttctacctcagattctggtactttctattgtttttctgttgccctgttgtactatatttgattagtcttatttattgctgaatctttcttct

SEQ ID NO: 32600 - DNA, 2314 bp, Arabidopsis thaliana landsberg
taacccctataaattaatactctataaattaataacctctattaattaattaattattccggttccgagttaagagcagtgggaaaaatgacataaatcgataaattaataagataatattttttaaaaaaattctatgtaaatctatggtcctatcaatatcataaattaataattgtataaatgtatcaactatatatatatatattatgtaaaaaaaaattttataatatatttattatacttttttgcttaaattcatatttgttctttgtttgattatagttttcatattttactgtatcaaaacttttggtgttgttttctagacattattattatgttttacttgtaactggttctagaaagatatattctataatgaaggaaatcttatagaaatttttaaaatgttaccaaattaggaaaatctctctataaattgataaatattaatttatcgataaattaatacctctctaaattaataaaatttcgcagtcccaacattattaatttatagaggttttactgtaattcgtaaattttgagagtagtttttaaccaacttacaccaccaatttattagagtacatattttgattttcgatatgcaatcttgttaccaactaagttggtaattaggacaatatactcttagaaatggccaggtaatttgaacaatgaccatttaagtgttttcaaataatcaaatcatatccatataaaaataattagtcagctaatcccctattaagaaaaatcaacagttaaaacattctcatttccttctaatgaataccctataaatacccactaaaaacttacatttctcccaccaatctcaaagcaaattaaatacactactacttcttgagcttttaaactatacaaacatatggctccaagaacctctcttgcactcttcgtttctctcaacctcctcttcttcacttgcacctctgcaaccacagggacttgtcctaaaaattccatagagatcggtacttgtgccaatgtgctcaatctagtggacctaacattgggaaacccacctgtaaagccatgttgctcgctcatccaaggcttggctgaccttgaggctgcggcctgcctctgcactgcgctcaaagctagcattcttggaattgtcaatattaaccttcctatcaatctcagcgtactcctcaatgtttgtagtaggaatgctccaaagagtttccagtgcgcgtaagttgaatacctatgacatacctatgaaacaaacgaatcataccgatacttgaacatgttttcttatctacttgttgttgttctaaggtgttttttttttcttggattgttaagaatgaacgtacgttctgatgcaataatggaaatggagttgtgtgtataattggcaagtttatatctactccttcgcttcgttgttccttggtctcttctttgtaattgtgtatttcaaatttgcttaataaaaatatgggtgaaagacctgtgtcctcccacaaatagatggtctttccgcgaatgtgaaacaaatgttttttatcattgttggtcaactaagtaactcgttcgacccctacgaatccgtttattgagatgatcaccgaatagagtttcacatagtaccacaactacacagatttcaaacctcgtttacagttaacacaaaatggaagttaaattattatatctccctaaatcgaaagttagagattccatctccataaaatcaaattttatggtttattaggttaacgtcataaacctaataccaaaccaaaaatctagtatattaaaccgaactgcaaccgattcaatttactctccacatcataaacttctaatctctcttctttagctaccatgtctctggttttctcttcaagcaaattggattctcaaaccaataggaaaaaattaaattatattggattgtacccataagtgaattataaacttctagttaactcattattgggcttttggttcaaaagaaaaaaaaaaagaaaaaaacgaattgcttgaatatatgacaacaacaaaggcttgtagctcagagttatgtataagacaccctaggaaaactgccaaagaagctcagagtcatgcatataatttgcgtacaaaattcatcatttactatatcactcacaagaagctagctgcaatttggttctagcattatgacttaaagacgatatatagtaaacacaaatgacatcagttttataaatataatttgcgtacaaattcatcatctactataaattcaatcaagactaactgaattcaatatatgtatata

SEQ ID NO: 32601 - DNA, 1811 bp, Arabidopsis thaliana landsberg
  unsure (1)..(1811): unsure at all n locations
tctaacatggttaatcttcttaatagatatgagagagaggtcaatcatggtcattgttctgcaatcaagaggattctgagtggtgatgctccagcttcttcaatgatggtcctctgcatatcagctattaatccaaggaccgataatggttctcaggaagcacattgttctgataattgcagcaatgtgaaagtcgaactcactgatgggtggtatgaaattgctactgctgttctgttacctgttttcttgtctcatttccataggatttttttttaaatcacaggtactcgatgaatgctgctctggatgtcgtgctaaccaagcagctgaatgctggcaaattgtttgtggggcagaagcttcgagtaagttatattcatgcaagatatactttgttttgcaacacagattttggttagatcactgacttgcagcatgcttacgttcttatctcttatctgaagatcctcggggcaggactttctggctgggctaccccaacatcaccacttgaggtttcctagactttgcattttataagattttctgatatcttctcaggttggtttgttcttagagttttcgttcaaccaaactttcaggcagtgatttcaagtaccaatctgtttgttgttgaatattaatgggacatacagagctcactgggcggaccgactaggcttctgtaagtagctttatgctgtgggcctcactacatcatctgagttcttattgctttcatattgttatctttccattgatcgtttataatctcttccttcctcaaggtaaagaaattggtgtccctctggctttaaattgtatcaagtgcaatgggggtccagtgcctaaaacgctagctggcatcaaacgaatataccccatcctatacaaggaaaggtcaatataaatgtgtgcctgttaatgcattttggtcttctttatacttctcgcaaagcattatattttcttgatgtatacaggttaggtgaaaagaagtcaatagttcgatcagagagaatagaaagtagaattatacagctgcataatcagaggcaagtttccttataactgtagagagcaatttttagtaacatttatgtgatcaatttagcacatgcatctctttctaagaagtgtcagattaactcattccagcgtaaatcattttgtgctatactggaatttccatctccaatcccagtataagaacttacctctaccctttgcattcatgaatcctttaagccctttttctaatcattcttttcttttctcttaactctaggaaaagctttctcaacactttgatacatctagcggatttggatttctttaacaactaaggttcctgtttttaacattttaaaaccgagggcttttgcccatcttcaatagctaacaagaactctttcttttttttacaaatcccaaaacctttactagactttttctgcttctttatcttacttcacctagagtcttttaccttttctcatcaatgaatcaacccctttttttttcttttaaacacatcccaacctaaagtataagcgcccacccagtcctatctagtccaaaaaatgcgaactagaactacatgagacactatctctgtcgttacgaacctaacactttctaccaagctgaatcggaataagacctcacaaaccctcacgagtgatataaggcttgaaanaaagtctaggtttgggttcgggtaactactctaataggagagtagctacttgattaacagaggatcaaatgaatagaaaatcagtatttagggtttcatgagttcaaat

SEQ ID NO: 32602 - DNA, 648 bp, Arabidopsis thaliana landsberg
ggggctaagtcactatggaaatgcaacattatattaattttaaatagctaaaaagaagtacgggggaaagtgaaagttaaaaacaaaacggagagaaaatgaaagtgttgatgagagattcgatgttgtcactcataacactctatttcttggtgacaacatcaatggctcgtcaagatccttttctttttggagtcgagacagacgtcgtcccatctggaaccgatctaaaacagaacaaggcgaaaccttatcttcctaatttgtttcgaactatgagaagagttcctaccggtcctaatccattacatcacatttctcctcctcagcctggaagtctaaactatgctaggaactgagaaacttttaaacatcaaccattgttctagatcaatttatgtttatcaaattttataagaacgtcattgattcatcttctaatgtcttcttttacttgataataaaatgatgatttaattttattttttagtgtggttattaaatattaataatccgaattgtggaacatttatatataaatcgtcttttaatagtggctaaaataatcttatatgaattggtatgctaacattttataaacgtcaatgttaattatgttttgccgatgtgactggctgcgtgaattga

SEQ ID NO: 32603 - DNA, 726 bp, Arabidopsis thaliana landsberg
tattattttcacatccttcactgccttttaagggctaagtataaactttttagtcattctttcatttggttcattactatgtgacagaatactattactatatgtaaatgaacttagcttgtacaatctttatgaacataatcagtatattaaagcataagcaagagtccaagccattttacatttctcagaagaatattggtactgattttttttaaaacccccaaaattatacaataaataatgtgaaccagacctcttcttgtggtcgaccgcatatattagaagaatttaaattccagttgtgacacatggacaattgtactaacatatctaagatccaactatagtatatgccagtcttatgaatcgattatttaagaagttgaaatcttgggctacgttacgtggctcgatgtgtatattggggactaataaggcccaaatcattgttacggcacaatataactcggcaaagcccgaggcaaaatatttcttgtttgcttatgtttgtctcgtgtctctctagtgcatgtgcaatatttgtatgtgttctggtaatctggttattgaacagatatttgataagttcgtacaattaatgatgagttgaaaggaggatctttttgataatttatcttcaacaatctcgaggtttacataagaataaggccagtttggtattcgagataagtgaaaagggactaaaaacatgtttaaaatcta

SEQ ID NO: 32604 - DNA, 4029 bp, Arabidopsis thaliana landsberg
agaattggcctttcagccagtgagagttcttaagataactatcatccatagtgaatctcgtggttttgacctcttctccctcaaagttattgcgaaagtgcccaaatttaggagtaagaagactgccaactctctcagatttcttccctttacctgtaaagggcttggtcttgactgagaccaagtgatgagcaaatacagcgccaaagttgacatcgcggtcaacctcctcaaatcccaaactatcagaaaagaaatcatgaacagcatgatagagcaacaacagctcagaaagtctcatcttgccaggctccatcttgcacaacaatgtgctactaatcagcctaaccaaatatcgtagaacagggtgacgaatctttgagtgtactgcgtccttggaatcataagttccattaccaaaccggctccagaaaacctgagcatccttaaactgtccaggtagtgcaactccagtgagatcattgtcaaaactatagatgtcacacaactctctctcagtggtagactatatctaacaccgcggatgaagaagataagagctccttcctgagcattgcgtttcctgtcattcacatagtagaccctagcagaagccatgatttgtctaactagctcaggatacaaatcgtactgcctacaacagatggttcccaaacctacatcatctagcagtcctaaacaagatttctctatctgcaaacgctacatcaaaccgaaattcgcaacccgagtagtcaaaatttctacactcatccaggcattatagaacagagtataataatcatcccaatctggagaaaaaaggcgattgatatagtcacctttagtgaattctctgttgacatccttttcccaaactctttgagaaggaatctgcacactagctagttttggacatgaaaatcggtaaatcggaggctgaggagcagcagtggaagattccggtggttgagcatgtgagccggcgggggtgaaagagctgcggcgaagatgagcggcggaggaagaaggtggtggaacgttcttccttcctttctttttctgtccagccatgttgcaaatcgatgaaaatgacacttggggaagatataggatgagattctgatgagattagagcctaaaatcacaagaaacgatgaagaatcgaacgatctagacgagttttaatgaaaacggcggtttggaaaaaaaatgaaatgagaaagatgaagttttaggttatatggacttacctggaaaatgaaggtgttgatcgacactcggatggtatcgatagacaccatcgcgtttggtcgacaaggattttttttttttattttatttttaaatctgaataaaaatcctaaaaaaccaaaaatcctatgttaaaaatcaaatgaatgaaataacgaaaaagaagaatacttactagtgggttgccacccactaagcgcctgtttataatcaagatcaacatgcgagtcctgaagatctaaaggcttttctactggaatctcggcttcagcgcagtagtttttgactctctatgtagggacctgaccaacgagaagacaattttccaggaaataatgtcaatctagaatcataaagacgtacctggtcatttaggctcaaaggttcgagtgaggatcttcttgtcatggtaagcctttgtgcgttctttgtagagctttgagttgtcataggcatgaatccatatctcatcaagctcattcaactgaataagtctcctttctccagctgatttgatgtcaaaattcatcatcttaactgcccatgctgctttgtgttctaattccactagaagatgacaagctttaccatagagatgatgaaaaggtgtggctccacgcggggttttgaaaagctgtctgtaagcccatagtgcatcatctaacttgtaagatcactcatttttcgattgtcccactgttttctcaacaatctctttgatctgcctgttggaaacttgaacttcactgctcgtttgtggatggtagggagtagcaactcgatgtcaaactccatactgaaagagcaatttcgcaagaatcttgttattgaaatgcttacctccgtcattgatgactatgcgtggcactccaaaacgagggaagatgatagacttgaagagtttcatgacaactgctgaatcattcttcggactagctatagcctctacccacttggcgacataatcgacaactagaaggatgaagagattcttgttgaatggtgggaagggtcccatgaaatctataccccaacaatcgaagacttcaacttcgaggataaatttctgaggcatctcgttacgcttgctgatctttccccttctctaacaaggatcacactacgatatgaacttctgagtatcctgaaacattgtaggccaccaaaagcctgcttgaagaactttggatactttcttgaaggttgcaaaatgaccaccatagctagagctgtgacaatgcgatagtatatcagcaatgtgaaaatgaccactctattgcagcaatgcatctcctataaactccatcagaacaatgcttatagacgtaaggttcatctaaataatatcgcctaatctctctcaagaatctcttgttgttgtaatctgtgaaattatcctgttccacatctagagctaggtaattaacaatgtcagcataccatgggtagtccttctcgaccgctatggaaccgcaattctcagttggtgactaatttcttgtcgattcaggacggtgtcgatcgacactatcgcgtaattgcgaatatcaacttcatccaaaaagtgagtgccgatcgacataaaagaagtgtcgatcgacactgaagctcgattctgcaacttatcacatttgcagtcatcttcttccgctatatcaatcatgtatatgttctcctcaggcaagaaatcattaaaaggaacatcatcatcgatcctaatacgtgacaaatgatctacaacaccattctcaactcctttcttatctctatcctcgatgtcaaattcctgaagaagcaaaatccatctcaaaagtcttggcttaacatctttcttttgcatcaaatacttcaaggcagcatgatctatgtaaacaataaccttggatccaacaagataagatcggaacttctcgaaagcaaacactacagctaacaactccttctctgtagttgcataattcctttgagcatcatcaagtgttctacttgcatagtagatggcatgaagtttcttatctttcctctgtcctagaacagccctaactgcaaaatcactcgcatcacatattacctcaaaaggtagatcccaatctggtggttgaacaattggtgcgctgatcaaggcttgttttatctgctgaaaggcatcatgactgtttgtactggggatgcaacaataataatatacgagattttggggggtgaacggaactggtcctttttattaacgataacaaagatcgagggattacagcaaactagttttgtctcggcggttatagactatcctgccgagccgagaacttaatcgtaaaagtagaaagacaaagtacagaaatgggagaggcaccgatttcgggctaggcgacgaggtcgggctaggcaccgatttcgggctaggcgacgaggtcgggctaggcaacgatttcgggcaaggcaacaattctctttgtctctcagctaataacctctggatcggattctgctcccaatagtgtttctctctatttatagggaatctgaaccctaaattcccttctgtctcctctgcaaattacgattttgcccttctcgacctaatgggcctttttaatggcaaaaggccctcttcttttttgatatctgttttgggcctcctaacattgaaggggcaaggcccatgtccaacaataagcccccccttagtccgttgtgcgagagtcttttataagcttgacgggcgtatctcaagaatttggatatattagttaggcacaagacagaaaaaggtttgag

SEQ ID NO: 32605 - DNA, 533 bp, Arabidopsis thaliana landsberg
ccttgaatactacaacctaaaagcctcacgaggttacgatgttgaagttttgcgattagttttacttcgttcttgaattcttccactccttgtcctgagttcgcggataacctcttcaccgcaatctcttgtccatcttctaacttaccctgcagtaatttacaaagaaaataatcacaattaaagatttttaattagtactataaaagcaatatgtgatggttacattatattcaaccttataaactggtccaaaacctcctcttcctaggaagttcacgtatgaaaaatcaccagtggctatagaaatcgtttttctgtcaaaaataggcaagtccaagtcctcttcctcaatcccttttctgaaattttcacctgtaaaaaaatagtaactaccaaaatttcaatataaaatacttgagagacaatctcgtaagttctaagaacaaaattgaaactaaaaaaacaaatcacctcgatatctcttcattatcttctttctgaaacatgcaaacactacaaccaaaacaact

SEQ ID NO: 32606 - DNA, 2852 bp, Arabidopsis thaliana landsberg
caagattcttcgcatggaaagttgttcttcgacttctcttctctaactcgctatcttttaactcacccagctccactgagtcgaaaatttcaaacctttactcgtttccttcatggctaataacaacaacatcccacatgatagcatctccgatccatctcctaccgacgatttcttcgagcagatcctcgggctttccaacttctccggttcttcaggttctggtctctctggaatcggcggcgtgggtccacctccgatgatgcttcagcttggttcaggcaacgaagggaatcataatcatatgggtgccattggaggaggtggacctgtagggtttcataatcagatgtttccgttgggattaagtctcgatcaagggaaaggacatggctttcttaaacctgatgaaactggtaaacgtttccaagacgatgttcttgataatcgatgttcctctatgaaacctgtaagtttctcttcagaatcttcactttgtctttttcttttgtgttctcgagaaaataaagtgaaattcaaatctttagggtttcaaaatggtgtcgtttttgagaaaacccagcttaggtctaaatttgatagttaccgagagtttttggctcagattggtgagatttgatgtttttgaagaaacccaagttgaagattttgatgtgttttaaagtcataacactaaaattagttttgcaagaaactttagtataaaagagtgttcttttatgtccaaattatattgtaagaaaatttgctctttagtttcttttctcatgtggataattccgtcatagtttgaattgttgctataactactctagtggcgaccgttcttgtgagaagcggtttttaagcttttcttaatgttattacggcattgttttgtgttttgttgaagattttccatgggcagccaatgtcacagccagctccaccaatgccgcatcaacagtctactattcggcctagagttagggctaggcgaggtcaagctaccgatccacatagcatcgctgagagggtaagatgtttgatacactttttttatcttctggtctcttttttcgatttttatgtgataatgtttgatcaaagctttaattatagcttttggttgagaaagttcgattagttcttacttactaagaacggtaagacctaacctgaatgtatttgctttgcaacagctccgaagggaaagaatagcagaacggatcaggtcgttgcaggaacttgtacctaccgttaacaaggttggtatctttttctctagagcttcagctactgttttcatgtcgcgaagagagcttgaaagagattttaaaagtaggcagaaaactagagttgtcaatgagagaaaagttttgtgattggcatatagaaactgcggtattcacatctgtttcttttgctttccttttgcagacagatagggctgctatgatcgacgagattgtcgattatgtaaagtttctcaggctccaagttaaggtaaacacccaagtcattttcagttttctattctctggtttttgaaaatgctatcattaaaagtttgtagaaagattatttaaaacagccagaaggatttagtggtgtaaatccttggtccccaccaccacctactctcttaaaccaaacttccaatcttaataaaagattataattgtttaatctggcaataaagagtaatcaaagagtacatgattgtgtgttttttggcattagtgtctttcactttttgcttgcttccctcccatggagaatcatcacaattgaggactattgtaataaagctaatgagaacattgaagaatattttatgcaatgatgggctttgataatatttttccttcataagctttatctctggtcaactatggcaggtcctgagcatgagccgtcttggtggagccggtgctgtcgcaccactagtcactgaaatgccattatcttcatcagttgaggttagactagagagagatacttcattaaaaaaagaacagaactttggtaatggtttttcttgcactgacttgtggtgtaaaaactttcttcaggatgagacgcaggccgtgtgggagaaatggtcaaacgatgggacagagaggcaagtggctaagctgatggaagaaaacgttggagcagcgatgcaacttttgcaatcaaaggctctttgcataatgccgatctcattggcaatggcgatttaccattctcagccaccagacacatcttcttcaatcgtcaaaccagagatgaatcctcactgtagatttttgttcatccaacggtccccagctgatgattgacatttttctctgtttcccactactagacttttgtgactgatgaaaggtaagtaaaaaggcattggagatggaatctaagtaggatttgtgcagtaaagaagtaaaacgggatctgtcaaaagaaggaaaaagctctcgcttgcttggctagtatttatcattttgatgaaagtaactcttttttgttcaaagactttagtgtgattttcaggaccaagggctttgagggtagtgctagctgtagtaatagtaatgaaggtgtgggatcgtgtttctgaattatgtaaaaaaggaagaaaaaacaaatgttggtattatattatggttttggctctcttttttttcttgcactaatttggatagaccatttaactattcaaaatgatatagttgggagctggactgattataattaggtaatttcccgcgcattcaaacactttatgcattagaacttctaatttagaagtataaaacacattgtctgaacaaaatccgtgagtatgcagagaacactagcataca

SEQ ID NO: 32607 - DNA, 508 bp, Arabidopsis thaliana landsberg
accttttgttgcaaacgttcacggaggctcggccgcgcagcgcggcggcgcgcgatttgtcttgttaagcggtactcgtcaaggccaaggagcaaatcgaccgctgcgcctggatcgaagcggagcaactgttgcggccattgaccggcgaaaagaacggcagtcgagccgtgcaagtcgtccttctcaacctgctcggctgctgtgcctgcatgacgcaggagttcgacgacggcattaaatacttcacttccgcgatcaagctcgcccccaacgacgcgcggctgcatcagaacctcgccctaacctacgaatggaagggcgaactgccgcagtccgatccgtattggaaccgttatttcgatttgctcgacgaccgtatgccggcgccggcggacatcccgcactaccgcgaacatctgacctacgagagcctcggccgactggccgccaactacagcgacaaagaaaaatggtccagcgcactgaactatgtgcagcgtgccgc

SEQ ID NO: 32608 - DNA, 613 bp, Arabidopsis thaliana landsberg
ttgagtacaatacggtcacaactatttaaaaaaaaattcggcttcgcaatacgaggttgatagtctagtataccacttccatgaaatccatgtttggtaacccaaaccagtatgctccttatatcttcatgattggattttcgaatgaacctgaaaaaattcctcttagtatgtccttgaactccacaatgataacatgtaggacaatgaaatctcacatcataagcattcatcaatcaatttatctccctcaacaatctgaaacaccttggcctaatatgcccaacaacaccacaatgatgacaaacatgtcaaaaaactcgctgaggcccactctacaatttttgaactttttctcgtagctgatggagtctctatatcagttctctatcagatgcagtctttgctataattgaagtttccttcacagtttctgatgcagacctgattttaccaccataaacaaactttagatctgattttgaaggatttcctttaaatacaaaaggccacacttatcagtcttgccaatattcaaaatatgatccaacttctttgtgccattattaaacatcctcaaattcttttgagttttttcaagttttactttagc

SEQ ID NO: 32609 - DNA, 801 bp, Arabidopsis thaliana landsberg
acaattcagagatgatgtcgttggaattgcgtatccacaacagattggtttttactatgtttttatttttattttaatagaatcgaggggaattccaccctttgtacattaccaaaataaaaaaacagctaagtctttttgaatgtttattattaatggatgataatagttaaaccctttaacaaaaaaaaaaaaggatgataatagttaaagatattgttgcatgttattacaaagtcgttttcgctttttagttattgatgataaataaataactatattatctttttacaacgatgacatctgcatattgccacttcgtcctccatgtcacatgtgccgcctctataagcaccagtattaatgcaattatcttcacatagagtagaactacaataaaaaaacttaggaggcctcgcccataagattcgaccttctatgcatggcaccgtccgaggcattccattcgacattccattcgattgtcctataacattattaatcaatatgtaagaattattcaaatactcttgattaaaaaatgcatatattgtcttaattataacttatagaaagatattacatatatatatatatatatatatatttatttatataattcattaaatattggtttgattgttgatttttatgtttcacagaatattatatataaaattaaaaaatgtatatatccaattaaatttttaaaaaagcattttcctaccaataaagtttttttttatgcaataaaaaaaaaaagttttttttcttgtgttgcagttcatggtttgcgttatt

SEQ ID NO: 32610 - DNA, 610 bp, Arabidopsis thaliana landsberg
attgaagaacacataggtgtataggttctatatcaatagcaacacaatgaacctccattgaagaccacaaatgatatcccaaattaaattatgaaagtattacctaactaagatataacgtaatgcaaaacttggaacaacaaaataaaaaggcagttataactgagtgaagatcaaggaaaattataaatgtagcaaacctctaagctcttaacaaatactgattggaaaatgtagagaattcttgctccacccgagagctcagatgttgacatttctttacttttcccttccagggtagaggagtatgctgttataaataattaagccatggtgaggaccaataccaacctaaaaagtataaactaacatgcattgtctaaactgaaacagaaccatctttagatattaccttcgcagtattttgtaataaaactgaggagaagagctccttgcccagcctatgaatttcaaggacagtaaagaccaatagaataagataagtttgactagttaaaaattgaaaaagaaaaacaaaacatagagatgaagcaaaaaaaagttaaaaaagaagtacccattggccaacaacctttccctacaaggaagt

SEQ ID NO: 32611 - DNA, 1203 bp, Arabidopsis thaliana landsberg
cttttagccgactctgaatattattttgaatcaataaagttaactcgttcacatctttttttttttcgttcagatctatttattgtgtttgaagaaagccaagtctctcgaggctcatataacagccatatgtaaggttgatggtgtgagaaacgcaaacgttttttttttttttttcaaatgtattgtaattggtaaaagtcttaaatttcaatcttcaacatttatagacccaatgaagtgcagcacattttatcctgttggaacaattctggcgggacgactaaaatcgagatactcaacaaatccaaactaaaaacaaagcatactttcttagccaaacaaaatcatattttaataatttgagttaacgttattgttatgttactattttcggaaatccaatctgattaaatggatattattgaaagaaaaaaaaatttaaaacaaatatctgattttaatacaaatctaactttattgtacttggggcataattgtttttaaatcaatatagcagatttattttctaatatataaaattacatagacatatatatatatatatatatatatatatctaatcaaatgaaaatccaaccaaaccatattgtagttaaatctaatctcctaaatgtagttttgacaagggacatgatttggttatgtataagaaaacctagccgaaatgtagattatcatcatgaaaacatatactaccatagtatttttattttgcagaaactatatatacaaaagtagttgccaatgattatcgtttatcattctatttatagacggttgcgtacattttttgttactgtttttttgttgcacaacatataaacggttaacagttatttgtggagtacaactatatttggatagttctctatgatgtactgtatatgaatattcgatcgttatctgaaattgatggatgagaaaattaaccttaaaaaaaatcattacaagactcgttccattattttattttattttatgttattttgatagaaactcgttgtattattgctatctattactccattaacgaagctcaaccaccagacagctactgtgatagtcctcttaaattccaaattgatccaatttatcactttttgtaacctacggttcatttttttcaatgcgatattgatactaatttaattagtttttgattttatcaattattaaacg

SEQ ID NO: 32612 - DNA, 597 bp, Arabidopsis thaliana landsberg
cttttccgctcaagaccgcaaaatgaccaatgttagttccatatataatatatctaagatcagatatggatgagtttgcgtgtgtgtaatttgagtctccttcaattatcttaaggatttcatgtgatcattcaacaacccgctgattaattcgctccaacacaaatacatatttggaaatcaacctagcattttaggtaccctcacttcaagatcatttggtataaacgtaatatataatcattctttacggtccaaatattgcggacacattgttggttttcttccaaactttttccgacgtcttgtcctaatatattgattttgcccgacaaaaaaaggtgtatagagtaattaatcaatggaaacctaacatttaactttgaagttttgaaattccggtttgactgactaagtggtaggatagaaataacttgaaacaaaacaacaacataacttagaaagatttagattcatattctcataattagaagaaaaaaactagcttagactccgactatacatcgtcaaaagtacatggaataattgaacaataaggcttactagatatttaatattaataaaataaagaattga

SEQ ID NO: 32613 - DNA, 1515 bp, Arabidopsis thaliana landsberg
aacacaccgagagacttgataaagatctgggagaggctctacattagtgttagaggatcgtatggagctgaagcgggtatgtaaacgcagaagaaacttgtgaacacggtcatcttcacgttctttgtcaatatcagatgcggcttcacacttgcaaacacaaccagttctatagttgtctaactcttcccacagtttagtcaaccgcccatagtaggctagaacaggttgtccatcttgattgcaagcgacgatttcatcttttagaagtgtttttcgtaccccgttacctaccgaaaaacgtcgacgaaggttctcccatagttgtgctgcatcggaaacaaatgataccgtagaacgaataggtggatcaatggatgtgcggatccatccaacaatcatggagtttgtggcagtccacatacttagttcggggtccgcagctggttttgtgatggttccatctatgaagccaagcttctgtttggcacggagtgagttacggagttcttcagaccattcagagtagttgttttcttttaaaacaaccgaagagatcaaagcaccaggattatcggatgcattgagaagaatatggagttgatgacgtagatgtaggtgtagatgtagatgttgtggacgcagattcggtagacatcgtagagtagtgagtttaataggaatttgtaaaagaagaatagaaagatgagcaacggtggttacgaagaacaacggcggctctgtttttttttagaaaaagaaaagggaattaggtcacagaattttattgctctgataccatgaaatatgtcgtaaaagcttgtttattccaatagcacaagagaagtatttatacaagaggatttgtgatatacgaaataaggtcgtatcttactaaatataagattcacatatatcttagtctaatacatgacctgaaaaccaaaagagaaagagaattgttttttaacttgaaagaaaaggaaaggttaagctttggtgaagggaggaaaaggcagaatcgtcgaggtttggtagagatcagtttcgacctattaaatcgtgggcaaatgtatcaaaattttcagagattgttaataagacctacagttacatgtgactttttgcaaattttaatttgaattagaattctaagagcatccacattggccatacctttgtagatgcctaaaaaatataagtaagattaaatttaaagacatcttctattttgggggtccaaaatgtctttccaaagacactattacacttttaaagacactccatctcttttttctattatttttaatttaataacatcctcaaaatatcaccaatgaggatggtctaagagttgtatacctttttgttagctgttctgtttcagtcgcgatttagaccagcgtgtgtttaaaggaggatcacgatttaactttctgttggaacgttacgaattttggtggttactttaggacatcaaaaggaaggttttccggtgggtttggattttgaacg

SEQ ID NO: 32614 - DNA, 1593 bp, Arabidopsis thaliana landsberg
aaaacaaattcttttggacaagattttgttatcagagaagtcttgagttgccaggaaaacaataactgctaggaatgttgtggagaggtggcagagaagatgtctgtagcagactgctcgcatcatagcttgaaaacatgtcttgagagaagctaatgttaccgaccgcattaccataagggttctggttgaaatcagaagagaattcatgtggaaccgtgtttgagagattaggatgttgtagaccgttgttgttgttgatgatttcactcatcatacacatgttctgatcaaaaccatgaagctgatcctgttgctgcatcaagtgattattcaacccgtagttattcactgcagatgcttgtaccgaaagtaacggtgagtagtcttgtgtgtttgacacgccaggatgttcaaagttgttgttggtgatgttgtccgaacacatgttctgaccaaaaccatgctgcatcaagtgattctggtaattgatgagttgattggagtgtggagcagacagtgggagttgtgagagagtagcatctccatggttgtacataaacagtgagaacttgctaggattcaagtgttgggtctggttcagatacgatggtgttaaactctgatgcaccaagtttgtgttctgtagtttctgcgcctcaacaatacgaagcctttcttgcagagtagaaagagtccgttctaaggactgaatcaattgagagagttgttgaggagagtaatgatcaaagtttggataccaattcttcttcaaattcgtcttccccttgtccttgtccttctccttctcgaggaactcatgaagattgcggctcttcttgcgttttctggcctctttatacctcaaagccatgtctttcactgtctctctctccttaggccatgttctcagttcaccgtctggtccgtaatagatgacgcaaacctcaatagcacagagaatcgaaagctcttcagctttcttgaagatggttttaagtctatttgttaaacttgttgaattacgtgacgaagaagaagaagaagcttgcttcatcgtgactttgccttgattcggcaagaaactagggttttttccgagagagagaacacacgaagaagaagtattgtcgaattgagggtgaaacattgtgaactcaatatgtttatatagatgccttggtgcctacgggaacaagcatacgcgacgcgtcgttgttaatcgcgaggcgtgaagatctacgctcctacgattcgattcgatttccaatatctaatgtagatttccttaactaatgtctcgatggtagagaccaaaaaaaaggaaacttttaattagtttctcgatggtactttattttaggctgtacaaaattaagatctaattaaaaaaaatactatagatttgattgtgtaattattaattgtgcaacaaaaacttggaggaaaaaggaaaatctgtctctaagaaaaactcttaattgttaattaagggttttcaaaaaattgaagaaagatttcaactctgcattttatttctaggtttcttctatcttttttttaatatttttttttaaaattttttttacgtta

SEQ ID NO: 32615 - DNA, 1649 bp, Arabidopsis thaliana landsberg
tgatactactgatacactaattaacatatctttcacattttctatatatatgaacttccactattaaagctttctttcgtccatcgtcgtaattgcacacaaactatattcttaaatgtgatttgcctccctcatcgtcgtaattgccatatctaagctccacgtgcatatcaagctagcattagaacattgccacttttgtatttataatggagtgcaactacatcatcacggagcagctaaaagattctgattttagaacacatcagtttttagaaaaaaactaatttttcttaactttgatcattatagtctcgtgatatccaaacatggagagtggagagagtcatgaagattgacacaaacttacttgattgattctctatcagaagttggcaaggtaagcttggtgatgcagcgtatctccaagacgatcgtacgtttgagctagttagttgtttgagttatgtttctcatgggcttaatgttgatttgggctttaagtgattgtattagtttgcttattctttaagctaaggttttcattctcttctcttatttaaagagatgttattcattattgtaattagtttttgattattgaataaacgagttttaagagacttgtctaaagcctagagaggaggactctcaaccctaagagcttgtattcaagccctgcaaggaggacttgcaaaacctcgtcgatatctttaccgatctcaaccctatccctattgcttcttcgtcaagtttcgacgttctaagcaagatccgttcgttagtccgagttttcatagagatcttgtgttttcgtccgttatttagcttccgctctctatcaacaaatcgatatagaatatagttcggatgaagatgttttctaaagcatgtgattgtgctttgttttcaaaaagaaaagaaaaaaaagaagaagaagaagatacgtgtgtgttatgtggtgaggaagatgaccaattcgccatgatagcacgtgattcttctcatcatcggtcttcatcttcaatacgagcaagatgagaccacgaaaataattactaaaagtgacgagtccaacggatacgatgctgatccaaggatgactaacttattatgactactacacaagttttttcatgaataggaagtttgaaagacgatcaaaacttgtgatttgaaaaagataaagatacataactacgaaaatgtatttttcatgtggttcttcgttaactacgaatatgatgatgaccactttgactccacaaccgggtacaaatgtagaattgaaccctacgatcggatataaatatcaatgaccaaacgactcgatttgtagccgatttgatcctatgaccgggtataaacgtcgatgacccgattgctgagtataaagccgtattttaaaggcatgtccaatctcatacgtgttaccatgtatgagcttgccggaggatattgagatatagagaactggagatcgacggtaagatgataatatcaacaaatgataagaatatattattctagaagatggatgttaatattaaaaagttaggaaaattaacattatctttaaatataatgattatattcgcttttatctaagtttaggaaactgggatctctttcatcttaatatataaact

SEQ ID NO: 32616 - DNA, 3339 bp, Arabidopsis thaliana landsberg
ctgattatgataatatccatcgaatcgttcttgatctctaatatcatgtaacgtcactctccctagctcaatccatggctttaaaacctcgaacacttcctcatgaatccctccggcgtcgtgtagcacgaaatgtgaccgttcaccgaagaatctaacgtggtaagcgatccattctctaactcgttgcggacttaggttaccgtataaggacgatccgcaatagagataatcgtacttcttcgtcttcttcgtggagttatagagatcgaaatcgacggatttgggaggttcggttaggactgagattgaatcggtgagattgagagttggatctccggtggtggcgtggaggatgagagttccaccggagttttgtggattcacggcggagattgatgagaaagtacagttaacgacgactgttgtgtagatccgtccgtaaccccaatcggttaagattttaaacccggttgttgaaatcggatcttgagtcgggtctaatgagacccattcgcatctatacgaaggatgaccgtacacgtgtaatggttttgatgataatccgataacggcgaatgagttaacgccgcctctgtaagcactcattgagacgaagttataagctgctgagccgtagccagtaaacgtccgtttaataactccgttatccaaaactcgatctaggttcttctccggtgacggtgaggatgatgattcttctacggtggtggtggtgttgagagggacggcggaggagaagcgtgagatgcagaagcggaaatcggaagtggagagagagaatgaagaaggtatgaaaggtaagagagtagctaaagtgcagagaacaagtaacgccatgaaagtgagcttgagctcggcggagaagttccaaatgacgccgacgaggagttttttgtctttagtgttttgttctttctctttgaccatggccatggtgctgactctttcaccagtggatctctcgaaacagagaagaagatgaaaaaaacggaggaagaagaagaagaagaatagattcgctccgaagttgtgtgtctctcactttttcaacgagtcggcgagaagagtcgtttttaattcttctactagtctgtatttttttgagtgtgaacacacctgtttctttatttgttttgttattttttgacaacttaattatgttttttttaattactgtaatatgtaagttcaatgatatttccagaattaatatgctatttgagtacaacgaaaaaagatacttacaaaagacaactactgaatccattcatatgtagaattaccagacattcctatgaaaggagagattttagctaggagtgtttactttatttctatttttcttttgttctgtactattttaattcgactttcgtgtttgattaaatgaaaaaattctatgccaaatcttaatttcaatctctgttttttcatttttgatttaagtctctttttttattgaaaagtaaaaaaaaattctagtcatgtaaaataattatgtttcttcatttggctgaataataacacattccttatttctgtattattttgacttgcagacgtcaccagaggaaaccgtatagtgaagggaaggtcaggtcaaaaggagagtgtattttgtaaacaataaaagagagagagcaatttaagctattattgaagaccaaattatcaactttatgaaaaatgattaacagctattgattcctatgtttagtatataatcatagaatcagaatctaaattgttcatgataatttaataatatggaacaaccattatatttcgtatcgcaaagttgacatgtgctcaaagccaagtcatgtatcaatcaacaacagaaaattattagcagagcaaccactaaaaatcaaccacataatgaaaagcttatggtatacacagctaatttctcaaatgattgtgtctttttttttttttggcattgtcgtaacaatttaatgagtttgctttaaccatgtaagtttctaaatttgatggcgtataatttcgagttttctgagggtgacattgcaggtatagaaaatggatttacatggctttttaatatggttttctataatttgtttgttaatatcgttttgtatacttttttaaaattacgcagtttcgttttaagcttccaaaatctgtaagacacatggcgcagacgtgtctttttgcttggcttctctctaacgtttcaaactttcaattgccttttcttcaatttcttttaacataaaaatcaaattctttataatttttttttaacttttccaaagctcaaaacggtcgaaaaagtattttcttacatccatagcctccaaatactacaatgtttatccatatcaccaagaagaccaagattcattattatcctctttaatgtacttttagcttttgctcaacaaattgaatttactacaaagtaatggtttcacttcatagaagaataggagaataataaagtctttagaagtcggcataacacgtgaagacaaacaaaatgtttattatgtatattcaaatgtgacacattttcaaatcaatggagaaactagcaatgttttgtggtttcttgggtcctaagaatcaagaaaagccctcacaacgtcaacaattggagccatacatatcggacatttcttactgctccattgcaattcatgagcacatttcagacatgtgcacatatgtccacacctgttaaaaggaagaccaagaccgccagttattattttaagcgtttccgatttgaagttgcgatatatcaaacagaagtacctatacaggagcgaatcaacaggcatctcagagcaaacgcaacacttgcgtttcaaaggatctttcttcgggtctactcgttgttctgctgatgagtttaaaagattattaatcagtttgatttctttgtaacgaataaatctaaaatgtgtttaatgtgatgatgatgataaaactgaccagaacgagacagatcttgagttacagatttctggaaatgaagttgcatatcgatgcaagatttaacggtatttcgtagctcgagcatttctcgttgaagttgctccatttgttccttgagatcacttatcgtctgcatgtcctgtgtctaataagttaagatttcaggttacttcaccaacacgtaacctaaacttgacgaaaaaaaacaagaacaaaactcacagattgatttgtgggaactaaaggttcaggaagagacaaagacgttgtcggttcgttatccttgtcaatgtcctggtctttgaaattccacgacatcatggtactactccttgctgatgattg

SEQ ID NO: 32617 - DNA, 740 bp, Arabidopsis thaliana landsberg
gacacccattttgtcccaaaagagcctaaaaccaacttatttttgcttagaagcagtcaatagcttcggtggggtttctatggtcaaaatgtgtcacaatccaatgcatttgacaaagaataagagttaaagattgactaggagtgtttagacaacacttatacccattttgtcccaaaagaggctaaaaccaacaaacaattgcttagaagcacattgataataggtttttagtcaattatactaaaacaccaatcatgtcgttgtagtattataggttgacaatccaaatgggtgtgatgctaacaatcaagatgtgattagaagtcactaaatcaagccaagcaataacaggttgtggtgtgttctagcagtcctaagtgaacatgcagaaattagaaatatcaagcagaaacagtaaaacactcgaccaacacatctctttgcagagcactgggtgaggtcgagtgacaggtcgagtaacagacagaaagtataacacagatactcgactgcacagtctgttgccagacaactgtgtggtcgagtatgaggtcgagtaacatgaaagaactgtagaaactaagcgacagttaaaaggatgcagtaaacaacagtagagtgaacaaagagttcaatcagataaagaattcccgaggatggggtaattgagtagtttcgattcctcagtttacaggtgattgacatgctcaataaattaaccctagacaacagggagt

SEQ ID NO: 32618 - DNA, 1685 bp, Arabidopsis thaliana landsberg
tcaatcggatccttccccagtgcttctgaagctgagaatccataaagcttctccgtcattgatttcctggaattttgaatctgaatatcaggtgggacatatcagctactataaagacatacacattacaacgaaactataggaatcaaaatccacaatcccacaaatgttctaactagccctcaccaaaagataatgcggccatttagatcgaagacatgaacagtttgagccatagactaggaaatattcatatactcggtatcggcgaacttgcctgccgattgcccctcgcctacggcgccggaaacttttgcatggttgttcttacgcaacggagaagagtgacgaaacgaagccgcaccggtttttctccacatcggagttccgtcgttactgtttctcctcacaggacgttgcggcgatgctgaatgcgaacgctgcttcatctccgccgatactttaagtctcgacatctctcgttttagatgctcttggctttcttctaactctcgtatcttctttagaagctcctccgctggtggagtcgtcttctccattgccagaaaaacgcagtcaaatcaaatcaacggagatcaaatctgagtttaaatcggagaagctgaatcaaggtgaaaatggtggagaagcttgagagatggattaaggaagaagaaacagaatctggagagagtcaacaaagaaggaaaactaatttgcttatctttctttgttttgattcctttttttctggttttaggtttctcagtttgtccttacttttttctttaatttttcaatttctgttttttgcttcttatagagtttttctttttcttcttcctaattcatgaataacgattaaagttgtttattatagtggggagattatgtaactaaataatctagattttttctaatttcaaacaaaagtgttttggattagtggtgtgataaatggttttgttctaattacttaagtttggctgcttgtttggtataagctttttttttttttttggtttttttcctctgaaagaccattaaaaaagaaaaagtgaagactttataaataaatttttaaaaaacagataagatggaaatataaattgctttattttagtcatttaggcagcctatattttgacccaaaataatgccttaatttttagataattcagtataataaattattaaaatatttataaagaagataaattgtaaaaaaatggtgataaacaaacacaaaaatttcaacaaactatttattaaaaaaaatgtattttatactactaggagactaacaaaattctctaatcgaattaaaaataactccaaacacatattacgctcaataaattagaaatctcatatgtgatttagtgtagtgatatactttaaggagctatccttaaatacaagaccccacgcaattaattttgcatgcaacccatttccattaattactcaagaaaaaaaaagttatctttttttggcaagctctcaaatttaaagtctcccattggttggattctttgtttgtttctattatgaccgtacaaaactacactacaaaatcatcattgatgtgaaactttttttgtcgttcatgttatttatttattttttttcttgttttctttttttatcgtctgaaagtttattataaaaattctgatgaaata

SEQ ID NO: 32619 - DNA, 2308 bp, Arabidopsis thaliana landsberg
cttccctttatctttttttccgcctttgagtggataataattttggaggaggcgggagcttttaagaagagagacccatattcaaaccgtgtggggatatataatattgtcagaactagccacatacatccctgcttgttctcatattcaaagagatgaggcatgactcatgtatgtttggggctatgcgatatgcagtattgatgccaatttttgtcaaaagagtttttttttgtgtgttttattaaaaaaaaatattccaaataaaattaaacgccaaaatttgaaaaactagctgtttgttttctgtttatctttgattttattaacttaactattcaaccactaaaattaaaaatgctggattgtttgttgttttaaaccagcttaatgaatataaaagcacgcctattttgtttgattggtgatcgatctaaatatctaatagtctagtcatcccatccaatttggattcgaaatcctatctttggttagaacgatcaaattatgccaatttgtttgttaaacatatatatttattagaagactaccatttcattttaatttagagaagtaaccaatggtttcgcttatgtcaaagtctttgattcaaggatcgataaaatttgaataagaaaatgttgtaacgaacaaatgaacattcaatgatccatcaataaatgttttatgtatatatatatatatatatatatattctatatttgaataaaaccaatcaataattctactaatgctccctacagaaaaaccacacgttaaaaacccttaaaatatatcgacacgattgtgagaaaaagactagcaaagagacaatgcataagctaagaaggcctaagggatgatgattaacatgggcctctttttgtacacgttttttctttcctttccttctttgcgttcacgtttcttggtatctcttacagtctccacgttgaagtgtaagcattacagagctctcttgctagagacaacgatgatcttatacctgttacgttcatgtgccaaaattaggtcttcattttctattggtacatgtcagtttgggccatccggtcactattatacacatatggtctatattttttaaaaaacttcttacttgccaaataattggcccactaaaaaatagtcggaaattacaataaaccggacccttaaaatcaataggaaaactctggatcttggcttcaactactattgttgtaaactaatgttttttcgcctccaaatttcaatctcattttcctaggaaatacatttattaacaaatttgcgaatatgttaaagattttgaatactagtagccaaaagaaaaaaaaaaagaaaaaactgttgttcatggaggcttatttaatttctagaaacgaagtttctgttcgatagaggttcatctcgatcgatcatcaaggaatcgacttggagaaaatagacaagaaaaggtttcagtccactacgaaaagcatacttaagaaaatggaagcgtgggccgtatatgggccttaaaacaattagatacaggccagctacgtctctaagttgagtagtatttgcgttgactgagccatgtcacgtaggacatcacctgtgggtcgccaacgattggctatatccaccagatcaataatgcaatgcatgaattttacttgaatcgtcgcaatgtaacatatcaaactatcaatgatctgattcgacccactcgctcccttatatggtgataaagtcaagaaaatttagccacatctatttattgcttttgtccgtgctaggcttataccttcttaatctgagaaacttcccacatggccatcaaaacttaatgaggaatcatatcttgtctctggcgttcaaacaaaacaccctaataattttttttttcattctgaagaaaagttttatcattgaagttcaacatcctcagacaatctgcattgaatttatcttgacttgtcgcttatgccaagttgggttgtacgaagttgacaaaaaaaataaaaaaatctgtatgtgattttcataatgtgtattataatgattgctttatttagtaaagagtcacaaaactagaaagaaaaaaggtttcattcgatgagagaaattcattctctgttttcgttatctctgttcttaatttcatcttctctctctgttgctttggattataatgtcatcactccaaaagaattccttaaggatggagatacccttagttctccagaccaggttttccaacttgggttctttagtcttgaccaagaagagcaacctcaacatcggtttcttggcttgt

SEQ ID NO: 32620 - DNA, 781 bp, Arabidopsis thaliana landsberg
gtaaaattgtctaaaatatgtcattgttggtttccttattttccctggaaatttactaacaccaggttctttggtaaatatatggacgcaaatttaatcaaaaaatacaaagggaaggaggagcgagtagataaactcattcacatatattctctgtttgaataaactaatttaaatatgtatatatttacatatattacacaaaatgatgttaaagagtaaatcaccaaacttgctgttagtcaaatagataatagatgggcgtccataatatattagattacgttacactcaatttacaacgtgtgaaaaattaattgaacaatgaacatcataaatgaacagttaatttaaagtattatcaaaaaccaaataataccatttaactatttgtagaaaattgaacagtagcttccaattattttttcagctttttatacaaattttatttggtgttcatgttttaatgccctaactgagttttatactttggggaataccctcttctaatatatatatagcttgtaatatagtttttcaatttaattaacattaggtaaataaaaaatttgggagagaaaggaacattcaagaagattttttttttattagaagtgtttttattttaggaccttttttcttcactacccactcttaatttcttttctagtttgtttgtcgatagatttccccccccccccatattttatctcttgtattttttttttttctggtcctttttttttctcccccttctcacaaaaaaaaaataataaaaaaa

SEQ ID NO: 32621 - DNA, 4829 bp, Arabidopsis thaliana landsberg
actgatgtaagtctccaacagctgacgttgacttttatgcttatagtttagcatgtaagccaaagcctgatattcggttgcagtatatatttcttgacctatttggctttagcaatggtattgatgttgttattcacatttgttgcagttgctgttgaattggctaaagttgcgagtgatgtgaaagctggagatattaaggtcctctttgtcaagcctcttgtttactggactcggtttttcatcattgccactgcgttttcccgccctcaaattgatgcaatagggtacagatttatttagacttgctcatatattccactttggaaaacatcaagtttactttctcttcatgaactgcgaatgcagatccaggatgagagacctggctgagaagaagtacggaaaagttgctaatggagatgtaaagccaaattcgtggacgttgttagattttggtgagtttcttcttgcgttgttggcatgcctctagttcaatgtgtcatgtgagggtaaaataatgacagttttatgttgattgatatacttttaggtgatgtggtgatccatttattcttacctccgcaaaggacattctataacttggaagacttttacgggaatgctatgcaaattgaacttccctttgaggatcagtcacaaccaaggaactgatatgatgagacagtttgttccaaaaaaacaaaaagtaacagtttggaagaagaaagtctgttgattctcttcactggctagagtcatgccacatgaaggctgtagatttttttgtttgtttgtccaggcaatgcctgattggttacactacacagctcttggcgtgaggggttgatgggccaacaatatcaggagatctcagacatgtttctagattgtttgttgggtagagttagacccaaactgtgttccggctttatgtaatgtatgctttaggatgattcttcatgttatggaacacacactgaccaagactctaatctaatttgctttcaacagcaacaaaattcatgcaccaaaagaactcaaatcttattcatcaaaatcactgactggccatatgagatggtttttgtgcatagatgagaatcctggaacatgctatacttgtatattatacaaaggcacaatgtacaatgagtcagataataagagtcactcatacagctctatcttgtctccctgttccatagatcatacacagcatgtgcaaccactgacactgaaacctgactaagagtcaaggcaaccaagagaccaaaactggaagactcattttcgcatctcctgcaatcaaagaaatgaactggtaacctcgggatcaagtctcagcgaaaggaaaaggagtgttattgggtgaagaatggttacagttagtcacatgttggtttccctgagcggtttcagacagactgaactccatgtcatgtgtttcagaccatccaggctcatatgtctcaaggaaaccgattttcgctttattgggtaggtcgtgaggatgaacaaatggaactccgtgcggccacccgatctcccttcttatattagcacaagggctgttcattacattgtggttattctcgcactccttgagattgcagaatcttagtttgattccttttttatctgcaatctcctgaactcgttccttgagaactctctgtgcttctaacctcagccgttttgaaggtggtagtggtttgcatctagaatcactcttcctccgttttttcagctgtttcattgatcctgcaccaaaggaaggatctactgttaatcaaaacttctgagtaagttaacaccacttgaactatgaactccgatattcttcaatctgaatcctttctaaatgctatgaaagaacaaagatggaaattaggcgttaacactgataaaagtaaacttctataccatcctgggattgagggacgatgaagctttgcaaagtctgtctgttaaaaagttcatcatttgagtgagatctctgcatgaagtcatcaacagaacgggggagctgaaactgagcttcaacaccatgacctgttgctctcatctccgagcaactcagattggtcattgattttggcatgagtttgaaggccaaggagaacctcccttctatacttccttgcagactgttcaaatcggttctgtgcactgcgggactcacataccccgctgtagcctggtaaagagctagccccgggtacacaacagcctcttgaggaccaagatccacatcaactaaaatccattgcccatgcatgtccctgatgtgcaaccccgccttatctgatttcacaaatgagatcagactcttgtcaagttggtgatcatggtctgaatacaggataagctgctcgtcttctgttaagctatggtgctgtgctccatgaaaggatggcctagcataacagcaaacagataacacagaagacgatacctcacaatttctcaaagggacattatcaagaatctcagtaaatggacagcttctcaagttcaaatagaaaccaatggcatcaagaactacacgagcagcttttcctagtaaagcaaagatatcaggcaaaccagcaggagggaactccatagaattgcttggctcggtcggagtcaaaccaggtctatactcgtaactctcttgccacgactgaggatctgcatagtagccagaagtcttgcaccattcttgtgaatcatttgtgtggatcatattattagtggctgaatatgaatctctctggtgaaaatagagccgagcagaatcaagaccggatctaaggagggctccatcgctagcaggaaactgaatgatggctgcagagtactgtgccagagattgagacaatgtagtcaccgctaacttgtaagaatcagaaggtagaccttctctgggaactaaatcacaaaccttgacacgacccaatgtaggcattccatttcctgccatcatcaaactatacaccaaaatccgaaaaaacacctaaaacaataagcaattggaacacaagcttaaaggttgaacatttttgaagatggaagcgtatctaagcagaagaactcatgtgactcttctgcaaagtctgattgtccaatagacaaattggtaatctctgagggagcgatgtagcatcaacaaggagattcactcaggaaggaaatcttgtaacgcctaactcatatcaatcattttcacagcaaacagagaaattgaagaatttgcatcagacttgcagacaccagaatcagaaccctctttgctgcaagatacccggaaaaaaagacagaaactttcgagcacgagacgataagtaagacagaaaccctagaggcgaatcagcaagaaatgaaagaggaatcaaaattgaccgtcgcctaatagaccaaagaaaggtgtctcctttcggacaagtatgcttcaccagatttaagcgcaggagaatgacaaaagtaaaagcaaaagattaaccaatctctctctgtgggatttgatttgtcaggagagttttaaaaaaaaaaaatcaaagctttcatgaatctgcgactctgttcttcaatttcaaaaactatatgaagccagtcaagcattattttatttcttacataacaatttttatctcaactttgataacttgtacatttttggacatcaatgatacaatgatgctgagatatgggattggacaaacagaataaacgagaatggtaaccgcatccaactgaggctaaatttggctatgttcaagttcgattgccatgagacaaatccaaaccaaagctctcaatggaagtgttggcaaagagcaagacaaactttcaagttctttagcatttttatctattcggcgggtctcattctttcgttggtcacctgagtgcgtctgcgtttagctccatcgtctcctaaacgtagtccaacacataaatccccatcgcagctaccatttgtaaagccggcaacaagatcctctctagcagtctcaggccaagcagaagcggaacattgaccgctgaaggtgggcatgaactggtgttcgacacttggagcacctccttttgtttctattctctcttcaagatcaatatgttggacctgaagaggtcctaatgatgcctctaacttttcttctgggcttctcttctctttcttgagattcacatacggaggtgatgagtctgcaaccattgagctcatccccgttgttgaggccgctctttgttcttgcactgccgctaaacaagtacaacaacaacaacaacatgtataagtcttgttcttttatatgctcaagtgtctgaacacctaaaggaaaaactgagtgaattattaccttttaacccttcatcggtggtgatgagatcaagctggagatgtgtaagaagccttcccagatctacaccagtggtccagctctctggacactcccctaccttcagtttcagcctcccgcggcttccagtgcctccccatatgatcccaatgggtcttgccttctcctctcctttcatcactatgaggcttgcgctgtctccctcaagatcaaacggactgcgatggttctccccgacaacaagaaaatcagtgaggaagcagactcctctctcgtcattgtactccagtgcataagccagcacagttcctgtagtcaagccagagcttctcccgactttcaccacctgttcacccactaaactaccaactggagactgcagctctatggctttgacctctccaatctctcctactccacctttgacagacgttgtgactcgtgacaggtcatagtcgtctgcaaggggatgaatgcacc

SEQ ID NO: 32622 - DNA, 2218 bp, Arabidopsis thaliana landsberg
  unsure (1)..(2218): unsure at all n locations
agggcgacattatgattatttggtataacattatgaacatgatttgtggcatgacattcgctggtctcaccttctaaatattctctaattttctagtgtatatttttaggaaaaaattaaagctgtcaacatccaaatttaaagaaaagaaacaaaacatacacacacaagcttgtgataaaattgtaactctcccttggtcctatcgcccccattctcctacagcttcggtccagtcaattttggcttttttctcaacttgtatttgttatatagaaaagtgctctcttttcttttttaattgagaacaccattacatcgtaaacacaaggtttgttgtatatttatcggaaactggtatgtttgaaagataaagtatgcatataaacactttgcggtgatattttattcacttatataatctttttcattttttgagattagtagttagtaccttaacgacttaaaacattgcaaattgcatttgctatagttcagccaagaaagctatccgttttttttttttttttttttcaacaaactttgttttcatttaatcactcaaacttagtacaaggtttaggagaatatcattctcagagtttagtacaacaaagataaaaacaataaagataaaagtacaatagtctgatgataaaaccatgctagctcggagacaagagttgtagaacacaatgccacatgcgagaagaaggtaaatcggagacacaaccacgatcgatccgggaagtggaagattggtcattgtcacaagacataatgacgttgagaaggagcaagggtctctagtcaaactcaaaaaaatcgctgaaacaataaccagggttcgcaagagatatgtatgaaactgcaacaaaacaggtggattctctctcgcataatgtccttgactatggagattaagaatgtcacacaaagttagtctttggtttaacacaagtagaagattaccagacctgagcttcaaggttttcatgagcataaggagtttatcactgaaattgatagatttcacaagagagaactcggtgaacaaaggagacggagattggaaggtgagaaagctgtggtaatcaccgtaccnnnnnnnnnnnnnnnnnnnnnnnnnnnnnnnnnnnnnnnnnnnnnnnnnnnnnnnnnnngatctagaaaaaagagtagaatccctaggtgactctaataaccaggttctaaaaaaaagcttgtacaagcagagcaacgatgattgattatggattaattgacatctaacaattattttcagcaatcgagacgaacgttggcagagaaagaacaggggaaagtttagccaaaacctgggcctaatggataaaggaggtgggccgtcacttatgacaatgggccaagagagaaatgggctgaaatgggggaggcccaataacaggaaccctagtgtctcagtggctgcaatgaagagttggtgactgtggcggcaggacttcggcgagttgaagatcagagtggaatgaagctttaccggatgttgtggcacaaaagtggtccagagactcaagatagacgagtgacggtatcatttgggttgaggaactgcagatttggaagtgagagatctcgttagcactagggcggggtaaaaatcgtcgacagtggccattggagtagatggacagagtgaagcaatgttgaagggtatggttaagtgatctccgagaatcaaagatggatttaatggagggttgctgtggtggtcgggaagatggagagaaaagcttaaaaaggttacaaaagtgatgcaaagataatagagattgaagcaatttgggatcttctgacgccggtgagcaagagctccaccgacgtcggaaagtttgattgggaagttgtcctcgaaaatggtacccgagagagaaaacgcatcaagaattgttttctttaattcttatccttgctatccgttttcctatgattatgctatttttagataattgaactccacatttggtttaacccaatagttagaaggataaacacttggtttgtcatcggtgattattacataaatggtatatttgcaggattgaaaaaaagaaagacaactaaagtaaatttttgtttgctcaccaacaagatattcaacatttgtgttgttgtagatcacaccgagtataagcagcacactaggttatgagcgtgttggctagcgtatccagtgcca

SEQ ID NO: 32623 - DNA, 662 bp, Arabidopsis thaliana landsberg
tttctatatgctttgttgtttgcatatataattatgttaggtttttattttaatttgacttctttaatttatttttggtaagatttgtatctgtatatctacgacattaacgtgaacgtaaacgtaaacatgaaagttaatccagtttctctttacacaaatcatagtaatgctttctcaaataaaagattttacaaaatcaactatgacggatcaaatacgcaaatagttatgtgagtacaacagagatcatatcagttgtattttaaaaagagttgtaattgtagcttgaacaaaaatttcatataaaaattagtcttaaaatatatatttaagatctatgattattaatttataacattattggaactataattttacataggaatttcaaaaaaattattatcttattattttattgattttggttaatttttacattggcacaacttggaaccggcaaaatttattaattttaccgtgtttattaatttattaagtattaatttatagagtttctactgtaatagtaatatccacttttatagttagatagtgaaatagttaaagaattacttatgccgaaagaaacagattaaagaaactgaacattatgaaaagattaagaaacaaatattttgtttgagaaaaagttaagaaac

SEQ ID NO: 32624 - DNA, 1086 bp, Arabidopsis thaliana landsberg
ttggaaaatgggatgagacactatggtgtaggagatgcaagtcctttatgcaaaacaacacacacacgccccccccctccccgtcgtgtcttgccgagccgagccgggcttggacttgggcttggccttgggctcttgggaaatgtgacctttggcccacaaaaaatgttctttttggggaaaatacttatgaggctttgttgcattatttgtaatatttgcaacatagtttttggcccaaaacgaaagcccatatcgtttgcataattaaggtatattcggaatcttgaaagcatatccaaatattccttattcgaatttattcgtatcttaattccttaaacggttgtgataatggttccgctaatcacgcccacgtctttgacttgcgcatcactccgaatcacgcgatctctgcttttgatttatagatcgcatttcctcacctctctcctataaaaggaacacatcttcctctcattgtactcactcgtttttttgctaaaagctaaaacgaaactctctccctctctccctttcttctcaaaataagtcaagagtaaatcgtttatttcatgtttgcatattccgctatcgaatgttgcgataccggttttatagtaattgtattctgcgatccactgctcataaaaccgtcacactgtgggagctagtttgaattacggaaagagatcaaatctcgggttcactcgttttcgaaaaccgtctttcctaatcgttttataaagatttttaatttattgcaaatcaggatttcgcggtcctacaatccattcaatcttaataggaaggattaaaaaaagggaaaaatgtcaaaaaaatcgcgaacttttaatttttgggaaaaaaaagaatgaactttcgaattgtcaattaaataccaaagttattgttgactttaaaattaattagataacttttgtcgattttgacaatttgggcacgacgttaagtcaactgacggaaaaaaaattaacagagttaagtcttctgttataaattctgctaacttatgaaacaacgttgtttttgaatttaaattttttattacaagttcaggaattg

SEQ ID NO: 32625 - DNA, 1088 bp, Arabidopsis thaliana landsberg
gatttaacgggtgcttctgtgagaacctttttaccaaacattaattcccttaaaatgttgatttgatgaacttgccagttgtgcaatgaggaaagcaatcatcagcaatgctccaggacgttcaacaaaagaccaactccttgatcttgtgacgaagatcagagcttgactaatgatactaacttgtaagtacaccgcacccattagctcgtggttattgtccctaatggacctcacaccgaatgtgtcctgtgaatccaatgtgaaatttactttacaactctgaacaagaacctaagaaaaaacttctgtaaaagagaaattaattagctcaattgtatgtaccgagaaaaagtcagtcttgtgcgccgcccagaagaaaataacactcataatggcttggtagcctcccagcacaattccagtggcgaaaatttctttgagcttccagctatcaggtgtgggagatggcttgactctgtcctttgagattgtcatgatagtacctaaaaggtagtaacacataataccataagatatagctgataacgagtgaggacgctgtctagaaaagtaggatgttctttgctcaccatcattaaggatggcaataatcacaaccatgaacgctgagaagtcaaattcccatatcaaagcaataagcatgaaaccaaactgcaagagttacaacgcaatatgatcaggatacaaaaagtaaaatcatgctaaacaagtgatagatttgtaaaacgggtttctacttaccacaatacggattgtgattgagactgcataaatctgtaacaagagagaaaaatagaccagagtaattagtttcaattgcaagcaagcaagtggttggaataaattaaggatgaaaaataggagaagacgcacagtatagttcttcattctctggaaaatagctctgctggtgagaacagcactgataataacgctgagtccaggctcagtgagcacgatatctgaagcaccacgagcagcatctgtagcatcagcaacagcaataccgatatcagctttctttagagcaggggcatcattgacaccatcaccagtcattccaa

SEQ ID NO: 32626 - DNA, 8103 bp, Arabidopsis thaliana landsberg
  unsure (1)..(8103): unsure at all n locations
aacaggtttggggtgttctaggagtcctaagtgaacatgcaggaaacagaaattcaagcagtaaaaacactcgaccaacccaacttgttgccaaacactgggtgtggtcgagtaacagacaaaagatgtaacagggttactcgaaagcacaatatgttgccagataaccgagtggtcgagtatcaggtcgagtaacatgagagaaatgcaaaaactaagcaataggtaacaagatgaagtaatcaacagcagagtaaacaaaaaaatcaatcagataaagaattcatgcggatggggtaattgagtagtttggtttcctcagtttacagatgattgacatactcaataaattatcgatagaaaacaagttcgataaccaaatctaagtgccaccgcaatagagaccctcaagttaaaccagtcctagactcaataaccattgacgagagctaacttaacaggcattaacgaatcaacaagttaaagccaaaacgctccatgtaaccaataccttggtaaagagccacaaatctctggaattagtgattcagacatctcatcgaacacctttcgggtgcggatatgtctgggcttaaattccagttgatcaaaaaagcaataggcattaagaacaactaatccagagaagggaactataaatcaaactcaaccacctaacatacagagaattctaaagtactccaacccatcttcagaaacctattcactactcagacatcattgtagagaacataaacgttgaacagaataaaaacatgataacaacagtttaacagcaagatgctaacaggatgaacaacagtaaacgaaatcaagaacaaatactgaatactgaatactgaatactgaatagataaagagaaatccaaattacaaaaggtcaagaacacagtgtctacggaataaaactagataaaaacttgttctcgaaaatgtaaagtacaagctacttatagcaaaatattctgaaattctaatactcaaaacgacgcagtattgggacggattaagaactgtactcaaccaaggtggtcgcgtgagaggtcgagtgataagctggaatcttcttttcttccttgtgctcgagtgtctggttgagtgcggaatggagaagactctgaagctcgacatctagtatgtagtcgagtggtggtgatggagatactcgacttccaggtaaagtgacgtgatcgagtgatggtcaggtggtggaggtgaagacactcgacctcggggtcgaatgatgtgatcgagtggcggtgaggtggtggaatgatgaaggcctctactcgaccagagggtcgagtggtctgttgaggttgtgaagcgtctactcgacctgggggtcgagtggtttggtatgataaggtccgcttcttctaattagctcgtcaacagctccgtatcacctgaaaacaacacaaatatgcaacatgcatgcaaaactatcttaaacatgcaaagtgatgacaaatgatgagaaatagtataaaacagtgatgatatgatgctaaagtgatgacaaatggatgctcaaaacatgcaaaatacacacttatcagtagcctccattaaactgttgtttagggacataaccttggttgtgttgaacaaaaggcttagactgattatgttgtggtggatacacttgatcttgggggttagctacattagtgcttctgtaggagaggtttgggttgggcttgtagttgttgtagcccttgttgaaccctcctttgttctgaatgtaacacagctagctcttcagtttgatcattttcccttcttgcatttggaagtgctcttcatcagtgatgtagtgtatctgcttttgttgagccaacaacagcttgtctagcttttcatccagagccttgatatctttgctctatttatcctcagttcctccagttcctctcattgagcgatcatagtcttcattgtagcatccatcagattgtgctagatttttgaccaactcacatccttctgctacatccttgttcaggaagtttccatttgaggcagtgtcgagtagtattctgatctttggtaaagctcctctttagactatgctcaataatgaagctttcttgaaactgtgatggggacactgagtggtgtagcttttaatcctctctcaagcttcacagaaagtttcattgtttttctgtgtgaagcctgagatctcgttcctcaatttagatgtgcgagcattaaagaagaacttggcaagaaaagctttcgtacaatcatcccaggaggtgatgaagtctgggggcaaagtcttctcccagttgtatgccttgtctcccaaagagaagggaaatagtctgagcttaaacatatcttcagtgacaccattgatcttggtaaggccagagagcctatcaaagctatcaagatggtctaggggatcttccataggtagaccatgaaacttgtttccttgtatcattgagatgagaccactcttgatctcaaaattgttgttctgaactggtggaggcagtatcccttgtctttggtgatgattccttggggcatcaccagcactaatatttcttggttgatcaacattaggtgggtcttgagcatcaactggtctgttctcttgatccatagcagctggtctttgctgatcacaggctgcctttgctttgatttcttgtaactcacgagctattctatcaattctgtctctgaaggtagtaggtgtgcagaacctttggatcgagtttgcatgcacaaagattagtacctataccacaaaaacaagcagacgaaaatatgagttagtaacttgataaatgtaaaagaacttgatcttaactttttcaaatatcttgaatgtaacaatgcaacaatgaattggaaatgatgccaaattgataagtaggtttttagacctacttgtgtgctgaatgtgaggttcagttcaattctccttaaacactaagatgtcgatgcatgtatagggggtgtcaatccagtcaagatgtgtacagaagctactaagtcaagccagattatagtgatggtgggtttctagtaacaatcctaggtgaggattcaaacaacaaaaaaagaacttttaaaagccctactcgatcattgggtcgagtagaaccaacagtcagaactaaaatgcaatcaacaggggatacaaataaaaggtaaataaaagtgcaatcaaggggtgaatacaaataaatctaagaagaatagaagtcctaaggatggattcattgataagggcaactctagggttcatcaggaggctaacaggtgaaaggtagataccctagacgatagattcaaaaatcgggtcaatccactgtcatgacagagaccctcataactctaccactttctaatctcacctctcgttgatgaaacatagcagagaagggtttaagcaacaatctaccaaagtaaataagcggactagccaatgtcttggtcaagtctacaaatctctggaattcgtagatcagacatccatttgaacgtcttttggacgctgaacgtctatgatcgaatctcgacattagccagcgaaacccgcataggggccaagcgaatccaggagggttttaacctaatcttaaccacctggctaacctagagattgccctaatctaatccatcattaagaaccctaatcactactcaagcaacattctcaaaaacacgaacccataaattactgaaatcatatcaaaatgtagatctaaacaagctaaacaactttacttaaacaactaaatgcaaaaatgaaatagattaagagtaattaagttttgaagattcataaacacaaagaaaaactaaaggataaaagctggatcctaaggacaaaccccaaagtgatctatttatactaaaatgttgaaaaccctagattcactagaggactagagacttgaggcggtttgggcaaatgctcgatcttggggatcgagtaatgagggtgctgcaaagtcggcgcctttgtgtctatgctctgagtgatcaatttgatcgagtagatgcttcttcctctcctatccgtatgctcaaatgtctggttgagtggggaatgaggaggatccgaagacgctttgatagatcaacaagtcttgtagagtaggtcgccttaggtcaagtaagtgggtcgagtagaggatcgagtaggaggggcgagtagatcgatctgctgcttcttctgaggctgccttgatcgagtaagtgggtcgagtgaattgctgcctcctctgtggctgcctggattgagttaactggtcgagtagaatcctctgctgcttccctactggttggatagagtagagggccaagtagaatccttgtaagctccttctgcacctgaaaacacaccaaaacatacaatatgtatgcaagatgatcctaaatgcctaagtgtgcaaaataagctaaatgtgatgcaaaatgatatgaaacaatgagtgatcactaagcgaaatgatgataaatacatgcctaaaatgagtaaaatacagtgttatcacaccactcttttagctcctcaataaggggttggaggaagacatcaagactagctcgaggatgatttggcccataatttagaattgtaagaaataagtactttgtattcatgcacataccagggggtaaattatatagagtcaggatcacatgccacaaaaaatgatttcgcgacatgccaaatggattgaatccatcggtacataatccgagataaacgttacggggttcttcggcaaacatgggatgtagctcttgataatatctccactccgccgcatctgaaggatgattcatttcttcttcttttgattggtgctcggcatgccaacgcattacagctgctgtcttgtggctcaaatacattctcttcaatcggtcaccaataggtagataccacatacgactatatggcactttggttcttcgacagtagtcatccataggcttccatctttgagcactacaaaaccgacattgatcttccttttcgtcttctttctagaaaagcatacaattgttaatacaaacatcgattgtataataaggaaggcctaaactgcgcatcaatttttctgtcttgtaatgcgaatcagtagcttggtttccttctagtaaaaaatctgacaacatttgacataccgaatccacacatctttcactcatattatgatccgccttgttctgcatgactcaagctgctaactataattgtgattggccttcacaacaaccatcgtacaaaggattttgggcaccttctaacaagtcgtagaatttcttagaatggttacgtacctgatcctccacattctgataagtaccatcttgatgatagttatcatcaaaccccacgttataacgaaatgcatcgttcatcatatccacatatggatcttctacaacattacccacacttttataattctctcttagatacgtactatcaacataattactcggttctacattcatgttgaaatcttctccatgcttataccaaacataataatcaggcataaatccttgactaaacaaatgactactaactcttctacccgagatgatgtgtttttcattcttgcatacactacaaggacaatgaaatttacctcgactactctgtactataggctgactattagcgaatgtcatgaactcctctactcttgcaacgtattcggttgacaaatttcccgttacttcatcaaatctcttgtacatccaatctcgatagaaaccgccaccaccgccattattgaagtttcccgccattataccataaactaaacttatatttttttcttcgaaatcgttttttttttcttttgatgttgttttgatttgttggtgaatgagaatgaagagtgtcgtgcattatatagaggatgttgacgactattnnnnnnnnnnnnnnnnnnnnnnntacaaaattaggtatacctacccaacaacgcgaaaaacattttccaaccgtattatacgataattatgcgactatttgacgacaaacaaaaggtagtcgtattattgtcgccttttttgcgacttaatattaaagtcagaagtgtagtcgtcaatgtacgtacgactactttacgactacttatttccttcagtaatgtcgtcgtcaaatagtcgtatttggacgaccattgaccgactaatttttgtagtcgctaaaatacgactacggaatgaccaatttgtatgttgccgtaacgtcgtccatcagtcgtaaagtagttgcacaaaaggacgactacattgttagtcgcctttcgtagtcgtcgtttgcctgttttcttgtagtgtaatatttcacaaaccggacacaattcaagatgcacttttccgagcaaacaattggatggaagtagaagacaaaaaagaaatctttggaaaaaggaataagccagcaaaaccggcggtcactttccctactaagaaattcgagcccagggaaaactaagggccaaggaagtttgggtcgcaacctttcaataacaatgtcgggaagcagttccaaggaaaaggaaagtcaaacacttgggtctgagacgaaagtctatactgcaacatgcatagggtaacatgacatctaaccaaagattgtagtgtccttaaaaggcatctcgcagagctatgggccagtggagatctctccagttcaaaactcgaaaaggccaagattgaccaacaaagaagaaccaaggagttcgaaggggaagatcaatgtgatccttggaggctccaaactttgccgagattctattagtgctatttaaaagcataggcaaaatgttctactgaaatcaagcttgagagaagaagttaattaccaaggcacttcaatatcatttgacgaggaagaaacgcggcacctcgaaagatctcatgatgatgctctagtcattacgctcgacgtggctaactttgaagtgtcaagaattctcgtcgatacgggtagttcggttgatttaatctttctaggtacattggaaagaatgagaattagtcgggcaaacatagtgggacctccatctcctttggtggttttcacgagcgaatcagccatgtctcttggaacaatcaagctacgagttctagctggaaagatgtcgaaaattgtggactttgtcgtttttgataaaccgacaacttacaacatcatcctcgggactccctggatttatcaaatgaaggcggtcccctttacgtatcatcaatgcatcaaatttccaactccaagtggagtagaaaccattcagggagatcaagaagctttgcgcacatgttatctagtcagccatcgtctgaagatccaatagcaattaacaaagcccgcgaagaaaggaataatcccaagatttctgagtgggtagaaagtggatattgtggtgatcgaaataatgttagaggaggataaaccagattggaaagttcgaattggagccactctaaccggcaaaataaaagaagtcctaatagaactcttgaagaaaaataaagcatcgtttgcgtgctcagcagcggatatgtatggcatagatccaagcataatctaccacgagctaaacgtggatccaagctttaaacctgtaaaacaaaaaaataagaaaactcggagtggaacaagcaaaggcggtaaatgacgaagtggacaagctcttaataataggatctataagggaggtgcagtacccggattgggtggcaaataccgtcgtggaaaatagaagaatggaaaagatagggtgtgcatcgatttcacggatctcaacaaagcttgtccaaaagacagtttcccacttccacatatagatcgtctcgtggagtcaaccaccggaaacaagttgctgactttcatggatgctttttcaggatataatcagataatgatgattcctgaaaatcaaaagaaaacgtcattcatcaaggataggggcatctattgttataaggtaatgcctttcagtttaaagaacgcaggagcaacttatcaatgacttgttaacaaaatgttcaacgcatacctcggagagacaatggaag

SEQ ID NO: 32627 - DNA, 868 bp, Arabidopsis thaliana landsberg
atttttcgttggttttagcctctttttgaataaaatgggtttaagtgttgtctttacactcctactccatctctaactcttatgattggttaaatgaattagattatgacacattttgaccatgaaaatactaacaaagctgtttactacttctaagcaattttcggttgtttttagcgttttagggacaaaatgggtagcagtgttgtctaacaactcgtaaatcatctttaactcttctaattagtcaaatgcattgaattctggcacattttgaccttagaaacccgaacaaagctattgactgcttctaagtaactttttgttggttttagcctcttttaggagaaaataggttttacatgttgtctaaaccactcatactccatctctaaaacttatgattagtcaaatgcattggattgtgacatattttgcccataggatcactaacaaagctattttactgcttctaagaaattttctgtgtgttttagcgtcttctgggacaaaatgggtataaggtttgtctaatcactcctaatccatttttatctcttctaattaatcaaactattggattctgatacattttgcccatagacatacgaacacagttattaagtgcttctatgcagctttttgttggttttagcctcttttggaagtaaatgggtataagtgttgtctcaacactcctaatccatctctagctcatataatttgtcaaatgctttggattgtgacaaatgttttaccatagaaacattaagaaaggtattgactgtttctaagcacttatttgttgaatttatcctcttctgggacgaaatgggtataagtgttgtctcccccctcccactttttt

SEQ ID NO: 32628 - DNA, 530 bp, Arabidopsis thaliana landsberg
cagcctgtttttatgttgtgattgatgtacccaagccagtgggccggagtcacagttaggcacggggagttcaggaggaacaggagcatccttactagatacgtccggatataactcccgaggacgacctctcttctgccacaacgcctctcggtacatgtctttcatctaataaacgattataattatcacttgtacctattatgctttataataagtctacacaaactaatattcgaaataataatataataggtgtatacaaattatttaactaacaactcaatatacaaaacgaatcagttcgaaatcataccttggcctacgaagtgaaccaactcaaatctttgaatccagcaatttttgacgaagtttgaaaatgggatgaaatgagctgctctcggtcagccgcgcgggcgtttttataggcattcgtagctcggcgccaagatctgtggcgccgagctcggtgccacgtcaacgccacggcgtccgggttgtgccaacgcagccgtacctcggcgccataa

SEQ ID NO: 32629 - DNA, 590 bp, Arabidopsis thaliana landsberg
catgtataacaaaattaaattgttttattaattttggtttactatttaggccggtacgttaaaagagtcccacagttcaagccccgatctttttttttgtcaactgatattaattaagactcaacagagccaaacccgagggtactttaaaagactctcatagttcaagccccgattcatggccccacatttaaaaaaaaaacttacaaataagaattattcgaattcaaacctccattaataggaaaataagaaggaaaaaaccagaactctgggggtatgggtttgcaaccagaccattcatacactccaagaacctaattagggccaattactaccaaattaagatgaggatcaagaaaggttaactttagctgataattttatgacattccgaaaggcaagctttttcaaccaatggtgtataggtagcaccacctcggtcaataatccattcacgagcccttgcacaagcacttcttttacgatcatgatcaggatccacttccataatctgtaggcagatgtagttcaggaccgtgcagaacattgaactatggctttcaacgtctagtccccacccaccatca

SEQ ID NO: 32630 - DNA, 2294 bp, Arabidopsis thaliana landsberg
tggattttcaggctttgctgccaagcttaccgagtcacaagccaagaaacttgctggtactcatagctctctgttatcttgaatttcaccatgtctttggtttcttagtaatttgatgataatgatttaaaattagtaatttactttgtttagctgaaattttgattggtaatgcacttttggaaacagattctcctgaagttgttcatgtcatggcggatagtttctatgaactcgctacaactcgaacttgggattacttaggtctttctgttgccaatccaaataacctcctaaatgatacaaacatgggtgaccaagttatcattggctttattgacacaggtataagtagttctcattagatcgtagcttgatcttaattcatgtttcagatcgtacctttattgaagcgcctcaatgacttggcattttgtgtggctataggagtgtggccagagtctgaatcatttaacgacaatggggttggaccaataccaagccattggaaaggaggatgtgaatcaggagaaaaattcatatcaacaaattgcaacagaaagctcataggagccaagtactttatcaacggctttcttgctgaaaacgaaggatttaacaccacagaatcacgcgactacatttccgctagagactttattggacatggcacacacaccgcctctattgctggtggttcatttgttcctaacataagctacaaagaactcgctggaggaaacttgagaggtggcgcaccgcgtgctcgcatagcgatatacaaggcttgttggtatgtggatcagctaggcgcagtggcctgttcatcttctgatatcttgaaagcaatggatgaatctatgcacgatggtgttgatgttttatcactctctctcggcgctcagattcctctgtatcctgaaactgatctgcgtgataggattgctactgaagcgttccatgcagtagcaaaaggcatcatagttgtttgtgcaggagggaactctggcccagcggctcagactgtgttaaacactgctccttggatcataacagtggctgcaaccactttggaccggtcctttcccacacctattacacttgggaaccgcaaagtgatactggtaatgcatatgtgtctgttttctttaatcaacgaaacacaccccaaatcttgaaactatctgattatgagtttttcaactgttaatgcagggtcaggcactgtatacaggtcaagaacttggcttcaccagtttggtttacccagagaacgcagggttcaccaatgagacctttagcgggtatcatcaaatttcgtgttccttgttaagacttacatgcaatgttcaataacagtttatgtcagttatctgacatttttctaaatatgtacgtaacattttgcagtgtctgtgagcgccttaatctcaacccaaaccgtacaatggcagggaaagttgtgttgtgtttcacaacaaacacactctttactgctgtatcgagagctgcctcttacgtgaaggcagccggtggtcttggcgtgatcatcgcaagaaatccaggttacaatctcactccatgtagagatgatttcccctgtgtagccattgattacgagctcgggacagatgtacttctctacatacgctccactaggtatgaaactataaataagtaatacgttatcaggtgtttcactccatccaagaaacatagaattttatgaaaagtagacaactttctgaatcagtaaatatcttttggctggatattgtggtttgcagatcacctgttgtgaagatacaaccttctagaacactcgttggacaacctgtggggacaaaggtggcaactttctcatcaagaggacctaactcgatttccccagcgattcttaaagtatgtccggatcctaattttcagattttctgcatcagatgttttcaaaaacaagaaaatgtaacgttttttgcaatgcagccagacataggggcaccgggagtgagcatattagctgctacatctaccgattccaattcaagtgtagggggatttgatattcttgcgggaacatcgatggcagctccagttgttgcgggagttgttgcacttcttaaagctttgcatcctaattggtctcctgctgcatttagatcagctattgtcactacaggttcttattttcactcaatcgcagaacaaccgatcaaaagcaaagggcaaaggatacactcgtctcaataattgcgttcactactttgcagcttggagaacagatccattcggagagc

SEQ ID NO: 32631 - DNA, 4697 bp, Arabidopsis thaliana landsberg
cattgatcctttgattatgccaactaacttaatcatcatgtcgtgtttatttaggctattatctaatctagctgtgcattactattttatggatttcttcggtgttctggtttggaaaaaaaaaagctactaatataaaaccaaaattttgttcagtttgattgagactgaaatacatttaattaaataacaaaagaaaggttcattgtcgattttattagcaaacaagtcagttgtccagcctttggtatgaagaaaggtggcgattaggtctttgtaccgtttctgatgcttctcgaactctgttggctctgtctcggcctcgtggtggcttggtacagtagtgtgtaattccactggagatagagaaagaggatttgagaaactcatgttgtgttcttttgaagatgagtgctggtctctgtgtccatgaagctagttttcccatatattattgctgctataatcgtaactaaacctatccttaaacttatccattagatcgcagggaatgtttcattctaagacatgtaactattcttatctctagagatttcataccaaacagaacaaacgaaaagaattatctctagagatttcataccaaaaagaaaatgaaagaaacataaattcctcctaatgaaacaaaattgaaatataagatccactaaattccttatgcacacacattatgcactggccttctgtatttagaatcatctctcttgttataaatttaaaaaaaaaaaaaaaaaaaccaataatcaccaactcaatttacaaaatatagtgtcaaagaaaaagatcaaaaagattaaatacatcatttttcggtttctaaacaatggctggtcataaaaagagtcttacccgtcttttctttgtttcagtaattgattatattatcattgttcagcggattaggagaaggaagatcataaaatatagagctattgcaaaagatagagttccagactgcactcaagatcccaaaaattgtgtcagagtttcagtcaaccagtaccatcttcctcctggttgtcaaaacactacacattgttatcgagaaaagtatcatatttaattatgtattcatatatacaaatcattttctactaaatatgaaaaaaaatttatcactaatctacattattgatgtgatatggaacttgttacattatcaaattttaattattttaaaattctttctttttttttaacttcaaattattgttatatatattttaataaattataaattaatgtgttatcaggcataacttcaagttcgtgtaacatgagatgtgtcttgtgaaagcatgacatgtaactttcgttgtaaaataaaataaaaaacaaatgagctcagatatgaggcaatatcatccgattaatcggagaattgctaaggacccaaccttagcttaaagcaaatttcatcgacgctcaaatgcaccagccgggaatctaacccgggtctgtaccgtggcagggtactattctaccactagaccactggtgctacttgcatatgtttttattttagttcaatttgtaatttgtaaaatagcccgaacgttgttttgagtcttttgactttgatacaacgatttattttagttagctcactcttatttttcgtgtcaacaatatagctattcaaaagacttaaaaaaggtgattgtggtgtcaattagcattgtcttttgcaatgttggatcataatttgcaaattcaactctcttttattaactccaataatattaatgatataaatccaaaaaatatctaccgacgtaaatgaattgaaacaaaaacaaaagatagtataaaacaaaaacatcaggtcctgcacaaatctcttccacataaactcctaaagcactgacttcattacatgcctctccaaaaaatcccgtataaaagaaaaaaataatgcaattcctatatagacaaatcggtctgtaaaaaaaaaagacttgatttaattcaggttggataaagaagatccaaaaccaacaatacttgcatatatactgtatatgatgagttaaaggaatgcattatagttcatagaaattacactagttaatcaattaatagtgattagtgcatcataaacctctaatccaaacactgacaagatttagtcgcgcggtaacaaatttctagttgcaccttcttacttacaatttctgttttcaagaaacataaaccaaaacattttggaccattatgatatatgtgaaacaatcaaactatatgttatacaaacaatatacatatactgcttcaacaaagcaattaggcagttcttgtttttgatttctctcttaagagtctgtcttaattactttagagaaggaaaaaaaaagcactttctaatcttctaaacagtccacaacactttcacacaaacgggacaaatcaatagagtccgtatgaagtaataatattattttttcctaatgattttgcattcccctgtaggtcataaacatatatcatgatctgaatggactccatttcgcgctggctttccgatctgtaagcaatcaatcggtggaacggttgcggaattgagctctccaaatgttttccaacaaaatggatcgtacatgtggtattgtagttgcactggttttagctctatgcctgataattgcacgtctatgcaagggaaactgtcactgcaagcaaaatgcacaggcttcacggtgtaagtgcctcgtatcttctcatatgtgactccttctactgacactgctgatgtatggttcatgcatttgctgtgatcacagtagaattgatcgatcactatcggtagctgaacctctgtgagttgaatgtttgagaaaagtattcctttcactgaccctatacctccctgtattcacattgaagctgttaagtttcatgagcttccaaaccaaatcactcattcgttttatttatgaaagtgttaatcattacctgccaagtcttgatccggacaccggtcattgtgttgtgcataacgacatctcggactgttatgttggagacacaggctttggtactgtctttaccaaggctaccaatgctgattccatgtcctggtccacaattcacattgtgaacatacacattggagcaacccgtttgaatcgaaatacaatcgtctcctggaaaaacagaggaaaataagaccctatttttatgagttttatgatgttttttttgactaattgatttgtaccgcaagctaatgtggttgtctgaatcatgacatttctggtgttctgaagatgaatcccatctgtgtttgaactgtctccgggagaagacacattcacgtcatgaactaaaaccttgacacagttatcaaacttgaggtgacattgaggactgttctgaatggttatacccgtcacagtcacatcgatactgccatagaaccgcagcgcctatacagtaaaacgcaagctaaggtaagcaaagaatacactgagttttaaaaacacgtagagactactaaatcatttgtatgtctcaccgttggtttaatacttggcattctccaattaagttcacttcttatctgttatgtgacaaaaatacaaaaacagagtttggtgttagataaagaaacttgagtagattttatagaatgagatgatgaagaagttttttaccggcattggaggacgttcttggaccgaattgttcaacgggacaatgagcttgaagtcatcgtcgataggataatcggaaaggtaatcttgttgccaccaaacagtgcctcttccatcaataacaccattaccttgtattgtaattccgttaagcttcgtgaactcaatccaccacattaaacctcctccccccgattcagtatccgtaggagctacaatcatcccgtccagctgcaagcaataaatatctcacgtctttcaatccaaaaggttcatgttttacatttttgttttgaaatcttgcaaatgatgataaattttctcacttggaatacaatgtttgctctgacaataaggacccgagaatgaaatcgggccaaagaggaaaatgtagtcaggcggtatgatcatcgttgaggcctcgactttgcaggcagatgcccatgccgcttcaaacgcctggaaaatttgttaccactcgtcattgtttagtttaagactaaaacacaattatggagggaaaaaaacagagtatatggtccactcttaaatcgggtatttttgttgttatttctctctatgctcgtttgttagtttattggggatttaaaacattgagaggaaaaaagaaaaaagttttatgactttacagaacagagagaaaacttttgtgggctctgtttcttgttctgtctcgtgttaccttctcaactgtaattcacattatggttattttttagaaacaattctcatgaaagcgagattaaaattcttgattagtcaagaacaactagattgaattttgtaacggattatgaatcttatgagtctgtatacctgagtgtcatcactcattccatcacccttagctccaaaatcaagcacattgaattgttgagagtcctcaactggctgcagcggaagaggtgatggtgctggttggacatgtggtggtggtggtcgttgaacttgtggtgcctgtgacacaccaggtgaaccgtcactggattttggcggctgagt

SEQ ID NO: 32632 - DNA, 476 bp, Arabidopsis thaliana landsberg
tgatgaacaggaacacgcggggaaagggaaacttgtctggaaaaccaacgaaacctaccacagagagcttggattgaactttcttttgctcactgaagggcttaggagaatcttggcagcacaaggagtgcatttctacttgctgttattccaaggtgttacctttcttcttgtgggtctcgatctcataggcgagcagatgagctgagaagaacaaaagaagattcataactcgggtcaataaatcagtgagtttgaatttccacttcctctatgttcagtggtatcctctgtaatgagattgttggaaccatagtggtaggcattaattgattttccgtttcgtttgtttgtttgttatgttggtttgattcctccattgttagggatagagtccgagccagagattcatacatgtatacaatatctgtaaagttggaacatgttgttggcagttaaaagagcttctgtcttga

SEQ ID NO: 32633 - DNA, 899 bp, Arabidopsis thaliana landsberg
atgattgtattttatattaaaagaaattttgtttagctaaaaggataaaagtttgcttctttttttagtctaataatgtcttactttttcaactccaaattctagttgttatactgtccaaatccagtattataattgacatcaaaactttaaagaattaggcatacgcaacatttagttgtatatataaaagtatgttttagagtagacgaagaaaatacctagattaatgcttattacatgcgatttagacaacatatactgctaaaacgccaccaaattttttgtctattctttaagtacaatcgttacagtatgatttatttaacatttcgttgaattgtggagcgaaaatatcttggattcgttaatcgatccaatgagcgtgctagatgcggtttaaccaaagcagccacgtcgacgatggactggaaaacctcctcctgagagttgcggtcatgaccaaatttgttatagtgtccttgaatagtatatttcagaaaaatttaaacttattaattatttgtcgttgtttcctattatttattgtttataaagttaacataggaaaatgaaagatggaaatacttttttattttcttagttttagagacaacaaagaagtttcgtgcctagatctgtacatcttctctgatcaaggaccaaatcattttatatgctttcttctcaaacgtcactcggaccgagtgaacattcatttaatcatagagaaaccggaccatcataattttcacattcaaacgcaccattctacatcatttctgtttcttatttatctttaattgactacgacaatttagatttataaaaataaattgctcaatccctaaacgcatgctaattcaatttttgaacagtcgctttggagtggatgataa

SEQ ID NO: 32634 - DNA, 457 bp, Arabidopsis thaliana landsberg
  unsure (1)..(457): unsure at all n locations
gggagcagaggtggaccctgtttgtccttccatgtaacagatcttagaggtaagtgcctcaagtttgatgtttggagggttgaaagtgcaatcaaccttgttgtggatttctgccatctttttggcgagatccattgctcctgctgcttgtccctggagaatctgttgtaacatgttcttcaagtctcaatctggagttggtgatgattgttgattttgctgctgtgtgaaccccgatggtggaagttgctgctgatagttgctctggtactactacttaggaacatacccctgaacttggttgtataaaacaaagggcttgggttgattctgctgctgtgaggggtagacttagtcctgcgtgtttgcaacatttgtacttctgtaagacagattgngatggttatgcttgaagttgttgaaacctttattgaaacctccttggttttgcacatag

SEQ ID NO: 32635 - DNA, 2189 bp, Arabidopsis thaliana landsberg
ctaatataccgacccgccgtaatagtcgttcaacagcaactattgcatgactattccgggttgtcattaaatatagtcgcaaaatagacgtaattatcgattgaaaaagcacatgtattttgttttgtaagttgttgtaccggtttaaaacgactacactattttgtcgtgttttagtcactctaaaattgcctatataatgaaaatttcacgtacacaaaattcattcacaacacaaacacaatacaaataatacctttaagaaaaaaaatgtttttgatgaaaaaaaacgataaaaaatatatttagttttattattggtcttataatggcgggaaattataattatccgaatagcggtggttttaatcgagagtgggtgtacaagatgttagatgaaatgacggggaatttgacagcagaatacgttgcaggagtggaggagttcttgacatttgctaatagccagcctatagtacaaagttgtcgaggtaaattccactatccttgtgctgtgtgcaagaataaaaaacatattgtctcgggtagaaaagttagtagtcatttgtttagtcaaagatttatgcctgattattatgtttggtataagcatggggaagatttcaacatgaatgtaggaacgagtaattatgttgatagtacgtatctaagagagaattatgaaagtgtgggtaatgttgtagaagatccatatgtggatgtgggtaatgttgtagaagattcatatgtggatatggtgaacgatggatttcgttataacgtggggtttgatgataactatcatcaagacggtactaatcagaatgtggaggaaccggtacgtaaccattctaaaaaactttacaacttgatagaaggtgctcaaaatccattgtacgatggttgtcgtgaaggccagtctcaattatcgttagcagctcgagtcatgcagaacaaggcggatcataatatgagtgaaagatgtgtggattcggtatgtcaaatgttgacagattttttaccagaaggaaaccaagctactgattcccattacaagacagaaacatttatgcgcaatttaggccttccttattatacaatcgatgtttgtattaacaattgtatgcttttcctcaaagatggaagcctatggatgactaccgttgaagaaccaaagtgccatatagttgtatgtggtatctacccattggtgaccgattgaagagaatgtatcagagccacaagactacagctgcaatgcgttggcatgccgaacaccaatcaaaagaagaagaaatgaatcatccttcagatgcggcggagtggagatattttcaagagctacatcccatgtttgccgaagaaccccgtaacgtttatctcggattatgtaccgatggattcaatccatttggcatgtcgcgaaatcattttttgtggcctgtgatcctgactccatacaatttaccaccgggtatgtgcatgaatacatagtacttgtttcttacaattttgaattctgggccaaatcacccgcgaggtagtctcgatgtcttcctccaacctcttattgaggagctaaaagagttatggtctactggaatcgatgcatatgatgtgtctttgaatcaaaattttaatctaaaagcagtgttgctgtggacgataagcgactttccggcgtacagcatgttatcaggatggacaacccacggtaaactgtcttgtccaatttgcatggaaagtactaactctttttatctacctaatggaaggaagacgtgctggtttgattgtcaccaaaaatttctttctcatggtcatccattacggaagaacaaaaaagacttccgaaaaggaaaagacgcttctaccgagtatccacctgagtctttacccggtgagcaaatttattacgagcggttgtctggtgtaaatccaccaagaaccaaggatgttggtggcaacggtcacaaaaagaagatgccaggctatgggaaggaacataattggcacaaagaaagcatattatgggagcttccatattggaaagatctgaatctccgacattgtatcaatgtgatgcatacagagaagaatgttttggataacataatgaaaactcttatgagcgtgaagggtaaatcaaaggacaacataatgtcaataatggatatataacgatgtct

SEQ ID NO: 32636 - DNA, 3790 bp, Arabidopsis thaliana landsberg
gatccggagatctgaacctggttttagattcatgatgttctttttttggtaaccaacgttctttttcttcgggtcatatagtccggccaaggctgtggggataattccagagtttattagagcacaagtgatcaagaatgtatatgttgcttgcgatatatactgcaaaaacaaacaaaccatataaatatgtgaagatcatgacgaaatggattatggattggtagggaagttaccgaatcgtcgtatgttgattcgtagagaaagatttcagagaaactcttagagcatagaagaagggaagcggctattgcctccttgaatggtatcttgcagtacaagcaaggtaccatcccggtcgccattttcaaaaagcccgtaaatgtcattaagaagatgttgtaccaaatgtcatcatattggtagacgatcttcatcacatcgcatctcatcgtgctgaatgtgattgagattggtattagcacgttcattgtgagagcctcatacttggcttccaaggcagatcctataggtggaccttctggtatgatgatgccgagtaagaatggtcccaaaaggtatttcatattaaaaaatgaagagtatgcggcggaagcaattacgctcaaaaccacagcatgtacatacacatctgccacaggtttgccttctggtgtgcgttctactatccattctacgaccggccttaaaacgcaaaaggctactagaatcaaaatgatcaccgctataaggtcacgatatgctgtcatgggagagatgttcttgtacgttcccacaagataggcgaaaatgctgacagtagacgcgaagatgtcattgataagggatgcagacaacacaaggcgaccaagctctgaattgaggatcttgagttctgacaggaaatgaacgacggtaggcaagagaatcgaggattggctcgagatgaccacaatgcgctcggcaaggactttattcggcgacatgtagtaagggtctatattatcagtgtggaggtttctcacacagaagccacccaaaaaaggaacaatgaagctcaaagtccctatcacgatgggtagccatccgttgttgaatgccaatcgacggctgattttgactgtcatcaaaaatgcaagcataatgtttccacacaccgaaaggcctcatagcggcccgtttccatctagtgcaggatcccacgataatttccttgatgatacctccctaagattgaacaattgaggccccagaatcagaccagcctgaacataaatatacatttattagcatgtaggattgtcaaatgttgcttaaaacgttttcgtgcttgtcaagttacatctatttttcctgttacgtgaccgtcaagtttcatgtacaaggatacttaccaacatataagagggaatcggggaaatgccaaagcttttaagaaaactgtgaattatgatgatgaatacaaatatgagtaatatctgaaattccatgagaggcaatgaatacccgaaaatcacatccggtgactttaggttttcccaaaatccaaaagaagagatgttgaatactaagggtatgcaaccgcggatatagctcgttgtattcataaattgtggaaacttggtgtatcaactctggagaaataagaaggaaaaaaaaaaaaaaggtttgaagaacttgtgagtttttgcatatgaatttcagtggtgatcgtgtcatttttgttgtttactttgttttggtcttgatttttttttctgtctgagagttagttagtcaaaaacttgttggatattgatgggtatgatttgctggatgaattacaagctggaaaatctatacataaaacacacacaaaagtacagagttttatttgctgacaacaaatattttctgttactaattgaccctcaaatttagaaacactaatccacacataatttttttttctatgagtacttcacaataagtagaatcctaataatctgtaaaagtatacttttaatgagagctcgtttgtctctttaatttttccttaaaattttttttgtctttttctcttctattgtttcttgaatattcttccggtttgaatcctcagattgtcacaaaaagtgacaaaaccacaccttataaatataagacatagatttatttttcatagggtagagttggagcaggcagcaccccaaatactaatcgttatgtgtttttttggcttgcacatagttttgacttttgatattaaataattaactacccgagaacaaaagtgttgtttctagtataataaaaggtaactcccatgttgttagctgaaagcgtaaccagaagcaaaaaccagcggatttgggagagagtgacagcgtatccggcaaggttacttttgttgtgaacgacgaatcggagggtcccggtgcagtttatattccctctcatatttctccatgagcagttttttgactccggtggtctgaaaaagcccttgcacgtgtcaacagttgaggaaagattatttgacatcagtagtcagatatctcgaagagcatgtcaccctaaaactcctttcaacaacaaatgttggacattgaagaagaagagagcatcctctaccaagtgtatatggatgtctctaaaatctccaaatccttttctacatcaagagtctccacatactcgaccatctctacgaaaatagtgcttgtgaataagaaaaaaataaataatgtaccaatgtaggtgatgtgttcgaggcacgttgggagggatctcttctccacaggagatgaatttaacctgctgtgggtcccgcttctgggagatgtaggatctttgaacttgaaatttcagatatttaaaaaataaataaagaagtaaataaataatgtaaaataaagctataaagacgcaattaaaaacatgatacatcaataaaagagaaggaagatggttgatatgagttaaataatggagttagagttgttaagttttgatatatcatagttcataaactaaatagagggagaatgttagagtcaaattaattgttaatatccttgaagaaaaaaaaattacatggaaatggaaaatggagagttgtttgaagtttaaagctagagtcaaattattttattctcctttagtgatttagatttttgttacgttttatgctcgattcacaacacaagatcttcacaaactttctaaaactcagcaatcgaaacttcgaatcagctcaaaaacagaaacgaattgaagaacgaaagaaacaacacaagagatttgattacccagttcaacaagatcgggatgatcaagcctacgtatggggccgaatcagttcggcaatccactagaacagaatgagaattacagagtacaagcagagctcaacaatggagtctcaagcttttcttttttgttgttacaaatcagaaacggataatgaagaagaagaaataaaggccttttatactaattcccaaatagaaacagaagaccctctctcgcgaaaagaaggttttctttagcctcttcaatccggtttaaaacactccatctaaccggtcctcaattcctcttaaccacaacacctaaaccggtcacttaaagttgaatcagaattatccacaacactccaccttgattcaatctttcaacattctccagtaaattgcactacttgaacttaaccttcggcaatcatatgtccaagtatcacctgagaagtttagatgatctaaagctgcttcaaacttgtgcacaggtatgactttagtaagcatatctg

SEQ ID NO: 32637 - DNA, 2742 bp, Arabidopsis thaliana landsberg
  unsure (1)..(2742): unsure at all n locations
ctttgacaacgatttgatatgtcgaaactgtttccttctaacccctaaggattctggtccttctccttctctctctttttctccttaacagaacgaaaagtggctaaccaaagccctaattttgagtttcgttctcttataggcacactctagggtttccattaaaccaaccgattaaaccggacgatttaaacacaaactctaaccgattttccggttcacgagcgttacaatcatacatggtatgcttatgactttttcatgttctttgagcatttatgaaacatttctctagtcattgtatccaaaagttgctaactgataaaaatgaaatattgcatgctaacttacaagaaaaacaaaagatcatatttttatttttgagtcaactgaaatttgcctactttgctaattatctttattacttatttctcagatgtaagatgaatgaaataaacatcttccaatacgatcttttggaaaataataattagttgaaagccttgtcacttggcttttcttaaccaaaaaatatcttagtttattatatgaaccttttcccaattttaagaatcactaacatttcgagaaatttgatattccttaaaatcatcagctttgtcatcttcatctcgttcttattctcatttatatttgtattcttttcaaactcatgctcatcttcaactccatctttaccaatatttctatcttgggcttttgttggaatatcagtctcatcaccgatctggaaaatgtcacgctaataagtgctctacacttgggtgcgtcaagtaaggaagatattctaggttggtatttcataaaatctggaaaatatactgttaaatctggatatcatacagcgcagttaaagactttggatgataactcttcttttattggctcagacatcaaagtcttaaaagcatactcaaggaaagtatagtgtccgcccaagttacgtcactttttgtggcaaattttagcaagatgtgtaccagtaacagataatctacgaaaacgcggtataaactgtgagatatgatgtagcagaagtggtgctctagaagaaaccattaacctcacgcttttcttatgccatcatgcacgtcagatttgggcactttcacagatacctacggtcccatgaaaatttccttatgcatctatttatgcaaatttagatcattttttcggcacataccttcggaattcgaatcatcttcatttccatggataatttggtatatttggaaagcaaggaatgaaaaaatctttggaaatgtggataaaaatcctgtacaaatctgacatttggtggaaaaagagtcagactcgtggaagtccgctgaacttgagcttcacaatgaaactcatggttctttcaatggaaaatcataatcgagtgcgacattttccattagacaacaattattctggatatcgttgttttgtgaatggatcttggaaagatagcgataagttttccggcttaggatggtactgtacatcatcaaattgagagacgccaaccatgggagctgccaatctcagaagaagtctatctccattacatgcagaggtggaagctctcctctgggcgatgaagtgtatgattggtgccgacaactaagatgtaatttttcttagaagctgttcagatctgggggagagggtatcttccccaaccgaatggccggctttctctgcgtatttggaagagttgcagagcgacaatgatgagttcacaagcttttctctatctttaatctcccgtagtgctaatgttgatataaatcccaagtgctttgagttacttctaggccaagaaagtagatctgtcaaaggcttctcaacaaatctgaagggttaggtgacgtggagtttgcttcgatgatggctgaaagctctttcaccggagtgacgaacaatggaatgaagatggagcgaggttgtaccacacggctgaggtgaatctccgtgataaaacaacaagaactcttgcaatggaggcgtcggctcaacaagaacaagagggaggcgttttcttttaagaaaatgctagatctttatttcatccaaggtaaaaattacatagggtttttgtggtgcttttataagctctccacggccacatcagcctcttacaaatcacaaaaggaaataaaagaaacagagaaaataaccaaaaatacaataattgtttgaaaaataaaagacaactctcgtaaaccaaaataagagtaaacacgcacgaacaaacggttagaaatcaatgaattgattgaaacacttactttgcttaagggttcgtgacagtggtgacgttacagccggcttgagctttgatcataggccatggttcatgacgtgaataaaacagagagtcttgatggtctcttattccagcttggtgattctcttccatcaatatgagtagcttgtcttggccatcttctatcttgctcgggaagtcagcgttgtcttcaagctctgaatattcgaagtctnnnnnnnnnnnnnnnnnnnnnnnnnnnnnnntctcaatgaaggcgttgaacttgttttggaggaaccgagtccttgaccgggtcattggtaggtctggtatgaatggtacgttgattggttcatgagctgttggtttggtgactggagctagttcgatgtcctcattaaatgttaaagcggatactttcgcacaataaattcgtacccaaccgctttatagtacatatc

SEQ ID NO: 32638 - DNA, 1208 bp, Arabidopsis thaliana landsberg
aacaagaataatctcatgaactctctccttcacaacataattacctttacgaccaccaattacgagccccgcgctaagcttatgaaactttcctactctatgcaaaacaccgaatgactgggctgccaattcccttgttggagatataattatacatgccacaccatattgaggactccatctatacctatgtaacttctccagaatctaaaacacacaaaaataatccattagcatctatcaaaaatcaaagctgatcaagatacaaagctacacacacagcaataaactatatcgcaaaatcgaaactttaccggaataacaaaagccagagttttgacagacccagttctagcaggacacaagaatatctctttcacataaagcatgacgaatagcagccctctgaacatcagtcatatgaacggatttcgcatctttcaatcctcttttgagtttatccgatgtaggtaactgagcaaacttcctcacacctgcataccgagagaaaacagtgccgtatttgccgtcttcggactttccgatcctcggatctttaggaagaggacgcaatgaaagtggattgaatcctgaatccggtttctgtgattcgatccactgcttcagaagatttatttcttcgacttcgtagagacgaatctgcttcctcattcccttagtcttcttaatttttaccatcttgacacaaacacgaagttagagctccagagatggaaagcttacgacttgagaggctagaatttgcaaaagagcagacaaaagttagggttttaagatttgatagatacacaagaagatgttgatgcagccaattgaagggtttaacgatgagtgacgatgctttttttaattaccaaaaaaactaatctaggcccaataaggatacacaaaggcccaataacaaagcattttttttttcgcttccctcgtctatcttctctggatctcttctgattctcgaatctctatttgtcttcgtcttcttttgttgtgaacttgcgatacatatatatatatatatatatatatatatatatatatgcgagtataccggactgtgaaattttggaacgaattgatttgatttgaatatggcaatcgcgaagaaattggaagatgagatctcacgctcttctccttcgtcatcatcatcatcgctgaacgaagctctgttaatctctactatg

SEQ ID NO: 32639 - DNA, 378 bp, Arabidopsis thaliana landsberg
ttgatttcacccggcgaatgagtggtttctattgttaacttctaaaagaattcattttgattttttctagatgattccgtaattttgacatctaacatatgatttcatcatattcttttcggccaaaacatgattcagaaattttaacataaatttaaattgggcaaaaaatcaaaatttggaaatgattattttgtaatttctgttttaaattattattgtgttttgatgcatatgatataaattttatctcaaaattatggcttcttgaaatctggatttgagaatcttgcatatttcatgttaaaccttgaaaaatatgcaacatcatgaatcctcattatccattagttctcataaaatcttatctattttact

SEQ ID NO: 32640 - DNA, 1067 bp, Arabidopsis thaliana landsberg
agccatactcttgagcgacttctccattgttctcatcttcttcttgaaacccttcattgtcttagtgtgaatgttcccaagctctttaagtacaccgagcttcttgtgaacttcagcaaactcatttcctccttggttagcaccttcttcataatgagcttgctcttgttcgctggcccatgctctggttgatcaacatgttgctcaaactcgatttgctcctcataattcagcttgagtgaagtactcatgttgctcatagtcgactggactatattctggttcatcttctcgagcttctccaatgtcgatgttcaaggcaaagggagatggcatgaaattgatgttgcgccttgtcttcaccgaagtccggttctcgcatggtagggatagaagagaaggcccaagctccgagtggttgaacttgaagagatagcgattcgccgcagttgttttctcaagaaaatccttccccttgagatagtctaggtcaatgaacttaggcaacacgtcaggggttccgaattccatactcacagctcctagtattaacgttaagagaccaccaacacaaagactcccgcgaattcccgagcgatggatggttgcagcatactccttgaagctcaaaaggtgatccaagagaacaacactcaacgaagtgtccgctctatcacccgccatcttcctccaatcttttgtttctctcaaaatgaagaccaaagattggtatatcatgcatagctcctcttcactgacaaatccggtggccttctttggaaagagggtgttggcgatgcattggtggaggtatctaatcacgggattacaaattgaagaactcttgctcttggttgacgagaaggattttggaccggcgattgtcttccaaagagatttcagctcttcttgatcatagtcttggaggattccttctccacttgggaatccgaaaatggtctcaagatggcaaatatcaatagtatattcgacatccctaactttgaaaattatgtaccctagacctcctctctcttctttctccaaatcatcaacccaaaaatgaa

SEQ ID NO: 32641 - DNA, 1448 bp, Arabidopsis thaliana landsberg
  unsure (1)..(1448): unsure at all n locations
cctggcgtatatatctcaaccatcagcaaacgccaaaagttacatgtttttcaacaaatatgacaagctcatccaggtggttgcttatctcgacactggagcagcatcatatatcatcaagccagacatacttccagcctctcattggaattcctattcagtagctttcaaggcagcaaatggccagatcttccacatctccttagtcagcaagcccacttacatccaactcttttaaggatacatgatcaaagccaaagtatatgagtccgaactccctggaaaatatttcatacttggatttgatgtacttcatagctttaagagagtatcttggcatccaaagggacttaagcacaagaaccaactgctaccatggactactatctcccatctctatcccatggagatattaaccccatcaaagacgggattatcaatacttcttgtgctacacacattcagagttcctcaccaaatgttcatcacctttatggaagaacctggacttcttcatatcattacccttcaagaagaatgaggatatctatccaacaaaagcaagccatccaggaatgaatccagaccgttataattttactctcgaagaagtcgactaactccaaagagaagaccttagtgagaaaaccacctccccatgggcatgcgaagccttctatgttaacaaaagagccgaacaagtacgaggaaaactgaggttagttatctactaccagccgctcaatcatttccttcaaacgacaagtttcctctaccaaagtgagaatttctattccagaggctcccccaagcacaagtcttctcgaaatttgacttaaaagcaggattttggcaacttggaatcaaaccagaagatagaccaaagacggggttttgcatacaagaccgacattaccattggaaagtcatgccgtttggattaaagattgcaccttccctgagatagattttcttggaatgcatatttttaaagaagaatactattttcagcctcatattgcaacgcagcaagacgagnnnnnnnnnnnnnnnnnnnnnnnnnnnnnnnnncagcaattcttcggcattgtcaactaaatgtcagaattcctccatgctctggcgaacacagatccatactctcagctcaactcaagaaaaacgctcctccatgggatcaaaaatacatagaagcagtcaaaaaattaaaaacaatttccaagaccttgctagccttgaagattccatccagaagaaaacaaattctgcagacagatgcaagtgattcttactggagagcagtcctctctggaagaagatgaaaaaggaaaaaggcatatatgtggttacaagagtggagtcttcaaagatagtgaaaacactaccattccacttacaaggagatactcgcagtaaaaagaggtattaaaaaaactgagtttctcatg

SEQ ID NO: 32642 - DNA, 5475 bp, Arabidopsis thaliana landsberg
  unsure (1)..(5475): unsure at all n locations
acgaatttcagagaagattatgagaagagaatcttgcaatcacttgattctaggcagctgagccgagatggacggatgaggaaccccgatgagaagcctctgattgctccagaggcagcaccatcaaaggcaacgccttctgaaaccgaggttgtccctaaagctaaggcaaagccgcagccaaaggaggaaccagtttctgcacctaaaccagatgctactgttgctcagaatactgagaaagctaaagatgcagtaaaagtaaagaatgttgctgatgatgatgatgatgaagtatatggtcttggaaagccgcagaaggaagaaaagccggttgatgcagctacggcgaaggaaatgagaaagcaagaggagattgctaaagccaagcaagccatggaaaggaagaagaagctggcagagaaagctgctgctaaagctgctataagagctcaaaaggaagctgagaagaaagaaaagaaggaaattaccttttcttttttgttgtacctcaatgctctttgcattcttctctctccattctaacagttctcgccatctttttttgtgtgttgcaggagcaagagaagaaggccaagaagaaaaccggaggcaacacagaaaccgagactgaggaagttccagaagcttctgaggaggagattgaagctccggtgcaggaggagaaaccgcagaaggaaaaagtcttcaaggagaaaccaataaggaacaggacccgcggtaggggaccagaaacgatcccaagagcgatccttaagcgtaagaagtcgactaattactgggtttatgctgctccagcggctctggtggtactgttgcttcttgtcttgggttactactacgttctctagatcgaacggagtgatcaagcgaagctgtcttgttgtagtttggaatactttaaaactgggatttttgccttcttgactcttaaaaaactcataagcttatgcatcttttacatacgagtagagactcttttcttttaagtactttttacaatcttctcttctgttgttgaggctttaactttaaggaagaaaacagtttttgttacattttatatgttttccataatgtactgcttgagatttgatatttcttttcgtctctttgcaaggtcgttgggtcaaaaaatttccatgataatagaaaccattttatacataattatcagagactaaagtagtgacatttctacatgatgaactcttttacaacagaagattaacattcagcttttagaccctcttcctctgttctctctccaagctttttgcttcttattccacctttctttagcaatcttgtctgacttccaccgttggttccgaaatcgttctctcccttttagccagtcggagtagtccttaccgggatcacacgctatgaaatctgccaactcgtccacatcggtttttgtcacgttaccttttcctgccatacaccacagaaatctctccccattgcaggtttcctcttcaacaccaactcctgaatctgaaccattctctggacctttagcttcagacaccttcctgcacaaccatggagtaatatgtagttgttggttaaagctctcatggatgcattatgaaagcgaagaagagaaaaaatatgacttttgctggtctatacataccccaagtacaaagttcggtttttgtgaaacttcaaagcaactgccccgctctgtttcctatctactgctgtctgtaccatataattatattgatccatttagaaaagcgcagaatttagactttgtgcaaaagagtttttagttgnnnnnnnnnnnnnnnnnnnnnnnnnnnccaagtttttggaaccactggatagtatagacgatgacgtgttttctgagtgaccaactgaatccccaagtgcttccaagtcacccccttctaggatgaataaatacatagatatcaccattccaaaaatggagtccttcactagaaagtcaagcttgagtgcaaagcttacagacagtaagcctgaaaaatgcataagcatccacttagatctgtgagggtaagannnnnnnnnnnnnnnnnnnnnnnnnngacagggcatatgaatattgaactgttcaaaacgttgaacaacatccatcatggctttgtattccttgcaagctcgaacatcacctccagcttcatgccagttccaattcctgagaacccggatggcttgcaacatcgaacaagtcatgaacttaagtgtggatgcaagcagatatagatcttccatactagatgtgttgtatttttccaacacagagtccataacatcatcagaactagctctaagtatcacgcaaccaagaattgataaggtctgagacaacatactttcagagcaggagctatcaaatacacataagctttcctttgcgtatgcaacagaatacgctaccagctcattgttttctctcttcgcattatcactttgatatgaatcccatgaatcctttagctgctgtgtaacatcattaactttcgccagtgttgagggcaaaagacgatgttcaaaagccacccgagacttactcgtcaaaaagccaaacttcccagacaggccattctcactcttagacatgtgtctcttatacaaaacaacagacttttcaaatgcatcaatatagtgatcaataagctgaaggtctaatcccttaaaacatggatgtgaacaaataccaatggcgtcagacaccaataaaaccacataggcatggatcatttttggtgcagagaacataaccgggtttagcagcaaggacacagcagcactcaagcttatctggggagttctaaatgcattacctttcttccaatataatctctcaacacacatttgattcgttttctcatcagaagttgcgataataaaatgagcagaaacgatttgcaccacaccggccctatcatgcttactaaacagtctacatgaggagaatgcagaatcaactacgaaaagaaggtcgctgattgacttattcaccaaaatctcatccataaaaacctgtacatataaataatcaaaaacccagtgagcatgctttcttcaacttaaaagcccttgccaaaggtatagtcaaaaagccacaagttcatcagaaatccaagataaaaatgagccacaaattagttaacttttacctcaatccctgtacaaagaaacgtatgacgggggatctaaagaaccgtcatgcgtgaatacaaaagaacaatctccatttcttgcacgaatcaatctaccgaggatcgagagaagagttttggccttctccagaacaagctcttgtttggccacaagtaaagacatgatcttcatacaacattttaagaacagcgaagctaattcaatactatcttctgtactttcaaatgtaggacaagtttcagccttttgtttgaataaagtagcgaacaggctttcgagactcctatcaagctctgtgaacaacacatcagagaggaaacagacatcatcgaaattgatcaagtccactttctctccacggaacttgatattccaatgatgtgaagcaatgtcacaattctcccaatttgttggttgggttaatgataaaggacccagaaggcacaataaacgtttcaaaattggcttctgagaaacctggaaattcaaaaggactgttgattatttccaaaaacccacaaatcctaaattacttcacacccttaaaaatcataacttttgagcacgatactaatcctcgacaaaatttaggaaactaatcagaatctaagcattgcccagtacggctaattgaacagaaaccaagatgcagaaacattgtactcgaaattgagaaaattgtacctgagaggacgtaattgctgaagcaagggatcggaataagttgacgggatctgagaccttcgaagctgggcgtttcttactcttccgcttggccgtcatcgccgtaaggaaagaggagaaaatgcttgtttcggtgaggttctcgatttgagtgacttttggtgtgtggcgggaaagcacaaagcacgcgtcgtttttgtgtattcaaaacgacacgcagttattaagaaagaaggctatgtttgtttgtttggtcacaaagactaagtcgctcctgaccaggttacagttaagttgactcttgagttcccgactttggattgaacaggagtgatagtgaactcaatcttgttttgggctcttcaaattgggcttgagcatcaaaattttgacaagcttacaaatatggactggacaatcgcgtaatatgacttttgatctttgtgcgtcatgatttcttatttttttgttttgcctggttgaaaatattttgagaggaacttggtgcttggtgggtcttgatagagacactatgtattgtcagttgtcactgtttctgtgtccaatttcaacacttggcgtattcgtagcatacgccacgtttccccgtcgaggggcctatcctagctagcgatgattcaatggctacttgtcacgtgtacctccccatagccttgcaacatagctatcgtctttaatatctttggtctcattcaaaataacactactttggttctgttcttaacatgttttttttcttcctaatacaatctttcagcctcagttaatttatttatacgaaccaaacaaaattaacatcccgaaaatggggaggattaccacgaacacaattgtgaaaaaaaacaaaaaaaaacacgaacacaaatgattttagcttctttcttgcgttcagttgaacacttttcttcatagtgatcgattggtaaattcaagtcaatacgtttcaaaacgctccatatattggatgcagtgaatgcaaaactattgtaggtccataggtttctactgccgacagagagaagaaataagcaaaaattcaatttggtaaagtgaaattaaaccgtggactgtggacaagaaaaaaaggaagaaaattctgcaagacatgtcgtaaccacgtatcttgttagatcataaaatacaaataaagtggaaaaaaaagaactttcttgcatgagtgacattgacataaagaaaagcatcaaaaaaatacgtggagcttttagtaggtaaatgaattaattgaaaagtaactttcttgcattagccaaatgtgattgtaaaagcattgaactatatatgtaaatgcaagcttcgtacgacccaactttgtatcaatccattatccatgcaactctaaattattgaacgaactaaacagcattaaactttactactactttgttggttaggtcctagtattacaaactctctacttcaaaatattcttggagaacagattaaacgacctcattgcgtttgagtttgagatgcgacattgagtttcaacactaaccttatgcattcacatgtaaatgttattaatatataagtatgatgtatcacataatgttggtataagtg

SEQ ID NO: 32643 - DNA, 662 bp, Arabidopsis thaliana landsberg
tggtcttaagctatctctctctagtcttcgtcgtcgttggcatcttttttcttttttagcttttacaaaagcgtcaaagacgcaaggataaatgagcaatgcagagaagaaaaaagagacacttttgttcctctctctctctcttcttgaacactgcttgttctctctctctctttctttcacgccatcatcgttagaaaacccaaagcagtgcaaaaagagaaagaagaagacgattataatttgttgtcaatgcctggtctcgtcttttgtttgctgggatgaaaaaaaagtgaccacgcgctgttacatggtgtttgaaccacacgctctggcgcgagttgtcgtcggggcccgaccgaccctttggctccactggatttctcttctttttctctttttcacattattgattttgtgttttctagtttagcttttcgtgtggatctaattatgttcctttaacaaccattattatttcttctcaatcttaagcaaactatctaagaaactaaactttcaaatccaatatatgataaagagttaatgtagagatacatgttatatgactctaagctacaaatactaattttttaacaaaatgtataaaaagaatcagatacaaaattcaagaaaaacagtggataggggatcctctagat

SEQ ID NO: 32644 - DNA, 3338 bp, Arabidopsis thaliana landsberg
gaggagccagtttatgaagaaggtaaaaagtgttattggcatgagttaattagtgtagatataggtgctaccttagttgatatattagacatgctaaccgactcccttaggcccttgtctgtgagcacaaaattaagctcacgtatctactcattgtagatggtgtacttataggatcaaaccaaaaagctaagcctacatttaagtatgtagagatgttggcaaatcttgaaagtttttttattttccatggggtagagagtcatatttcaagacactagcacacatgagacccgctgaacgtaatctttacgtccaccgccacaaaactgctcgcggctgatcatgtcaagcttcttacaaaacaacttcagtagaaaacatttcatttgacaggtttcccgctggcgttgcaaatcttagcatttggaaacattcttggcatagttgatttgctgtcagctgatgacacctccaagactatcctgcattagaaaaggctaactcatccaaaacaattaatatatcttcctgacatttacgctctagaacaaaaccttcaggtaattgtatttacttaaggttcttctacatcatgtcttattcacttctatatctacagctgccagttgttccgctaataatggtcgaggataatggagactcatatggttcaaattacctaaaactactctctcaaataagagattaattggagtattttaggatcgaattcacagagttcttttgttcaaacagtgagttgaatgtcgagattaagctagcaaggtacgagtgaagtagtaagaaaacaaagtaagaaaacaggaggattattgtgttgtaaacgattaaataaagagctagaaacagggtattctcaggaaactattggtattgtagatctaatgaaagctaggttgttatcgaactgttcttaaactcaaactctaatcatggaataaccggtggacgtgccgcgaaactccctatatctatagctaataatactggagaagccgagaaactatcaacctaaatatgcattcttaacgagttcaattgttcatcttagtagataggctgattcttattacacacctataaaccagactcatcaaataatagatccaactgcagatacctatggcgggcatatctattgtctggattcaagatctagttaattactctagatctagcattaggcataattaaagatgaagaattctacacataacctagcaagggggcaatctactaaaaccatatgaatccctaatgagaaacgttattcctaacaagcagattactcagacatattgagtatgaaaatataaacacaacaaatagattaagggaaagaagggatctcttcactgttttaagatctgaatcaatctctgaaaacactcaatgaatagcttatgtctctcagtaacagggtttgcaaaacgcttgataagaacttgatagaaaacttgataatcaaaaactggataaacaaaacttaggtctaaacaatgtataaaaaccctataaaacgtctagggactaataatgtaaataggggaagtctttctagggcaaatttctacttctggagactagaaagcgtctaggactttgtagggccaaaaccggtgtcgaacgacaccaagagtgtgtcgatcgacaaaaagagtgtgtcgatcgacactcctcgctgattcctgaaccaaaatcgtctttagcttcctttttcttagtgtttgctccaaaatgtcttcttatctctattgttgtcccattgaatagaatatctgaaaagacactaaaaacactcgagaaataacataaagactcaaaatcttatacctaaaatatagttaaaatcggtgaaaatcggattatatcagtaatgcaagttcccaaccaatcaatgttgaagatgatggaataatgagtcgacctccgggtgtcaaggcagcaaaagcgaaaggatagaagtcagccactattaaagacggaaagaaatctgctagtattaaaggaaaagcagaccagtcatcagtcgaacattttcagagcttataggagcttaaggagaaggattgggatcacaaagagaagcaaagcaatcagagactttcaagtctctttagtgacttaagtgtcagaagttttctctctcttctcttaactctctcaaatcttttagagagaaaaaactctgaatcttgttcatatcttttgctaatccgattaacatcggatctctttagatttcgttttatgttttagctatctggctatttttcagatctatctcaaacttcttgtcggtttttcttctatactttgtttcgatttgtagtttttttgtaaagccttttgcctgttcttcaaatcaacacttctatgtcgttgaagtattaaatcattgtggtttgatgggtctttgttagctgtgtacttgattcttcgtccaattgttggtaaatcctcgcttgcccatatgggattaaattaagcgatggttcactttggtcgtttgatttcaagtggttgtagttgattgaattggagtatgtagatttggagtccctgtcgtgtttgatagtttctctgaagactgcttcgattctaatcggctaaagaagaaatccggtgagcaaagtaaatcaagtcaattacttccaatgttcattgcaaaaggcgatgggtaaaagaaaggcttaatctggtagaagctgttcgaagatgatgaagaactggaaggtaaagaaatattccggtgactggaagtaattccccgacgacaatggagttaatgaagaaacaacttttctccagacctgccacgtgcccgtgtttatcttttgttaagacatgtgtctatgagctgtattgatataagctttaatctgtgtctttggtttatattaaatatttaaatgggtcttgtactttatgtgtaatgccctttggactctttaataaaatgaagtttgacgaaaagaaaagaaaagtgtcaggcaattttttggaataaacaatcctcagttatttcaggtcaagatgacaaagtattttccgagcagctcgacaaacttcaccgtctatcaggttataatcataaaaaacaagcaaccaagtttgtggatgcgatactaaaaagaaaattgatgtcctatgctgtaatttccaaacaaactctcaagattattagactattggtggttctttggagatttagaaataggctagtcttatcaacattattagattattgatgttctcaaattgtctattttttagggttctaaatagattagtgataaataataaataagaag

SEQ ID NO: 32645 - DNA, 3278 bp, Arabidopsis thaliana landsberg
  unsure (1)..(3278): unsure at all n locations
aatggctccgatctcctccgcgtggctggcccagagactacccgccgccaaggcatgaccatcccacatggagagacagagaacgagaccgtccgcattactcagaccatgagtaccctcctagcagacggatagcatctgactgggcccatacagagccgctcccaaaacctcattatgacagacgaccacctctcagtccacctcgtggtggcagatggggacgagttttgagagagaggagcagatccccgccattgagagatgttccaccaccgccattgagagatggtccaccaccgtcattgagaggaggcggtccaccgctgcacagagattaccgccgtgacagtcactttgacagagaaagacgagacgatgggcgtggcggcagaggcagaatgggaaactcttactgatgcaaaaactgtgtatgtcttgggattttggtttagacagttcaaattttcgcggaatgtgaccttgtattacaccttagattctttgttcttgttagcaaaactcttgtgccattagtgcaaaaaccaaacaaatgagaagcaattttggtgctctttcgtaattaaagaaacatttagggccgaaacaaaaaatatgcttcttcttaatattccccttccgtttcggcttccgcttgagaaggtgcgtactatgagttcacgagtggtctatctacgtgtcagttttttattgggtgatagctaaatacacgcatattaaaagggctttttggatatttgcttcaccgtagatcggacggtggaaagagacaaaacctaaagcatttatgaattgacatcgttggatcatcgtatttaacaagaaccgtacgatgagattgccacgcaaatctaaccggcgaatataatccagaaaattgaaatttcaaaacatgttagagagagggaggaggagagatggttttaaccaaagtctcacctgttgatgtctttgctgcttctccggctacagtgactaaaacagagcaaagtgctctcacatcatgtggttggattatatctgctaaaagggaccttcaaaaaattacaacgtacaagtcagttttagacagctcttggatcaaactaaataacttgtgaacaccagaaatttcacctgtatacaaactttgatggaactgacgatgcattgccaccagcacgagaaacaggtgatggagatgtgcctgaggttggtccaccagttcttccattatttacctaaatacaaataataagatttcacttcactaagccaacagcaagagaaaaagatatttttcagttctataaatggttaccaaaaagcatatatatgcaaaatggtaaattggaacctgtggaaagtggctaagcctagatgaatctttaattgcttggttgaacaaaatctcttgacctttccttctcttaggtgctggagaaggagcaaagccggaggaaccaacagctccagtaatggctgcatttgctgcttgttgaagataagccatgtggttggaatgttcaccgtgaaacaaagcttgtctctcttcacttccttcaaagttcttgcaatccaagcatttgcagttctcggaacaaagaatatttgcttgaaagcactcgcaatacttcttaaggcatcctgattttttgcagtggcatcctttgttatgtttccctaacaacacaacttcaccgatatcctcctacaaaggcaaatcaacaataacttagaagcttaaagaactctcccacgatctagaacaagttcctcaggaccacgtacccttttatcccgcccaccatgtggactgctagcaattttaggcctgaacgcaaatggattccgctccagagttgcttccacagcttctcgtctagcaggttcattatcaacattgttgaaacaatttacacagttacaaccgtcacaatatgttccggatgcaaagcattcacagtacctgacaagatagtgcagaaatccacaattaacaacataaattggtaaacttaaaaaatcagacttttgagtttcttagacatgcagcagaagaaaaggaaaagatatgaacatgcaatcacacaaacaagtcaccaggaaactaaataaactacaacataacaaaatttgatgagtgtcaatttctacaacaggatggggaaaacttacaatttcaagcagcgtgagtgtttacagttacactgcttcttcttttgaggggtcccttttttaccttccacattaggccttggacctctagcttttggagattccggccttctgtctaaatagagagaggaaaattttgaaattttcatcatccattttaaattagcttcaccaattagtctaaaaggattaaactttaaaccaatttcatcatccccgatcaaatttgcacaacctccattgagtcaagataacacaaagagttcgaatttctcaatcgatagataaaatcttacggatgcctaattggcgcgttaacgatttgtgactgtgacggcggatttgacatcgtcgtcgccattggtaacgtcggtcgtacctgagtaacctgaccgattgctatggtcatacccggccgtatcgncgaagggacagagctactaatgatgggtttcaccgacgtagctacgacggtaggagccgctggtttagacagtgaatgttcatcggagccaccagtgaagtcgagctgccttgctggcttcttcgtcggaaaaccctcttcaacaccgtccttttttggcgggaattcgcctcctccgccgtcttcacccatctctcaaagattttccaatctccaaaaccaaaaaaacccagaaattttccttttttccacagttgatataattcaccgcgagaaaacgagaaattcctacaaatcagctcgaaaaatccagatccgaatctctccggagcgggaaaatcacaaatcgattcggcggctgttaagaaagctcaaaaactgagactttgaatttgatccgcgtatatatatagagagagaaaagggataagctttaagggagatgagaattagggttctattgggttttagctctaaacgaagaagaagaagaagaagacggagaagaagaagaagaagccctcagaggaatttggtaaaattaaaaacaaaaattaaaagcacaaaaaaatactttcggttttgttcttcttcttctctaacaccatctctcctcctccctctctctaacatgttttgaaatttcaattttctggattatattcgacggttagac

SEQ ID NO: 32646 - DNA, 2168 bp, Arabidopsis thaliana landsberg
taatgaagatcttcgaagtctaaatagaaagcctacacactgtatgtttattataatttattttttagaagaaaagaacaaattgttatcttacatattcaattttgtatacaatttaactatctatttcataaaaaactcgattttaattttacacacttcatctcacttgataatgatttcatgtcaaaataatatatatatgagatcaaatctatatcttagttaatattaaaaattattaacaattaacaaaacatagtgttaataccatacatattaaaaatttgaccaataatatatataaatatttttggttaattttccttttggttaagaaaaacaaaatgtaatattttttagatatagacatatgaattagtatatgttaataatgatttattttttagttttctatttctttaagaagaaaaaagttaattgatttcttttttagtatttctatttctttaagaagaaaaaagttaattattttgttacacgtgtcaacatctgatcgatagacttgacacatggcataatcctatgagttagtaattataaaaaccatactttatataataagatatgtaaatgtttcattttaaaatatctactcccagaattacatcatgtctctgttcgggagtacgtcgccttcatccatcactactcttcatgtctgtctgataggaaccgcaactccatcctctacccttgtatgaggaaatcagtctagatggttcgatattcttaggaaagagagatacaattgtatgtaaacatcatcacccgtgtgtttggagtataagacctagtggtccatgtagattaacgggtcaagaaaaatgttacccatggaatgttgatatttgaatacctttgttacaagatttcatttttataattaccttatccagttttgccgggtatgatactactaccttggcctgcaagaaacatcatatggatttaagaaagccgaacttagtaaagacaaggtgtaatcttttcgtttttacctgaataatcacatagaaggaccagcagaaagcatggcagtgtgaatgtaatcttcttagcaaagacatcttgtaatctttttaggaaagacaaaatttaaggcaagcaaaacttagtaaagacaaattgtagcaatatagctacttgtagactaaaatttctctgtcttttattgtgtgattgtttagaaaaaggaaaagcagaaagcagggcagagccggaaagaatcggagataattgcaagagtacggacatagtggtgaaccaagcagtgacgataccaatgcctaatggaataccatgttatattgtagtatgtctggatgcataatttcgaggatacatatcaactgcggttggttcagctcggctaagtggataaacccaagactcttcaaacgtatttactacgaagactgtctcgtcaacaacagcaagcctaaatttgccttttggctccactctctcttttcactaccgcaacactttcccttaccaatctatctgcggccttcgtgacctgttcttaggtggtggctttttctcttgtttttttttataggatgagatagtcgaaacagagggaacttaagaggccttattagatacagaaatatgagattagtcatattcatataccataccatccacttttgttttttggttctcttgggatgtgaaacagtgatagataaatgaatatatcaaaactcttttttccctctctattaagcttttctcaagacctattattgtaactggaaatggtcaaaaccctcagtctcagatcctagaactagcttattgggtcaagttgattgagcccttaaaaccactaagagaaataacctcggaagcaatctttgaatttgaacatggtcagacttaagacaccataccatcctcctttgtcatttgttctctaggatgggaaactttatggataaatgaatatatcaacctatattcccctatataagctcatctcaatacttatagatatagtagctggacaatgtcaaaacctcagaccccagaacaagcctatccagaatataacagaccaatgaatgagatgttgaatattcactgatggggataaataagaatcccatggaatcaagagaatgggatgcgtagttttt

SEQ ID NO: 32647 - DNA, 242 bp, Arabidopsis thaliana landsberg
ctcggtgaccggcggggccagatgcttaccctcgggcgagatgatcgccgtcatgcagccgccgcgcagcgccttctgcagattctggtccggcgtgatcgagacgatctgctcgtcggtcagccagcccgtggcgttgacgacgaagcagccgcttttcagcgcatggtgccggatcgtcacttccatctgctcggcgaagatcgggccgaccatcgagcccgggaactgggcaatatgga

SEQ ID NO: 32648 - DNA, 3613 bp, Arabidopsis thaliana landsberg
  unsure (1)..(3613): unsure at all n locations
tgctagacaagagattgcgcgaaatcccgctgatgatgtagataatcctgcttcgttatcaaatttggttaggggctgtgctctaaaagaattgtgaaagtattcatcctcggcttgatggttctgaaccatgaaactcatcacatacctagacacagtctgtactgtgctgcatctgaactagatactaacaatcccctgcttatatagagtatagtctttgtgtcgataacttgccagaatagtcttttaactgttgctagatacgtnnnnnnnnnnnnnnnnnngttctgtgttgctacgactgacttgccctttatagatggatcgtcgcattcctgggcgttctgagtcattttggaaggaagtcaatcacgtgaagggtttatggaagaatctggcggatttgaaggttgaagatgctggaatagctgcactttttggcctggaatgctttgcgtggtactgtgcaggagagattgtaggatggggctttactttcaccggctactacccttgaagaaagaaagcaaccccctcataaacaaacatgcgtttcagatccattgaataccgaaaagcctttttatatcataattagcggcttattatctatctcactgctgacattagaagcaaagttaatttctgtttctctggataatttatacacaaaagctttgaaggtgaggcatcatcactcgtgctagctctaataatatcagtcgactaatgttggccatttggttttttctttgtcattttcatttatgtgaataaccatttttcttgggtttagagtctataaaccgtttggtaagatgtattcattcgtgaaacctcagcacataccaaccttaccagagaagagtaagacggtattatattataaaccgtttggtaatatgtatcattcttcttctatcacaaaaaaggaagaaaatcctatatttttgacaattgtctgaaaatacgattaggttcagagtatttcaacgttgtctctgtcatttgtctatcgcaatttcgcataaaagcaagccttgtaggtgtagaagccatcacaccagattgtagtggatgattggaaactaagacttcagtcatctggtattctcctctctctctctcgaccggtcctcactataagtcttctctttgtaacatttttgtgatcattttggatcgttagttttgtagttgttctttttttttatgagtgttttgatagtgaacataaacttgattcataagtcaactgtatgctcaatcaattggtttttgaagaagttagttctaagaatcaagcaattggataagataaaatcagataaaatctacacgccttttatcaaaggcaaagcttatagtgtttaaagctgttttccttgaaaacttgaaagatctacactttcagaaaaaagttgtaaactgcagcaacccataatcaataaagaaccagtagtagttttcttcagttatgcaagcaaagattacatgaattagcatggctatttaatatatgcttttttccttgagcagagactttacagtgtttgaggaacgaagattgtgagacacaatggctaaggatgaagccaagggattgctgaaaagtgaagagctctataaagtttgtccttacatactcatctctacgttagttcacttctccatttctctgatacatttctgtgaaaaatgttgtagtatatactggagactagtgtgtacccacgcgagccagaggttctcagggagcttaggaacattactcataaccaccctcaagctggtatggctactgcaccagacgctggccagttgatggggatgctgctgaatctggtaaatgcaagaaagactatcgaggttggggttttcactggatactctcttctcctcactgctcttacgctaccagaagatggcaaggtatttgcatagatatgaccaaaccaaaagaaaaagtgtcatgatgtttttcgttgttttgcttctgtatcatttctgcaactgatttggtacacgagctctgcaggttatcgccattgacatgaatagagactcgtatgaaataggattgccggttataaagaaagctggtgttgaacacaaaattgatttcaaagagtctgaagctcttccagccctcgacgagcttttaaacaatgtacaacttcatacttctttgtctttcaaaaaaagaattagtatgtatcctgagatggtctttttgttttgatgtttgtgatgcagaaagtgaatgagggtggattcgacttcgcatttgtggatgcagacaagctgaattattggaactatcatgagaggcttattagattgatcaaggttggtgggatcatagtgtatgataacactctctgggnnnnnnnnnnnnnnnnnnnnnactcgtccacgcccgagtggaggatagaagtcaagaaagcaaccctcgagctgaacaagaaactctcggctgatcagcgtgtgcagatctcgcaagctgcgcttggcgatggtatcactatttgcaggaggttatattgagcgagtattgttgttctttgtgatctttagggtcatatgattgtgagccctttatattgagctattgtgatgcaagagtgttattgttctatgtgatattttggttcctgtgtgaatgtgaaccttttctatcaagtttgtggatttcttcaaatttcaagattataacagacagttacgaagaaacacaactcattttatgttttgtgtcttttggcaaaactccaaattctgaacattgctctaaaatataatataaaaagtaaaaaaatgaatggggcgttccgagaatcgaactcgggacctctcgcacccaaagcgagaatcataccactagaccaaacgcccacattgatatatagtttgctagcttttaatacaatgtatattaaataatttagttttgtgatataaacagtaaacagaacaagatattttcacccaaagttaaaaaatccaacgtttgttcaaaaataagaaaaaaactatccaaagttaaattatcaaatgttaaaaatcgttagacgttaatcacaatataaaggaactcttttttttttttttgagttaagaaacacttagttgggccataaaaatataggtctagtagatgaaaggcccataaaatcaactagggttagttcttcttcttatagagcgccgcatataagcttcatccttctccgtcaccaccggctctgtatttcggcatttgtggagagaagaaggtactctcatccctttctctttcttatcttaatctccttttttaaaatttgtgacaaagtaaaatgagctaatctcgtctttaagatcatatgtcaaaactgaatttgagttttgatatattcaggtaaagagagaagatagaaacataaaatgtcggagaagaagggaaggaaagaggaggtggtgaccanagagtacaccatcaaccttcacagacgccttcattgctggtaatttccaaaacaccaaaaacacttttgtcttattgcttcaaagcttttactgttagatagtggaaatggaatgttgataatgagctcttagctaatgtttt

SEQ ID NO: 32649 - DNA, 319 bp, Arabidopsis thaliana landsberg
  unsure (1)..(319): unsure at all n locations
tctattggagaacaaagacaatggtctcgatggaaagcaatcgggtcgggtcattaacggacccactaacccgatggtcacacctctgctcaacgatctttaccaattcaccatggcttatgcttattggaaagctggcaaacaatctgagcgatctgtgttagtattcttcaaaatttacaaaaaagttcgatcctttgaatccacactgtaaaatctnannnttgttttcaggtttgatctgtattttcgtaagaatccttttggtggagaatacactatctttgctggtttagaagaatgcatcaaatttctcgct

SEQ ID NO: 32650 - DNA, 1002 bp, Arabidopsis thaliana landsberg
  unsure (1)..(1002): unsure at all n locations
aggcaaaagcaaataatttttgtttttttccatttgctttctgttgttatccttcaagaagtttttattttatttttcacaacccaacaagttaatcatcatcaacattcttacatgttaaagagaacaatgagtttcttagatctgtttgtgtttcttcctcttctgaaattcatggtgatatggtgataaccaatatgccaccaatttcaggaagagaagaaaaagaaacaccaaaaaatccaacaaactcaacgttttcttgaacatgtaagaaattgatacgtgactattgttaggttgattaggaaatggttatgacgttttaattaattagttttggtgtttcactttatgaatttggttttcatattttccttttttatatgttgaagtgttttcttttatgcattagtgttatgtctaagttgtatgaagacctatataagagtctctattgattaataagaaatccagctccaacaattaacctaattctctaagagagagttggagtgaagggaagcttttgcttaaatcattcttgttttctaaggttcataagataaaagtattattttaacttcatttataagatgatatatgcaaaggccaaatcaactataaacattctaatgtaagtaattacaaacctgtgtttgtctccgaccaaagtggtgnggtgatccatcattagaagggcctatatagaacgttatatctgatccaggtttcaccttacgtttcttgcaagccgcagtaacaaccttaactatgtctgcgaacacactgccctcagcttttgcacatatgtaagtatgctgaccaatgacgaaggttgtgatggagagtgcaagacaagccgtggggatcacgaaaccgatgacccaactgatgttagtctgtatatagacaacacctgtgagtgcaataactagagccacggtgagtagagaagtaccgccagttaaagaatgtttcaaggtgagctttgcccttttt

SEQ ID NO: 32651 - DNA, 1079 bp, Arabidopsis thaliana landsberg
tgttcttagatatgtcttagccatttaatgttttaactatgacttgtcaatatagggggatgggcggaattttaagtctataacgacaaccagattgatccggtaccaatccattgcaaaggaggctgcgattcacgagaggattttaactcctctcactgcaataaaaagctcataggagccaagtatttcatcaatggttttctagcggagaacgaaagcttcaactccacaaattcacttgatttcatttcccctagagaccttgatggtcatggcacacatgtttccaccattgcgggtggttctttcgtgcccaatataagctacaagggcttagctggagggactgtcagaggcggggcacctcgtgctcatatagcaatgtacaaggcttgttggtatctggatgatgatgacacaacgacttgttcatctgctgacatcttgaaagctatggacgaggctatgcatgatggtgttgatgttctgtcaatctctttaggctccagcgttcctctatatggtgaaactgatattcgcgatgggataactactggagcgttccatgcagtcttaaagggtatcactgttgtttgttccggtggtaactctggcccagattctcttaccgtgacaaacacagctccttggatcatcacagtggctgcaactactctggaccggtcctttgccacacctcttacacttgggaataataaagtgatattggtaacaacaagatatacgctctttattaattgttctactcagtactcagattacatctgtgtcgtattgtgagtctgttcactatattgcagggtcaagcaatgtacacaggtccaggacttggcttcactagcttggtttatcctgagaatccagggaatagcaacgaaagtttttctgggtaatttttatatttctagtttcttgatgttcatcaaatcttgcaatgtgaagaagatcaattctctgacatccccatggttcctgtaatgcagtacttgtgaggagaatttattcaattctaatcgtacaatggaggggaaagttgtgttgtggtcgtcaacatc

SEQ ID NO: 32652 - DNA, 853 bp, Arabidopsis thaliana landsberg
  unsure (1)..(853): unsure at all n locations
acctatatatatgagagagctctagggttaacactaggcttccaaggatcgtgaaacagaaattactcaattgcttgctgacaattacgaatatattttgaagctctcttttgatatcaccatcaccgcacagagtatgtagtgtaattgcgacttggatatgagacagaactgtgtggtgcaatcaccagtccatgcaaagatccgaccaatgaatgtgagagccatttacaaaagccgagatccgaaacaccttttgtctattacaatttgtgactaagccaaatacttgaaagtgttttgattgtcggtatccctctccaagtaatctgtgctgatcaagtcctcaatccgtttctttatcatctttatatcaggctgcaaataaataaaaccaatatgtaaatttccttgatggacacaaattacaagacatttacagaattagagtttttgtatttaccttgaacattttgctgagatgctcaacacattcagagaccaactgttgatgccccaacacttttctactcttcatgatccgaacaagagctgcatcaattgcatagcgtctatctttatcaacatcttcaacaattttcttcctctcatccatcggaggcagaggcacctgttcaagaaaaacacatcatttttgatccgggcttacatgaaaataacaacacaacgctaatgaaaatatcatcataccctaattctcctcatcttatcggtgaacttggagttgaattcaaaggtatcggtgttggagatgtttctcgacatggttcctttataagaatcttgtactntaagcatgatagtgaatgaagcagcctggcaagatcttcat

SEQ ID NO: 32653 - DNA, 727 bp, Arabidopsis thaliana landsberg
cttcgaaagagtcaagaaatcttgatgattagttatgtgtcttaccctcttacattatgtcctcatatggcgtaaatgtaataaatttcataacctttttcattcatcttaaccatatgttttaagtaaccagcatcacaactcaataacacaacaatagctagaaatggcatcatcattttctaagcgtaaagatctttcaatatgttctcatcggctgtttgggaatacttattctcgacatttaacttaatgatatacgagtataaactcaaccctagatggtgtcgattaaatttttattataaatatatatatatatatatatatatatatttttttttttgcgtaattgtaattaagttgtacatgttttgctcattcaacaaaaacaagtgtgttactcacgttaaaaaacacgttacaagataaagcactttgtcccaacccctccctcaatttcactataacaaacaccattagagattttcacggcaaaaatgattgaaccaaattggcgatcgtctatccccttttcaatatggcctaccaaaattttctcaatctttactcaaaaaaattcataatgacagtaattaatctcgcgattttttttgttttcataaacaaatctaccataattctagcaataaaaaacaattacttttaaaattggttagaagacaaaacaaaatctctaaattctttttgctttgccataaaaaaa

SEQ ID NO: 32654 - DNA, 852 bp, Arabidopsis thaliana landsberg
cttctaatctgacttagattcacagaagataatacgtaaaagatttagtttctggtatttttccattggttttttgtgtatttccttttttttgtttaatagaagtaataaagaatacggaggataataatgacaatattcctgatgagaaagttgataattttctaaaagcttcacaaatcttgagcatgtatatattgtgaagtgttgtgttcattgtaacgtcggggtgggttgcatgaattaaatgaatatgacaaactatttgagaatgtaaataatgttttcttggcctacgtatgacattatatcatctatacatgaatgacctccatggggggtttatttgaataattgaaaaatccatggttttgctttaaaaatagattgacctaaagcccatgattttgctttaattaagagttaagacaaacaaagactacaatgtagatgaataatgatagaaaataatactataaaaatggctttagtaaattaataaaaaaaaaaggagagcatgtgagctcacacataagacagcaaaaagagctaaatgcagagagcttcagatccgaccagacaatgacgatcgttaaaccgtcgcagctctcattctacggcggcggatcttcgacgttatgttcactcaaaagctcactcctcaccggtggtattctgactttcatttccctcttctacctctgtctcaattacttacgcactataccgccgtctcctgtcatacgagtaactccgattcatgtacctcataccttcgtgaatgagtatgatactgataacgaaacaccgacgatggaagaagaaacctactaccatgatcatcactcaccg

SEQ ID NO: 32655 - DNA, 4589 bp, Arabidopsis thaliana landsberg
aggcttattttctagatataaactgacaactttaggcttaggtcatagaataagctgatcgtttagcatttcaaaattcaaacgaactttctcctcgaaactgatacaaaacatgtttctctctgtgtcatagacagaaccaataccgatgaattaacccctactatttttgttgatctctcttacaggtgatgcatttgtgggaggatttatgtcacagttggtgaaagagaaatcgattgaggaatgcgtgaaggctggatgctatgcctcgaacgtggtgatccaaagatctggctgcacttaccctgagaagcccgactttaactaaactattgggttaccctcagttttgtgatatcttccaaataaaacaacctttgaattattattgcttgagtgtacttttttaccacttttattctcattattatttgataattaatattaccaccataggtttagacaagacaagtcatgtttaatcaatgaaggcttcgatgagaagattatatctaccatcagctaataccaaaaaatggctcatttcacaaacaccttaaatggatcctctaacattatcaaaaaaaacctaaacgttagtagtagaaccatcttcttgaatcaaagactcatcaagaataacgaggagaagcgcaacggaggacctcgagaaagagagtttcgtcacaagcaatacaaagtttggagtctccggaggtgaaatcgtcgtaagcttcatcttttgattgatcaagcaaagctctgaagatgggatcgtgaagcaacgtgatctttataacgaacctcttataagtttcctcatctttaccaacgtacaccacaaggtgtccctttggtacgtcatgtggtatatgatattgatccttaggatttccggtggcgacgcggtgtttggcaactctgcttgacatttgcttccatgcctttgcgatcagcttgctcttcttcatcatgtttatgagagagatgagaaagagaaagagagagacgtttttggggtttagtactagtgccgtacatgggtatttatacacaaagtcactaacataggtctactatatatatattcaatgtatgtattatatggatgaataggtatgggtaatgattatttttggaccatgtcgtctttacaaataatacatgatctacattagttatcatgaaaaacaatacattccattcaatacatatatattaccaagaaatatgtataaatatttggaacgtcattatcaatttagttttgaaaataagatgtctttgttcatcatcttattttatttgttttttggggtcaactacggccaagctgtacttacgacatacgaaatcgtacgaacatgcatcttccctcaaacaatggccaatgggctttcgctttaatcattgcttcgttttgattatttggtttctttaaattttcatgaatacaaaacaaatctttatcggcatggcatgcacattggcactcaactatttggcatagagataatgtatgagtgtcgtcacagtagtagaatcacttaaagtgatttgcataactttaacattttgtcaataagtagaatcactttaacgatgttatttaacgaaagcagaattctttagagaagaactaaaatttgaaagatttgtttttcttataaaaaggaaacacattttattcaagttgtgaaattgggggtcccagggttcgatcaaatgttggagaaagataagatttaaaagatataagaaaagggataagattcttggacaaagtgcaattccacttacgtaccatacatcgcgatatgtaattcacatattacacaaattatctaatcgctaactgatttggtatgctggatatatacaatggggcctgcgattggtgactaaccaaaagcacaatactttttaaataatatgatcaataattggactgaatagctcaggtgtctataatctaatacaaacgatgatcatgctggatcttatcatgattttgatgtatgcacatgtgaaaaccagaatcttaacgcacttatcatgccatcatacttctgcatgttcgaaattggccattataaattctttataattcattagggattcatgatgtcttggtggtcgaccatatgtttacttttcaagaaatcaataaacgaatatagctagtggatatctaacacttgctcgtgaacatgggatgttttacagacaaatacgttatacatatttaagattgtatacacctatataatacatgtacgtgtatatatatgtaatgattgtatatacatgtacgtatatatgtatatcattacaaatcaggccggttggagattctgagacgactgattcatcccccccatagagacagcccggtgcttcatcccattgattaagtgtctctctttaaggaaacgagagattattagccttcggatcagaaaattagatttattcctagccgtttgatgtacatgacctccagctaatgcacgtgaaatttaatggtaagttttaaccagaaacctacaaaattgtgtgggtgatatttaactgtaagttataacagaaaaaaacataaatattgtcctcgtcagcatggtctagttgtagtgatcagataagagatgttataataaggtatccaaggtttgatacaccctaaaaactactccacaaacgtgtgggtgtcaggagttttcacatagctcccactaatcctgagatcagactgatctcatggttcgttgacccgagaactagctaggaacaaaagtccatgcgacatggctcggagctcaggaaaaaaacatgttcgattaaagaagcttcatcgcctcagagcttagggagaaccaccattctcataggcatcccttgttcttctctaattcagcagaaacattttcgatttgtgaagaatcaggaaaagaaacgttaacatgtgatgaatgcgattttttcttgtgtctttccatataaggtgagatacaagaatgatgagcatttactcaacttttcatatgaagaagacacaaatggagactactcgtgcgaatgcgatcattgtgaggaatcaaccatattctatggatgcaaagaatgtgaagtggcactccatattaaatgctcatttacaattgtttggtttttacttatttagattttaagaaatatgttaagattcaatcaatatgttaatgtagccgtagggcaaatagatcattcatatcaataaacagagattttacggtttttggtttgccaatctttgctttcaattattattcattgaccaaattgtcttcgttcttttcttttttgttggtgtcgcactatacatatattatataaatataaatagtttaatttaaacgtcgtctcaacaaacctttgacttcaaatttgatcttcctcttattagtcttcgtcatattttcttccttcttccatcttttagttctaataagttcattttcataaaacctcaaaagtagctcctacattagtatcttccttttcaagtcaacaatcctattcttgttctgttatcaaaaactccttcttttggtgattaaactctcttcaacttctgaaaaaagttttgatttttcttttgtctgtagtacacaaagatctcaaaggtgagtttgtaatttcctccaaagttactttaccttcctatcacgaaattcatacttctttaaattcttgtttagggaagaaaggaaaggtttaatctttagtataaattttgcaagttaggccaaaaaagattctttccctaactttgcaaaatttagggttcgttacagaatttggggttttctttaatctctaatttgattcgacaattcatcagattccttgatgtcacagtatttgatcctttgttttggattagtttggattcaaaagatcaaattttgaatgaattgaacaaatgaatagtgcatttgattctgagtcttctagtgtagtcaagtggtttagacctcgaatcattgtgatgattgttttgaagtaaatgctccaatgaactaaacttgctcactgtacttcgtttgtgtgtatatcagtggaggaacctgggtgttttaacatctttacgaagatgaaatgcttcttattccctcttggggacaagaaagatgaacagaggagccctaaacctgtttcaccaacgtctaacttcagtgacgtaaacaaaagcggttcagatttcagtccccgggatgtttctggaacgagcacagtttcatccactggtaggaactccaacactagcatgtcagctagagaaaacaaccttagagagttcactattggtgatcttaaatctgccacaaggaacttcaccaggtcaggtatgatcggggaaggcggatttggttgtgtcttctggggaacaatcaagaacttagaagacccatcgaagaaaatcgaagtctcggctcaacagctcggcaaaagagggttgcaggtaaaggtttcttcatcttttgttcacagaatctgttagtgttggttcatcaatgctatgggctttgcagggtcataaagaatgg

SEQ ID NO: 32656 - DNA, 1115 bp, Arabidopsis thaliana landsberg
tgacagcatctagaaacctagaattcttcaccgacggataccgctattttattcataatcttccagatgctgtcgatgccccaatgtatttccccaggaagattgagttcggtgtcattaaccagccagcgccagcattcaatcatatcctaggagacttctcgctcgttgtctatcagtttcaagctatcagctctttttctgctgtcattgatcgactaggtagattaattatgtattctgcactctcttttaatgttctatatatatactacttgttgcttacagatcacacaagaccttagatcaataccgaacaacattagacgcagaatatgcacatcaccataatttctgttacctgatggtgagaaatagatattttagtagtagggttttgtttaaaatatcgaagagtagaagttgcagtgtgtcgctgtagttagttattttcttgtgttataacagtatagagtgtggtgtatagtaggattttgataagaatatatagataatagttagactgtatagtagtaagattttgtttataatatctaagagtgaatacccggaaaaaaatgcgggtgtaaccgttgagagtgtgatgggcagacaaaaagatcgagtcagctgttcactttcctgcttaaaattgggtctaaattatgtcttatgtacaacatattcacaaagtttcattgtttctgcaaatcaacttctacggctaaatgaaaaactgcatatgctgtaggttgggattctccttttacgcatctaacaatatcaagacttcttccaacacaggtgaatttgatgatcttttggataacaacatcttcagagatccatctgacactgtggacgagattgagctgacatatcagagtgagatgaactcttcactgctggacaccaatggttcaatcaagtcccaaccgaaccaaaagcgtctggagatcgaggagcttactcttcagacaccaacaaacggaaccacattggttcacaacttatctgcagatgtatatcacaaggatcgcctactggttagttcacaaagaaacttgtgtttaaagcatgtgactggtagattggaaggtacttaagaatgccat

SEQ ID NO: 32657 - DNA, 1214 bp, Arabidopsis thaliana landsberg
acctacttcttgattcactcacagagaactcacgaacaaatgacaaagactcaactttgacaagaaaacgtttttgttactttaaaatgatcaagggttgctttacaatgaatgagaaatcaacttatatagagctgaatacaatgttctaaggcattaatgaaagaaacaaaacataaatgaaaatattggacattaattgtagaatatgtccaaataaggcaagtgagatgtgccttgtatcttgtcaacttggggaggaagttgtgacgtcttggaaggttctggagggtctcaagattctcacataagcgcacaaacaaagaaggaaagagttgttggtaatcgatctccttcggctccatatatggcaagtagtagctcagcgggttcttgtgtggtaagatgtaccaaagttcgtgtggtataagtcttgtgtggtctagatgttctcctggtttccatatgtagctttgaggtgcgtccaagtgtagaataaggaagatttccttttttggcttcatttcgtgcggtacttcagaaggtaattcagcaagtagttcagcgaatagttcggccggtctgttagcaagtacatcaaatatatgtacttgtgatatcttcgaatcattttcttggtaaatgattccttgatgacttgatgttgcctcgttaaaaacctttctaggtaaacccattgggacaaaccctagataaggggaaaagagtgcagcggtcatatccccacaatatggtgactcggctcgctggtctttgatccttcttgaatcatcattagtcttcttaggattaatttgcttgtgaataattaaccctagccttgtgcttgattgagactccaattgggcaagagtcctccaaaatgctcctcatcaatcggtttgataaatgtaccggctggtttggtatgctctcggtttggtttaatttggatgtccgcatcatcccctcccccttgaaagggtttcgtcctcgaaactatttgacctgcactaagagaaagcaagttagctttcatgcggttttgtgactctaaggtcataccttgatgttgtttaggattgttgcggtatggtgcgtcgggtggttcagcttggatcagcatggagtggtaaactcctctagcagcatgtagctccagagtagggacgtggtttttcatgaatgatgcggcatgtggtgttgcagattgt

SEQ ID NO: 32658 - DNA, 5518 bp, Arabidopsis thaliana landsberg
cgctctgaggaaactcgacctctctccttctgctgcgaccagcaccgcggtcgagtgaccttctcgagtgaatgaggcgtgatctgctgctagatcgagtgagtgtagccttccttcttctcttgtgctcccgggattcgaacgacgaatgcctagccgggacatgtgatactctctgctcgctaagctcaggcctgtgctcaagctcatcaaatctcctcgatggcatctccagaggaggctgtccctgtggaatagcagtggtgggggaggaacaactcagcttatctgtcagaagcttgatagtcttgaaacacttggcgagcagcttgtcctgcttcttgcaccacttctgcagtttactgttatttttatgagcttcaatcaagctcttgctctgcctcgctggaggtacatgttcaccaaagtgatacatgctagtgtcgaacgccactgccctatcttcatccatcccatccgaagcggcttcttcaagaagatcgtcctcatccaatggcggagcgttctcatagtagaggcgtccaacctcaggcctaaaatcaatgttatctccttctattatccttgtaacctcaaggctagggagaaggatgttagctctcctgtctgtagagtgctcaaacctgaacctgtggaaatcgtcaaccattgcaaactccaggaattcgcaatgacgtaggtgctcgatatccattgctcgcggctcgagtccagcagaaatgattgggactccacaagctatcagaatcggtgtcacaacgccacctatgcacaaagcgcctcgtgctctcttgcggttattggtgacagcccaactcttgtatccacacaaatggatcagaagaagtacagctaggggtgtgtcattgatttcaccctggaggggcataccattcttagtttggcgaagagttcccttgagggccattgcgatcatctccatatcagagttagtgacagtccttgtaatctctcgggagtagagtacgttggctacagaacgctggaagtacctgatgacagggctgcgtatctgattgctctttgacctggaagcattcaacggtacatagctgccaatggtgatccacaagtctttcaactcttctctttcatactttggcttagatcccgttccattggggaagccaaacaatccttccaatcgcttgattgataacctatactcatgaccatacacagaaaatcgcaagaatcccaatccttcacaatccaactcatcagaggtcataccttggtagagctctacttgcagcgtggagaggaattgtattgtctcatcttcatacgctacatacggataagccatcagagtgtccagatgacaactttggtacaggtgctgaacatcttccaacaatccgagttgtgcaagtgaggtcgagcaaggatacctcgtgctacataactcattcagcttgaaaagcctaacatattcctcagcaggcaatacgtccggcttgtgcagaagtttggtagctctgcgagtctgttcaggcatgtactcgtcttccagatcttcgtctataagctcatacctctatgtcatcgctctctttcctcgggctatctcagctttccttctgaagctttcatattctctctgttctctctctggccttgaagatgacgactctgtctcatccatgttgtagtcaggatcaacagaagaactgccactgtaattgctcatgattctcctgtagagatttagaactcaaagctcaaatgtcaataggttagtatcaaagatagcaatgaaaccaaaattattgtcaataggcaatgaaatagattgaattggtcgagtacaattctgtactcgagtaacctgagctgttcctgagcttagacgaactggatcgagtatcttctcaaaggtcgagttggaatgctacagcaggtcgagtaaatcgtggaggtagagtgagtcgtgaaacctagatgtcgagtaacttctctgaagttggaaggctctgctgaattcacgaacaagaagccgagtaggttttgcaggggtcgagtgctttctcgaggtcgagtagcttcttttgaaagagacgatggttgatgtggatgaattggtcgagtatatcaaaggaatcgagtgaagtggtttggtcgggtgacggaggggatgatctggtgacggcggtgcggcggtcgagtgaaattctcaggatcgagtagctctttggacggcgatttgtggtgtagagagattagagtgtcggcggtgaaatgaaaaaaggaaggtagagtggatttggagaagtcgagtgacgcttcaaaatgagtggtctaggttgagttttagattctctctccagcttatcctcagcgcgtggtccacactctgttgattgagaaaattttgcagaaaacctactgtaaactgtaggaaatttctgcaagtctctgtagcttctgttggtcgagtaaaatgatgattaaaaagtttttgggttttaaacatcacacatactcgaccaatgtactcgagtgcaaggtctccaggtgcaacagaagattttcaaaattttgtactccaactggctgtacactcggtcttcaggtcttctgtagagtaaaagttttgaatttttactctatctccacattgtttttttgttcctgagaaccacaaacacaaccaagacaaatcaaaaataacgagaaaataaaaatttatttacagagatagtcatgggacttcctcccaagtgagcttgtttaaagtcattagcttgactcctttactcctttaatcatcaagaagttcctggagatgaaccgatgtcacctctggaaggatttggtctgctaagtatttcttgagcctttgaccatttacagtaaaatctccactcttaccagctagagtgactgctccatagcctgaatcacactttgaaacaaactcctgagcgttcataaacattgttggccaccaaaagcctgcttgaagaatcttggacactgtcttgaacgtcgcgaagtgaccaccatatgctgagccatggcaatgcagcaggataccttccacttcatcttctgagacacatctcctgtagatcttatctttatagagagtgtaaagataaggctcatcccagtagtaatggtgtatgtctctgaaaaacttcttcctttcataacttgtcaggttgggaggctctactccgcacgccaagtaattgacgtgatcagcataccatggagattctccttcaacagcattcagttggtggaactctttcccactagctctttccgaagaactctacaaccatgagctactcttctggcattgaatcgtctatcggaaggggttcttcaattctcatccttgacagatggtccgctgcaccattttcaatgcctttcttatctactatctccatgtcaaactcttgcaataaaagtatccatcttaacagtcttggtttactatccttcttggcatacagatgcctcaaagttgcatggtctgtatagacagttacctttgatccaaccaaatagcttctgaacttctcaaatgcgaatacaacagctagaagctccttctcagttgttgcatatctttcttgagcgtcatccaacgttcggctggcgtaatatatgacatgaagcttcttgtctattttctggcctaaaacagctcctactgcgtaatctgatgcatcacacatgatctcaaatggatagtcccaattaggcgctcaaacaaacggagcagataccaaagcatccttaatggtttgaaaggatttcaaacattcatcatcaaatgcaaactcggtttccttgcacagcagtctggtgagcggtcttgccaacttggagaaatccttgatgaatcttctgtaaaatcctgcatgaccaagaaaactcctgatgtctttgacagtttttggtggctgtaactgcatcatcacgtcaaccttagccttatcaacctctattccctccttagaaattttgtggcccaaaacgatgccttctctaaccatgaaatggcatttctcccagttcagcaccatgtttgtctcttcacatcttttaagtaccctgcacaggttcaacaaacacgaggagaaggaacagccatacacagaaaaatcatccatgaatacctctaccatctcctctatcaaatccgagaaaattgaagtcatacaccgctgaaaagtagcaggtgcattacatagaccgaaaggcatacgcttgtaagcaaaggtcccataaggacaagtgaaagtggttttttcttggtcattttggtgaatagggatttgaaaaaatccgctataaccatacaaaaagcaatagtaaggatggtttgctaatctttctagcatctgatcaatgaatggcaatgggaaatggtcttttctagaggcagcatttaacttcctatagtcaatacacatcctatgtccagttatagtcctagtgggtatcagttcatctttagaatttttaacaactgtcatacctccttttttaggaacgcaatgaactggagatacccaagtgctatcagagatagggtagataaccccaacatctaatagtttaagtatctcctttttcacaacctctttcaagttagggtttaatctcctttgaggttcaatgctagagtaggattcattttcaagatggattctatgggtgcataaggtgggtgaaatccccttaatatcatctaacgaatatcctatagttttcctatacttcttgagctcagttatcagcaggtttacttgatcagcagttagctcatcattcactatgacacgatatgtagagtttagtccaagaaaaacgtaccttagctcttttggtagcggtttcaaatctactttgggtgccttgagttcagaccagtcatcggatactaagttggcttcagagaaggtgttgtggtcgagtagctcggtcgagtacaccgaatgggctgttggtcgagtgatgtggtcgagtatatattcctcccttgctctttcacccaaatcttcatactctcctggattctcaactgctttgtgttcatctatcagcttctggtaccccaaagtctccaaatgtaaatctccttccttgctatcctttgttagagcactctgtagatgatctgtttctcccagctcttctagcatttcatgagctaacatatccatctcttcaatccagaaaacatttccttctatcgtaggcttcttcatggtgttggtgatatcgaaggtcatcttgagatctctcccgaggttgagatcaatctttcccttcttaacatcaatgatagctccagctgtagctaaaaatggtcttcccagtatcaaagggtctttgggttcttcatccatttctaaaaccacaaagtctgtaggtacttcgaccacgcctatcatgactggtaagtcgtccagcataccatggggaattctaacagatctgtcagctagga

SEQ ID NO: 32659 - DNA, 781 bp, Arabidopsis thaliana landsberg
  unsure (1)..(781): unsure at all n locations
gatgtgtagcgtgtcatagattaggtttgatcaattatactctttatatgagaaaaataaattgaagaagaatcaatatcataaacctaacgtaacgaatcttgttctatacgaagcgaaagtctagagaccaaaaatagatttacgcgagtattgcaacaaaaatcaaacaaaaaaagggacgaaagaaaaagaagaagaagaagaagaaggaaaacncgatagctaggcaaggagagtagccacatctcgacattcttgacctcaaaaatgggcagttgaactcatacgacatttgtgtgcccatgtgagagtgatatatatgtatattagtatatattatatagtatctaaataagtggccctcgtgtttgagtagaattaatgtcttcgcatctaaattaatttggtcctattcttatatggcaacgatcaattatgcaaattcttaatttaccccgtcaataatcattggctgaaattgtggtcatattcttcgcttagaaaactaattatcaatatcgtatttacgtgaatactcggaaggttttggttgatgatttaaggttgccgttctgagttctgacatcctgacttttgagcattagtcatgttatatattacgattagctagctatgatgtatctgagagctgatcgaatatatacatactcagtattggagtacattcaatccaatcttgtcgtgaaagaaaacatatcgctatatctatacacatgttcactatattgtgtgattgcttaccgttctactaacacga

SEQ ID NO: 32660 - DNA, 855 bp, Arabidopsis thaliana landsberg
tacgaatcgaaccgtacgtcttcattcgaaatctatattccggtttgatcttaagatatttttttaaaactgatcgattggcggttatctagacactgaggcgatgaagcttcggctttcacattactcgaggagggactagtcagtgagacagttatggggactgtgtatgaccgcttgtgacggtagtcttagagtgggaccaaaaagtcacgcataagaaaacaacaaacactgaatttttgtattcgttggatgaataaatccccaatatgtcggcaacaatcatgcaacaccaaatctttttctctgttttcaattattttcttgacgtgatataaaaacaaagtattgatagtagtaaataaagaaatggtttttgacaggttggatatttgaattttcaaaaccatttttctgatttttttttaaaacagatcgcctggtgagtgttacaaaacagggacatactaaaactagactacacgatctgcgtatatttctttctacccatggtggactaaagaatacgcgatccacgccattagatctggacctacgcggtgatgagtcatgtggacctatgcatgagaacgtgacgaacgaaccacttaaacaaaggatcactactagaccacatccatgagactcgatgatcacttaccaattttataggggaagatccaattcagcgaccgaacctaaagtcgtagaaccacatgatgagttgggctctcgcggagcccataagtgagcccaaccataagaacttttggataaaagagctgcactctgtggtcgacacgtagcttgtgagttgtgaccaacactcacatgtgtgacggtgcagcaccg

SEQ ID NO: 32661 - DNA, 2398 bp, Arabidopsis thaliana landsberg
  unsure (1)..(2398): unsure at all n locations
ccggctacgtctaatcacgatggctaaacccgaacacgcagggggcgccgggaaccaaggagaagatcatgcttgactgggaccctacgggcaaatcaggaccaaagacaccattgcctgatgttgtgatcattcatgctcctaaagatgatgatgtctactctgcacctgctcaggctgctgctccagatactcttgtgcaagaagctccactcacaaccgtagattaccctgagatgattcctccagtggcctagagaagaccttttttactattactccatgggattttgttctttttgttataacttttctacttttgacactctctagtcgtatctcttatatcctccaagcagacaagttttttctcatgttgtttcttaacctatgtcaagttttctggaggttgaatgcttttagttccatgattcttttgttcttaagactcgtaataagaaaaagaatgacgacaacaatgcctggtatttgatgttgttactttgaattatcattttgctcagatcactttattcgaaaataacaaaaactaaaatgtttggagctctcattatatagtcttttacggttttacaaaaggatagagctcgtacctaaaagtacaactcggattcaaaactcttcctccttgtttaccgttgcagcatctgggaagctttgcaataatcgaatccaaacacacactgcaatttttaactgataagtcttgtgtacactgcatcatcccatacaatttcgtcgtcccgagactttcctcccccgctgcatacatgtagtctcttgtgtaaggctcttgttctttacgaattgctttctccttgagcttatctaggagagcctttgtgttcttgttgaacaactttttattgccgctcacatctttggcattgtgcaaatacaaatagtgcttgaaatcaatcttctcgtaggtatatatttcggaaatgtagagaaaacagttgtcgtaccatattattctccctctgttgttcggacatctcctaagaatctgtcacatatttacaatatatataaatatgttgggacatatttcctaagaaatgctaagatataactaaaactaatgtatgcatttatatatatatgtaagtatatgggacagctaaccgataatattgtaatgacgttaccccagagaaggcggtaaagaggcaagagcggcacttggattcggaggcatctccccgacattgggccttgatgtagtaggtactagaatccgcaccaccaacaccgtggatgannnnnnnnnnnnnnnnnnnnnnnnnnnnntcgagatgatctttgagtctgctctcgtatgaattctttgccttgtattttccttcactgttgatgcatatgtgttgcagatacgaattggtctggtttagggacaaaacattgtggataaaagagaattgcatggccaccacgaccaagatagagatggatacagaggaagaaaacattgtgttagagtgtttttatatttgctcatttcagtttgtagaaaagaatgactctagtcttttaaatgacaagagagaggagtgtttgggtgtgagacttggtatttacggcgagggaaaaggaggacccatgaaaaggtcaaagttgaaaagttttgaaacttttaaaatctgaatttactctacattaaaatttcaaatttgttacacgttagctatatgcctccatgaaaatcaatatacatcaaaaataacgtaccagccaaatgtatagtggagcttatggtgatatacctgattttatgatgattgtgactaattttggtttaatatagacatcatgatggagatgataagaagaaaacagagaagcaaagaagaagacatgaagttatgttttaagctaatggctttttatctgatcacagagcagagagttcgacttcttgagtggaaggtcgataagctacgaaggtttatcagttgaaaaggagcctggattgaaacatatttctcccccaaatttgcatacgttttgctcactcttgtcacctaataatatctgttttccaaacaacaacaactttaacaatcctttttttttttaaggcgggtttcatgcttccaaactaggtggcattcaatctttattaagaagatttaagaatgtaccgtgtgtggagttggatatagtcgaaggcagtggacagtggtcatagttccaaatgatgtgttgaaccaagagagttagataacatagatggctctgatgaattaatgtggagacaagctgaacaaacacatttcacaagtttcagattaattcgaaaaactgtaaaatcagaagttggaaaataaaatgggtcattagtttcttttaggaaggggttattaagcatgaacgg

SEQ ID NO: 32662 - DNA, 3002 bp, Arabidopsis thaliana landsberg
cggggacaacgtatggaagagctataatatcagcagattctatcctaagagcttggttccaaatttgcggattctcaaccaatgaagttgattcatcagaatctgctctttgcttttttaataatttacctgactgaccaaatagccattcttgttcaacatcatcaacctcatgcaattcctccctttttggtacattcaaaatctgatccaaatatttcaagtctgaatgaggccgcttctttgcagatgcttcatcgttttctttaactttcactgaagaaaccggtggatggcttttgggttcttgagaataaatgaatccgttaatcttgtgctccttaacctctggattagacactgtttcgtgcaactcagaaacaagctttggatgtgtttggcatgctccaaactttcttccgttttccacggatgatataggagaaacaactggcttatgtatcttgtttttcgtagatccattctctgcatgacaattaaagaaactcatgctaagagacaaacagtaataacacaagtaaaacacattcccatttcacatttagcacgaaaaccaaaatctaatccattaataacacttagtgaaaatgaatatcctaataatatataaagacatcaatgagtaatcaagagtaagacataaggtacatcacatataacttttttctttttttggacgacaagacatatattatctatttcaactgaaaaaagagttcggtcagggaaggactcaccatacagcaatccatttgtctcaagatccttccgtttgccaagaattctctcagcagtaaggttcttgacgcctgctgttgaaaagtcttgcactctaaaatccctagtacccacaacgtcttgttctctctctaatctgggtcctccctctacaaactttggtttctcctgaccatttttctttatcacctcagttttctcctctttcttctctttactacttccatttgttatgttttttggttcacttttctttatcccttcattacccaatggcttatcactctttgtcacactgtccctgcggtgattcttctcttgtagttcccgtttctttgccttatcatttttctccactggtttaactttaacctcagctcctttctgatccatgcaaggtgatactcggagaaccgcactttcagacttttttgacatagcagagtttctatgggtactgtttctcttctcgtcaacttttgtacggttggtttgaggtattgagcaggaattgttattctctgtaactccacaaggaaaatcaatctttcgtggactttgactttctgtagcttcttcatttccgaaccttcttgccaggtcctgtataaacttagactctccgttaccattactctgcaaggtatttgttacaagtttttctctgtccccggtgtttgacaaaacaccagcagcttttctgtcctctgaagttctgcttttttcttgatctcgatctttgtctttcctatctttatgtttctcttttctctccttccgttccttatgtttgtctttgcttttttctttttcccttttctcttttccttctttcttttctttatccttcttgtgcttcttctccttgtgcttttcctgcagtttaaatcccacgagaaaaagaccacacgtatataagtgatgattagaagaaaggcatacaaagatttagttacctttacttgtcaactcttgggttacctttacttgtcaattcttgggtcaacttatataagttttcagagaagaaaccaggttaatcatcaaattcaatgagtatgcgtctacattcattcaaggataaaggatcacactagtgatattactaagtttggcatctatggaatacaattatctaacatccaaaaccaccagctacagaaacccatacacttcaatatgtcagcatctcagcattctaagttagtcaaggatcctgcaatgcttgctgtgtactaagaaaaacaagtggaaggacaatcggggcagaagctaatattggggtacttatggttctctcatatgaggcagtttaagtccatcagcatcattacaggtatcaattcctctatcactacttaactgtttgggtgacaatatctcagactcgaccaactcttaacagtaatgctacatttatacaagaaacttatcctgaaacagtctctatgacccttactcaacacaaaggcacccacaaatccgaccatttatcaaaacctttagactatgctaagagcctagaggcaaaacgtgttaccaaagttctctagtcactctccaacaaaatcaatcttagaaacaccagaaaagaacatgattatcaaagaatgtagaacctttatcaaagagtctgatgcctcggttctaatcttcttctcatatcctggaggtggaaatgggaagcaacgagacatgaccacttatccgttaaaagtggtatactttaaaccactctctagttactttgtcgctcctaagtcccagcacctgaccagatcagaatctatgatccagtccaccatatccaataatatcacttagaagctccaaacatttctttatgatctcccaaatttcacttcaattatccttaagtatacactataaaattagtaattttgcacctggggacctcaagatttgtagctaacctgccaaacccatgatgagcagagaaaatcaaaatcggaaccattcatctctcaatttcgttggagttaaataagatatatgagcagagctcaaaagcacctttatatcggaagccgccaacaagttggcctctttccgattgaatgtgaattccgccaatcaaaaaaagataacactttattccaattcaatcctcccacagactcttttgaccgcaattaggttctaaatcagggccacgatccaatcaaaccctaaaaaaaaaacacaattgcaaaccaaatcaccagcccagaagaggaattgct

SEQ ID NO: 32663 - DNA, 2490 bp, Arabidopsis thaliana landsberg
gaagatgtcattacccgaagctatctctcctctctacggcctttcgtcaagtaatctcttcagaggatctcttccaagttcgctcgctcatcggctcaacggaacgggttctttataccttgatcacgttcaagtacccaacatttgaagaaggaagatggttcattctccaacggagaaacaatacctctttaaaattgaactgtgtaacatctcttcctcccatgtttcttggatgcactgccgtcacaataggtcacaagatttatgtaatgggtggttataacttccgctacaataaaaccataagtactgtgcttgagatagattgtagattcaatacgtgtcgacatctccggaatatgaagagggatcgttgctccgcagtcgctggagtgatcgacggaaggatttacgtagtcgccggacgccagagacgatttgatgattgggtcgaagtgttcgatgtagagactgagagatgggaacttgtgcctggtccattctcttcctttgctagttctagtggaaagtttattgtacatgtggttttggataataagatttacattatggatggtgactattgttttgcgtacgatccaaggcgacgtagatgggagacttggggacctgaaagtgcacagaggagttattggcacttgtcgtcttgtgtggttgatgatttgttgtacgcgattgttcctcgggagatttttggagcttcgattgtcgtttatgatccaaggggaatagcttggagacctgtcatgggtttagagttttggcctaatctcgtttatttcgagtctaaaatggcgaattttggtgggaagttggtgattttgggatgttatcggagtagttttgattattacagaaaagacgtttggtgcgttgaggtggctttggagaaacatgaagatggtcaaatttgggggaaggtcgaatcactctcgcttgtgaatgcattccctatgtcgcctttctttgagctttctcgaactgttacggtttgatgactcgatcgcgggatggtttcgcgcattacttccaggtatgtttctatgacgagtttgacctattcataatgataataatgatgttgagacattttcttgagtctcaagtcttagttagggtttcatgaacttgcaggtggaagatcttttattacatctattgttttagcagctttgttgatatgagagcaaaagtggttcagaagcttttatatctgacacctccttatagagtacttttgtgcacaatagaccattattgtttttagcctttctacaaaaattcttatgaaacttgttgaaatgcagctttacttagctatcttctgattttttgtgtagtttcactaacattcttctgtaagtaatcacaatcagatttgacgaaaacctgtttgatctggttttactatatgagcaatatgaaattttggtttagagattaagcaaaacagagtgattttgttaacattatcatacagctgattgagatactatacacacacttagaccatctccatcggaatatctgattgagatactcatcaattaaataataattaaaaagagaaaaagtaggagagaaggagagaaaagtggagaaacgttactggcaggagagacgattctcagcatttattgagagttgtcattaaactaatggttcatttactttaaactaattaaaatatattaatttgattaaaatattaatttatttattttttgagattctctaccacttttgccgatgaagatgctcttagattcttgatatatccagaaaatggctctctcagtatccttttcatcagtgtcccagtcaagacgacgagaacaaagcacttgaattacaaacgaggaatttctaagtagagaaaacacagagacttgtgagtcaagtaatcacgttaatagacatttaaatcaattttaaaagatttttccaatggtgaattgttattaacgtataaaaagctttacaacaaaaaaaatactgtttaaaataataaactttgctattatagtttccccaaaatgaaaaaaacatccaaatttcaaagtggatttcttttttacgtcaaagtgaatttcttttaccaattgttcttttgtttttttccgaagaaacttcatatatttcagataatattgaaaatatgagtaagtaaagaaaaaaacattaaatgataatgatatttaaatatttaatacattaatgaattaaaaagatatttaagaagaacaaaaatattacaaattatcattttggatttttatttctgattaaacattttttttaaacaattttttctgaaaatccgtgcgttacttaagagagtatttatttactcaatatggttccttataaatacacaaaaaacatacaacgtaacagcttctttcaaaaaccaaatttattagtctcgctttccgttaattcgttgctgctgacgtcacacggcga

SEQ ID NO: 32664 - DNA, 600 bp, Arabidopsis thaliana landsberg
ttgttgtaagttgtaacggcagagacgaagtacgtataccaacaagtccgaggcgtcacaggctttaactaacccaaaaatgtttatcatgttccttgatttcgacgcaataattatctttatataacaggcttttgtctttaattctctctatatatgtgttgtgatttgtgaactctagagagaagaagaagatgagtagtgaaaaggtgtcgttgaagaagatgaataagaatgatggtttagggtggattcagtggatgagaggatggtttaatgttgtgcaagagattcttttgcagagaataatggcttctcacttacaaattccatttcatcttcctcctttaaaccacttaacttgtattgtcactggctcaactagtggcattggctccgagaccgctaggtcccaaatcgaaaacataaactttcctttagcgtcttattttgtttttgtttttctgttgttgtgattgtcctgtgaatcttataatgcataatttgttgtgtgaactttgttttaggcaacttgcaaaagctggtgctcatgttgttatggcggttaggaacataaaagcagctcatgaaaatattcac

SEQ ID NO: 32665 - DNA, 4100 bp, Arabidopsis thaliana landsberg
atatgtgaccaaaagtgactacttctccggcttctgttttgaaaataacaagataaatcaaccctacaatacattaacaagattccatatgaaaattgtaggtattacctcttgagatttctctgttctttttcagcccatgtcttcaccatctttcgaggattgtgacgacagtagccatatctaaaacggtaatctccttgtacatatcgatctcgatccctgaaatcatcacagttataaaaatagggtctaaaacaaaatcattaacaacctctattcatgtaatactaatagctcacttgaaaaccagaacagatgtcttgtacacttttattgcaagttccgaaccgtcagattttgtggcatgataaacattagcctgaaagacaataattaaagagagtgctttcaacaaaaaagaataaaaacagataatctcaaatatgagagtagtgaaatgtatcatacttctttgcctgtcgaaatacagccattaacatcgttaaacacacccctattaagcattctaaacaataccatacgcgtccttggatcaagagcctggaacaaagaaaaaaacaacatcaacataatgcttacatcagacccgaatctttgtgtgacagttagagcttacctgttcaacagttgcccggtccgctttatcagtattcctacttctcccaatttctgtatctctaagacttccacgaatcgcagttgtcacagaattcgacatcccaactttaactcttccttcccatccctgcatcaccaattaactcaaaatcacatttccagctacacaaaacctacctgaacctaaaccctataaactcaatgttcatttgagcagagactatgagcaattattcagaagctatttcaaatgtaaagatcatatctttataagaaattcagaagcttttttcaaattctaaacaaaaattcgataagaaacggtacctccaaaggagaagcacgaacgtgactagtaagcttctgggccttatttgaaataggctgaagagcactagagttagggcgtgaaccatgtccaccgtgagcattaggacgacgagcatgaagagaaaagccaccaccaattagctcgtcatcgtctttaccgtctagccaatcaagagcttcagcgatatcggaatctgacgaaagcgagagatcgtcgtcatcatcttcaagctcttcttcgtattccaaaacgggagtaatcttcggtggtggctctgcaactactactactacttcctccatcacttgtttttcgtggaaacaactaccggcgacgagaatcagaagaagaattcaccagccgaaaacccttttctttactcagacaaaacgacgtcgtttaggtttcggttttgaacagtttaactaaaccagaccggacaagaacaattcttggcggtgagtaggattggtttacccgacccgaagataaacaataaacaaaagaaaaacatgtgatgctcatgtgggttcttcttcaactctctcgccgtttctagagctctttgatgttctctgcttcttgcctgagtttagtaaaatttcaagcattgtctcttttactcggtaagttttcttgtttgatacacatattcgcttctcacatcagaaattgatatcaaagtaagttccttttttcttattattctctcgagattgacgaaattgaactctgtttctcgatttctaggaacttatcttgagcactctgttccactctgatttgacctttgaaagagctcttatatagattcttagtatagggattgtgtttggaaattttggatataagtttatgttttgtctagctgttaatgagcacaaagtttcatgctttttagcttgttttctctaataataggtttttgaacttcataggattgtttggagaaatttttggaggtgatggacaacgggaatgatcaacaaatcgatgttggctcggtagttgaagcagtttcggctggtcattcctttggtgctcctctctatgtagttgagagtatgtgtatgcgctgcggtgaaaatgtatgtctctttatctctctcacacacttacatttggttaggtgtctcggtttttaggtaaggtctatgtgtatattccaattgattttacaattggaatttttctgtgtaagcttatctttttgtggatggagaaattggttgaacgcgtagcttgcagtgactgtatttgttttctcattgctttgtaaatttactagaagtgaaaccatctcaatgcctttgaaatcttgccagtttggagcatcttcatcaaatttgagatgggagaaggttggaaatagagaaacttaagtatttgtaagatttagaggaactttaccaagttttattgagattcctgatgttgttatgtagtccttatcctttgtcataggaggaaaggttatacaggtctaggaaacaggctagcgtcgctttagtctttgctttttactttgagcttgttcccaaattgtacatgtttgctttaataacattagttcgttctacagtccaatggttcttgagattgtaatgaagtgtattatagcggggatgaaacagaccttattggctaagtcttggtgatggaatgaaatatattaacatatgtggttctgtggaaatcaattgggaagctttatattgtgaactttcagctactagtttatttttggctgaaatctttttcagttgtaaagagtccaacgtatgagattttcttggtctttctcttgatccttcttctgtgcataaagtagcttcttatttcttttccagggaacaactagatttctattgaccttaatacctcacttcagaaaggtatgttttaaagagtacccaattttgttcattttctagattcagatttttaatattctagctaatgtgagtagacgacattttagaaaactaacaatccactaagttttgttggttcgacgttttatttagaattttctctaccttgtgttagcttagaagcttcctgctaacatatttctggttacaggtcttaatatctgcatttgaatgtccgcattgcggagaaaggtacaacgtcttatgattttgagatgcttttaagtatttgatttgagatacactatatattgtctattttctcaattaaaaaagataagccttttcttgatctctggtatattttataggaataatgaagttcagtttgctggcgagattcaaccccgaggatgctcttaccatctagaggtttcagctggtgatgtgaaggttggtgcattgattcaaatctaaagttttgttcttttcaatagaagtttgttataattttcatgtggagatgcaattatgaggtagcatgtagcctgccattcttataagaaaaaacatgaattatctttctttagttgtctcttgctccctaagctaattttaccttcttatttctctctgaatgcagacatttgaccggcaagttgtaaaatctgaatcagccactattaaggtgagttctcttactgattctgggaaattcaatgcatcttcggattcagtattttcttaaccgagcatatttataagaaacagcttcccctaatctccctgaaaactgtgaattagtttccttcttataatatgaaaactggactgatttgaagctggaaactgatagtagtttgcattaatatatgtattcagattcctgaactggattttgagattccaccagaggcccaaagtggtagtttatctacggtaagtcctcttaaccatcttgtgatacaaactgttcatttttagggggtagttgtttctttgaacaacctaaaaatcttctggtctattcatgacaaaataactattcgctagtcacttggtcgatgaatattgagaagattgccatcggagccctatcagtatttctttgctagcttcaatctggtgttagcagttgggaatatcttgtttccgttaactcattttttggtggaaaataagcctatacaatggcgtttaagatctttgtttttttcattttcgagttccatgtcaatgacgctccgagctcc

SEQ ID NO: 32666 - DNA, 1681 bp, Arabidopsis thaliana landsberg
tcatttttcataaagtaaacagtgaaagcaagtgaataaaaacaaaagaaaacaagaagaaaatgaaaagaggacaaagctcgttgtctggcttgaaatgtatacggctataagaagaggccatgaaaaggggaaaaaaaattgttggtagggtgcacaagaaaaaaaaaatctgttggttgaaaaatttaatttgttatcaaaacgaacgaatggtcactgctttatcaaaaaataattttttttaactacatcataaattgacatgcatgcatgcagatccgtgatagtatgaagtatgaactcagacatgaaaacattcaactacaaaaaaattagaatttgtttggtcatttctaatatacaggaccactcatccatgtttacacaaattaagtaatattacttaaccacacaatcatcacgcttttggtttgtggtcactgcttcggctgctacagtcactcacaaggtccacaattattcacgatcgactcgactctttgacaacgacgtttctaattataaccatcgtgatttatgatatcggtagaccaatgttcaccataaaaacttaaacatataaacaagcaagtggttgtgtagtataggtacgtatcagctttcagtctttctctcaatagttgaatcttgcactctagttcaattattcgattggaggagttatgatccatggtccaaagatatttatagatcactttggtctaaaacttcttggttaaaaaaaaaaacgttgaaacatatatatcatagacgtatactacatagactagagtataaaaaaaaatacacatggtcacctatgatgaaaacttaaactacatgcatcactgatcacttgtaaacattttctcaaaagacttcacaacaaataatttggggaagatttggggagggaggggtgaaacttctagacctaagttcgattctctataaaaacaaaaagcacattttcttgggaagtctgtcagttggattttggcccaattggtttacctagtaggcagaaatacaggcggcctgattaccccctggcattagtcggaaggcatccaaactcgggacagacagtgtggtggtccttcggggagaagtctactctgaaatacttcggtgcgtttctaccggtgctgaccagatcagccgatagagtttatcaaaaaaaacaaaaaaaaaacagctttaacgttcttgaatcttggtgcatatatgatatatcatttgtttacatctttgttgtcgtcaagataagttattccatgattcttaaacaaaatttgtcttgcaaggaaaaacatatttattcgatatgaatactaatgggatggtttcagttctttctttttttacttctctatacttttgttttgttttgcagcgagtcaactatctttgaggagatgcagtaagcagtagactgaatggtgatcattgggttaaccccaacagctgatggcaatatacttccatcacaaacaaacaatccctctgcttcccagctctcaccattctcatccaacgcaccttcctccgcggtgactcccatcctacaactacccatctggtgagccgagaagtacgtcgtccaatactctccttttgtgccaaccccaccaacagcatcaacttcgtctagaaactcttccatggctaaatcaaa

SEQ ID NO: 32667 - DNA, 1050 bp, Arabidopsis thaliana landsberg
catcttgtcaagttgttgagaatcctgcgcttttggattcgattggttacttgaatgataaagagaaggatgatgttaggaagattatgagttctaaacatcttttttatgaagagatgtgttcgtatcataatgggaataggttgcatttgcctcatgaccttgctttgcagcgttcgttacagttggcgcttagaagcagagatgatcatgataatgatgattctaggaaacatcaaatggaggatcttgatgatgaggatcatgatggtgatggtgatgaacatgatgagtatgaggagcaacattatgcgtatggagattgtagggtaaatcattatggaggtggtggtggtcctttgaagaagataagaccaagccttagccatgaagatggagatcatccgagtcatgtgaattctctggagtgtaataaagtctctttacctcaaataccgttttctcaagctgatgtgaatcaaggtggggcggagagtggaagagcaggttcggtgcagaagcagtggatggagtcgcggactctccagctagaagagcagaagcttcagatccaagttgaattgctggaattggagaaacagagattcaggtggcagaggtttagcaagaaaagagatcaagaactcgagagaatgagaatggagaatgaaaggatgaaacttgagaatgatcggatgggattggagttgaaacaaagggaattgggtgttgaattataacggaattggcttcacttctcttgattggtatatagctttgctaaatgaagtctcattttctgcttttgtaagcttgctttgattggaatgatctcgagactttgatgtgagagatctttgtggttgcatcagtgatgaagtttgtgaatgtagtgagtaaggagtggttaatataagcagctctttaaggtctgtcttggctctgcttgtcagtactcacgctggaaaaagataaaatgtcattgttgctgctgtattgtcttcgcacctgttagttccattgtgtagcagttttctcaagattcatccg

SEQ ID NO: 32668 - DNA, 761 bp, Arabidopsis thaliana landsberg
tatatttgtaactactcttttatttgtaattttgctcaaaaaagtgatgaaatgtagttttgatatatgaatatctaccattatacataagtatatctgaacatggtacaacttatgaaagctaaatgtcaatacttgcaaagatataacaaatacaagttacatgaataagagatgtgtgttgaatttataagtgtcattttcttttcactttaaaacaaacttcatcttcttttgtttcttatgtgtcaaagttgccacagttgctctatttgagtctttcagtgtcagtctcagtcactgtactgattttacttttttttgttgagtgtgccaatgatgacatcactcccacgtcctccatccgtcttcttttaacggtcacgtggctcccaccctcttttctcgatgtctttaccgacttgttctagcccaacttacttgggccatttagattttttggtggcccaagttgctgaaagaggatttatcatagaaatctgaacccgttgcagcgctcaacacatgtcacagtcctgacaaacacgtattcaaatccttgttaagtcccgccacctgtcaccagagcaccacgaggcaaactctgatcaggacaccgtcgtactattatgtcggaagacaggaaagcttaattaagcttaaacctgacgtatgtaattgggtaactctaccttactaaagggtttaattaaaacttatcatctctctaaaataaaactcttacttataaattaacttta

SEQ ID NO: 32669 - DNA, 536 bp, Arabidopsis thaliana landsberg
gaatactgcaggggatgagaagtaggcaatgcttctggcacttggctgatctgatcagagtcagttggagttttggtttcgctgctgacgacaggttttgcatcgttttgagccttatcgctggatacaggatcagatgctgggagagtgtttgattgaggtacaggatctgcaggcgctgtagcggtaggagctgctgaaggagcaggattatcgtttgcgttagtggtactcatctcggatctgcgaaatcaggagacgatgtgagacactatcgcgacactaatacacagaacgaaacaagcgcggacaacgatttgagtgcgcagaaagcgaacgtcgtcatttcgcgtatatcattcgccgacgcaattcgacgcgatgccccaatcgatgtagttgcaggatccaaccgtttgatttgctgacttgtcgtatttgtgatgtcagaagcgaacgcaataaccgcctaacatacagtcatgccctgctgatgccatgcgccgaactaccaggacactatgtggtaacatgga

SEQ ID NO: 32670 - DNA, 3991 bp, Arabidopsis thaliana landsberg
gtggttcctgtgtattatggcactagttcatcagatgtggtggtgcaggagcacaagtcagtggatcggataagagaatggagtagcgcactccaagaactgagagaattaccaggccactacaataggtaactgtggattgattaatatgtcgcttgcactttgagaagattaaaattctctacttcaaaatgttttccacttatcaaatctaacaccacaaagaaaaattatacaaatcaaaggttttatatggaacttataatgttattatgatagattgacaaaatgtgaggcagtttatccaaaacattttttgttcttcagtattcattaatgttttcagcaataattcactctgtgatttttaaatcaatgcaaacagggaggaatgcagtgagcgggaacttgtggaagagattgtcaaagatgtgcatgagaaactctttcccacggaacaaatcggaatcaactcgaggctgctggagatggaacatttgctttgcaagcaaccatggggtatccgtcgcataggaatttggggtatgcctggcataggcaaaacgacacttgctaaagcattttttgaccaaatctctggtggctatgaagcttcttgtttcatcaaacactttgacaaggcttttcgtgggaaggggcttcaccgtttgttggaggaacattttgggaaaattctgaaggaattgcctcgtgtatgcagtagcattacgagacctagcctccccagggacaaattaagcaagaagagaactcttgttgttcttgatgatgtgcacaatcctttggttgccgagtcttttctcgaagggtttcaatggttcggcccgggaagcctaattatcataacgtccagagataaacaagtgttccgcctttgtcagatcaatcatgtgtatgaggttcagagcttcaatgagaatgaggctctgcagctgttctctcagtgtgcttttggaatagatataagaaaccaacatctgctggaactatcactggaagtgattgactacgctagtggaaatccattagctctcagcttttacgtcggagagcttaagggaaaggaactgtcagaaatgtttacattcttcaaactcaaactacgtactccatataagatttttgatttgttcaagagcagctacgacacactagatgacatcgagaagaacatttttctgaacattgcttgtttcttcagtgaagaaaatgttgactatgtgatgcgactacttgaggggtgtggtttttttccacatgttgggattgatgttcttgtggagaactgtctggtgactatttcagaaaacagagtgaaaatgcatagaataatccaagactttggccgagaaataattgatggagaaacagtacagattgagaggcgtcgcagactgtcggatccttggagcatcaaattccttcttgaagatgacgaactcgaagcaaatgaagatcccaaagcaacatatactcgtactctggtctggcatattctatcatttttatacaaaacttaattacttttggagatgagccaacttcttgatctatctccttcccttatatttcagggcactgaagacatcgaaggcatacttctggacacatcgaacttaacatttgatgtgaaccctggtgcctttgagaatatgctaagccttagattcctgaagatttattgttccagttatgaaaaccattatagcctccgccttccaaaaggacttgagtttctgcctgatgagctaaggctcctccactgggagaactatcctttgcaatccttgccacaagactttgatccatgccaccttgttgaactcaatctctctcacagccagcttcagaaactttgggcaggaaccaaggtaagcaaactcctatccgctgtcttatagctttttcaaatttttgttatttcttctccaatatgattttctgttcagagcctcgagatgctgaagatggtcaagctttgtcattcccaacagctcactgcgattgacgatattttaaaagctcaaaatatcgagctaattgatctccaaggctgtacaaaattgcagagttttccagccacgggtcaattacaacatctccgagttgtaaatctctcaggttgtagagagatcaaaagtttcccagaagtttcaccaaatattgaggaactacatctccagggaactggcataagagaattaccaatatccattgtgtccctcttcgaacaagctaagttgaatcgagagcttttcaatctcctaccagaattctcaggtgtttcaaatgcttggaacaatgagcaatcaacaagcctggccaaattagtcacgtctactcaaaatcttggcaaacttgtttgcctgaatatgaaagattgtgttcatttgcgaaaactgccttcaatgtttgatttcgaatctcttaaagttcttaatctgtctggatgctcagagctcgacgatattgagggtttcccgccaaatgtgaaagagttatatcttgttagcactgccttaaaagaacttccacagcttccccaaagtctagaagtcttgaatgcacatggttgtgtgtctcttttatcaattccttccaatttcaagcggcttcctaggttttacaccttcagtaattgctttgctctttctgcaagcgtggtcaatgaatttgtaaataacgccctgactaatgtagcacacatcgcgagagagaaacaggtacccctctctctttctctctctctctctgacacaggttgttgtatctgatttattttcgcttgcggcaacaggaactcaacaaatctttggctttcagctttactgtgccttcacctgaaagtaaaaatatcacatttgatctgcaaccagggtcttctgtgatcatacaactgggttcttcatggagactcattcacggttttgctattttagtcgaagttgcatttttggaggaatgccaggctggtgcttttggcgttagttgtgtttgcagatggaaagacacggaatgtgtatctcataggctggaaaaaaacttccattgttggattccaggggaaggtgttcccaaggatcacatgtttgtcttctgtgatctcgatatgcatctgactgcctgtgaaggaaatgactccagtatattggctgatcttgtcgtatttgaattctttactgtgaacaagcaaaaaaagcttctagatgggagttgtgcagtgacgagatgtggagtccatgtttttactgctgcaaatgaagatacgagttctagcatgactaaaccattttcgtcctcggattacctgcaggagatttttgataatgaagttgaggaattgagggttatctatgatggcttagacgagaatgatagaaatttattactttacatggcatatctgaatggcgaggaagctgatttcctggcaccccttatagctagcaatggcttggggattagttctaggctcaatgtcttagccaataagtctctcataaatatatctccgtatggtatcatagtacggcaaggtttacttaagaaaataggtagggagatagtctatagacaatccactctgcctggtagctcaacagtgttagacagagactttgttgaggctgctgcggttaaagagcctaaagttacaacggttaaagtcccgagagttacaaaggtggaagaagcgtatgaagctaatgctaaagctggtgactttagcagccgtaaaaatcatcggatgaagctgaccctcaataggtataagatggtgaagaaaataaacgatgggtgaaaatttgaaaaaaataaaactcttgggattgtttcttaacaatgtaataatttcttgacctttttaaaaaagttattaattttgttcgcttactccagccaaccatgtcaaaacgaaacagcaatcaaagttaagatttatccctgaaatgcagattcgacctgataggca

SEQ ID NO: 32671 - DNA, 446 bp, Arabidopsis thaliana landsberg
  unsure (1)..(446): unsure at all n locations
ttctgggtttaagagagatcgccaacacttttctaacggaatgaataagaagaattttacagacttctatttatatgtgttagactgcgagtctcgaagccnnnnnnnnnnnnnnnnnnnnccaatcaaactttcttcttctgtaaaccaaagcttaccgcttcaataaccaactccaatctgttgctaaaccgaatatcactagaccaacattaaaccggaattggatcataatcataacagagatgaagtgaaagtatgaaatgaagtattgatgtgaaatatagcattgatgtgaaatgtgcggtgtgaagatatgatgtaaaatttatggtgcgaagacttgatgcaaagcgtgtggtatgtgtgtaagtatgtgcgaaaagaattgctttgtaacattcctaagcaatttactataaatagtaagctaggcgaagagagtt

SEQ ID NO: 32672 - DNA, 2565 bp, Arabidopsis thaliana landsberg
ctgtagatcgagtgagtgtaaccttccttctttttttgtgttcccaggactcgaatgaggactggctagccgggacatatgagactctttgctcactaagctcaggcctgtactcaggctcatcaaatctcctcgatggcatctctagaggaggctgtccctgcggaatagctgtagtagaagaggaacagctcagcttatctgtcagaaacttgatagtcttgaaacacttggcgagcagcttgtcctgcttcttgcaccacctctgcagcttactgttgttcctatgagcctcactcaagctcttgctctccctcgctggaggtacatgttcatcaaaatcatacatgctagtgtcgaactccactgctctgtcttcatccttcccatccgaagcagcttcttctagaagatcatcctcatccaatggtggagcgttctcatagtagaggcgcccaacctcaggccaaaaatcaatgttatctccctcgattatccgtggaacctcagagctggggagaaggatgctagctctcttgtctgtagagtgctcaaacctgaacctgtgcaagtcgtcaaccattgcaaactccaagaattcgcagtgacctagaagctcgatatccattgctcgcgggtcgattccatcagaagtgatcgggactccacaagcggtcagaatcggtgtcacaacacctcctatgcacagagcgcctcatgctctcttgtggttattgctgacggtcctgctcttgtatccacacagatggatcagaagaagtacagagagaggtgtgtcattgatttcaccttggagagacatgccattcttagtttggcgaagagttcccttgagagccattgcgatcatctccatatcagaattagtaacagtccctgtgatctctcgggagtaaagcacattggctatagaacgctggaagtacctgatgacagggctgcgtatctgattgctctttgacctggaagaattcagcggtacagagctgccaatggtgatccacaagtctttcaactcttctctgtcatacttgggcttagttcccgttccactgggaaaaccaaacaatccttccaagcgcttgattgataacctatactcatgatcatacacagagaatctcaagaatcccaatccttcacaatccaactcatcagaggtcataccttggtagagctccacttgcagcatggagaggaattgaattgtctcatcttcatatgctacatacggataagccatcagagtgtccagatgacaactctggtacaggtggtgaacatcctccaacaatccgagttgtgcaagtgtggtcgagcaaggatacctcgtgctacagaactcattcagcttgaagagcctaatatattcctcagcatgcaatacgtcgggcttgtgcagaagtttggtggctctgcgagtatgctcaggcatgtactcgtcttccagatcctcgtctataagctcatacctctctgtcatcgctcttttcccccgggctatctcagcttttcttctgcagctttcatattctctctgttctctctctggccttgaagatgatgactctgtctcatccatgttgtagtcaggatcaacataagaactgccactgtaattgctcctgattcccctgtagagatttagaactcaaagctcaaatgtcaataggttagtctcaaacatagcaatgaaacccaaactgttatcaatatgcaatgaaacagaccctgttaatcgagtacaattttgtactcgagtagactgagctgtttttgagtttcccttagacgaaatgggtcgagtaacttttcttgaattcgagtgagtctgctcccagaggtcgagtgagtcgtggaggttgagttcagccggtgaagcctagaggtcgagtaatcactctgacagtgcttcagggctctgttgctttcaagaacaagaggtcgagttgctgttgcagaggtcaagtgaatactcgaggtcgagtgatagtttgtggtcgagtagctttgtcgtaatcgagtggtcccggagacttcgacggtgaacgaggaggagtactcgattacggtggcgcagggatggtcgagtgacataggaaatgaactggtgacggcgacacggaggtcgagtgacggaagaaatggactagtgacggtggcgcggaggtcgagtgattcaccgtggtcgagtgaagtgatctggatcgagtggctctttggacggcgattcgtggtgtagagaaattggagtgtcggtggtgagatgaaaagaggtaggtcgagtggattttgtgaagtcgagtgaagtttcaaaatgagtggtggaggttgagttttagattctctctccagcttatcctcagcgcgtggtccacactcttttgactgacaaaatctgcagaagatctactgtaaactgcaagaaatccttgcaagtctccgtagcttatgttggttgagtacattgatgttattaaaaattttggattttaaacatcacgtatactcgactgatgtactcgaattctgggtctccagatg

SEQ ID NO: 32673 - DNA, 690 bp, Arabidopsis thaliana landsberg
gaataaaaggaacacaatataatatttgttttggaaaatatacgagttcttaaaatgattcatagggatcacttcggattagtgtgagatacatgagagattggcgggcacatattgatgaaatttttccttgtgtgagtatatgtcatagccgtctgccatcggtgacagatttatgaatgaattatccatcaggatttgtgagagatcgaaatatactgatgacgtatcatatgtccatggcgtagaaaaataagcacaagaaagataagaaaactaaacgacataggataaaagaggaagaaaagagagcttggaggtgaaaataatcatacttgtatttttttgtgacttcttatgaatacataaggggttttataactacaattatatcataaagtttaagcatactctaagagtattatgatatatatataactcaacgatacaataacacaatgcaagttgttttgggaatcaccatttatattgcttttggtatttatgaatagaagcgacgtataggtagaaaccatcaggattgatttgccatagacaagaaccatcgggtttgcatcttgatttgtctctatcgagatcaaagaggacgaaaggagtcattttggccgatgatgagaagatgacgcaattccatcaagttgattggttggtgtcaaacataagcacgta

SEQ ID NO: 32674 - DNA, 5066 bp, Arabidopsis thaliana landsberg
agcaccgggcgtgtagcggtcaatagagaaatgtgatacgcggtttgacccatggttcacacttgggtaatagctactggagtaatttctcgaattcatccttgagcttcctgaaactaagaaaaacaaaaacaaaaattaaaagcaaagtgtcctagagttcactctatttctcggacttgtggaactaacaatctctccccggcaaaggcctcaaaaagcttgatgcgtattttagttcgcttcaaactattacccgaaagaccacatgactactacaagtgcacagaatatcagagtagtattttaggatcgaatccacaaggagagaagtagttcacagaaatccttaagaatagagtgaagctaggaccaaaataaagagagggggttgttgtatgctatgagtaactaaactaaaaaactactaactaaactaaacgataagcaataagagagaagcgttaggtcatcgagggtttctctggatgtcatggtttaataaataaggtatagatctcaatctaggtgataacatggttaggtttgtttacttccaaatttttggacaaacgaaactctttcaagaccagctaaccctaacggttagtaggtgaaagccggttattatcactaatatcttgcatactcagttgccctaacggctagtaggtgctaacatggtttcaaaatacaagatcaaagcattaagttcaaattctattctagtccataagttctttattcagttgagctagttcaggcaattatacaagattctaccaagtataaaatacctaagatcatgtactaggtggcgttccagacatacatgcattaagattaaactcaactagaaagaatagtgtaaacgatcaaccaaagccatagaaatcgccagcctagacttcagatctaaaagtccccatgaattcccctttgaaaccccctcaaacccaactagagatctactcgctcatggcaaaggagctaatcaaaagttcggttgagtaaaccataacaaaaagatgaataaaacttaaaaagggtttagagattaattatttgaatgtagaatacaagaggcaaagctccaccttaaagagtcttacacaaaacgagaaagagaaagagagagatggtgattttcaagcttcatgaggtgcggcggcaagctggcagctctcggcgacggcttgggttcgcttgtgatgaaggcacacctagggttagggcttagaacaagtatttatacttgaggggcaagaattaggtttaggggtacaaacatcattccgccgagaagtgagcttcagggaaggagcctaatgatggtggcgcaaagagggaaggacttgggcgtaacctaatggttggtggtgagctaatcggagctgcccgggttcaagtctccttggcctgatttgttttggacttattatttccaaacgaccggttcttgacatgtcttcacccttcgggtcatatcttccaaacggcttcatggattgcttcgattcgactttgacgttaatcttgactcttctagctttccatgcataccaaaatatcttgttgccgtggtggggaaggcctcggccggatgctaaacttctgaaatacaaaaatgattgccttttgatacttttagcttcaaaactcttaaaaccttcttggcatctagaatacgtgtttctcctcttattggctatagaatggtaccaaattctctctgaaacataagaaaacaatagctaaaacgggccaaaaagccgctttatcaagtggtgatatgatgcttcctctgcatctgctggatagagtaattggtcgagtagctgctctcctccttccccagtggtgtgatagagtagagggtcgagtaatctccttttgtacctgaaaacaaaccaaaacatgcaatatatatggagaatgatcctaaatgcctaaatgtgcaaaataagctaaattggttcaaaatgatatgaaacaatgagtaaatacaacgctaaatgatgataaatacaatgttatcaactccccctaacttatctcttgcttgccgtcaagctaacaaaaagacttaggttgaaggagaggttggaaggtggggattcaaaaaccgaaacatgcatataaaacgggtaagctcactgtccaggtagctaattctaggttgcaagatgatagacccttacccaaaaacattagtcatactcgtcacaatgcaacctaacaacttgccttaatctattcaagcattcacatcaaccaattccctttaacattaattaagcacgaacagtggatcaagcaatgcaatggttatgaactcacttggttttgggcttaggttaagagacaaaaatggtccctctaatggtttggtcgagtaacatgggactcttagagaaaagattgagcttcattagaatgctaaaggtaaaagccaacggacatatacaagaagagactctcatctacccaatgatatagtatgatagctcagaagatgatcccattcccatagatgtcctaacggcaccctatttctcattctttctctctttttggttcaagttctaaggggttctctttgaaacgatttaagagtctagcgggtttggttttatcctttgacaaacttaaggcttttcttctaatcttagcacatagggcgatttacccttttatttgaatcacaatgcctaacttctttgaattccgaaccctttactagacttaacactgttgtatcccccttaaaactctaaactcgaactctcggggtgttgtttttcattctcattctcattcccattcattccatacacattcccaatcccaaaaacgagtctccacctagtcctagctaatccaaaaagcgtaggctaggtctacatgaaagactgctcttgtcggctcatacctaacacgttataccaagctcaatcgaaaaagacctcagaatcacacacaaatgatctttggcttgaaataaggctagggtaagggtatgggaaacagctctcaaagtgagagacagctacttggattaacagagggtggtgaagtgaataagataatccaagtatgtatatggtagccatgagttcacaaaaaatacatagacataataattgcaaattcagttcaggttctaatagataaggaatggcatcagataagcgagtttcgaatcaaagtagtatagtcaagttgtaaattcaaagcagggtgcagtcttacttcagagatacaatccggttatttcaacagggggcgaacaacctaggcattgaacttacttcatagaatcaaaacatgcttatcggtttgaaatcatcattatcccctatgtaaatgagcaatcctaaatgcaaacactctatatacaatcctaaaatgaaatgcaatctacatgacactctgtttttgtgaaatcattttctaaacaattttcatatttttatggttttttctatgccttagatgatacaaaaattgaaataagaaaagagaacacaatgttaaacatgtcttgaaccctcccccaaacttaaattacacagtcccttgtgtaataaaaatctgaaagagaattcaagacaaaagcacaaaacacacaaagaaaaataaaaatgctaatggtatgtacaatgactgaggtggtgttacctcagtgatcaggtgaagtaggaggagacgaaatcgtccatactctcctttgtattactccaagggacgggttatgctgaacttggattagctggatgcttgaccctttgttcgggttgctgatcgagtggctcctcaaatggtgcggtggcttgccccagcgtctgatttccttgttcttcttcgcttttgcaacttgctcctcttttccttttctctaggttcgaaggatgattgtcttggtggtgaaggtgcagcatggtgttccctcggctcatatgaagactgtcttggtggtgaaggcggatcgaaatgcataggtttgtgacgagtggatccgcttctcccaaatggcatgctttgtggcattgccgtagttgaagaagaacagcttatcttgagttggagattgttaaatttcttgttgagtgtcacaagagccttgtcatggaacttacaccatatttggaggaaaccaaggcgcttgtgaatttcctttgactatttactttgcctcggtgcggagtactcctcaaagtaaaactgttgtgttgtgtaagactcgtccataggttctgcctcattatctgaatgatggattgaggactcatcatcattcactccttccatcggtacagcttcatcacctgaagtatagaggttctccattggtgggtagaactcaatgttgccaccatctctgatcgaagtggaagcgagttttgggaggagaaaaatagattgtcctgttgtggggtgatcgaacctatacttatataggccattcttttgttgtgaccaaaaactcttggaattgagaaggtgttgcatatcaatccatctcggaggaatcggtgttgaatgtagaggtacattgcaagctctcagaattggtgtcacaactcctcccacaaccctttttcctggtttcttaagtcccttagcccatcctctgtaactcagcaggtgctcgattaggtagaatgagaccgaagtgtctgtctgatctctagctagaactgtaccgtctgatgctaaaccaagcaactcttgcagtactatctccatcaactctagttctctattaacaaaggttccattccgctctcttgcaaatagcgcactagccaaggacctatgaaagtatctaaccaccggactccttatctcgttgctcttggtcctaaagaatgataatacatgcttagacccaagcgtggcccaaaatgactgaagctctttcttgtcaaaacgatgactcgtgtcttttccgcttggaaatccatacatcagctcgagatgctctattggaagccgatactctacgtgataaacagagaactccaagtatcccaaacttccgtctggcctgatttcatcgtcct

SEQ ID NO: 32675 - DNA, 1257 bp, Arabidopsis thaliana landsberg
tgatacaatactgtcacttcgtaggccatcaatcggacagattcatatatcagaatctctggccgaaccttcctctctccacagaatctgaccacattcttccagtcaccaacatcctatgccatcacaacacatataaatcatgtctggcctatctagatttactattcaactcattgaaggaaaaaacaactgtttcgacttacctctcctgcaaaacactcacgtctgagattgacccaccgattcttttcataagctaggcatacgtgttcttcttctccttcaccacaaccaacctgcatcacatcccagatattctgacactgtaactaagaaaaacggaagaactatagcacaaacaaatatgaccatgtttcagatgttttaccattgacacaagccggtagttagtgtttgtttataagccttcttcgtacagccagatgacccctaactccaagtctaaagcctttgttgtttcagatatttctttctcagtttcactcttctcccattccaagactaatgttgcaaaccgacaaaacacaaacaaagttttattataagcattataagtgaaatgtgtacataagaacacaatcatggtggtcaaaacttaccaattgtgaagacaggcgggcatctacttataaagtgatgaacaaagtttgactctccacaacctcctgttttaatgttgcatgacttttgatattccatgcggatcacttttagtatgtccacaaacttcatactctcaaaagcacactgtatatatttaagcataagacaactttataagaggaggtaccagtttctgaaggaacaataaagagagaaatcaatgaaacataccttaagttgtctgattgaatctgcaggcataacaatggcataagaacttttctctggataatttgtaatccatctgcattttctacaactcattctttcattttccgccaacgtaaaaaggcgagttaccaagctttctccttctggatttttccagcaacaccaaaactcaaggatggctacaactaccttagcagcatcactcgactgcaaagagtaaaaaatctaaaaaccttaagaataaagcttattgacaaaaaaaatattataatacaatgcttagatgcatatcttctccacacaaatgacgaaccatggaaataacttcttctagggaactaagtaagtcgctcaaacaactgtagactccctcagtttttatgctctctgacacaaaag

SEQ ID NO: 32676 - DNA, 953 bp, Arabidopsis thaliana landsberg
cggttcaaattttgattgtcgatgctttgattctttcttctcacgttagtttgtttgaaggagaggtagaatgaaaaaaaaaatatatatagatttttttctggagaaaattaaaaataatttaagattttctttgtttagctgaaattattgaggattttttttttcttgaaaggatgcaacttttttggaaaaaagaagataacagagtaatgaaataatccatctgatcttcttcctttctttctcttcgaccaacaacaacaaaaaatattcaaattttttacatatccaaatttagtaggtctaatttttgttttccatcttattaaaaagaataatcaaaactagggttcttagatttctcaatttgggattaatgaaactagtatttattttgggttgggataactcgaattgagttttagttcagtttaatctattaagttttggtttggcattgtgtttagcacagtaaaccaaagataaaccacgaaattccaatttatgaggacctaggattcgaactttcgatttagggagaaattgaactttaacttccattttatggagactgggataaaggttcgaattctgtgtagatatgatgctatatgaaactttctagggggacacagatcgttcacaccctttgcttaactgtgaatgttttggactttcctcccattccatctgcgaatgtcactctagaatctagagaatcaagggcaattgttcctgctcctcgttctaccatttatgaagccaacaaaaaaccatattcttctttttcaagaaacggtgatattagtgaaatctctgaaagaaacaaattgtataaatactatgtttacttattaatccttcttgttggtagctaaagaagatgaccgcaatgatggggaagccccaggtaaattatacaaaatgcattaatactatttcaagtttac

SEQ ID NO: 32677 - DNA, 1394 bp, Arabidopsis thaliana landsberg
cgtttcagagtagaagtagtttcagcttcaccaggaactacgatcttgcttcttaccaagccccccccccctccacccgcaccaagaagcaagatagaatcaatgctggaacatattctggaaggtcagcagaggatcttagagagacctatccctagatggaatgagagcagcctcactacttcttggcatactgctttgatggacagtggatatgagttcgtgaaggttgaggagagtgacaaatttgacgttgcaaaggcagtgtcgaccgacaccataccttggtgttgatcgacaccatcgaatatatacgagacatcaggttgtgacgaagctatattgatcaggctcgacattggtctccagaatcgctcgacacacattgatagtatcgaccgacaccacctgggtgtcgatcgacaccagtaccaacctgaggaagtgtcgacgtttgacagtgcaatatcgatcgagattgagagagtagaatcgataccagatagtagtgtcgactaacacttacctagtgtcgatcgacactggacgtagactgcaccaatcagccttgactttccacctgttgctgaactagtctacacacctgaaattcctcgtccattgcctcaacagtatatgcaagagattcaggaggaacgctgcaaggttccacaacatcaggagaaaaacaggaagaaaaatattgttcaaaacggattgcagcgttgaattttcaacatgctaacgaaagtcgagttgtagcacgagtgttgatcgacaccaccactcgcgtcgatcgacacacatcactggttgaaggaaagtcatctccgatagctacttttaagctgggattaatgctataagtccaggcactactgtcacgtcacccactacacctctcatacttcatccacctcctaaacaaccaaggtactaatcttttggggtcagatttcacccaggtaaccgagccgatcaaacaaatgccacaagtgccgcgagagctaattttgccgtctccccgaggtgggaacattatcctttatggctccggcgtcactccataaacatacccgagccggtcctcgaaaaaccttgggcaaacatcacccagctcggtggttatcctagaagatgcttaagctgagtatgacaacaatccgaggaccggtttgacctggctaggatgaactcttgacctgagccaaaggcacacgttcgtccgaggagaagacttttgaactttgacggggccgaaatatcatttccggaaaacctggaaatgatattagagaatcttcgaggatattatcaaatctggaaatcttcctgatgttcccaaaacaataaggaaaatctccatttatgaaagatcttccatcgccgactcc

SEQ ID NO: 32678 - DNA, 688 bp, Arabidopsis thaliana landsberg
acccatcaagcaaggccccccagataaccgcatttggttcaaattccatatttccaatcaattcaagagcctcatagatcaacccagctttgctgaatagatgaaccatgcctgcgtaatgttcaacattagagacaatggaatagtcatcaatcatgctgcgatatatcctccgaccttcgtcaacaagacctgcgtgagtacacgcagtaaaaacactcacaaaagtgactgcgttaggtttcaccgactccatgtccatcttggcaaacattttcagtgcttcttgtgcaaaaccatgagccggcagtccttcaatgatcgaatgccaacaaaatagattctttttgggcaaattgaagaacaccagaatcgcccggtctaagctaccacatttggaatacatatctaccagtgcagaaccaatgtatacatcaagaacaaacccgttctgtaacgcgtacatatgaacctccttacctatttgcagcacgccgagatgggcacaagctgaaataacaggagacataatagcctcatcaggaatgatgccctactccatcattgtgtagaacactgcaattgcttctctatatcttttattctgcgagtaacccttgatcatagtggtccatgagattatgtccttcacaggcatctgattaaacaatgactctgcttgttccag

SEQ ID NO: 32679 - DNA, 2548 bp, Arabidopsis thaliana landsberg
tttatcatggtattgtacagaaatgagtctacaaggatcttaaatgttggcttgtttattaagccccctgcgatgaaagcctggtggatatagttgtggaacttaggtatggaatctagaatgttgtgtaagcttgcagagaagtacatgttggttaggatttgattacacttgttaggcatatggacttagtttgaataatcatggcaataggctagagaatgttgggagttcctttgttttcaaaacctcttccacgggttcggcttttttgttttgcttgaggggaagcaagagcttagtctgggagagttgatataacctgattttcaccgattttatctatgttttaggtataggattttgagtctttatgttatttctcgagtctttttagtgtctttttaggtattctatgcagtgagataacaatggagataaggagacattttggagcaaaagctaaggaaaaggaagctacgggcgattttggttcaggaatcagcgaggagtgtcgactgacacactcttggtgtcgatcgacaccagtttcggcccagcaaaaaccctagacgcttttgagtttccagaagctcaagtttgccccagaagattttcctatttgcattatagtccctggacgtttttagggtctatatatatattgtttttagacctaagtttcttttatcaagtcttttatcaagttttctacaaatcatattactgagagacataaaccagtcgtcgattgttttcagagttttattgagatctatatacagtgaagagatccattctttccccttctctatttactgtgtttttgctttcacactcaaatatgttgtttgcttcatccaatatgtctgagtaatcttcttgttaggaatagggtttctcattagggattcatatggtttagtagattgtcccccttgttaggttatctgtagaattcttcatctttaattatgcataatgctagatctggagtaattaactagatcttgaatccagacaatagatatgcccgccataggtatctgtagttggatctattatttgatgagtctggtcaataggtgtgtaataagaatcggcctatttactaagatgaacaattgaactcgttaagaatgcatatttaggttgatagtctctcggcttctccggtcactattagctatagatatagagagtttcgcggcacgcccactggttcttccataattagagtttgagtttaagaatggttcgataacaacctagctttaattagatctactaaccaatagtttcctgagaagaccatgttcctagctcttttattaaatcgtttacaacacaatcaatctgctattttcttattttgttttcttactatttcactcataccctgctagcttaatctagacatttaaatcactgtttgaacaaaagaactccttgaattcgatcctaaaatactgcaattgatctcttatttgagagagtagttctaggtaatttgaaccatatctgacacttcaaggtatatttcaagtatttccgcttcaaggaagaattatgagttttcatgcaaaaaggagtagaagtcaacaaaaatccgttttagaacagtttttgtgcctcagatgttcacatccagccaaggtcttacagatctcggcatgagggtatctcggtgtcattggaaagctagaagagtcaaaattaacgtcgaagttgaatcgaaacaatccatgaagacggtcagaagttatggtccaaagagtgaaaacatgtcctagaatcgcggttttaaaaatgatcaatttaaaaccgccgaccaaggtgacttgaacccgggcgtcccctcgagtctttcaccgactactaggacgcacgaccacaccttcccttcctcttgccgccgagttgcagcaagaagcccaaaaacttggcccatcacttactaatcaatgcaaggacgtttctaccctttgacctaatgaagccctataaatacatgtttaggggaaaccctaaaaaacaaccacgaaaaaggctgtctcatgcggctctcaccgccccaaaagtcgtcctcctcttgttcttctttagatctctcttttctcttcaattctctattctctacttgtaacaggaagaagatttatgaagctttggatttcctgagaagatttctaaacccttttctatattcatactctcttttatgcaatttcttattcgtatgatgttgtgttccttgagtatatgtgagtagaactctagttaggttttaaggggggggggggttcaaagggtattcatggggactttagatctgatttagtttggcggtttctatggttttctttgatcgtttacactattctttctagttgagttgaatcttaatgcttgtatgtccggaacgccacctagtacttgaccttaggtatttcattatttggcaaaatctcgtttgaatgcatgaactagctcaactgaataaagaactataaccgttgcacaccctgccaagtgatagggacttatg

SEQ ID NO: 32680 - DNA, 3201 bp, Arabidopsis thaliana landsberg
ctccttcacaagtttacgatatacatcctcatccatttcccaataccgtcccacactgagtgtttaaaacaccgtcacgacataatcgtacaggccaagcacatgtagagaaggtttggaagcgactcgcgttggcctcacatcaatatgctgccagtagctttgtgtcttccttatcccatatgccggtaacaggacgcttgttaggatcttcttttgtcgatgcccccgaagtgctcgtgcgtgctcgagaagtgcctgcagcgtcgtttgtctttcccatacctttgcaaaagagacaaagtgaagtcaagaaatcactcaaaaacaaatcaaagaacttaaacattgtattttagttactaaaactaaacaatgcatcatgaataatcaagttctaagccctaaaatccgttttcccaaagtgtatgaacatgtccgttttttaccagaggagaaattttcaaatctcaaattaggccttaatccaacaattaaatgctcaaaaaggttcctaaaaccatcctagacagaagttagcatcaaataacccataaacatcatgaaattcaaagaattagagatttttcaccttttgaaaacggaaccaaaaaagggaatttcgagctcatacctttgtagatcgagaaaacagacagtagatatgaaaagagaaaaagtccgattgaaataggcaccaaatttgacaaaaacgactaagaattgagagagttagggtttagtgattttggtgttcttgatgaacaaaaaacgaagaagatgaagtggagctcttgaatggcgaaaggaaactcgatctggtgataaactgttcttcgatccggttcaatttaagtggagttcggttcaattccggttgacagaaatccaatcagtttggattacattgggatcccgttctggcatatgatgttgaagctcgaaggaatgaatgggtcccccctcctcaagcattgggatcgatcgatccccatcaacggcgccaattagattgctcgagtaattgcttgatacacttaaccgctaggtagtaaattcaagatcgatccacaaggaccaaagatactctaaacattttcgagactcgttcttagctaaaactaaagaggttgttgtttggttttcttagttataaataaaaatgcaaataaataaaacgattaaagttatggattaaagacattgggcgtaagtgtatttaaaaagataaagactagcaaaataaacaaaacagagaattctgttatgaagaaccgttctcaaacataaacataattctagactaactctctctctctcgagatactagcaactaaatttgactactcaactactaaactttcgttggcattttcctaaccaaatttgcattaatgagttggttcattcagttcacattgcattctaacgtaaactttcgcaggctagaaatacaatactcaatttatattcattcaggcaatctatcgaacactttaaatgcatagaaaaacctaagttctaaagcagggtgatcaatcctattctagcattaagaacatgtaaatcagagaacccagagaataagaattccaaataccaattattccattaaatccattgaatctcataattagaaccctaacacctaactggtggattactcacacattgcaatagaaatgaaacaaagaggtattaaagtagacatgattcaaattgaataaatgagaatagggtttagaaatcttctccaaattgtcaagaaggaatgaatctctaatccaaaaggtgcttacaaaaaggttctcagaaatgttgcagaaaaagatgcgtaaaagaaaacgtaggtttttcgggtttttatacccaattacaataaaagaaaagataaacccagttaaggaaaaccgggttggtcatcgaaaaggatggatcgatcgatccccccttgggatcgatcgatcccgagctggcgggtctaaactccaatctttcttgacttggatcgatcgatcccttcctgccgggtctgaacttcatttggctgatgacctggatcgatcggtcccctcctgggatcgatcgatcccatcctggcgggtctgaaccttcatttccattgttgtttttggtccaaatgagcctgacaagtctcgaaagcatccgcatcccacttaaacacctaaaacctgcaaacgactcaagacacaaccgaaaagacgcaaaagacggactatgacacgacaaacgactcaaaactaaaagacctaagacaccaaaagcgcaacatatcatttagtataaccaaggttatgtcccaaaacaacagttcaatggaggataccaacagctgaatccaccagggttcactcaacaaccacaacaagccccaacagcacaagatcctgaaattaagcaacttattcaataaatcattcaaggacaagctactggtgccatggcttttgacaagaagatagctcaattacacaacaagatcgattgttcttacaacgatctgaatgtcaagtttgaagttctgaattcaaaaagcaagtatgtggagagtcaatttgcatcaacctctgctccgaagcatccttaacaacttccagggaaagcagtccagaatcctaaggactatgctactgccaatgctatcaccattcaccatgaagatgaatctcaaccaagtcatcagactcccaatactgaggacagtatgattcaagaagggggggattcaactcaaattgttgcacctgccacccagcaattcatctggactatagagcacacacctttgttgaatactcaccatccttgaaaaaagttcaaaattgaaaaactcaagaaggaccagaatcaagagttgatcagcattgcctctacccaagaaacatacaagaagaaagtcatccaagaaaagcttgatgatcccggtttattcactctgccatgctctctaggaccattgacattcaataggcgcctttgtgatttgggagcatgtgttagccttatgcctctctctacagctaaaaggctagggatcatggaatacaagttctacaacttagctttactcttagctgacggttctgttgcacatcctcatggtctaatagaaaatgtgcctggcagaattggaaatgttgagatacctacagattttatggtattggacgtatatgaaga

SEQ ID NO: 32681 - DNA, 867 bp, Arabidopsis thaliana landsberg
tattatcttgagtaaatcactaaaacttaatatataattttttaaatttaaaaaataaaatgtcaagtttgaaatatatttgattaaaaaggatcaaaacaaacaaaaaccctcataggtcttcaatgaaattcgtattttagggtagccacaaaaaagttgggaacttagcttgcatctaattaatctgatttaaaaatatatatttgattaaactgtttctttttaaatatgatacgaaaatattatgtgttaattaataacgatattatttcagtgaaaaaaagttaagttatacataatttgaattgaaattaattacttgaatcatgtcaggtacgaccgtacgagtatccaaaaccctaattttttttttctccaaaccccaattttagtacccaaacatccaattcgtatgattgctaaaaaaaaaaaaaaaaacacatgcattcgtatcagctagtaaattacacgatctctctgtatctaaatttttccggatactaaaaaattgcagaattgatcggaattaagtaatactagatctaaccgtatataccagaagatgcatcaattcccaagttggccacatacaattatttcaaacgaccggaacaaaaaaaaagaaaaagaccaaaccattagcacgtcgtattttaatattcttttgtcataatacatacacggtttatactttatacatacacctactttaacccgtacatgtcggggtcgtacctttcctgggctcattccacatcttataattaaaatatacaacttgctaattgttactaattgttcacaaaaatgtcaaaacctaattaataaaacaaaacacgcaaagcataaaaaccctttaccttt

SEQ ID NO: 32682 - DNA, 2971 bp, Arabidopsis thaliana landsberg
cacatttgcaggtaaacattgattgattcacgaagagttaatattttctccactttggttatcctagaatattattataaacaatatttcttcttcagaggacggaaaattttcggggcaagtatattcaagaaggagaaatggtatatggtttacgttgtatagtactatgcatgatttcgatggccaaataaattgaacgtgatgactaatgatactaggtcaacttaaaagagtattaaaaattgtggtttaataaattattttgcataattgtgggttcatgtaacatgtaattttgaatcggtgagctttagatattatataatcattaatactaaagacaattttcataacagtttcattgatttcttgttctaaaaatgcgtagttatgggctttaaaaaaaaaaatggccttatgttaaaagaaaatatatacgtgtataaatggcctttaccatcatcgacttttaattgcaactgcaaaactgaaccctaaaagtgatcagtcatgtccctcctccgccgcattgtacgaaattcgaccgtatcaaaggctgttccggttgcgaaggcgttcatgccttacccactaggaagagatccttcctcactcccaaagcttgatccggtatccatcagctatatcgatagccgcccaatttctctgcgctacagagtcagggcaatgatcgagatgtctaatctcgacgaagcctcgaagctctcgcggctagctgtcttgaacggatttctagtcgacagagacaccgtcttcatctgcaattccgtaatcggcgccatgtgcagcgccaaacggtacgacgatgccatctctctgttcaattactttttcaacgagtctcagactcttccaaacacgctctcctgcgatctcatcatcaaagcacactgcgaccaaggtcacgtcgacgatgctcttgagctctaccgtcacattttgctcgacggacgtgtagctccagggatcgagacatacatgatactcgcgaaagccttggttgatgctaaaagattcgatgaagcttgtgttttggcgagatccatgagctgttgtagtttcatggtctacgacattctaattcgcgggttcttggatatagggaatttcgtaaaggctagccaaatcttcgaggaattgaaaggactggatagtaaacttccagggagagaatatcacaaggcaaatgcaatctttaatgtttcgtttatgaactattggttcaagcaaggcaaagatgaggaagctatggagattctcgcaaatctggaagatgctcaagtgctgaaccccattgtcggaaacagggttttgcaagttctggtgaagcacggtaaaaaaacagaggcctgggaattgtttggagagatgatagaaatttgtgattccgagactgttgacataatgtccgagtattttagtgagaagactgtaccattcgagcggcttaggaaaacgtgttataggaagatgatcgtgagtctctgcgagcatggaaaagtgtcagacgcagagaaactcttcgccgagatgtttaccgatgttgacggaggggacttgttggtggggcctgaccttttaatattcagagcaatgatcaatggttatgtttcagtagggagagtggatgatgctatcaagaccttgaacaagatgcggatttcaaatctcagaaagcttgctattcatcaagccccataagttggatttggtatttttttttccttgtttatccttaaagtcttcttattcttttttttcttttttttttcttctttgaatttttactaatcgattggtattagtgagtttgttgagtgatgtctttttgttgctaaaaccgaactgaaggaattggagaaactaactagaagctacaactagaggtttggttaactaagtactttttagtatcttttgctttttgcttaaatcatggagaatcaataggaaacttgtctacaaaaagtgatgtcttgaagtaggtaaggtgtaggcgtgtgggtgtaacaaagactgtctgtttgctttctctataagagcatcattatttgtggtatcttacccaaattcttaggctaagatttgtgaagaaaagactcttatataagagcttttactcttatatttaagttttttcttcacaaatcttaatctaagatttggctaagataccactaataatggtggtcttatcaatggattcttaaatgtttttgaaaacctcttaaaatattatataaaataaaatataaaaaaataaatagaaaaggattcttttagaagagtaaattgacttttaaataagagattttttattcactctctcctcatcttaagagtctccctcctcatcttaagagtcttcttatatttaattataattttgtgtatagaagtcttaagaaatttgtttaaaaccccatcaataatgatggtctaagtgtgtgtaagaagaaaatggagcaatgagttcttgtaacggtgtttgaatgaaaacaagtttaaagaagaattctagctactcaatgttttcttttctcaaataaacatcaaatatctgagaaaacaacagttttgatacaatatttttacatgttttaaaatttaactaggtatcaatgttttcacgattttttgttagtattttcatttattctttacttaattacttaaattaagttttgagcaaaaaaaaagactttcaaatttccaccattgaagatcgaagctctcttcatttttttagtagagtaaaagttcacgacgaatttagtgtttgcatatattcttcaattaattaaattttgtctctgattaactagttaaagaaaaccaaaaactttgacaaaaaactgtgatatcttgtaacaccaccacgttatctagtggtgcggcgtagtttcccaccgtaatctaactctcctctgcacaacgtcctcaatct

SEQ ID NO: 32683 - DNA, 913 bp, Arabidopsis thaliana landsberg
  unsure (1)..(913): unsure at all n locations
gtgaagtatctaatgtttgttcctgttttatgtttacttgtttatcatttgtttctcaatggggaaaatgagggagttttattagttagtatactcacatattgtcgttgtacttataacaaatgtaattatattatggaaattttgttatgtcatttttagaaaattctatcatttgtatcggtaatgttttttccacatttgaatttatatttcacgaaggaatagtgaaaactctataaaattggtaaattgcaagaaatgaatttgcaaaagttaagtcctgaccgaaacagtataaacgtctgtgggccaaaaggcccgttaaagcccatttaagaagggtatggtttcaattaaataaagacgtttgtctttgctctcaataaagaaaagagacatttcgccattagatcttcttttttttcttcgtaggtcgaacgaaattttgtgtttcgttgaggagaaaattgagccgtgtttgtgttgaggtaagacccaatttccgatttgattgttggtgtgtttatcttttgatagaaatggtaatttagattcgcctaattgatcatctcctgagaattgggctctggaaattgattttacgatctcgttataattatgctgtaattttgttgttggtgttgttgaagatgtctatgatcgatgagccgttgtacccaatcgccgtacttatagacgagttaaaaaacgatgatattcagctaagattgaattccatcagaaggctttctacgatcgctcgtgctcttggggaagagaggactagaaaggaattgatccctttccttagcgaaaacaatgacgatgatgatgaggttttattagcaatggctgaagattgggtgtgtttattccttatgttggtggtgtngagtatgcacatgttctt

SEQ ID NO: 32684 - DNA, 1025 bp, Arabidopsis thaliana landsberg
caagctcctcctctatggtaaaaacgcggcttctgaatagtctgcttgactttattgtcaatgttcaacaagtcaatcagttcatcgtagtgatctttagtcactccaaagaggccacgaagttgtaaatgcttgacttgaagctttcccgaagacttcagatccctcaagacgctcaaaataccatcgatagtgatccttgtgcatccaggcacaccaatctgccaaccacaaaacaacattcggttttaataggatcccacaaatcaattcaattaccaggcacttctataaaaacttacaatattacttattagtaatccaaataagctttaaagtaaattaaggaaagaagctcaccttgactacttgtcggttgcgcgccaccacccgcttaagacaatcatcagtaattctacagcaatctacgatcctcaaacactgcatagtaccctgagccctctcagttaaatgcagtagagcctcttccgtgatcttctcattcaacggtcgacaaatgtggatatgcttccaaagtaacgtgtcatcacaaacagtagtatgcaaagacttgcaaaccatactaactgaaagaagatccttccctcgtaagtgatatagacaagaaccaatcgctggatgaacagacgcatcctcttctccattattgcagcgatcactacttccaacaacttcaccattcctcgcagtctcatggctcaatacctcatcaacactactagcagatatgaaagcaccatgacaagatccatcaccatctaatgcccctccaaacccattattttccccactactttcagggaatttacatgtggaaaacagagacccatcaaacgccccaccaaacaatgactctgatccataactgtaaccactactctgaaactgcattgcattgttccaaaagaaactcaatccagcaaacagctgctgacggtttccatcaccaatccaaatgtcatctcttctttttcttccatatgggttattataataatcctcca

SEQ ID NO: 32685 - DNA, 937 bp, Arabidopsis thaliana landsberg
ttttggtaattaaaataattaattaccaaccctttaattttattcgttggcctatctttaatgaatgatttgtaattgattaggatactaacttctggggatcggtttataccactcgtgctgcgcttccttaccttagacaaagcaatggtaagattgtggctatgtcgtcttccgcagcgtggctaaccgctccaaggatgagtttttacaatgtaagtatatattcacttcttttaattacttagtaaagtaagctcttagggattgatgaatattattatacatataatatgttaattaggcaagcaaagcagctttgttgagcttctttgagacgatgagaattgagcttggtggcgatgtacacattacaatcgtcacacctggttatatcgagtcggagctcacacaaggcaagtacttctctggtgaaggcgagttaatagtcaaccaagacatgagagatgtaagttaaataaatctttaactccttaaccaatataattaatattgaggtcattgttgaattgtgtgttcttttgcccaaaattaactaggttcaagtaggaccatttccggtagcgtcagcatcaggacgcgccaagtcgatagtgaacggtgcgtgccggaaacaaagatacgtgacatagccatcatggtttaaggtgacgtacctttggaaagtgctatgaccggagttgattgagtggcgatgccgcttactgtacatgactggaactggtatgtccgaggatactgcactcaacatgaggatcatggacattcctggtgtacgtaatactctgtacccggaatctatcacaactccagacatcacggctgcttagagaggggtcagcacatcataaatggatgagatgtatcatgagtatgcgcaatgagtgataattatcaaagaaatgggtgaaaatgt

SEQ ID NO: 32686 - DNA, 2308 bp, Arabidopsis thaliana landsberg
cagagggagatggagagtgccgccttaagggtttgcttgaagctgtgatttccgtacaaatacaacgggagtgtacgtatcgaacgatatacagtactgatcctcgtgaacactacttattatatgttgtaaaagaactaaggtttcgattggttgttcgttctcatgcatatctatttttacaaaataaccacttttaaacattttagtataagattttgatgaacactaaacataaaagttagacgtagataatcggagagcatcaacacttgtagtatgttggaactaaaacttgatacttttgagttttaagttttaggtcgttacttgaccaaaatcactttattaggtaacaccatttaatctcttattatatttatattatatcgattcactatcagttattagattgaattattttaaacaaatatttatgttcacaaaaatttcaaaaagtttatttaaagctatggtctgtgtccatccaattcattttttgtatttaatcaattatttcccgtccggtatggaccgtgatgatttaataaaaatacgttaaagcagcttggaccgttgattaaggacgatgtcgcccggatagagagcatcacaatcgttgatgtctccttattaagtatcaacacaccaatacaatattcgaaaaagccgtacttaatgttctttatttattaaaatatcattataccgacggcaattatggtcctacatgccggttattagatttctctcgtttctcgtttccttatttaaagtcgcaaaaactctctctacacagctcataacagaaagaagaaacacaaagtgagacagaactctctaattaggcccgaaggtttcaaaagggtattttggtaaaatcgaaagagaatcatggacgcttttgatgcgattccagatcctgtggtcatcgacattttgaacagagtcggtgacgtcaaaacgttaatacgatgtcgttccgtttctaaacgattcaactcgttagccactcagtctgagtcgctccttctccaactcgatcagatcctcggagccaccgaatctgactccgagatcgattctcctatcgctagcttcttccgatctctcttcaaatccattcacggtctccttcctcctatcttctccaaaccagctaactctgacgaaatcctgacccgatctccgaaaactccggctcagattctctccgaatttgaacggatccggaatctgtaggtggagttatacggtggtgatgtcaagcttgagaaaggcgccgccgttaagtggaaggctgagttcgggaaaactctcaagagctgcgtcatcgtcgctttccgttccgcgacggttaatacttcagcagctacggaagctgccgccgtcgtcgacggtgttgttgagtcagattcggagtttgtttgtggattgaagacgcgcgtggtgtggacgatcacgcgcgttgatggcggcttccacgcgtcattacttgatgagagatttggtgaaagatcacaaggagatggagaaattgattgtgcgtgacagtgatggagaaggtacggtggtgatggacacggcggggatgaaagaatacagagagacggaggtgcgtggggataataaagaatcagagcgcgtgggggaacgaactgtggtacctagcgtgaggatgagtatgagacacgcgccgtcgctgatgctgaagagcgggatttgtctcgaagcagcgacgctggtggtcgtaaggccgactggtgtggcttccgatgataacgatgttgagctggtgacggaggcgttcgccggagatggcgacgattgtatgtacggagaagctgttacggcgttgcttaagcgtaggagaaatgtgttagagatgaattctttctaaggcctagtgggctttttttgggcttccgtttgtttggccctttttaatgtatatacatacgcatcgtacaaagccaactgtactattggcgtacgacttttgggtcaaatgacatcaaatccgaattattcctctaatatcatatgattaccacattaaatgcgttgcagcatctaatattatacatagatatgattcgaaagaataaattaatagcaataatttatgaatttaatactatctggctatctcccagatgtaattattgtggattaaaaaatatgggctaatgtaaaataattcctaacacatatttttgttattgcttattataagggggatttcatgggaataaaagggaatttgccaattttaaagccttattgggatcccgatttttaaaccccc

SEQ ID NO: 32687 - DNA, 778 bp, Arabidopsis thaliana landsberg
gcgttaagtgcatgagcgatgctggattctttcttgacgcgtaagttttctcttgaatcaaatgttttgatctttggtttcggtttaccaacatttactgttcatattggtttaacagaatcgatgtagcagcaaaccggacaatgagatctttttactcacagcttgtgtctctacaggtacatttctttagacccaacaattgtaatgatcaaatgttgccaacaaatttatgattttcttttcagggtatacaaaaaaacctcgatccaagttgcacacacgcatttttccccgaaccatctctggtacaatctaaaatcttttttttttatatacaatctaaaatctttatatacatttttaattatttcttaacaaattaattataaatctctaaaaaaaattgaaattattttgcagtgctttttcccgcaatacgtattgcgatttattaaaacgccatttttcatcttaaattcagcctacgatgtatttcaggtttgctttcgttaactataccggtttaatattatttaaaccgacggtttggtatttctacgctttgctttattttacaatatcagttccatcatggactggttccaccttgtgctgatcaaaccggacgttggaaccgctgtaagcttaatgtgacggcatgtaatccacaccaactcgatgcactacaaggttcaaaaccaaaatgatttagttcaaatgtgaaaaccggtaaaaaccatatataaactgaaccgaaactccggttttgttctta

SEQ ID NO: 32688 - DNA, 6901 bp, Arabidopsis thaliana landsberg
cagcttgcttaccctgtggaagatcctcaatggtccatgtaccattgtcttcacatgctgtaatctaatctcaacaaataatgttttgttttctgtttttgagcataacttaggaaataaaggcatgattgttgattgttgtgtgtgggagattcggaatctccgataattcctctgtcttgctccgttttggttttttcggccaaattgtacaagcttctccatctctaaagagataaattgggcctgagaaaataacagatgggctgaatttgggcctaccaaattctcaacaattgtaaaaactcactaaaaatttggacaacgattacatgtcgatggctggatgcaacgagcctttgagaacagaagttaacaagagcaactagggttgggttttcgtgtacctattcggtttcagatcggtttgtttggttatacttatacctaattcttataggggattttcgaattttttggataatttaaaattttgtttctgctacaatttggatatttgagtagagaactgaaatatttaaatagataactgaaatagaaccgcaatctttttgggttcggatctaatcaggcattttttatccgaactatccaaaataccaaaacaattttaataaatttgaatttattttgcaaaatatgttttatttttgacaaatataaccaacaacatttagatatgttgtctagggtccctttcccggattccaatccggcgaggttttccacgaacggatcacttagtgatccgatgttaaatccgattttaggatccattccttaacgcattccgtttttatcatattctaagattcattactagagtcatatgcacaaaagagtagaataaacaagaatctaagctttatttatataagtaaaaggatttgatacaacttacgagttttgcctataagctattacaaatcatataatcgatcctagctacccgacttccatcaccactcatctttccggccttgagtctcgcgcctaagccaattccttcccacgatccccttctttccctgaaaagccaacaaggcccccaacatttgttcacttagcgcatacaatcaaaccatgcattcttgctaagtttcggtgatgaatcattgggaaaacagattgggagaaaggaagtaagcgcatcagttcggcctagaagcgtcagatctatcacgatcctccgattccttgccgagtcgcatcccctattcagcccatctgtttcaccgaccgaatcatgccgagtatgaacatgcttatgcccgatcatgcaaaacagattataacccgcccaaacaagtctatatcgacctactaaccgatcgccctatcagaattaatattccgatggttgaccatggaattctcaccttttcctcgccaatctctccggccaacgagtttcctctgaaaacaggcgatctcttttaagtagtttcctctccaagaacccaagagagttttggtgagtttcgtttttctgtgtcccaaatcgcattcaagacccttctatttatagggattcggtggtaacagttctcaccaaaaaagacaccttttggcccataaccgttcctgggcgactcttggcgaaaaggggtaaccgttcgaccgcccaaccgctcaaccgcccaaccgtctaaccgtcagactgtccaaccgcctgaccaaccgtcggcctaactgcctcactcccttcctagcttggtcgtgctgacggagctgactgacactccttcgagctggccgagcttccccttgagctggccgagctaaccttgagctggccgagctaaccttgagctggccgagcttctctatagttggccgagcttatattgagctgtagtacagcccaattctggacttgcccgaggttccaccttctccctcggaccaagtcccatccggtaatcctatctaggatcgcggacgcttcactcttcgcatcgggttgtccattcgaatttcttgttcccccgaagcacatcgtaaaaggccaagcacttgtcggtggatcgggagatgaatcggttaagggctgcgactcttccatttaggcgctgcacttctcgcttgttttgaggcgatgccattcctaataacgcctcgatttgattcggatttgcctcgatgccgcgatgcgtgactagatatccgaggaattcaccggaccttaccccgaaacgatacttggttgggttaagcttgacgttgtagaggttgagctgctggaaacattcgcgtaaatgggatatgtgttcttcctcttccatggattttaccaacatgtcgtcgatgtatacttccattgttttcccgatctgtaatgcgaagatcttgttgacgaagcgttgataagttaccctggcgttcttaagttcgaatggcatcactcagtagcaaaacatttcttgttctgtgtagaaagcggttttctcttgatccttagggttcatcatgatcgggttgtaaccagcgaaagcgttcatgaatgacagcaacttgtttccagaagttgattctacgaggcgatcgatgtgcggtaatgggaaactgtctttcgggcaggctttgttaaggtcgatgaaatctacgcagactctccatttaccgtttttttttttactacgttgggtttgctagccaatcgagatattttgcctcggtgatggagctgatccttagtaatttttcaacctcgtctttcacagcttctgctcgctcccgacccaattttctcctcttctgcttaactggtttgaacgtcgggtcgatgttgagctcgtgtgatacgatgtcaacacttactccgggcagatcttctggggaccaggcgaatgtattgacgttctctttgaggaaagcggtaagttcagctgttaattcttctcctaggtcgccgctaccgatttccacacaccgctcgggatttttgtcatcaaggcagatagagattaccggatcggggattggtctcgtggattcccgagactcctcaatctttagctgctataactgctcgaaaattgctttctcttcagctcggccaagcttagctttattatgattcgcgtcggtcgtcgactctgtgacggggttcttgagcttgtgtgctgccatgaagcagattcgagcatttttctgatttccccagatggttttcacgccattgctcgtgggaaatttcaggcagagataatatgtcgaagcaacagctcggaattgatttaaccatggtgtaccgataattgcattgtaaacggtcggttggtcggtaacagagaaatcgacgatttttgttacccctttggctcggactggtaacttgatggtcctgagagtcatagtggtttctccagaaaatctgagcacaggtcgcggagatggtataatttgcgtcatgtcgaccttcatttcttgcagggttgtaagaaaaatgatatccagtgtgcttcccgggtcgaccagaactcattcgacgttgaaatcaccaatggtaagtgtaatgactaaaggatcgttgtgcggacgatccaaaccgttggtatcgctttcatgaaaagttacttcgtcatctgatccgctaaatggccgcgtccagttatgatttgagtcggccttcctttgataagctttgattgatgccgtcgtgtcttgacagaaagccgaatctcctaaaattgtgaagatccttcctcgagcagcttctggttcatcgtcatctgcttcgcgattgcctcagcctcttttagatccttcgagattcgccgcgggggccgcctgctcgggattggccacagcatagacttgctcggttttggccttctccgtttctaagtcctcgatggttaagcctccaccgatttctccgactaggaattttgctgccaactttgccccgaggctacgacatctggaagtatggtggccgtaactcttgtgtaactcacagtattcctgctcgtttcttgcgggttggtccttcgtccaagtgtaggattctcgcccgcgtcctcgtcctcggcctcggggtgtatcagcttggtaattgtgggctccagagaaatttcgtccttcatggtgaatgaatgtcccgtcttgagcgccctttttgtggttcggagcgctgaattgggatttatcgctacgaggcgtttgcttaggcggttcatgtctttttgatagtagttccatttcttcttcatgggaaacgtaatctgaggctcggtgtagggcatctctgattgtctgcggcttggacaagtttagctccttccgaaattcggacttgtagcacagtgctttcttcagagcagagagagccgctacgtcgttgattccttcgactttggctagggtatatcggaattttgcgaggaagtctcgaagtggctcatttggctgctgagataatgaccatagatcggcgtctgacgtgccgggatcgattagcaccgaatattgctttaggaagagcgtcgatagctcctgaaaactgtccacggaatttccctcgagtcttgagaaccaatccaaagctggtcctttcaagtgttcgacgaaaaggtgacagacaccggcgtctctttcgtcgggtctgaacttggctcggaccacggagattatgaatgacttcaagtgtcctttcgggtcggaggatccactgaagtattcaatccttagctttcctggatctgagattattgcgttggagatcgtgcgtgtgaaaggtgtgttgtgggactcttccaagatgcgatcgatgttcggggccgaggagactgcgttatgcatttgggatctcacaagcttcatctcgttttttgccttggctagggagagcttgatagcgcttatttcctgttctctggcgtactcctcagcccatcgaacgttctcttctgaatcttcatcgtccgagaccccgatctgattggcctcgacattttgtgctcggggaggagggagctgcggatcgtttccttctgttcgattcgtgtctcgatttcccaagattgccggctcggctcgatctcttccagtttccggtgcggttcggcggataggcctcatcgtgttgccaggtgtgtgtaacaggagccatgttggactgagatctgctgctgttcgtcgatcgtgaagatgccttgcgccgaaacgagtagtcttgatctgtccttgggaggtagctgcttcgagttgttgcgccaaagaccgatttgcctgttcttgatcttttactttcttctgaagttgagccatcatgctcctcaattctgctaggaccgcaggagcggtggcttcaggaacgtctgtttggtttggagggatcgggtttccctctacgtcaactgtgttaccggggatttgaatgttgaccattgtggattggttggttggttctgtgttctgggagtaagagaaatcttaatcccctccttctagcgcccaaatgtgagagtcgaaactcacacaatcgaaattgtatttagggtttcttcaaagaacggatctttgtgagattctcaaagaacaacagaattgttgattaccacggacggtgtttttgattttattattgagataaagatgatttgatcgtacaagtgtttagaaatatagaaaataagcgttttgccttcaaagtcagcgtttttgatagcctgaggttgagagcatttttttgtgtgtccttgtttgtcctttgaggcgctatatataagggtttggcaaaccgcctctcgcgatattctcggaagatttcaagttatcttagagtcggtgatggagattatctttatccttggagaattttgcgggatcttttatactcgataatatccttagattttccaatatcatttccgggtttttcggaaatggtatttcgatcttgcatcggttctaagtcttctccttggatacgaagtttcttccgagccgggtcaagttggtccttgggtcgcggtcgggcggctcgtctcctggagatacgcctgagccgaatgacgtttacccgaggcatttcgagatccgcttcgggatggttcactgaaatgacgctcgaaccgtttaaaggtcggatcgggacaactccataacaacgtccgaggcgtttcatggccggctcggaatggctctttgaagtgatgcccgagacgtctcggggctggctcaatgttgtcctttgaaatgatgcccgagccaacgatcttggccttaggcatttcctctggtcggctcggttacttgggtaaaatccgaccccaacagttttccccccagctttttaactttggcgggagaggcaatgagcttcatgagtggatatccgagccgactattcatcttcccaagtcgtgaccttgtcgcttcatcttcccggacggtcaaacttccgttgcatgcagccgactctttcttgagaagcggaaacgtttttcgcttattcccgagggtcacgcggacgtttctctttctgccgagcccacgcgcttctaacgcgtttcatcatttattgcggacacgacgcgcctttaaaaatcttatatatagcgagccatccctttgagaatttctcatttgaagtatttgaagaagaagaaatcaaggtttgcctccttctctctgatcttgatattcttattgttttctctttttccggtgaagctccatcgtttctttgttattttgattttgccgattagaacattttgatgtttcctcgtcattcctcatctcgttagacgtctccgagccgagaatggattctaaatctccttcaaccccgagcgcctttctcttcgactccagtgattcgaaccatccagacgactttccctctatctacaaacagagggcggttttg

SEQ ID NO: 32689 - DNA, 603 bp, Arabidopsis thaliana landsberg
tactgtttaatagttagactacaaaaaaatgatcttttttgtaattttcttaaaccaactttgaatactatagataggaaagagtagtatgtaaaacacatacacgatatggattccaaattgttttcctctcttaaagatagacaagtatgtgtagttaatgaattgtctcactaccatccatgcatatctatcctaatttaaaattcatgatgttgattaaaacaaattaatactactagttgttgattaacagttgtttccacgaaaatgagtttttgagatgtaacagttggatactatgctcagttcccaaaaacatgaccaaacataattttgtctttcacgtgactaattactgctcaagccaatgaaatgaatgtcacatcagcataaactctgatcaattagagtcaaacaatggcgtgtaatgtaactatgggaacaaaaattacaagattttttttataatttttttttctttgaatgttggtatgggtattcgaacaaaatatcaaaaagtcactatttttgttacaaatggaatgaccacaaaatctagtacccatgatacataaaatttttatataagcacaatataat

SEQ ID NO: 32690 - DNA, 2668 bp, Arabidopsis thaliana landsberg
acgaaatctttcgtcttttatttccgaaatgaaccgggcatattttcaacaaatctcaccttcacttcggagatacccgagctaaaaactaatttagtcctcgcggcaaacactaaaaccgagtctatcttgcaattcggaaaattaaaccaagtaaacataaaacggtctctacgaccttaaataagttaaaaatatagagttaaggcctcctcggccaacaactttaaaacaaaaacaaaagtaaaaaagttttgaaacaatacggggggtcaccacagaccaataccactccgattcaaacataatcaattttactccgccacttcggagttcttctcaacatcaacggggaacatggcgacgatagctggtttggaggttgtgtccttgttggttccctgctcgttgatgatcaacacttcatccaaagcattggagtctacaaccacttccggtggggtatccaccaggagcgaagtgagctcaacgaggtcaagacgtggagtctttgttcatccgcacgaaccgattcgagttcttcagctatgctggggatctcccctttttcgatctcttcgaggagctcccggttcgctttaacctccgcagctcggatcttagcagctttgacttcattagattcggtgtagaagttcccgtatttcgaggacaagtcgacaaattgagcccggatttttcttctctcatcttgtctcgcagcatggagcatcacggcctgaccttcctcgagcttcttcaacctctcttcgcaagcaaggagttcggcccttgatcggttttcattatcaatggccgtcagataggcgttcttgcccaatttgagtttcgcggagaggtcagtgttagaaatctcgagagtctgaaccctagcttccgcggctctcatgcggctaagtacgctattagcctcatccaccatacgagcattttcatcctcgttatgcttaaaactctcaatctccttgtccttctcggagagctggtcctcgtgactgatgaaggcatagttgaactcttgaacagcctagtaataaaagcatattttgagtatgagctcggcgagagatgaacttattctctaatagaacaaaattatttacctcgttaagcttctccgcgaagaggaggtagttctccttgttggttgccatgagttccgttagaggcggaatggttgctccgaggtgaacaagtgtcctaagcatatcagcgaagtgcatcggaggagctgagacagttcaaaagatacatgagtaaggatttttcaaaaaaattaaggataacgactagggaaacatgtttaccaggcaaaggaagtgtgtcgcgacgctgcgagttgcgggactcagaccccctggaggagagaacgacgagatcttgcgagtctcctttcttgttactccctttctgttggttcgtaccatcatccttcacctcagtttgggcacgagaagagcgagttggagagcgggcctcggtctccgagtgcttcctctgtttatgaacatcccatctcgcggggtcctttgttgggagcattgggagcattcttgctcggagttcttgcctccgaagtggagatctctggaccttttccggatgaagcgggagctttttaacgagctccggtgtcatcctcgttctgaggatgcttggctttgtcaagagcacgaagcttgctgtcctcaagagttccaggcattaccaccttgtcagattgaaggcgttctttttgcttccttgccctttcactctccatcttcttctcagcacggtaagaggaggcggccatttctgcttcggagaatattcggggtttgaactggggtgaagaagaagcaagatcaatcctagagcaaagtcttcgccctgatgcttgaatcctgtcgtttgtaagaactttccaacctaagtcttgtcgacaaaaactggagaagtgggcggcgaaggtcttcgaaataggggttttctcaactcgagctgcgaagaaagataaaacattgatcagttcgtgaaacaaaagttgagatctttaacaagttcagaattaaaatcttcctaggttcgctgtctaccagctcgggtggcccattcagaaacaaataagtcggtcttgtctccaaaggtgagctcatttactggaaaaagaaaaaagattttctccagtgttcatttttctctgggaaatcctcaaacacaaggaaacctttccgaggcgataagaagaaggttcccgaagtgcgacctttcttcacagcgtataattgaaggaggtcggaaagcgaaagaagaaattcatcttcttctgccagagtgagaagactcaagatggttcgaataacgtttgggtaaagctgaggcaatgctactcgaaactcatgcatgaactcgatgaggatataaagaagtgggaagtagagaccgcactccgagaagaaaatttcgaatgcacaagtgtgtccagcagggggagattcgggagcgtctgtcagttcgggggatatcaatttgatttgcggcgagatctgatgggcccctctgagtaaggtgagtctacttgaggttgaaagcgaagttttataagtcatgaacggaccccaatagagcccgcctaggggataattttcttcgaaggcatgaaaaa

SEQ ID NO: 32691 - DNA, 4256 bp, Arabidopsis thaliana landsberg
atttctggtatgcacaaatcgcttcattgttccgagacaaagacaagtacgagtcaccaatgctagtatcaacaaaagcaacctcagactcttgtccatttgctgccatggccatactggctaataccaaatgctcaagggcattctcatgatctcccttagtctcacatataagccccatgagtcttctatccgcggcctctgcgattgaacctggtaaaccgctttctctatgtatagaaagagccgtttcgcagacctgttgagcctcatcaaaccgtaatgcttgtacaagagcttctgctaggtatctgcatgtttcaccaactcttgggtcattttctcccaaaaccttcttctggatattcaatccctcggtataacacgatatcgagctctctagctgccccaccatagcgtaagtgtcacctaactgcatcagaccagcaaatttagctagagcatgctcttcaccttcttcaacaacaggaatctcaacagagcgctgtagaaccggaattgcctcattgtactcttttaacttacaatggactgctgctgtaacatgcaaacacatgatccattccaaacatggtttcccattctctgcagaagcctcaaacaacttagctgctcgatgagttaactcgagagctttgtgtgtactgtcaccagaactaaccaagtttctcgcttggttcagtaaaaaacgtgcccgctctacattttcagatgatggttcttcatttccattttgtaacttggtacctgcgactttcttcttcctcattccaccgactccaacgttcgatttagtcacattcttcttaccagtttgtttctccatatccctgggcatgacttccaaatccaagtttgaagaatttgacttgacatcaaactcttctggctttgccacttcgtcctcatctccttcatcttccaagatatcaatatctcgcatctctcccaaagcaagatgttgtagatcagaatcaatctttgactcatcaccatatgatccaaaactctgccttgaaggagattgattagaactctgcaattcgcagagattcttacataactcttctatagttgtgtcaaacatttggtccgcattagaatgcgattcattaacagaccctccttccattttctttatttcgaataaacagctatctgcacacaaccataacccatatatcatcaatggagctaaagaacacaaaaacggatgcgcaatttcggagaaggctcgattaaaccgaaatcgaaataaaggcaaatacttgaagcaagcccacaaattaaaacatctatagaattgaatacaggaagaatgcattgcagcccttatcattatccaaatacaccaatcgctcatataatcttttttcagacctttcattaggacactttagccgttgtaagacaaaacacgagaggacaatcaacacctatgtatcagaaaaatagcgaaaaggaaatcgaaaggggacaaaagagagaaaacatagagacaaaatctaaccttgtttgggattgtgtcggaatcgaaatccgcggaaagagacaagaacaagggaaatctaagagaagtctaattgtagaaatgacaagaccagaaatgggtcggagggtgagagagagagagttgaaatttcaacttctttctttttttttctcggtggaatgtcaaagagagaggagaaggaggaaggaggagcgggaagagagagaaatgaaaaagttattcttctaatgccgccattgcgctgtctcacgggaacacaaaactgcatttattgctattttactttaccaattccagctaattttggaactgatttttagttttaacaatatgagaaacatgtagattttttcctctccctattgatttgcagaagctttagaaaacttacatggcctgttccgattttcaatgccaatggtgatatatggacgacactaaacacaaaccttaaatcggttttgattatatatttctataactcacctttagccaaacgtaacttttactcttactagcatagttagccaatgactaggaatctatgatagtatatatatacttgacccctgttttcatgtcgtaggggtgttcattatgtatttgatcaaacatatcttaatagaacccaaaaacaaaccgatgtaacaccaaacgggaaaaaaaaacaaatttaaattcaactgaaaattaaagaccaacccataattgacaaatccatagtatatttcgattgaaattggtgaccatattctctactctacaaccaaaatatctaaaaaaagaaaactaaatcaaaagttcttatattctaaacactctcaaggtgattttgctttataattgttagagtgtaaggaacaaagccaaggagtagtatatagttacaacaaaacgacggtgtattggtcactcaggcagtctcagacggttgaaaaggaccaagaaactctgctcagggccaatatatagaaatccaagatctgcgcccttcacatatggtcccattccctattcagaaaacctcatccattaaaaccgaaaagacgaagaaatgatggtcggctcttttgtgtttctatgtattacctttccattgagttttaagagcttgccctcgacccatcttggctttttaaacccaaagtcagcgatttttccttgccctctgtaactcgcaagctgcatatatgtaaacaacttctggataagctgttcattcaaatgtcaatgtggctggaacccatgaaatgtctaagcaattgtttcaataggagattagattgtttttaatctttttctggtaaagtgtttagcttaagcttatggttcttgatcttttattgatttacatgtctgagcatgcttatgttttgggtctgttttttaaactgaagctcaggagatgaggaaagttatcattaccactcccaattcctctggaaacaatccatgattcgtcatgcgactcccattcccaatccttgcacggaatgtcacctaccaacaatttgtgaccctatcttagattgttcacctcatacaaaaatgtcatgatttgaatacaattaaaaaaaagataataacctggccagccggcacatttggatcccctgtcaactttacagcctcaacatattcaaagaactctatatctgaggagttacttccttctgcatcatcccaccgaccatacttacgcttaagttgcactatctcggtgccataaggcccgaatgcacccacatatagacctgcacttagaattcagaacatatttcaagttgagttgtacaaaaacattctgagtccaaatcaaaagaaagagaataacactaatgcacaacatgcttaccatcaaaagggtctaagttgctttcaggagttatgattctattaaatgctgtatactcggagagatggtttcctttttgtgcctggtttatagcaagcttgacaatctcatgcacatgtttcgatacctagaacaataatcaaacaacctttatatctaaaaacattaacacgacaacgtaaaagaggttttaaataataacaaactcctagatctgattctagaggttaactttataaaaagcggtgtaaattcaagtaatataccttcaaagaagctttctctccccagaacgcctcggcaacctctggtggcaacagatctgaaagtccttgagctgcaagagctgttacttgttctttggacactctatttttccttgtatcgatatccctctacgttctcccaggaacatgcaatataaaggaatctctttcagtatccattatatttgccgacacacggacagtctcatcatctatagaggaatcctctatgttatgtagaacccctccgatgacaagcttagtgtttgaatgctttccataatctgcactatccatagatgagattgcttcaatactgtcattttcttcttcttctacttcttcttcatcatcagaagaatttgtttcctcagtgccttctccaaccagctcttcagtagcgtcatcacggccaacaatctcttcctcagggattttaataacatccattactttcagttttagccctgggattttatcttttagaaattttatcacatttttaattccttcttcagttggttccccaacatttagatgtgtatcttcttttttatccaccttcagttcacttcctcgtacatctaaaatggatgggtca

SEQ ID NO: 32692 - DNA, 6042 bp, Arabidopsis thaliana landsberg
  unsure (1)..(6042): unsure at all n locations
cacacttactgtcatccattttaaactgtattgcatcttcagtaaatttcttcatcttggcatcaagttcagccgttgcctcttctcctttggcaatgattctgtcaatatcctcatccgtaattgtgctatctttagaactaaacaccatttcagcaccatatctcaccatttgaagcaactcatccttattaacagctggaaagcaaagaaaagaaatcagtatatatatgtaagagaaaatccaatacatttaacagcctcagtacacaagcacttacttttctgttctgccaatctcccttgctgaataaccagagcatcaagtgccaacttcttgtaagctctctcaatgactttagcctcaatagcattctgcataagaccaatgcagaattagttcaagttctcaaggtcattcttacttcatacacatgggtacaagagtaacctcggtgcagaaccggaacacttgaacttcttttttttgaccaatcctatgtgcacgatcctgagcttgcaagtcaacttgagggttcctgccataatccacccacctcattaggcataaaagaaaacactcataaattacaatggacacaaaaagagccttaccagtcactatcatagaggatcacaacatctgcagtagcaagattgataccaagtcctccagctctagtggataacaagaaaacgaatttctcacttcctggcttgttataggcttctatggaagcatctcgttcgtcaccaccagtatttccatcaatacggcagtactggtaaccacgatacattaggtaatcctcgagaatatccaaaagccttgtcatctgatacagatgagcaaaatcgttggaataagcacaaagaaccaagaaagatatcactcagaaaaaaggaatcaaagataggaacaattatttgtttgcgttaatgaatacctgagaaaatatcagaacccttgaatctcgatccttcaacttaggtagcaatttatctaagagaaccatcttacctagaaacaagaacatgtaaagagaaaataactaagccaattgccacatttctgaatgatctacttgtaatgtaaatcttacctgcgtttgttacaaggtgatctcctgtagtatatgggggaccaggctccgcaccctggaagagataagggtgattgcagcatttccgcaattgcattgctatgttcaacagacgtttgcgttctccaccaccattaaccacttcaagatccttctgcagtaaagccttgtagtactgtttttgcatttgagacatgccaactttgagtattgtctccttttttggaggtaagcctttctctacatctgattttaacctccgaagaagaaatggtcgcagaacctacaaagatgaggtaaatgattagcataagaacttagagaataaccttgataaaatatgagtacataccttgtgaagttgttgaacaacttcttgctggtcgttttcaccagaaatttgaaaccactcgtcaaaagtttctgctgaactaaaaacctcagggagaagaaaattgagaagggcccacaattcatggagattattttgtagtagaaacatatgaaatgaatacaatattaactcatgcaaaataagtacagaagatagtaagaagcatgtctaaggaacacgaaaagaaaaaaaactaagttcaacagactcaagcaagaaagtagtttcaacataggcagaagcaatctgacagaaaaattgaaggatctaaacaattatagatcaaaagatttgacaagtacctgaaggggggttcccgtgataagaagccgatagttggtgctgaaaagtctcatggttttcgaaaggagtgaattctcatttttaattcgatgtgcttcatcaatgattatatatcgccagctaaaacggcgcaatgttgtcttctctttgatagccatctcaaagcttgttacacaaatgtcgaatttccctgcaactagcagttcttcacgaatatgtctctgcattatttaaaatatatctcagaatcctgccaggtgcatataaatgcaaccattcaaatgtaagagctattatgacttactctttcctcgggattaccgagaaatttcacagcacgcaggacaggacaaaatcggcgaatttcattcatccagttaccaagggttgattttggagcaactaccatatgagggccattaattcccctgtactcatgcaggtaagccaacaaagaaatggtttgaagcgtcttccccagaccctagaccatgaacaaaaacaataaagattagcatcagataacatagagagctgaaaaatcttattatatgctaagataattagtggtttaccatttcatctgcaagaatcccatttatgccgttctcatacagccgaatgagccagtttaaaccagctaattggtaatctcttaacttcccctgaatacctgcaatatgaagagtatgaagatcagatctctaaattctacagaatttatgcagtcctacctagaaattgtgaggtcgcaactgaagaatatatcaaacaactctaccaatcaaagaagtgggcataaggtgtcaaatcctataataacttcgactcgcaataggacttgagcaaacatacgctatatcaagatattaggagcaaaacaaaggtacttacaagcgggctgagtgagcaaccgtgtgcctccagatccaactataccaccctcttcttcttttaaacactcttcatcttcctcttcctcggttagtttggaagaatggcgacccctgacgataaagtgaaacccaataaattatatttctggaaacttaatatgaataaccacaatttattttgagataagttgcactcaacacaccttccttttcccttcttctgggacggagacgggtcacttttagcaaaatgtgcaaataactcagtttgctgcagaagatactttatcctcccctttcctttattgttctaataaatggaatgattgagttgtttcaatacctctggatactaaagacaagcagctcagttatttactaacttaccatatcagcatctatggaagcattttgggagtctaagatttgctgaattttctgcttcttcatcttctgcatttctttgagtctagccttctcacgtttgctgatctcagctttctcctcgtcttcttcgtcctacatataaccatcaaattatgaaaagagtgaccaaatatcctcacgagtcacatgaatgtaccatcataatgagcgaccacccatcattgtaagcacttctaagcatacaccttcaaacaaagagagtcgaaaccaaaagacacccaaatatcgaatatacgctcaaaggaaaccctaatcttacttagaatacattcagatttccaaatacagcaatccccgaattcacagccgacatgcgaatgtaaatcgaagagtggaaaacagaaacgaagacatacctcttcagcgtcatcttctacggggacaacctcgtcgtcagagacaggtgcttcgtcgggcgcaacatcttcctcgtcagagcccgcagagcgagcgacggcctcgagctcgtcatcatcttcttccacattggcctgatcgttaacttgctcctcttcctccgacgagtaagcctcgtctgaagaaacttcccgcttcgaagctctagccatcgacgcgcctctacgaatcctgatttcgtctgagagatcgaatcgagggttcctgagttttttttgctttggttagtaaataaacaaaagtgaaattaaaagcaacaaacccgacgtttgaaacgaccgtagcttctattttaccccgttgatttcgagaaatcaaatctacggctgagatgtgccacgttggcttgacttataaagattctcccgccacttgagaagtaagagtttcggaaattcccgccttggaattcgggctttaaaggcccatgggctcgaagttaaacttataagaaagcgaaagtcaaaaaggtcaacttctcgttcttataacggaacggccttatccatttatccgcccgaatcacgtatcttacacctcagcacttgaagttgcgacacgctacacacctataattccaataataccctttgaaagagcctacacgcttgtctcatgcacctttgcgtatagaggatgaaagtggaagttaagaaaaaaaaaaccgaatattcgtattttaatcgccgtttcttttcttctattagcttctgtttcgcaagatcacgacttctatataataatatataagctcgccgtataattttcttgccgggaataatctccgatcatcgtcggaaatttccgaattgttgtaaaagaagtccaatttaggctttggatcctcagtttaatttatctgggacttttggttgctgaaatctctttcgggttttgtcctaatcctcattagtttgggtttcgtgagtctcgttttataaggtatatttttggctaatttgcttccgaattctgctttgttttagctcaattttgcccttaacattggttgatgaacagaggatgatgtggttgtgtttattgtcttcttgcagaacatgggacaaaagagattgttgttcttgctggcagtttttacttttcttgtttcatcttcatatggtagaggtggtaatgcaacttctataatgattctatgtctgtttcctttattgggacttccagtttttttattctcctgagtctctctgagcttaattaagattttaaactttctgtgtaatgtgaagtgcttgggaaattggaaatttaatctggctacagtgatttttcattaaggcctaattacatgttctatcatgtttggaacaaatcaattcataatccttgtagcatcatcatatgcataaggaaccatgaaggtcaaaatattgatttcaaagctttatgttttcgacaatttcatgttcttggtatgagttgtgaggctacgaaggagttaagactgaagcaagtggatttatgttagcttctttcttctaactgcagttctcaagttgaagagcgatgatgatcgacctgtttacaaccatacgcttgccgtcacgcttgtggagtatgcctctgcggtaagttaatggcagattagtgaagtagtaaaagacctttgataatgatttagcttcaaaacgtaataccctgtagaacgaatgtcatttatatctagtgttttgcaagtgagaagaaattatacttgtcctcttcatattttcatttatcattatttgcactactagagaaaagagatgatgctgataacgtacatcagatgagtgaatcaagtttgtaagatgtatgcaggtctatgagtctgatttgacaaaactcttcacttggacgtgcgaaagatgcaatggtttgacaaaggtaaaaaacacatgttgaagcagatcactgtttgaactttgaagccgcaattattgagttgagctctaacgtttgttaggatggtgcaggatttcgaagtaatagaggtcatatttgacgttgaacactgcttacaggtctgctctgatatcataagctacagctggtcatgaactcatgatgtttcttcattgaacaattattaatatcagtacatgtaacttgtaacgacaggcgtatgttggggtggctaaggatttgaatgctatcattattgcatttcggggaactcaagaacacaggtattaaccctcctcatgtaatctaaannnnnnnnnnnnnnnnnnnnnnnnnnnnnnnnnnntcatccaaaaacttgtgcagcatacaaaattgggtctcagacttgttctggaaacagctcgatctaaattaccctgatatgccagatgcaatggtatgctttaacgacaagtatttgtcattgagttggtcaagtactacggtagaatttaatagttatctaaattggcaggtgcaccatggcttttatagtgcttatcacaatacaactgtacggcctgcagttttggat

SEQ ID NO: 32693 - DNA, 749 bp, Arabidopsis thaliana landsberg
ttttttattcatataaagtccatctttaaaaaataactatttgttgttcttttatcaaaagcggaatacgaggacattgttatcctgtccgggctggtgcatgtaaccctcctgacatctgatggatttgacttatcgttcaaaagattcataatcttcccggtttttttagtttgggcttcataaggcccaattagtgccaaatccatcacagtccactagggtttttgagagactgaggatataaaaacagattttgttctttgttgtcattcgccgtaatctgaagaagacgaagcaaatcctcccacaaagaatcatccatgggtcgtgttatcagagcacaacgtaagggagctggatcagtcttcaaatcccacactcaccaccgtaaagggccagcgaaattcagaagcctcgatttcggcgagagaaatggttatctgaaaggtgttgtgacggagatcattcacgatccaggacgtggtgctccgttggctcgtgtagctttccgtcatcctttccgattcaagaagcagaaggagcttttcgttgctgctgaaggtatgtacaccggtcagtttctgtactgtgggaagaaagctactctcgtcgtcggaaatgttcttcctctcagatctattcctgaaggagctgttatttgtaacgttgaacatcatgttggtgatcgtggtgttttcgctagagcttctggtgattacgccattgttatcgctcacaatcctgat

SEQ ID NO: 32694 - DNA, 965 bp, Arabidopsis thaliana landsberg
  unsure (1)..(965): unsure at all n locations
agattacataggagaagaagattgatcttgaagttcagttgcaagtaatcacaacaaatattgaattttcaaggcttcatcatcgttcaagttatctcattgttcctccaccaccattaccaaaagctccttcagattcttggttaaagcgtacattaccaacaataccaccaaaaaacaactcattcgcatggttacagtctcttggcactgatgatgataatcactttaccaagactcaagctaatccaaagtgggaaactatggtcaaaacgtccaatacacagcaagggtttgtgtgcttctccaaggtaaaaaaaaaaaaaagaaacgtccaatactttcacaaatgtgtcttaattttcaaagtcaatgcttggcaaaatgtgttaatacttgttgatcctgttttgttctttcaggaaacactaaaccctataccagagtcatagcaagaccaaaacaaaattctcactggtggtaatgaagaaactgtaaaatttttcacaccaaattacatgtaaattttcaacaataaagaggggatgagccaataaagtttgggtattttgtctttaactatttgtgtaaatctgaatcaaaaagatttcatgataaagagaaagcaatggagataaatgtcttaaatattgtctggcacttaaggagaggtttcttgttgaagtgatgtacagctcatgttaacggagatttcatggcaataattccatgtgacactgcttctttattctctactaatagacttttttttttcgttcttttgtaattatggcttcaaaatatagagctcactaaaaaggaaacttgaaagctgcagaattgaattgaattgaataccttgactaaattagtcactagaggaattattgaaacaatattggtgtgaaaatgatcacatttcatctcttattctctttatatatatagnggcatggaagatcaca

SEQ ID NO: 32695 - DNA, 1213 bp, Arabidopsis thaliana landsberg
taattccacataataaagttgacagcgtgagaccgaaaatcaaatgtggacaagaatatttgtcttataaagacataaagagactgaaggaaaaattatgctcaaaccaaatacttcaaactcaaacacaagaaatggtttccaacattgatcacaaggctatggaagcactcctccgtggccaaggatgcgccaacagcctcaagattctcctcgaaaacggcgaaataagctcagtttcaacaaaaccactcatcaacaccattctcgattctttctcatttgctctgtcttttgtggattctccaaatcatccaccataccatgaatcctcttctcaaaacatggcaagtcatatgtcccggagatcatcgaagcagtaagttaccaacaaaattctacactcaaattgtatgtgttgtatgcaaattttcataaggttctaattcaaaattaagttaagtagcaaatgtgtttttttatgttactttataatatcttctataaccttcgattcaagtgtcttctatatttttgataattgctatagtacaacatcgcagaaaactttgtgtagcagaaggtttagtgaattacagagaccatttcccgattatgtgccccaatgaaggcttcacctggaggaaatatggacaaaaaaccattaaaggctcactgcacaaaaggttagtcaattaggtaaacttgaaaaacagagccaatgctctgtttttatgaatgacattttaatagagtaccggctatttatttattttttaggtgttactatcggtgtacctatgcaaaagaccaaaactgcaatgctacaaagcaggtacagaagatcaaagacaaccctccagtgtacagaaccacttatttgggaaaacatgtgtgtaaagctgttgcagctcatgatgatacatatggttccacaatgattcgattcgaccaagatgtttctgaataattatgcctcagctacaacaattgaccaccatgcaattaccatggaggtaaactccgcagaccaatatcatgaaccaagaatgtgatattagtgagtctttggtgggtgatgaccaattttgggcgaatcagttttcctcatttgcatcagaggacctgctggatgtcttgacaaaactgctcgtattgattagaactttatccacctgaacactaactctatcaagctttttatgttgacatg

SEQ ID NO: 32696 - DNA, 2631 bp, Arabidopsis thaliana landsberg
ctcggacccaaatcaacctttaaccctaagttcaattgacaaaaccccaattaacaatcaacatcaatgtcaagagagcaaaaagactaaaactttcggtcacaaattgaaaatttaaacatgcaaagatgatcgatagaagagaagtacttgaagtttcctgcgaacagggtgattgaacttgcaacttgatccgtatttgcagcttccagttctcatataaaacgaacaatcctctgaatcaggtctcactggatacaccatcatcattctcttctcgctcccttcttcttcctccttttgatcgctgccgaataatgccctcgaatccgtttctacattaccttgagggacactaatcggaacactcagctctttcgcagaatcatccaaacccacattcctcaattgatcacttagctcctcagaaacgtgattgagatcagacggagcccgatcggcgacggtgacggtgacctcatcggaggaagatcgagacggatcgggtccggttgggttcgggtcggaagtttcttcgggcttgctcatgatttactcagaaacacattacaattttacagaaatccctaatttcaaccgagaagagaagatcaaatcaaaagggtaaagaaaaacgaagaccgaagcagaataagaagaaatcaatttgcgttttatcttttttataaaagcgacacaagtgagaatcagaaagaaactgtgtctcaaaagtgtaataattgatagtttagtttcaaaaagcaatatacttattaaaatttgcaatttagaccctgaagttgtctctccactcgcatctctcgtaacacattatataattttgaatgatgttcgattcttaagtttgaaatttttacaaatagttagcaaatcttgaccgagggtaaataactaaatatcattcatgtttaaaacgtagaatgtcaaattaagagttttaagactcaattctttttatcgcattcaaacttcaaatctttggatcttcaactatgtgtaagaagttaacttaaatgtcaatttgcgactttttgtctcatgattacgcatttgtcattattctgttatgatatttcgactgattcttgttgaaatttgaattcgttgaatcagtcgaagatttccagtgaatagaattcatcggaaatcggtcggaaagtcatcatcataatagatctgatgtgtcaaacaacacttatcatgtttcttattttatcaagataagataagatcgtatttataaaataaaataaaagaagggtcagattcataaatggtttattaaactttattagatatttcctctgtttctgattatatgtagtttaaagactttttttttttttacaaaataagtgttgttttcatttatctatgcaaaaattaaaaatatttaataatttttggccaattatattttacagcatatttttttattggttgaattagatatagttaatgatgtttttatagaaaatagagaaattaaatgagatttttatgtgttttcttaatatgtgtgagaaaatcttaaactacaaatataattaatgaaatagagggagtattaatctatctttcagatttttatttataatatatataacaaaataaaattaatttttaatgatagaaatttttacaaaaccttttgccttattttttagtttgtcaccatttgacttagtatatatataaacacaagcacatatccagaatatttactcttgaacaatatcaatcaaacaacaaatcatatacaagcaattatggtcacaaaaacaaaaacaatgtctctatcattgacactcctcctcttcatccttgtttctaccgtctccgtgacctcaacactagaaaacctttcaccggcacctgaaaacaaaggatattggtgtgtagcgaataaaaaagcaacagatgagcagctacaagcgaatatagattggtgttgcagctacgaaggaggattccgtgattgtacacagatcaatcccggtggagtgtgctatgaaccaaatactctacgagaccacgcgtcgtacgtaatgaacttatattaccagaaccttggtagaaccaaagaccaatgcactttcaacggttctggctctgaagttactaaagacccaagccatgacgcgtgtattttcatatcttatgattaatgtatgtgtggtagatttttaagccgaatctccaaataagttgaaaatgctatatattgatcaaatatctctaatctctgtataagtttatatgtaactatatattggagtatattctcaacttatagaacatctttcatatttctcaaatgttgttgatgaattaatcatttttagtacatgatcagatcaatacttgtattaatggctaaatacttcataaacgcaagatccaactcataaaatgactttatgtatcttgaaagagcatttcaagttttttgaggtgataatatacattaaacctgatgctaataggaaaggtttttcttgctggactcgtaacataaaaaaaaaataggctaaaatttcgattatcctatgaaaaagaaggtatggaatctttagcacgagagtattacattggaaaggagcacatgct

SEQ ID NO: 32697 - DNA, 1051 bp, Arabidopsis thaliana landsberg
tatcttctatgtacgcacatcggtatatgttacattatttttagtagattgtacgagatttttctcctacattttatttaataacgaaatataaattttattcaaacattatgtgggatcgatgtctcactaacatcctctatcataaccagataaacttcctccaaacatacattaaataactgaaaaccaagcaatacagtaaacacatagtaaactaactcggcaatcaaccttcatatacacatgagtaatctggactatccagtctcttgagataaagtcatgacacaagcgtatcagggttgttagcgtaaaaatatccctaatatctaactatattaaaccaacaaccaacgcccaatccatctccaacaccacccttctaaatattttctcccaagctacaacaagccattaatacacagcccacaattccgctaataggctgagcaaacaccaatattaaaaacaaaactacctaaccacgtcccatactcatcacggatcacacctcccgctgttgccttccccgggtttccatgcgaggctccgtcggtattgattgtaacccatccctcacttggtttcccaaacagtcggtttcaaggttataggttcgaagaggaattaggtgaaacgatagaggttaattccttgggagacaaggcatttttgattctactgttacttgtttctcagttttggctttatggatgatgtaaaactctatttacttcacagatgacgagagagagattaaggtgttcgagctagacaatggcatggaagtaatatcgcaacaatgtcaggattttctcagagttcttccaaatgttttatcctagatttctctgaaatttgttttaggtcaaagctgctttctttataattgtgagtaccaatcatctttaataaaaaagcttacgtttcagcttcattttcggtatagacacacgcagcaacatcggtattttcttcaaaggtatcataacacaagtgtaggtaacattaattcaagtcacgtccgcaaaaagtttactactaaatc

SEQ ID NO: 32698 - DNA, 1760 bp, Arabidopsis thaliana landsberg
aatcaatttataaaattttttaaaacttttagcattatttagttgaactagttgaactaattatattaaatgttactacgaaaaccaaagaaaaacatttgaactagttcaactaattaaattaaaaataaccacggaaacaaatacatacatgtttttaatctaatccaataagttgaaccaagttaaactagttgaattgttcatataaatctaagaaatacaaattcaaaacacacaaattatttttttcatgtgcaacaaattctacaagtgtatccgagacataaccttgttcttcctcttgcgacgcttttctctggttgatggaaaccatgttttttttttgttttttcaccatttttagtgtataaattcaattggctttgtcgactctgaaaaaaccatctatggccgggtcatccatttcggcagacatcgattctccggtgatgcgtcttcctccgtcgatattgttggatcaaaatctagatcgatatctcgatatttacttcgtccactctggaaacgtttcttttttagagataccatctccggtctactcatatatttcaccggtcgacttttcctccgtcgcagcgtcttcttttttttacaagtgccttgtttgttacactctatctttaggtctcgattgaagaaagtaagtgaacgaaacgaaaataattgtttagatatttgcaatggtagtcagtacaatgtagtaattgaatcgtgttgctccccaaatcaatccatagttgcagaataaatggtacaactgaaattggttcaattgatctagttcaaatggttcaactgatctagtacaaatagttcaactgatctagttcatctggtttaatcggacgagttcaactgatatagttcaaatggttcaattgaatgagttccaatctatttttccggcgtatggtactaaaacattagttttattgagtaaatttgaaaaatgccttctttatgagtttttatttgaaaaatactctatcctatattttctaaaaaattatttttaatatataaaattaataaaataacctcattataatttaatataattaaaactttaaacagaaaaattccataaattaatatttgatttaactataatttaaatgataattcttatcttaaatattttaaacaaaattttgtccaaaataatatatataaatacattttattaagtgataaacttcaaaatatatttagatattaaattgttaaactttaatttaaaagatacataaactatatttatttcaaaaatagttaaaaaaattatcaacaaccaaaacatatttcgaataatacatatctttcgaatttatcaatagcctaattctttttggaatctattacttagatttcgaatttatttaattttaattttttttttctaaagtttgaattctgtttttatttattaagaatacagcttttaaatttagataaaactgttattttacgtattaaattatagtgttatttatattttgggccaggttatttattttattgggcttgggttggattattttggttgaatctgtagtttctatatttttgaaaggttatttggacatttccaccagttttgattaaaaaaagaaaagataaataaaattatagggaaggggtggcattactgatcattatttcggagaaaatggcattcctgccatttattcgctcaatagagatagggagagagataggaacaatacagaattcag

SEQ ID NO: 32699 - DNA, 936 bp, Arabidopsis thaliana landsberg
ttggtcatggggttgttatcgacaagacgttgaaccacttatgactgtgtcatgagcgcatgggttgtgtctaacagagcagtgtaagatccttctagatcatttacaccaattagaggcaacaaatgcttccaagttctataacctcaatgcctagatgtttcggagtaggttgtgatgcaagttttgaagcagatcgcggagcagctttcgaagtactcggatacgtcttggctgatgtttgggttttctttctcgcagcataagcacattcaatcctgacatcctttaagtaatgcaatggattcacaagttgttcacctgagtaaacataaagttctttgtactcataagcaatccgtaaattatttgtgggaacatcaaccatcttgaatcatcgacttgaagtattgccatatccataactgggggtgttgattagtctcccaacattaaacttgatcccaagaaaccctttgtatattagcttagctcttccaagagaaatatggtcgtgattagacgatgcgaagaagtgctccaacgcgaggtgacaagttattcaaagacattctagggtaactgcgtgttctggtaattaacgaggcctacaattgtgattttttcaatgcttaaaaactgttactaaatcggccgaacatggatggagtgattgcgggaaaatgttattgctcttaaaaactgtcactaaatatgttatcttttgcgttgcttcggacgataattaaagatggtgaatttctctatattattgtaagacgacacttttagcgactggatttattatcttatgatgcgagataacggaaagagtgaacggtgtaaataataatgggctatattaatatctatgtctagaggatgaatatattaagtgtcgacggatgaagatcacgtgattaaacctccctcttc

SEQ ID NO: 32700 - DNA, 298 bp, Arabidopsis thaliana landsberg
cccggtcgatgatttcaactcctggtcgaccactcctcggacacggtcgatgaagacttttcttgtttgacaaaaaaaccccaggtcatcctgggggggcgcggaaccaggtgatggatcagacgacctaccggacgcccaggggaagtctgaataggagagaactcacaccggggagggcaaacggacatccatgctttaaggaggcaccccctccgcacttgaaaacccacagtctaccgagagcaccacaactgtgacaacacaagcgcgtgctaaccaggcctaaaagaaaata

SEQ ID NO: 32701 - DNA, 967 bp, Arabidopsis thaliana landsberg
gtgtttccaagaaagtggtcgtgggagggatagagataagatctgtcttcaattgtctgttttctttctacagtcgtgtttcaatcctctcctcacattgtttccctcactaacaaacatataataaaacaagaataaataattcgaaaaaatgtattacgtaaacccaaaacaaacttttgtaatttgttactccctttttgttttttatgtctttccgacttctttgtcctctttgtttcatttttctgacaaatttatcacaatctgtcattatgctatcttgagagattaattttctaaaatcccataaagttattttgtatatatacgtgagggagtatccagtggatacatataatagttattatatattatgcaatgtagtttaacttcagttaaatttgtaatttgtatgtaatatttaagatttgtgcgacatgaattcaaatgcaacttcacaaaaagtaacttaggttggtgaatggtgataatgaaatgcaccacatagctaaaagtgtaacaatttatgtatagcaaaaatcgtatctactttttatcgacaacttttttttttttttttttggtgacgttatatcgacaacttgtttagatctgaaacgttttaattcgaaaaagttttcgtccaccaaaaagttgttagtgtgatatttttatatattactattaaaaaaaacccaggtcaagtgataatacctcattctcgaccgccgcgaaacttcctcaattttcaagtagattcattctatcaggtaaaccctgtttcttcaattctgctactgacattaatgtttcttcacaattacactttaccttgtgtaaaatcagtttgcaagagttaataagagagttcttttaacaatgaaatgaagggagtaggtgcacaccaaaaaaaaaaaaaaaatttgaaatgaaggggagttgtaaaatttttaatttatttttg

SEQ ID NO: 32702 - DNA, 1000 bp, Arabidopsis thaliana landsberg
aatccttttcagctttcgtaaaggaaacggatcgcccccttttgaaccaaattgtaactctttctctttaccattacatcatattcttgaggatatggacatggagaaacgatgacaatgaaaatgagtggcactgaaatccagaaacacttcaagacgcttaaaggaaccattgctattacttcgatagaagatggcgatggtagccacgtggtatggacattcgacttcgagaaggttcacaaagacatcgatgattcacattccatcatcgacgaaactgtcaagtacctaaaggagttggatgaggttcttcttaaatttcacgaataatttaaaaaaattatacaaagtggaacccatatatataattattatatacttattactaaatctcagtatatgaaattttctttaaaaaaaataaaaaaatgttaccgtttataataattggatttgtgatgtatttactcaaatgctttaatttgaatatgcataattaatattactcaatttttttttctagttggagtcaattggtatttgatatattaagcagatgaaatcaatataatttttttggtttctgcataattaatctaatcttgcatgcatgtattatactggttaattaagtgggatgaaacaaaatgcaaattcttaaacttttggtaaaagttaggaagattccatctgatcttaaactttagtgacggggtaaggcaaaaataataaatgtgaatttcatataactttctatataaaatcaccttctttgagaagattattatcaaacccacacaacatatatggcatacataattgtgacgttaaaatctacgtaagtatgagtttcatcagacttctttcaagatttcatagggaaaacgaatttgcgtaagcaagacatatatgtgcattatacagttcttcggtgctgcaccttcacatacaaacatttataaagaacacatggtctaggcaactcttaacctatcca

SEQ ID NO: 32703 - DNA, 3508 bp, Arabidopsis thaliana landsberg
aaatcgttttatattttacctagaatccatttagctttcacggataacatacttagtctttactcttctatggcttaggagccaactcaggcgcaaccaaacgttcttgctaacccatatgataatcagtatcagcaaccgtacactgattcttattatgtccctcaagtttcacatccacccatgcaacaaccaaccatgtttatgccacaccaagctcagccagctccgcaggtttctaaagttttggttttgttgcattttcttttcttattcttccttgcaccatcatgcattaatgaccatccttatctagcagttctcagatgtctagatcaggaaagtgtccgtttctttatgtttttgtctaagggattggtcaagcttttgagatatgatgacatctgaaatatgtatgtggtgctcaaatgcatagtctcttcgtttgtgtgatttttttagtcagaatagtagatggattataataggtatgtggttctttgacctaaaacaaaactccccaaaactgaacattttcagcctctaaacccatgtcctagagaaacggataatctagacctttacttttattcactgctgtagaatctatatcctagagaggtcgtgagaaaattttgtcgtgggaaagtgttttgtttgctatgtacaggtttcttgggccaacttgttgactatagtgtgtttatgcagccatcttttactccagctcctacaagcaatgctcagccatccatgagaactacatttgttccttcaactccccctgcactgaagaatgcagatcaatatcagcagccaaccatgagttctcattcattcacggtatgagaaattttgcctccagtgtgtttgatgttacccgcagttttagtttaatgaagctaacttctaaattttcatcagggaccatctaacaatgcataccctgttcccccgggtcctggtcaatatgcaccttctggcccttcacaacttgggcaatatcctaaccctaagatgccccaagttgttgctccagcagctggacccataggatttacgcccatggcaactccaggagttgctccaagatctgtgcaaccagcaagtcctccaacacagcaggcagctgcacaggcagcccctgcgcctgcaactccgccaccaactgttcagactgcagatacttccaacgttccaggtatcgtacgacgtttcattagcaccttatgtctgttttgtttctgagtaaagtcatataatgatcacctcttgtaaactgatccagcccaccagaaacctgtgatagcaacgttgacaaggcttttcaatgagacatcggaagcactgggaggcgcacgtgcgaatactactaagaagcgtgagatagaagacaactcgagaaaattaggtgctctgtttgtgaaactcaacagcggagacatctccaagaatgctgcggacaaactcgcacagctatgccaagctctggacaacaatgacttcagcacagcccttcaaatacaggtaagctagtaaattgatctcttctgggttccttgtagatgatttcgtgtttaataatcagttttattgacctcaaaaacaaacaaacaggtacttctgactaccagcgaatgggacgaatgcaacttctggctggcaacactaaagcggatgatggtcaaggccaggcaaaatgtgcggtgattatttattttctgggttcatggatttttttttttataaatctaaaggagggacgtgtgtatcaaactccttttgctttcttaattttggtctttttaaaacgccgttgctgctctaatcttcttttttttttttttttgtcatttatgaacctcatctgctacttccagttactcttttgtttagatagtatagagatcatcagattgctgaaacattctcatgtttttggatgttactttaccggacaagtttgttcgtctttctttctacgaattttgttagatttttacgctctttgtttttcttgtcatatttgaaacatggattaagcaaaaagtagcatttataaaatattgttgagcaacaactaaatattccgccagaatctcttactaataaaagggagacacgggtagcgggagtatcctagaacgcgctgagcaaacttttaaaagaaacgtgccagtcaccatcatggcctttttgaggtcgatctcggccatggtgcagattccatgtaggaggaagaaagacatcatcccccacgactacgagggcctcatccttcgaatgtacattataggtattattactttgattaggacaataaggaaaggagtattgaagaaactggatgtaaaagatgatggtacgaaagcgacatgacaaatcaatgtggttgcagcaggccttgtcgatgaaaatataacacctttgggttgtataaaacaggcccatatagcgagagaatgtaggcccatataatagagaatgtatgtttatggacccaaaaacgttaccaccaaattacttgacgtagagagatccgttgcttaaaaaagtatgacttatgtgcgagagtctgagagagacagagacataaaggcattgattggaacgtcgttgactgataacacacattgtgttgtgatgactgatgacttgaaattcgaaaaagtaagttaagtggggagagagagaaagagagctcaacctcaattgtgggttttgaaacccaatgtaactaacctactaataagagttgctgcagtgcaatccaatgcatgtgtgagatcactggcgcgtgagaatcacactgacccaatcgctacgtgtggattttgtgtgtaaatggagatgtcacagagggttgaaaggaagagaacgtgcaaatgcaataaagcgatttcttctggctactacttttgatttacaaaagaaaaaggagtatttacatatattgagggtgcgggccgtataactaactcttatcgacgtcattatttttaacattcatcatttgcagctttatgtttttatcaatttaaccaagtgttttgaaaataataaaaattgatccttgagtgtatatatatgataataaaagaaaactttactgcaataagacttgactattggacccatatacatgtatctttataacttttgagtaattcttttattttttaaaaaggagaagcatttttaacaccaaagctttattacctctgggagtatattatgaaacgacaggtcaaatcaaataatcaaactctacttgcaaataaaagtttgaaaatcagaaacacacattctgtaatctggttgaatacttgaatgctgaaaaaaaaagaaaaagaataacacattatacttgataagagatgatgataaaatatatactagaatcatatgggtacaaaaatacatgataaaaagagagtgtgtgtgtgtgttttgttgtgaatttgattgcaaaaatccaaagtttgacgctttgacccactcacttggg

SEQ ID NO: 32704 - DNA, 580 bp, Arabidopsis thaliana landsberg
  unsure (1)..(580): unsure at all n locations
gcattttagctgccagtagaacaggtatctaatagcgactcagactaagtaagaagagataacattcttaaggatatcatagagacaccataacccgttcgtaatcactgtatagctaaggagtattctcacaggaaatgtttcactggtcacttagtacacatgacacgtcaaatctgtgtatacaaaatatctatcggtttataatatttaacatcgtttcagtgggagaacgttcttggttctacttagacatgaattgacgaaaaagcctgtccacaatacacaggtaaggccacgactgagagacaaactatatacttacattcacacaccaataactataacactctctgttcaatgaggcgaagcagctcatagaaaaaaccaagctttattcacataatcaagctntattcatgtcgctgatgattagagctttacctgtggtctcatgtctcttcataccctccattgacccagagacagagctcttgtcacactccccattgaagaactacagccaagtcttcccccgttggagcaacacagagtcgaggttggtgaagacctaagctca

SEQ ID NO: 32705 - DNA, 5856 bp, Arabidopsis thaliana landsberg
gtctacaaaataacatacttcatttatttcctccaaagatatgactaatctttcaaaagacactgtttccagtttcaacaggggaagcagaataagaatgattactatgttttcaaattagcaaaacggcgtttttgttaatgctttgggacagcaacaatgttttgttttaaaggctttagaaaatcgcactcttatttacctttcatcacatcagtagaattttgctccagctcctgtacatgaacctaacaaaggacgaatgagatggtgagagagaaagataattttcttttcaacttaattataaaaattcgacacagaatataaagaacaacactcttcttaaaacttacacgataaacatctgcatggttacttccattttctctaaagatcagcttaagcatgtcagcaatgatttctagtttgcttccagcgttggtcgctgttcgttgtttttcctcctccaggaacactgcagcctcctcaactgtaccaatgagtttaggagcagtttcgtgagtgatgttaagagttttaagcatttcatatatgtaaggcccaggcttggtaaatccctcgtcccttttgggaattggcactttagaaatcagttcctgcagcttaagaagcagtcctgcaagagaaaaacaacgatagatgagaacaggcattcatgtataacagaacgttgtaatctcagtcaaggcctaaagtttgacctttaagtatagcaaaattctcagggtttatggaaacgtcatttaatgaatcccttcttgctgccgcaagttgtacacattcttgcgcttcagaaatgcaagccgataaaagaacagaaggaaggtcaaatgaagcagagtctgcgcataaactttcctgcgcatgttttaaagatgaactgagtgtttcgagaagttggaagcagtataatcgtttggtaacccggaaaaatagaacaaaaccccaagaaacgaagagttcatgatgaacagagaatacataaggaaattatatgtgaaacaacattagtcccttaccagattgtgcgcttcatcaaaaataaggacactattagtccagttgactttcaaaaactttctatacccattgctgatcaagtagttgtaaggtgcaaatatgatgtccacgtccttgtgaagctctcttgtgatataataagggcatctgaaaaatacaaatatagtacacagatggaaaaagccaggaacgtaagaaacgaaaatatttgttgaagtagcaaaaaaaatagaggaacctacggtccagaatcttttccaatataaaccaaatcctcaatgtcaacaggttcgtcgccaatatgagggttatgcgtcaaataatctacaaaagattaaaggaaagggaaaaatagtaaccataattcataaagaagaaggatttataaatggtcgtttgatgatggctgtgtacctggaaggcgattgaaatggttgcattggcgtttaccgcgctttttgcaaaggtactgacaggcattagtgagtgctttgccacggagggagttgacttcctcattaacgcataactgctcccgtgatccaagcaccaccatcttaggcctacaaaattgattgagaagagatgatgagcaggtagctataaggcagaaacagaatttgtggtgtgtccgacctgtagctacttctttttaattctttgatcacttggcggagctgactatgagtccgggacgcataaactatggtgggaaaagctcctcctcctcctccggattgtgacagaggctcgtctgaatcggaccaaggaatggcactgttcttccgatccttacgggttgagaaagagcccagactctttcgccaggctaaggtggcacagagaagacaaagagttttcccagttcccgtaggactctccaaaagcgcatgacatttctgcatcatcatcacaagttataaacaagattagttaacaactaattcagcgttaaattaagaacccaaatggtcagtgtgaacggggaagaaccctaaaaagcgatatagaattggggaaagcaaaataaacaacagaatagagagagagagagagagagagagagagagagagagtatcatcacgcgaatatcatcatcaacaaaacagttgaagagagttggtgtgtaaaaaagagagagagagagagggagagggaaacccacgttttgaagagactcgatgactctgtccatgtatatgatctgagactggtacgcctcgaatgggaattcaacattgattcctctgatgctgtaatttggcattttcgggtcggattccgccgataacaccacaaaacctctccggagaagacgaagaagaagacggaagcagacgcgcctcttctgattttcccgccttgtagggcttccacttcttgaaacaaccgtaaagcccattataacccactactttattaacaaggcccattacctgatacctgatggtctgtattggggcccccaataaaccctaaaccctaaactatttgggggagttaaaaagttttgttttgttttgtaatgctgtgtaccaaaatttgtccgagttagtacgattttctccttagtcgcgttttgcttgtatgtgtgtctctgaagaaaagtgatacagagagaaagaaagagaagggagccaatgagagaatatcaaaactgtgaaaaagaagtttccgtcaagattccaggacaaaagtattgaattttttgttcagtttatcaatgtaaaatctcatttctctttcactcttcctccgatcccgactcttcagaactcgactctttcttctgtttcacactcccattggccttcttcgaccctctcttctcatccatatctttcttctcatcctcatcttcactgtactcactttcgtaatcatcatcgtaatcctcctcctcaatctcatcttcctcctccataccttcttctgcaatcgcaccctcatctgaaccaacccacgtgtccctgccctggttcttttcaggactttcactttcagtgcttgctttttgtcacacccgatccatgtgtcacacaggcagaagcaagtcaagttgtatgttccctctgccggtgcttggagtttacccattaccagccttgaccctcctttaaccttctcaatcgcttctctcactgcatcgtttgtttccttcacccctgcacccgaaccttccattgactcactgatggcttttgatgcagccgttatcgctccaccttcatccaggaagctaaccttctgagagaaccaaacgttgttcgacaccgaatcagccagaagaacccaatagttttcctccttgtggaaggggaagtagggtgcatgaggaagagcgcctacaagcccattgggtcgtttcagggtgacccaagcttgaagggtcacaatgtctccctcttggatcccctcttccccttctgtttcacatgtgatgtcgactgtaatagacggcatcatttctagcaccttctcaatgtcctcaacatcagttgctgataaacccgctacctgagtaagtagttcagaacggtcttccaacctcatttcttgaagatcttggaatgatttaaccttctgaaaataggagaaacaatgacatgttaacataaaatggaggtttatatatgtctttagactagacctttaagtaaaccaacctaaagaaccactactacttatttggagaacagaatccaacaagattctcaggaatcaaaaagtgagagaaaaatgctcatgatatggaactagatattagtactgcacttgacacatttgatagttagtataccttccgtgctatctttttgacaacggcatcactgaaatgagggagctgtaagaaaggggaaatgccttctgatgatactccagaagacttccttgcactaagaggaacagcctgcgattttggatttttagtttatgttcctagacaacaacactaagcacttcttaaactttcaggaagaagtaaatcttgtggagaaaagagacataaagaactgaaagctcacaaacaaataaaaactagaagataggcgatgagagtaatttaagacctgaacaatgcactgagatagctcaactactccaactgcaggcctcagccatccatgcccttgggcagtgcgtggtataaccgccatctgcaagaaactcacaatgttataatgaaagaatggttaagaaaaccacaatttaactgtgtaaccaaaagcatcactattaacctaaatttctaagtcttttaagagtctgtttcgagttcctctaaggaaaatacatatcttctaggttagcactttgcggtcatcgctttttgatggttattttatcagaaattgtgttatttaaatagagactagaccttcaataactcctcaaggaggcgaggtgcaagctctagcacacgcctgaaatcaccctgaagggctggagacaggactcctgattcacgagttaactgggcctgtatcaacagctcggtctgtacagaaattgaggaagtgagtatttcagtttatccaatatttagcattacagttgcataattttaaaattcaccttcactatggcaggatgctttttccaaaacttagcttgctcttgcttcaacttcttaggatccaaatttagctcgcttttgacagacataaagagtttctgcagagattcatcatcggatttacgaactggaatctctgcgtattcagctgctctgatgaaaatatccataactttgcttggagttaaagagggttgcaataactcgaaatatgcttgacgagtttgaagcttaacgtgattcccagtatactttgatgatctccagagatagattgaagcgatcactagtggcaaaagaatacataaaccaactgtacacaacaataatatcccaccagattctccattcatgtttaaaataaattgaggaagagcaattcccattgtataaccctgcatcaatcacatttacaaatatttcaattatcatttggagacggcaaagcccataatatgctacaaaaacatgagaatatggcctcaattgtttcaaacactcctttagatttgcatttgaaattgcgagcacaatttacaaagaagtttcaattttcatttgaggaaaaaacactattctaacatgtaagtgtaaaaacaaacaaacaatggaggttatatagtcattacctgtctaccatccggatgaccgtacttctcaaagttttcgcgggataacggatcagtcaaagcttggtaagctttagctatggactccacaaaatatttattggcctctgtaccattacaatacacaaataagcaatactaagaacacataacaatgtatcaaaagggaggaaataaacgattatcaaggaagaggaccaggaagcatttcgacctggatcaggatttttatcaggatggtattgaatagagagtcttctatatgctttcttgatttctgaatctgaagcaccaggttccaaaccgagtataccgaatggctcaaagagttgactctataatatttacccaagataatgaataagcaaatgaagcaatcttggactaagcttgaagagataattattagttattacctcacggctcatgttcttagtatgataaatcaagaagatcattacaatccaaagtaggacaactgtcaagttgctacaagaagtgaagctagagatctgcagaagacaaaatcaaacccgttccagaggtaagaacatcatacagttaaaacaaaaattattcggaaagagttagtgtgggggaaaaag

SEQ ID NO: 32706 - DNA, 3235 bp, Arabidopsis thaliana landsberg
  unsure (1)..(3235): unsure at all n locations
tctatggggctttcattcgtgtctgcacatcctcgttgtacacctcctcaaatctaatttcacgcctttgaccaagacgcttcatccaacaatcaactacaacatcgtgcttatcaatatcatcctctactcccatgatttcagccaaaagaggtacttcttcagccttctctctaattatactctcaatgacttatggaaataatagacaatgaaatattagaaagaaataaaatcatatttgctcaaggaataataggaaatactaaccccagttgttccgagtacatggttgatttgctcaagggtaaaccctttcatctcggtcctcttgaaattcaccttgcacatccttggacaaccggcatgtgcaccctctttttcttctatgaatctttccctaagtgatggaatggcctcaaatgctaaaaattacaaaaaaacacatgaaatttaattgttagcttcaattacgaaaatgtaacaaggataaaacaaaagacttacctcaagcggcacacagaatccgggaacaggccatggtgactgagtgttcgggacgacaccgttaaaatgatccaatgtgtgtgagatcgattttaacatgtactcaaatgaatatctcccccatggaaatgtcttacaaaacgtaagatcactcgcaaccctgagatagtcctaacacagaaatcaagtggactagccctttctcaggtcttagtaggcacgacaatgatgcttgttaaaaactagagaaccgccatccgcaacttatccttagatctagccggttccatctcactaagcttcgttctcacgtcttcacgtctaattaccccggttttgaagtacctgttggcgaagttcaaactaccggcactctgatgattagctggataggtcttgcagttaaaaccagagatcaaagcatgctccctaataccaaagcggatgggaactccattaacaacgaaccaaacctccttcttcttctcaatagatgtcgttcgaagaagaagcatccacatccccattaacttgtggatatatccggatggcaggtggtagatgtgcttgaaactcggatgctccttaaagtaattcttctcaaaatccgttaggacatgtttcaagtcagcgaaggtcttcaacactttcgagatataacacctcgttgctaacttcatcttcttggtatactccgacgccaggaagtacataccaagtggctgcattgccatcgcttcctccatatcctaaaagaaacaaacattcattcatatatcactcaattgtaaatagtaatgtcatagtattactctgtatttctcagagtatagaaagaaacaaaaatagaagtattccccgaaattaccagtattacacagatcctcctattcatatatcacgacacataagaaacgacaacgcattacatattctactttgaaccctcttttccaattagagtctcttagccacttagagtattcttcttctactcatacttccttgcgactttgccagctctcgtgcccttcctcatgaaagccaatggcactacgagtgtatcattaccccccccccccacccccaccctaaagaactcaccttgtcctcaaggtggaaattgggttactgagctgaaaatggtgttgccggttcccaagtatcctctgatgctggcagcccttcccagcctatcaacacttccacctcgctgtcaggagatactcgacgaacagctttaaccttctctggcttagtgtcccagacatttttcggagtcacaatcgctggcagatcaatgattgattctccagttctcactaccttcttcaacaatgacacatgaaacactggatggatcaaactgtgagtgggtagcttgagtttgtaggctacctttcccaccttctgaatgatctcatatggtccgaagtcgcgaggagttagcttctaattcctactctatgcctccgaagcctgcctgtaaggtttaagcttcaagtacaccatctctccaaccacatattcgacctctctgcgatgcttgttagcctgagcttccatcctcttctgggctgcctcaagattcaccctcaactcttttagcaactcatctctgtccacagtcatcttctctaccttagcgttagtggacggcacatccttatatctcaaaagtcttggtacctcacgtccatacacagcttgaaaaggggtcatcttgattgcagaatggtaggacgtgttgtaccaatattcagcccaaggtaacaacttcacccagttctttggcttatcctgcaccaagcatctgttggttttaaggagacaacaagccggcaggagacagtgtggagtatttgttggtttgacacacttgacattccttaatgaactttgtgatatccttcttcattcctttccaatatacttcccttgacatcctcttgaatgtcttaagaacaccttcatgccctcccacaagactgctatgaaactgttccattaactctcgggtaattttcgatcctgcaagtatcacgagtctgccttccatatagaaccgtccatctctcatctcatacccggtgtcagtcagaatcccagccttgtacctctgtataattttcttatacaatgggtcctgttccacctgctcagctaactcaaccaaataaacacacttgagtgcagtcatctgtaacatacaaacctgctcccccagcatcctagacaatgcatcagccaccttgttctcaacccctggtttgtaccaaatattgtagtccagccccagcagcttatatgcccacttgtgttgatctcccgaaatagctctttggtccaacaagtgtttcaaactcttttggtcagttttgatgatcaccttctgacccacaaagtgatgtttccatttggtcaccgcaaacacaattgccaacaattctctctcataaactgacttagctttacccttctcagagaatccttggctgatgtaggcgatgggtctcttgccttgagataacacggcccctattcctgcgcctgacacatcagtttcaatggtgaatggttgtcggaagtctggcagcatgagcaccgctagctgagtcaccgcctnnnnnnnnnnnnnnnnnnnnnnngtagctttttcagaccacacaaaccccttcttcttcaacaagtagtgagtgggcttggtatcttaccataatccttcaca

SEQ ID NO: 32707 - DNA, 2678 bp, Arabidopsis thaliana landsberg
  unsure (1)..(2678): unsure at all n locations
tgagcaggcgcgaaagaacattgaagagaagaccaaacaatatgctaagcatgccaataaacatagaaaggagcttatcttcaacgaaggagacttggtttggattcatctccgaaaagagcgttttcctgaggagagaaagtctaaacttatgccaaggatggacggaccttttaaagttctcaagaggatcaacgataatgcctactctatggatttgcaaggtacgtataatgtgagtaatagttttaatcttactgatcttgttccttttattgtagatgaaacagatttgaggtcaaatccttttcaagtgggagaggatgatgtgataatgggaagcttggatcatggagcgtgggcacagcttgaacccgaggagtttggagaaagaacgcagcctgaggatggagagcttggagctaaagaggatgaagcattgcatgttcttgaaggtccaataacaagatcaaagacaaagctactaaatcaagctatcaccacacttctacaaaagattgagggcagccttaaacaagaagcttgtcaaccacgttggttgtgattcaagccgtttaagcaacaacaatggaggtgtgtgacttgcactctgtttccgtcctcttagttttgtcccaatgggttttccaagagaggtttttaatgaggcaagcccacacactcttatcttggcccattgttgtttttgaagcccatttgtaaaggagaaactcaaatttcgttttttgtgtatttatttctctaggatgactcttcctcttttctagggctcctcttcttctctatatattctattctcttctcctttataaaactcatcaaactttttattatcaaaaccttttctaattgtttgatctgaaacgtgtgtaatatctcttcaacttgtgattgctttggtgcgtaatatcctagcaagatcgatcccgaaagttcaagagtctttccacaactcttggaagtttcacttcatccattttcagttcgttttcatcatcatttcatcttcaacccttcaacttccccacagatccattcattcactatatcatcttcacaatccatacaaagagacttcaagggactggatcttgtcacccaagatgatatcacgtggtatcagagcaactttgtatcaggttgtgtttttctaaacttttggtattctctgttcgtcaaatttgtttcgtcgttgtaggcttgaatacttatcggaatcgttcgaaactagttaaatcgtttagatcacgttctgaactataggaaaatgtactagatcgtgcgatttgaataagctaaacgtttcgtattctagggtttatgataatacgtttttggtactgatttggtttgtttaagagcaatttgatactgttgtgtcttctagttgtagaatcatgtcagataaagataaggaagagcatagcaatgcacaaacaacaagttgttgatggaagctataacagctactcttaccgcaactctcactgctaatatggctaagatgatggatgagagattcgaggctgcaaggtctaaccaagaatgggagaacagaactatgaggaataattctgatcgggaggcaacgcttatctactacagccaatcctctactcgcaatagtcataggaggcaaagacgtgggcaagaagaaagacatcctccaaaagacaacttagctaatcttaagcttcttatccctctattccatggtactaataatcctgatgattatttggagtgggagaagaagattgagttggtgtttttttgtcaagagtatactgaagcaaacaagggaaaagtggcagccactgaattctatgattatgcactaaggtggtgggatcaagttgttactactaaaaggcgtcttggagataatccgattgaaacgtggaatcagctaaagaatatcatgaagagaaggtttgtgcctaattattaccatagagagctgcaccaaaggttgaggaatttgattcaaggaaatagaacggttgagcagtacttcaaagaaatggaaacattgatgctaagggctaacgttcaagaagagtgtgaagcaacaatgtccatattcatgggaggcctcaatagagacattatagaccgtttggaggtgatacactatgagaaccttgaagaattgtttcacaaggcagtcatgtttgagaaacagattaagagaaggagtgctaagcctagctacaattctagcaaacctagctaccaaagagaagagaaatctggttttcaaaaggagtttaagccgtttgtgaagcctacagttgaagaaatcagttcaaaagggaaggaaaaagtagttacgaggactagagatctcaagtgtttcaaatgccacggacttgggcattatgctggtgaatgttccaacaaaagaattatgataattagggacaatggagagattgagtccgaggatgagaaactagaagattctaatgttgaaannnnnnnnnnnnnnnnnnnnnnnnnnnnnatgagggtcttaagtgttctagataaagctgaagaacaagcgcaaagagagaatttgttccatacaaggtgtttgattaagagaaaagtgcgtagtttgattatcgatggtggaagctgtacaaatgttgcaagtgaggctatggtccaaa

SEQ ID NO: 32708 - DNA, 439 bp, Arabidopsis thaliana landsberg
  unsure (1)..(439): unsure at all n locations
atttaataggagtgctgtgcactggagttgttaattgtactttatatgaatattttgggtaaaaaacaaaatgaatagttaatcaacgatgtatagattcataaacaaaaaagaggaacgtcgaggatacgatcttgtaatttatattattgcaaatgactcataaattctgtctaatccatacatacaatacacctttattttcatagatataaacatttgatgtaaaataactattaaagggtgttgagttcctatcggacaaacattattcttccagaaaacaaaagagaggaatatattgaattatgattgttgttcttgacttctttctctctcatattggtgnctacgtcattntcaagcacattttaaattgaatttttatccttttatatgtggttaataatctgacaattgtcaaaaaaaaaacttcata

SEQ ID NO: 32709 - DNA, 533 bp, Arabidopsis thaliana landsberg
  unsure (1)..(533): unsure at all n locations
tctctatccctatcccttcccgaagaagaagaagaacgagacctttctcttctcggtgaatccagagaacgtgaagaaaatctccgatttgcaatagcgcattgaacagttagaccaattccagtcccaggtctcttcttgtggttgcataagttgccataagtggaatcagagagtgaacgagatctaacgnnnnnnnnnnnnnnnnnnncaaagtgaactagcaaaaacccaggctttgtgaagccattacagaacctaatcttcattctttacctgcacaaaaacggaacaacactaaaatcgacgattatcaacgagaaaatcataccaattcggactaacccagacaattttacagtacaattagctcagaaaactccgaaaaaataccatcattcatgttcatgttaacatcaacgaaccaaaaaaccataacctaactagaagcaaaccacagaaactatggaataaggagaattggaccagaaagtgaaagaaatctcaccggagctgaggaaagatatcggaga

SEQ ID NO: 32710 - DNA, 1674 bp, Arabidopsis thaliana landsberg
tttctggtttgtctttttaaacgtttggtttctttgaattttctgtgaccaaataattgctacattattaacatttattgttattttattactttataatgtttgtttgattaaaaaaaaacatttgaaagtaattgacaatgtttttgataaattactttcaattaatgtttgtgttttttttttgtaatataaatttgttacacaaccaacaaaaatatagtaatgtttgtgatttcctttttcttttaaaatgttttttttgtattttttctattcaacataaatatgaatattgtaacatttggatttttttcaagagttaattaagtgttttgaaaaacattattaaaaggttgtgtttggtctgtatttgtttggaagccatatccagattttggttttactagtagaagattatgcggttcttttcaaaagataatgttatgcttggccatccaatatacaaacccgattaatataacatccaataaatatcaacaccatctaatatattattgacactttatttctcaaataatttttattaattttttaaaattcaaattatggtatacactatgaggacataaatagcactatatgtatttggtttactaagtttacgagatataagaaaattatataaagaagttgaaataaaaaattaaaataaaagaggggacacattttcagactacgcataagttaaaagtaaatatgttgtgtaataaatgaacattttaatcataattgagtaaattatattattaaggatcaagaattcaagaccatgtggattattcatgtcattggcttagttaataatcaaggaaacgcagttttgtactactatcctttttaaaatgttagcctatttattataagagtttggtatatgaccagattacaactttaactcagttacatgttagctttgacatttgacaattattgtctctatctctctctcgatctcccgagcttcaacattgacgagcagaaatcatggttttgttttccgatggtcgctcaacttccacccacaaaaggtacagacggttgtcatggttcgtgccaatccacagtttccatgaaattaccagacgtgatctaggccaaaacttgcacaaccacgtggagacttacgtggagcccagtaagatcgaagtaaaagaagaaaagccaagagagacacgagaagaatgggtgatctcgatcaaggacaagatggagaaagcacttagttacgacgcaacaaatagctgggacaagctctgtatctacagagttcctttctatcttcaagagaacgacaagaagtcttacttacctcaaactgtctctattggtccgtaccaccatggaaaggtacacctcagacccatggagcgtcacaaatggcgagcggtcaatatgatcatggcacgtaccaagcacaacattgaaatgtatattgacgccatgaaagagctcgaggaggaggctcgtgcttgctaccaaggtcccattgacatgaagaatagtaatgagttcacagaaatgcttgttcttgatggttgtttcgttctcgagctcttcaagggaacaattcaaggattccagaaaattgtgtaagcctggctaaattttatctagtgattttcttctattgcttaaactgttgactctgtt

SEQ ID NO: 32711 - DNA, 2252 bp, Arabidopsis thaliana landsberg
catccagaccatcctctaaagctcctcataaatgtcgaaccacgtgcttcttgtagccagtgtccatcttcgtttgaaaatggttatctttgttcgatttgtgacttcaagttggattttcgttgcgcgacgaggttgcctttggaatttattcttgaagaatccactgtccacgagcatccgattcagctctctgatggaacccgtgacggttttgtgcaactttgcaaaacatgcaaatggggagttttcgatgctgttcattacaaatgtaataaatgcgatttacgctttcatgtggagtgtaccaaactttttccacaagctagccacgttttacacccccaacacccactcaagctccttagatgtgaagaagcacccgattacgccgacaacaagtgtcttctttgcgggaataagtttgacggacgaattcaccactgtgatgtttgtaactttaccatatgtggcggctgtatggaaaacccaccgccgcttagtgttgtaagcccgaccacccatgagcatcaactttatcttctttcaaaacctctcggtttcacttgcaatgcttgcgggactcaagctgatcaaagcccttatttctgtcttcaatgcaacttcatgattcattgggagtgtatcgatttgccccgcgtcataaacatcaaccgccacgatcatcgcatctcctacactcgtcgtcttggacatgggcaaaatacatgcggggtttgtcgtaaaaaggttgatggcttctacgggggttattcttgctcaaaatgttctaactatgttgttcactcgagatgcgcaacggacgaggatgtatgggacatgatagagctagaagggacacccgaagagccagaggaagatgcgccattcgaggtgattgatgataacacgatcaaacattttagccatgatcataacttagtaatcaacaaggatgggaggattctccatgaaagcacactatgtaaagcatgtgtcttccagatctgttcagatgcgttctacagttgcgagaattgtgacttcattctccaccaaaaatgtgctaacctgcctcggaagaaacggcatgtttgcgacaacctaccatttaccctagtcacaaatgatacttcagacgaaacttcatgtgatctttgttggcaaagtttcaccggtttcaggtacgagtgtcttactcgtatggttactctagatgtacgatgtggttcaattcgagaaccattggtgcaccaaagccatcaacatcccttatacttttcgaaacgtagttctaagtcttgtacggaatgtggcaaaaacatggatctagatataggaagctttagctgtgatgagtgtgactatagtttggacttcaagtgtgctcttttaccgcagaaagtaaagtggcatagatacgacgatcatcctctttacttgtcgtgtggtgaaagtggtgtggatggagaatactggtgtgaagcatgtgaaacaaaagtgaattcgaagaaatggttctatacatgcaatgattgtggtgtcatattgcatatttcatgcgttgtgggagacttctcatattatatgccaggttccaaaataggatgggaggaagacttggtggtatccaacacctctatgtgtagaccattttgctatgtgtgtaactctcaatgcaagcttccttccattgttaaggtcgtttccaaagccgatgttgttttatacatttgttctttaaactgttattataatttcaaccgctctaataactactctagtagtgattggtaaggcatgttttaatgaagaaaaactttgtaccatttaattccaaaagtatgttttacaatagtttttttttaacctcaagcttatgcgctttttccacaattatcaatcttttgaatccagtcagcagcagtctcaatgatcttagaaacagaatttcttaacaggatatttaaaagaacaagtttcttgacattagagctggaactggaatctggtctctgttttgtgctaaagcaagagcagctcatgtatacgcagtatgtctttttaacttctttattaatcaaaatttgctctgagtgatttgaatacatgtgatttgacaaatgattcttcgaatgtttcagatggtatatatatgttaactttatagtgttattcaaatgggttatacaatctgatggtggaaatagaacttacttttggctgtataaaaataaaaaaacaaagattgg

SEQ ID NO: 32712 - DNA, 564 bp, Arabidopsis thaliana landsberg
cagcagcctttttaatatttttgtatccatagcttgcaagaaaagagacaaaaaaaaagaaacgaaaataaaacatcccgtgtagtgaggtcactgtgactaaatcttcatctagaatttagtactgaagtcaagtcgtccccttcacaatcagaccattagcatcgtcaaatatttaacgtgtattataactagtgtcaaccatgctgcccttttagagttaatttacaccaaaaaatacaaacacatttttctcaaattagctgaacaccaaacttaaatcctgagaccctttcaaatatctcaatatccatttcactgcttcccaatgcaaattaccaggcctattcatgtatctacaacaagacaaacgacataggccaaatcaggacgagtacctatcatggcgtacatgatgctgcctactgcacttgagtagggaacttgttctgtatcaatgcactcatcgtcttctctgacagctgcaagtttgaaatgggcgccaataggagtccgcaccactttagcttcatccagaataaacctctgaacaatttttctgat

SEQ ID NO: 32713 - DNA, 5199 bp, Arabidopsis thaliana landsberg
catttaggttcttctaatttcagaaacttagcataagctttgaacctaaactcaagcatccaatctggttcctctttcaatttcgaaatcaaacgaatcgtctcttcagataaacctttagggattgtgaaggaatcgatatcttcaacgaatccgtacttcttatcgtaatcgagattttggaaatactgttgaagtttatcagttgagctaacggttgatgtacctgatgatgatgattcagaagctttgatgggacgagaatcgattccaacatcggctctgactttgaagatcggtctcgttggatttagggatttgggagatgggaatttgacggattcgggttttgggtgaaacccttttggtgattttgaggaatcggaagtgggttgtggagagaagctggagataccgtttgcgagaagagacgccattgttgttggtgtggctcttaggagaagtaaaagaagattgttttttttttttttttggagtcgtgtgttagaaaaaaaacaacgattaggaaaaaaatgaagaagagatgaaatgttaatattatggaattttctagccgtagattgaagatagtctcgtgtcagccacgagacgatttttttgttggattttcacttttcagctcaattataaaccacatacgttttccactaactaattataaaaattaaaataacgttgatctcttctttatttgttaaaaatctcttttagatattagatattttttatacttggacaaaacaaacaaagatattagatattttataatccgatttacgggttggtttcttgtttttgttaatgaaaaaaaaaattagtttgatcttttatttcaaaaacttaataatattttattttaaaatttgttggttcattcatttcagtttagtttggtacactgaaatcagttttaattcttttttttttctcatctgaattatattagaaactaaagtagaatacaaattgaaatacataagccaacagaccaacagaatattttgagaaacttagctgaaaaaaaggaagtaaaaccaaaaacagatataaggaaacattttaaaccaacgaaattgaatcaagagacaaaattcaaaagaaaaaaaaaactatgaaaaaaataagacgtaaacttcctctaaaaaatgtgaacgccggaaacaccaataagatgggatagacctcaaaccgaagtcaaaagtaatagcaaaccaacatggaggaaatcaataagcggctgaaaccagagacagaagtacaaacaccatcacacctcaccaaccgaaccgagatagcaaaatgtactagggacaaggcataaaccttgaagatctactagagataattaaagcactagacacaatcagtttcgattctacttgaggttttttttttttagttagttgtcaattaattaaagcagtaggtttaaagaaacaacagaaatcgttccttacgaattctatgaaattagggcccaaaaatccaaaggaagggccactttaaaagcccatattaaaaatcttcgagcccaaatccaaaacgcagaacgaagtttattaaccaaaaaaaaaacgcccaattcgcggcgattatctgtcgttgccaaacacacaacagtgaacagactctgcgtcgccggagaaatcttgtcgacgggtaagtctcttcgttaaagcttatgctgcgttaaatcgattaggtcaattttttccctgaggattcgccattttgatcctcgctgaaatccaactggttttaagtgatttatgctttggcactagttttgttgagaatcttgtttgataaattcaggaattgaccaccaattttgtgccatttgaatctcctagatcctctctgaacgttatatcttgcttttgagtatatgttaaaagtcgtatatgtgattgattactgtaaattttatacttgttcaaggtcttttaaggttttggaagatggatataatctcacagttgcaagaacaagtgaatacgattgctgctatcactttcaatgcttttgggacactgcaaagagatgcaccaccagtccagctttcacctaattatcctgaaccacccgctacaactacggctgtcgatgatgctacgccttttcctgagcaacctaagcagctcagtgctggtttagttaaggctgctaaacagtttgatgctttggttgctgcacttcctttgtcagaaggtggtgaagatgctcagctcaaaagaatcgctgaactccaggtcaaacaagtcacaccgatatgtcgagttcttgaatccgattacttctatttgtctaaccgctttgtcctgttttttcttcaggtggaaaatgatcttgttggtcaagaactccaaaagcaactagaggctgcaggtaaaaaacgatcttaggttttcacttcattgttggtgtgtcttatctgtctgtaactggagcagattcattatgcacttcaaatttcaatttgtatactttcttgttgatacacgcactatggttagatgttatctttagtggttctagaatttggaatttttgttttcccttgcaactgcctctgacgattgagctgatgttaatggtgtgaccttgtttgtgacagagaaggagctaaagcaagtacaagagctgtttggacaagctgctgacaattgcctgaacatgaagaaacctgaatgaaatgcttgtttaccttttgtcgagctgatttagaaactatatgatttggttcagcaacacttatcttttaggttcataaggaatatctattctaagttggttcaccaaaaaattgttgtagaagcaattacaagaatgttagttagctcacaacaacagaaccattattttgaccttacacttttttgacctgtctgattacaatctcagagaatccactttatcattttcacaattacaggccatgattgacacatcatgtttgattctccgggcagtgttggtcaaattactatgatggtcaaattactatgaactctggtatctgtcacattcaatccaagttgctgaaaagaaatgaccagtccataagttgtggtccaaaaccggatcttgattgtgtatttgtactcaagcatgtgaagatatcctaactcttcatccttctttcgctctctcacaagacttgtatagagtccaacaatcttttgtctgcgtgatgaagctttaggatgaaaagaaaactttagccagtcccatcaatattataaattaacaattgtataaatttaccaatatatatatttatataaatattatatgtaaaatatttagtgaaatatgactctactattgtttttctttaatttttattatttttttgtaaagttcaattctaatacttttgctatgtgaaaaaaaaaaaatacaatttttgttttctacttataatcggattaagaaagattattgattataaagaaaagatcacttttaaaattaaatttttgtaagaaattataaaatttgtaaaatctctttataaattgataattattaatttatccataaattaattaattttctcggtcccaaacaatattaacttatagaggttttacggtagtttgttgatgaaacactcatattctttttaggtttcttcttgttgggtgcttgagaaaatgcagactgacttcttcgatgatatgttgtacatctttatcatctattggaatttttgatatcaatgccttggcaccttctgaatcccttgcagctagtagaacctgatacatcctgccaaaccataaacaagaaccaatgatataccgaaaacctcttgatcttttggaaactgatgatctagttatcaaaattgactgcatcctcttgaaactaatcgaacccgtaaaccaaaaccctagtggtaaacttgtaactctttttgtgccaatgatagtacaaaattggtcttttgttatgtaatttcaagatatatcttttctttctgttccttaaatctatagttcttgagcaaagagaacaggagtggcttacctcagaaagctcaggacgttgcaagggaatgctgcagattggtactctttccacaccaatagaccgtgctccaggtccttggcattaagacatgcatgtaagagaaaatctagacattttcttgaaggaacaaacccgagctcatctttcataaatcttagcaaatccattcctagatgcactttggatggctctgtctctgcgattgcccaaaacacctgatccaaagcagcatatcactgagaggcttaaattactgaaggctaattcagtaaaagagaacatagctactagttacagactcgatcactcgagcttgatagctgttctaattaaatgttcttgcttagtgctttacttcaaacttcttcgttgagaaaccccacaatgatccaagaacatggaatgtgaaagttgcacatattggagacatctcaaggttatcttagatgagtaaatgaacaagtttccagaaagaagcccatgagaaaaacaaaatcaaacctcgtcaaaatgagcttccacaggtatgcctttctttaacaaccggaccttgttccgtttcagcagatcaacaatatcgctatacaacaaaaagagcaaatcaagaatgagacattcaacattgggtagacaagaactaattcgagagcatgggtgatttactctaccttgactttttattgcggacagcgaacaaaatcattctgaagaaaccgtcgatccaactagtatcatcttgtaggtcatcagccagttgaactagcgtacttaactctccctttgaatcagagtattcctacagagataatcaattcactgattatcaatcaactaatatatgatactaagaaaaatgtggctgaaagtgtaatacttactataagagatataatcgatttcgggtctacgtggcattcggctttcctcatttcttcatatatatgcaaggcatctgcccattttccacgtgatgcaagagccgaaataagcacacttttcagttcattttggtttatagccggaacatctggatcgacgagcacctatggtagaataaaaatttgagctcttactctaattacgtaaatggattccactttcgagatcctaaaaataaataaagagtttgtgtgcctacct

SEQ ID NO: 32714 - DNA, 6662 bp, Arabidopsis thaliana landsberg
atggcactgaccttataattttgagggaatagttcaacaagtaaatttgtctactttcaaatttttgcatcgttgccgaagggctagcttttattcatcattagataaggtgtagaaatttagtcttttgttttttagttacatacgttttctctcttctttttcttgtgtgtttctaaccgcagaaccaaaaacaagcaaagaacatgaacaatagtctgattgctgcgttaatggctaagattgactttgtgcacaatcttcttctggagaatgtcaattttgttggtggaacatggttttattggaatggtcctgactagttacactcagaagtctaaattccagaaactatttcagagtagtagcaacttcagcttcacgagaaatatgatctttcttgttacaatgcccccattcaccacaccatcaagtcagatagaaagtttctttgaaaaaaaagaagtaaaagaagtaaaaaattctaatcatatcctagtaaaaagttcttaacatattaaactattaaacataattaggatgaaatttttgttaatagattaaagggtgaataattatttatcttagagaaaaaggaaatataaattttattaaccttaatagataatgttgaacattatcaacaaaacttgacatattgcaagactctaagtcacgaacttgtgactcgttactattaatttattagatgccagtatgtgtttaaattttttttatagtttttcatcttaaatatatttatcctctattttcttaaattacacacaaaatggtagtaatcacgtatctacgtaaattactatatgtgttatgaaatatatatgcatgtaattatgtaagtatcaaaagtaaatgtgattaagtgtactcatgtttgagtaagacgtttaggacaaattactaatactcaaagtctaagtcacatagaagtattaacttcaggaataattaaaaagtaacttatttgatttaagaatatttagagcgagttgattaattgagataagagttagagcatcaaatattgaaaaagtgtgttaacggataaaaattagatttttttttttaccagtggacgaataagattatgttggatgtataagctcgattttgcatgagactttgattaatggcatattaagaggtttattagtccacaaagagaatttcgtcaagcagatttactatctccgtatattgtgtgtggatatatatatatatatctatatatacatttttgcaacacttttatgaaataaatcctagagtttgaacttaaaatttaattatttagatttaaaaattttaaaacaagatattgaggtcaacaaacattgccaatcggaaattctccatgttttctaacaaaaatatctattccgagattttttctatcaattaattactcccaataaatattttgaagatttactcagacgttatataaattaggtgtattcaccagagccatacaaaacttttttttattactctcatatttttcgttttttttgtatactcagcgtgcccctactaaacgttaccggaaaaaacgtaattacagggaatgccactgccacgtcagaatttgctgacgtggattaaatgaactcagccggctgagttacggtatgttgcggcggtatgttgcggctgacttacgtcaaaaatatatgagtcataacgaaacggcgaagtatgagtataactcagccagacgttacggctgagttgtaaaatgttgcctgagttattgtataactcaggcaacggtatggttgagttaaggatggtcggccgagttataagaagttataagataacccagccaacaatatggctgagttatgagaaaaaggctgacttatttcctcgacgcggccgagttatagttttgattggcttagttatggaaagatgtgacggctgagttatggtcgagtgctataaatcagccgccaatagctggattacgatataactcagccatgttatggatgacttatttttaaaagattaattactataatatcatgcagttatggccgagttgttgaacgttacggttgagttagttgagttacgacatacaacggctgaattaactttgttttttttcctgttttaattactgtaatagtattcatgtcacggctgacttaaagatttgcttcatggctgtgttatgaactatttgtttggtggctgacttgccacgtcatcacttcaaaacggcgtcggctgtaataatccatgtcatcattccatgtcagcatcctcgacggaaatacgaaaagtcccttgcttctttaaatcattttcccagactgtgttcaccgcctgaacgttacaacatcaccgaaactttcttttcttcattcatcttctcatacatcttcaatttctttcatctttctcttgatatggctggtcccgctacggtcatagttgtttctggttcgtgggtaaagaaacagagattcgtatttaaccccgacgaaagagggtgtagagttgtgcagctataagcggaaagaacagtttacgatagtcttttgaagatggtggtcgatgattacggagtgaatcagtcgactcatcagttacggctgagttacatgttctccaacaagactctgaaaaatatgcccttcgatactccactagtttatatctccaatgatcgacagttgcaatgttatctaggtttgacgaaattcgagcagctacgtctctgtgtggagtttacagcgaaagattcaagtgatattagtcggaaggacggatcaagaggaaggggttcgaaacgccctattgaatctgactcaagagcagaatctagattcgaagttccgagttgggggtttgaaggtgtctgttacgattatcaagaagatgaagcaggggacgatgaagcaggggacgatgaatcaggtgtcgatgaagcatctgacaaagaagcaagtgacgaagaagaagatgatgaattttctagccggtttgcttttttcgacgactccgatggtgcctcatctgatgatgaagactttgctgtatacggcgagcctaagaataatgacgaagattcaccgaaaccttctccttcgaagagaactcagaccatggaaatgatcggatctgctgggagcctgactgatttaaagttagagctgtctaccctaacactcgcggtaggccaacaataccgtagcaaattcgagttggagtatcgactcaaacttcttgcgataagggatggatttgattttgatgtaccaactatctaatacgactacagtgaattacgagtcctgggttgatagatgtcgctggagagttcatgcatctacacaaggggatgagccttatttttatgtccgtatatacgattcggaacacacatgttctgtgacgcaacattctaatcgatcccgacaagcaacacatgatgtactgggagttctttacagggactatcttggtgacgttggtccggatgttaaaccaaaaacagtcgaaataagcattttcgagtaaaggtaattacaatgtttcggctgacttatttattattgtatggctgacttatagaaatattacgattgcttatgggtatattatggctgacatataattacattccggttgagttatgacccttctacggctgacttaacatcactttgtggctgagttgtgttacagtttgactgagttataaatatattatggttgacttattaattaatatatttgtgtcaacagatgggttattgaaagtcatacaagacgctgaagtatgcaaggaagctcactctggaaacccctgatagtagttttgaagaactgccttcttacctatacatgataagacaggcaaattcaagtaaaatcgcgcgtcttcaaattgatgagagtggaagattcaagtatatgttcattgcgtttggtgccagtatcgctgggtttcctttcatgcgcaaagttgttgttgtcgacggtacgtttctccatggtagctacaaagggacgctcttaacagacctacctcaggatggtaattttcagattttttctgttagctttcggtgtagttgatactgaaaatgatgaatcttggcgttggttttttacgcaacccaaagttgttatgcctgacgcaatggatctggcaataatctcggacagacatcagtcaatagggaaagcaattggtgaagtgtaaccgttggctactcgtgggatttgcacttaccatttgtataagaacattttggtaaaattcaaaaaaaaacatatgttccctctggtgaaaaaagcggcaaggtgtttaaggcggaatgattttgatgaagcgttaaacgagattgaagagcgtgatcctcaactacatgcatacctccaaagacctgatgttcaaatgtgggcgcgtgttcatttccccgtgatagatacaatttaatgactacgaatatagcggaatcaatgcacagagcactgtcaaaagccagaaatcttcccatagttcgactgtaagaagcgatacgactatgatgacaagatggtttgctgaacagagagaggatgcgagcacgcatcaaactcagctcacgcgtggtgttgaaaaaccgttacaggtaactcagctgtaactgtgtacataagtcagtcgtaggatgcccataaaccagacattatgggcataactcagccataacatatctgttttttccttctcttctctaatatgcccgtgtcaccgaaacaaaacttatggatgtacaaacgattcatgctttccgcgtagaagtaacttatggaacatatttgcatgttggaaatgtggatgcaaaaaaatgcacatgtcgtcatttcgacaaagagaaattaccatgcatccatgcaatcgcagctgcagaacatatgggtgtgtctcgtatatccatgtgcagtccttactataagagcagttatttagtcaatgcatacactggtccaatcatgccttcagatacggaagtccctattcctcaaattgtagttgaccaaccgtgcttgcctccgattgttgtgaactagccaagcaggcccaagaaaataaggattaaatcatcattggaagtcgccattgggaatagataccctaggaaggaacacgcatgttctcgatgtaaacaagttgggcacaatgttaaaacttgtctggcatagtattgtttgcatgaattgtatgtttcttctttcccttgtttggtaaccgtaatatgtagttcatgaaattgtaaactctaagcaccttaatatgtgcaatttcccatatgtcacggctgagttatgtgctttaaggtttggtcattttacatgtttcggctgagttacataaatagggaagacgaaaggttcagtcattttacatgttgcggctgagttatctaattttacggtagagttatgtggttttatggctgagactaaacttatttatgttactttacggctgagttatattactctagggctgagttataatacagatcggaaaagaacattttgaaggctaagataatatgaaatttattggtgaaacgtaaatatatgtttgaaagatacataggaagaagtaaaattaaacaatatgaaacttcaaacattgagcgcatgacccgattccttccatcttgcattagtcgacgaccatttttatctcttgcacttcttcgatattgggttcggcaatcacatcagatatggacgaataactaacaatcttcacgcggtgggctccataagaatacctaacaatcctccacaaagtgagtgcaataacaaaattgtcattgctaaaagattgaaacctattatcgaagtcaactgccatttggccaacagcctcacatttcaatatcactttgctgaaacatataagacagtgttacaattataccccttgagggaaaaatacatgatgaaaagaaagaaatttaaagggaattgatcgaaagaaattgtactatttgtccataatcttgaagggaagtctgaatccgtcaatctcgacacttttgtgttaggtattactcatatatccgatatcaacgagtgcaccaagcaaatctgggagtataaattaaaagttaaaaataggcgtgtcaaaagtaaaaggccaaacaaagaatagcgacgtattacttaccgaccaaagtatctgtaagaactgtgtcttcaacaatgtagtcaaaaggtgtgaacctgttaagtaatacagtttcccttgggtatgagcatgtgacaaatgtttcttccatgaactcaatcacataatggtgggatgttgctttgattggttcaaagtttggactgacacgaaaagttgagattgatttccattgattctcttggagcatatagaagtaaaaaggagaaaaacgtcttccgattgtagcctcaatttgtgttccctatgaaaacaacatcggagggtgagttatatagggaataagaataaggttaaatataacttgtaagaagagtgaagattgttttaccgattcatcgacaaagacgacccgtagttcgaatgtgttcccactgtgaaactttctatacactctaagaaccataacacaaatcatccatctagt

SEQ ID NO: 32715 - DNA, 809 bp, Arabidopsis thaliana landsberg
cagtcatacaagaccacctaaggcgatcaaaggtaagatttcattacatatcgaacctctttatgttcttcctcagaagctgatatgcaattgtaaattagtatgtcttaatgttgaatttcacttacactcttcttatttgcagagtcaaccaagaacaacagtgaacaaagataacaaacaacaactgatttcacaaaggttatttcccacaatcgtgaaccagttgttaatttccggtttcatgggtaagttttatagtttcctctggcgtcattcatcataggttctctcatgttctaactctgaaactagcactaggagaaaattttggctaacttagtgttggcaactcaaattgcaatattttgttgaaagttgcctgctatgaaattttattttgctgtgtatatattatcatggggaccctattatcatgccattatgataaaaactgattaacaaattgtcttttatttgttttagagcaaaattaattgggataattttctaatgagattattggtcaacagtacaaagattgaaagtcgctgatactcaaatatcactaaatacaacgccggataccaaactcatatgacaccatatcaacctagaatttttctttctaacaattcaagagggagatgaaggatccgacccgatcctaacggcggaccaaatgcgaccaatgcctatggcaacgcgaggccaaacggcgctaattgcgttaagcgtaccaccatatgctcacccttacgcggaagtctgaacggagccaagttattattccagatgtgcggaacaca

SEQ ID NO: 32716 - DNA, 1644 bp, Arabidopsis thaliana landsberg
cttcgtggtaaagaggggatatcaactctgtagcgagaggaccactaaaacaaactatagtaattgtaaagtatgattttgttgcattacatttgaattgattacttttgcttgtattggaaagtcttgattataagtaatataattatatattttcttgtgtaaaaaataaagggacaaaattaatagcaatgaaaagttttttataaactgttgaacgaaatatctgtatataacagtagataacaaaatttcaaccatggagaatcacagtaagcgacttataacaccatgggtcagtcaatacaaactatagctattattctctcaaacttcatttttgccttcaacagctttcgagcttttccttttccttgcattatcgttttcttcgtcaaacttagcagcagaacgcttcctgatcgcttccatgctattgtcatcgttagcccactcgagcacctgaaatggacagtcaaagaggatggataaataaaggatatctggcttgggagagatgagtgcacaacataagacttaccaaatggcgtccatagaaatgggtgttggagagtgcctttttagcgtttaaagcttcttgcattgtcccaaattctacaaaagcataaccagcgtattttctcacattcttcaatggaagcccaactctcttgaatctgtccaaatggactgaaaagctgtcttagttctttcttggctgcttcaaaagctacatttttcacatgtaactttgccaactttgtgaccttgtctgaaccttccccaaccgtttcactccgcttgttttcagaaaaattcaagatcaattaatgcccatccagaacatttccctacaaacaaacaaatcagtgtcaccttccttcatcgagtccaatcaccttcaagtttcaaagagacttaactagattatatacctctactggtagatctctgtagacactggtcgctgtctctacggagtcaaattctacaaaaccataaccgcttgaacgacgtctcgtccagtctcttattatctgctttatagtgaaaaataaaggaatatcaaaaacagacttatgatggttaactgcatatcatcatcatctgtaagcaatgaacaacaacttaccttaacactcagaatctttccctgcttcaccactccagtcaaatgcttcttcaacccctcatcagttgtcttgaagctcagattctttacatgaaggacatttgactgaaatataatgcattatttagaggaaacatcgttataagatgtgatctgaacacagatatttcaagtcaatgaataaacatgaactttccaggttcctaacctgaaacttgcaagaatagtgtactaaaaccaaatctagtttcccaagctaatcaagattttttcaactgtatttcagtttgcgatagttcgataccgcacacaaaggacgaacatatgatttcaaaacgtccacagcaaccataaagtagacatacctcggttatatccgaatagattccaacctgctgatctaagttgactcttctcgcatcattttcttcgacagcactcttcttttctttgttatcggcaagtgcttttggctcaagaatatctcgaggagcccactccagatacagggg

SEQ ID NO: 32717 - DNA, 3907 bp, Arabidopsis thaliana landsberg
  unsure (1)..(3907): unsure at all n locations
ttcttagtttttaaattttagctaccaactaaactaagaaaagagaggaatcgaagccttctaaaacaagaatttcataacctaaagagattaggtaagtatgtggtcattcttctactaaatgatctttaaagttaatctatctagaggaaaaataaaattggaaaacggtgaaacagaattaagatatggctagataactccagtttgaaaaccttaccttctgtttgaggatcaacaaagaatttctccaagcagtcgacaaagtttgtcccgttaaaaggatccccaccgattcctacacaagtagattggcctagacccactgnnnnnnnnnnnnnnnnnnnnnnnnnnntcaaaaccgaaacaatgtttagaaatcgtaagaaatataaggcctaattcaaaatctagaaccaacaaaaacctgtttatataaattttcaaaagctccatagtgtaacaaaagaaccatgttcaatctaacctttggagggatttatactagaaaacaaaactaatttcggagatttttcccaggctaaagactatggtgaaataaacttgagagagatggatacagagaacaagcatcaagcataagaaaaaaaacttacagcttcatatgtcaaggttccagatcgtgagacaattccaatcttcccaggcttgtggatgtatcccggcataattccaattttgcattcaccaggcttgataatcccagggcagtttggaccaaccagcctagctgtagattgactgttaagagcatgctttacacgtacctaaatcagaaacatcactcaagtcaaagagagaagcacaagagataattatatcagtattcaatcctatgtaataagcactgaaggagatataacaaacaaaatcaaaggcatggtgataataataagtaccatgtcatgttgagggattccttcggtgatacacacaataagatctaactcagcctcaataccctccataatagcagcagcagcaaaaggagcaggaacataaatcacagaggcattggctttggtgtcagccttagcttcagcaacagagttgaaaactgggagacccaagtgttctgttccacccttcttcggtgtcactcctgccacctattattacacaataaaaacgcacacaacgtaaattagtaaagccacttgctttaaagcaatctctcatctccaggatctaatggaatttaggtgatgaaaaagcatatatatgtgtactcattgtcaaaatcactagaaaacccctaaaccaaatgtaatcggaacaatggagaaatacccaattcgaagaagataaaaagaatcaggattttaccattttggtgccgtactcaatggcttgttcagtgtggaaagtgccgttctttccggtgatgccttgacagaggactcgtgtgtttttgtcaacgaaaaccgccgcaggaggatgaggatccgacgcgaaggagcgagattgggtcaacgaagtgagagactggcatgacggaaaaacctatgagccgccggtagaacaacggcgagcttttgatgacagagatccgataagccttgccacttgtctagacatgattgattggcttcttcttctcggtgctttcgatccgaatcaagttgtgaaccctaaactgtgtgaagacggaaatggagcaaagaaaattcagcggagctcggttttgaagaatcagctgagatcaaaagccgacaaaagaggcttcctttaaaggctacacttttctcaattttagcccaaacccatttatttctagatgatggactttttagaatttatttcaatcattctgtcaactaaaaattatttaaaatctttctggaatctttctcaaacattgagctcttcagaaaaattatgaataaacgtattctgtaaaatctttcaatagtaaaaagtttcattttcgtatccatcgttggtacttggtagacaaatggtgtcacatatacataacccaggaagatcaaagatgcatatacataaacccaacggcttccaaatttcatttcactgaatcatgttcgaagcaagtagttacatacataaatggagaacaaccgaaacagtaagcaaaaaccagaatcacaatcatcatcaaagcatatatgaaatgaaaccagttcacgggatatttcagctgaccagaatcactagactcaatggttttaacaaactagatagtgttgggaagctcgattagtaacggtatttggtggagtaatcttttggagcaatcaccaacccacgacccttccttgcaccacggtagacagtctcaatgatatcaatgaactcctgcttgtccttgagagcccagttgatcttgttgttgttaccagttccaagatcgatcatgatgtgcttgttcctgaagaagaacatgaccgtagaaggatcgtacagctcgtacatggtgttgaagtctggaacctcagtgatgtccaccagataaatgactgcaaagttcttaatcgtctcagcaacagacgcaagcacctcatccatctacaaaaatcaaaaacttcgaatcaaaacagaaaccagaaactgaatactagaatcaattgtaagtgaagccctaaaattttaatcagttccaagataataaagatcacacgaatggctaaagtttcaaacaatcaacacaacatatccggaatattccaagatcaccaaattcgcaagaacaaaacgaagcataaatcacagaaatggacactaaaacggacacattcaaaaccttctacatagtaaccaactccaacaactaggatttttttgagtgaaaccctaatttcatcagttctgagctaaggaacacaattttcaaacaatcaccacaaagtatcgcaattttccagtacgaaaggatccaaatcgagagctatgaactacaaatcgaatcaaaaacatataatcaagctcaagatcgaaatataaagataagagaggaagaaacgtttgacagacctgcatacaggtctcatcccagtcatggccgaaacgaatgacgacgagacgctcttcctcggccagaatcgactgatcaacagcccaaccggagtgcagatgtggaagaagatacgacattctctctctctctctctctctctctctcgacgattttccgatctgtttcgattcaaccttttttctctcttgccctaattttatattctcttcccaattttgttgacggtgacggcgcgtcgattccacgcgtgaaccgcataaagcgtttgggctaagcccttgataatacttactttccggcccaataaaagataaatcgacgagattgcgaaacagacggtgattaaggtagtagaacaccataatctggtatgagtcattcgtagaggaataaagctctaaaatctaattatcctatccaatatcctctcatagaggtgagagctaagattttcccatcaactccatttgaagcgaaattctctgatctctcttcattttattttccctctacatctctcccaacgatttccaaatctcacttcactttggctcctccacctgaatccatggatattgcttcgtcatctctctcacaagctcacaaagtcgttctcacgcgtcaaccttcttcccgggtcaacacctgctcccttggctcggtctccgctatcggattctctcttccgcagattagctctccagctttaggtaaatgtcgccggaaacaaagctcttctgggttcgtgaaagcttgtgttgctgttgaacagaaaacccgaactgctatcatcagaattggcacaaggggaaggtaaaaatctctccttttattctttgtcaactcttttgagtctataggggcttgaatgctattggattggctttg

SEQ ID NO: 32718 - DNA, 1013 bp, Arabidopsis thaliana landsberg
ctgtcaccaggcaaagaggtaaagattttttgataatactcagcaatagtagcaacaatttcctcttcttcatagactggatcaccagctgaagattcaataacagctatattattaatagctcttctgctttttgtggcagcatgaaagtagctcgtatttttatccccaagagccagccagagattgcgacttcgttgcttccagaacgcttcttctctttggtaagcacgcatcaagtttgtattaatgaggtcaatagcttcttgatcagcactgccattagacatggcttcctcgagctgatcccggagaatagatatctcttcctgactattcagatgttgttgtttactccacaggataatacatgatcgacaagcagagattcgttggtcaacagaagcctcaaggtttgaaatccaagcctctcggattagcttcttgatttcagaattatctttcaatctcctgtcatatctgaagatacagcgtcttttcttctgttttggatcagaggaggtcacaagaggtcgatggtctgaaccctcaaagcggagatactcgctgcgacccgaagggtaagccatgatccagtcactattcgccataaccctatccagtcgacatctaacaagatgtgtgtgtctttttcctctccaggacaggaaattacccgaatggtttaggtcatacaggtcacaggaggacatcagagatcttagatcagagtaagaaccttcaggtctaggaggacctccaactttctcagaactgtggataatgtcattaaagtcaccagtaagaatccaggcaggggatctagaagcagataactcatgtaactggttccagacttcaactctcttagttctgtcaggttcgccataaagcaaagttgagtaaaagaaccgacccttagctttgatttttgtatcgataaagtgttgacaggaggtgagaatttcaacttcaatattttgtttccagaacagggctagaacaccatagca

SEQ ID NO: 32719 - DNA, 623 bp, Arabidopsis thaliana landsberg
aattagtaataggagtcaacctctttggattgacaaaagtcaaggatttgaaaacaaacgtttggggtttctgttttggtcaagttttcatacttctagttgttacttctaagccagtatctctatcttcaagaacttagaaaattgctagtaaaagtctcgttatacaagatataatataaaacaaagtacttttgaaaccctgatataacgacttcgtaatatatatatcaagatacacttctttttgtcaacaaacgtaaaactatacgacattaattctaactaaagtctacggtgttttcgaataaccaggccatatactattacacgcacgtagtaattttttgaattcaaactgactgaagagatcccccaaaacagtccaataaaattggaaaggaaattgtgtatgtataaacttgatatataattacttaaatcaaggctgtcatcttagtccaagaaaacgggacgaaaaatattaaaactaaacgactctcaacagatgttattagtactgtcatgtaggaatgctaccttgccctatgtcttgtaagatacacggtataaaatgtattttcattcaataaaaaaaagctttggtttgttatatctgcgtt

SEQ ID NO: 32720 - DNA, 1494 bp, Arabidopsis thaliana landsberg
ggattttgcgataagtttaatcaactttatttattttaatgtttcgatgttacaatatggtttagtatgcactggattttagtacagtaaaaactctataaattaataatgttgggaccatgcaattttattaatttatagtgatattaatttatcttataaatcaatatttattaatttatcgtataagttaataaatattaatttatagatatatttacgtaaatacaatactatattcttttaaaaatgttattaatttaatttttatatgttttgttgtttgcatatatacttatgttagatttttatttttctttgacttttttaatttatttttcggcaagatattgtgtctgtatatctacgacattaacgtgaacgtaaacatgaagcttaatccaatttctctttacacaaatcttagcaatgctgtctcaaataaaagattttacaaaatcaactatgacggatcaaatatgcaaatagttatgtgagtacaacaaagatcatactagttgtatttttaaaaagttgtaattgtaacttgaacaaaaatttcatataaaaatgagtcttaaaatataaacttaagatctatgattattaatttataatattattgggactataattttacatagggatttcaaaaaaattattatcttattatcttatcgattttggttaatttttacattggcccgacttgggaccaacaaaatttattcatttatcgtgtttattaatttatcgagtattaatttatagagtttctactatataagattcatatagtttctaaaaaaacaaaaagtattaatattttactttcatatccaaaaaacagaaaaatcaacatataggaattgtataaacgatcctaaaattaggaattttaaagattctctctcatctttttcttaacatttaaatatttttattttttttaattgtatgagtttctactaagaaactaccgctgcagttggtcttatacctattgttttcctaatacttacttcttcctcatattctagttcattcaaattgttttcaatttctggagagctcttccttcatctattatatataggatgatttacaaaattatatgcaaactttaaatataatttatattctatatgaaatttttgtattttgtagtctttttttataaccggttgatttttttttaaatgaagcattaactaataggtttttatttgaaatgtgactttaatggttaaatccattcgactccacctcaccggagtttgactccactaagtctcgttatccctcgtattagggattggttacggattggatcttgtcgatctaatgatatataaaaaaaaattgagaggttttgttaaaaaaattatgtttgattttaactaaaacattttatattttgaacatatggagtatatatatatttaaaaagtttacattatcagtggcttttcttctttttgaatcactatcggt

SEQ ID NO: 32721 - DNA, 2107 bp, Arabidopsis thaliana landsberg
  unsure (1)..(2107): unsure at all n locations
gtaatagtaggcaataaaatgaaaataaggttttgcttttattttaaaaaaaaaagatgtgacgtttgtgaaggatcatgtggataagttcacctttaaggtctcctttagcctggtttctacggtgttagtatttccgtttgagacttcttctccttcaacatagttttcccaaatctgaaaaatatcaaaacagtttagcaaattacgttttcaaagaaagaattttcttcactaaacatgtaattgccgaccaccttcagtttctggtttttagcagatctctctgcctgttcaagaagatgtgcttcggcgatcctgtgtgcaccaaagctagtctgcatttttgctaagccagcttcaagcagaactgtagccacgtttgtcctcgattcccacatggatcccaagaaagtaccggttctatccacggtttcaacttcaatctgtgtgattataatagagtatgagaaacccatttaaaagaataggaaactgagattaattcttagatgtgcattcggtttacctcaacatctctctgcatgatcctacgtctcattacagagatagcttcttctgaataaggttcgccacggccaggacatctgacaccagagaatgaaaaggctatgctacatgttatctttgggatataaagcttaaaccgatgtccgctgaggacatattccacaacagcgggtattctcctgattctttgcagggatggcaggaaatctttagctttcttagctgccgactgagacaaatatatggttacacattagattagtcaaaaaggttaatgaggaaaatgcgtttattatgtacatggagatatatatatatatatatatatatatactaaccacagttaggtctgtgatgtgcatggctggagattcttttgcagaatggattcctttctttccagccagagcacgagcttcagcagccagaagagcatcataatggtttgatcgctcttcaaaatctctatgtctaaccacatttccaaaaccacggacaagaacgagctcagcaatattcacaccaaccggctgactgccagcaattgctgcagcaggtggtgcagtcacttcatcagaatcggctttggcagcagatggaaggaacactgagccaaaatccatgaacctatcagcagctccagatgtggtaggaccatctccttgggtgactttccttgaatattccatttgaacaataacctgttgcaggaaaagggaagtcaaatcttgttcatatgtgcgtacaaaggcaatgcaaaaggctcaacacaatacctgtttgccaataagtcgttgtctcagaaattctctagcttcccgagcataaggagctggtttctcttctctacgtgggttgcccatttttggagatctgatactcgaaagacagacccgtctctctgctgctggactcccaaatggaacagcatcatcggcaactattagacaatccccactcaccacttccactacctaaagagagataaaaccaataactcaataaccaaaggagaaggacagtatttagaaagaatttctgcagacaagttacctttcccgtaaagttctggtcatgaattgccttagagtttgtagctggaggaacgtagtttgcccacattttaaccttatctttcttgcattgaagttctgcagctttcaactttttcttagcttcctcctccatcatgttggcactccattcaacaaatttagcaagaccctaagaaaatataatagcagcaaaggtcattgatattgtttcaacaacatagaaagatcatatattccagttattttctatcagagatcaaaaactgaccagtagaattacaaagtataacattatgtgtcaaacaaatttctctaagtaacaacatgtgcaatatagagaagaaaattgtagtttttacgccactagtagagcaaaaacattttcagtccattaagttaatatgcaatttatgttgaaagcaaaataactgcttagtgtaaacacgtacattttcaacgagctccaaccncaagtctttaactgtntccccatcagaataatgaactgaaccaatcagatt

SEQ ID NO: 32722 - DNA, 912 bp, Arabidopsis thaliana landsberg
acatccctacatagatacatactttcattttattttatttatgggtgggaaacttacaagtattcttcagaactaagcagtaccatgacagaacaggaacctaactcctaaaataacaatgaataggaaaaatgaacttgtgctgaattcactggttcattatttgtatacaatcatatattattgatcttgatctagaacacaaatttcaaacaccaaaacgaaactgcaaagagctacctcaaggttatagatgccaattttcccatcaactgaagatgctgatataactccaggcatctttggataccaatgaacatcaaaattccagttttgaccagtaggtaactcagccacaatctgacataattggaccaaaaattccattaatttagataaagtactagttaactgacaagcatatgcaagctaacaacaaggctatatcaaatctattgtctcttcacctttcctgtctttgtgttccaacaaatagttcggttgtctttcccacaggtaagtagatacaagctgtcacttggacaccactccattgcaatcacacctgttgtataacaagtatcaccactctgtttcaaccaatgcaaggatacattctatatagtaaaagagatggagatacctctttggtgaccaacaaatgtgcgaacaggtgattgtagataccttatgtccaaaagctgacagaaaacatctttagagaccaatgaaaagagccaaatttgattgaacttgaaaaaataaaaattaagatgatctgattaccttcacattcggtgaactatcttcatctgaagcacccaacatctgattaaaatgatcaggatcccattgcaaaactgagcacctaacggtatttttcaagctgttgattgataatggctagatcag

SEQ ID NO: 32723 - DNA, 1882 bp, Arabidopsis thaliana landsberg
ggtttaaaattaattaaaacccgggttataaaatatggcccccccaaaataaataagttttttgttattttccctcaaaaattatgtgtatgtgtaacaaagttttgtatatatatatatatatatatatatatacagatgcaaaatattgttttgtttgttgattatgtcggagcgtcatagctaaattattctgtaattgtcttttaaatatttatgtaaatggaattgagatttctcataaatatgattggtaatccacaaaatgataagacaattttacaggtttaccaattgatatgcaattcacagtaaaatcagtaacaattcagtgattgtaaacacaatcatctcctctatcaataaaaatttaaatcacgtaaacgtgaacttagttctgtcataacagagacagtgacagctttaatcgacccatatctctctcaatctggtcaattgctcgtttcccatgaaagcattcatcatccttcgtcactgtatattattttctaagtacatattatccttacgaagtaaaaaaaaataaaaaaatctctcctctctccttttgcgtggtaaaaagtaattgtagttgtatttactagcagtaaatgtaaatttatatttgttcaccatctcgtttatgggattggataatttatcaatttcactcatattgacgtaatctcatttcatagacccattcccacttctaaatgctacttttttttttaattagaaaattaaaatcaaataccacatcatctaaaacattcattcagccggatcggacaatcttggccattcatttataaaatcattactactaattaacattgtaaaccaacaattaaatgcggtttaagcttagttaaagttggccttaggatcgagcaagataagccaaagctccaacaagtggagcgttaatgtaagttgctggctctgaccgtccgtagtcggaccgttcgtcagggaattgatcgttctggtccggaccaccgactactgcaccgactaggtcgttaggattaggagattgagaggtaaacaaggagaagccgtcgtggcactggatcctggtcgggtggactgcaacggaggggagagatgagccacggtggtgaatccgacgtggatatttcagaccataaccaaccatgtatgacatcttcaacgggttgcctccaagtagataatccacctgaagcatatatcacatgaatcaattaattaagcaaatactactctttccattttatattgggatattaattaattcatgctttagcaaaatacaaaatttatttcatttttgctaattatcattataataaagtatagattcttaattcttttattggtatgctgtagtcttgcagatggtgtcacatttattatgtgcattaactgaaaatttacttgatagtcaagtttgattttgacatccaaagtataccagagtcaatatacattggttttgaaacaaacctgtttctttgcgatggagcggaggcgggcaggggtgacgacggagccaccgcaataagcgacggtgcgagcagaggttaagtatttggcgtaggtcaagagcaagaacgatgtagacgtcacgtattgcatgttgctctcacccatcttgaacaatagcccacctataaatatgtatacacatatatcataaattccttgatttttaaatttcaatgagaagatgagtggtatatatgcaaaaacctggtgtatattgggaagaggatgctccaggtataacagagcaaatgaaactatcagcatgctctttgtattcttcaagtgacttcactttctgaatcagaaactccttgaaaaaacaaaacaaagtcacacaaaaaatgtttca

SEQ ID NO: 32724 - DNA, 2517 bp, Arabidopsis thaliana landsberg
ttattgtcggtgccaatccgtatgcgagtactcgttcaaacttcgaaataacttgaaacccaaaagctataatcataattgttggaatccctttatattaatattattcgtagtagataaatcgcaaacatagagcttctcaaatttcttaaatctttgaaagagggaatggatgaagattaggtttaatgacatgtatgatcagtctcacaagcttctttggtaggtgcgcataatctaggtctaacatttcggcaacaaaaacattttttctgccctcacaacggcctggcaagcactttggtaagtttaacttgcttgcctcaaaaccttccaagtttgtacctgtactagattttaacccgcggtacaccgcggagacaatttattttttttaaattagtatatataaaattttgcaaattatatttgtttataaaatatttttattttatagtttacaattgttattaagtaacgtccttccaaacccgtttcgccaaacccgtcttgtaaaaaaaaactgcggtaccccgctaacttaaatttataaataaaataaatattttacgggattgcaattgtgttttagtttgtcaaacaaaattttgttttaaatagttctcgaaatctagttcaaatttagagaaataagatttagtgaattgataagaaatgtatttagttgcgttttgctcattttacgggattgcaattgtcttttgggttgtcaaacattttttgttttaaatagttaccgaaatctagttcaaattttggaaaaatctgcgtgatatatgggattgtaatatatttggaatgtttttcgtttgttaatcaatttattgctgaaaaaactaataattaaaagccaatggcagccattgtaaataagttccaactctaagatttattttacaaaatgactgcaaaaatgtatatatagatgatataacgttcaagttgccctagaacaaaaccttggtctttgaaaagtgaaaacgtgtttctatattttgaattgattttgtggatcgccgagtagatgtctacgatgaaaacaaacctttcaagttatgcttggcacgaaatctctatgttaattagtcattaaactaaattagtaagttttgacgtgtgacacctttgtttttcctttatattgtccacataaatgctaacaagtgaaaagttagttatgatatatgagatatctttggactaaacaaattttaaacgatttcttagtttatcaatatgttaaaacataatattgttgaaaatgaaaaatgagatagtagtgaaaatgttttaaaatacaagaaagtaagataaatttgtaagaaaatatgctgatgtaaaaaatattgtgccctaggttaaaataggttctagatctgccactggttaggtagttataaagacaataatggtgtagaaataaatcatgtcatgtcttttaagtgttcttgaatctctgtgtcagtcatttcctaatgagcacccttagattccaaatacagcttttggcctgattagtacgtaactactgatttgcggataaataaaaaagtattagtaactccatcttttgtccattttatttttgaagaaagatattttgagcattgcaaagaagttccacttttgtcttgccacaacaaaattcttctcattctttgtttcaaaagccatatattcatatgagacatttgaaccgattctaaataaggctgtattatcgagttttatgaaaacatgaaaaaaaaaaaaagaggactgagaaactttaggaccggtgtcattatgtgacagacaagagagaaaactcgtttaataaaaaaaaagtctcgacaaatcctatttataaaccttcaaaccccaaagtcatgtatattaacacaatcattctatttatattaaaagaccgcgggtatcatcttttcctgtaaaatgatttcgactttagttcccacaccgcaaaacaatatggttgatagttccaactacgcaatcttttttttttcccccccttaccttccaagattcaatttcctgaaaacaagatcattgctctaatcaaaccctgaaatagagtttaaactataaagcaattaatgtttctaaactagtagtagtgaactaatgagctatgaaatttgtggatatggttgtaatcaatcccctgaaatagagagtagaaagcatcaaagtgttctaaactagtagtgaactatgcatttctttttagcaaaagacaggggttcatagttccaactacaaaatcttatcttccaagtaaacaagatcatggctctaatcaaagccctgaaattaagtagctagtgagctaatgcaattacttcctggcaaaaccagatttgagtcaaatgatcttctcattctctctcaatgagaagcaaactagttatcttgtcattctctctgaaaaaacgtttttgtttatctgaagttgatgtaaatgactttggaagctttggttttaaaagaaacaaa

SEQ ID NO: 32725 - DNA, 1232 bp, Arabidopsis thaliana landsberg
aaaaactaacataatggagacatgcttttttcagtatatcattttcttaacgttgttgtttcacttgttatttttgtagaccaatgttggctctaatctcagtggagaagttaatggtgactcgctggggagtgcatcatgttgtcctcctttgttatatttataagaaacatgttgtttctacactttctttcaccctttcctcaaatgcaacattggaaccagtatataacactattgccgcatttaatgtagtaaatacgtatctaatattttccaacggactgttcattttgtcaaattgcaaataaaatgtgtcgacccaattatgtagcaagttgcataatgatgattactgatataaccaaacatttcatgtaatgtatgatacctataaattgatactttgtcgagcttataaccgaatgaataacatcaagcccaatacacaattttcaactcactcctattcttttcatacagtataacttcgtttgcatataggaattacataagttgtttttaaataacgttctattttacagttaccaatgacttttttatctgttagtcttcattgaataactagtcgcatacaaagtaaacatctgtatatatatggtccgtttttggcatatctagtgatataagttagggtttaaatatcaaatgcatctgtaattgaaagttataaggtatgtggtttatagaataaaaaaaaaaataaacacgaaacaaaggcatctacagatggcgtgtgttttataaataaagcggtttactcattacctacgcatgtttatgttccctacatatagcacctagtgtcagaattcacgagttttcacctatctttccaggttattttggttatttcgcaccgtaaaaaaaactatttacttaagttttctgatattttcctaattatgtgtccaatttaactagttattaatagggaaaaatgtaaaaagaaaagcgccaactttcaaatttgggacgaaaaagcctgaatttcctaaatatcatttaaatcataaagttttctttgagtctttaataaaatggtcaagttttgttgactaggtcatttcggacacgccgtgaaatttccgttaacagagttaactttccgttagaattttctgttaaatcaaaaaaacgtcgttttgttaaaaaaaaaagagagaaaaatacatccaatgaacatcgaactgatgacctaatgcacactt

SEQ ID NO: 32726 - DNA, 1127 bp, Arabidopsis thaliana landsberg
gacggtaatgcgaagaaaataaatgagtgggagacatgaaaaaagaaaatgacatggttaatagatttgtacaggccaactttcatgcaatggaaaataggtacctcatacactttccggcggtcatgaagaagatattggggatcgagttcattcactaaaaagggcctgaatatagaagtgtgaactcaaaagccaaactcaatttatttactgaacaatcaacaaaggttaaaaaggtagaactcactttcttaaagaagaatatgcttgaactttctcaagaggatatccagaggaatagaaagcaatcaaacaatcacaaatcggccaactgaaacagtaaagggagtaaagtccctggtgaatttgcggtccaagaatataatggtacttgataatcattaactacactctctccatataatctaatagagagaattggtacaaatccatgaattaaataggataaaaccaaaagtaaaaacgatattcataaatttgtttagagacgtacctttctactgggtcttcaagtatgaccttgtccccaaaatgtataatctaataaagtggtaacaatgggtccatgagatcacaaataaaaaggaaaaaagaagagaatacactatagagaatccacagagacagacacaaacaacttgtaaaaattaccccaggaaaacatcttccaataaaattgaaatcacaaattagaactaagtcttttcaagagacatttttattctccaggtgaaaaatcaccaaatgaaaaacctgagaaacatcaaatcctcaatcatgagaaaaatcgagaaagtgaaaaactacctcaaattcgccaaacgcatgtatcctgtccataatttgtcccatgggagctgaaaaaacctagaaaatccacacacactaacaatctcaataagcgagacatcagagtgaaattgaaaacctcaccggagtaacaacaaattcaacgaaactatcgcaatctgttcgttagagcaagaaaacgcgattattatagcacgataggaaacaaaaccttgtagccgcatttaccttcttttcatgacgcagactccaatcgtttcttttataacaccagttcctttttcaccccattt

SEQ ID NO: 32727 - DNA, 940 bp, Arabidopsis thaliana landsberg
aattaagaaaaaattgccatgctctttcttagtattaggtttaaaatttatgtgaaccatgctttttacaatatgtctagagaagtagcgggtatgttgaaaaaccctcagcaactttggaggaacaattttaagttaattaatttatttaccggagtttaaatttgtagtaaacaaaaccacattattctaacatataagctctaggctcgacatagagaatgaggcttgtatgctgaaagtgtcgatttaaataatgactggttgttcaatatccctaggcgaataccctatgtgttaagccattacctaatatctgggtttgaacccaagaatgcatatctgctgagccacacgatccagcgcatttttgttttctgaaaaaagaaacacaccgacacatacatgatttgatatagttgaaaggtaattgaccaagtcagatgttgtatatattacatattgagatttaagattttacaaaataattctcgtttttaatctttaaatcattgtttttttttgtttttctttaattacattttttttggttgcaaaataaactattactacatttagtttgtggtaaagattttttgctgatagtcttagctgagattttacgaatggaaaattttctggaattgcatagtttctttctagttttttccttttttttctttctcacaacaccttaagcgtccacgagcagctttaccttacacaaatgacaagtctatgctaatcataaccgaagtgtgtaatatattgatttgtattaatagtcatatcataactaatgttcaaaaccgacattgtatgtgaactagagatgattaacaaaaatatcttattggtagacattaatatatactataagaaattaaactactattttcatttatatacaccgcaaactaactttgataattcgtatttg

SEQ ID NO: 32728 - DNA, 1852 bp, Arabidopsis thaliana landsberg
cgtgtatgattgaatataaatttagaaccgcaacgagattctgttgagtaaaggggtgcttccttgttatacgattgaaaaccaaaaactattaagaacttcgggttcaccatcaaagctttgagaatcatgaagaaggttggtttgtgtttttgtagtccaaattaacttgatgttatgtttatcattcggtataaaaactagaaacgcaataagaacttggaagttaaagtaggattcagggtttaaggtttaaggttaaggttttgcgtttagggttttaggttctaaggtttagggtgtacggcttagggtttagagttagggtttacggtttaaggcttatcgctatggttcacacgatacaggtttaaggattaaaaaaaacaacctcaatcatttctattagtgtccatgtcaacataattcaaaactagccttgagacttaacagagtcaaagagaggggtaaacagattctaaacagagcactctgtttttcttcattaaactaaggaaccattccataataaactcttaccaggaattggattcaagtcggaaggaacaatacactcatcaaaacctgtatcatcctcttcccctgtttccggtgggactctcgtgccgtgtccgctgtaatgcacgaataaaacgtcaccggattttgctggctttatgagctccgacaaagcctgacggatgttctcttccactgcgctttatgtttttcggctcactttcgagcttgtatccccggtattgtaataacattattcagactctgtaactatttgaagtaatgaatgtggttactagcctcctgggactagtaattatatcacatttgagtcccaaaggatcgggacgcttcacagggtctcactatgtagcctttacaaagatttcccagaggtcatagcctaccgttaggtttctccagtttgataagcacagtacatctcctaaaggaagggtgactaacaaaaccaaatcacagaacctctgcaaccagcctcggcagagcaagtactgtgctcggaccccattgacggccctacggcgaacgaactactcctccggttcctctaactaatcagctaagggcgtcccattccaccctcatggttgcactgttatcccggcttgtcactccccaaacaagtccttacggagaggtactcaggaaacatcccgagccccctaaagtaatcacaagaaccttatcgggataacatcatcgtatcatacataatcacatcatgttcattgattaagtttaagcaatagcataagcttatcatgattgacccaaacaggtaaacaagggtaaggtaaatacagactagtcaatccttaaatttcaataatgtaatgcgggacagtgaattataaagtaaagtaggacataataggtctaaggacacttgccttcaccaggttgttgctcagggagtctccaacaacacactcaggaacctcggactgctcgttgtctaaataaagcgagcatgcattcaatacatttgaaaagtacaaatgaacatcacaccaaacatatacaaacattggagcacatcttaaaaagacacaatactacataagggataatgaattcaaagtataacataaactataacatacattaactttatttgaaaatagattattatttctctaagtgttatttacaagtacataatcatagatcaatttattttattgtgacctaaaaattagaacagagatgaactcatgtaatacatattattaatctcacaagcttaaacatgtttaaatctctaatgttctccttttatttattttattaaataaataaaactacatctata

SEQ ID NO: 32729 - DNA, 11447 bp, Arabidopsis thaliana landsberg
  unsure (1)..(11447): unsure at all n locations
aaaatttctccggagcccatattaccaagttgatacaccccgatgcgaggccgcccgatggtcgaggacgaggccgagttcgaggacgcgtcgagaatcctacacttggacgaaggatcaacccgcaggaaacgagcaggaatattgtgagttgcacaagagttacggccatcatacttccagatgtagtagcctcggagcaaagttggcagcaaaattcctagcaggagagatcggtggaggtttgaccatcgaagacttggaagcggaaaagggtaaaaccgagaaggtcaatgctgtggccaatcccgagcaggcggcccccgcggcgaacatcgaaggacccaaaagaggccgaggtaatagcgaagcagacgacgacgagccagaagcagctcgggggagaatcttcacaattttaggagattcggctttctgtcaagacacggcggcatcaatcaaagcttatcaaaggaaagccgacacggatcacaactggacgcggccatttaacagaccaaatgacgaagtaacttttcacgaaagcgataccaacggtttagaccgtccgcacaacgatcctttagtcattacactgaccatcggtgatttcaacgtcgaacgagtcctagtcgacacgggaagcacactagatatcatttttcttacaactctgcgagaaatgaagatcgacatgacgcaaatcgtaccaactccacgacctgtgctcggattctctgggaaatcactatgactctcgggaccatcaaattaccagtccgagccaaaggggtaacaaaaatcgtcgatttctctgttaccgaccagccgaccgtgtacaacgcgattattggcacaccatggttaaatcaattctcgagtgtcgcctcgacgtatcatctttgcccgaaatttcccacaagcgacggcgtgaaaaccatctggggaaatcagaaaaatgctcgaatctgcttcatggcagcacacaagctcaggaaccccgtcactgaatcgacggccgacgcgaatcataagaagccaagcttggccgagctgaagagaagtcaatctccgagcagttataacagctaaggatcgaggaggctcgggaatctgcaacaccaactcccgatcctgtattcttaatctgccttgacgacgaaaagcccgagcgatgcgtagaaatcggcggagatctgggagaagaactaacagctgaactcacagctttccttaaagaaaacgtcaatacattcgcttggtccccagaagatttgcccggagtaagtgttgacatcgtatcgcacgagctcaacatcgatccgactttcaagcccatcaagcagaagaggagaaaattgggtcgggagcgagcagaagccgtgaaagctgaggtagagaaattattaaggatcggatccatcaccgaggcaaaatatcccgattggatcgcgaacccggtcgtagtaaaaaagaaaaatggcaaatagagggtctgcgtagatttcacagaccttaacaaagcgttcccgaaagacagcttcccattcccacacagcaaccgcctcgtagaatcaacttctagaaactaactattgtcattcatggacgattcggtggnnnnnnnnnnnnnnnnnnnnnnnnnnnnnntcaagaaaaaaccattttttacacagaacaaggcattttttgttaccgagtgatgcccttcggactcaagaacgccggggcaacctatcaacgttcgtcaacaaaatcttcgcattacagatcgggaagacaatggaagtttacatcgaggacatgttggtgaaatccatgacagaaaaagatcacatatcccatttacgctaatgtttcaagcagctcaacctctacaacgtcaagctcaatcctgcaaaatgccgctacagagtaagatctggcgagttcctcggatacctagtcacgcaccgcggcatcgaggcaaatccgaagcaaatcgaggcattgttgggaatggcgtcacctaagaacaagcgagaagtgcagcgcctaaccggaagggttgcggcccttaaccgtttcatctctcgctcaaccgacaaatgcttagccttttacgatgtgtttcggggaaacaaaaagttcgaatggatgacccgatgcgaagaagcttttcaggaactcaagaagtacctggcaactccacccatccttgcaaaacccgtaatcggagaaccactatacttgtatgttgccgtatcgaatactacggtcagcggagtgttagtccgagaagacagaggccagcagaaaccgattttttacgtctcgcagaccttcaccagtgcggaacctcgctatccgcaaatggaaaaacttgctttagagtcgtaatgtcggctcggaagctgcgaccttacttcgaattccattccatcatagtaatgggatccatgccactctcgccatcttacacaatccaagctaatcaggatgtctggctaagtgggcaatcgagctcagcgaatacgacatcgagtatcggaacaaaacatgtgcaaagtcgcaagtcctagccgatttcattgtcgaactacccaccaaggaggcccgggaaaatccgctcgacacaacttggctgtctgcacgtagacggctcgtcatcgaagcaaggctcgttgtgtgaggcatccaccccacctcgccaacaggagaggtcctcgagcagtcatttagattaaacttcgaggctaccaacaatgtggccgagtacaaagcgctcgttgccggactcaatctagctcgcgggctaaagatagaaaaaatccgagctttttgcgattcccagctcgtcgcgaatcagttcaacggagagtacacggctcgagacgaaagaatggaaggctatctgactcatgtacaaaatcttgcaaggaatttcgaagagttcgagttaacaaggatccctcgaggggaaaatacatcagctgacgccctagctgctctagcctcgacatccgacccgagcttgagtcatcccagtagaattcattgagaagccaagtattgagctcgacgaagaagaaaatgtcctccccatacaaatcggcacggatcacaacgacgctccaggcgacaaccaagacgagtgcagttcatagtggatagagcccatcaaaggctagatagccgaaggaaaattgccctcagacaaatgggaagcttggaaactcaaagctcaggctgcacgtttcgttctagtagatgaaaaactttacaagtggcgattatccggacccttaatgacatgcgtggaaggagaagcggtttgcaagatcatgaaagaaattcacggtggctcgtgcggaaatcattccgggggaagaactttagccattaaaataaaacgccacggattcttctggccgacaatgatcaaagactgcgaaaaattttcaaagtgatgcgaaaactgtcaaaggcacgcgccaataatccatcagccagccgagctcttgtcatcaatcgtctcgccgtattcattcatgcgatggtcaatgaatataattggacctatgcatccctcgaagcagaaaaaattagttctcgtcttgaccgattatttctctaagtggatagaggctgaatcttacgccagcataaaggacgctcaagtcgagaacttcgtgtggaaacatatcctatgtcgccacaggataccttatgagatcgttacggataacggctcgcagtttatatcaacccgcttccaaggcttctgtgataaatggggaattcgacttagcaagtcaacaccacgatatccccaaggaaacgaccaagccgaggcctcaaacaaaacgatcctcgatggattgaagaaacggctcgatgctaaaaagggctcgtggtccgacgaactcgaaggtgtactttggtcgcatcggacaactcctcgccgagccacaggagaaaccccttttgctttagtctacgggacggaatgcataattccggccgagatgatagtgccaagcctacgacggagtctatcccccgagaacacccctgataacactcaaaggttcctcgacgaactcgatctgattgatgaacgaaaagattcggccctggttcgtatacaaaattattagaatgaaacggctcgtcattacaattcaaatgttcggcaacgaagattccacgaaggagatcgggtctccggaaagttttccagaacactgccaaaccgaacgctggaaagctcgggacgaactgggaaggaccgtacttaatttctaaagtcatccgacccgtagtgtatgagctcgctgacttaagtggcaaagccgttccaaggtcatggaacgcaatgcacctaaggaaatactacaactaaatccgaggtgactaaacttgaactacgaggtggcttgatccctgaaaagggtacgtaagcagctcgtcttcggacgagttcagctaccnnccncccccccattaaaaaaggggggagtggtccgtatatccatactcccacttattattttgtacgagtactagcttcggcataaataataaaaattcggttcaacttttaaacgcttcggctacatacgatgagcgacggctcggagtatcttttacgcctgctcggctacagcacgctatataaatacaagataaattctttcagattttttcacaagacatttctatcttcagaaacccggtaatactaaaacacctgtaccccagctcattcttcaaccgaaaagcttcacccacacttaaactgaatcatatcagacaataaaacggttcggatttttagaatcccaccaagtatttcatattgcaaaatggataaagccatccaggcataagttctacaaatcattggataaagccatccaggcacaagtacaaagacaaaaaaacaacaaaaaaaaaagagacaaatcccgagtcgggcgtttagtcgagatctgcagacgggcgaatgtcctcagcaggcagaagtgacccagactggttaacaactcccccctagtcagcaagggtctcgaccgatttgtgaccacccggacttaaaggagcggggtcgggaacaggagccttgagttcctctttcagctcggcgacaaaattggcaaaatttacctcggcattggcgaagtctttcagccattcttcgacctggtctttctcggtcgccaactctccaccttcctcaagtgccttgatcagttgcgcattagcccgcgccttggataagtatataaactgatcgttgatcccgtaaaggagcgacaccttctgctcggcgaccttaaatttggcgataaaaacctcaaaggtctcgcgcctagccgtttgagaagcccgagccacttcgctatcggggagccccctcgcctcggctagcatgcgtttgagacgaacaacctcggagtccgccctcaaattcagctcggccatcttaatggcattcgccttgctcacgaaggcctcctttttggcctcctccttcgccatcttcgccgcggcagcttaggagagcgcctcatctctttctcgctcgacagcttggatccgagcatctgcatcggccaacctgttggccgcctccatgttattcctcatggccgaatcgtccgaatgcaccattcggttcatcaaggcgacagcctagagaacagagaaagaaaattacggattggagctccagactgatgaaaaatgaaaaagttgaataggcacttacccgcaggaaatgggacgccgtttcagcatacttccgcgactccaaaagagtattcggaggaggaagcaaaggaccagcacacaccccgaggaggtttccagaggctacccgatcttcaaaaatggggagctcttttcccgcctcggtactcgagcccttcttcttcttgctcttcttcttggacgatgaatcatccgtctgaacgcgcttacccgccgccttgtcgctcgcaggcagcgcgacaatcgtctcgggcaaaggcgcagcagcaataggatcgacctcttaagcctcagcaggcgtcgggtcaatcggggccgcaacttcgggagcaacgtcccggtcttgagtcgcatcgggagaggccgcccgcggcgaaatcagtcgcgcctccgcgaggcgcttctcctccgccaagcgtctctctttatcttccttcttcttcgcgtacacctccctaaaagtgagtttagttgactgcatatcgacgaataattgagtacgatagtccgaaaattttgaactgggaggacaggaaacgccttgaagaagacggagggctcgttcgactcgatcccgggaaaaatgttttgtcctatcgcacttccgagatgattacgcgtgataagtcgagaggaaatcgtcaggaatcggctcgaggaacttgagggtgcgttatgcgacaaaagaaactagttagaaaaataaaccaaaaaaatataaattgcgtcggacataaataaattgctaactaaaactacccaaagttccccatctcgttaggaccgtcccgagaaggtcgtcgtgaacagcatctccgagagccacgtagaagaagtgatcggtatacgattcatccttgctcgagaacccgtcaataattttcttacccttagcaggagagatgtaataccgatccacttcggatttgggaacccgccggatctcaagaaaattctttagatgagcaagcgtaatttcagtttcaaattcataactccgaatcaaaatcccgagcagatgtctcaagggccgcatcgtgatctgggagagggcaatctagtacgatgtcacgtactccaaaaccagccttgggactggcagccacaagaagcaaccataaaagaacccctcgtacaaagtatagaaacccgcagggggattgtcggctcgctcatcagggctctacacacgcaaggttactgcaccaagaccgaatcgggccctaagatccgaaagagaccgctcggtgcataatgttgagccaggaggatcccgcattatcgcctttttattcttcttcctcttcttcttctcggctttctcaaaagtcctctgctcgttaagacgcagaatgtcttatgtctcgttcgggccgaaataaagaaagtcctcaatctttatcgtcggcattaagggctcgggcacatctcgtcaattggatgtcctggcttcatcagccatcggggcaaggggcctccgaacgagaggcagctcgggatcatcggacaaatccaattcctgagcaatatcggcattggtatcttcccgagccgtgaaagaggtcatctgctcagaggcactcgaagaagatacatcatcatcttcagaagatgtccaaaccgctctccgtttgtagatgggggaaggtcgtctggatgattttagtcgctggaatcaacgagagaagcgctcgggaacgaaagagactgactggaactcatttttggctcagggacgatcaatgagatgagaaacgaccagaaaacaagaatttctaaaccgaaaaaatcaaaaataacaaaagaacggcggagcttcaccggaaaagaaagaacgatagaaatatcaagatcagagagaaggaagcaaaactcgtttattttcttcgaaaacttcaaataaactcccgaaggaatggctcgccgtatataaagagttttcaagagcgcgtcaggtccgcagcaaacattcaaaacgcgttcaagcgcgtgggctcggcagaaggaaaagatccgcgtgatcctcgggaataagcgagaaatgtttccacttctcaagaatagttggcaacacgcgacagaagtttgaccgtccgggaagatgaagcgacaaaactagaagacgaacagtcggctcgggaatccattcatgaagctcatcgtctctctgctaagtcaatgagctggggggcaaactgttggggtcggattccacccaggtaagcgagccaaccatgtttcaatgcctcgggagacgtcgaagacttatcccgaaccgggccataaaacacctcggagatcgcatcaagaatccataccgaggcgatatcgagaacgcttcagagcattctcgtgaaatggtcccccgacccgacctcggaacgcctcggacataaaacctggcaattcatcccgaggcgggctccaagacgcctcgggaacgcatcctcgaaaatcacggtccgagctgcccgagcacgacccaaggtcagctaaattccggctcggaaaaagttcgggttagatgagaaaaccttcaaaaaggacttagccgatataagatcaaacgtatcatttccgaaaaccccggaagagataatcttcaaagatatcaccgaatacagaaattcacagaatctttggaagataaggacaatctccttcaccaacttaaagataaagagaaatcttccgagaatatcgcgaggggcgatattccaaagctctataaaaagcacctcgaaggacaaacaaaggggacacgcacaaaaacgctctcaacttcaggttatcaaaaacgctctgactttgaaggcaaaaacacttattttcatattctagaacacttgtacgatcaaatcattactttctcattaatacaatcaagaacaccgtccgcggtaattgagaattctgttgttctttgagaatcttacaaagattcgttctttgaagaaacccttaaaactatttctattgtgcgagttttgactctcacaatttggcgctagaaggaggggacttgagatttctcttactcccggaacacaaaactaaccacccaattcacaatggtcaacaatcaaatccccggtaacacagttgatgcagaggggaacccaatccctccaatccagacagacgttcctgaagccgctgctcctgtgaccctagcggaactaagaagtatgatggctcaacttcagcagaaggtgaacgatcaagaacaggcaaatcgatccttggcacaacaactcgaagcagctacttcccaaggatagatcaggactactcgtttcggcgcgaggcatcttcaggatcgacgagcagcagcagatctcaaccccacacggctcgtgttccacacgcctggcaatactacaaggcccgtccgccgaaccgcaccggaaatcggaagagaccgaaccgagccaacgattttgggaaatcgggaaacaaagcgaacagaaagaaacgaaccacagctccctcctccccgagcagaggttaccgaggccgatcagatcgatgcctcggacaatgaagcttccgaagagaatattaggtgggctgaagagtacgccagagaacaggaaactagcgccatcaagctacccttagccaaggcagagaacgagatgaagctcgtgagatcccaaatgcataacttagtctcctcggcaccgaacatcgaccgcattctggaggaatcccacaacatgccgttcacacacaggatctccaacgccataatctcggatccaggaaaactaagaatcgagtatttcaacgggtcttccgacccaaaaggacacttaaagtcgttcatcatctacgtggcccaagccaaacttagacgccggtcttagtcacctgttcgtagagcactctgaaagggccaactctggattggttctcgagactcgaaggaaattctgtggacagttctcaggagctatcgacacttttgctgaagcaatattcggtgctaatcgatccctggacatcatacgccgatttatggtcactatctcaccagcctaatgagccacttcgtgacttcctcgcgacattccgatccaccctagccaaagtcgaaggaatcaacgacgtggcggctctctctgctctgaagaaagcactctggtacaaatccgaatttcgaaaggaattaaatttgccaaaccactgacaatccgagacgccttgcaccgagcctcggataacgtatctcatgaagaagaaatggaactattagccaaaagacacgaaccgtccaagcaaacgcctcgcatcgataaatcccaacccagtgctcgaatcacaaaaagggtgctcaaggcgggacattcgttcaccatgaagggcaaaatttctccggagcccataattaccaggctgatacaccctgaggcgaagccgcctgaggccgaggacgaggccgcggtcgaggacgcggtcgagaatcctacacttggacaaaggatcaacccgcaggaaacgagcaggaatattgcgagttgcataagagttacggccatcatacttccagatgtcgtagcctcagagcaaggttgtcagcaaaattcctagccggagagatcggtggaggtttgaccatcgaagacttagaagcggaaaaaggaaaaaccgagcaggtcaacgctgtggccaatcccgagcaggcagcccccgcggcgaattccgaaggacctaaaagaggccagggtaatcgcgaaacagacgacgatgaaccagaagctgctcggggaaggatcttcacaattttaggggattcagctttatgtcaagatacggcagcatcaatcaaggcatatcagacgaaggccgactcaaatcgtaactggacacgaccgtttaacgaaccagatgacgaagtgactttttatgagagcgatactaacggcttggaccgtccgcacaatgatcccttggtcattccactaattattggtgatttcaacgttgaacgagttttagtcgacatggggagcacactggacatcatttttctcacgaccctacgagaaatgaaggtcgatatgacgcaaattgtacaaactccgcgacatgtgctcgggttctctagggaaaccaccatgactctcggcaccatctagttaccagtccaagccaaggggataacgaaaatcatcgatttctctgttacttaccagccgaccgtttataatgcaattattggcacgtcatggttgaatcaattccgagacgtcgcctcgacatatcatctttgcatgaagtttcccacgagcaacggcgtgaagaccatctggggaaatcagaaaaatgcccgaatttgtttcatggcagcacacaagctcagaaaccccgtcaccgagtcgacagccgacgcgaaacataagaaggctaaactgggctgagccgaagcaaaagccatctccgagcagtgatagcaactaaagatcgaggaggctcgagaatcaacaagaccagtccccgacccggtaatctttgtctggtccccagaagacttgcccggagtaagcgtcgaaatcgtagcacacgagctcaacgtcgacccaacttttaaactcgtcaagccaaagaggagaaaattgggtcgggagcgaaaagaagctgtgaaagccgaggtagagaaactgttaaggatcggctccatcgcgagtcaa

SEQ ID NO: 32730 - DNA, 730 bp, Arabidopsis thaliana landsberg
ccttttaccttcagcttgaagttgtacttggtaaaatttacctttcggatgatatcttcgaatttttcgggatccgggcgttcattcttcacataatacaaatctttagcagatatgcccattatctctataccagcctactggaatgctgtgacccaagtaagatctggatggccctgtatctgaggctggagtatatacctgtgggcacattcatgagcgcttatatcacactttggggcccggcatgttccatctccattggctgttacctttatgctggatggacgatcaccgttcatgataggacaagctgtgtagcagaagtttttaaacttcaagtttaaaattgtggcactgactgtgatccaggctggtttttcggaggttcctaggttctcatctttaatttgagatattgccttacgaacgtgtgctttggcactgccggaaaactcccgagataaggagatacaagggacactctttccttctctctcaaaccagttcttcagtttctcagcttcaacaaaatttgtgtcaatgaacaggtgacttgatccaatggagctcactgtctttccattaaattcactaattctgcccgccttaacaggcagaaccggaaacacaccacaatcacaaagacttttgggcctttgtccttctgttttgaagaagtcaccccacatagttacctcaacactttgggctgacataatctttcact

SEQ ID NO: 32731 - DNA, 596 bp, Arabidopsis thaliana landsberg
  unsure (1)..(596): unsure at all n locations
aacggcccaaaaatcataatgaatatattccagtaaaactagactcgtgtggtatccaaaacacaattttcttcatagaaaccaaatttatgcattcttttcttgtctccatcatgtataatgtatttttccaagtgaccactgaccataatgtaactgtcacagattttaaaataactaaaagcaataattgaaaaagaaaaaacactttcgaaaaaactttacagccttctaaccattcaggtctgaatcagaccgtctgattcatagttccaatggaatgccaggaacgtactcctctaataagactgatttcgcacttcaacgaattttttagagcaaaatatccaatattttattaaaaattggccttccattatgctctatcttaaatgctcagttgctcacccaattttctgtctacgtatttaaagcttaattatgtagaaaacatttgcacataattttttgtctttgggaataaagttaaggattgatttggcaaaccctacaactataaatccgaaagacatttcagaaactacatcaaattattaaattaacnatgacaaaggaataacaaaacattctttcat

SEQ ID NO: 32732 - DNA, 2006 bp, Arabidopsis thaliana landsberg
tgcccgtgccaccgacccatgcccgtgccacccacctccattcttcaaaacttcttttctaagcatctcaacatcagaaccaatgccataaatctaaatctgaccaagtgtttgtcactcctgcgtaaaaacaacggcaacacaagagaatccatttcctgaaactgaaactgaaagtgacaacaaccacctttgtaccttgcattatgttaactacagaatcattacgtgattgaatcattacatgataaaatacagaatgtattgtatgagaatcattacgtgattgaatcaataacccatgtcgatacttttaagttaactagagagaatcaaaaactttttaaaaatgaagctcactcgcacatacaactgaacagaattttgcatctttttcaacgaaacggatctgatctttttcaaaaaaaacttgaagaccacatcatctaatgatttttattagcttctcaatcaacgatctattgcaaaatgcagaacctaacaacacttacaaatttatccaatcctacatttatgcaaattttcccaatcaatcaaacaatcttgagcttcaatttcttgaaataagattaagtaccaaaaattgcataagatcaaaaaacttaccggaagaagaacagaagccagaagtggaagagtccaagctaacaaactcgtcgtcggaagaagacttcgagttcgaaccatcagaaccggaatcagaaggatgaggactcgccgtgattgtgatcggcggaggaatcgggaacagaaacttctccaaatcaaaagaaccgagtttgtttttcgattccaattggagtctctgtcggaacacgaagaaatgagagagaagaagaaaaaaaataaaacgcgtgttttttttgttttttttgagtcaaaacttttacccaataaaaagatgccacgtgtgggtttctattgggtcgcgaaaaacccaattttaggaacgatcctaaatggattgttctgtttttatattatctaggcccacttttacatagaaacccataggcctgggcataatacccggaatcgaatacccgacccgaaaaacccaaaaaagaatcgatccgaacccggaacccgattttaagaattacccgaatgggtcctaaatctcctacccgaaaaaacccgaacccaacccgaaccaaatctaatacccgtgggtacccgaatacaaatgtaaacctaaaaatatttgttatatatatatttgtaatacctcaaacacccaaaattaaaattataaatccgaatataatatattttttagttattcatatacatttgaatatatttgggataaaagtaaccaatgatatagttttcttttaggtaattttagtattttggttacatttggttatatttgggtaaaaagtaaccaatatatttttggataattggatatttcggttagatttggtattatataagtaaaaaacccgaacccgacctaaatctgaaaatattttgggtagttttgattacttttgcatttttactaaaataatcgaaccgacccgaacccgaacttgaaccaaaccgaatttttagaataccctaatggttctcgactttctatccgaatagaccagatactcgaaaaaaagaaccgaacgggtacgggtacctgaatgtccaggcctaaattattattatgagacattggtcaaatttcccgtctttttcgcctctttaggtaacactcgagtaacattgtttgtatagtcagtaacatctcccaagcaaccgttctggacttaatactgcagggtcaagttgaatctgatggtggcaggcaattggatcttaacaattatatatttatggtataactctcgctttcgtatcaattctgatgatcctttactcttacatatcctatgattcactccggtttattttgtggtggtgaaagaaaaggaaagagcaatactttgtaaatgttggcacagattgggactacaaagctaatt

SEQ ID NO: 32733 - DNA, 957 bp, Arabidopsis thaliana landsberg
aaaaccttggttcggatttttgggttcggaattcgggatcgggttcggttggttttagtaaaaatattaaaaataaccaaaaatatcaataatattttcaaatattattataataaccaaaaaatccccaaatattattataatccaattaaaaagtaaataaaaataggaaaatatcactttatatgctcagaagactgaaaaattaggtgtaggaattgtggactatttcaacagtaaaagaactaatgaagttactttattattcttctgtatttttctttttttaattaaagtctcatatattgttttgttactaaatattttcattgttatcatcaggttaacctcgttaacaattattagtaaatattatgtataaattatccgttacagtaaacattattcatgtatcgaatatcttaacgttttcatataaatattattctgttatataatatgttagcatgttatcattctatatatcatgtagttataattattattatgttaattatataaaaaaaagtctaatttccttttattgtgctgaatatacataaataaaaaattatgatttacaattttaaatcgataaatatgttttaacaaataatttataaacttatcgcgatatcatagtttttagaacattaaacaaataattatatacttatcatccgaatattacaattatttttattcaatagcatttttgtaattaattttaaaaaaaaaaaaaattgggtttatatattatttatctttcattcttacctaaataactaatatttatatataaattctttatttcttcatcatcctcccagcatatcgattaatatagtccataaaaatacgtcaagtttaatgcttccatgttagaagacgtgctctaaaacttcttcttttgttgtttttaattcacacttgatctaaagaaccttgatctaaacg

SEQ ID NO: 32734 - DNA, 3509 bp, Arabidopsis thaliana landsberg
accaaaaatagagcttttcatccacttcgggtttggacaatacattttgactggttaggtacgccttaagctgtccaaatgcttcttcacatttctcatcccaaataaattctttgtttctttttagaattcgataaaaaggcaaagatttatcagttgatcttgaaataaaacggttcaaagctgcaatccggccagttaaccgctgcacttctttgaagtttcttgaacatgacatgtcaagaaaggcatcgatttggttcggatgggcttcaattttccttttggtcacaatacaaccaaggaactccccggatgggactccgtacgtgcacttcaccggctttagcttcatttggtattgattgagaatctcaaaacattcttctaaatgcttaacgtagtcctctttctttaacgacttgactgacatatcatctatgtaaacttccatcgtcttcccaagatgctcgtggaacattttgttgaccaattgttgataagtagctcttgcattttttaaaccaaaaggcattaccttgttacaataaatacctctatccgtgataaatgacgtcttatcttgatctttaggattcatcattatttgattataaccaaagaaagcgtccatgaaagtttgtaactcgttcaaagcggttgattccacaaggcgatctacatgcggaagcgggaaactgtcctccgggcaagatttattgaggtcagtgaagtcgatgcaaactctatcttttccattcttcattttgaccacaacggtgtttgccacccaatctaggtattgtacttcccttatggaccatatccttaagagcttatccacttcgtcatttactgcctagcctcctttcactgcgagttttcttcttttttgttttacaggcttgaatcttggatccacgttaagctcgtggcagactatgcttggatctatttaaggcatatccgatgccgaccatgcaaatgatgccttgtttttcctcaaaagttctattatggcttcttttatttccccggttagattagatccaattcaaactttctgatctggtttgtcttcctctaacattacttcgatcaccacatcatccactttctacccactaggaaatctcgggattattcctttcttcgcaggcttcgttaattgctattggaccttcaaacgttggctctctagataacatgtctgcgaagcttcttgatctccccgaattgtttctactccgcttggagttggaaatttgatgcattgatgataagaagaggggatcgccttcatttgataaatccacggagttccgaggatgatgttataagctgctggtttatcaaagatgacaaaatctacaatcttcgacatctttcccgccaaaactggtagcttaattgttccgagagacattgttgactcaattgtaaaagctactaaaggggatggcggtcctactacatcggccctgcttatccccatcctttccaaagtgcttagaaagattagatcaaccgaactaccgatatcgacgaggattcttgaaacctcgaagttagctacatccagcgtaattactagagcatcatcgtgaggtcttttgaggtgctgcgtttccttttcctcgaatgatattgaagcgccttgaaaatctaccttttcacttaaacttgacattagaggaacattccgtctatgctttttgattgcgctgatggaatcgcggcaaagcttggaacctccaagaattacattgattttaccttttgaacttctgggttcttcttcgctagccggtcttggtctccatattgaatttcgaaagatctccgcttgcccatagttctgcgagatgccttttaagaacactacagtctttggtcagatgtgataataagtttttagttaattatcctaaaacactaatcatttcgttgtagtattttaggttgtcaatccaaatgggtgtgatgctaacaatcaagatgtgatcagaagtcactaagtcaagccaagcaataacaggttttggtgtgttctagcagtcctaagtgaacatgcagaaaacagaaaatcaaacagaaacagtaaaacactcgaccaacacagctctttgcagagcactgggtgaggtcgagtgacaggtcgagtaagagacagaaaatataacagggatactcgactgcacagtctgttgccaggcaactgggtggtcgagtaacagcagagaaatgcaaaaactaagcaataggtaacaagatgtagtcaacgatagtagagtaaacaataaaatcaatcagataaagaatttccgaggatgggggtaattgaaaagtttcgatttctcagtttacaggtgattgtcatgctcaataaattatccctagataacaagttcattaaccaaatctaagtgccaccacaacagagaccctcaagttaacctagtcccagactcaatcaccattgacgagagctaacctaacatgcattacgaatcaacaagttaaagcaaaacgctccctgcaaccattaccttggtacatggccactaatctctgtaattagtggttcagatatttcatcgaacaccttttgggcgcggaaatgtctgggctcaaattccaggttatcagaaagcaataggcattaagaacaactgatccagaagggatctatcaatcgatactcaaccacctagcaaactgagaattctacactactctaacccatcctcagaaacctattcactactcagacatcattgcagaaaacataaacgttgaacaggatgaaaacatgataacaacagtgtaatagcagaatgataacaggatgaaaaacaataaacgaaatcaagaacaaatactgaatactgaatagataaagagaaagccggattacaaaaggtcaagacacaatgtctacggaataaaacctagataaaacttgtcctcgaaaatgtgaagtacatgctacttatagccaaatataccgaaaccctaatacttaaaacgacgcagtattgagacggattaaaaactgtactcgacccaggtggtcgagtgagaggtcgagtgaatagctggagtcttcttttcttccttgtgctcgagtgtctggttgagtgcggaatgaagaagactctgaagctcgcaatcgagtatgtagtcgagtggtggtgatggtgatactcgacttcctggtagagtgatgtggtcgagtgatgatcaggtaatgcaggtgaagacactcgacctcggggtcgagtgatgtgatcgagtgatggtctagtgatggggatgaggacactcgacctcggggtcgagtgctgtggtgaaatcgagaagtcctctactcgaccacggggtcgagtggtctcttgagatcttgaagctcctactcgacctcggggtcgagtggtttgacatgatcaggtctgcttcttccagttagctcgtcaacagctccaaatcacttgaaatcaacacaaata

SEQ ID NO: 32735 - DNA, 5130 bp, Arabidopsis thaliana landsberg
tcagaaccaactggttcactagaccgggtgggcgcctgttaaaaagggcggtctgagaaggtggagctcctcccgagctcgtaatttgagactcttggcgggtcaaaacgagcatccctttgttgtgccacactcgttgagttacatctcctgaactcgggtggaggtggtggcgatctctgccttctttgcagctcctgaatttgaaccgccatgccgtccattgctctcttcatctctctcaccttcttctttaacccactgaacatctttctctgaaacttgcccaaacccttgagcattcccaacttcttgtgaacttgaccgggatctgtctcttgatcggacttagcatagttttcaaagaaaaactgcaccgctgcagcttcacacgaatcttcttgttcatcaaactgttcagctcgactgaactcagcttgttcatactcggcctggccatactcggcctgctgaaagtcactcgaccgagtataagcttcatgctcaccttcttcttcattgaactctgctctttcttcttgagactcacttcctatgctcggctctgcttgtagaggtgcaaggacgttgactaagatcgattgaggaggatcaaagtcaatgttgttcccaatcctaactgtggtgaacttcttgcaacggagtgctagcctagagagacctagcgtgtagtgcttgaacttgaaatagagttgatcagctggggcagatctatcaaaatagcatttcctcttcaagtactccatatcaatataggttgttgtgtgagtggggtgtgaagaggaactccagcggctattaggatgggcgtgatcactcctccagcacataagcttcctccataaccggattggtggataccggttgcatattctctaaaaccaatcaagtgatcaatcaacaccaccgaaagggatgtatcagccctatccccttccatctctatcccattccttgtgcgccccaaaatgaagcataaggtgagatcaagcaacttcagctcgccctcattaacatggccggttgtcttcttcgggaagaaggcacttgcaatgcaaaggtggagatacctaagcaccgggctccttatcaacgaactcttggccctagatgacttgtaggggagtggaccggcgattgtcaaccatagatcaaggagctcgtccttgctgaagttttggcggattccatacttggtggggaacttgaaaacagcatccaactgcctaatgggaaccgagtattgaattccaaacaccataaatgtgatatagccaactcccttatgcagctctctctccctttcttcagcatagaaatgaagcttcaaagtggctaggaattggcagctctcagttttgtatccttcacacttgtaggagaagaaagtctccagcttggccatctccatgaggtagtcaacatccctacatatccccaaagcttgcatggtaggtctatggggatatcttgtcccctcaaaactcagctccatgagatattggtagtgctcttcaatggtaggttctttctttctcctcatggtgttccttcttctccttgtaggaactatcaggacctcttcatcaacttgcacatcttcctcagatgcttccttctctatctcaggcacttcttcttctgcaaccggctcggactcccagacccacttgcctcttgctatttcctttcgagcagccgcagaacgacccacagaggactctggggccatactcggccattgtactcggcctgtcatccgagtaaaaccacgactcgcagcttcctgattccttgactgattcttctcattaatcatctcaaaccctcttgccacggctcgagcagaagctctccttcttgattcctcgggattcatgattttgggatgatttttactgcaggtagtcaccacaaaataaccaaaggtaggtcaaagtagaagagaaattgttgtttaaaagtgaacaaagagtgtaagagaggttttggaaaggtttgtaacaagagattttggcaaagtttctgagaaatctagagaagtgagagtaaaaacttgaaatgtttggagagaagaagtaaaattcgaaatttttgagcaaagagagagtgtgagtgacttagcttgttgagtgtggttttatagacatgaagatttgatcctagccctccaaacaccttagatcctcacccttcatttggtcaaggggacatgtctcactatttgcagaagaatctttgaagggctttggggagcatgatttgattggtggggccgagcaaatttgaattcaaattcgaatttgaattgtgttgacctcgcacgtgtgaactaggccgagatactcgacgcgcgtgtcgagtacagtgttgggcctgatgggcttctttttctgactcggcttcgggccgagtgctgcatcttgttgggcctttgaacagtgaggcccatactcgaccttgggccgagtactattcaatcttgggcctttggtcaattgaagcccacactcggcctgtagccgagtagtacggtcgagtgtggcctgaaattctctagaagtcttttccctgaaacacttaaacaaaaacatcaaaaataacaagaaagcaatatatacagggataggcatgggacttcctcccaagtgagctttttttaagtctctagcttgactcctcacactcattaggctcaaggagggtgatagagtagaattgacgtctcctctccttccttagtagatacaacatcaaattcagcatgctctcgtgataagtctgtaattgagtactcaatggccctttcttggtaagctcctttttcatcatttggatagtcgtcttctctagactgttctaatgtgaattcacatccttctttactaaccataggaataacttcatcatttgggacgtccttgatgtcgagtggtgcttggttggctttcccatggagctccttgacttgatccttcagctctttcacagtgtgtgttagctctcttatagctctgtcgtgccatttagacctctccttgagttctagccaatcatttgatgccctcatgcttgactttagctgtttggttgagcactctagtcgaatatcaattgagccttcctcgttcaatgcaacatcctctctttctaacgcaatgacacctttaaagatctctgatcctggtactttgttgtgtgagtctaatgacatctcatagctcaaggtctcactggagagaaatccagcttcactacttttgatcacaggagtttgaaggtgatctttgttagtaagctcctctagcagttcattagctagctgacccatttcttcaactaagaaggtttgtccttctattgttggcttctttatagtgtccctgatttcatagttcattttgaaatcctcccccatattaagattaatttttccttgcttaacatctatgactgctccagctgaagccaagaaaggtcttcctaagatcagaggatccttagattcttcatccatctcaagcacaacaaaatcagtagggacctctactccattaatcattactgacacatcctctaacttgccaaaaggtcttcttgaactcctatcagcaagaatcaaggttaggtcacaaggcttgtagtgaacgaaacccagcttccttgccacagagagtggcattatgctgactgaggctcctagatcacaaagataattgctgaaaggcaattgcctaatggagcatggtagagtaaaagaccctggatcttccaacttttcttgaacaatcttctttcactgcactcatgacttaataccaccattccttggacttctttgatcctttctataattaggtctttcacgtacttgtgctcgtcaggtattagcgcgagacaatccactaaaggcatatcctttatctgtttttccaatagggctcaatatttcgcaaccagaactttcttaaatcgaccagagaatggaagtaggggcttgtaaggcggtggcacgaagacattgtctttggttttgacggtagttggtttttcaacaaaaggagatgatgcagaagctagtagtcgagtaggttggtcgagtataggctcttctattgctttttcagcggaatcttcattctgacaaaaatcctccccatctcgcaccacactgtcctcagtcttctggttcggactctcttttgtgggtaattctttaccgcttctaagtgtgatagcatgagcatactcctttgaatttggcattgattttccggaaggtcctgtaaatttgggtgctgaggtcgacccagtgtggccttctatgtatctgatcttcgatgtcagtgcttcaaccttgatattgatatcatagtaactgtagtcaaccttgttatgaatttctgccatccttttggataaatccattgctcttgttgcttgcccttggagaatctgctgtaacatgttcttcaagtctgaatctagagttgttgaagctggttgatgttgctgctgatagttgccctggtactgcggcttagggacatacccctgaccttggttgtatggaacaaagggtttgggttgattcagctgatgtgaagggtagacttggtcttgcgagtttacaacattggtacttatgtaaacagattgggattgttctgcttgaagttgttgaaacatttgttgtaacctccctggttttgcacatagctaacttcttggattagagactctctccatcctggacttggaacgtttcatcttcactgagaaaatggacttgcttatgttgcacaaggagtagcttgtctagcttgtcattcatagcttttatatccttgtgatgcttctcttctaaatcaaaattccctctaatggctctgtcataatcttcattatatttgccatcagattgggctaagtttctaccagctctcatccttcttcaacatattcgttcaggaaattttgattgcatgttgtatcaaggagcatcctgatcttagggagaacacctctgtagagagtacttagccgtgatgccttggagaaaccatgatgaggacattgcgtctgatatcccatgaagcgctcccatgc

SEQ ID NO: 32736 - DNA, 473 bp, Arabidopsis thaliana landsberg
acgaaagggtctacaactgtgttggactgattctgttgtattcatttatgttataaatacatataacaacattgatataaaacaaaggcgatatttaaacatatagcaaccccatattttggaaaataaacatgtagcaaagtggtccagtttatagaaaatgtaatgatattttgcttttccgcggtaattggcaccatgttcacgtgccaactgggtcacagctaaaagtttcattattcaaatctctaatatatttccctagtgaaattatttattttgtaattattcttcaattgagattttaaatttaaaccaaagtcgtgggaacaatccaaatatcactcaactcctaccccacagcttgttttctatgataatttcaatatttttaaaaaacaaaatttggcgtgaaacgattcccaatgatcttaaattattatgaaaggacataaattgtgatgaaaatctta

SEQ ID NO: 32737 - DNA, 1113 bp, Arabidopsis thaliana landsberg
ctacaacatgtcaacaacatacattggcaatatatgcacatttatgcttcaagttgctaattaaacactgaatctgaaatctgaaattatgccaatctaaaaacctttcggcggtaaattttgagtgaataagacaatgtaaaatgactaagataaaaaagtgttaggtggggtgaaaaaaaacagagaataaaaacctcgcaagcgagggaagtgatgaataacagagacaattggttatattagctgtcactcccatctttcatattccttcacaatctctctctctgtctctcgatcttgtgaaccaccacacacactaacacaatgagagagatccttcacattcaaggtggtcaatgcggtaaccagattggttccaagttctgggaagtcatctgcgacgagcacggcatcgattccaccggacgttacagtggagacactgcagatctccagcttgaacgtatcaatgtctattacaatgaagcttcaggtggaagatacgttcctcgtgctgttcttatggatcttgagcctggtactatggatagtatcagatctggtccctacggtcagattttccgtcctgataacttcgtctttggtcaatccggtgccggaaataattgggcgaaaggtcattacactgaaggtgctgaacttattgatgctgttctcgatgttgttcgtaaggaagctgagaactgtgattgccttcaaggtgagagagatacgctttcattttctgaatctcgtttgtgttttgatttgtcaggtttcctgttcctgtatacatttgaatccagatctgctattagaaactcttttgtagatgcttcgtttagcgtttgatgttctcgatttcattctctgatggatgattcatttgttgagcaggttttcaagtttgtcattctttgggaggaggaactggttctggcatgggaacacttcttatttctaagattagagaggaatatccagatcgtatgatgatgaccttttcggttttcccatctcctaaggtctctgatacagttgttgagccatacaatgctactctttccgttcacccgctcgttgagaatgctgatgaatgtatggttttaa

SEQ ID NO: 32738 - DNA, 1986 bp, Arabidopsis thaliana landsberg
agccagatccatacgtcgtattcaacaagacgatctctttagggtttattaatttactctactcatgtgaaagacgcagtttatttagctacgcaggcccatatgtatcaaaatttgtctacgtagctaataagcataaacaatagaatataaaaacatttgggaaaaaagaaaaaaaagaaaaaacctaattttaatttgaaagtttaatacctaatatttttaaattggagtaaaaatacttcatttaattatttctaatcacaaaatatctcagatataaattattggtggaatcaaacccaaccgttaacggacgttacagaatcatttaacggcgttaaattttacggaatcatttaacggtgtcaaattttaacggtgtcaaacccagctgttaacgggcaccggaaagagtgcgagtttttctttggctagttgttcatcaggttattatgactaacactgagagacagagaagacacttatgtgatacaactatttgccaaatttgcaagagtggagatgaaactattctccatattctcagggattgtccggcgatgatagggatatggaaccgtattgttccacctactcttcagagacctttttacactcaaacattactagagtggatttatggaaacgtgggaagtcaggtggttagagaggggataccgtgggggacagtgttcagtatggcaatgtgatgggcgtggaagtggagatgcgggaacgtttttggtgagaataggaagtgccgtgatcgtacccagtttgtgaaagagatatcaaaagatgtgtatcaagcacattgtcttgcaaatggaggtcagattaagagggttagagtggagcgtcagattgcttggtcaagaccggatgaaggatggttcaaacttaacacggatggagcctcaagaggtaacccgggtttagccacggctggtggggtcattagagatgcggtggggaactgggtccaaggttttgcttttaatataggggtatgtacggctcctttagcagaactttgggggttctactatgggctttattatgcatgggagaagaagattactcggttaaagttggaagttgattcggagatggttgcggggtttcttaagacgggattaggatactcatcctttgtcattcctagcacgcttgtgctatggcttcatattgagggactggatagtccgtatttcgcataagtatagggaagctaaccgtctagcggatgggttagcgaactatgcattctcgttacctccggggttccatgggcttggtgcttgcccgaagagtgttttagcggtctttggtgatgatgtcaatggggttgagacctcacggaatattttggtgtaattgtttatttttcattttaataaattgataggggaatttccctatccctcaccaaaaaaaaataaaaacataattatttcactcaaatagtaccttattcatttcgtagtttatttatttgctgtaaaaaatagtttatataattatgttctataaaagttaagaaaatataatattttgcttcatatattaattgtattataattatcaaataactgtaaccgtatttaaccgtaactgtatttaaccgtaaccgttttaaccgtatatacaacagttaaggtcaaagttaaagaaaatttgtaactgtaaccgtggccatgcctatttgctcctttcatcctcattgaggtgccaacaatttttagctagaatttgacaatatggcatagcaaaatgttgttgagaaatgatcataaatcctataatcccttatgctcaacaaatctaaaaggcaactcacccataattatcgttttcactaatgccttatgagatgctggatgactaaaagccacaaaagacagtcctttactctcccacaatcccatctatttcatatcaaataaaaaaatgttgtttgcttcatctttttagtacccactt

SEQ ID NO: 32739 - DNA, 3218 bp, Arabidopsis thaliana landsberg
ataaccaattgactgttcaaatattttacctttagcatccaaagctgcaacttcggattccgggagacgattcaatgtttttctcccagatgattcgatctctgtcctgatatactgcagagtgttgatcctgcaacagaactgaagtatttccgccgagtcattacccgtccccagctgtgattttctcctgtgagaagctaccattggcttctcctttttcttgaatacaccatgtagtctggacccgaccgtgcatcttgttaaagcaggcaaagcgggtagaaacgtattccgcgagcctaatagaaaccatataaaaacaaaaccagaaactccataagtgaaatgaacaaagcgtgagcttttttattccaaaaactaaacaatcaactgcttaccgcaggatgatttcgcctttgatacataatgctgcatacacttgtctagtcctgacgttagctcaggaagtaaaactggatgcaaaagaatcggcaacaagaaaaacgcttccaatgtctcatctaccatcctcagtacatccacagcagaaggagcgataccgagtttattcgatctcggattccatacctacaatagaaagttacaaaaccaatcaatatatgaataaaactcttaaaaggaacaaaaaccaggaaagatctttaaagttgttatatacctcttgctggagattccggtcgatccactcttttagcctatcaactcggatcttgatccacgatttcacaaggttaccaataacgacttctgcttcaaaaggaggcatctctcttataaccgattttccaccatcttcactatctactgcatcttgtacagcaatttgcaccagatccttctcaagcttatctgcagcagtgagtactctaatagcatctggcgtcaactcagtaatacccgagacgaatttcttcaactcggtaccatagcacgaatgaagcgtagctgcagccacaccagctgcaagcgggtgccaattcttcaagattggactaaatatcgccttctcattaaaagctaaatgaccaatatcctctgcaagaatcgcaagagcaggaagattattcgtgctctgccgggattttgatttcttgctatgttccaccatcctctttgtctattacaaacaaaaaacaataaagctacataaatggctgcagatacgaaatcagatcaacagaaaaagaaatataagcgaacctgttgaaaagccatacgcaacgaagacctgatataggtatcaactcgatcacgccctgaatcgacatgcttctttttccttctatattcgctagaaatatcttcacctagtaccttagctaccaaaatccccaaagaaaccgtagtttccaacgtctcaacgttatcaatgttgaaagtatcatggtaagcaagaagtctcttctcaccccaatccatcaccaaactcaaaacagaactcaagatcttggaatactcaggatcatttgtctccattgcgtcgttctcaatttcgagtatcaagttatgagcagccacaagcaagtcattctccacttgcccggttgaaacataccgattaaacaacacccagagaaagcaaacattgtgaatcatctgatttatccccaagacaggccatgttttctttataagctccaaaacttcatctacctcttcaacaatcagcaactcatcgttcacatcaaaacaagactctaaaagcatctgatagattctaagattcagtggaaacccatcagcccaatgacaagtctcagaaccaatcccattgttgttctgccgactagcaagagacattactaaactcctaagattctgcgtctcccccgtaatcttcccggtatctaacggcctctcgagactggaccggataatctgcttaagctgttgaacagatttatctgatttacttagcggcacacaaggatataatatcaaaccagcttcaagaagcttcaagttccttctctgccatgattcatactcttcttggtctggaaaatctgaagctttaagctgttgcagaagctcaagaggtagcaccatcatctccacacgcctcccaagctaaaatcaaaatcacaaaattctcttaaacctcaaattcaaacagatatttctcaatttactaaaatgaacgtacctgaccagaagcgatcctgagaagagctctacgaatccttgaatcaatctgctccgagattcgcatttgtacccgaaccaactcacccaccgtgacggatttcttgctccgatccggttgactcgacgattctcccgctcctccgtctccgtctccgattcgtttcttcatccctaacgccttcttcaccttactcgcagctgtagaagtcagagatctatgaagcgacggagacggagataacgacgccgtcgtcagaccgttgctccgatcagatttcggcgattgagggatgtaagtcagcggacgacttccagtgctacggcaagcagcgactaagatctcgtaagcagtttctcggagctccgaattggataaattaggagctggatcgccaaatggagatggtaacgattccatttccacttcgaattcaccaaataaagatcaaagtaacaagctttaaacccaaaacccaaaaacccttctcagatttaacacactaccaaaaattgattattttgagattgttgagcttgaaatcagaaaaaacgagaagagaattttgcggaaacgattagatcaaaggtaagagacaatcattgattgaatcatcaccaaatgcacaaaggagcaaacaaaaactgcagagataaagtaaaagacttgttcttggcaaaaatatatattaaaaagatgaagaatttgagtatgcccagaatttgattcttgcttgatgttaaagaatgaatgattttgaagaaagaaaaaaagtaaaaccagacggcgacaacaaaaaaatgaaagagaagacttgagacaggtgttgtctttggtaccaaatgcacatgtttttattttatttgtatatttttcaggagaagaaaatttaatcaatagtagaagagagattagggattgtaaatatgtctgggcacgaagcggatatccagaaaaattgtgatatttgttattcgattcgttttaaccgaatacttaattttgttatttgctttgattcgaaaatttttggatatccgaaatttcg

SEQ ID NO: 32740 - DNA, 2998 bp, Arabidopsis thaliana landsberg
aactctactcttgctattcgtgctagatccttatgtacgacatctgccgctcgtcaatccgattccgatactcagccatcggaatcttcgtggtcgttcacattcgagaaggaaaatgagaaacccatcttagtgaaagctccgaactctcgccggaaaaacgaatcggattcagtgacgatgccgacgtctttcatgactggttcgatcgtagggaagaggttttacaagaaagtgacgactagagaagctgatgatggaaatggatggactgtgatgcttgattatagaacccttaaaaccccttcgaaaagacctctcaagcttcgttctttggcacttgctaaggccattgctgctgagtgggagtatcaggtttgttccatttcactaatttgatctgttttacttctaaagtttattgctttaagctatttagctattgttttgtagctgatcagtactgggtttgatttaagttagctagaatccttgtaattgggtctgctcattgcttattcaacttaaagctgagagcttaccgttctttagtgtccctaatgtttgatcggtttctggactttgcaatctgagttctaatgtgatcaataggttgataattcgattagttgaagtgagatttaaagaactaggcttgcagttctctagctcattttctcttgtgatccttttgcatctacttatgtttgtgtggtagctgactcggtatcaatcaatacgatgatcttgtgttagctaacagaagggatcagaccattcacaatgccgcttatgagactagcatgtactgcacttgaaagagttcctcttacgcgttcaaagatcatagaacatttatcgagaaagatacatcaagatctcgtctttttccgagcacctgaagataatgatctaactagtgacgtccatggtataatacactttctcttcaatttcaactacctcctagattttacacttattgagttgtgtcttttgcagatattcaggtagagagtattgatcctctacttgagtggatagagtcagagtttcgggtcaaaccgaaagtgtattctagcatcttcgggggtaaacaagacgacaagctagtgaaagcagtagaagaactgctcaagaaaacgaatgatggtgaactcgcaagcattgatgcactccaagcatcagctcactctatagtaatcgccctcggtatcttctgtgggaaactccagatcgatgatgcaatcaaattgattagacttgaagaagatttacaggtttcattttgtcactcacttagccaaaatctattgctttgacattctataaaaactaatctttgtcgcatgtttcatgcaggtggacaaatggggactagtcgaaggcgggcatgacattgatgttgctgatctcaaagttcagatctcatcagctacagtgtttcttgctctatcccgtgaaaactgatcatcagtctctcattttcctcaacacattaaaaaacaagcttatctgtttgtagattagttatttactttccaagttgcaagaggtatgtgtaaacatttttctctcttattcaccaataaagcaaaactcgaaatccaaatgtttgtatcaagggaaagctgaatgagtggatgataaaaaatgcagagttttattgcttgttgtaggcaaaaaaaattcatcaagatataccacaaaataatctaattctgatagttgtgacagcaatacaagaatgaatccaaaattggatttcttgcagattattagaatcaaaaatccattaggtactgcctgattcatttgttgttcaaccagatttctgaagctgcttgatgtgtgtgatctgtttccctgggttcaatccctttggacaggcacgagcacagttcagaattgtgtggcatcgatacagtttgaactcatcgtcaatggcttcaagtctttccttagtgtactcatctcggctatcacttatccacctgcatatgtgaataaacctcttgttacaatcaataccttgagagatcaaaactttaacctaataacacagatacaatcatatagttgcaatttattcaagaaacatttgaagaagcacaaagagtcctcagcaccttcctttagaggtctctcctccatttcaattgcacaaaatcggctaaactacacaacagctaaaggaacagaaacaacctatatagtatatatctttacatgatgacacagatataatcagatagttgaacttgcggttttctatttagagatctgaagaagcacaaaaagtccttagcagcttactctagaggcctttcctccatttcagtataaagctaaactacactacagtaaaggagtaagagaacctaaacgcccatacataatgacaaagttacaatcagaccgttgaatctgagattttctacagagacagatgaagaagcacaaagagtacttcgcacctttcttcagagatacctcctccatttcagttgaacaaagtaggctaaactacactacaactaaaggagcaagacaacctaaatgaccatacataatgacatggatacaatcagaccattgaacttggggttttctacagacaggtgaagaagcacaaagatcccttagcacctttcctcagtgaacaaagagctaaacccacagtaccacactaacactaaaggagtaaaaacaaccctattgacaatgcataatgaatgtaaaacaagtaaaacaacccaagccatacataatccgtctaccaactcttactgctcaaaccaacaaaattctcaagcaaatctcaaaacagaaccttccttcagctctaaactacaactacagaaacttaagcaatctaagtgaccccatataacttactaatgtaaactaccaacaagccctacaatatcttcaaaaaactactttgattagtgaatccattatgagaaaacaagattaagtttacctgttggcatga

SEQ ID NO: 32741 - DNA, 414 bp, Arabidopsis thaliana landsberg
cttttcgcttcaccaatgtttgtaagattatagcagccttaaactccccaagtctttaaccttttcgtcggctaattgaacatcgggcccccaaactaattaaatactaaactttatctattcatattttatttgcatggtattagattgtaccacataatatcgttccttcttttctcttgttgaccgtacacatcaaatctaatctaactaaagtgcacattaatcatatcagataaatttcccaatatggcaagatatagtattaaccattaataatatatatctgaatgcgtgactgacattcttcagtgaggtcattgactctcccctagacccatacctgaaaaaactagtatacagataaacaaagaacactactgggatgatggattcgaacactattacgaattt

SEQ ID NO: 32742 - DNA, 443 bp, Arabidopsis thaliana landsberg
agaacctcaatgctaatcaggacggagaaaccaacgatacgcttaacctccctagcgaatccagcaatgtctactggtagctattcgatggctctcattagcgcagagctgggatagtccatgctaactgcattatgaacactcctaactaagctggcctgaacaactaaattcgcacacattacatgtcacacccggagctgaagaatgctccctatacaggactaaaaaacaaagggtgacaacatggagttaacccaggctactgaccctaagatcgtttgtaccgctcggggactacgagcgctgccttcctaatccgagctatagctgccatgttacatataagctaaatgacgcactggaagaagaatgattcaacgtgcaaggatcagatacttgggactgcactgaaacagatagagtactactccatacttacc

SEQ ID NO: 32743 - DNA, 785 bp, Arabidopsis thaliana landsberg
  unsure (1)..(785): unsure at all n locations
ttcagaagcttattttaagcgtgcctctgtgcttcgtcatttttgcaggtataggaatgagctaaaggtcctgtcggtttgcatttttattcttataaggcgttaagccagaagatgatttctcttctatttctctgtgttatatagatacgaagactctgagaatagttaccagaaatatctggaattcaaatcaggagattcgaatgctgagaaagaactctctcagcttcatcaagctaagagtgctttggagactgcctcgactctgtatgaatcaaaggatattacgaaagctcttgaatttgccgataaaccaggcggcgttgtgtttactgctaccacgctgtnnnnnnnnnnnnnnnnnnnnnnnnnnnngtgctactcatgcagtagtatcttgaggactctgctgatcacagcagaacgcttatgatttacattgatgatgcacttcaggcaaagcttctcaaagagaagctccttatggtgactaaagactactcaggtgcaatcactgagactggttatattctcaaggacgatgaaaataacctcgaggcgaagctcctacgtggccgcgcctactactatatggcggatcatgatatcgcccaaaggcctggtctaacttcaaccttattttcaatcagagagagtttggggcccaaaacagatatacttaagtaaactttctgtttcaggcattaccaaaaagggcttcgtcttgatccggaacacagtgaactgaagaaagcatactttggattgaaataactgctcaa

SEQ ID NO: 32744 - DNA, 890 bp, Arabidopsis thaliana landsberg
agtcaatcgcgttcatatcatctttcttttataaaaaaaattgtcagatgaaaatattattcctgcttaactatattttgcatggccattgactccttcgcgtgaacctaatttcattctccattgattgcaatatttattaaaattagaaatttcgattctaatataacccacggaatgatattcatgtgacttactttaacccataagaaagttaaaaccgaatatccctctatatagtttatgggagataagtgtacatgtagatttaggtggatagttcttgttagatgacaaaaaccgtcttgagtttgatttattcttactattatatgtggccgtggaacttttcctaatggtacttatggacttggaagttgaaaatgataacaaagtagtatacatatattctttctgtttcatattgcgttaatgtgctagccaatgacaaaacagaaaatttgatgaatttttttaataagtgtaagaaaaattgaacgacacttataataaagccaataaaatatattatcgtattaattccagaatttgtttggggtatgaatataattaataaggttttattacggaatgaagtgcactagtttcacattgatccatttagtaatggattctggtccatttaatgtggagcattattcgacggtacagtaatgtttacatagtcggttccaaacttcaagcccagaatataatctgttactcattatatagtggttgtgatttcatcgtgtttggtcgagtttgtatttatttataggtagtttagaaaatgtgaagagtttttttctaactatttttttctaaccagctagattacacttctacaactagggatcataaaaaaaaaaaaaactacccaaacgggc

SEQ ID NO: 32745 - DNA, 690 bp, Arabidopsis thaliana landsberg
acttccaaacaaatttgctctcatagctttgttacaacttacaagaacatgtaaagcatagtttctcgtatacaacaaaaatgaatacaaaaagttccacccatagtccaaattttggtattgagatcaagcttgagattcacaagagggatcatccgtggcacgaacccgagcctttggggatgtgagagcaacggttaggaccagatccagggaccgtacccttctgcaaggactcgaacacgaaccggatatcactatcgaaggtgattcttaacatcctcgtggcttctacttttgtggagtccaagaaaaccacaaaaatggcaagcataatcactccaaagattacttaattcttcataatcatcactttaactttgtttctttgtactaaaaagtatttgtagtaagttcgtttactcttttgtgtcgcattgaaagatatgaatatgagttaaatatatagagagggagggtttactttttttttgtcgtcagggagggtttacttggattcttatggattgactttttagttggaaaaaattggttctcgacatttgaactagaaaataaagattgagactgattaaacaagttaacacgtaaaccgggtttgtcttggaccgcaagatttcctgctcatacggaagggcgaagaagatcacgcgtctcacgaatttttaa

SEQ ID NO: 32746 - DNA, 690 bp, Arabidopsis thaliana landsberg
ggagccactgcataataactcataattaagtttcagatgacaattgccttctaaattcataagttatctgtcaagggtctcctagttgtgatattcaataactatagtgactttgcagcattcccatgattcgctaagcaagatttaggaaaacgttgaatatacctacctcgatttcactgtcgcatttttgaacttcatcagaatccgcagccttgtcacgagcttccttcaataacaaaatttcaaatcatgaaacgaaaattaaaagataggatgtacaagaaaatgttatgaaggaaaaggtcttttaaattagttttctgaaaatgttatgcagacacaaaaagtctgctgacctttaatttctcgagatgatatagagcaatgtggtataattcaatcttcagcttatgaaagagatcttggtaatcattaggctctatccgaattactgttttatcatgcaattctccaaaaccatttggaacagaggattgattcccaacttcattttcgacagaactatgtttatattcccacgaaccattatctcctatcctcgacatggaatctttcacaggctgtgttggaccttgaaactcccatgaatcatcgtcaaactcatcgacaacttctgtgacgtcagacattttcaaggctggagaaggcccttgaaactccctagta

SEQ ID NO: 32747 - DNA, 5298 bp, Arabidopsis thaliana landsberg
  unsure (1)..(5298): unsure at all n locations
ttctcttctcctgtcattggcagcgggtcgctccgtttattctcggaaacgttggtattccttcgcttctctctctggtcttgttgaccatgactctgcctcatcaccgttgaaatcagcatccattggataatcataattgtatgaggtcattgttcctgaaattgattcaaaactcacaactaaactttatcaaatctaaggaagaggagtgagagaagtgacttcctgaacttcggcggtagtgtgatcgagtgaaagaggtggacttgagctcagagtggttacgatcgagtaaaagagggagagaaacaaacgtggagacgttgcgggtttgtgatcgagtggaaagaggtgagaaccgggtgtcttgagcttgtgatcgagtgaacttgacgaggatggcttaagatcttctaagtgagatgttgggggcggttgagcgtcacagggttgtgaccaagtgaaagagggcgaggcgtcgggagcttgcgatcgagtgaagtaaacttccaagggtggagaggcttgcgatcgagtgaaggcatcgcttaaagacagagaagcttgcgattgagtatgagagagagagagatgttgttgtgaggtgtgattaacattggatgaggagattgggatttataggaataggaggaggtagatgcgccccttaggtaggtgaggagagctcttcccttagcaaaaacgtgatgagaggtgggtggtgaagactattgatttgttgacatttttgtcattggggacaaggtgggcttcaccggttttatcattgggaagtgatggcctgattttgcccactccatgtactcgaacacgccttggactcgaacgagtcactgcacattttcgttccttcgttcagctccgttatcaaaaaatttgaactattatttcccgggaaataaaccactcgatcgcaaagtttgaatatccgtcttgacttcgtgatcgagtgactccactattcaccctgtaaatcactattcacactttaaatcactattcaccctgtagttgatttttgtcgcttactttcctgagattaaaacaccaccaaagtgagttaaaaaatcaataagaaagttaaaattatatacaaagatagtcatgggatttcctcccaagtgagcttgtttagagtctctagcttgactcctcacacttattgggcgttgggcggctcttccagtggaacaaaaagttccttctggaattgtttggtctgccatatatttctttagtctttggccgttaaccgtgaagtcgtcaccttttccagacaacgtgatagctccatatggtcttactgcagtgacactgaaggggccagaccacctagacttgagttttccaggaaaaagcttcaagcgagaattgaacagcaagacttgatcaccaacttgaaatttttcgaacttattttcttgtcatgaaacgacttggtcctttccttgtaaattttagagctctcatatgcttctaggcggagctcatcaaggtcgttgagctgtatcaatcttttctcttcagcagtcttgatgtcgaaatttaaaagtttcactgcccacatagccttgtactccagttcaacaggtaagtgacaggatttcccataaagaagattaaacggggttgtaccaatgggggtcttgaaagctgttctgtatgcccataacgcatcgtcgagctttacagaccaatctctcctggtgatcccgacagttttctctagaattgattttatctccctattagagatttctacctggccacttgtctgtggatggtaaggagtcgctaccttgtgtttaaccccattctttctcaatagactctcgaaaactttgttgacaaagtgcgtgccnccatcactaatgactattctaggaactctaaatcttgggaagatgatgctcttgaataacttcaggacgatcctagcatcattcgtaggattggctattgcttccacccatttagacacatagtctactgcaaccaatatatacttattcccatacgaggacggaaacggacccatgaaatcaattccccatacgtcgaaaatcttaacctctaaaatcgggttctggggcatctcatttcttctactgatgtttccccttttctggcatgaatcacactttgaaacaaactcctgagcgtccttaaacattgttggccaccaaaagcctgcttgaagaatcttggacactgtcttgaacgtcgcgaagtgaccaccatatgctgagccatggcaatgcagcaggataccttccacttcatcttctgagacacatctcctgtagatcttatctttatagagagtgtaaagataaggctcatcccagtagtaatggtgtatgtctctgaaaaacttcttcctttcataacttgtcaggttgggaggctctactccgcatgccaagtaattgacgtgatcagcataccatggagattctccttcaacaacattcagttggtggaactcttttccactgtagctccttccgaagaactctacaaccatgagctgctcttctggcattgaatcgtctatcggaaggggttcttcaattctcatccttgaaagatggtcagctgcaccattttcaaagcctttcttatctactatctccatgtcaaactcttggagcactaagtatccatctcaacagtcttggtttagtatccttcttggcatacagatgcctcaaagctgcatggtctgtatacacagtgacctttgatccaaccaaatagcttctgaacttctcaaatgcgaatacaacagctagaacctccttctcagttgttgtatatcttccctaagcttcatccaacgtccggatggcgtaatatatgacatgaagcttcttatctattttctggcctaaaacagctcatacagcgtaatctaatgcatcacacatgatctcaaaagggtgatcccaattaggtgcgtggactattgcgtcacagatcagtgcttctttgatcgatctgaaagcaaccagacattcttcatcaaacgtgaactcagcctctttgcacagcagcctggtgaatggcctagccaacttagagaaatccttgatgaatctcctgtagaaccctgcatgtccgagaaaaattctgatatctttcacagtttttggtggttgcaactgtaccatgacatcaacttttgccctatcaacttctatcccattttctgatattttgtgccccaagacgattccttctctgaccatgaagtgacatttttcccagttcagcaccaggtttgtctcttcgcatctcttgagtaccctgcacagattaagcaaacaggaggagaaagaagagccatacacagaaaaatcatccatgaatacctcgaccatctcctctatcaaatcggagaaaatagaagtcatgcagcgctgaaaagtggcgggtgcattacaaagcccaaaaggcattcgtttataagcaaaagtcccatagggacacgtgaatgtagttttctcttggtcgtttgggtggatagggatttgaaaaaatccgctatagccatctagaaaacagtaataggggtgattggctaatctttctagcatttggtcaatgaaaggtaaggggaagtgatctttcctagtggctgcattaagcttcctatagtcaatacacatcctatgtcctgttatggtcctagtgggtatcagttcatcttttgaatttttaataactgtcatacctccctttttaggaacacaatgaactgcagatacccaagtgctatcagatattggatagattacacccgcatctaatagtttaagtatctccttttttactacttctttcaagtttggatttaatctcctctgaggttcaatgctagaatattattcattttctagatggattctatgagtgcacaaagtgggtgaaatccccttgatgtcatctagtgaataacctatggtttttctatacttttttaattcaattaaaagcaaatttacttgttcagtatctagttcatcattcactatcacaggataggtggaattgattccaagaaaaacataccttagccctttcggaagcggttttaggtcaaccttgggtgccttgagctcggaccaatcgtcaggtggtgattcagcgtcggagatggaatcgtgatcgagtgaagcgatcgagtgatgtagctcgccttgcgatcgagtgacgtgattgagtgggtcgttggtgcgatcgagtggtctcaactcctcaaagtcttctgagtcatcaacttccctgctcatatccatgagcttctggtatcccaaagtttccacatgtaagtctttttctctactgtctttggtcagggcgctttgtaagtggacctcctctgctagtccttctaaaagctcgtcagctaggaattctgtctcttctgtccagaaaactttaccctctattgtgggctttttcatcatgttggtgatgtcgaaagtcatccgaagatctttcccgaggttgaggtcgatctttcctttcttgacatcgatgatggctcctgctgtagttaaaactggtcttcccagaatcaatgggtctttcggctcttcgtccatatccagcaccacaaagtcggtaggtacttctattagaacctatcttgacaggtaagtcttccaacaggccatgaggtatcctgatggatttgtccgccagaattagcgaaatgttgcaagttttatatttatcaaaaccaagtttcttggctactgagagaggcatcagactgaccgaagcacctagattgcataagcatcttgtgaatgttaaagggcctagtgagcatggtagagtgaatgagcctggatctcccaatttcctaggtatgaccttctattggataattgcactggactcatgacttaatatcaccattccttggacttcttggatcctttatgtgatcaggtctttcacgtacttgtgagagtcaggtatcagcgcgaaataatctaccaagggcatagtgacatcaagatcctttatctgtttttccaaaagagcacgatatttcgcaatcagaactttttcgaaacgaccagggaatggaagcggtggtttgtagggcggtggtaggaagattccgtctttggtttttgcggctactagtttttcaacagagggagtagctggtggaacttatggttgagtgggcttttcgattgttttgtcagccccaaccccatcttgatacaaaatcctccccctctggaaaaacac

SEQ ID NO: 32748 - DNA, 1125 bp, Arabidopsis thaliana landsberg
ttttgggaaaaatctactgtcaatctctgccctgttgaggtaatgaactaaccagatgagatattctcttggctccgtaaagattttgtgtttaatctacagttttcaatggtgtaggttcgtacttctggtttgatcgaggatcaaagcgtagaagctcttgaagttgactttgccaacaagaacttaggaggtggcgctcttcgcaagggatgtgtccaggtatataaaaccctaaacctaaactccttttgatcttgtgaagtttttctgatgtgaatagtttcttgataaacacaggaagagattagattcatgatcaatccagaattgatcgttggtatgctctttttaccaaccatggaagtcactgaagccattgaagttgttggtgcagaaagattctctctttacacagggtacatggttcgatctgtacttttgagttatacaatgtgtgattctgaaaaaatgttgttaaaatggtgttctatacactctgtagatattcatcttcgtttcggttttccggtgactacattgatacaaaggaaacagatgttttcggaaggcgaaaaacgagaatagtagccatagatgctctgcgacacccaggagtctcccaatacaaacttgaatccctcctcaggtaaagttgaatcataacttcttacaattgtcaacactcttattataaaagtgttctaatcctttcttcttcagggagaccaataaggctctatgtggtttccttcacgtctgcaagaatcagagcaacgggcagtgtatagatcatgaagatggggtcggtgtcgttacagggaattggggatgtggtgcttatggtggagatcctgagctcaagtctcttcttcaatggcttgcggtttcacaggtcaaatctttatctcttctctccattaattgcttgtaattatcaaccaatggttgttgtctggctcacaacattacattcttttcaggcaagaagacctttcatgtcttactacacatttggatttgaagcactccataacctaaatcaggttttgtttttcattcactacatcaaattataaaacagagaaatgttttgtatggatttatactgcgtttgggataggt

SEQ ID NO: 32749 - DNA, 477 bp, Arabidopsis thaliana landsberg
  unsure (1)..(477): unsure at all n locations
aaaagataaggctagaaaactagtcctgagaagttttggatattttctgctcgcagtttaattcaaaatttgaaatgcctacatctctgaagtgttgaaaaaagtaattttaatttcactattttattttacatatgcatattctaaaacagaaacacttttccatcatgggatcggaggtgatatatataggttttaatctgctaatctgcgagactatttcttactataatgttaagattaccgttggttgctattttgtacgcccttaatccagttttatatgtaaatgtcctttgtaatataaaagaattatctttgttttgagtcaaagtattttttttttctttttggggtaaccacgtcaaagtatttatcgagtttttacaaatttttgaatagaaacaagatgtttngggatatttatatatatatatatatatatatatatatatatatatattataaggcataatg

SEQ ID NO: 32750 - DNA, 497 bp, Arabidopsis thaliana landsberg
ttttctgttactgactgcaggaaggttacatggtgccacgtacgaaatgcgaaccattaccaagaaacaaactcttaagccccataatattccacgagggcagattagtccaacgcccaacgccgttagttgctctgttaactttcctctggcttcccgtcggtttcgtcctctctatcatccgcgtctacacgaatattccgttaccggaacgtatcgcccgttacaactacaagcttactggcatcaagctagtcgtcaacggccaccctccgccgccgccaaaacctggccagccaggccatcttttggtctgcaaccaccgcaccgttctcgatcctgtggtcacagctgtcgcactcggccggaaaatcagctgcgtcacttacagcatcagcaagttctctgagctaatctcaccaatcaaagccgttgcgttgactcgtcaacgtgagaaagacgcagcgaacatcaagcgtcttttggaggaaggcgat

SEQ ID NO: 32751 - DNA, 595 bp, Arabidopsis thaliana landsberg
attaaaatgaagtagtgactagtgaataggaatatatgagctaaacagaattttgatgatgaaactttacctccggctataaatctgatgaagagaagacattggccaactacgatccttttcttgatcacctgattgggactcatctgagtgatcagccaaattctggctttctctgttgtcaacaataaaatttattctccgtgttgtaatctgagaaatgcacagcaggtataatcagcaatccaaatgtcatacaagaaaagcatatttggaaacataagccaatttctggttttctatgatgtctacatgccacaattcttgacttcacttggatctaaccaatctaactaatctagttgattatatccaatttttcctctcttttcatgttagctacttgtagaaaatccaaaacattcaggttggtctaacatacttgaaaggttcctttcacaacccttagtggccggaccatagatgttggaagttcaagaaggatcctttcatcaagttcactgggaacaaagccaggtgctactactgaagaatctcggaccatttcaaggtcatttgatgttagaggatcact

SEQ ID NO: 32752 - DNA, 6014 bp, Arabidopsis thaliana landsberg
aaataaatttttatatttgtatcataaaaataagagtatttgcctttttagtagtttgatgttttgtgttttctccaaaaatgtttctatgtttttatttatttttaattattgcctataaaaatcttttacacaaggtaaatgttggaagagttcatcaaatatactttgagatatttcatcaaatatatactaacaactgtaacatttattcatattagtcgaatgtcacaagaattgaccatagatatccaatatccaaatgttacaacggtttgtcaaataaaattaaagagttgcaataattagtcaattcaactaaatattgtaatggttcaattaagtttgaaacaactcatttcagtatatatttaagtaaggaatttgtttttaaaataataatttagaaagatttatagcaagagatgtaatcttcaaataaactaaaacaaatcgaatataccaactattgtaatggtttgtcaaaatgaactaaaggttacgatagtacataaaacaaaactaaaagttttgatgattcatcaaataaaccaattgtcgttacaacaattaaaatactaataaatgtaattacaatgttaaattacattgatgttactctagataagtaaatattacaatgatccataaaataaatcaaaagttgcaatgattcaactaaacacttgcaatagttaattttaatttattttagtaatgaaaataataataaaaatatgataaattacgagaaaaagatgcaaccgtagaaggcatttgttcagattactattatatagaacacatgacagttggtcattaaataagccaaagttgcaatggttcatcaaataaactaaatattgcaatggataaatgaaatagttgcaactactcatttatatataaatattttgattattacaataaaatttttataaaagttataccgagagatgtcatcgtatatattaaatatatcaaaagttgcaatggttcataaattaaaaccaaaaattgtaatgattcgtcaaataaactaaatgttgcaacggtttaatttaatggttactatttcattcttctgtattttagtaattaaaaaataaattaataattttgtaaaacattacatcgaaaggagcaactgtagatagtaaaatgttttaacggtcataaataaacttaaatttgcaataatttttcaaataaagtaaatattacagtaattcaattaaatagttgcaaccgtttatgtagagttattataaaagttgcaaaacgtagattcggattgcaactttctaaaaatacaacttgtgaattaaaaatatatgtattttaacaaaaagttgccataaaacactattgtacacatcttcaaaaatcatttattgagattgttatgattgaattttgtttttactaaactaaaaagttgcgataaaacacaaccatacacaactgcgaaaatcatttattgagatcgttaatattaatatatcttattatataaagtacagttttgaaagttactaactcacgagatcatgacacgtggttatttgaacgatcttagattttgacatgtgtttgatatttttttttactttttcctaaaagaaaataggaaactaaaaaacaaagatatttatatatacttatttatatatactaattaatatgtttatatctaaatatttaacttacaattttcttatctaaaatgtaaaactaacaataagatggagtgtatataattaaattatataaaaaactaacaataacatggagtgtatatcattaaattatatattttattatgataaaataggtatttaaattgtattgcaaaatcgaatttgtaagattgaaatttggtttaaagaaatactaaattacatactgaaaaagtatgagagttacgttactatttaaaattcaaatatcattaataagatggagtgtatagggactgcatagtccgagttactcatgtgtatagtaaagctaatcgcatagtgaatggattagcaaactatgcgttttaattactgctcggtttatatttatttgatgtttgtccaacagttgtaagtccgacattgttagaggatacaaacgggatgtcgtttccacagagtgtccgaatgtagtttttatgttataaataacaaaatagtttattatgatgaaatagatagttaaaatataagtgaaattgaatgtgtatgattaaaattttatgtaatacaaaaattactatattaaatattaaaaaaagtgtgtagattactatttactatataaagtttaaatattattgataaatatttaaataaatttatatcatacacccgcctatttaggcgggccttatctagtatactatattagttgatacaagtaaaatcttgttgtaaccatataatatatatatacattccgatcttgcatgctacgtcaatttttttccaaaccaaatagttaatgttcattctatctgattaattaaatatgtcaaacatagtttaccatttttcaaagatataataactggtcattttattgaatatataattatatatactcaatttatcatgttttatgaacaagtttagctatataaaaaaaattgtatcctcttagatgaacatactataataaattactaaataatacattacagaaattaaaaagcattaataaagctgatcaacaatacatatattacaaacgctcttgccctatatacattcatacgaacctgataacatgttccacatccttttccattgttgaacagcgaaggacctccggctgaaaccatcgcgtatagtggtggattagccaccgcggaaccgtacccacaagctcctcctacacacacacacgtatatatatatatacacacatttaagcatcatataaataaatttactattctaagaatttatgtatatatattattagaaatatgtaatattattacgtaccggtgctaccggcgccgaatggttcaccgtaccaagtaactccggcggttccccatccagctacatctatagtctcattttggcaataacaaaattttagtgagactgcgaaaagagctaggagagcgaaatatctttgtgatgatgccattgatatatctagctatatactttgttttgtataaaccaagctttctatactcttttaaaggtatttgtgaatttgattcattagatgacaaagctttttagtttttataatggtttattttttgaacactctcacgacgcgttgaacgttttaggaaattgtatattggcaatatatgtaagtgaatcttttgtatctatggaatggaaaatcaagctctccaatcatcacgtacgaaaggtaaatttgaagtgaaaagagtaaaacttaagtctaaaagataaatgcattcaagaaaggaaaacttttagtgtgttcttttatttgacgctgcgccagcggcaatagcggactgaaacgacgtgtcatgagaagtagtaggtaagtaaaacgacattaaagcttgaaaataacaatttcggatgagtcgccgatgatagccgatgaattgcaactgcatcaaatgaatcgctgaaattaagcagcgtcacgtcaatcttcatcatcgtacatcttctgcggcagttcttctctaatcaatgtattttttctcgccgcagatctgtttttcttctttgttgtcgctgacgctgcgttcattaaaagaacacgccctaaattaaatagaaaatttggttttctaatgcggtgaaggattgatatattatactcgcaaccatgtatcttgattgaaccgtgattcaatatgcttggttaaaatgtctacttgatctacaatcggacgaagtaacctacgtgcgaaattaatgctgattggttttacaaatttgtgaacttttatttggtcaatgaaaaggggcagaaaattcatcattgttttgaagctctcgcagagctggttaaatatagtaagatgttgggttaggtaaaattgtctttaaaaatgtgtacctctgaaaatgattgaaaaatgagatattttcctatatatatatatatatatatgtatgtattattgacttacagtttgatacatatatatgtattcattcacagatatataggcaatcatttacttacagtttaattgctaatatatgaatgattatttttaatcaattttttgatgtttttgtcccttgttgtatctgcatcatttgatatgttgacgattctttcaacgttattcatcaaaacggtaactaattaattttaggttttaaacttggaagttaaataggggacatttcactttttctacaaattttttcgacagttcaatggaaaacgtcaagttaattttcggctaatgagatattgaagctcaatggagttaattaacagatcataaatgaaacacgtgtaagggaatctgctactcttttgtattgtaggccttaactttttttatcgatcagtcggcgtgtcagtgtcttgtggtcttaaggaaaaatatccgaacctcatcatctccacgagttaaatagtatatatccttcttcttcgtacgaggttaagacaactaaaatcttaaaaaataaattaaatacttaaaatcaatgaatcgtttcatatatatacatatatatatatatatatataatatttatgtgcttcgattaattagtacatgtaactattttacgaacgtttagttatcgcccatttgcacataagtttacaaacaaacatagaatcatcacattatatattgtgcaaaattcaaatacaagatgataaatctttacatcttcaactacaaacacgatatatgatatcaagttatcaaccaatcaagagctgtaatctagtagttttttattttttgttaaaaagttgtaatctagtagtttcattttcatctatctttttacattatagaaaaatgaaagtatagaaaaatgaaagcttataaaaagttagtgggctacatctacattatattaaaaatatatagatatatatatatatatatatcaataactagatcggacagtgaccaaaccaatctcgttgtgtccaatccaagaaaataacaaaggaaagtcgtacgtttgatgatataaaaacctttttatgtttggacgagtttcatagaacatggtggacaaaattatagtactatatactatttagtatctccttttgaaaaacagtaagccatgtaaatgaatttgtacaattaacagctatttaaaaagcaaaaaaaaaaacagtgaatgtttatttacaaagttccgaagggaagaggtcgtggtagtggttaggggcatgccaaatacggaaagggaggcaaagaagatcgggtagtcttcataatttcatacttttcactttgtagtaatctttcctttttttttttaatttcatcaccaatgtttctttgttcaaattcatatccacacactcttttggaaatggcactgcagcttcatgtgaggtgtggggtcattgcgccttatcgtctgaaaatgttaccctcttgacattcaatgaccccattttcttattttccataatttcttttaccattttactataacaagaatgatgcaaaaggaataggcaaaaaacagcatattattttttagtgggatcctagtaggtcacttgaagtctctatgcattgattatggattgctatatttgtctctctttttatttttgaatttcgagttagtgatcttcaatgtgtgtttcaaatatagatattcaaaggttataaaccaagaaaagaaaaagtagaaaaaaaatatatatatttcaaatcttttaaacggaccattggcaacaaaatctataaacgagttaggcccaaattgttgtacaaaaggcccattaggttaaataagtatgggcctaaagccggccgatcaatctctgtgccattaccttcttctttcgcg

SEQ ID NO: 32753 - DNA, 201 bp, Arabidopsis thaliana landsberg
ccggggaaagaatgcatacgaatacaaaaaaaacagttttttgcttgtctatgatatgaagcccatcggtggtattatattacttagcgatcgagacgcagtgcgtgctctcttccgagattaactgccggcaccactcctacattttgtctatgagaaccgacaagaaaggacgttgcctggcatgaggattgctccatc

SEQ ID NO: 32754 - DNA, 589 bp, Arabidopsis thaliana landsberg
  unsure (1)..(589): unsure at all n locations
aggttatcttcctttttatgttatgtagcaaagaagatggaagtgtacaatgacgatactgaaatgaggtcaccagagacacaaccaatcaaggaaacagctttggaagtgtacaatgatactgctgaaataaggtcaccagagacacaaccaatagaggaaacagctttgnnnnnnnnnnnnnnnnnnnnnnnnnnnnnnnnnnnnnnnnnnnnnnncaagcgacgcaagaagaagtcgatggtgtgggaacatttcacaatcgaggcggtagaaccgaactgcagaagagctttttgcaaaggatgtaatcagagttttgcttacagcaacggtaacaaagtggctggtactagccatcttaagcgtcacatttttaaggggacatgtcctgcacttatccatacgcatgacaatgacaacaacccactgatgtctactccttacactcccaagactgacactccgagaaggcgttaccggtctcagaacaacgctagtccctatgttgcgtttaatcaggacaagtgtcgtcaagagatagctaagatgatcattatgcatgactaccctcttacatggttcagca

SEQ ID NO: 32755 - DNA, 1382 bp, Arabidopsis thaliana landsberg
tttgggtttctatatcattgattctgcgacacattgaacaagaccagagactacatataaatgtctttttggttggatatgtttctgtttgaatttgtatgtttatagttttgactatagactgatctttatagctcaccaagaaaaaacaataaggaagggacgaaatcaacgcgattgtggaggcaacaacgagtgcgggaacgaggaacggtgcagaaaacactagaaaacatgctgcaagaaccttctttcccacactaactcctttcctccaaagccaacccatcttcccatccactcttgtgacttcttccatccgatcacactgcttaaattagtaacatacccacaatttcaattgtatgaacaaacatgtttttagagaaaccataagccaaaaagtttccaagtttctcattagaatctgctacatttccggtaaaagtcatcttgatcacaatcgttagactaaaccagtgagaattgacacatcaaaacatttaactactaagaaactttgttatagttaaaacacacaattaaagtaacgagtatgcaaattcctcaagttccagaaaatgtagactcaaacctgattaggcgatcaaagcgaggataaccaaagatgccatcggaagagtaaaaaaacttctctaaagacgagagagacagagggacccgtgttgagatttggacagcacaacagaagatttcatgtgttctataccgggtttcttcttctctatatccacttgttttctcatttcctcgaactatgacgcatttaatgggctgttctgcaactttgagtaaatgcagattgaagataaaagaacctattatttctctaaataaaataagtcataagtacatatcactaactataatatagggaactacttaataaataaatctctcacggtcttatctatcacaaaccctaaaattttgacattaatctaccgatgagagtcatgagaccgctcacagttttgggagatgaatatatatattttttaaattccggagatgatatttaaagaacaaacaaacaatatatatatttgttgggaaatgactagtaattatgatgtaaggtcttgttttccgtgattccgtttttaaaagttacacaagttgactgggccgttattttccattgcgggaagataatgcaattgtaatactttatcctatggttttatcattagttttggaatgtatatatactacacatttaacatttgctttggatacttggatatatttgagttcttagaaacgaaaattgaatatatatcttcaagtgagaatctgttgtctataaaacaaacatagaatagcatgttatttaaatgcataagatgattatctattaa

SEQ ID NO: 32756 - DNA, 908 bp, Arabidopsis thaliana landsberg
  unsure (1)..(908): unsure at all n locations
tccatatatatacgccttagcgtgaaccccgatcgatcgagagactacaagtaaatgtgatacccaattttttgcacgtataatataagaattatttccagattaaaccttactatttacagatgagtctagaattctctatctatttttaaaaaaatgattacgaccacaactaatatacaaacaagattcatttctttctttattttatttttatttttcaattacgacgtaaaggatgatccatgaactatattgtttgtattagagaatccaatcaaaccaatctctttggattaatatcaaattattttatccccgtatcttttacagtttcaatttagatgacgatttaagaagctgcaggcgtagcaattattttaataattacaaataaaattgagtgaaaactgtcaacagtctacttatgtgtaaaactaaataaatgaataaatcctcgaaatttaaaaataatgaagaagtcagcatcttcataatggattattataaatatacacatagatggatgttcagacttcattgagatctaagatcacttgaacacttataaaaaatattttgctcttctttctatatatttatataaaaagtcaaaatatcaagaagaggaagaagaagaagaaactcattttctccgcagagaaaatacaatccatggcttctacttttaggctctctattagcttcctcactctcatcctcttctctctggtatgtttatctctccccatatatattgttaacaattttacacttatatgcatatgattctttatgcatatgttcctctatatgtgtgaggctcaaattgaaagccttattctntaaacatatgtacctctatatatgtggtatacatatgtatatgattaaacgtatttaaataa

SEQ ID NO: 32757 - DNA, 620 bp, Arabidopsis thaliana landsberg
cgaaatcaggtggtgagaagaaaagcaagactgatacaggcactaactgaaaggttttaaggcttctgttgtggagcctgcgaagaagattggagaaggtagaccgaagagtctcttggtgtaaacatatcatgtttgtttttttgcatttttggtttgtgatgtctcttgcacatgtttcagatagtgtctattgttggttgctaaatattatttgtgtcttactacagctgatagggtggtcaagggtttggaagataacgtattggatggggatgctcttgccagatttggtgctcgtgaatctgagaaattccgctttttgggagtgtaagtctttcacaaaaaaaattccatcttagaggctatttgctacggtggttaggagaagagaatgtaaatttatgtcttaataaatattgacttctctactggcaggaacatctctgattttcttttaacttcatgatgtattagtaggctgcatgatccctatatgggctaagcctgatcagctaatcatgtttggtgaacatataccgaagggatgctaaaaggagacgccctactgatgacaattatgatccgaggacactctagctacctcctgattatgtgaa

SEQ ID NO: 32758 - DNA, 699 bp, Arabidopsis thaliana landsberg
cggcaggcacgaaagtactgattcgtccataatctgaaacgcaaccaacatcctcgccaacgaagatactaatttattggaagagagaatagagattggataccagctgattcaaacgactacggcttcctatctttgttgacggctccgcaaagaggcctgcttttaatactgattatataacgttagggttgatatgacataacagaaataattatgggttcaaaggtataaacacataaccaataataataggtttattcatctttgggctttctctataaatgggtcgtcataaaaagggtaatacttttaaggcccatttaatatactcatgaacgaacgccgtgcacaagatatggtgctagttggcatctacctacctttttggtattcatcctcaatatgcaatttatccatcaacaatgaacacttgtaattaatttaaatgaaatctcttagattgtttggctaatataaattttcataaaatgttttatataataaatacccgaaaaatggtagtatttaatttccctccttgttataaaatagccaggtgattcagtaattcacctgaaccaaacggtgtacaacacatatatatattgtatactaaaggtaattgcgtatcactttgaattttatacgtacacttaattagccataatggggattctaaacaaagcccataagttt

SEQ ID NO: 32759 - DNA, 1344 bp, Arabidopsis thaliana landsberg
tggattttatagtcaaaatgtttttgaggactatgtgtggacatatgttatgcttacaccatgtccatctgtttacccatatgatcacccaaaacactattttgcattattttgtattgtagactatactgctagtagtgtggagtttgaatatagggattgggatgtgtaagctattggagatagtcttaggcctccgtaaactctcctgactctctaaggctatttgtgtattattatttttttgcggaaaatcatcataatgcaattaaattcataaaaatgttctagttttgataaaaaattgcaaataagttactataactaataaacattttatacgaagataatcaagtccccatatgacaatgctaaagtagattattgattatgttgaaacttgatacatacagtgatttcacgtgtaactcacgcaataagtgggactggaatggaagaaacaccaacatcttgtggattttataatccaaatgttttttgagaactatatgtggatatatgttgtgtccccgtaaaaattcatgatttttaggctatttggtgtattattaatttcttgttgtacaaaatcattaaaatacaattaaattcataaaaatattgtagtgtcgaccgaaaattgcgaataagttaccaatattaataaatagttaataaaaaaataattctaagttcccacatggagataatcttaagtccccacatgaaaatgttaaagtctattattttgatataaatttggacattatttcaatgattttggcctaaagatatgtttaaacaaaaaaataatgtactacaaagttatagatctcttcaagctctacaattttcatataaactttatcttcatccgattttatatgtaaaagttatgaatttataactatattatgcaggaaaaagaaaaaccgggtacccgtatccgacccgaatatccgggtagtcctcgcttcatatccgacccgaatccgaagctacagtatgcgggtatttcccgtatccgtcccgaatataaaacaacccgaatccgtatccgaaaaaatgagtatttgcactatccgtatccggtacccgacgggtatacccgacccgttttcacccctaggaggaaggagttaaggcacactagatcccacctccctccaatcttttgtggttgagtttcatgtaggtctcggtgtggccaattttcggccaatagaatcacgccatatcacttagatctttgaaacgctattattcagtatattttgtgtcgtaaatctgtttagtaccgttcaaatatgttagcttcatactaatgtacctacgcgttataaa

SEQ ID NO: 32760 - DNA, 4271 bp, Arabidopsis thaliana landsberg
actgtgttaattgtggatgatgagaagacgggtggtttgatcagatctgaatatgagaaacagattgattgtaggcttgaaggagatgagaaacagaatgtaggggaggagaaaattgcaggaataactcaacatgtgaataaaaatgttgtaatcactaacacagctacaacacaagatttctgggtagcagtggtgaaaaacgaagttgaaacaaaagtagagttggtagtagaggaaatagatggtataccaacagcgacaataccaaacagtgtttttgatgaggcaaagccgttgtggaaagatttcctagttggaaagtttcttgctaaggctccttttgtgggagggattcatgctttagtgaataagatttggacgttgggggacaagtctatgcgaatagatgtgtccgtggtggaccacacaacagtgagatttagaataaaggatgagcgcattcgctctcgggtgctacgaagaggcatgtggaatttatgtggggttgtagtggtgttatctaagtgaagtcctattgtggaagctgatcaagaagcaatcaaaaatatacctctttgggtcatagttaagaatgttccactaaaatatttctcttggaaggttctaagtgctatcactagtccactaggcattccaaggaaactacacccatatacagaagcgtgcaaatcttttgaagaggcaaaagtgtttgtagaagtggatttgacaaagaaattacctaaatatttctctttcaaatctgagaagggaggtgatactaccgtggagtttgtgtatccgtggctacctccacgatgttgtaaatgtgaaaatggggtcacttggatgtgaactgtttgtcacaggagaaagtaagagctgttgggatctcatgtgtggataaaggggcatcaatcaaaacagagagtacaagggaggagagggttttggttgcagaggctgagaccattgagcctacaagcgtacaagatgtggaagaagataaggcacttaaacaacaggaaaaccaaagtgataaaacgaaatcaatggatgtaagagacaaggactggaatactcctactaagataataagaagtccggggaggaacgaggagctcagttatggagagatctctattatgtctaattctttttcatgtctaagtgaaaaaggaggaaaaggttaggacattgaaacagagaaccatgaatcgaataaaaacgctggaatagaggaacaagataaaaaagaaggggttaatcaagacaatgaggaagagagtacgggaaaagattgtcaagatagaagtgtggtactgagacaaactttacctcgcgcatcaaaagacagtcacaaagttctaggcaacaatgcaaaacaaagtactaggagagcaactcaatgcaatcctaacacacgtcccatccaacaccatcattaatgtctggtttcttttggaataatcggggtttcaacaacaaaagtaaacatggagtaacgcggaagtggttgaaagaagaaaattttgattttggttgcttactggaaacgaaagtgaaagaaggaagagcgaatcagatagtaaaatcagtttttaaagatcactctctttacatctcaacgccacacatatcaccaggaatgcgggattttcaggaggtggtgagaaaatgtgagcttactgacttgagttaccaaggcaagaggttcacttggtgtaataaaagacaagatggaataatctgcaagaaacttgacagagttctggtgaatgagacatggactcaaaaatatatcaattcttatgcagtctttgagcctggaggatgtttagaccacatgagatgtagattctatctagcagaggagattcataagactaagcgtccttttaagtttatgaatgttgtgatgacgcattcaggataccaggcagaatttgaacagagttggaaaagatcaccaccactttttcactcgacttcagcaatgcacatattatccaagaaactaaaagcgctaaaaccgcagctgagagcgataggtaaacagttaataggagctattattgttcgaaccaaagaagcttttaaaaaactctgtgagctacaacgacaatggctttcccgacatcgcaagctatcattgatgagactgctgcttatgacgaatggaggagattattggatattgaggagagattcttacaacaaaaggccaaactccattggatgaacactggagaccaaaataacaaggctttctatgcttctgccaagctaagggaaataagaaataacataagagaaattcagtgtgaggatggtacaatagctggaactcaagaaagcattaaggctgaagcagagagatactttaaagactttctctccatgaggcctacagattacgttcaatggtcaaaggaggagctggagaatatcttggattttaagtgtgatgaacatgacaaacaaatgttaacaagcgaagttttggaggaggaaataaggaaggtgctctttgcaatgcctgcaaacaaatcccctggccccgatggtttcacgtgtgaattttttaaagattcatggtctataattcacaaagatgtggtggtagcagttcagtctcttttcaagacaggttttctccctaaaggagttaactcaaccatattagctttgataccaaagaagaaggaagcaatggttatgaaagattataggcccatctcttgctgcaatgttcaatacaagttgatatcaaagattctcgcaaaccagcttaagggtattctccctaagttcatctctccaaaccaatcagcttttattaaagatagattgttaatggaaaatctcttactcgcaacagaggtcatcaaagactaccataaggactctgtttctcctcgctgtgcaatgaaaatagacatatccaaggcgttcgattcagttcagtgggtttttttactcaacacactgagagcccttgatattccggagcagtatgttaattggattcaaaaatgtgtcacaacagcctctttctcggtgcaagtaaacggagaacttgcaggatattttaacagcgatcgcgggcttcgcaaggctgctctctgagcccttatctttttgtcatctgcatgaatgtgctctctcgcaagttggacaaggctgcagccgacgaaaaaatggattttcatcctaactgcaaacagatgaaattaacacatctatgttttgttgatgacttgatggtttttgtcgcatgaaataagaaattaatagaaggagcactagaggtctttgatgattttgcggttcacacaggactcaaaatcagccttgaaaagtccacactttttatggctggggtacatatgagagctaaagaagagattctaacccagtttccttttgaacaggggacacttccggtgagatatttaggattacctctaatgacaaagcagatgacttcctcggattatctgccccttttggagaagattcgatcgcaaataaaatcatggacagctagaactctctcttttgcgggaaggcttcagctaattggttccgtgatattcagtttaacaaatttcttgattgcagcgtttaggctaccaaaaacttgcataaaggaaatccacaagatgtgttcagcttttctttggtttggacctactttgaatccgaaaaaagcaaaggttgcatggtcagaagtgtgtacacccaaaagtgaaggaggtctagggctgcgatcactcgaagaagcgaacaaagtgtgtgtgctcaagcttatatggagacccctgtttgcgaacgattccttatgagtagactgggttaatagacaccttatctggggaggttcattctgggcggtaaagaataatacatcaagcgggtcttggatttggagaaagatgctaaaatatcgacaactagctaaggagtttcatagagtggaagtgcataacggtgagagcacatctttttggtttgactcatggtgttcgatgggacgtcttcatgagaagctaggagataggggtatcattgacatggagatttcgctagagagcaagctttgtgaagtgatgaacagagacaggagaaggaaccatcatcgagacttactgaaccaaattgaggaagagcttcgatgccaaggacaacacagcttggaaacagagccggatgcaacgttatggaaagggaaaaatgactactaccggaaacaatacagttctcga

SEQ ID NO: 32761 - DNA, 3191 bp, Arabidopsis thaliana landsberg
tgcaaaaatctcatgtgaatacgggtgagagtgagagatcaaaacagtcaagggatcaacagttaaggagatacaacatgccgagacatgcttttcatttattcagagctttattccttgtcttagaagaaaacatcttgaaataatatcacagtgagtgacaaattcaagaggcatagatttaaaaaatcaactcacaatgacaattcacgcaagtgttttgtagctatgtatgaatacttcgcaaatagggtttgttggatcgggttaaagaagaaatgttttgatataagcaatttatttggtaacatgtatcaaaactatatattgagactaaaaaaaaaaaatcaaagaatcaaatgtacgtaaattaataataatttggattaaaaccaaaagtgatgatgcaatacgaacacaagaacaacgctttcaaaaagcaaacacatacttattcattttttttgttttgttcacaatgtataatattggagtatcaactcctacaaacttggaagcacaaagcaatagaaaggaaacatggtttttgtcctcaaagagaggaacacaaatccacaatgttatttgcaaagctttattaaaaggaaaaaggagatactaagtcacatttgacttagtcttgatggtactttgggttgggccgtcttatgcattagtcgatgtttcttcatttgcttcttccaccttcgccgatgcttcttcattttcatcttcttcctttttagcagctgcagtagtcgctccttcagctgtttcaaaacctataacactgatacctccttcctcacgatgacgtgcaataacagacttataatatttcagttctccatcggaagtatatatccctaaatcattagttttgcaccaaatcttcatttcatcgtaaaatacatctagattaatagtgccgtactgcttccatataagaacacgataaccttgaagacctttattcttaccacgattatcattaagctcgagattgtaagggaagtaattcagcacatacgcttgatcttcatctttagagtctctataaatcttaacagcaccaacattaagatctctattaattgccctagactctccatccttggcatcatacgtcttgccatcacagaagcgtacggttacacacttaccacaaccataattagaaagctgatgcaacaatggagccatatatataagattgaaatatttcaaaggttttgtttgatgtgagaaataatgaaggaagccttcttcttaaatagatttctcacttttgggatatcgcctttgtccaaaagactttagacacttagcgtgtaagatgcaattacatcctacggttaatattcaaattattaagagaataattagtcatagaactatccaacagaatgatgtttagtcataaaataatacttcctccacaaagtctatgttaatattattttcataaaataatacttcctccacaaagtctatgttaatattattttctccacaaagtctatgttaataatagttccttccaaaagtctatgtcaataatacttcatccggaagtctaacaaccctaacgcttctctctcgaaaaggccaaactaattttttcttatatacttatttgttaacgttttgagttttccacaaatactaaaaaattaatattgtttgattattttaacattattttatattatatttatgaattattaaccaaaaaagattctagtaaatttaattagtctatgcattctatattatattttgccgaaaataattttaacatctatttggtaaaatttaatcatctctagaaagcttatttatttggtaattataacaactcaattctaatttcttttatctgtttttttctatggtattactatctcaagatcctcttttttaaccatttaaactaatttatatgataccgtaaattagttatattcacaaaaaaaaaaagttatcatacccaatcatatacacatgatcaaattttacttcgtttagctttttaaacaacaatttattttatatggcaggagagaaacaaacaaaaacatgggtctaatccatgttcgagtaatcctaaaattgtcatttacaatttatttttcatctatttctagaaacaactccgtacttgtgtgattcgtcaacgaatagatttttctcagtatcaagatttctccaagttaagaaagtttctccgaaaatggtttctagcatgaagaactcgatgactactgttcattttggttcttttacaatattcttaatcactcgtacataatcatctttattttagttaataaatttaacgtttcatataaagaaagatcgagaatttgctagactcaaagatttgtgtattccaataaccatactttacaatattgtgtgcttcctcattttttattctttttcttaatatttttaaattttgttgctcgtcatattaagttgggataaaatgatttcaagttgtttgcttttgccgcaaatgatttaaatgatgtgaaaattaaaagctttcagcttaaaatggatcatataatttttgaagaagataatatatcacattattaaaaaggtgaaaaaatttctttacttaggtagaaaattgacgaaatttaacaagacgtcgacaaatatctagtaacatacaataatatgaacgaattgaaaataggtgtattaaaaacgaaaaaaaaaagaaaaaaaaaatgaggtggattatttgttttgttttgattggcttaatttttattgatgtgctggaaaaaaatattttaatattcttttttttttccacaattattatttatattaagttatcgggaaaagattctgcgctaaagaaagccattcaagaaccgatatgcttacatggaaaaatgctattttgaacccgagcttttttagctaaacaatctgctcgagtattagaactacgaggaagaaatataatatggaaagaatgatttttcgaatccttctttctatattacattttaatattattattttttgaaattgtgggcttttgcggctaatgatttaaatgacgtaacaattaaaaaaatttagcctaaaaaaaggatcttttgttgacaaaaaaaaataaaaatggatcatataatttttgaagaaaataatgtatcacagaataa

SEQ ID NO: 32762 - DNA, 564 bp, Arabidopsis thaliana landsberg
taaaacatatctgttattgccaaagtcaataaaaacacatctggaatgtttgataggttttttttcaattagtcaaggatcattgaattggtttacctggttcatggaattacgggcttcaacagggaagagcttgcaacgatcagaggccatgaaagctcccacaagactcatgaaaagaacttgaataaccggcatagaagccacctccaacaacgaccagaatcccatctttttatgtggttctttagactaatgatcaagggattatatattatggctcaagctctaatctcttcttcttcttctttcttctttcttctgcagttatctgcagagaattaataagcctgagaagagagaaaatatacgaggtaagcaaatatttacgttgagtatatacacatttatatataaacttacagaagaagcagaatgattaaacaataatttgtggaattgagacatgccagagttttgagtattttgagacccgtatcattggagtagtagcacgaacctgtgttttcacgttgtaactaaataatacttttctttccatat

SEQ ID NO: 32763 - DNA, 184 bp, Arabidopsis thaliana landsberg
  unsure (1)..(184): unsure at all n locations
aggcggcaacgacagggacaaggaccggaaccgggggcccacccacaccaagaaacggggaaaaggacccaaacaagccacagaaagacaccaccgagacaaagacgggcagacaagaacgaagaggaggaaggaaggncagacggccagaaacaggaaggaacgaacacggacggaagaagga

SEQ ID NO: 32764 - DNA, 546 bp, Arabidopsis thaliana landsberg
aaatcaaaccaatgaatagtaccggtgagatcgccttttttttgagagagaggtaagtttaaggttggtgaaaaccaaaaaaagagagaagaggaacaagttcaaaggctattcacgttattaagcaagagaaggttttaagacattggcgcgtggagttaaagccatcgttgtatccaatcagtaagggccatgtaggatgtggtgaagattgtctacggagccgtttttggagtatttttacttttatggaaactacgtttaattttgaccaacaatatcatcttaataaggaagtaaatccaaacaaaatatcttcacattaaatgtccttcaaataaattttattttatttctcttttctgtcaactctagataacaacaactagatttttaggcattccaatggattgattatagacgtgtttcatttggaaatttactaatgaaaacaaatcggagagaattgacaggtaaaccacaaaacacagtaaatcacactgaaatgaattatgagctttagtttagacttagaccatgcattta

SEQ ID NO: 32765 - DNA, 524 bp, Arabidopsis thaliana landsberg
ttgaatgatcagaactaacgttctgctcttggtccagatggttagtcgaattaagaatcctcgattcatcaccggtttaacatacactgatccgaccggtgaaattaaacatgtgttcttaaggaagttttttaagtgttcaatgtctgaattaaattaggataatcattggtctaattggatctgtaaagcaatacagtaatgatcatattttgtgctatagtttgtattaatcttcagtcaaaaaaatctttagaaatatttgaattaattagtgtgctttcttgtcacgaataaagttcgtccgcaccgcatctatgtaaacaatcattcgctcatgcgatgagctccttattgagacgttaatttaactaccggctaatacaaaaccataaagtaaactttcatgacccaataaaatgtttttgttttggttcatttcagtcatagatttttgtgtaagctatgcacttattatcaatagtaaattaaaagactgttctgctcatatgtttatgaatgtg

SEQ ID NO: 32766 - DNA, 1439 bp, Arabidopsis thaliana landsberg
  unsure (1)..(1439): unsure at all n locations
tgtcatgtgtattattgaagacaacaacgaaacacatggcaattgtttgcgaaacaaggtatcacatgagaacaaataccagtcgccaaggtaaattgggtccatcactgttgctgattaatcaatcttgtgtttgtatatcactttatatatatggtaatacgataaaataaatcatagttattgttgctttctgttatacgattttaactcaaattattttgttgatatccaaaaattacctcaactctttagatatatgataatactaatgtacataatccatatatttattgtagtttccaaatatatccctaatcataaaaaaaatcttacaaatgactatggatttaagtatttccaaacaaaacaaacaggggaaaattgaataaagaaaaagaaagggataaatgtgtaaatagtcgacaatattgaggctatatttaatattaatttcttcgattcttctctctctttctctctctgtgagaagaagcaaaatcacgaacttccattaatcaccgactcgcagaacctttctctcattaaatcttgtggaaactcggaaattgaatctgcgtgagtttcaatcgcttgatcgatccatcaacccctagagatggtgaggaaaaaggtaccggaatggcttaatagcaccatgtggtctactcctcctccgccatcttcttacgacgatggtctcttccgtcattcccccgtcactaagatgaaggaagaggcagaatnnnnnnnnnnnnnnnnnnnnnttaattctgctcctccgccttcttccaacacttcggttccatcgccgtcgcatagaccgaggaacggtaacagtatctctggcggtagtggcgaatatggacattccgttggtccttccgccgaagacttttcccgccaggctcatgtctcagcggaggtcaatgcaaccttccttttttgcttcatcaatgcaaatattcaaattcttccaccagcgttttgtggtctaattgctcagtttctgaatgttattgtttacttcttctttattggttttttctatagttgtcgaagaaggtgatcaatatgaaggaattgaggagtctagctttacaaagtttgccggattctcccgggatccgttctactgtctggaaggtatgcatttcaagaatcatgattttggtttgttttcactttgaagaatctatatcgtagtaatgcaacaatgcatagaactgtgtctgagagtctgataaaccttacttggtcattgaaatatgattctctttgcagcttttgcttggttacttgccacctgaacgttcactctggtcaactgagttgaaacaaaagagatcccaatacaagcactacaaggatgagcttctgacgagtcctgtaagtgatcctggtcttttgtttcttgccttggagttattgttagtctg

SEQ ID NO: 32767 - DNA, 3558 bp, Arabidopsis thaliana landsberg
  unsure (1)..(3558): unsure at all n locations
gtgtgatttcgtcagggtataggtagtaatcttgttagaaaaaattgaatgacaagaagcttcctagaaagcatctgtatctattactcgctttgtgcacaatgtagatcatggttttgtgtttatgactttgttggaaccactagttttttggagtttctctattattatgtcactgcaactaccaatatatcttcagttttacgcttttggatcagtgatcgatgaaattcattcattttgtggggcaactcatgtggcttgcttaagctctatgcatatcaacatgtgagagttgctacaaatcgaaatatatacaaattgatgaagaagatgaaaacacagaacagcaaacaacaaacaacaaacaacaataacaaataaattgacaatcaagaagctacaagaaccgtatcgaagctttagttttcctgttcaaaaagggctgaccctgccagccagtttcagcaagaactctggaacaagccgtttcctcggtggcgcaacagcatcgtttctcaatgcgtcactgtcatcggcgtgtatcatagagactatatgatcaaatagctcatctttaccgcctctcagaggatccttgcaatgcagtttgtaatgtgtttagacaacattgagctatgtatgtagaaaatgatctttaatggttgtttgcttacctgaagaaataggtcggtatgagttttacccttgtacataactagctcagctttcacttcagcagcttgaagagcatctgtaaaagttttgctgcaaaagaaagaacacttttctgttttaggaagaggactaaaccaaataacaaactgttgaatgcttgatttcatatatgtagtaagggtgagctaaccttgcttcaggtggaattgaataatctgcggatccatgaaagagtataatatgaggtaagagggctgccgcttttcttacattcaggtctttcaatcttacttcaggggagaattgtttaaaggactcttctccttccattatgctgcaaattagtgaaaaaggagagtcataagtcacggtttacatggtattgaaattacaattgatttaggttcggtttatggtattgaaattaaaaatgattttggttcggtttacattggtttgagaagaagaaaaaacaaaaaagtcacgcgatgtgtttttcagagaggaatgcgtcgattcaaaaagtcatgatttggaaaggggtacacccacagaagtgctctcactcgctcaacgcgcacaaagtgcgagtgggtatgaaatacagccttctgattggcttagaaactaaaaaaaaaatgaaatagtatacatgttgctagctcctcttattatttattttttgcgtattctctcaatctgatgaaagttgttgcttttttagatacaattgattctatccaaggttttgggttatttggaagatgccaagttagattgatcagatggtttaccttaggaaaattgaacgatacaagcctcggttgtggaagtgttcaaccagattaaagagattgtacctgttcaagtttacaaatggtgagtagattctgaattactggataagaaaccctttgaaaaacgttttaagcttcatagtgtcaccaagtttagtaaattaccctccagataaaccaaagtaagctttaatctgagatacactccatgagatgctctcccctcttgattctttaatagcttgttcaaagagagcacaagaagagatatgtgcaccagccgattgccccatcagatagattctacacacgcaagaagacactggttcaatcacaagatcccatggaagatagaaacaaaaaccaagttgatgagctccaacctgttaggatcacctccaaatgcagagatgttattgcagacaaatgagattccttgagctgcatcacttaccatatcactaattgtcccctgaggaaagtttctgaaccaaagacaggggattgcttggtcaatgcattggatacaggcatatgattaataaagataaattcccaaatagctccaagctgatatagatttgatagaatccaggacaagtaacactggtaagaaattgagtactttgcttacctgtaatctagacatgccacaattatgtccctttctgctagctgtagtcccaagagagaaccccaagctttgtaactaaaaggataggcaagtatgaaactattgagtgtgcgacttttatcttgtgaaagaagatgtatccacaaaggacgctagtgtattattatcaaagttaaacacgatacgaggcccacgaattgcttacccgataatccaagctccaccagtaacgaaaactacaaccggcttcaggccatcactcgttggcggtatgtacaaatccagcctgccagaataatcgaataaaatgtactaaataccaatcaatcattgaagaaggcaagattgcagagactgagatacctattccttggatgacctccataaactatactcctcctgacttgagatgagaaaaaataaagatatgcaactacacaaggaaatagcaaaagctctgttagtgtacaaaaaacagcttgttaataagacagagcaaagaagatggggtaaccttgaaggaaaccaggcataaggagcattgcataacaagcaagagcaagtaatcttgtgatccaccggtaacctaccctgaacaaaaacttacaacaataaaacaaaactttccttacagagattccgacaaaaaaattgaaacatcatcacatgtcctaagattattaattaccggaaaactcatttagttatcataaaactgtggtaagaataattcatcgagaagactaattgtgagctctagaaacaggacatgagatacgtctcggctaaaaacaaataaacgatgccatgagaggaatgaaatttacccgagatatccaagaaggttgaagctaagtcgagtaatgagatacgtctcggcagctgcatggcctatgtcgcgaccgaacgactgctgccggcaaattcgaggcgaaccgtcctcagaagaattcccggagactcttctacgaacatgttccggtgaagataatctgttggagccgtgaagcagccccatttcctcggaattcgctgaccaagcctctctgttttnnnnnnnnnnnnnnnnnnnnnnnnnagacaactgcatctccgccgtgaaagtagtcggagaaagattggatctcgaattttgtatcctcctcctcctattcgtgtcttgtgcttttataattgatcggttcttgttttttttgtttcaattttcaaatatttgaaaagctttcactcatgtgcggctctctctctttttcacagaggaatgtcaaaacgacgtcgtattccggtcctcttctctaccaatttttttccttcctaatgagtattattaatgtgaataagttacagtattctgatttggtttctttaatctagtattgattacgtactttgaagagttctttttcttattttgtgtattaaacagcagtttaaagggtcccgctccat

SEQ ID NO: 32768 - DNA, 451 bp, Arabidopsis thaliana landsberg
tgcaggctttgtattacatggctccccttagggaagttgtaattctttcttggaggggaaacctgttggggtgcatttatgtttctcgtgattaactcttctttttttattgcactctggaattatttgcatttcgttttttgcaggtcacacgggttgatgcaacaattcccttttgtatataaaatgaatgcagctgttgctcttcttgttttctccctgtggggtctagtgctttttgctcgccaaggaataatcattactactcaatgtaggtgcagccatttcaagtttatatgcactttttttttgtttactgctttcatttctgtgttgtctcagttcaaatcaatgtggtatcttttctatatgagattctgaatctttacctttgaatcattgtagaagaatgataacggttggaagaagagtggtacgtaccatgttatcg

SEQ ID NO: 32769 - DNA, 498 bp, Arabidopsis thaliana landsberg
ttaagctcatcataggaatagaggctatgatcattaatcgaaggtatcatcgcaaccatgagccgtttgagtgacatagccgcagattcatcagatcaaggcataaaaaaaagcgcagccgaagcataaatattaaaatgtcataaagaaacggcaaaagagccgataactatcaattgaagagagctgataacgaagccgacgatcgctgttgtgtaaaaagaacgatgccggatgagagctagccaagcacaactttgggtggatatcagatagtagccggatttgacataacccgggcgacaaagttgaaatacattgtcgagatcttaacggaaagaaaagagtttctctttctaaaaaatgtgagagagataagagagagactctcactttcctataaggtgaatgtaataaaatggggaattagcaaacctagcaaagaagactatatatttaagaggcctatatctaagcaagtaacaatacagaaaggtg

SEQ ID NO: 32770 - DNA, 797 bp, Arabidopsis thaliana landsberg
ttatacatgtttttttttttttttttttgacatcttattataaacttctgatcttatttttactttttgttatatgccagattatccagaaatttttaaaatgttatttagattacccggttggaaagttattttggagaatgatctgatccctttttttgttgtcaagaggtaagtcaataacacacaagtttctctttttcagctcgttattattttttggtaaaatactaaaattacttgtcatagatcttcttaagcatatttgtagaaacctctgagacgaaaatacaatttagaagaaagcaagaaacttaaaaaaaaaaaagactgtaagctacaagaaatgaggagattgcaaagacttgagcttctaaattatagggtattaagaaccaccggaaacacttccattgaaaatctcaattgtatcaccgtgatcaacacggtgccaccggaaagaccggtcatcatccattacattctgtttgtatataaagaaatagccatcttgaggcagatttaactgaaacctctgttgaatcttagccagctctttcctcagctctccaacgttatcacccgcgttcacctccaccggaatcttcctggtccagcacttaggcaacaccattactctcagcttcttcaaaggattgttgttgttgatccctgccattagcattgtggatgattattaattatctgttctattgagtttgatggtggagattgctcagttttgaacacttgattgttgcggttttggtcgttgtttccaggagaagatataagag

SEQ ID NO: 32771 - DNA, 1296 bp, Arabidopsis thaliana landsberg
  unsure (1)..(1296): unsure at all n locations
agtgtgccgaatggtgaagagcaagaagagtactgcaacagaaagagagacaagttaataagataattgagtgttgaactaatatgataaagttgcaaagatgactgtgaacttgtactcacctacgtatctctgcaagatcattagttagctcgtaacttaaggagtagtaaaaatacaatttggaagcaatgacatcaacggttctcctgtttacgcttttgaggcgagcaatgctagcggtagaacaaactttggcctgaaagcaaagaaagtaaaacaataaagaccacagcaagatttataaataaagtatgtcagttagagagatagagaagaagtaaacctcgttgtactttttctgatcaatgagaaaaagaagaacaatgaagtagnnnnnnnnnnnnnnnnnnnnnnntagatgcttaggaggagcttgggaattcgatgatgctgtatcaacttccatgtcatgttcatcactctgtaccaatattataaagtccatcaaattaagggcaaacactaatacatgaatctaattacagatcctagataagctcgtaatcaaagtggacaagtgaagctacacataccttcggcacaaaagaagagagacgagtgtgagcttcagatccaggaaccaaagcgaaatcaaggaaagaagagatcacgccccccgtgcccttccttngtagtccagcggtgagaagcacaaagcgagcaatgcgacggacttcctttgtataagatccagtatcaatcagagctgcaatctccttcaaatctggagaaaaaaaaaagcagtacaacgaattcaattttgaaacaaacctagcaatgtgagattaagagaaactgaagcataagatagagatttactctgtagcgtggaggtaggagcagagacgacggattgcgttggggtttggttatctttcatctctacgtcctgagtcatctttttcgcaaatctcaagtcgtcttcttcttgacgaaggtaaattaaaaattgatttgaaaagagcagggcttaacgcacacataagtactcttatgttttcctttttcttttccttgaagacaaaaattaccaaattatatttgggaaaaatgttgttttatacgcgaactttcaaaaagtagctattctatacgtgaactctgacgtcggccaaaataaacatgaaaaatacgttgaccagccattttaacagaaacaaaacgttgacccgccaaaatcccaagacgttaactcgctgattaaccccgttaagagaacgttaatgaattctg

SEQ ID NO: 32772 - DNA, 4219 bp, Arabidopsis thaliana landsberg
cggattcctcacaggtttactttttaaagctttcatttcattcacgagatcactgattgtcttgtctacttgccatctactgaccttattttggttctctcatggaaattgcagagaagattgtggagcttttggagggagctcagtcacggtacacttacatatcgggatcgtgaggttaagcgttttacttatggtttatatgcaacggaagaatattgccattgttggaatgcttttttagatcatcaaaggctcctacagatttcttagggaatggtttcaggcttttgttagaaattgtgtttattgcaacaggtagagaacataaccatagacagatgtatctgaagagataagcttctctatgtctaaagaaatggaccgatacgaataaaacaagcatcattaaagattaaatggtttgtaagaaatactacacttatttatgtgaaattgtgtggttagtgaaaagtaaaaacatcggaatccaaaacctcaaatttaccaatcagcccaaattattgatgctggcgtaatgaatggtatgctgatggtaggcaaaagttggtggctgcgaaaattacaacattatccctctgtggtggacccgaatctgtaatcggaaaaggtggaacccacttggtttaacttttaagcctaaaaggttactaccggtttgaccggtttataatttggtgtttaattctaatcccggatccgtttgtttgttaatctcaaggccacgttatcgccaatattttgatttttgagtgggtagggaatggtggggtcgaatagttgggcctagccctcaacaatgtgtggaactgaagagagcagggtccagctcaggcccaccattcactctaactaagttagtagcctttcttttctggtgcttacggtccctctttctggtcggtcgtatgtacaattagcctacctcggggttcacacccgaaacaagtaccaccaacagaaaataagtttgaatcagttacatctagttaccgtcgaacttacaatcatttcgattactttgatctgatttctagttcggtttgtatgtttaatatcctgattgtacaaatacacaagtacataagtatgcgtatatgtatgtgaccggtttaatcaaaggacggacgataggaggattttggaatcctggaaagaggattattccatagacactaattagctttttggtggcgcagccttgtgacctacattaatggggtccaaccccaagtatgggcttacagctttttccataaaattaaagtaaatctttttttgcctaaccaataaaaattattgaaaatctttccaaccatagaaaagttaaatttgatcagcgatggaaatttttgtacaaagctaggtatttcatttgggagtgtactagtaactagtaagtactaaccagaatgagtttcggattttggattttgaagcttttcttaggttaaaaaccaagtatattactaaacaataagagaaaaacattttgtgaaaagagaaataaagtttactggaccccattgtacagatggtcccataataatactgatagaagatagagcaatggaaagtgatttgtccacgtggtacaatcggaatggttctttaaagctcatcgaacacatcaggaccgttgatttttcccgcatcaaaaagcgttgaatactattctcacttgttttcctgctcctatatatatatcctgacgagtcacatttagtaatctccttggacgtgtaacgccgttaaaacgattctttcccattgtatccgcttttaacaactctcgtcgtcatctccaccgtccgttttctctcagctatattttaatggcgacaattcagaagcttgaagaagttgcaggcaaagatcaaactctaagagccgttgatctaaccatcatcaacggcgtcagaaacgtcgaaacttcaagacctttccaagtaaatcccacagtgagtctcgagcccaaggcggagccggtgatgccgtcgttttcaatgtctttagctccaccgtcttcgacaggaccaccattgaagagagcttcgactaaagaccgtcacacgaaggttgaaggaagagggagaaggatacggatgcctgccacgtgtgcggctaggatttttcaattaactcgagagttaggtcacaaatccgacggcgaaacgattcggtggttgttggagaacgctgagccggcgattatagccgccacgggtacgggaacggttcccgccatcgccatgtcggttaacggaaccttaaaaatcccgacgacgacgaacgctgattctgatatgggtgaaaatccgatgaagaagaaacgtaaacgaccttctaacagtgagtatatagacataagcgacgccgtttcagcttcctccggtttagctccaattgccacgacgacaacgatccaacctccgcaagctctggcatcatccactgtggctcagcaacttctgccgcaaggaatgtatccgatgtgggctattccatcaaacgcaatgattccgacggtcggagctttcttcttgattccacaaatcgctggtccgtcgaatcagcctcagttattagcttttcccgccgccgctgcttcgccgtcgtcttacgtcgccgctgttcaacaggcttccacgatggctagaccacctcctttacaagttgttccaagcagcggctttgtatccgtttcagacgttagcggttcgaatttatcaagagcgacgtcggttatggctccgagctcaagctcaggcgtaacaaccggtagttcatcgtcaattgcaacaacaacgacgcacacgctgagagacttctccctagagatatacgagaaacaagagcttcaccagttcatgagcaccacaacagcacggtcatcgaaccactgaagaaaagaaaggaaacggcggcgtattagtgatcggaaaaaaagcacgtgtgcacatgaagaagtgcacgtgttaagaagtgggcctcgattttaggcagaagtgggtcaacacgcaccaaaaagagagtggagggaggaggagaggggccacacggctcccaccttacgcatagcttccgaggcagccaggttgggtgtggtcccaaaatggttagagctacgtggtccgtatgagtaggaccagcttaagcttaagcataattcgaaacgtttcgtttttttggtgggggctcaccactttgtcttaacttttttggtctttgtaattttacaaaataagatttattgaagccctctctaagtcatggtccactcaacaacaattgtgatattgatgttttgattttattaaaatctgtaacaaaataaatatttctatctaaaatgaaaatactaatgttgttttcctaaaattgttgtagcattactttcaaatgattccattttcttacaagtgttacaaaagctttttgcgaaaaaagtctcgtccgtgttattggcggggcctagtaagcttgattgtaccactaatacggcgttgtttcgtggggcctgaaagcttcccactcaagggacgcctagttgggtcagcaccaccagtttaacgctaaggaaataaaggaacagcctggcgtgggtcatacttgtgtctatctaatctttaccgttcaattccatcgtcttgtcctaaccgttgattctatttcgttcgttgtttaattagtactagtagtagtagatattttcttcttgtctacggtctcaacgccagacaggatttactataagataactttgtttatgtttgatttataattcaggtgtggttggttaaagttaaacgatggttctccgtttcacaccgttgattatatatttttttaagatatgtaggaagtaaaactttaaaaggttaaacacaaggtaaaatgtattattggaggcctaaaccaacttggtggccgtggatggggaaaaaaggtccagaagtgttggctataggattccacgtggacttagagaaatgacttgtcgttctcttcttttatttcagtggacctcattaatttttatatatagttggcctataaatttataaatgttcctttatttttcttaaaaaacaaaaaggttttaaatcaaacagcgggaaaccagcccaatgcttttttaatttcttgattaagcccaaaaaagggaaaaagttgtatgggcttacataacatttag

SEQ ID NO: 32773 - DNA, 1195 bp, Arabidopsis thaliana landsberg
cgaccaccactttctcaatgaaagcacgcgtgagcatgacctgatgattttccccactctgatcattgactcaacatacagaatcaattcaaatcatacccaaatgtaatcgaaaaagaaagcaagttaacatgagttcttgccttaattgtatcttcataaaagtagttttaaaattctcctagtgactatctataaacatatcacagaaggaagattaattacaggcaaaattacttactttccaccaacaaagggaacaccctttcgcttggtaggaaggtcgccttgcaaaccgggtataatctcagtcatctgttggacaattctataatcctcgctgtagctctcgtagcatcttccccatcttggatccctacaaacctgtcaaagcatatccacattgcagaaatattaagcatacacgtttcttaatcagttttctgcaacaacttcaaactagatagcttcattatacttactgcaatacacggggcaaaggcatatgggattccagtcgctctgacttcaagcgcggttgctgccccaatcctcttaacaaggttaggatccctaagagattagtcaaaaacacaaacataaagttgttcagtatcatagctatataaaacagaccaattccaacaagaacaaagtcgtttcaagtttgtgataaccagagttaaggctttctatgacaactacttgcctggtgactccaaggcctacattgtgcgggaaaatggtggcgccatacacattgttgtgaccgtgaacagcatcaatcccgtagatcatagggatcccaaggcgggtcgaaagagacgccttttgaatctcattgaccatgttcacccaagtttcaggagtagctttttccgagggcacacttcctccaccactcaaaacactccctacacaccaaaacccaacaaagtccactcatttaaacaatatatcgaacacttaacagacaataattcctccaagctcattttcttcttaccaatgaagtatttcttcatgacttcaggtgtagcgacgctgcgttcgatctgaaccatctgaccaatcttctcttgtagagtcatacggtgcatcaaatctctgattcttgcacccaaaggctgctttgggcccttggacttcaaagtaccttcagcagcaggcacgattcagcgaagcagcttgggac

SEQ ID NO: 32774 - DNA, 1170 bp, Arabidopsis thaliana landsberg
tttccgaagtccgaacctataaattcgatcattatgccaaactcttatttcttttttcttttgcaagaaaacaattgtactcctccgcattgattacaagagacacacaataagagggaccgaaagatagaaaaagagtacattacacgagattccatatttttcatgtttttattacgtacgtaactgtatgtatatgtaccatatatagataacggaccattaattatttgaacatttacctcaaaaagcaaagtactctctctacttcattccaaccctatgcgtatgtatcttagtgtatggaccgatagacaaattaaatgtataggtagacacatgggctacagttatgaatggtacaattatttcatcaaaagcaaagtactctccatcggtacatgtacatatatacatttcttataatgagttaaaacctgttaggtcaaaagcatagtgctcggctatacatatagccaaagaacgagcagaaaaatcaaagtcgtgagttcagaagctataacaaaatttctaagaaaaagaaagataagaaaatggagaattttatggtagagatggccaagaccatttcgtggatagttgtaataggagtgttaggtttagggattcgtgtttacggtaaagtgatggcggagcaatggaggatgcggaggaagctgacgatgcagggcgtgaagggtcctccgccgtcgctatttcgtggaaacgtgccggagatgcaaaaaatccagtcacaaataatgagtaactctaaacactactccggtgataatatcatcgcccatgactacacttcttctctctttccatatctcgaccactggcgaaaacaatacggtaagctctcaataatctgataatttcaacaatttttgagactcttaattttgggatctgtggcaaatgtttttttgtcaacaaagtagatacgcctctgaatttgaataatgatagcacacaaggcagattagtcctttgttggtcgttttgagttagacgaatccatttttcggaccgatgatgatgcagacaaaacaaacatatatcttcattaaaatcttgtacatagttaacgaaagtactatatcattacacacacatacaaaagacactagttaacatgcatacgtgaatttatatattcataat

SEQ ID NO: 32775 - DNA, 715 bp, Arabidopsis thaliana landsberg
  unsure (1)..(715): unsure at all n locations
atatgtatttgctctggagtcttttgtttcacgcagaaaatttatataaaatacacagagacaagttgttgatgttatattggtaaagggctgcttactagctttctgttttagttagtgttgttcaatttgattgggtttgtaagaagctaatagcattaaaattataagttatggagtactgttttaatgcttctctagctttctgctctttctcttattattagtgttttcctaattgattgggtcatcaggaaactaataatgataaaaatgatgcagtattattcagaaagttatcctcagggatgttcggacaccaagaatggtggtatagagacacagaagtttttcttaaactgtttatgccttttgttgggccgctttgagggaaagaaatttgagagcatactatcagagtatggaatgaagctcgtgcctattcttctacatcaggtatctttcgctattgtttattgaatgnngggagtgatgacacactttacctgtttttcttttttagttatattggttgatctgctagttatgctagaattcatttcttatattggcttttatgactccctgcgcacctcataactttgttcttgctctactgatgttacgattctaacatatcgggagaaaattaatcgttgaagggttatatatatacacccatgtgatcatccttagtgctgacggggcttccttt

SEQ ID NO: 32776 - DNA, 1873 bp, Arabidopsis thaliana landsberg
actctagtgctcccacgtacaaccttcgatacattcgagatatggtagaaaactagtgtgcctttcatttgaggatattgtaaaataacatcataaaagaaaaagaaacattatataaaagaaggaaagaggaagaagaagtcattcggattgtagttatctccattatccaacaacaataattcggatgaattcttgtgttagagacgtagagtcttggttgggatcatagaaacggtcttgagatcatggtgtcaaacaaagatctttcctacaaaattgaaactagagtgctttcttagagtcagaggtttatgtgtaatagagatacacttaaccattagacccacacgtagtgcaagaaccttattggtaagaggtcccaaaacggtatccattcttttgtagttggaggccacaccaaccgccgcaatgttccaatatatcaaagggattataagtcataatgagatatactagaacattggcgtggttgatgtcacctccagttactacaagcgttttaatccaaaaacttctttgtttttgaataactcaaagcaattctatagttcaaattaacctctttctgaagaaaatatagttgccaacgacggcaattgtggacagcattatgacaataaaactacacaaacaaatgcatagaatttgatattgaaatctgaatttaggttcacaacataacttttatttgaccatatattcgaatgcacgagatgtgcattctgaatagtgatataaaaatcatacaaaagaaagaaatagaaagcttcttaactctaaatgaccaaatggatgaaagagcaacaacatggtgatatgatatacacatgtattatgaaacttgtaacccaagaaaccaaaactttcttttcttggtctcagcaaggtaatttgaaacccatgtagcgaccagagacaaaatcattccaaacattaaaagctccatgggttgtcatcagtacagtgctaagtgccatgacgataccaactgcaaacacaatgatcgaagccctcccatacttggctataaccttcttaaccaccattagtccaaccagtgatgccacgaaacagaccagagcaaatatcgcagcggttccagcatgttccattcctagtagtaggtactggattgcagacattgatgaagaaaacaaaaccatgaacgaacatgtagctgcagttacctgtagagagagcacgattaacttaagaatccaattgcttgttttggtaaaactttggttctgatgctgctagagaacaagactcaagaacgtacctctggagcaataccgatttggagaagaagaggactaatgagcattccaccaccaataccaaagaggccacccaaaactccagccaagagagccattacagggagcatcaacttgttttgtcttcctccaactccagtctcctgtggagtaatttcagtttcatattcatcaaacctgttgacttttgaccaacagaaaagctaatttaatcaacagcaagtagtatgtattggacctgttcagagttttggttactatgcgatgtgtggttgctttgaacattgtcactgaagtaaatgcagagagtaaagaagatagtgagaggtatttgaagcgaggagaggaaccagtagagagctccacatggcttgatcgatatgattccctgtgcaaatccaaagtatatcaacttcttacttctacatgccattaagatttcaataatttggaaagaattataacacttcaaggaacgttcaaataagtggaggggaatgttggaaacaagagcaatgagaggcattgagatatgaaaaatattccaaatcaatcgaccaaaaatcata

SEQ ID NO: 32777 - DNA, 5342 bp, Arabidopsis thaliana landsberg
caatcctggtgagacatttttgtaagcaaatcaattttcaagcgtatgcagaaaaaggattcacatgttaattcctccagttactagttcggctctcttagcagctgcatcagcaactctgcaacaaatagctcaacacttaatttggaatgactatttatttgcaagtatatggctttggttaatatatgacattaccttttccgtaacaatcgcccccgccttctctctacaatatactcaatcacatgcttggaaatcagaatcacaccaacaacagttaaacctatggagacatatttgaacctcctgccaaagagatccttttagactttttcaatctcagttttcgaggaagacaatagccatactgagaagagaaacaaccttgaccacttttccaacggaaagatgatcttatcgagcggtacaggtgagacaaagaaaagtccattctcggggttttgaatcctgaaaccacggacaccgtccttaacaacctgatgacatggtaagaaacaatacaaatgagatgtagaacgtatattggtagtaatataagaagattttggaaccggtgacagataaaaagcatacctcaccaacaactgtaaccggtgtgccaattgagaggacaagctcacctcactttatatgaaattttatgtatggattatggaactcatttgctgtttgcaacatatcgccattgttatagtcatagaaacagaggggaagatgtaataaaaccaaatgttattgtttcgatttctttttatacttcaccaaattaatggccaacatttcgcaataaaacaaaccagatacaataaaattctaatgatctatgactatgagtgtgtagtgtaccaaaattatctatgagtgtgtagtgtaccaaaattatctaaacccaaactagacaaatcggtgatagatagaaagatcttctcacgatccacaatcagcctgcaactactactagtgagctccacatctcataggagaaatctaactgagattttcctcttgtggtttgcatatggcccaagagacctaattccacgtggacatcgccaccaccattggattagatcacacttccgtcactgttgtcgtcgtcttctccattgtcttcttcctccgatgaatgcggaatcagccagcaagggccgtgcaagtgaccgttcacgcacacgaagaactctaacccaccttcacgtgatcccagccgccgcgccgcactcttcgggacgagacgcgccgccgtcatgctccacacgcgccctccgcaatacggacacctaaccttctcctccagcgccgcttgtcttctcacgagacactccctcgtctttgacctcataaattcccgaaatacccctctgaaaacccctaaatgctcatctccacccaccgcctgatgctcgcacggatcgctcatgtataggagatcacggcggcaattctttggcaggaagaatctcccggatgtcttggagaatctggactcgcaggcgaagtgacccgacgtcggttgactcagattgaaataccgagtcgactcacccccgccgcagaagaacatgagtttcgctaacgcgtgccagccgccgtcgattcgaccgctgggatcttcgccggacagtgcagccaccatccctggcgcacggttcacacagagccgccgccacagaattcgtctggcgattgcgcagaatctgcggctgagggaggcgattgtgcatagcgtgtggatgtcccagctaatggactcgaagacaagaaccaggactcgctcattctctatacctgacttacccgagttgggtaatcgactcggttggttaaatttgagccgtctattcgtgttcatctggacgacggagaatcttccctctagaagcatttgagtttttgcggtctaaacacgcgcgtcgtgatctatcgtatttatatcagttggtccggtgctcgagaataacacacgtggctttatgctagaataaaagatccatggagctccccgacgctaaatgtgtcgagctatcattggtttattgtgacgcgtgtccattggtgattgcgtgcgctgcaacagagaatcggaggtataaactgacgtctcgattggtattaaaggaaaaaattaaggaatgggagtgccacgtgtcgagcgagagacggaaacgcgaatccgaaacgtacttttctggaaccaaaaatatctcccggaacacgtgtcacgttcaattgcagtcgagaaacgtggcaaatacgaagtaatcttccaaactaagaagagacacaaagcagtcgcatgaaaggcagcataagctcccaaaaggtccgtccaacaggaagaattttttagtggtcaacgtcttggtcgagtttttcaagatcgggaactgatgctttttgctttttgtagtggtcaacacatgacaactacaaactactacgaaaatgtttgatggattggataacgaggttaagctaataatgggctgaatggaccttattaaagcccatacattccgtttcaaatagaatgggcttagaggagtggttgaatcacgtggatttgttttttctttttttttaactctgatcgacgttttgtacataccagtcagattcgctcttttaaccttttaaaggaaataaagttaacctacgcgtgtaaggcgcacgttagacatcgcctttggaaattggcaaaccctacaccgaccgaacaaacgattaacaaaaatatacatactcctcatatcgagagcagcttccttttcattttcttctccctctcctgggtttcgtgtgtgaatgtttctcttccacaaaagcgatagaatccaccagaaatcttcgattgtctctctccctcatctcaattagggtttacgggaccgattttcttctgtcatgcgtgcctacatccgtcgattgggttgggaattttcaatgcctgcgagttctttagcggaatctgtctccgaaaaccctaggcactgccgagctgctaattttcgcctgtggttctggcttaacttcgagagttagaatccttaccttttccttttctgattttcgttgtttttttttcttctgaattccgatggctccgagccgcaagagagggggtggtagggctgcggcggcatcatccgctcgccgagagtggaaggttggcgatctcgttcttgccaaagtcaaaggatttcctgcttggcctgccgtggtatgtgcatctatggctttgctttttctgctatttcttctcttttctgtttggttctgcaagaattgcttattagattcatgatttagtttccagttgacggtagaaatagctataaatttagggtttgaagtttgcatgtatgtgcatctgtatataattcagatgaaagttcctctctgggattagcaactgcctaagggatatggatattttcagaggggttggtgaccttatctagtttttggcagattaaaagaatacccgtgattagttgttgtagttgttagtagattaccactgatcgggactttcgtttagcaactttataggccattttacatcttctaagttttggatatatgatgattattccctataatatcccatttgccactttccagaccagtttgaatttgattttttggatcacttgctcctctgctaattgctgggagtgatttcaggttgacgaaccggaaaaatggggccactcagccgattcgaagaaagtaactgttcacttttttggcactcaacagatgtgagttctcaggcctttagtatcaccctcatatattttgttttgctttctggtcatacttcccaaatgcttacattttcagtgcgagttcctatttgtcatcctacacttattttaggtccttcaattttgtgtccccgtttgagttgattaattcattttattatgattcttattcgaggagataaacttcggttcttgtctcactagattaggacgtagaagctggtaccttggttatggctatagattttaacctttcctgttccggcaggatcaatttgctgtgatgtatgttctctaacagacaccactaagctctaattttacttggtttagaatcagaatcattcctggtttgaacttctgtgttcacttgagttaatgataattgagtcgattttcttatttccagatgtttcgcaatagtgcttctttgttgaacttatctttagcaattttgtgtagagcttccatatccgttggatggtgacttttgttatcatttatcttaaagccttttgcatgttgaattctctgaaaactctttaatcatttactttgcagattagcatcagcatttagcgaatgttctttttgttgcttcattcattcccatggttaagtgaatactgatgtataattattatgacgaagcattttagcacaactgtctgcttttcaaatttaattggtttttaaggaatcagtccaaggttgtagtaaactatgctcactgtctcttccctctagatcagttaaatgttatttattttagggtatgcagttagtaatattttctggtgtatgtgcagagctttttgcaatcatggtgatgttgaatcatttactgaggagaagaagcaatcacttttgacaagacggcacaccaaaggttcagattttgtccgtgctgtcaaggagatcacagagagttacgagaagctgaagcagcaggaccaagctagtgggcctaaatctgctgaagaaacaactgctggaagttctgggaacacttcacagctgcctcaggcctgtgaaaatctaattggttcaagacttgacactcaaatagagtcaagttctagtcatggtagagatgagttgactcttctcagcgaagatgcttcagctgctgaacaaatgctagccctgcgtcataacactctagctcataatggtgcctgtgatagtgcagcagctaaagatctatgtgagatagctacatattcctcaaggagaagaaatgaaagggtgcgggctctaaagtatgctccacagagtataatattaccggttgagcactctaaaatctcatcaaggttggaattggatagagttcaaaggtccatgcttcaatgcagtgatggtggtccaagtgtcaatagtataaatggcaaagctataagaaggagaaaaagaatccgtacgtcaggtcaatctgaatcagatgacgtggtttcatcagatctaaatctgcacggatctgatgaggacaacgcatctgaaattgctacagttgaatctaacaataatagtaggaatgaaggcaat

SEQ ID NO: 32778 - DNA, 643 bp, Arabidopsis thaliana landsberg
gtaacgcaagctggcttttcattggaccgtaaggttcatttccatcaaccattattgtatatgactatactcattgccatgaataattcaagttttattctatcatattaagttctaacgtattttgggaaaaaaatgctcattaattgtcaacaaacaaaccatacactttttagtttttcaaacatgaacttgaaatgaagtttttgtgttctccttttagtgtggaaaaatggattcagttttatagtataaaaaagggttttggtaatcgacaataattaaattaaaaagaagataaattacgaatgaaatacctaaatgttaggggaagaagaagctcttggtaaggctcttcctagctcttcgacaaccctatggacgtggtaacagtttgaagatgatgaggcagaggattttgggaattgaaataagttaacaaataaataaataaaaatcttaatttatatgtttgtttgggaagaagattggatatgggtttttggattttcgaggtttaaggaattatgacgaccgttcgagcaatgtgggggtttctgtattggataaagaagcgaaagtgagtgaactggacttctcttcttctctccagttttcttttattgttctgcgttattaaaaa

SEQ ID NO: 32779 - DNA, 1061 bp, Arabidopsis thaliana landsberg
gtttggagtacttaaggttttggctcatcgcgatcgcttgattagaggtcgaggtcttgcctctaacaattatgaaaccccgatcactttcgatgggggaaacctcacggtttcagtcaagcttctgggatcgtaaggcatcttctcatcttgattcacaactattcgttttcttgtttattgctagttggtgatagtaaaagcgatatgtatgaatgagatgcttgaatccattcgttgttgaaatatgatttgtatctccatgtggtttggtttcagtctgtactacgccaatgtctctgtgggaacaccaccttcttcgttcctggtggctctggacacaggcagtgatttgttttggttgccttgcaattgcggtactacttgtatccgtgacttggaagacattggagttccacaggttactttcccctcttttgaaagcagctaaacggtttcttcaaactatttttgtttaactctttgtcgtttgctcttctttgagacagagtgtaccactcaatctatacactcccaacgcgtcgactacaagttcaagcattcgttgcagcgacaagcgttgttttggatctaaaaagtgttcttctccttcaagtatttgcccttatcagatttcctactctaacagcacaggcaccaaagggacattgttacaggatgtattacatctggctacagaggatgaaaatttaacacctgtcaaagctaatgtcacgcttgggtaagtaaatgattcttcacctctgtcttttctttacaaaaaaccttcatgtacgctattgtgccgcttaaatactgtccgtgtcctgttaacgccgaggtgtgcgtagcataaccgataatatacagtaagattagatatagtgtgaaatctggagatgtaaaatgtgtaggtcttttgcctctcttagcactcatgtatggctccatcaactgtcctctgtttgagaaatgacctcaacccccaaataactgaatccgtgtttgtcgtgcaattgaagtcagaagcagacaggtctgttccagagaaacaattcggt

SEQ ID NO: 32780 - DNA, 915 bp, Arabidopsis thaliana landsberg
gtaaaatcttcaggaaatgggacaaggtagaggaacaagttcttcaaatatataagcagctcttcaaagctcagatgcaaaatatgataaactgaagtcaatgtttttgtcattgaagcaagttcctccaacgatgtgagatttaaaattcccatagatccttttccactcatccaatgtgaagtgcacaactaacaacccgcctaacaccttaagagccaacggtaaccctccacaatgtttgatcatttgcttaccaagctcttccattttttcatcaactttatattctgcaatatatcatcaagataagatgaaatgaaatgaatgttcataagaactagacgagctgcgacatatattaattaaattgtcttgaaagcttacatatattaattaaattgtcttgaaagcttaccggaaaaactatccttcggaaaattgtccaactctcttcaggagttaggcaatctggtttaaagatgaaaccatttggatttgctcgtaatgcgacaccttcattacgagaagtaagtaatactttccagcctataccaaaatatatctcttttcatataagtcactaacaaaagggaacgtacataatgctttatgaccaatatgtttgcatgtattatgaatattgaaaacagattgttaccttttcccagtggaaagattggttctatcacgtcccaatcttcttctctccatatatcatcaaggacaatcaaagcctttcgtgtacccaataggcgaaagagtttttcttgaagttcgtcttccgtcatctctaactttatatattctggcccaactttccgcaagattgtttgccacacatacttccttgtaaactgttgtgaaacacatacccacgcgagttgagcaaaatgactttttactgtctcatga

SEQ ID NO: 32781 - DNA, 246 bp, Arabidopsis thaliana landsberg
  unsure (1)..(246): unsure at all n locations
gggacagggaaagaaaagcacaacgagaaccaagacgccagacacaaaaagaggcaacaggccgggagaaaagacgacgaccgcgaccggggacaaaggacaagagcgacgccacgacacacaccgagacaccgaaccgaaagaccaaaaaaagacacccgacacggggnaacgaaacgagaangggccaaaccacacgaccaacaaaagaagccgacaaagggaacaagggcccgaacaaaaaca

SEQ ID NO: 32782 - DNA, 849 bp, Arabidopsis thaliana landsberg
ttaatccatccaagacggcagcttttaccgcagcgaaggagaccagcggctctaggaagagatcgccaatatactttcaccgtgagacttgatgtaagagactagtctctcatcttcttctttagtccaagcacctttgttcatgtgttctttctcgcagcaaggagatcttcccatgactctcttcttctgatgatgatgatgcttttgattctgttgttgagggttttatggagagagaaggggagagaggtgttggaggtggaaggtgaagcctaatttgtttctagaagagagttggtaagacacgtttgaaggagtggctagtgggctccgttctcttttttctttttaatctaagattaaattgtgtttttgtttgtttgtatcaaaactagaaactgcaacattcacacgatcgtgttcgcagtttcaatgagaaaacgctatatggcttttatggttttttcaaacctgagtctagttgtctacttatttacttattagcctagttgtaggtgtgaaaccataattatgaatggcgacatgcgttttgttggtgattttagcaatagaaactgtgatcaatatttcacatttcctaaagaaacttttcaaactttaccaaatttaatcatattatatttaagtagttagataggtgaaaatttggttcatcttgtttttttctatattttagtttcattaataacgtaagaaaaaaaaaatcatcgagtttgttcgatatgattttttatcgcaaataataaatttgtttgagctagggttgtaaaaacaaaagtagaggatatatttacattaaagtaaatagttataaggattttgttt

SEQ ID NO: 32783 - DNA, 862 bp, Arabidopsis thaliana landsberg
gtctatacaccggttagcacctgccacgcgccacagagagacgtgcaacgcatgcgtgaaagaatttgaaacgaagtttaagaaaccggattcaattttaaggattagagtttgggcaagacgtcgatggctcaacccaaacgatattggatttgaggttccgaaaattactaaagtctgaatttttgcagaataaattaggaacatttagacagatggagacatgcacgatatcaaaatcatgatagacgaggatgattaaaatttagtgacctttacattcacagctatcacgtgttaacgtccgcactcatggtcgagcagacgataaacacctggggtgttacaagtatactcactcacatctacgatagtttttgtagtttagacgactctaatagtatccttatttgagatggtttcatacatagaagtgtctagaatactcactaccatctaagacaattgttaaagtagtgatgactcaaatactattcttatttgatacggtttacaataaaaatatgtattagagcaatataagacatttgttatgacataattgtctcaacaaacgtttctgtttgagacggattttcacaaaaatgtcttatcttgctcaacaccgtatgatataagacacttatacaaaatatacttatatatgtcttaaattgtgcgtctcaattagtcatatatgtagtagtgataagctagagctaggaacattgaacctcttcgatacgcaaagttataacaaccaaaattgttatgtaggccccttgttgccttggtctggaaatgcagttcatgaatatgactcaaggcctcatagaaagctttagcattgactttgattctt

SEQ ID NO: 32784 - DNA, 6451 bp, Arabidopsis thaliana landsberg
  unsure (1)..(6451): unsure at all n locations
aatccattatagctgcgtttttatttttgtcacaatgctgatcatagttaagggcttctgaatatctctctgattctgagaaaataatatgaaatagtgattgcacattattgcttacctgctgtagagttccttttcacttattccatgcttgtttttcaatctgtttctttgccatctgtcattaaattcttcttaaaaaattgcgagatagggagtagatctttattgtccaatttcagaaagtgcagaaaattcactacctgatagttgttagtagccgcctttacataaattagcactcactttcttgaaccttgattgctgtgtaatcttcttcctatattcactgacgtatagatgatcccgcctctatttctagacctaaatggccatctacttcattcgttnnnnnnnnnnnnnnnnnnnnnnnnnnnnnnnnnnnnnnnnnnnatgtggttcgtttctttttaccttccagttctgtctcttatttttatgagagatcatattttgctctctcttttcaggttatgggagatagatcaggaaacataagatggtgggatgtaacaacaggacagtcatctgcatttaatagtcacagagatggaatacggaggatcaaattttctcctgttgttgctggagatcgcagcagagggcgtgtagctgtgctatttaatgacaatacattctctgtatttgatctggtgagtcttaagaggattcagtattttccttcaatttgtgcacatgtcttgtggtttcaaaggtggtgtactaatattgtgtagtgtgaagagaaaacaagaacaggactggttttattgatacttgtttgaaattgtctgtcaactcaaaatgactctttctgacacttgcttttgaaaattgctgcaggattcaccagatccgttagcccaatcacttctccagcctcaaattcctggcacccttgtactggaacttgattggctgcctctgagaactgataaaaatgatccgcttgttctatgcattgccggggctgatagcaccttccggctcgttgaggttactgtgtatgtgtaaaactttattcgtatgcagagtcccatgaatgctttcagattaggattagtttttttcagcatgttgtgtctccccgtataacttaactgtatagaatagacatgtctaggtttatctattttgctcaccagaggactgtgcctaaaacaaggccgtgtagatggattagtggggttgacaactaggcgccctttcccccaggttaggacttaggcatgcctaggttagggcatataaatactgttttttttctgagggtccattattattgatccaagtttgaattggctacaatcatttacttctgcgatctttaatttccaactttttcttccggattttgcagaaatgaaaagaaagctggctttgtgccccagtctaaatcagtaaaggagaggtttcgtcctatgcctatgtattcccctatcttacttcctgtgccacatgcgctggtaactttctttgctttggagtacttcttgattctgaagtcaatcttggtttagttctgaattcatgtaatccagaagatactaattattgcattatctgtatatccgtataatctcccaagacaggttctgagaaatgagattccgattactcttgacaatgtgtctgattatttttatacatgcaggcactgcggatgattttacagttaggagtgaaaccatcttggtttaatacgtctagcacaactttggagaagaggcctcatttaatccgtgggatggcttcatcctctaaggatctacggagttacatgattcagttaccgcctttaggggaccctgtagtgcccgaaatgctgttgaagatactagaaccttatcggaaagaaggttgatctcatttgtcaccacagactagcctctctctgttaagatacctgtttaagtattctattttcttaccttctctaatttcttgtatcctaggttgcttgctggacgatgaaagagcaaaactttacgctgatgtggtcaagaaaggttatgctgcaagatttgcttttgcagcttctgtttttggtgaaacctcagaagcacttttctggttgcaacttcctcaagccattcgccatctgatgaacaagctaacgagaaggtctccgcagaaaatctcttcccctactttagactcaggagctgatgaagtagctatgccgagtaaaataccatctactggattatcgtcacctgaagccaggaagatagactctatggtcagtttcaaaataattttttttttcctnnnnnnnnnnnnnnnnnnnnnnnnnnnnnnnnnnnnnnnnntgcagagaagagatttatttattttggaactggagctccttcgctttgtaattttctgctagcttaatggagctttcttatttgaagtcggtttggattagaaatttccatttgcttagtgtttgttggtgagcttatattctacattttctcgaacagtgtgatggttcacttagattgatggcttttgagcgagaagaattacggacgcgtgccaatgaacgtcttccttggcatgaaaaattagacggagaagattgcattcagaaacaagtacacgagttagtatttcaccattagcttgtctttactgtttattgtcctttcaatttattacttgaaattacggttttgttttagtagtagctcctgtgtaaaatggaaactatatattttagaagcatcttaagctgagagaaaaagtagttgtgttgatcttgtatgggtaacctctttgaccaggctgatatcagttggaaatttggaagctgctgttagtttgctgctttcttcagctccagattctccatacttctatccaaatgctctccgagctgttgcactcgcttctgctgtgtctaaatctcttctcgaccttgcactaaaggtatctgtctttgctatattggataatctttcgtgtccttgtaaaaatatcattccatcacatttgttccacacgtaggttgttgcagccaacatggtaaggaccgacaattcactcactggtactcatcttttatgtgccgttggtaggcaccaagaagcttgttcacaggttagctttctttgtttccttggtcatactacatattgcatattcttcggaactatgcttccactgaaattgtcatttcattagttattcgagaatattcttagcttggtttaataataggcaacgttttagacacagaatattttatactttttaatatgcagctccaagattctggacgatggaccgatgctgctaccttggccgcaacacatttagaaggatcggattatgccaggtcttttcttctacggtttacttcaggatctaattattatttcctattattggttactagtcgttgtaactactcctatctctctatctactcagggtattgcaaaggtgggctgatcatgttctccatgcggagcacaacgtctggcggtactttatcatcatgctcacattcaatacagtttaacttagaaaatttaaatgtgacataaattcctcaaacagttccgatgatgagaaaagaatttcattttattaatgcagggcccttattttatatgtggctgctggttccctgcaagaggcgcttgcagctctcagagaggtgcaacagcctgatacagtagccatgtttgtcctcgcgtgtcaggagattcattcagaaatcataaccgagctatcaacccaagacgaggagtctgaatctgcttctggtgatggcacagtaccgctgcccgatctgcctggtcttgaatcagggaaggaagaagtgacagcggtttgtgaatactttcaacagtaccagagaaagctagtgcatttgtgcatggactctcaaccctacaccgactgatgaggaaactatactaccaaactctttcgttggctatgcaaaattacgcacatgaaatcatctttgaagaacaacaacaaaaacaagtttttgcatttaaatattactgtatttgtgatatagataatgtttctgcatgttgtaccctaaacccttcttctgtgtaaacttgatttaagaagacgagataattttctcttgttgtttggttattacttaaacggtttgaagtttttcaaattagaggaagaagaaaaacaatacatgcattacaatatacgacaaataatgtgaagagtttcaacttacaaccaactcatgtgatattgttttggttagcctcaatgaaagaatcgtctacgacaccgagctgatccaagttcttcgtactcagccttggtgacacacatggactcgaaatccgggctggaagccaaaagtgaaccacctctccatacacctagtatggggctgcaaatacaaaaggagttaaaataacaaagaaagagctgcaaatataaagagtaagaaaacaaaaaaaaaaaggattgaggttgtttactcctcctgagttgttatcttcacatcaaagtgatctgggacaagtggtcgaagctctccttctctgcaataatgtctcagaccatcaacttctctaataataaagcagtactaatgaatgattcatcacataaatttagccttacagtctctccttaagttgtggaaataatgtacttccaccagttaagataatgctgcggtaaaacatcaaacattagacatcaaagctcattcaataacagcagaagattaaaaataagtaatccatttgaaaaccacctttgatacaaaactggttgcaagtaagaatggcatgagtttatagctcggacaatgcactctgcaagtcccgcctgattcatccctatcccaaaacaaaataaaataccatctcatcatcatcttctatctacaactacattctaacattcatcaacacaaacctaaatctgcaggctggaataacgtctcaggtacaagaaaacgctcattcgttaaatcaatctcctgcaaagacaaaaaaaaaccctcaaacttgagagaaatccctaccaccaccacagagacaaaagaatcgaaaaaaagtttacatttttgttcatgtcagccttctttctctccccaaccttatccatcaccaccacagactctttctctgacaaactaagaaacctcttagcagcttgagggtctttaacatagcctttggtatgtgtaacaccatcaggaagaacataagtagacttgataagagtgttcccatttctagcaaggcggagatcacgaagaagatcaagtgaaacaaaacaaagcttctctttagcatcatcaactaaaaaagtttcatccataacattaatagatctataagaaaccaattccttcaagtaattagtaaaagcttttcctcctaaatcaatcctcttaatggcgtgattaagagtgaaattgtgaagaacaggaacagcgtgagtgaaggagaaaccacaatcaacaacgagactacactgagtctttgagaggattgaatcaggctgacgactagcttcatagagatgaacaagagattgaggatgagctatatagagagaagagaatccgaaatcttcgaagacgagttcgtcggtggttcgttgaacggaagggattgagagtggtgcttcggtgaggaggagagaggaggaggaaggagctatgtggaggagggaagtgaataggtgtgaccagatttcgcgttgtaggtcggagtttatgaggtagccacggtcgattgggcggcgtacggcggcggaggtgaggtcgatttcgtcggagagagtggtgagtggtgatgggtggatgaattttttggaagagagaggtttgtagagacagttcgggattacggtggtgggatcacgctcgccgccttgtccggctttgattagaccaccgccgttgtctagaacaacgatgtttgacattgatgacgatgactcgccgccgccggcgaacgaactctgtaagtggttttttgttgtttaaatgaatcggtttaggatctactggtttagctagtgcgattttaagaaaagactgtattggaattaccagtttagagatttcaaactgagggaggagtgaatttgaattagggaaattactaaaaccggtccggttgttccgttaaacgctacaaaagttagtaggcccgggagttcgactaaatcgggttggtcgggtcgggttattcagtttaaggaaaattcagggttttgaaaatttcaccgaatagactcgaattaaaattcggttcggatcagttcggtagtcggttaattcggatcggttattagctaaaatttatgttctgtacatgagctgggttttgtgttttaactacgttggtaaattttttcctttaggttaacatattacaattactct

SEQ ID NO: 32785 - DNA, 1233 bp, Arabidopsis thaliana landsberg
taaatgttagaaaacaatttgacctttacactttgtagaattgtaggtcaagaaacatagtaaggtaaccaagtttctttctatacctatatgaagtttcatgagtttacccttttaataattccacttttaacttatatctcatgttcatataatatttctcaatacatagcaagtaatggagaatatattagaattcttacatattagaatccctgtaatagtgacttttaaagcctttgtaaaaattaaagaaatggaattattattactttaactagtagcgttgtattagatttgctcaaactttggctttaccgtcaaatctaatagctagtatttttttttctacttctctcaatcttgttctaaatagcgggaatatttttttttggcgccaaaaatttgtcgggaaaattttagtttccaattacatgttcctattagataaaggtaatttggtcattttgttcaagagaaggggtatttttaaaaattgacaacataaaaggatattgttgaaaaaggtagtaaaaaagggtagttttgtaaatctccctttcaattatattttttaaaattaaagtattattaaaacaaaaataacaagataatgtctaattttactgaacggggttagtggtaggacggatttggtcgatagtattacgagacggtataccacaagtgaaatctattagatatgtttaatttcaatgtgcaggattagatggtatgacgagttttgatcgataataatacgaaacgatatactacggatgaaatcctagatataacaactaaaatctatatatacattatcttaaacactaaacaaagcaaacaatattaataaaacaaatatttacatatacattttatataacaaattttattaaaaacctagccccgcggtataccgcgggtcaaaatctagttctatatatacagtagtagggcactaatccgatctttaactcatatacttatagtcaatatcacatatacaattgtttctaataaaactctagctcgttgtagaccatgtctatattggataaacagttctatatatgcgtaatcataaaaaaaaaatctagtttaaaatggttgtattgtagttaagtgcattaactacgtttacaaatgtcaaaaaggctagtcgtaagttgttaccaaatccattttcggattgcaaattgtgcagattggttgcatgataccactcttttt

SEQ ID NO: 32786 - DNA, 493 bp, Arabidopsis thaliana landsberg
cccttccactgaactttttattatgttcaatcaaatttatagaatctctaataattttattttccacctaatatatttcttatacttatagagattcatgtacctcaaaatccaggtttaataaagcttgtcgttttctggcctaaaatagaataaggaaaagccaataaatattgtattcatttatttattttacttataagttattaacttcttaattattattttgctattttctaatatgaatccatttcaaaacacagcacatcggcatatctgtttatctatcttgaaaagaactcgtcctaatttgtttttttttcgtctgacaatttcttcttctttttaaattgagaaaatgattttgtaaaaacaaataaaatgggcgactttttttttttttttggggataaaatatggcaattggacgacttggattaggatatttccatttttatatatacaattcaactgaaagataacatgtatcatg

SEQ ID NO: 32787 - DNA, 628 bp, Arabidopsis thaliana landsberg
gcagagacccttgagctataaccatgaagccgcaagaaactccggtagtagaaatcattaagcccatattctggcaaaaaccgatcaaactcttgcttcatcttcctcttcacctcaaggctcatgtacggaaacttttgctgacactcgataagtgcaaatcccatacgcgctagaagaagcttaagtttcttgataccgttatcactccatgtcttcaacttagtcgcaatgtacgaagaacaaagcatggagtcaaacaacgtccactccctaagaagcataagcctaggctcttcttcataagagattcttgaacagtcaggtgctcgaaccttagttccatctttcagagtaacagaagtgatcttatctatattccctgagctattgatatgttgttcaagctccataaccgcagcttggtatctttcatcagtcaacctctcatgaacaaactgatcagtcaaagaaacacaagccagccacaacaactcattagtgttcttcctcaacatatgagatagctcaaacaacaaacacccagatggcttcccatgaaaagtccccatcttgtaataatctctttttagcttttttgaaaacctttacaccatctcccattttc

SEQ ID NO: 32788 - DNA, 477 bp, Arabidopsis thaliana landsberg
taattgtctttgtaacacatgtgtacaatgttcactttaacttatttatcgattctttttgttccaattggcgcacgagggtggacgtggaaccatcgaggatgagcaatgttgcttagggtatatctaggtataatgaaaatgtcgaaaactataaaccatagagctaatgattcattcataccatcttttgaattgcctttaggctttgtagtcaaagtgggtcaaccacaacaaatgttcgaagagttgtatatcagtttataaaacgatatctcccactatatgcttaaaaaattcagtgtattcacaatttttttaatcaaacttatgtatagtttactcatactactcttctatatttcaatataagttgtacaactatcatagtttttttttataattgtgagcaatgttttgaatcatcatataagatggcgcaagttctggctggtaaccacatgtaataatgaaatg

SEQ ID NO: 32789 - DNA, 947 bp, Arabidopsis thaliana landsberg
ctcctccttgacaggttaagccctctctctctataattctctcaatcttcaaatttctcttgttctttcttcttcttctttctttgtatctcaccacaaattcttactcctattgaaagctttgttgttcccgacgaagccttggtgtcgtttcatctccttcttcaaatttttaaaaattgctccagtttttgcttcgcgagtatatgctttaggtttcgaattgagtagattaagctcttgttcactgtttttgatttgtcaaatcttgaaccctagttttttcacaaattgattaacaatggatacgcaaggtaatcttggaagtgtaattgtttatttaactgtgttcaaagttgaaaccctaattttctgggtatgcgaatcgggctgggattgaaattaatcgctctaggagcggagatttttcttagatttgagatattgattgcttgtttcttcattcttagcaattacgttaatcaaatgttgaattttgttgattctttgcttaacggatctaaaatcttgtgtggcttgatttggatatgattctttttggtcttgaatatagtgtatgtatatattcgtgttctatttaatgcgtatgttgtactctatttaatgtgtatcttgttattgcgtttctgatactgtcgtttcttattacattttgttttttatgggtggtttgtgaaattgttgtgaggatataaagatttcaattttgtttgaaaatggaaactgaggatgtgcttgacataccagcttcaagcaactttggctctgaagtaaagaaaaatagccttgaatctgggaatgggtcacctgaggctaattctttagttggtaatgatgagaatgtgaaaggaaatttagatttggatttaacagaagaaaatttgagaattggtggtgggccataattttggggaaatactaacaaa

SEQ ID NO: 32790 - DNA, 528 bp, Arabidopsis thaliana landsberg
cttccactttttattttaaactacttggttagataaatcttctgaccgaagctggtttaatgagaagggagttgaaattgtagacaacgagtactttgtcacggacgacaacgtaggaatgctcaagttggccaaggaagctaactccatcttggtacgttttgactttgaatctccaccgtccatttattcatcgtacgtttttctttattttgtatcctcaactttttttttttttgctttctcaccagtttgattaccggattccgccgatgggatgtgccggcgcagctgcgaccgacagtccaatccaaatgaacggtcttccgatcagcatttacgcaccggagacagtcgggtgcgttgtggttgacgggaaaggacattgtgccgccgggacatccacgggtggtttaatgaacaagatgatgggaaggattggtgactcgccgctgataggagccgggacgtatgcgtcggagttttgtggtgtgtcgtgtaccggagaaggagaagccattataagaa

SEQ ID NO: 32791 - DNA, 2203 bp, Arabidopsis thaliana landsberg
cttatttgccctacgcaggaccatctctgctaaaccaatgtgaaacagggaatttaaccaagtttctctaatccggttcaatgcatggtacgtgcatggctgatctgcatctcaatttctagccttctataccatgcatccattttactcttatcttctatgatcatctcaagttcaatctctatcgtcaaatagaaataggtataaagaccctatttcattattcataaagaagatcaatattcttctagtgtacaaatcttcttctaaagtcttgatgtattgtaacctatttcaatattcataaagtatgaccaaaaaggaaacgaatcacataacatatgttgaacggcaaaatatgtggtctccgcagctaaaaacaaatatggagtacaaaagaacatttaaacatgactaatcttcctcagatctgtccaacgagaacatccttgtatggtgtcggagatgataccaccacggtctctgtagctccctctccggctttggaggttgtgtgtgcccggggtttggctctactagaagcttcgtgatcagcttccattttccttattctttcttcttcagcaacaagagggagatatccttctctcccttcaagaagtcggtcttgagctccaccccgtagtttctcgaggcggagcccagagatctggacgaagttaaaaaccttaacaacgttcagcaatcctcccacattcaaacatgtagccccggaaatcccaagccaaatccatctttccccctgaaaattcattatttaccgtaagaagcggattttgaaaaccactttttatgcgataaatttggtttccaagtacttacaagaagcttcaatccactacgagatgacccggatatgtcgaggctattgagaactgcggaaaccaagaatagaagggatccaaccaagaaaggaatgtaaacacactgctgtagaatttgaacatgactatccgctctctcgtagatttggcatgagttgtgaatcgatcctatcaaccaaagtaacggacccgctatcagcaagtttaatgcatgatgctctcttccactgtatccacgttttgtctcagcctaaatactccagaaaaaaaatacagcggaatgtgactacatataattagtcagacacacatcaaaagttgttagtcacaacattttactctattacttatgtttacatggaccacaagtccacaactaacattatggacaatatcatatattcatattaatatgccacaagtacttagctttatcttcaaacacttgttataattgttataaattaatgtgatatcaccgagacataaccaatttagttctcttatctctcatagactaatacgtaaagcatatatgtgaaatttgatgaaccaggaaactttgttacaacaataaaagtgttataatgtcaacaacaaaaaaaaagtgttatacctgatggaagacgaaaaagattcccaagaaaaacactaccgaacccgctatctgaaccagagggactgcaaattccactagccccagttgcaaatcatactccattaaccttaaccttaaatcacataaacaataagcttattactaaaacgtttttcttaatcccccacattggtgaatataaagttatatatatcacacgtagacacatttgagcttacaaattatggtaaatttaactattaagattactaataataatgttactaaattaagcaagcttcttgagatcatttaccggtaatcgattccagctagatgagccacaagatcatgaacattcacggcggttataagaacgagagctaagagaataaggacgaggccggatcttggttcccatgagaatcctgtcgctgtgaaaccgccgatgagcaccacggttgcaaacaagtatagacctgcgttgatgtactcggctctgctcctcccaagccgagggccgtacgttctaatctcacgcgccgtcgcgagtttcaccattttattgtaagattatgcgtttagagagagactgagagagagagagagatctgggagagactcagagagaaagagagagctttacgtggctttgtgcatggcgttcttcgattaggaaagtggaaacgtggcagattgtggaaaatagctgactttcgtaccagacgttgtcgttttatcctccagatgctattttaat

SEQ ID NO: 32792 - DNA, 5187 bp, Arabidopsis thaliana landsberg
gtaaaaaaatggaccttttaaggtttcttcgtgtaaatttctcataagtaaaaaaattggcttgactatattgtaatttgaatctgttgtctctctgtatgcagcaaaactcttctcttaaattctcgagaccatttcaaagcggaacaacttgtgttaaatctcggagaagctttgtggttaaagcttcagcttctggtgatgcttcaacagaatcaatcgcgccgcttcagttgaagtctcctgtgggacagtttctgtcacagatattagtgagccatcctcatcttgttccagcagctgttgaacagcagcttgaacagctccaaattgatcgagacgctgaagaacagagtaaagatgcatcctctgtccctggaacagacattgttctctacaggtatagatcttcgatctaaaagactaaaacttgcttgatatattaagtgaaggagacgtgatgtaacttatctctgtgtctagataaatgataactagaatttaagattactcattatctgtttgtatatacgatagattggaagttgtacatgagtttgattctgaatgagtaatgttttgttggtgtttaggagaattgcggagttgaaggaaaacgagagaagaagaacattggaagagattttgtatgcattggtggttcaaaagttcatggaagctaacgtatcacttgtaccttcagtaagcccatcttcagatccgtctggtcgggttgatacttggccgaccaaagtggagaaactcgagcggcttcactcgcccgagatgtacgagatgattcacaaccatcttgccttgattcttggaagcagaatgggtgatctgaactctgttgcacagataagcaagctcagagttggccaagtttacgctgcttctgtgatgtatggatatttcttgaagagggtggaccaaaggtttcagcttgagaagacgatgaagattcttctgggtgggtcggatgaaagtaaaacaagcgttgagcaagccgaggggacggcaacatatcaggcggctgtatcgtctcacccagaggttggtgcatttgcgggcggagttagtgctaagggcttcggcagcgagattaaaccatcccgattaaggtcatatgtgatgtcatttgatgcggagacgctgcagagatacgccactataagatcaagagaagcagttggaatcatcgagaagcacacagaggcattgtttggtaagcctgagattgtaataacaccggagggcacagtcgattcatcgaaggacgaacagataaagatcagcttcggtggaatgaagaggctcgtcttggaggcagttactttcgggtcgttcctttgggatgttgagagccatgtagatgcgaggtaccactttgtattgaactaaaaacatggtctgtaatgcagttgactaacttatgtagcattaagaagatacccattaagggtatcattacacttgtatcaaaaatttgaggaaaagatcgtacattttatatgttattgtgatggaataagctattgctaaaaatgatagggatgctaaactaagcaggaagcctacctagcctgcaataggacttaagaatcttaaatgtatgttacaaaattacaaaggaagccaaatttattaaggctttttatcttcaaacagaggaatgaagaagttgtttagaagtgacccatttgtgcaaaatctcaccaaagacatcgtagaagacgatctctgcgtccgagtgagtgaaccgagcagacatgaatccttgaccatcataatagaatttcagtagcttgggattgatggtcactgggttaatatctcctctccaagccttggatccagcaccactagttagaaactgaataggactgtcttcatcactcatatgttgaagacaatgatcatgtccattcatgtagagatcaacaccgttctctttaagaatcggaagaagctcttcgttgagctctttagtatctccatgatgtccaatgcttctcattgcatggtgaccaacaacaatcttccatcttgctttagaactctttaaggaaacttcaagatcacggagaagagctttgacataagagttgcgagatggaactgcgcgccaatcatatgagtgaccatctgcttctgtgtagtattctttcacgaaaggagtcgtgtcaacaaagaacatctctaccaactctgcatcaacgacaaatgatcgaagacaaatccaacggctgtcgatttcccggagaacagaactcagctgagcttctgcgtcacctctatagtcatggtttcccaaaactgcatcattcataatcacatttgatgagaattctgtaaatattaaaacttagcaaaagctttgggggttttaaaagaattattaccactgtaccactgtttctgaagacttggagcagtgtagatgttagagaaagattgttcgaagtttggatcatgttcactaaacaatccattgtcgtagaagttatctcccgtagacaccacgaaatctaagtcaatcttctctccaatttttcccatctgtaaataaatggatatttacataaactgttaaaatttatgacaacatttgtacgaggaaagaatattattagaatattccattaatgaattctttgggaccaaacctgataagcaacgagagactgattgaaggagccacgacgaccccaatctccgatgactataaaactaacggaaccgtcgcttttagccggctctataaatctctgaagctcaccgttcgacaccacgacgaaggtggtgaagatacacaacagcaaactcagactcgccgtggcggacattaacgatcgacgaccagaattcataattattgatcaaataagcctcacacaattttttgatgaattaggtaggatcgatgaaacgtacttggaggttttgtatatttctctctttatataagagagaaagagagagagagataaggaatttgtgacgagaagaagagaaacgtgaatggtgaaggaaacgatgatgatgaaagaaggagggagacgatgatcctttttaaaccgaaaaatattaaagatgcggttaaagaaaaataaagaaaaaaagaaaaaaaaggtgcggttaaagatgctgaaggatattccaaccagtagccgcatctttgtttatatttttgacgttttcggatctcaaattctgacatccacctcttctatgcttgtttgtgttgaatctctcaaaggttttggtttgtttgtggtaatatcagaattctaaaaaaatctatatacaaaaccctaagtttaggtgtttgagtttttagtaaaagtaaaaacaaagttgtggttttgagttctcggtaaaaagggcagaattgtggatttttttagtaattatcgaataaggaaatttcaaaagtgctttgatgacttttaaaagggttttcgattattctagattagtactatcttatactaagagatatttgggaaacattatgtgctcaatcatgattgggttgtgatttatttaattctagtctaaacaattgcgtcacgagatggtattcctattggaccacatactccactttcagacaagttctagcagcggacgaagcaactgcaacctctaatatatcggcacgtcacgtagcttaacagttttagtgaacactgtgtatacttttcagtgtagtaagtaatctctagttattttgagttcaagtcaaaaacgttgaaatggatatcaggagcccattttaacatccctgaatttcagggccgttacaaatacaggcccacatatcggtaacagacgttttggtctagtcaataggttcgtgaataggttgctttcacgttagttctcggatcctttggagttggttccatagggtttacttctttgtttctggggttcatgtcttgtggacttgtggttacaaaataagagaggatcccttgactacagatcttcagaaacatatttcttccacttccaatgtacattttaaccgatccgctccagctctttagacgggcctatatatagtgttccacccggctcatccgatttaagcaagaccagcatgcagttaactgccaaatacttaaaccaaacagataaatgagccccatgactgaaccatcaaagcccagaacacccagatcagctttgctctggcagggctgtctctcaagtcaatctacagacatttgcaaattttactcggaccactaattcttccttcactactattagtacaggaaggaaatcttatttcttgtaacaactataatctgtaaaggtgaattctggacgtgacaaacagagcctgttgttcctccaaaaagtaaaccaaaagttgcagaaggaattaacacaaaagggtctgtgtaaaaattttctcaagatcaaatcatgctctcattcagtttttgggactactcacacgccgagtgatactataacagtagtaccagactctcagttgggaagatttctactcgtccttgtatctcttctctaattgctccaaacgctcaaggtctttgtggtacttgcagatgcggaagatgcacctgtcagtgaatacgagagaatatcagtaaaaaactaaacatacaaagttccaagtgagttatagttgaatgatgtaccagtagagaaggatcccagccgcacacagaaccccattcctctgagccttatagacctgaaacacaagtaaactactagtaagcaagctgaactgagacaatttagggacagggaactgaagctttgatgtgttgctaataacagatggaagacataacacatatcgaaaaggctcgggtagatgttttaggaaagaggtacaattggagtggtataatttcatcaacaaccaaccgccaacaagttcacaagaacagggcataaaatgaatacgacatcagttcctttctcacataatttatcaaagaaacttgtatttccaccacaagaagattccttgcagcattttatagctcttaacaacagcaaagtgatgctataaacgcgagctcagaagagataaacaccaagcagtagcgctaaccctgtgagtgtgtgacctaatatgcaattggtaatggtggtggtgaggactcgaatgttgaatgaaacaacgcttgcttc

SEQ ID NO: 32793 - DNA, 1625 bp, Arabidopsis thaliana landsberg
gaggacacttcaagagatcgaggaacatgattagattctctctaggggctatctttaactccatctgacatttttcttgtagggtgggagtgacgatatccgttaacaagttgtggatggttacaagcttggcgtagtcgcaaaagcatcaccaaaagataagccatgtgttcatgcaaagtcccatcagcagcatattcctatagaataagagtagaaaatgtcatataacaaggtagaaagtcaccatttattcacatatatatgataattatattattgaagaatcacctcaaacttccaacgtgaattcaattcaagcttcctgtagaaagaccattctactactgaaaggtcctttttgctcaaattaactttctttaaggtagattaattataggttgtccatcaagtaatgttcctaaatagcaaaacataaaagaaaattagcacaaactacaaaaggacatatatatatatatatagtaagagcaaacgaatacctttggtgcggcgcaacattataccccttagaatagcttgaagcttcttgtaaccatgaagaggctatttatcaattgaagctttatttctttggtaaaataaattgcccatggcatatggatgaaatctaagaaatctgaaatagctataaagatcgtctactttgttcttaatcggcgttccagtcaaacaccatctccttttggctctaaggctaaaacaagcttttgcaattagggttctatggtttttaattgtatgagcttcatctaatactactctcaaccacctaactcttcctagtgcaccaacgtgaggctgaatcaaactcgatccgtcaaggctttctctgcctctcatactatcataacgattcagcatagggttttgtggaacttcatttgtaacaatggcgtaagttgtcatgaccacatcatatattgctatttctgttggatctttggttctgtgagatccatggtggactaaaacagagagtttgtgttcatcagaaaccttctctttaacttctcttgcccattgttttacaacacttgctggacaaacaatcaatgtaccaccagagttttgaccttttcgctttctctgctttgattgtgacttcaacttttgtaacaggataagagagatcgtcgagatcgttttaccaagtccctgcagtgccatataacaccacacataatttgttagatatcgaacatttcacctaattaaaaaatgtgataaacaccaatgttacctgatcatctgctaatatccctcccaaacagtgcctgcttcttttttctttcttacgcatccagttcaatgcaattttctgacaaacaataaagattttagtatatgaccaaattcaaaattaaggacaataaaaagcttttaagtgaaaacatgataatatattattacctgatgcctcataagaggaactgtaagaacaccaggaggtagatccttttcggtcttgggttgcttcagatcctgtaattaaactaagccaaattaataaatatcacgttgaatgttaatggaacaacagatacatacttaagtagtgtttgagtccattacttgtaatgcagcctgatggatgaccctct

SEQ ID NO: 32794 - DNA, 486 bp, Arabidopsis thaliana landsberg
ctaatatagtaatatattatataaagaaatgataatgacaaattgccaataataatatttctcagagtcatactaaaatattaaaataacttaatttttaagagtttcgttcatgcatggcttttttgctcagtcttgttcatgttcatgttcccaaattaagataccaaaaaaaaaatacgcttgattttataatctcttaatttttatttactgccccgaggtttgcctaccctctaattacaccacacacatttagatcagactctaattaagaaaaccaatagaatagcacttaccaaactttctttatgatatgactctgacatatactataattagcataatgcaatatacaacgattttcatctttgtttagcccactagctaatcacctactcattaatttttgtttattctgaatgcagatatatatgtatatagttttgttttgtacttatatgcactagtagttataatgtccat

SEQ ID NO: 32795 - DNA, 890 bp, Arabidopsis thaliana landsberg
  unsure (1)..(890): unsure at all n locations
tgatttcattgtgaccacgattacttctgcatgcattctgagatcgtagaggaacttcttcacgtcagctttgagtgcttccgcgtctgaatccnnnnnnnnnnnnnnnnnnngttggattttgcagctttcgaagctttcttttgtcagaagaagctgtgagagaagaagcatgagaccaccatctctcacaatccagtacaagtcgattgttccatactgtctttggtactcgtttggccactcgtctaaccctttgatgatgacaactgctttgtttgctgttatgcagtcattgattatcccaacaaatgtggatggaatctctgttagattttctctgcgccagatctcagggtacctcattaccacaatgttgggtttgaggtttccgagtcccatcgtctggatgatcccacggaacccttcagtcatgtttggggctacannnnnnnnnnnnnnnnnnnnncaacgcttatactcaatgtaggtggctaattgtttgcaagcttcctttgcttcttcagcacattcatagtagtcaccatctaaaattgagacaaagatcgacattccacgaccttttttcttcatacagttagcaaaatcagccagcttagggtgacatggaacattttccgggagctgtccccacggtctgcagaagacaaggggaattgggtaccagttctttgggtgcacttgattcgctgcaatttgaagaaatgacagtacatgagattagctttagatacatggaccattcaataatgaaccaattagatatggcaggttctgcataatggaacttagagatttagtattatatagacaacggctacatgaacangacttagatatccaggttcataccttcgagtgacctgaga

SEQ ID NO: 32796 - DNA, 4532 bp, Arabidopsis thaliana landsberg
  unsure (1)..(4532): unsure at all n locations
ctgggattagcattgcattaagctgactaagttcggattgattaagctgtctgcaacccccaaagaaggcgtgctaatgatatgaagaatttagccactgctgctgtaaaagcaagcagattttatagggagttgaattcccaaactgtcaaacacttggtaaataactacagaattatacagctacctcccttacttggaatcaaatgaaatgttattttcttttcttcatctgaaaaaaatgatcatttcgatttaagcgattgacattaggatttcggaaatctcgccatgcgtagcaagtatcttcattattaactagtggacacttggcagattgtcagcttatgttggagatgctgctggaatttgagcttcactaagagctgnnnnnnnnnnnnnnnnnnnnnnnnnnnnnnnnnnnnnnnnnnnnnnnnnnnnnnatgatggctgtccaaggcgcatttgcagatagatctagtgctttactgacagttcagacgcttctatcagagcttccttctctgcaaactagagttgagaagctagaggctgcatcatcgaaggtatttggtggtgacaaatcaaggatccgaaaaatagaagagttaaaagaaacaatcaaggtcactgaggatgcaaaaaatgttgccatcaaagggtatgagcgaatcaaggtatttagtaataaccctatgcatatcacaacttgtgctgttttaccaacatgatatgaatattttggttatgctctgtgtaaatttgtatcattgcaggaaaacaaccgatctgaggttgagaggttggacagagaaaggcgtgcagacttcatgaacatgatgaagggttttgttgttaaccaggtacgttattattatacagcaccttaccattagaaggatgatgcctttcttaattgcccaatagagtgaagaatgtgataaggagattgtttagtttaagcacaaagtgtgtgatttcattcttagtgagatttcaagagtggagaagtagaataaaaagatggcattcatgggtctcttgtaggcaaatgaaaatgagttcttttaaagataatgcggtagaagagaggataggaatatataaatttgctagtaatcaaagagtccagagttttaaagaaagagttgtgttcttgaattggacgcaggttggatacgcagagaaaatgggaaacgtctgggcaaaggttgcagaagagaccagccaatacgatagagagaagcagagcagctaacaaacacagaaaaaaagagagtgaacgatgttcattttggcataaccataccaaatccatgtatggcacagaatcacattgcgtaataatggtttgtcaaaaagtgtagtttcctttttcatatgttgtatctatcttgatagagattggtaaacgttcttgtttgttttctttagttgctgtaaattagttttctagaagcatctctgactacagctgcattgactcatacccattgttttctggtatatgccgcaaaagatatatctgatagtttggtaaacgttctttgttttctttagttgttgtatttaagttttctagaagcagttctgagttctgactgcgtctgcattgccctcatacccattgtttcctggtaagtaacaaccagttcgttttagtgagttgaccgagagagaaattgaaccatcgagccaccaatcttactcgtaaaccggccggtttatctcctaaagcgagaccaatgaggcaatgacagaaaagtcacggagacgtcaatattcgcgaaagggaaagatttcacaaaaagacagcagaaattatcgcaatattacacgcccatgccattttcaaacaacgcggccaggtcaaagatcgcgtctgtcttaaggggtagtttcgtcatttcgacaagttttttctatccatccagtcttcttccttgcttggaactttcttcgtcttcgattcccttccttgcttctttccccgtcgatctcgctgtgtgacctttttatttagtgactcgagattacataaaatcttctatacactggttccacatctgtttcaatcatggcggagaatggtgaagagaagttacttgctgttgcgcgtcacatagccaaaacacttggccacaatgaatccatggccgatgatatcttacagatcttctccaacttcgacggcagattttctcgcgagaagctcgccgaaggtcaagctggagaagatggatccggagtcgccacactcgagcgagctctaaattcaatagacggtcagatctctcgctttgttgctgcggaccaaccaatttgggctgatcctgcagattcagctgctttcctcgacacaatcgatgagctcgttgcaatcattagagagtggagtcccatggcttcagagaaacctatcggcatctgtctaacacgcgccgacgatatgatgcagcaagctatgttccgcatcgaagaagagttcaggtcgcttatggagcgtggagctgagtctttcggacttaatcctcagggagacgctggtgcgatgaatcatcgtttcgattctgaggaagaagaagatgatgacagagacttcaacaacggtgatgatattcagatcccagtggcacagccactcactgactacgatcttatcattgatgctctcccttcggcgacaattaacgatctacacgagatggctaagcgaatgcttggcgctggatttggtaaggcgtgttctcatgtttatagttcttgtaggagagagtttctggaagaaagtatgtcaaggttagggttacagaagctgagtattgaagaagttcataagatgccgtggcaggagttagaagatgagatagataggtggatcaaagctgctaacgttgctctaagaatcctgtttcctagcgaacgtagactctgtgaccgtgtcttcttcggtttctcctctgctgctgatctttcgtttatggaggtttgtcgtggctctaccattcagcttctgaatttcgcagacgcgattgctattggaagcagatcgcctgagagattgtttaaagtgcttgatgtgtttgagacaatgagggatttgatgcctgaatttgagtctgtgttctcggatcagttttgctcagttcttagaaatgaagcagtaactatttggaaacggttgggagaggcgataagaggtatatttatggagcttgagaatttgatccggcgagacccggctaaagctgcggttccgggcggtggtctccacccgatcactcgttatgtgatgaattacctccgtgcggcttgtagatcccggcaaaccttagagcaagtgtttgaggaaagcaatggtgtcccttctaaagattcaactctgttgactgtacagatgtcttggatcatggagcttctagagagtaacttggaagtaaaatctaaagtgtacaaagatccagctttgtgctatgtgtttctgatgaataatgggagatacattgttcagaaagtcaaagatggagacctaggattgctgttaggagatgattggattcggaaacacaatgtcaaagtgaaacaataccatatgaattatcagagaagctcatggaataagatgctggggttgctgaaggtggataatactgcagcaggcatgaacggtttggggaagaccatgaaggagaagctgaagcagttcaatattcagtttgatgagatatgtaaagtgcattcgacgtgggtagtgtttgacgagcagctgaaagaagagctaaagatctcactggccaggcttttggtaccggcatacgggagcttcatcggcaggttccaaaaccttggagacatagggaaaaacgcagacaagtacatcaagtatggagttgatgacattgaggcgcgtattaacgagctgttcaaagggactaccacgggaagaaaatgaaggtaacgaacacaaaaatagcctcttgtaacatcttcgtaacgaaccacctgctaaatgaccaatagcgaagtcttgcagggaggatttgtaacatgtattgtgtatccttttagacagttagctcagctctgttgtgttgttgtgtaatgttgtattgtaactggatcactttttttgtcattgtaaaaagagaaaacagttgaaaaagatgacatgttagggacttggatctacttctaagtcttgagtgcatattttatcaatatgttcttacatctaagtcttcccttttaacaaaggagtcaacacaagatttttcattattttactgattctcaataattgtgtaactatcaccaagtaaccataaccaactagtaccaactcttgaagatagtaaaaaacaagagaggacacaatggatatttgatgtttttaactcttgaaataaataatataagagaagtttcaaaactgagcagagtaccaaaagaaacgaagtgagtctaggaaatatgaaacgtctaaagaagcataacaaaggggatcctctagagtcgacctgcaggcatgcaag

SEQ ID NO: 32797 - DNA, 1112 bp, Arabidopsis thaliana landsberg
tttctgggtgataatgagacgttccaagtttaggatggggagactctgcagttagaagaggtcagctatgtgcagaaccaaggaggttacaacaaaggtttcaacaacttcaagcagaaccatcccaatctgtcttacaggagtacaaacgttgcaaacccgcaggaccaagtctacccttcacagcagcagaatgaacccaagccctttgttccatacaaccaaggtcaagggtatgttcctaagcagccgtatcagggcaactatcagcagcaactcccaccacctgggttcacacagcagcaacaacaaccaggttcaacaactccaggattcagacttgaagaacatgttacagcagattctccagggacaagctgcaggagcaatggatctcgccaaaaagatggcagaaattcacaacaaggttgactgcagttacaatgatatcaatatcaaggttgaagcactgacatctaagatcagatacatagaaggccaaactgggtcgaccgcagcaccattgtctagggatagcttgattgcgcttgttaaccattcgaataggctaggatagcactctactcgattaccccatccttaggaatttctcgtctatcttatttctctgttttatcgttatcacttaatcgttctcattgcctgtttcttagtttttataatcactcgaccaacttactcgaccacacccagtgtctggcaacagactgtgcagtcgagtaagattgtcttgtttcttgtctgttactcgaccagtatactcgaccacacccagtgtctggcaacagactgtgcagtcgagtatatctgtttcatatcctgtctgttactcaacctgttactcgaccacatcctacttttggcatcagcctgttgtggtcgagtgattttaagaattctgttattatttatgttttcttcatgttcacttatgactgttagaaaccccaatactgttattgcttggcttgtcttagtgacttctgatcacatctcatttatttgcatcacacccatttggattgacacctaaaatactacaacgacatgattggtgttttatgataattgactaaaaacatattatcaac

SEQ ID NO: 32798 - DNA, 548 bp, Arabidopsis thaliana landsberg
cacaccattgatggggttcattgaaacaaccgcccagtccacaccctgggaagaacaagggaaaaactcaaaaggtgaagatgtgattcttctcctacataaaaaaggttacaacttacaaaagacctattcaaggtacttacaaaacatcatagagattgccttaatacttgttttgagtttaaagagatccaaattgaaaacatatgcagccataaggatttgttgccatttgtgtgaaactgaaaaggcaaacgggttataataataagaagccacaatgtcatatttaacacattaaagatataaggagatgtgattagccattgccacgacctcttgcgtatccgagtccattagaccatttgcaatatcattttgctctaaatgattacacgtggtcaattcatatttccatctacctaaatccaagctcataacggattacactaaacaaaaagaccaaaatgtaactaagttcattgaccattttagaacgtcattcttcgcttgtcgaagaagatgcagtgagaagcagagctaaataa

SEQ ID NO: 32799 - DNA, 951 bp, Arabidopsis thaliana landsberg
gccatgaaaagccaaagatctgatctttttgacagaaacagagcaagcaaagtatgtaaccaggaaaaaagcatcaggttattttcagataggatctttgtctttgcttgatctgtttctactgcagatttttcatcagtgattaaacggttactttgaaaatttaccttattttgttcctctctcccttatcctgagtttgtattttattgatgttcattttgaaattgtctgaaatttgtttgttctttttactatatggatgtttaacactcttgttgtttcaattgtattgtaagtttagaagttaaaacagagttcttcatggttcttgtttggtttaagaaactgtttgatcttaatctatttcagttttctttttttgtcttggaacagtatttgtccggttccattggtttgtttctctctttcaccacgaccaagtcttgaactttaaaacaatttcagaaaactgttttattatcctcatagtgatcaatcaatattagtaaccctagtagtggacgcacaagacatacatttccgtactagtctgaaaacaaacgccttatacgaccatgttttgctattccgcatggggtttttggccgccttctttctccctcctcctcctcgaaaacaactctgattgtgtctctggttaactgcttcgccatcacctccatcaccatcttcttcgttctcttctgttgaaaaggtgtagcttctaaggtacatttgcctacaagatatgctgtcaaccaccgtggtgcaacgctggctaccgtcatggttgattgaccgtacgaactcggcctccgccatcggccacttgtaaagattggcggaagtcataaccggccggacgcaaatggagtctcttttgatgtttacacaatcatctatgcactttgaggccatggtcgcttttttggaggggtacttctaact

SEQ ID NO: 32800 - DNA, 1144 bp, Arabidopsis thaliana landsberg
ttccggccaccaccgagatttgaactcgtcctccagtgtagttgtcggattccatgaactctgtctttgtaaggcctcagccctaggcccattaaagaggttttgatcattaatattaatcttatttaaaaataaaagaaattttaaaatctaaatccgaactcatctttatatatccaaaccctcgtttaattttgtaaaattaagagtatgtttggattaggaagctgcataacacatcaagtgttggaactcgcggtcctacatcaagagtatggaagctgacgtgacaaactatagacgatggtatgacatgtcaaggacacatgagctgacttggcgtagtgtttgaagatgcgagttgtgttagagattcactaaatattctctacgacaaacttaaggaaaatctaaccttaatgagcaaggtttatacatttgtggaaatgtacgattttcttacgattagggttttcgtgtggtgtgtaatatagtctagagaggccatgagccctcgtttaacactctagtctctagattattgtggatttataattttcatagctaaaagaataaggcttagaaggcgagtgtttgattatctctattagtgtttcacgattgggtgaataggatcaaactagagttaggattagacgtgttcttaatcgggtttaatctattgcgtagaacaagttaagttccaaaataagtagatccttataaagatcatcttcttataaagaacaagctaaatactttccaagtcaaaactttgttgtgtattgtaggttacatggaaactcggtccgaggtccgtttccagtttccgaaatgtttcgaaaacggaaactctccggaaacacgaaaattgtcacagaaacgcgtttcctagatatctatgtttggaaacaagatggaaatgtgagtttccaaaatagaaactcacatttctgaaatagacatacgacaaattgtttttattgactttgaaaatttaataactaaaattggaaatattcagattattaatacatataactaattttataaaattctgatttttaagatcttctcttgataaacgagatttgtagagagctttatattatcattgatgaacctaattaaaatgagaatgaga

SEQ ID NO: 32801 - DNA, 1004 bp, Arabidopsis thaliana landsberg
tctgtgagaaaccagaattctcatttctgagtcttgcagttctggcattggagaagaactttgatagaaaagccttcttgcaatcatcccaggtggtgattgagtcatggggcatatttttctcccaaatgtgtgctttgtcgcccaaggagaatgggaacaaacggagcttgaatccgtcttcactgacaccattgatctttgttaggttgaggagcctatcgaattcatcaaggtggtcgagtggatcctccattggcagaccatggaatttgttcccctgaatcatcgagatgagaccactcttaatctcgaagttgttgttctggatagcaggaggtgcaattcccttcctctgacgttgatcacgtggtgcatctccagcaccaatgttggaagggccattttgttgattctgttcgtcagccatatcgagtggttgttgaggtacaaggttgactgtgtttctcctttctttgagttcgcgagctatgcggtcgatgttgtcgttgaaaaggaggttttgattgcctgttgatcgagttcgcatactacagaggtgtacctggatcaagaagacaacaagaaaaacacacagttagcaacggaattgaaaattgaaaaagaacttgatctaagcaagtctgaaatctcaaatgtaacaaacgaacacccaattggcaacggcgccaaattgataataggtttttagttcaattatcctaaaacaccaatcatatcgttgtagtattttaggttgttaatccaaatgggtgtgatgctaacaatcaagatgtgatccgaagtcactaagtcaagccaagcaataacaggttttggtgttttctagcagtcctaagtgaacatgcagaaacagaaaatcaaacagaaacaaataaacactcgaccaacacagctcgttgcagagcatatgggtgtggtcgagtgacaggtcgagtaacagacagaaaatgataacaatgagagtaaaaactcacgcgtta

SEQ ID NO: 32802 - DNA, 585 bp, Arabidopsis thaliana landsberg
  unsure (1)..(585): unsure at all n locations
caatcttcatgatgcttgaaaacttattaaacaaatttgcagacaagaaaaaacaaacatgcaaaaaagctgtaagttcatgcaaacagagtttctatatgctaggctgttgaatccacgaagcaaacagaaattaaatacttaactatagtttcaaaagaggaaggtatatccaatccatctggtagaatctgcttcaaaaggtggtctgcgaggaaagaacagtatcagaaggatttatatcacataaacagaataaggacctatataaacaattatcaaggtaaatagaacaaaacaaaaacacttaaaagacaatttacgaataacctatgagttggattccctcgcttaaggtattaaccagtataatggggctatcaaatgccagggtaccacaaaccaattgacgacggagacgaaggaacaagagttacaaggaaatgggaccaactnttctcatacaaatttataaagactctaaacaagcattagatgaaagatctcaggagaagattgtatcaaacagaccataaaggatagcatgcagaaacactagctcttctaaacgtcctggtaattcga

SEQ ID NO: 32803 - DNA, 2565 bp, Arabidopsis thaliana landsberg
gggtacccttatttccaatataaacgtcatgtttctgtagtgctctacaaatccaaatgatacattcactgaatatttagtctgttccatatttaaggcagcttaatgtctaaataaactttattcaagaatgatgcaccaagaatgtgtctagtcctctgtgacaaaacatacaactcacaatatcaggtgttcaaggagacattgcaaaacacaagctttgatccttattgagattcaggaatgaattttgggcaaaccaacattcaagaactcatcacgtgacacaaggagcaatccccgaaacgatccagacactaatttcattgattgacgactaaaggacataaatttaagaaaaaggatgaaactttaacccagatgtaatgtgccaaaaaagagagaaaccctttaaaaattggtacctgaaaaaaacaaatccaaagggatttcgtcggaagtagaagcatcctcgcttaaaagccgatcaattcgttctgaaacagacggtggaaccctaagtatgaactgttcttccattgtagataccaacagcttgacttgaattcttcttcttaatcaatccagaaacgtgaattcgcgaacgcagatcgtatcgaatacgtatacttcggtctgttgatgtcgtaagtcgaaaagagacgagaatctattgaactgaaacacgaattctttgttatgttagagagagagagagagagagagagagagagagagagagagagacattataagataaaccttctagaagtatccttttaacaatttattattttatttccctccctaaaaggtttcaagatttatgttttgaccaaaataattataaaaggtacaaacagaacccaacaattggtgaaaaatcaccaatatgctatttaattctattgaattttacatttttagttcctcttagataattgatctcactaagtataaatgtataatgataataaaaaggaagataataaaaaaaccagaaattggaatggagcatctatcaaatagaaaactttaaggggattttaatactttaaaataattttgagggggttaaatgtaaaacgtaaataatataaagaaaccctaataaataagtcgttcattgatcaatcttctccaattcttgcagcatcacttctccgtcgttcctcaccaccgagattcgttcaccggtaagtcttatccctgatattttgctcttcttcccaaccgtatatacccgtatcttcttctttctctgtcgaataaacttggcttttccgacttcgattccttcaattgtaaacaacttcgttgcccgtacaactttttgagtccggtgaaagatcccgtgacggaaaaaactgtagatcaggcaattattatgtctatacatcgatataaaggattgaatcgttcatcttaagtaagtttgacgaaagttgtgatcttttgtgcctattcacatataacgtttcttagctcctatcttttgaaattgagctgattcgatctctacctgaattgcatgtgatcttattttgatataatttactattcaattagaaaatatgatctttctagattgattgcttctttaaagttctcttagacgctggtgttatagctcttgtgtttgtggtctcttctctcttaaatatccaacctcttttggtgtattttctaatctagtttgtgttgactgactgatagagagattgaagcttgactcaatgaggggaaggagctacactccgtcaccacctaggggttatgggaggaggggtcgaagcccaagccctagaggccgatatggaggtcgtagcagggacctcccgaccagtcttttggttcgcaatctacgccatgattgcaggtacatacttttgacttctctattattttcttcagccattgtggatgatgttattgtttgcacacctcttaagcaagaagacttgacacctcttagcatattttggcatgatgttctcttatctttactgtaaaggttttcaaaaagttgacgtcaatgtatcttcatttcttggcttttagcaaattgtaattctcttcttactccttgtccttttcttcaggcaagaagatctcaggaagtcgtttgagcagtttggtcctgtcaaggacatttacctgccaagggattattataccgggtgagcatgttttgtaaataggacaaccaacacttgatttttacttatgttctgattagaaaatatccctattttcacatcttctttcttgatttgtttactacgtttatctgcctttcctttttctttcggtcatctctttgtgtcttctcatggatactagggccttatgagaatcttcttaaaaactgatttcataaattaaatttaggctccatatttttcagatagtaattttctgtgacatgacaatagacagtgagcatacttgtggtcttaaaccactagttttcggtgtcgttaggtggattagtcgtttagaatttagtacctggtgagacctcatcagtttttagtcgcttaaggaaaaggatacatgatgata

SEQ ID NO: 32804 - DNA, 719 bp, Arabidopsis thaliana landsberg
gcctcggcttttcaccgctggcattgcttccttctacgagggttactatgccaacaaaggaattaacattgtcaaaggcactgttgcatctggtttcactaccaactcaaatggagaggttagcaattagcatcaccgttcaaacttgacaaacagcagtttttctctccgctgcttcaacaatatctctctgttgcttaatgatgcaggtcactgaggtgaaattgaaagacggaagaacgttagaagctgatattgtgatagtgggtgtcggtggtagaccaattatatcactcttcaaagatcaagttgaagaagagaagggtggtttgaaggtttgtgacttgcatactccattttcttctgtatctgagatatagttcttattattattgtttactcatgagatctttctttgattgcagactgatgggttcttcaaaacaagccttccagatgtatacgccattggtgatgtagccaccttcccaatgaaactctacaatgaaatgagacgcgttgaacacgttgaccatgctcgcaaatccgctgaacaagccgtaaaggtaataattataatgcttcttcaacctgtcttaatgaaggagctgtataaaatcatcctaattgaatcgattgatataatgattttgtaggcaatcaaggcggctgagggagggaactcaattccgaatatgactatctttcatacttttact

SEQ ID NO: 32805 - DNA, 1133 bp, Arabidopsis thaliana landsberg
gaaactcgtaagctgagaaaggaacaggtgtcagataaaccagggtggagttctgtctgatgttatatatttgtgaaaagccgtgaggtgcagaggtcttgcttcgagttaatgatgaaggaacagttgcaacttgaaactgattagagattaaagttggaattgctttcactgtaggagacagctctaagaacaaaaaattatccctcttgaatggtcttttttcaatagtagatatttcgtaagatcattccagagaaaattcgtcgtaaaatagttactaatttccattttcttgggcggcagtaaagtcaaagataattcagtttttatctcttggctctgttccatcaatcttgatcatgaaataaacaaatcgttaatgtaatattaattggaacattcaaagttttgacttttgaccgaataataagacaatgccccttagtctctataaaacaatttgaacaatgaagcacaaaaatcataatccccaaagagattttaagaaaaaggtgtaagaaataaacaaccgagttttgagatatggaggagaagaagagcaaagtgatattacatgggacgtggataagcacatactcaaagagggtcgaaatcgctcttaaactcaagggtgtactctacgagtacctcgaagaagatcttcagaacaaaagtgaatcgctgattcaactcaacccggtgcacaagaagattcctgttcttgtccatgatgggaaaccagtggctgaatcacttgtgattcttgaatatatcgatgagacgtggacaaactctcctcgtttcttcccagaggatccttatgaaagggcccaggtccggttctgggtcagctacatcaaccaacagggtgtgttcccccaacctctcatctgaaatcaaccccatacattgatatgattagcagactattgactgtttcttgttgcaggtgtttgaggtcatgggtcaagtcatgtcccaggagggtgaagctcaagcaaagtctgtagaagaggcaagaaaaagattcaaagttcttgatgagggactcaagaagcatttcccgaataaaaacatcagaaggaatgatgatgttgggcttttggaaatcaccatcattgctactctcg

SEQ ID NO: 32806 - DNA, 851 bp, Arabidopsis thaliana landsberg
atgggtgcaacgtattcttacacgaaataaacgtaaattaaaataaattgtatacaaacaaatatcagagcccaatatatttacacaataatttatttcaatcattttatctcgtacataatgatatgtctataatttacatgttttcagtgttcattcatcatcgttttgagtctagtttcatcattcatcactgttttatatcatttctcatcattcttgcaaactttgtatgattaggttagctttgcatacatattgcatttttgagttattttcaggtgatttagagctgttggcgagcaaactcgaagaagtgagccggaactagaggacatactcgaccccaggtcgagtacatccagcaccatactcgaccccctggtcgagtgacattggagccattcttccatctactcgaccccctggtcgagtaacagcagctcaggccactcgatgacatcactcgaccccctggtcgagtatatccttcaccaatcatcgccatcactcgatcaagcactcgaccacatattcagagtcgactcaaatccgcactcaaccagacaagctgagaacaatgaagagaagaggagaagaagaagtgtttggaaacggcctggagctccatcggatcacgaagcccatctcggcccattatcactctatgggtcgggcgattaggttactagcccgtctattatcatttaatttcgttttgtataaataggtgtctgagagttttgtcctgaggcatctagtcgacattgattgatcatctttatatttttaatatgtctaatttaaaaccattttggtttcattcgccaactttatgataacgattttta

SEQ ID NO: 32807 - DNA, 273 bp, Arabidopsis thaliana landsberg
ataacaatcttctttcttccgttggattgtcgatttaaatatcttacagaaaaagacaaacaattttaaatttttacgcaaaatctattgcgtgtttatgaacaatgtacaaaacatcaccgaacactaaaccggtagcctaagggaaccgctagttgaaccaactgtaccgatatgatgaactgacgatgttccttcaccgtccttattattgacttcaactctcggcgaaggaaccggcgtcgtattcctccagagaaacgatgggtttct

SEQ ID NO: 32808 - DNA, 1128 bp, Arabidopsis thaliana landsberg
taaccgaaccagcaagttaagtcccatgctctccacgtgtgttgaagggaagacaagtacatttgtggcttgaggtcgcagggacaaaaccttcagagtggagagccttgagtccttgtaggatcatacgagtggcacgtctgacactatcttcaggcaatctccctccggcatcagagatcatcttgttgagattccctaaggaagcatactccatgtagatgtaacacaaactcatgcttttggtgttagtcgcaaagtgaagatgatcgcttgaagctcggacaatgaagggattgttgtggaaacgaagcatgatcctgagctccttctcgagattcttggactgttcgagagtacttgtcttcttgacgtatgatttccctaagtttgaatcactctggagagacacaaagccgaaggtacctaatttgccaagaacactgacagtctccaatgaagactcttttagatcttcgataatctccatagtgatgatgagacttggttgtctagaacacagactctccaatgaagacttcttttggttagcaaaacttgttctgtatttttttggttagaactctgtttcagattttgtggggttaattgttttgatcataaatatatattgttaattttagtataaacgtgttttataatattttggtaaaattactgtgtactttaatgatattaacacatacatgctgttcaatcatctaactaggaaaacttagttattaaaaaagtgcatagttaacaaatgtaatcaagatgatttaatgtattcttagaactcatttgttttttggttaattttgatataaagcatataaatgtgttaaatagtattttttttaaaaattaataatatgttggtaaattactttgtgtgtttaaagatagataaatgttgttcaaactaaatatttagttaatataaactaaacaaatctaaccatgaatatttaatgatttatgcctattatggattaatgatacatatgatgttgtaggaaaaacaagtataatgaagtttgtacagatttcagcaaaattttgcaaatcagtgaatttttttttctttcctagccacacacacacaccaaaaaggttaaccaacta

SEQ ID NO: 32809 - DNA, 491 bp, Arabidopsis thaliana landsberg
cttgttgatagcttttcttcttttcacacatcaatctaatcaccttttttggtcttattattagaaagaagatacggactaggtaaaaataggtggttgtaaacgtagacgcattaaaaaaatattgtttttttttttcttttgataagcaaaattggtggttggtctaagattataaacttgatattaatgcaaaggtcgatctagcaatagaagattaatcagtattcttggtgttttaacaacagattatttcatcattaaagtcgtgaaacaaataaattttggtagtatacattacgtgtagttttattagtttattaaaaaaaatagtatatagttttgttaaaacgcgatttatttagtaacacattagtatattacacgtttaaccaactaaacttttttttttgaataattatgtgctatattttttactcaaattatgcaaattttcgggatttcgagttaaaatttttgcgaaatttaca

SEQ ID NO: 32810 - DNA, 6428 bp, Arabidopsis thaliana landsberg
  unsure (1)..(6428): unsure at all n locations
aatgagaaaccccaaaaggccaaactctctctatccactatcctcatggctaataagatctaaagatttttgctttgtgagtttttaccactatatatgtataacagctgctaaaatccgtattatgtataatcaattgcttacttgatgggttcgccctgtcactggttcacatgagacgaggctatgagtcccatttgtatcgattctagtgaacttcgtgcatgcaggcttccccttcaccttcttatcgtcaccacttgaattggcgtcctgcataaaccatacacacattccaatatttttacttataagtgtctaatggaagattttatgctgtataactagaggcaaaatgtggctttacctctgctgtacttcttccttcgctgccattataatttatgttggcgtcgactatcatctgacacatcaaagtcatgcagctacatcaagtgaactccaaacaaaagtgttcttcatattataacgccctcaagataactggtagattttgaggttcagatattatgactggactcaaattacttttctaatgtggacttatatcactcgtgctactgtatgaagttggaaattagagacagttacaaaaatcatctagtaacatcaaaaggacttcaagcctcatcttctgggaacacgccaataacctttgcaatataacgtttcttcaccattccaccctcaatctgaaacaatcaagataagtagtaagtatgaaattttgatttaccagagcaaatagcatcttaggaataatggtatggccaagcaaaatgagaccaacttgttcgagtacctgttgcctgannnnnnnnnnnnnnnnnnnnnnnnnnnnnnnnnnaagcaatccagaaaccaaacggtctaatctgtgaatagctgtgaaatgatgcaaggataactcgtattgtattattttttaaacaaggaacattttgacaatttatccttgtctaatactattagctggatacgaaatagagttcctaggtcatgctcagcatcaaggatgccaacaatcgtgttcttacggtattgaccacatggatgcacctatacaatacgaaaacgcccgacattattaccaaagtatcaatcatacaccacaaaggcattaaacatataatgggaattgtttcacaatgcttcgaatagtactaacagaaagagaatcagattatttggtttatgctctgaacaaaaagtgtttcacattctccagagaccaaatagagtgaaaacaatccaacagaaagaatactcacaggaacagaagctggtttgcagacagtaacaacgtcaggttcttgatgaaggatcacaacatcatcaatcatcaccggtggttcatgcctgaaaccttctcacacatttagaatttggatagacattgaatgcaaaactgatttcaaatagcaaatgcaaccatctgaataaagttcagcttaagaacaacctgtggaggaagtgagtaatcttttgggatgatttcacaatgtatgaaaccggtacaatttctccatcaactttgattcttccagatttgactgcaccaacctacaatgttcaaacatatcaaaatcccaaaaacacagatttatcatcaaactaataattccttgagattagaggaagagcagtacataataatcacgaggccgtcctttaaattcatcagcaaacaaatccacaattgttttcccagtccatcgtttgttcacctacatcaatttcaatctccatgtgactctagtatgagcaaaaacaagggataatgaagaaagatggaagatacttacatgagaaatgaactcgaagtagtaaggtctcacatggcgtcttcctgcacaaacaaatcaagcgattaaaccagagcaattagttgaatgaagagagtgtggagattggaggattcgtttttacctccatggaagatgtagtcctgtttctgtgatagtttagaagatgactgtaaaagtagatcagtactcatggtgtttgaggtagtggcgaggnnnnnnnnnnnnnnnnnnnnnnnnnnnnnnnnnttgtcgtcttcttgctgctttcgtttcatgtttttagattaatcttagccggtggtcgctgtcaatctaaacttcaaacaaattcgtattggtttgggtttaccatgttttaagctacaccaaaccggacaattaatgtaatacgtttggtaatccggtttggttatgatcggttgatttggtatttggtttattgattacacgaggaaatgttatagaatttaaaacgaaatacatttggttcaattcgatttgggtagtagacagtttggtttggtttgggttttggattttaggattttggtaagtttggtttttgaataatctcgggttttttttttttcagtttgttcaattaatttcagtaattttgattgttctcatgacaactttctgatgctttaatcaaaatgagataattgtgactggcaagagtctgacaatgcggttgagcaaactagattctaacggacgaagaacgaaaaaaaaggagatgtgtgtataatttgcataacatacactagttacaatttgcataagtaatttatcaacatttaaatatccgtagaagattacattttcttcaccaaaattgtttttgaaaccgtataaccatctccatttactagatattgaaggagtgaaaatgtatttatataaatttatacctggttgaaaccgtatacacaactccatctcctaggtcacgaagacacgaaaccgagttttgtatagtgtgtgtttacattggttgtgaacagtggcggatccacgaaataatcttatatggggcacagttataaaaaatcaataaaaagacatcagcaagccttgaatttggattaatgtggggcaccatcaagtaaaaaaccactacactacatacatttttaattatataatgcaaacttatataagatttataaaattgaatatcgggcacatgtcccacccaagaccaacgtgggtccgcccttggttgtgaactgtgatgcgaggtaccttgtcggcttgtcgcaactatatagcttttaaaatatgacaactgagtcagaacatcaaatttgttgaagcaaacgtgctcgatgcttctttttacaaatgcatgggtcgacttcttgtcaaccctttttgcgttggatccttgaaagccaaatagtgcataccaagtatgttatcgtttcgaacgactagtaccaaatgccctgaccaaatgttatctacgtattcgattagctactatcacaagccacaacaatatcacaaatgtgcgtcccagaatttcacacatagccaacaatttgggtttcgacgaaaccagtcgcattttgttttgattggttctccctctgtcacccgcaaacgctgcatttgcgggtggtagcggttgttagcgtttgacaccaatcatagaaatcgctagataccgttttggaccgttcgaaatcgccagattttaaaagctccttcccgcaagcgtttgcggttgcgggcggtagcggttagattaattttttttttaattaattaaaataattatgtcttccacccaaaccctatatatcttattcttatcagaaaaccctaatcaatatattgaaaccctattctctcaattatggcatctacccaaactaacgaaaatcaaaatcaaaatcaagaatcaaacgtaagtatgatctatcctttcatccattcattaggtagtgtaattctctgagtattttatggcatcgtcattttttttattttgtatttttttgagttttttgattgaatacatgttttgatttgttttctcgattagaaaattatttggtcagacgagatgacccgtttcttgttagaactttatcatatgtatagaggcaatctggaaaacccacgagttcaacgttatttacagtttattacactacttgatgcaatttttggtgatgtaccaaatgcataaagtactaagatttttcttacaaaatttatttatttttgaatttaatgttttatttatggttttaattattaagcatgtttaattttctaatattatcaatttatcatagtaatatattgtattttttcttttaaaattaatatattatatttattttggntattttttatttaattactatcgcactcgctggtttaccagtcataaaactcccgcaaacgcacctattatcaaacgttcaaccagtcgttcaaaacgcttgataacgcttgaaactgcaaccgccagtttccgcaaacttccgcaaccataaccgcacccgctgcgtttcaacccgtcaggccctaaaagagttaatcactaggccgttaatccctatccgtaataccaaacactagagggatagaatagtaaatcgcatcgtgaccggtcataaaaagacacgtgtcgtcatcgctatccaaataattgacaaactcgaagcccgcaagggattgccgaagacacatgtcagtcagcgaaaggaggttaaacggtgtagttatcactccctaataagggtatctacgtcattgcaatgtcgttaagatctatataaacactactcttttgctagctcttatccgacggcaaaaggagaattaagatttttaactttaaacgagagtttcgtttatttactcaaaaatttacttctgaaatctctatttgaatttcggggaaaaaaatcctaagtaagggaatgcagagagatggtcggagtatcgccggtgaagactaagctgtgtgatcggtttaaccgatccgtcggcggcaggaattgccaccggaaacacgtcgaggacgggtgatccagttttctaaactctcgtctctcgaattcttcgaagatatcgaaaaactgtaaatcttttttttcttctacttttttacaaaattctctaatcatcgttgtaaagtaaaaaaccatggtcggagcaaaaccggtggagaatggatctgacggtggtagtagtacggggctgcttcacggccgttacgagctagggcgtcttctaggtcacggaacattcgcgaaggtgtaccacgctcgaaacatacaaaccggaaaaagcgtggcgatgaaagtcgtcggaaaagagaaagtggtgaaagttggtatggttgatcagatcaaacgagagatctctgtgatgaggatggtgaaacatccaaacatcgtcgagcttcacgaagtcatggcgagtaaatccaagatctatttcgccatggagcttgtacgaggcggtgagttattcgctaaggtggctaaaggaagactacgtgaagacgtagctcgtgtttatttccagcaattgatctcagccgttgatttctgtcatagccgtggtgtttatcaccgagatctgaaaccggagaatctcttgttagatgaagaaggtaatctcaaggtgactgattttggtctctctgctttcactgagcatttgaaacaagacggacttcttcatacaacttgtggaactccggcttatgttgcgccggaggttatattgaagaaaggatacgacggagctaaggcggatctgtggtcttgtggtgttatactttttgtgcttcttgctggttatttgccgtttcaagatgataatcttgtgaatatgtataggaagatttacagaggagatttcaaatgtcctggttggctttcttctgatgctagacggcttgtgactaagcttcttgatccgaatccgaatacgaggattactattgagaaggttatggattcgccttggttcaagaaacaagcaacgagatcaagaaacgaaccagtggctgccacaatcacaaccacggaagaggatgttgatttcttggtgcacaagtcgaaggaagagacggagacgttaaacgcgtttcatataatcgcgttatcggaagggtttgatttgtcgccgttgtttgaggagaagaagaaagaggagaaaagagagatgagattcgcgacgtctcggccagcgagtagcgtgatttcgagtttggaagaagcggcgagagttgggaataagtttgatgtgaggaagagtgagagtagagtaaggattgaaggtaaacagaatggtcggaaagggaaattggcggtggaagcggagatattcgcgggggctccgtcgtttgttgtcgtggaagtgaagaaagatcatggagattcgcttgagtacaacaacttctgcaggactgctcttacaccagctctcaaggacattttctggacctctacacctgcttgaatttgatgaattcttgcgtgtttcaaatttctatgttgcaatatatattgttggattctacattcgattcgtgattcttgttcttgattcttaatgtggtatcat

SEQ ID NO: 32811 - DNA, 1312 bp, Arabidopsis thaliana landsberg
tttttagtatttagagaatgttccccttttcgggactctacttcttatatttatagtcctagaaccgagctaacaataataaatggtcagcttgattccagccgcatatctcatcttcattattgctccgtcttcataatctcgctcttcacatcccgaaatcagctcccctcattcattactgattctgccgttacttcgatcgaaggatctctaattcaaacccacattttgggccaccttcttcttaacgggcctcttacttttcatgggaagcccaaaacgtgcctaggcccttaagatgaccgttgaaattctactccaacagtttgccccccaagtacttcggcgctcgttactttggagcacttaagatgaccgttgaaattcctcgtatcaaaacaaatgattgcgaacccttgatccctgagatttctttccttggaaagtgtgcaaatgattttacatcctagggtttctcgttttacctcttcttcacactcaattattacctatataaacgcgggacatgcccttataattcttcgcctttatgtactctttcaaaccgttctctttagaaggtaaaccctccagctttatgttcttcatttgctttttcttgcttgatttttggtttaggatagaacctagatcggccgtttagcttaggtatcggaacaatcgaacggaatcctcaatgatttcactaggttttgatcgttgtttggagattagcaacgtgttcagccgttctcgcctcagattctggcgaactttgtgctgccgatcaacctagattaaccgcaactactccgtgtttatcgactgaatccaaaatgtccctctaaatctcctttagatcaaaaattggatttgaatataaacagtaattgttatggctccgagacgaactaacgaggaggaggttttcatagaggggaagtttggtaaatacgcgaagtcaatccttacgtcgagaaaattccttttagtgagagggggatgcgagatccctaaagacgttacgttggtacccatgaagacaaaagagactccagaaactcctccttcagggcactaattcgcctttgaaatcttcttttcggagtgcggactgtactttccccttccagaaatcttcatcgagctaatgcacgaactcggagtagccctcccccagctatgcccaaacgtaattcgaacagtgttatgcctccagactgttgcacacttttgctcaacactttggtgcgttctacaacggtccgttcgcttgggactcattcagctttcagagaatccgccatgt

SEQ ID NO: 32812 - DNA, 1855 bp, Arabidopsis thaliana landsberg
attatggttatttgaaattgaaggaccaaatatttggttttgaagaataattaaacaatggtcaacaacggtctcaccacatgataatattaaagaatatctcgtagtacttgaccaaaaaaaataaaaatagcttaaatgtatttagttgaatcggtacttggtattgccgtgtgtgggaaagaaatgttgtcaatgctaaataaatttgccgtgtgaaaaattcaatcaatatgaactctagaacccataatggtagaaagtcttcgactcttggcagagaacaaaacaactattgaaattgtcttcaagataacagcattatcgaaaacttttcaactgtagatctagtatcatccaaaggatatgatgctacataggtcttctagttcgaatcacaaagcttgctccaaatcacaaacttacgcatctcagtctccaacttagcggattaacaaaaacttaatttataggtcaaatatcaatttgcaattaaatgaaaacatatttgatctcttccaaatttgagttaattttgatttcccattataacatttagacattaatgagggctggacaaaatattcgttcgatccgcttcgattcggtattcgatttgatttgattcgaaaaattcgaatatccgtaagattttggaccaaatcaaataggaaaatgtagtattcgtaaaaaccgaagcaaataacaaatagtgtttttaaaataatcgaatatccgcttcgatccgtatctatcgatatatatttaaatatatagttatatctatatatagatatcataaatagttcatgtattgttgctatcttatgtttttatgttaaaatatttatttgatcatttttctctcatgttatatcttgatcaataacattttaaactatcgggttttagtttttggaattagtttgataacattttgttgaccggtgataataacaacggttatgtttggtatttggaacttactttgtaagcatgttagataataactttaaatatattatatggttatatagtttacaaattttcttcaatatttaagtgtatcaaagcggatattcgcaaatatcacaaaaaattccggatattcgaaattccggatatccggaaatttttgaagcaaagcaaatcacaaaatcaagtattcgtttaaaacgaatcgaataacaaatatcacaatttttccggatatccgcttcgtgcccaggcctacttttttaaaaatatagtcaatgcatttaattgggagagaaaaacgaaaaaaacagtagttaatttgttataacttaacctaataaggtatcgacaaaaaaaactgacctaataagctcattttgaagtgcaccgtcttgattggttcttctatgggaagttgcaccaaaccctgtggtaactccataactgtccgttcctcggttcatgctctccatcacccattcgctactcgccttgactccggcacgagcctcctccgctagctccaccgtagatcctcctcctcctctagccacggcggctacttgaccaatcgtcaaagtctcacctcctaacttcaccgcctctttcctatactctttcaccattcgtttcacctcatccaggtggctccctttcaaagcttcggccgtcgcgttccagttcaacggatcgcccgagacggcggtgatgtgattgttttgattgcatagctccatgcgcgccgactcggttaaagaaaccggtttttttttatccgacccggttttcaaaacgatatatacggtcgtcttaacttcttttctctatatgcgatgatgttattatacaaaacaaaacactacaaatgtgtgtatgt

SEQ ID NO: 32813 - DNA, 1003 bp, Arabidopsis thaliana landsberg
gcataatatgagctaagggattggatttacgactttaagattgcctagagatggacaaagagaagttgattatagatatgggctctaatagataatgtaatggattacaccttttagacttaggcttcaaaaaaaattaatgagccaacattaaataagcccaccagttataaccctaaaatcactttggctggcaaaagagctttgcagccatcgtacggagatgatagaaaatattgtggtgcagcacacatctctggcgaagctagggttcgtgtttggtggttttggacaagattcgaggcaggggagaagaaccagagataattggtcgatatgagagcaagttgaggacgagagatggagatcgccgaacaccattgtctccttttgagactagttattgataatctcagatgctttagtttcaagaaggtttgaaagggattcaaaaagagaaaaagatttgttatcaaaaaaaaataagaagataggagatctagagagctgaaaaaagcaaaattttcaacgtaggtggagctttgactcaccgacgtcaaaaactatgatcggaaggaaattctcaatactagtatttaggagaaaagaggagagatataccttatctaatttaaatattatatatactgacctataattcataaattgaatgataaatataagccattataattaaatgattcagtatcatttttttaaaggtcaactaaatatactgtaaaaaaacataacgtcaatctaacatggaaatattgtgtatatatatatgtagacgttcattactagtaataaattacctgagtattgagatatatggagtatcaatttatttttatttttcttttgtgtatttatttttataagagatatatttatattataaggtaatacaaatatatttatataaatagaatagtagtagtagtacatataaaacatttctggcaaacttatgtaacatagctatatagtatgcagaagt

SEQ ID NO: 32814 - DNA, 804 bp, Arabidopsis thaliana landsberg
  unsure (1)..(804): unsure at all n locations
tctgatgacattggcatatttaggattctctgttttgtgcatttggattgacctgatattcaatttctgtattttctaggaagcagttgagacaatgtctgcatgctctgccatggcattgcaaaagtcaagtggaaataaggaagaagagtctttgtcaccaaatagtgaatgggctaagtggaaacgtggaggcatagttggagcggctgctttaacagggggtacattgatggccatcactggtggtatgatgtcttctaactgttaatatctcttccaacgtttagaaaattaagagtatgtgtttggaaaatgctaattcttaatctgttttgattacatattatgtgaaacaggattggctgctccagcaatagctgcagggttcggtgcattggctccaactctaggcacaatagttccggtaattggagccagtgggtttgctgcagctgctgaggctgccggaactgttgctggttctgttgctgttgcagcatcttttggaggtaaataaaaagtagaatcagttttagattcctttaagaaataaaatgaatcaaagtgatgataattgtatagttcttagtcttctgttttgtttctacatgtgttcatgaatagctgctggagctgggctcactgggacgaagatggctaggagaactggtgacattgaagagtttgaattcaaagctattggagaaaatcataatcaaggagttagttntaaattcctgctgcttcatgtngaaatctctttgctctgcattganctctttggtctttctttatttttct

SEQ ID NO: 32815 - DNA, 470 bp, Arabidopsis thaliana landsberg
gggggcggggcaaggccgagcagacagggcggagcgagcagccaggcaaagcccggaaacgaacgagaccgcagccagcaaactagcgacgaggaggcagccccacacggccggcagccaagagggacaacggccggcaaggccaaggaaagccgaggcaacaacaggacagggaagcccaaaaaggaacagggccgcacgcgcgcaacactgatgaatgcaacgagggcacaccgtggccgacaggcccgggaaaacaccgaaaggacaccgagatggggacagaccagggcaagggacgggctgcaacgaagaagacccaggaagcgcgaggcaacagcacgccgaagacaacggccccgcccgaagaacacaccgcccgaggcacctaccgaaggaatgacccggggaagcgctcggaccgcggcgaccagggaggaacgccgcccgcgacgacgcgagaaggccac

SEQ ID NO: 32816 - DNA, 1952 bp, Arabidopsis thaliana landsberg
tttttttggttgatgatcacaatggagcagcttgtttactacttttataaaacataagacatttattttttcattcttattttttggttttttccccagattatttgcttatttaagaaaatgttttaggagagtctcagaccaaggtgacgtttaaatttggcggattattcaaccactatacagactagacatctagtaagcggaatgttattcaagtaccgtgaacacacaaaaaatttaaaaactcactatatattttgttaataaaattttacattgcattgaatagagacttttgacaccaatatcaccacttactaattactatactatgcttgaggccgagaaaggttcaacacgggggcgtgtctctttgcggcgtccaatcaagaggataaaaaaatgggggcaaacacagccttgaaaattataatgtgagggtcagatttgggaaatttggttttgtagtatcgttggacattttgaaggtttgagtggttttttagacacatccacttatgtattaaatgaatattttaaataaattgtaacttgtagttttatttatatggatgtttaagtaaacgatgtcacactgatatggatagtctggatagagagaaaacttttctattatatatagattttggctttggatcaaataacatttgagcatttgagaataacagttaccgattttattaaatacttattggagtgaggagaagacattatgaacatcaaattagccagaaaaacaccaaaagggttatcaagttataaacatcaaaattcacacagaaagaaaactccttttctctatacacttctcttaaacttttatccccaaaagctcagccatttcgcaaccaaacccaccactattgctgaattggctcgccaatgaccaagccactgtcacagacacagcagcttctgacacagttacttcggttgcagaggattcaaacatattaggttggtggtgatgaaggtgtttcgtgtagtgaagctctatttgaagacggtgatgcaaagatgaaaccagtcctttcttcatatcagctttcacttgctgtattggaatcgctgcgagaaagctctttatatactctctacatgactctttacctctacacactacttcttcttctccttgttcttctgattcttttgatctttcgggttgctcagacttgttcttaccaccttgtttctggtttcccatgtcggctttgttgtctttgatgacggatggtaatcttttgatctctacatcttggtcaaatttcaagacatacgcttggttgcaaccctcatagagcctctctccaagcgtgtctatgatgtaataagcatcgtggttcacaaggagtacaaagaaatgatcattccagcttacaatgtagatcacaggttcgcttgccgactcttctggttcttgtttcatgatctcttcccagatactgtcaaaggacattacacctttgagaaaatctagactagcatcttcttttccttcttcttcctctgatttctctggatggaaaaacccgatgaatgatctttcagggactacacagatgggtctgacttttgcctggagaaccgtctcgagatcgaaatgtttgtctggaaaccgttcccggtattcctcgttttcacacatatttctccactcggatgatccttctctgataagactgtcaaactctgaccttgttgggattatgtctctgttggatcctaaccaatgtgccatcactgcaactagagctgtgcaggcgctttctccagcagctctctcgcttctctgatcaattgatgcgagaaatactcgagccgtgagtttcatcagcccatcacggcttataatttctttggtctcccagctaccaacaacgaaatcatcatctccaaactgggataatggtttcatgattgcatca

SEQ ID NO: 32817 - DNA, 1032 bp, Arabidopsis thaliana landsberg
gactctccctcctcttcgctctgcctatgtgaagaagccggaagactacctagcacatctattaggacttggtgagaaatcacatcgattttatcttttgtataaagttttattaagtgtgcttgtgcatgtccatattgaaggatgttgtttatcacattgtgttttttagagggtagaggaagtctgcattcattcctcaaagccaagggttgggcaacctcactgtctgctggtgttggggatgatggaatcaaccgctcgtctctagcatatgtgttcggcatgtccatacatctcactgactctggtttagagaaggtatcttgtcacatacttatttatacttaatttcccctaagtaagttggacgcaggggataattaatcattttcaattgtagatataaccctttgtctctgaattttgaagtaatatatttacttgtttcttattttggttgataagctgatatagcctgttactagctgcatatacagtagtcttgttcttgccatatttgcttttgttatgttactatgtcccatgttgaccctatggcaacttttgttgccaaatttatatcatcagtggttgcatctatcaatatctcaagatagtgcgtgatgtgtcaccacaagaatggatattcaaggaactccaagatattgggatcatggtcttcagatttgttgaggaccagccggcagatgattatgctgatgagctctcaggtttgtgcttagatatagttattgtctatcaacttaatatgtaggcatgtagagcctatatacttttagtacttatcatgcattaatgtctacatgtgacgtaaccactgcaacatgggtttcttagttaatcattaaaagtgttagttggacatggaacatgcgtgcttatccagtgaagcacgttatttatggtgattatgtgcaccaccacatggggtccaaaattgatagaagatctaaagggttttttcacacctcagaacattaagatcgatgttgttgcgaaatccatcaa

SEQ ID NO: 32818 - DNA, 2407 bp, Arabidopsis thaliana landsberg
  unsure (1)..(2407): unsure at all n locations
aaccggcacaaaaaccactagactggaacactcgtattaagattgctttaggagcagcaaaaggaattgagtatttccatgatgaggctgatcctccagtgatttaccgggatcttaaatcgtcaaatatattacttgacccagaatacgttgcgaaattattggatttcggtttagcaaagctaggtcctgttggagacacactacatgtgtcttcccgagttatgggaacttatggttattgtgctcctgaatatcaaagaactggctatctaacaaataaatcagatgtctacagctttggagttgtgttgttggaacttatatccggaagacgagctattgatggcgatagaccacctgaagaacaaaacttgatctcttgggtactttatcaagcaagagtcttgttaacatatttttgttgttgcttgagaagaaagaaaccgattaaagtcttttttttttttggnnnnnnnnnnnnnnnnnnaaagatagaaggatgtttgcgcagattgtggatccaaatctagaagggaattacccagtaaaagggttgcatcaagctctagcgattgcagcgatgtgtttgcaagaagaagcagagactaggccattgatgggagatgtggtcacagcacttgagttcttggctaagcctatagaggtggttgataacactaacactactcctgcctctcctactcagacatcatcatctgattcatcaaactaatttattttctttttcatccttttaaatcattaagtttttttttttcttttaacgtaaaacccaagaaaagtaattagggttagagttcgaagtcaatcggatgcaaacagttctttgtaatatggtgtaatttggcattggggagatcgcatcatctgtgaatcacattattaatctcttttgttgatatgttaaatcttgatctcttttatttacatttcaggattttgaaacctttgatggtttgatggttttggaggaagcactggattgttgataaaaccttgtcgatacagagtttcgatttctcaaaagagacatttgagaccttgttggagtcttttcatcactcatccatcgggatccagtggaaagattctctttctttaggggttttcagaggagatcgactttcgttgttacataagtcccgagtaacaagtaagatacacttgtgggtgatgaagaagcattggagtaggttaatgacagttggtctacctgaatttcccaagtttccaatatattcaagtcacttcattgagaatcatggtaagattctgctatatattcgtcactttgtaactaggtcaattagcatctacgttgtgggagagacataagaatgcccgaaagttgaatgttactcttctatggagtcttcaattggtggtcctggttgctactatatatgtcccaagcttacttccggttccaggcttttctaggtaattaagaggaagaagaataagcgtgctccgatccattgctacgagttaaatggttacctcctttcatgagttataatggtctttactttccaacactataaacatagtgggataacttcataagagtttgaatctggttcgaaaaaagtgggaaacaatatttatgcatacaaatatggttctttattttgatttttttctatgttcatattattgcttcggcggatctgaactcaatgccaatgagcaaatgatcactcgctgtcggtgtctcgtaatataagatcatgatttgatattcgaggtctttatgcatccgtggttccttattccccaagcttaatctctttattgcataaattgtatacgttctcgtcatatattccacttatttacttggtatagttatttctggatatgacaaaaagtaaactctacattaatattttggagagattttgaataagtatgggaaaatacaagagaagaatctttaacaaaaaaaaatacaagggaaggaatgttgtttaaaaagagttgtttcatagatgaaaagtgcttttctcttatcttaagaaaccatctgaattataacttctacatatataaacgccatgtatcactgctagtgaggtctccggcgtttactcggagaatggcgaggtgagcgtaaacaatgggaggtaccatcctaaaggggtatgcagcatctttgtagctatagatcatgatattgaactttgagagaatagcatccccaccagcatcttctggcttcatggacgtctgaagataagggaactcgaagacttttcttgctcgaatgtttgatgcaacatgtatactagtaaaaataataacgacccaacccaccgtcaacaactagatcgaacaaggcaaaacaagtcaaaacaaaaagtacaacagaggagagcaatta

SEQ ID NO: 32819 - DNA, 2640 bp, Arabidopsis thaliana landsberg
cacccaataacttgtacttgacccgacacacccgagggatcatcacaggagaactatgcttctgatcttggtttgttaagtttggtttgggagttacccgttcttgaattatgtctaaaagcttgtcttcctttcttgggtgcttctgactcaaccaactccttgagcttctctagagctgaaatgagaaatgacttcatcatcatcattaccaaaatatagttaacagattcaatggcctctaatgtctcctatgcactgacagggttccataaaactctaaatctacattcgtaaagtaatgctctaaatctaaattcacatgctcattaagaggtttaacaactaagcagcagtgctgattctcaattccacattactcccctatttttcatgtctatctgcagagtgtttcctagagctatatacacaaggctaggtacttaccgggtgtgtaagtggcacgaatggaatctaatgaagtaggcgggatcggatagataggacatgaatcactcccaactttcttcaggagcttcgagaaacgccttacctgaaatttttatatatccgaatgagcaaatggagctagagtcaagagcttcagtatataaaaagtcgcagaggatcagatagagggtgggttccagcagtcttcctatacatttatcctaagagattaatgattcagtgaggtgagcacaagattatgaaactgaatcttcttccctgtttcagacacaatgctttacctagtatcttttatctgaggtacctcaagcttgtgtttacacatacgtggacaagcatatagagaacgtggacaagcatatagagaaagaatgtttctgtgtttgtgtagtacataatatcagtttacctcatgattactcagcaatgtgaagcagcggccagcctggcctgctctagctgtccgtccagcacgatggatgaaggtctttgcaaatggtggcatatcataattaataacatttgttacccctttaacatccattccacgtgttagagcatcagatgcaacaagaacttggatatcaccttttctaaacgcttttagttctttgctgcaggcaaattttgttcaataaatgagaagaattcgttagttctgggttccaaagatagtatacggtgctactaagtaatgcaagattcgaatattacctccgaagtgattggttaagaccacctgaatactcttttgcttttatttttgggtcaccaaaaaagttgagtaacttgcatagacgacgagttgtctcaacggaagatgtgaaaatgatacacttttcaccttcccatgattttaggagagcaaccaaatatacaggcttcattccggtttcgcaaatctgttaaaagacatgggaagaaagttgtggagataagcttttgtagataaatcttctgttaaagcacaaacttgatgaaaaccgacacattaaaggcacatatataccagtctaagacattccaacttctcaggtagtctgtatcggcttcctccagttgtcatgaataacgggtgatgcaggtcaagctgaataagcttgcttggatcctgcgtcaatgtagctgatagtaccattttcaccagccttgggtatggtttacccttgaatcctctctccacacttctgagattttaaagcagacatcacattagttctttttaatcagttttgattacaacgtttaacatgatcatgttattatgtgactactattagcatacgaaaagaaataagctagtaacacggaactcactgtctacgaacagtctgcagagaaccaaaagcggaaggaacaaatggtgtaaatgaaggaaataggctatcgtcagatgtctgagtcagttgcagaacagttggtagccaggattgatatgcctccctaagcaatctgtcggtttcatcaacaacctgaaacaattagcttcatcgatcaaacggaaactaagaacaagaagaactgagaaggcaaatcaggaaattctgcatacaaggtaacgcaaatgctcaagcgtaaagcccttggtgttgttgatatgatccatcagccttcctggtgttgctactaatatgtccacagcactttcaaggttttgagaaagatcatcgggatcatagcatattcccgcatcaagtttaggtgtcttgataagctgtgagatttcaccagctatagaagattgacccacagctgagccaacagataatcctacagctggagctatagcatcaaatacatctttaacctaaacttagaaatgtgaaaacggaagacttgagtacagtacaccatatgcttgcgatatagacaaaaaagcataagtgagaacctacctgcaaggctaaatcacgtgttggcaatacgactaaagcacgaaggcatctcacaggacgagatgcaaggagctgcacaattggtaaagcataagaaagagtctttccacttcctgttggagagttaacacagatgtctctttcaaaaccacctggccctatagtttcatgccaaactgcgacttgcactggaaataatgaagatatgcccatgttctccaatgccatcgtcagccaatcacatcaaaacttgaaaaatgaggcattcatcacg

SEQ ID NO: 32820 - DNA, 247 bp, Arabidopsis thaliana landsberg
agaaaaccagcacacaaacaaaggaagggcaaaggacgaaccaacaaaaaagcggacacaacaaaaaaaacccgcaaaccacgaccaaaggacccggacaaaaagggcagccaccaaccagaagcgaaaaaacgacgcaaaacgcgccacacacccagacacccagaccaaaacaagaggacagagagacggccgagcggaagaaggcgcaacaccggaacaggaaccgaaacgacggcaaccgagg

SEQ ID NO: 32821 - DNA, 557 bp, Arabidopsis thaliana landsberg
caagcagattgaagatgctgaagctgatgaaatgacgagcctactaccaagtcttgagatgggttgttttagtgtcatataactttaccttcttttatcatggttcatgtttttgtctactagtaaagaaaagagaagaacattcatattcagaggaaatctatcataataagtctcgacacattttttgttttcaacattactggtttcttctcgaagcattgtcccctttggaaagaaggtcttttgggttattttgcatcatgtgttgtattgggcttgcaattaccgtttaggcgcgcttcgacgttattctgatgtcataattgaagtttcacacttctgcacaaaagatacgagataaaaatttgacgaaaagataacggatccataatttcctgccaaaaattttagtattcagatttaactccaattgtgtaaccagtgagaagttttccctgagctttgccattagatctaaatctcgatgtaactgtgatcggggcgagtacctcacaagtttacaagatccgaccatctacttatggtgccaggcc

SEQ ID NO: 32822 - DNA, 3763 bp, Arabidopsis thaliana landsberg
cacctacaaaatcacaaacacataaaaattaagctaatcaaagcataaagattgaaaatttcattaagaaaaaagaggggactgggagactaaccgaagagaaaaccatctccaagttttcaactttctgattatactcatctttagacaagaaccctaatttactaaaccctaaaaacccagatttcaaagaatcccacgacccatttcccttaaatttctcaacttttctctttctttcaacttttttctcacaccgatgcacataaaccctattactacgttctctacaagtcaatcttgacccgacccgtatcggatctctgaagaagagacggtgctccaagacttgtgggtacacttgaatcttcgttaaagtagtcattgctatggaagaagagtgagataatgataagctttgaaactcatacaaaaagataacttagaaaacaagataaaggaaggagcttttttagggacccaaaagatagattgttagatatttttcagcttcggattcgtcgaagacgttaaatagagtgatcggaggaagaagaaggagattaggacgaagaaagaaagaggtgagggaaagaaagaaggaagagaagtgtgatggccacacgttacagcaacctcatctcgttagcctaacattgacacgtgtcattttgtgtttcttttgtcccttcgcatgttttcaagatatttttttctctctttgggagctactttagattttggttcacatgaacaaaattttgattcagttttgcttctagaaagccaaaatttgatttcaaattacattttactcagacttcgtcattacttatgtacttgagtaaattattgtagtatccattgtcacatttgagtagatgatagagattattgtcaaactaccacttacttatttatattattttagaataataaaaaattataaattaaaaatttaatatcaaacaaagaaaagttgataatgtttgtgtttatgataattttctcctttgtgtaaactttaagctttttgtctctaccaactcaataaatttatagtccctgtacaaattttaaaaattaatctttttctaaactataaaacaaaaatttggacccttttttatgctaattttttaaaaacacattaaaattgacattttcatactaaaaaaaaaaaaaattgtaggtcttttccatactaatcagatccttaaatttaccaaaaaaaatttggatctagaacaaatgcgcctcatgcacctccaaagagccggtctgctttacgtgagacccaaatatcagtaaacctattaaaagtccaacttccctaataacgaaaacctaaacgtgaaagtatgtggacgtggacgtatgtatataagcgtttatatatttttcctcagtagctgaattttatgtgttttgtatgctcgaaaacatggaaataaacaaatctaatcatgttatcatttagtcatgaagatcattgaacccctacgatcccttgaatgtctaacttttgtctcttattgatcacttactatttacttgcttcacttacttacaactgtgacacaataacaacccctcccccctcttttattgatttgtcctagttttactctcttctaacagacttgtttgaattacttctcttccaatggaattcgatccataaatactatgttgggtacaaagcaaaggtcccacatcgaaagtttagaaaaagagtttctattatataagccaagtccaactacaactagtatgaggtattttggaaagaaacccaataacaaatccttgcgggcttgaggatataagcctaaagaggacaatatcatactaaatggaagagttggaatgggcttagaaagcccattaaatggtatcagagcctaggttgaaaaagtggacttagggcttgggctatgatcggtgtgggaaaatctctcaaacatgacacgataagaatgtgcctcaagaaggaggcccaagttcgtggtctttggtttgaaggggagattgttgggtacaatcgatcttggcatgatcttagattgccgcaagcatgtgctttgcttgcttggccatatggctggctctggatgcaatctctacaactagtatgaggccttttgggaagaaacccaataacaaatccttgcgggcttgaggatataagcccaaagaggacaatatcatactaaatgggagttggaatgggcttagaaagcccattaaatggtatcagagcctagattgaaaaagtggaccttgggcttggactatgatcggtgtggaaaaatctctcaaacatgacacgataagaatgtgcctcaagaaggaggcccaagttcgtggtctttggtttaaaggggagattgttgggtacaaaccaaagatcccacatcggaagtttagaaaaagagtttctaacatataagccaagtccaactccaactagtatgaggccttttgggaaaaaaaaaccaataacaaatccttgcgaacttgagcatataagctcaaagaggacaatatcatactaaatgggagttggaatgggcttagaaagcccattatactacagtcgattaactgtgcacttccagtagtcgtgttgtcaaaatttgactaaagcaaaataaaacatgcatgttggtgtgtccttaccagatatgttacactcctatttccctttaaccatacatctaaccagtgtccctaaggcaagataatcactaatagcccacaacaatatagttctaagtgtgcaattctccttcatataagaatcataaacctctatacattctttccacaaaccatttagatcatctataataggtgcaagatacacatctatgttgttgtgtggtgcagttggtctagggaagagcatagtcatcatgatgttcccagccttcatacacatagtcggcaacatgttgtagttgactaacaacatcgatcatgtacaatacttttttctgcatagagaacgagttcatcctatctgtagaaaagtcgagtcgaaggttccttggtttagtagaatactttgaaaacttatcttttatttgagaccaagtcaatgaatcaactgggtgtcgcattggaccgtctacactagcattgttgaaatgccaacacaactcctaagcaatcctttttaatctaaatatcctcctaaatctatccttagatcgaaaaatacctctgaacctttgcgggaaccccttcttttcctctctagtatgcttatcttacttccatctcgaagcactatatcttgggcagctaacaaactcctcaaacatctttcgataaaggatgcaatcatgtgtaaatcaaatcataactaaaaccaaaaagcttcaagagcttcttcatctcatgaacagattttggaagaacattatccgcatgtaacatgtcgtgaaccaatttcatgaactgatcaaattagttcttggatataccacttttaacttttatgtggtagagagccatgattgtagacactttagtatagttgggacacgtcgagtagagtagagttcaacatccatcaacttctacctaaactcagattcttctttactttcatcatcatcaccctgatctccactttcagtctaaaaaagtggcgtttgatgagaaaaaggaaaagtgttaaaaaccattttttttccctcttatcatatgtattcaattacatggaaatcaaatgacatatatattaggaaaacaa

SEQ ID NO: 32823 - DNA, 518 bp, Arabidopsis thaliana landsberg
  unsure (1)..(518): unsure at all n locations
aaaaataaccggaaaaaacaccggctataacgacatttgttattagagaagctttttaatgtttttatacattatcaaatactatctggttataatggcttcttgcttcactctgttctctataaatactcgtttcaatctttcttttttcccactctacagaaaaaaacaactataacaaaatcggcgacgatgcctaacaaactcattttcttcttgattctcacatcagatcagtcatcatcttgataacacggcagggctctccccaaaagaaaaacaaatgttatgtcaaccaacgcgccacttgcaggcaccaacgccgtcgttgcacaccggactgtttctttcgtccttactttccggcggagcgacatcaagagttccaaaactntcatcgtctacattccaatacccgtctccaaaaacagctcaaagaattaggattgcctccggaggaacaaagagaagcaatgagctcgatcatatacgaatccaacatacgctctcaattcccc

SEQ ID NO: 32824 - DNA, 1001 bp, Arabidopsis thaliana landsberg
tagaatgttcctttgcttgggctaagaaatcccattttccaagttgtctctgcaccaaatattaaatttctttacaaattttggagaaagagggaagttaaacaatcccaaagggtaatcatgtgttcagtttcaaatttacctcaacgtttccaacaactccagctttttctagagattctgttgacgcaacttcttctacagattcatcaaactcccaaccaccctggcattattaaaatcaattacagggtaaattagctaaaacctataagactaatattataaacgaatagctatgatttattagctgttcttgttaggagtcacagtttgtatgccttcgggaacatcagagcgtgacccttttgtgatgaaataacaagaacctcaaattcgtcgctaattgtgccatcactcgaaatcttgagtctgtatggaatacacctgcaaattttaaactcacacaaagtcaactcttagaatggtgattagtggaaaaagatatagatgaaacatacccgacgacttgacgccgtcccttgttgtatctttgggattgacgacccgtacgggagaccaaacacaccatgctactagaaaaacagagttcttgaagaatctgaatctaatttttgactgtataaaagaagagagatcgatgacggttttgctttggcggctaaagggaaggaggatctgaagagtgtaatgaatgtttttgcaggttagagatcgaagttaagaattgtttgataatagttataagcaaagattggataggagttatgaagttatgatggggtgagtgaacaaaagatttgagataagacaaaaagcgttgtcttttgcctccttgcggcttatcctttttatagaaaaacgacatacattttctaaactcttttttgctctttatatttttattttttcctatcaacttttgaaaataaatcattaatagcggttaatttaaaatctaaaaaaaaaaggaccattag

SEQ ID NO: 32825 - DNA, 1074 bp, Arabidopsis thaliana landsberg
agaattacttttcttcgtctcttggaaccgttaacatcggcaacagaaaaagtgtaataaaaaaaactgttttcttttcgttcggatgctgagatttgttttgcaaatttagaactagctaagttgggtcaaaagtataggttacacgtaaaaagttacagcaatttcttccctaataactttgggctttaggcccaataacagaaggccttaaagtggcatacttagggtttagtgaaaaagcaatcgtcatccttgactcaggggtcaggtcaaatccagaagaagaagaggtaatcattctacacagatagaaacatttattttttgtttaatttaaagtttacattttgttgtgacatttctcgtgttttcttaatatagatggcaagactgataatcgtgccagaatccgtcttattaatcaagacaagaacaaatacaacactccaaagtatcggtttgttgttagatttgtatccttttaattagttcatcacattcccagttgttagtggtgtctgtttacattcttcctatcgagttttgtttggccttgaatgtgaggaaagataacttgattgaccgtattcgtacacttcactcagctgctgaagccatatcaatgaagttgacgacgagtgaaaacgtttcttctctttaaaaaactgtatttccatccagttttgatcttactttcgtggctttgaatttttacttttcatatagcatcgttatattactctttacctaatttccctactgtacttgtgaattttcccgtcgacgtatgtgcaagttactaattttatgcaagttgtgaatttgcaagcgttttaatttctaaacgaaagaatactaatcagaaacttagaaaatttgacaagattaactaaacattgtatatgtctatcgaccactactacattatttcaatgtgtaagcatatttttttatcatttaaaatgaaaaacagaatggacaatgataaatcaacgaacgacaaaagcagaagtgtgtggtatttctatttatcagcacaaatagaaaacaatgataaaatacaaaagtggt

SEQ ID NO: 32826 - DNA, 1659 bp, Arabidopsis thaliana landsberg
aagagatagtttcattaaatatcataaggacacgcctttcttacaatgaattgcttatggatcatcacagtaaataaacaggttctgcaattcatgccttgatgtatgacacgactaaatctaaacaatcagatggatcaaacaaacaacagaaacgattcacttcaaacagcttacacatcctaggattctagctaaagttaaaacttggaaatctggtgaaggaagacataatgcttatgcacattttccgaagtttttaacataacctacgtcagtaaaatactcacatctgggaaaacatctatgaagtgagacaatgtatagagttagattaccaagttcaatgatttgctgggtaaggaagccagatccagaatcagggtctcttgcgaagaaggggattaaaaaagaatagcgatgaaattctccgctataactctcagtctctggtgtatcatgatccttgtaccagatacaccaaataaaggaggtaatggtagacaatcatgttggtgagtctaatttctgcaacccatcatctgcttctcttttattttcatactttgatctccaagcaccaagagtcttgaaatcccacacagcctctgagatctcatcctggggcaaggttagaccctcgcgttttattgacctatgcaacccacagaagaatttagggtcttgtagcctgatgtactcctgcaaaacttgctcatgatttgggatccagttccttgggaatggagtataatcacaagacggaatcaaagacatgcgagagaattgaactccttctatagcatcaacgagtcccattctcagaagatcagagtattcaggtgcagaattattgctactctcgcttaatggatggctaagatcccgtgaggcaatgctgtacactttggcacgagatttaagtctataccttgcagcgtacaatttagccaaagagcttctaattacataagcacagaatccaacagccttcttgcgattgtctgcatatttgtaccaatcagccattgtttcaagaaacttattcatctgagagttactatgagactggcttgaataaagcattgggttgcaaggtaaaggctcgggatctttgtcacctttaacaaaagcaagccgcctaaattggcggatacattgttctaaactagcagacacagatagcaaagttcccacaccctttttgctcacaatgctgcctccacttcctgtataacggagagtagggtaaataactcttcggcaaattatgtggtcaagaaactgaatacctctacttatatgttcaatctctaactttgaattatccaatctcacaccaaaaactctatcgcaaaaatcaattatttccttccgcatctttactgcatcctctctaggccctctaatgccaatcagaaaatgtcccccatacctaatgtaatccattttcctagttttctccttcccactagatggaacaaactccggccaggctggattatggcaaccatcttcaatagattccttccatattgaatcatctttacaaggactaaaatactcaactatcttcgcttccataaatcgatccaactcattaagacatacattagcaagcaaaggactcaatacgccacagtagccataagaaggcac

SEQ ID NO: 32827 - DNA, 425 bp, Arabidopsis thaliana landsberg
  unsure (1)..(425): unsure at all n locations
accactgaggataagaaattatctcgacaagtttccaagctgtctagtggcctacactttgttctgctagttgaaaaaatggtttagtcgacggttaatagcataaataaagagtggtgaaaaatacagtttagagatttatcatctgattctatgttgcgtgttttatcttggtaataaactttggactaggaaggaacgtaggtgtctctgttccgttattggctcctttggttatttacttacttcctctgtnttgggtggaaatatncattacctttgccctttggggttttattcgcatgcattgtagttacccacatagcatagactaactatcttttgttgagcttttatcgttatgtgcaacgaatgagtttattttggtgtttatggttgttggttttggcattcatattcttgcg

SEQ ID NO: 32828 - DNA, 1468 bp, Arabidopsis thaliana landsberg
gagttccaaaagaaatatacaaatgtcaaatagtgttattcatttatttttattttttttctacgagaaatgataagatttgtaaaacttcacctagaagatggtgaaatgtataagagcatttccaactataacaccattttggtgttgaaataacaatatgtgtaatgtaaatttagcactaaagctttattcttcttcaaccacaacacaaaatatcacactaaaaatactattctcactattatattgttaaattgaacattttcttagttaatattttaaaattattaattaatgtaaaattataatccaaaaatttacatactaaaaataaattacatcatactaattctaacgacaacaaatgttcaattaacatttcaaaattcaatatgagcttctcgatcttaatttgtctatgtcgagctaaaatgttttgaaattgagcatcatcatcacccgtcatctcaacttcttcaattggaacttcaacccgttcttcaattggtgcatcaatatcacgctcatcttccatgatcatattatgcattatgatagaagatgtcattataccacgtaatactgttttatttcataagcgtgatggtctcgccatgattgcaaacctggactgcaaaacttcgaatgcaggttccacatcttttctaaagtttcttgttttatggcaaataatttctttttaggaccacatggatcatgaattgtttgaacaagagtggaccattttggatatataccatcaactaggtaataacccatattatagggttttccattgataacataactagcgggtggagcagtaccttcagctagattagcaaaaagatgagatgcctctagtacattaatatcattactagatcctagtaacccaaaatatgcatgtcaaatccacagatcataataatgagctacatcctctagaataatagtaggagatgtactacgactagcatattgtcctctccaagttgttgggcagtttttccatttccaatgcatacaatctaaactatccaacatacctggaaatcctcgggattcgccaatgtggagtaggcgtgcaacatcattagcgtcaggtgatcgaagataacgacatgcaaacacctcaataatggcacgacaaaataagaagaagatgaagaagaagaagatgaagaagaagaagatgaagaagacgaagaagaagatgaagaagaagatgaactactgtagttaaaactcatcttttatgagaagaaatagaagaagatagtgatattccttttagttctaaacatattgcctattatatagaagagcatggaattgtgatattcatcttatcaggaaaagataaattgatcttaaccgttgaacttttttgaccaagatctaacagatagaactgtttagtcatttcatgtcttctatcaatggtcacctcatgagaagaaga

SEQ ID NO: 32829 - DNA, 1781 bp, Arabidopsis thaliana landsberg
  unsure (1)..(1781): unsure at all n locations
gtcaatgtagagaaggtagaaaaaccataacctgaaatgaagaagacaattgttaaggttgagattgtatatagtccaaaacctgaggagaagaagtaagttgcagctccgacaacaaagacatttgatgatgatgttatggatctgacaaggttattgcagacaatctgaaaatagcttcaagttctgaagaaatattctccaatcttctagattgaatgggtaataaggcaatggctgatgcattgagagcacttcaagaaggactagagaatctagacggtgttactagtaagagttgatgagtgccacagctagcgggttctcagaaatatccgtatgtaggaaattcaatagtgaagcgcataatctctgatgaaccatcgtcttcttcggtacctgaacatcttcaacctgtttttgatgaccaatttgataggctgtaggattggctcaaaccagatttgtaagtgtctatttttcttcacatagaaatgttttgtgctatcattactcattcttttcttttctgcagtgaaaaagaaggcatgaacaccagcaactttaannnnnnnnnnnnnnnnnnnnnnnnnnctccaagaagcgattggtcaacagaaaaatatggatggatgaaagactatgtaagtatagcaatttttaaagttttttgctttcaattgattaaatcatttactgttagctggctgaaactatatgtaactataataattgttgttttgattataatgcagcacatgggagctgcaatgtcattgtttcgccgaagattcaatcgtgatccgtcaaaatatcccaaccagagaatagcttttttggaccaagatttgatctccacaatgctcaaagactataaacagtttcaaccggattataggtgcttcaaattcagggagcattatgaggatcaagtcaatggtacagctcaatgtgacgcggcgaaaaacaagaaatggtttgttgatgtggatcacctatatgcatacctctttgtcaacgggaatcattgggtcgctctagacattgacttgccaaaaaaacggatcaatgtttatgatagcatcccgagcttgactacggatacagaaatggcgatacagtgcatgtttgtgatgacaataattcctgccatgttgagttcatttattccgtcaaagcaacgtaggaggagctactcaaagttggagtggaagaggattacgaagatcccggagaatcttgacgcaggtgatgtgctatctactcaataaagtacatcgaatgtttggcgtttggcaagtcctttgatggcttgtgtgatgagaacatgcagtccctatggactaaacttgctgtggagatgtttgaggaattaggcaagaatgctggaacactacactctgaggttcgtcgcaaggccttcaaattcccaagcctcatggatgattagaagcttctattaagaaccatgttcctttttaagcttttcattttgttatgtctatgacttttaggacccatgttttgtctcaaacttttaagtacatgtatctaaacccttttaagtacatgagtacatgttttgtctcagattttttggttgttcagcttcaataacaaccttcattttgtccatgatagactcggtttccaacagcagtcttatattaaactattaaacataataatgatgaaatatttgttaatatattaaaagagtgaataattatttatcttacagaaaaaaaatataaattttattaacctagacatataaagtt

SEQ ID NO: 32830 - DNA, 806 bp, Arabidopsis thaliana landsberg
gacattaacacaaaattgttagtatacaagtttttagtatcttgtagagatatggcatattttttttttttttttgcagctataagatgcatgttatattatatcaccttacttttgctgaatatcttaattctacattgtttatagggttttgtttatattccacttgtttttaaaaaaaaaatgtaaagttagttagacatcttttacaatgaattttgttttacaatgaatgtttcatagtgagcttagcttttttaggagaaagttttaaaatcaaacacaaaacgaattagacgttgagacgagattacggattcctatgacgccgatatggtatttgcgctcttccaaaatcgacatctttttaatctcccttttctattagattgatttggtccgttccaatatatttttttttaaaattcgggtggtagaataatactttggttaattgatgttaagtttacaagattccagaaaaccgagttaggttaggtgaaaacccacacctcgtgtatcatgttttttgtttccgcttgtttgtgaaaaaaccacaaaaaaagttcattatctgataaattttaagattcgttgaatgattttagataattgggcacggcatgtccaataaatatatatctatcccgtgtataaaatttgagaaatggacttttgggaagtctatattttagatgaccccaattttgtataaacgacaatatatcatgagaaaatacgtgtttgagataactaattccgcccccccctgaaaaggtttttttttttttgcgtttttttttaaa

SEQ ID NO: 32831 - DNA, 408 bp, Arabidopsis thaliana landsberg
ttttattcaataatcagtcacatagtgtataaaaatcatcttgaatgtttagttttactattttaattttataacagctactacgttaattggggggatatataaaccgttaatccgttataatgtatttttgatattgacatgtgtttcttttcttatggaaggttatcccagaatgtgaaaagccatctgatttgcttcaacctatggaaacacgacacttggtgctaagaactaagatgcataccaaggagttcaatggaataattcttcttctcaacaactgccctaatttggagacgcttgggtttgatattctaactccatgtcctttctcggtaagatttctacatatatatgcaataaagagtagccacaatctaggcttacttaacaagcatgattttc

SEQ ID NO: 32832 - DNA, 2505 bp, Arabidopsis thaliana landsberg
ttttgatttctgactagtttgagagaatttgtgatggaattgatttttttttttttggaaatgtgtataatgatcttgtgagattcttgtagttattgatgatatggttcttatttcgtgattgataaaccctaatttggtgatctttttaattgcagcggcagatatatttatgtggaaggacaagaaaatgtcaggaggtgtatttggcggtgctacagtggcatgggtgctatttgaattgatggagtatcatcttcttactctgttatgtcacgttatgatcgttgctcttgctgtgttgtttctatggtctaatgccactatgttcattcacaagtaagttttgtggtcaatcatatgaaacaggtcaaggttgtcaagcttatttgactcatcttcgttaccaaattttcattctctttcaggtctccaccaaagattcctgaagttcatatccctgaagaacctcttcttcagcttgcttcgggtcttagaatcgaaatcaaccgtgggatctcttctcttcgtgagattgcgtcggggagggatatcaagaagttcctctctgtatgtttaaactgtcctggacttactcgttactcctctctcgatgtctcacttaagtttgacacttattgtactgtttgattgaattaggctattgccggattgtgggttctatcgatcttgggcggctgctatagtttcttgacattggcatacataggtaacacttactgttgctaaaagtattttgcttctgccttctctcttattctgacattgctgatgaacggttattgatttggtccagctctggttctgctcttcactgttcctcttttctacgacaagtacgaagacaaagtagactcatacggtgaaaaagcaatggctgagttgaagaagcaatacgctgtgttggacgcaaaggtattcagcaaaatcccaagaggaccgttgaaagacaagaagaaggattagttttttttggggtttttgttttgtgtgggttttctttggagtgcaatgtgcacaatgctctggtttttatacacgtgggttgtgttgtgttgtgaattggtaatctaaaaggttatgtgttagatctcaacccaaattttacttgacaactttgctttgtttttggagtggtttgtggcattagcacaatgattgtagtcgttctcttgatctatatttttaatgtactgattgatttctgtgtttctaatatggtacgttactcaaatatcgttttttctcgattatgtatttgtagtatgtcttgatatcaaacaagtcaggatggccgagtggtctaaggcgccagactcaagttctggtcctcgtaagagggcgtgggttcaaaccccacttctgacaatttagatttttattttctctcagctcattttttaagtgtttgttactttatttgcccaaaaaataaaaatataacatgtttgtatatttactggttatatatatgtaataagtatgaatattaacaaatgtcagtatggccgagtggtctaaggcgccagacttaagttctggtcctcttacgagggcgtgggttcaaaccccactgctgacaatttatatttttgttaattttaaattataattaccttcttttttctttcctttatactatgttttctcatttaaccatggtttttgtttttttttaaacggtcttatgtttctcaggtaacaatcagctaaataagtaactagttaaaagttaaaacgcttaagatcaatttgtatcaaatggtgaatcctgaaacataataatataatgggttccacttcttatctttcaacaaaataattgtgacaacaggatcatttcacaaacttgtcataattgttttggttcaacacatgttctcattaatggtttttcttttttttttcttaaacaaaagaatggccatatcatatgttcccggaatcagataactattattattgcataaatgaaccatctatgaattatataatttagtctataaaaatcattttgatttgtataactattactgagataatgagatttactgatgcttaaacatttgtgaatagaaaataagtaactttagcttggccttattcttttcacagtcgcatggactgcaacacaaaattaaaagccaaagactcattaaattaggattgatgacccatcaactttccctacttcataaaaaaagcttggagggctatcactgttatttgcggtgtctccgatattattagacttgagtaagaacgacaaaagatgaaagaaaagaagaacataagattaaggagaagtaaaagcttcttcttcttttttttgtctccacttgttgtcactgcgactttgcgccaaacaaacaacgcttctttttttggttacctaactttcttttctggctatgttgctgttaggtttaggtaaattaaaatgtgaatcaaaattaaaattacgcaaacacaagttcaccaaca

SEQ ID NO: 32833 - DNA, 244 bp, Arabidopsis thaliana landsberg
  unsure (1)..(244): unsure at all n locations
caggaaagagaaaagaaccacgcgagccaggggcccagaagaacgaaaagaaagcagaaagagcccccccccacgaaagggaaacaaagccagacgcagaggcggcacccggaaaagaaccggggaaaaaggaacagcaggcccccgccaaaccacacggccaggccgccaaaacgaaaccgaaaaaaagcaagaaagacagacccccaaacacaaaacaacgaacccagnacaaaccagaacc

SEQ ID NO: 32834 - DNA, 471 bp, Arabidopsis thaliana landsberg
cggatagcaatccccaaccaaaaatataataccatgcgcaaaagcccccgccaagaggaaggcagcaatataagggcgaaggccacacaacccaacaagagccgcaaaaccccgcgccacgaacgcaaaagcaaggaaagagaacaagcgcagagccaccaaggaagaaacaacccccaaggaggccagagcaaggccaaacagaaaacgaaacgaacaatggagagcgacacaaagaccctcaaggcccacgccccaaacgaccccccggaggaaaacgcgcgaccaaaagaacgcccacaccgcggccgaccccaaagagcgcgcaaaacagaagacccgcaacgaggaaaagaacagcgacagcaaaaagacgaagcgccataacggcaagccaaaaaccctgcgcacgaggcaggaaccccccaagaagggcaagaacggcagacccggaacccagggagggaccaa

SEQ ID NO: 32835 - DNA, 1825 bp, Arabidopsis thaliana landsberg
ttgaagctggtttatctcttaatctcacgggtattgcagcggaaaatctttccaagcagaaactgacctcactgattcttcaggtttcgatcttaatccacacaattatctgtattgttttcgtctcttttagattgcctaaacgttgatgatcgacttttgcagaatgagattgtaaaggaagtcaatgagaatccaaacgctggttggaaagctgctttcaatgatcggtttgcaaatgccaccgtgagtttattatcacctccatgctcttatctctttaagagctacgttacttatcattgttcctgaaagtttgtgtttttgtgtatgtatgtgcaggttgcagagtttaagcgactcctcggtgttatacaaacaccaaagacggcatacttaggtgtacctattgtaagacatgatttatcgttgaagcttcctaaagaatttgatgctagaaccgcttggtcacattgcaccagtattcgaaggatcttaggtcggttttaatctcttagcttccactatctctgtcattaacccaatgatttactgactcttcttatgttttgtttcaaattgtctccctctttattgcactaaagatcaggtgaaacatcatttcatttgagtgggttatatattgaacaatgtgttactctggtcgacgataactttatggttttggtttctttagggtcattgtggttcttgctgggcatttggtgctgttgaatcactgtccgacaggttctgcatcaaatataacttggtaacacaactttctccatcaagccaagattgacgattgctacagctttttaatgtaattgctcttcttcccttgcagaatgtttccttatctgccaatgatgtcatagcatgttgtggattactttgcggttttggttgtaatggtggtttcaaaatgggtgcatggttgtactttaagtaccacggtgtagtaacccaagaggtaaattctcagcaaagaacaaataataatggcaatgtggtcaaagtgtattgaacttttgtaatgctgctggttcttcagtgtgatccatactttgacaatactggttgctctcacccgggatgtgaacccacttaccctacaccaaaatgtgcaaggaaatgtgtaagcggaaaccagctttggcgtgaatcaaaacattatggtgttagtgcgtacaaggtcagatctcaccctcaagacattatggctgaggtttacaagaatggacctgtcgaggttgcttttaccgtttacgaggtaatgaaaaagatttttgattgatcaaaccatattgattatatcttggtgaagtccacattttcatgtatctttttgttcttcaggactttgcacattacaaatcaggagtatacaagtacataacgggtactaagattggaggtcatgcagttaagctcattggctggggaacttctgatgacggcgaagattattgggtatgaattctctggattttgattcagatcaagctgaaaaagtaataacattttcttgttcgttgttgcagttgcttgcaaatcaatggaaccgaagctggggtgatgtaagttcttcttttctccaatcaaaacttttaaattagaccttccaagtaaacaaaagcacagaacctgagatagaaaatgtgaaaatctcaggatggttacttcaagatcaggagaggaacgaacgaatgtggcattgaacagagtgttgtagctggtttaccttcagagaagaacgtatttaaaggtattaccacttcagatgatcttctggtttcctcagtctaaacgagacggtgtg

SEQ ID NO: 32836 - DNA, 3593 bp, Arabidopsis thaliana landsberg
  unsure (1)..(3593): unsure at all n locations
gattcgtttgaaatttttatagaacaacagaaaagtcgttacctcatgcagattataatttcgcaggagctcatcttttggtataattcctaaagaaagcttcaccggtaccaaatactttaatatcatcctgattcacataaggccacattagctgattaagcaacgcaatgcaagagtaaggtaatcacagagtaaaaccagaatcagaccttatatttcgttctcttttggggttgcaattttgcaaggcatatgatagctttgtatcagcctgcaagatccaaaaaaagagattaaatgttactatcaatatttggattgacactacgaaatgaactgtgatggtaagaaaaaatctcttagtgactcacagcaggaaaattttcgttgaagacttctaatcggccggtataatacatgtatgtaacctggtgtttgcgaagaataaacagaagataataagtaactgaataaggaggccaaaaactaaaactgtttgcagagaactgcgccagaccttatctcttcttggaaactcctcaaagtcaaatatccgagcagtttcgatacttcttattacacttcgacaaagattgacggttccaagctaaaatacaaaattggggatacctgtttagtactccatttaatggttaaatcataaatatctaactgttgccagacagcatatcaccctaaagttggtcttgaacaattggcaagtcacatataatgctcctactcgttttggacctttcccctatagtttaaaactacataaggagccggaaaaaatattgaacacaaatataaactaatattcctgaagatatatagatagatcaaagggaaaacttacagcaagaactccaaaaactttcatgagaagagacccagctgcttttaatttctctggagactttccattagaagttaaatctttatcagcctgcaattccatgtggaaaaatcatgctttcagaactgactcctcgacacaatgaaaccagacaaggttaagattttgaaaaagggatatacaaatgagatactaccttttccgcaagaactcgaatttcataacaaactacatacagagcttccaatgcccaagcagattcccaattacgaaactcctgaacaaatgcactgcacatatagaatccatcagatatcagacattgtgaacagacaaaaaaaaaagcttatcacccctgaatcatattagacatcaatagaggagcagagaggaacaagaagactttacttggcaaacttctcgaaagcaaggtatgcttcgactagattcccaactcggtaactttgtagagaacgaaacacatgagccagaatctcgccatattcagagaatctatcagactgtctaatcaaactgctagaatcctgtatcagtcaaagaaaagaaaactcaaaggattcagcactttcacagctctctacatataaataaaaaccctaaatctaaaatccatactcataaactcaaacatagacatagagtgttcactacaacaactcaataggagacactttcacggcctaaattcatactcattggtgaagcaggaggacccaattggaaaatcatactcattagtgaagtaggaggatcctagattgacattgattgaacctaaaagatacacactttgctaacataaagataatgttcctagtgttttgagccctaaattcagaaattcatactcattggtgaagtaggaggacccaattagaaaatcatactcttaaggatcttacattgaatcgatttaacctaaaagttacaaactttgctaacataaaaaccatgctcctagtgttcacaattcatacgagaacccaatcggaacatatcagaagcatcctggatttgaaatcgaacctaactttaccaatacaaggatcatgccactaatcacaggaacatactccaagctgctaatttgaatcatgggtctcgatttaacagagaatatatgtacctgaaagacgttgagtgcgtcggcgagtgagagaagaggtggagaattggaagagaaagagaggagacggcaaagtgtagaagagtcttggtacgaaacggcgtcgcagaatcggtttaggtattcagtgattctccggtgagcttcacccatactaacgtacgccattgtcaccttcttcgtctgcgtcttccttattctttgagagagacacgaaatcaaataagtcgccaggaaaaaaaagaaaataacggagttgagaaaaacgacggcgtttgctaattaactaaattgttactacgtactagtcttttctggtattagacttattgacatatgttagttgggccaattaaggcccatatgaaatacaatcattaaaatgtttgaaaatttatttgtaaaggatttgaaaatatcattagtgttggaaggattttaaagttcctgtaatcggtggtactgatcatgaatttgttttagagtttttaagttcatataatcgttttatagatcatgattaatttgttttaaggttttttaagttcatgtaatcgtccgtaatgttgacatctgtatgtaaatatgtcttcttagcccgatggtgacgtgaggaactttcttgaagggacatgaaataaatttataccatgcatataactcaacaagttgccaaaaactcgaagaaatgaatataatcaacttgtcaaaagtaattaactgatcaaataaatcacttgtttccaaatgtgatttatactttcacacttctatatattcccattgatattccccttctttcatagttagcaaaggcctctactacatgtacatgataaataaataaataaaaatcacgctaatcatataattatcaatatatttgattcttgaacacacaattaatagaaattntgagttgagagaagtcaatccaggattagtatttatgtgtaatgctaaaaagtgaagataacgagaaacttgagaggtttttaaggtncctactttatttttgggatgaaggttcctactaaaatatgctcttatatatcattttatttaaaaaagcattccatttgaaactaatctaaaaatctttagattcattgttcaccactcatagtaagagttgcatgtggaccatcttatattctctactttctcatacttcgtatttggaacctttattccaacaaattcaatgtgtaaagccatcattacgttcatttatttttgcctttttgcgtacataaaagaaacatcataacttgacatgtaaaaaaataaatcattgattcgatttgagacttttgaaaaccttgtcaattttataaaatttggccgatttgatctaatccacataatccatcccttatagacgaaattaaattttcaaacgggatattaaaaaaaaatatcaaaaaatggaaaaatttaatatcaacaatttttttttttaacaatactccataaacataataattgtattaaaattaattttaatacataaacattttaacaattagaaaataaactttctattctctattgtatcatacatcatttcacactttttttttt

SEQ ID NO: 32837 - DNA, 4237 bp, Arabidopsis thaliana landsberg
  unsure (1)..(4237): unsure at all n locations
tgcaagaataagagttcacatttttacctttccacaaacataaagaccaccaatatacagagcaacctggagaatcaagatagcgaatctcaaatcagctagttagatgatataaagcaggaagaaaaatttgatagtatggaacaatcagcgagaatctaagaactttgagtaaatgaacaaaaccttgagacttcgaaggaatataggagtttgcaatttcgcataagtactcagaagcatacttgcagtcttcaagtcattatctcctgtccaacaccacaaaccatccagaaaaaatgtaatcaaaatnnnnnnnnnnnnnnnnnnnnnnntagtagccaagatttattataaaaacaaaaactaaccgagattagtgacgatgtgtctacttccagatttgcgcaagtgaggattattgacaggcatagacaagacacccccaaacatagatgccaaagacaaaaactttctctgtctctagttttgttctgaaaccaatcgcaaaacaactgacatagcttaaaacctaactcttacgaaattcaactaaaactagtgtctaataaccaaccacgaaagtgaaagactttacaacgaagaaagacaaatgagtaccttccaaaacaggaaactttcttcaccaatagcttgctactactctgaagaaggcgtcaacactgctcaacatgaacaatcgcatcgagatgatgttaaacccaattgataccaaagaaaataagaataaagtaaacccatcaaaagattcaatctgaatcacaaaaaaaaaagtcgatggctttattgaagcggctgagaaagattcaattaaaaccctcttttgtattttagcgaaaaactcgcattaacaaaaaaaaaaaacgtcttcaattttttccctaaacgtcaaaaacgtcaaagtgtacattgcattgagtttcctcctatgaacaattcacgagatgagtatttacgttgtaagaagaattaaggaagacttggaaggcaaaacccagaaaaggaacaatcaataaaagtcttaatggagagaaacgattttagatgaaaagagaaacgttgtgatgattagattaatagcaaagacaataatcaatgaaagcgagacagagggataaacaaatcgaaagagttttttttttttttttttggttaagaaacaaatgtttttgttttggtcaacggcttatgcaagttaattgactttaacaattcttttgtcttatcaaagcaaatctcttaaatcttaatatagtactagattttgttcatgtaaagttgaaaaatcatccaaaaatggaagacaattacataagatttcgtatttgacaatagtagaacattattaatttattataatcattttcacttaatttgtttacgtttgttaatttgataaaaagctaaaatatttcacatataaagtaagaaaggtacaaaagaaaaatagtttgaattcggtttttcctaataggttaatgatgaatattttattgtctagatttatcgagttgttcgtagttttgataataaacttcttgtgcgtcggggttaggccgagttgatttttctaaaaagaaagacatgtttaaaaaaaaaaactaaaattcttaagtgaagtaccatttgaaaatttctacgtgaagggaaaaaaaagataagttaatgcaaacaccatgacgttaagaaaaaaaagtcaatgccaacaccattttgttttggtcgacggattagataatgcatattgtgcagacgtattacttctttgttgttacggtaccaatgactcgatagtggtcaaccagaatggtgaaaaagcccgaccgaacataaacgagactgattttgtcgtacatgggcttccggtcagcccttcaagtcactcggtttctctagttgagatccactgtttatagatatgagctgcctttgtggaacagcacagcagaggccgctcagccctaggatttatcagtggaggatcgtcatgcatgcctatgcaatatgcgaccaaggacctcacttaatggtggataaattggcgacgacatgggaaagctccacacacagttttttggatcatcgagtggattaacaaacaaatccgaaaccgttttccacaatccgacttgtaggcgataaacgctatgataacggattacaagtttggtttgaaacacggctctaagtgtaaaagtttctaattttctgctgaaattttttactattcgatgcactagatgtacaaacgctatgtttttctttgaatataatttaacattattttcaaaaaaaaaaaaaatctatagcgagatgttatcaaagctatgggcttccatacttggccatccctattttaccgtgatgttcttgaccagatctttggctcgcccacagctcttgtttgcctgcaaaaacatttatgaagtatttttcttctcctcacctcagcctcataatccggatgagaagtcgtctcatgtagccgccactagtcacatgaaaattccgtatgactttgtatttgaaagattcagtcttatcagaggtctggtctttcttagaaatcataagatatcttaaatggaaagaagcagaagttgtcggtgatatgtaatcagaggtctggtctttcttagaaatcataggatcttatatcgaccattgtccatggaattgattatttatcaaggcacgatgagttgtctcaggagcatacatttttcattagtaactggagaaccttcatggacactgatcgaatgttgcataccccactatcctagatatagtgatataaaggtgttatcttaatattggaattatacgaataatatgattgtcaactaagtaaaaaaaaagaaaaaaaatgattgtcaactaagttgactcaacttgtaaggcaaatgaaaaatctagtatcacatagatatttattggttatatgataattcattcttctattttccgtgaaactacaaaacaaggaataaaaacgtgactaaacaaaaatacaaaaaaaaaaaaaaaaaattgggcaagaaaattatggccacgttttgttgatagcatacgaacgcgccagaaaattagcaaatttaattaatttcactgaaaaaattatttttgtgtgtgtatgatcataatgattccagtaaatgatttttgtagttccgtcaagtgcaaggtaccatgacaagcgtattaggaatgatgaaccctaatctgatcaacggaagaaatctccacaaaggatcttcaatttttgtacaagatgaagaaactaaaaaacgagtccaatggagattatcaatcaaggagggatctctaagaacgcatcaagccactgcttcttctgcaacagaaccaaaggttagtagtaacaacaatctttgagcttttttttctgttaactctctggttttgtgtttttgaatcattaatcttgaaaacacaggcgacagagttcaatacgacgacgtatgaagacaaaatgttgaccaactatgttcctgtctacgtcatgcttcagcttggagtcatcacgaacgataacgttcttgaaaacgaagagagtctcaagaaacagctcaagaaactgaaacaaagtcaagtagatggagtgatggttgacgtatggtggggaatcgttgaatcaaaaggtccaaagcaatatcaatggagtgcttatagaaacttgtttgcgatcgtacaaagctttggactaaagttacaagctataatgtcgtttcatagatgtggaggcaacataggagacgatgtcaacatcccgataccgaaatgggtactcgaaatcggggattcgaatccggatatcttctatacgaacaagagtggtaatagaaacaaagagtgtttgtctctctctgtagataacttgtctctcttcagaggacgaacagctgttgaggtatgaaaaactcttgatcttagaacgtaactcggaaaaaattgcgtttatatattgatataatcgttgctctgtttctagatgtatagagactacatgaagagctttagagagaacatggaagatttcataagctctggagttataatagacattgaagtagggcttggtcctgctggagagcttagatatccttcttacagtgagactcaaggatgggtttttccaggaattggggaatttcaagtaagaaaaaggaaataagactcttaatttcttaggctt

SEQ ID NO: 32838 - DNA, 4717 bp, Arabidopsis thaliana landsberg
catgttttgatgtacaaaactagtagactggagaaatgccatatttatgtagatccgttgtgtttgagttagatttcaactttataaccggaaagtgaccatttttttacattatgactgaacttttttgaacaacagaaccaaaacatctccctctcgcaggatttttcatatatcagctctctcgttaagcctagcggcggcagtaatagaagccgctacaccaccagggtgagtagacaaattaggattgttcctcagctcagcgctcaccactccctctgcgtcctgcctggtcacagctttatctgcggctaacttcccggtcgcaccctaataagccatccggttcaaacacatttagacaatcttaaaactaaaacattgagacattgaagatgtttttaaaattggggtttaaccgccaaaacatcaatgagcttgattttatcctcatcacggtctatggtagcgttgtgatttgctgctgattgagcagaagcggcgattccaccaggagcaatcacattagtgccacaagctctaacctctgccgcttgaatcgctgctgcgtcgctttgatccaccggtttgtttccagcggtttgcacagtcgcttccaatgcttctccaatcgttattgcactttgtaaactcaaacccacaacttctgcttccggagctgccgcagtcgccactggcctaggctcgacgtattgtccaacgacctatgacaaatatatcttcaccattataaaacatgatcgtaagaaaaaagatgtaattctggatttgagttatgacctgtccaccgacgaattctgttgtgacacgtgcaccagggacgtcagtttgcgccactgtgacgcctcgttcagcgtcgagatcagttgtgtcacctggatggacaaagccaccgcgtttattagcagtggctgcagactgcatgactgccgctgcaccgcctttctgagtgtggccaaacacacgtgtctccgctgcttgcatcatgtttgcatcctccggcgctataggcttatcagcgagttcaccggagacttcaaaaacgtcaccgtaagtgactggctcttgtggccgctttggttgttcttcttgactcatctctctgttttgttatgttatgttccgttttgtgttacatacaaaagtgacaacaactcctataaagataagagaggtgcatgagtgtgagagcaacattatgagattttgacacttgtcattttgtcaatgacgtgactaagaggcaggtgtcagtttccaagtttatagcaaccttagcaagatgatgattcagaccgactgagatagagttttgtcatttaggtttaaatacttttttccatgtttcgtacaacattggccacgtttcaatattgagacaacataacaacaatgagcaaagctgttctgaacatttctgaagccatgagatgagagctaatacatacctactccaacatggcaacatatataatataactgaactcgaggtgcaagtgagcgaatgctctgtggtcatcaacgccattaaacctttcagccaatcgaggaaatgctcctgcatgagaggaggctaggcgttggtcaaaagacccgtcagagacgtactcccacatgtgcaccgcataaaggaagggatcgaagagtttgtgaagaagctatatatccgagacattggacaagaagaagaaagatcgtacagaatctgaagctaagtataaccatcaggataaggaagcaggatgataacaaggaagagggtaataagaaggaaggttatgctcaaggtgttccagtaaaaacgctcttctcttttggatttttgttttactgttgtatctgtatttgtggttttttttggttaaaactcagatatttttaattgtcacaaaccccattggactggaggaatatcccatttatatagatcagtagtggtaagtgttaactctcttaggaattattagttcaaagcaaatcagctaaagaatggattttaacttcaaactaaaaagtccccattattcattccaacatcatccttgggaagtttttaagcagtaagatacaaaaaagaacaaaaaagctagtcgattaaatgtcacaagcttgtgaacaccatcctctccccgccggattttctaacatatcggctaaaggaccaaaagctgtagacgattttacataacaagtttcctaagttgtgaaagagagacgaacaaacatacaaacaacgaaaagaaagatcatcgatcctctcgccggatttgtcttgtcatatatcaactctctcgttaagcctagcagcgacggtaagagaagcaactacaccaccagggtgagtacacaatttagggttattcctcatctctgcgctcaccactccctcggcatcttccctcgtcacagctctgtctgccgataacttccctgctgcaccctatataattcatccggttcgaaaacatttagccactactttaaaaggaaaacatcaaaaacattgatgaaaatgttttgaaaattagggtttaaccgtcaaaacatcacgaagcttgattttcctctcgtcacgatctacggtagcgttgtgatccgctgcagattgagctgaagcggcgactccagctagagcaatgacgttggtaccggaagctctcatctctgccgcttgaatcgctgcggcgtcgctttgatccacaggtttgtttccagctgtcttcacagttgcttccagtgcttctccaatcgttattgtactttgtaaactcaaagcttcttcgtccgtacgcgcagcagcgactacacgcctcggttcaacgtgttgtccaacgacctaaagcttcaccattactccaaaacaaaaaacggatatatgaaaagaagtactagtacttttcgaaacaacttgtgacctgtccaccgacgaattcggttgtgacagttgcagcagggaccgtttgctccactgtggcgcctcgttcagcgacaagctcagttttgtcacctggatggacaaagccaccgcgtatattggtggtggctgcagattgcatgaccgcagctggaccgcctttctgagtatggccgaacacatgtgtctccgcggattgcatcatctttgcatcctcaggtgctatgggcttatcagcgagttcaccggagacttcaaaaacgtccccgtatttgactggctctcttggcctccttggttgctcttggctcatctttgttttgttacgttaatgttctgttacaaactacgataactcctacctgaattgagtgtctattatataaagagaggtgcatgagtatgggatcaacgttctgagattttgacacttactcgtagatgaggtgactaggacactcgtgtcagtttgcgagtttgtagctaaaaagataaagcttagattgagatagggattttacttttctttttgtaaatttgtcatttagttttaagagtgaatgaaaaaggacatgtttccaacgttaccacatatgagtcgtataacattggacacgtttgtttcaatatttgtttttgttcttgtagacacgtttcaattttaagacaaacataacagaaaagtcaaatgttggaaacaaaggtcaccaatatgtcggaagtcaaataacaaatctttgtcggtctaacaaaactcataaacttcccctaactcttcggatctctctagatccttgtttttcgttgccttaattatctttctcttctcttatttcatgttagaaaacagagtatacaacagaaaacacaatcgtttatttttgttctctgtgttcccatacacaaaatcttccagcttctgtttctccgttttgttcaacggagttacaaagcggaagaacctttgccttcggcctgaaagaccaaagatatgggaactggtggaataacgtccaacgctcacgttgactctcccacgtggcatcacaagcacgtgttttctatggctgacgactctgttcttcaaaggggcatcggatagctgctttcacggtggggcgggcttcaaatggccgtaaagaaccagtggggaggccatgattctctcaagaaatctcaagagctagctcacaatctttttcatctcatctctcaatcaaatggttcgattttctttttacttctttagattttatgttatgatcatgaatatattgatagtttgattccaacattatgatatgagcagtgattacggtggaagaaatagagaatttgctacatgaaagcttgcttctttctttcaacacagagattgaagatggcagcattgaagaggtacgtactatttcttgaaaatgtagacgatcaatttacttgtgaattatgtcgactaatctttcatcgtgtgatttcgtcaggtagctgaacaattgatgatactccatgaagaacatttacgtgggactctttaagcagtagcttgaacgatttatatcatttttggtgtataattagatcaatgtaagatacaaagaattgaaaattgggtggacaacaaaatattattcatcagaaatcatagaatataggaatacgtatcaaaatctatgtctatttgatgtaatcattttgtagttgtgataaactatttttcctaatgtaatttcaaattaaccagtaagacactccatcatgattatgtgggaaatatggacc

SEQ ID NO: 32839 - DNA, 1518 bp, Arabidopsis thaliana landsberg
  unsure (1)..(1518): unsure at all n locations
caaaccatggttttatggttttgatagataaaagtgattttgaagttctggtcataaacggattatatgaattgtaaataaagtttagtcatgcgtataaaatagcctaatatccactataaaaaggagaaatgacatattattatactgtattcacatgtttttttttttgttttggcaaatactgtattcacaatcacatgttaagtattgatgtttggtacaattataaaagtttctaatgttttctgaaaataattttaaaaatcagttttctatacacttctccaaaatttataaaattcttttataagttcagatttttatcaaaaaatgataaattaataacaatttgtaaaaatggcgtgaaaataattttgtacatttatggctttgcagttttgcttctccattttgaaacatacttgaaaaaaaaaaaaaaaaaaaaaaaaaccaccgtaagaaatagtatagtagaaaaaagatctacataaatttctatgcaaataaaaacaaaaaaaagtcagatagatttcatattagtgtggggcttattcacactcaaaaattagtttaaggaaggaggattgccacaatactgtacatatatattgtccaaagaatattatttcttctaatgtgggataactctaatatctccatcaaaataaaaccggtcctgaaattgtaaagactatcggtttaattttttttagcacaattcaatattttagggttttgtgcagagatgtcctacacggagaccgagattagtaaaaagaatttacagtcaatactcaatagttaatggttttgatttgtactaaattcgatattttgtgactgaaaatcgcaaaaaaaaaacctttaacttgccaaattttgcaactttactgtttactaaaaaaaaatgcacattaatactatgaaatcttaaataatacgtaatataactcttaaacgtatattgttaatgttttcactgtcacatatattaaatttttacgaacttgacggtaacgaaaaacaattatatttcgtattattttcgattttgatgatcaatctacattttggaagtaaaaagtaaagttagaaaaagtgacaagttaaatgtttattttttacaaaacccaatattttaattaagaaaacaagatataaacgatggtgggaggtttagtttaaacaccttacctaacgatacctttactttggaaaggtttctaagcgggacataccactagactaatgagagtatgagactatgtactgtacacaaatattgagctgcaaaaatacagtaatctattttgaaactgcaataccaaatttcctttacttaggtttagtagtgcatggctcgactttgaagaaaatacttacaaagggtaaaatatagcagtacaaaacaattgaaatacttactcgtccatgtatgttgcttgatatttttattatctttccattgncgntttgttattattattgacattgcaaaaaaacagaaaacaaaac

SEQ ID NO: 32840 - DNA, 4561 bp, Arabidopsis thaliana landsberg
cctttcctactaacttacgatatatcgtgaaatacaacaaatctacactaaactgacggaattttctatgttttttttggtacattggttttggctggttttaaatactcttaatatgctcatttggcactgactcacaaattctaacccaaatttcagctcatatatcagaagatgcatggaggaatgatttgcaatcacaagacctcccaggtttagaattttttgagatgaataccatacaaactgccaccaataatttcactctatcaaacaaactcggtcctggtggatttggttctgtttacaaggcgagaaacgttttatcctctttgctctttttcttttctgtcatttcttgacatgacatttccaacttgtttcagggaaaactgcaagatggaagagaaattgcggtaaaacgtctttctagcagctctgggcagggcaaacaggagttcatgaatgaaatagtactgatatcaaaactccaacacagaaacttagtccgggttttgggatgctgcgtcgaaggaacagagaagctattgatttatgggttcttgaaaaacaaaagcctggatacttttgtctttggtgggtcacttcttacccctttcgtgtagttttcccctttatatctggaatttcttatctgatagcttgtatacttagatgcaagaaaaaagctcgaacttgattggccaaagagatttgagatcattgaaggtattgcacgtggacttctctatctccaccgtgactcacgcctcagagtaattcaccgagacctgaaggtcagcaacattcttctggatgagaaaatgaacccgaaaatatcagattggtttggctcggatgtttcagggaacccaatatcaggaaaaaactcgcagggttgtcggaactctgtaagaaccatcccttgataacatattaaactagattagtagtcatatattaaattgggtgaaactatttgatctttgaacagaggatatatgtctcctgagtatgcatggactggcgtattctctgagaaatccgatatctacagtttcggagttctgttgttagaaatcatcagcggaaagaagatctcaagtttcagctatggcgaggagggaaaagcacttcttgcatatgttagtaagactttatgttttcatgcatttgcagaggttgcaaaaggtttgttgctttgatattcttaagagtggaaactgaaaaacaggcatgggaatgttggtgtgaaacccgagaagttaattttttggaccaagctcttgctgattctagtcacccatctgaagttggaaggtgtgtacagattggtttgctctgtgttcaacacgagcctgcagacagaccaaacacacttgagttgctgtctatgcttaccacaacatcagatcttcctctgcccaaaaaacccacatttgtagtgcacactagaaaagacgaatcaccgtcaaatgattcgatgatcactgtcaatgagatgacagagtctgtgatccaaggacgttgaaactgtagaattggaattattctctataaggatcaaaatttctaatggttgtaaaattacatcccttcctttattattcagaaactttttatctatgtggaaactgtttggtaaaattgactaaggtatattttattaggcatgattacatgattccacttcccactaaattgacaaaatactttgctcaaaaacaaatcgttgactctactttattttaagacttcccgggagattattctcgggcctagtggcacaccaatgttgactgttgaattcttcggttcttttggacagaaacagttaagcccatatggttggagttgggaatcagtcgattagggtcattacgggtctaacgacattagcgaggctcggaggttttttttatgcactgcaagtgttcgaggaaatgtctaaacgagataaaacatagcctgcatttcaagaaagttattgtgttgtaatggtgaagcaaggattggattctttcgattgatgcagaactaataaggacttgaacaatgacaacgttgcgtatctgattgggtaaggacttcttcgtgccaatctatcatgtatgcattgccagtattgttatgtattattgatgcagagctaataaggacttggaattgtctcccactcattcacgttgttatttgtttagtgagcagttactttctgaacaccttttttgtgtatttaagtaaatgattgtctttgaatggaatagaagaaaatttgcagtaacttattctaaagtctttgataaccaaagtcttcttctttttgttcttgatagcattgaacaatgacaacgttgcgtatctgattgggtaaggacttattcgtgctttgacacttttgttctctattatcaaataacgcatgatttttggaacattagtaaagattattaaataacgcatgatttttgttctgtattattctcacaagtcagtccctgagttgacaaaacaaaaaatgtgcaaagagagttttttttttttttttcttgctttctcgctttatgtaaagctaatctaaaaaagatagtttttggagagaaataacaaatatggggaagaagtggatcgtgttctttgcttatttgctcttatctagcttctttataagttctagctctgcagggataacgaaagaaagtcctttgccaataggacaaactctcagctcctctaatggtttttatgaactggggttcttcaattttaataactcccagaatcagtatgtcggaatctggttcaagggtattattccccgggtggttgtgtgggtggccaatagagaaaagcctgttacagattccacggcaaatctcgctatcagcaacaatggaagtcttctgttatttaatggcaaacatggcgttgcatggtccagtggagaagctcttgtttctaacgggtctcgtgcagagctttcagacaccggaaatcttattgtcatagacaatttttcgggaagaactctatggcaaagctttgaccatcttggtgatactatgcttccttcctcaaccctgaagtataacctcgccactggcgagaagcaggtgttgagttcttggaaaagttacactgatccatcggttggcgactttgtgcttcagattacgccacaagtgccaacgcaggtgcttgttacgaaaggatcaacgccttattatagaagcggtccatgggctaaaacaaggttcacggggataccgctaatggatgacacatttacaggtccagtcagcgttcagcaggatacaaatgggtcaggatctctcacttatttaaacagaaacgatagacttcaacgtacaatgctaacatcaaagggcacacaggagttgtcttggcataatgggacggactgggtattgaactttgtggctccagaacactcatgtgattactacggtgtatgtggaccttttgggttatgtgtgaagtctgttcctccaaaatgtacgtgtttcaaagggtttgttcctaaactcattgaggagtggaaaagaggaaactggactggtggttgtgtgaggcgtaccgaactatattgtcaaggaaactctactggcaaatatgcaaacgtgttccatcctgttgccaggataaagcctccagacttttacgaatttgcaagttttgtgaatgttgaagaatgccagaaaagttgcctccacaattgttcttgcttggcctttgcttatatcgatggaattgggtgcttaatgtggaaccaagacctaatggacgcagtgcaattttctgaaggaggagaacttctctccattcgtctggcacgttctgaactaggtatggcgctcaaatgattactcggaagaattacttcgtttacaactttatctacaactccattgatactcttcttaccggaagcagcatggcttattgtttaatttgtttatgtcttatatgtcacaggtggaaataagcgcaagaaggccattactgctagtattgtgagcctttctcttgttgtgataattgcgtttgttgcgttttgtttctggagatatagagtgaaacataatggtaaaaactgatgatcttactccctctctattgatttcttttctttatttacagtactcattttcttgctattggtaagacactgatgacctatattatctataattgaaacactagtttcagctgatataacaacggatgcttcacaagtttcatggaggaatgatctgaaaccacaagatgtcccaggtttagatttctttgatatgcataccattcaaactgccaccaataatttcagtatatcaaacaaactcggacaaggtggatttggccctgtttataaggttagagaatttttaacctctttgctcttttctattctttgcttatgctctccagatgaccttatgcaatgtgtttcagggtaagctgcaagatgggaaagaaattgctgtaaaacggctttctagcagctcgggccagggcaaagaggagttcatgaatgaaatag

SEQ ID NO: 32841 - DNA, 499 bp, Arabidopsis thaliana landsberg
  unsure (1)..(499): unsure at all n locations
ctgctttctcggctttggtctgaagcttgagctgctcgacttttgtcagcagttttcctgtggtgtctctgtgctctgccaaacataacaaatagattagatttcgggacatataagaagataaattttgattttcaacttttaccttcttggaggttattgttcttgttgcagcagaaggtgatggcttcttatttgccattgaatgcactgttaaagacgaacagattagtttagccgccattatctctctctgtctctttccctggttttgtcaaagctttttcttcaatggagaaaccagagcttgtagatcacacaagctttgagattgctaggaggaataggattgtgttgaacacgtgtcgttcggcgagtggttaactcttctccggttgaaatcaatccaaatcacatcactttttaccggntattagtatattagtaaaggttagtttggtaattaaacaaaacgtaaacccttaatagttaaccgact

SEQ ID NO: 32842 - DNA, 3524 bp, Arabidopsis thaliana landsberg
  unsure (1)..(3524): unsure at all n locations
gttagcgatagagtaaaggagcaaaagattaaaagatctattgtgggaaaaaggaactaacccgagatgagtgatgggcgtggagtaggaattgcatgcgaattgcaggacgccatctatcgaaggctggtaggatggtgtcttttcgggttttgaaacatcgaaagacgtttccctccgtttccatcgctgttaaaaaacgtcaaaccggtcgaagaacgctgagtcaataaggcgaaatggtaaaaatgtgataacaaaaaatgggaggaaatttctaacccgtgagcgacttggtctgaggaaccaaaacagctttagttccggcatctcggaccttagtttcatcccgccgagggttagcactccgctctgccttttcacctcctgatccggacgaaggagatacggtgactggaggaggaggacccatagatcggggtggcgacgacggtcgaggagagcggtcagttcgggccctcgtcttgtctgttttgggggaggagctgctgcgggatggtctgtctctcttcttctgaatcaggtcagcaattggctcgctgctgagtccagttcgggaagtgggccggggtgagtcacgtcgaggtgatcgctccttgtgggatgaccggccgctatgaccttcgcggtgaggagtgggtctgtaagcaccggcaaatcttgccccttcggcgctgccatcatcgactagcagggttctgctatataccttcttgtcgactgtggattggaggaatgatttgttcacctcgcaagcctccacaatcgacttggacatcgtcttgcgacgagctgcgatggctcgagcagaagtccctttaggtaaaagagggggcagaggcagctggaggagatgaacaggggggatcatcctaagcttgtgattagcttctatgaaccggtcaagagtgaaggaattccaaagggtttccccttcgatgacgatattgaagaattcgccgaactcagcagtaggaagggttggtgcaataaaagctgcgaagtggaaaatagaattggtcaaataaggcaagaagtaaaatgaagctcatatgcatgacctaataactaccgggcttggtggtccactttgtggggaggaagtccgggatgttcctgatcgagggagggctctttttaactaggaaccacgggtgatgccagttctcgtccttatttggaagatgcgagatgagatttctattggcgttcggataagcagagaagtacccgactttcttcgaagaactcctcacactgagaagttcgttcagttcgggaaccccgatgacgtantccgcctccgccgcaatggtgataattcctagaatagtccggaggaggttgggggttagctggggtaaggcgattttgagggccgataagtaacgcacgagggcttcggggagaggaaaagtcaagccacaccctttgaagtaaatctcatacacgcaaaagaacccgggtcggtgctcctccggtgattcggttggctccggcatctggaaatccctcattactttggccggaatccgacagaactctcccaatcgattaagagattggagggtgcatgtggattgatagtggggaccggcgatgtcgttcggccaggtgcagaggtcattactagagccgacgtcgtcaaaagaaggggattcaggtcttaaaatttcggaattcattgtgtagagagtagaaaagattgaaggttcagggaaagaagagcactttgctttgagagagaagcgtaattgttaatatgacaaggaaagagtacagtaaatttacctacacgcgagccagttatgacaacgcatccgtggtgggggaagtgcaagagtttcgccgcgttaatagtaaatatacaatatacggtcataattgcgacaggtgtcacatcagtaattatggaaaatttcgagatcaatgcaatcgcgtaatttgggcgggaaatcaaaagtatcatttggcgcaatctttgcccttatagcattaaagccttccgaactggggtaacacttcgaaagacttggggggctaattgttggtgtcagatcccgcaccatgggctcggatccggccaaagattgctacgtaggtaaaagaagcccatgagagagaaagcccacaagcatcctcgaggtgagggtatggatgagatgctggcctgcgaagtgagggaggagtcgaagtcaaggatacccggatcggagaggccgagtgggccgaaaggtgaagtcaagaaggcccgaagtggattcaaattcgtacgttcaaataattaattcgaagattagaaacggatgcgtctctaatagaatgattgaaattaaataagaattaaatgaattctttggatatatattgtgggtcaaagaccatgtaaagacacacgcattttttggtgcaaattagctatacacattcttttacaatactcatagttttctctatgatcatctatctattttctagtatatttgtcctcaagaataatccttcccactaaataaataaatacttgagtgtgtgaatccgacattcacattttggcgccgtctgtggggacggatgatttttgagtcattagattttttatgtgtgttacatacccgaagtgatccgcaatgtcaggagaggatactaccaacgcttcgatagccgaaaccctaaagaccaagcaacaaacaatggccgatatggcgcagaagttttcaaacgtggaaaaaactgtctaaacactgcaaacaacccaggtatcgcttagccaaaatgttagtactatttagtctcgtgtccgttctttaaatgcagaaaattctagagttcgaagaactatcttcggatccccaaattcccttccgcgaaatgcaaaaagtgatcaaacgaccccggagggtacaaacgcggagaatcaaccagaagacggagaaacgcatcccgaggacgatgaccagttcggtgatcaacacgagcaggaaaacttcgaccagctcgaaaccatgaaagaagtaagccgagagttgaaagaaatgaggtcgaaattccaccaagctacaagctcggagccggatatcaaccgggttatcgaggaggctaggcgaacaccgttcaccctgcaaattgcgagtttgagaatcagaggttctcgaaaactcaacttttctgatagccgctgggcgagttgatctaaatgaagccgatgaagacgcagggtattgcaaacttttctctgaaaatatgtgtgggcaagcccagatgtggttcacttaattggaaccaggatctatcagtaatttcaacgaactatcggcagtatttttaaaacaatactcaattctgatggacaagagcatttcagataccgacctctggaatctatctcaagggcggaatgagacacttcgggctttcaacaccaaatttcagaacgtgctttcaaagctcccaaggatctcacaataatcggatatttcgcatttcacaaagggattatggca

SEQ ID NO: 32843 - DNA, 3063 bp, Arabidopsis thaliana landsberg
ccctgcaataactgaattttatggacatttttttacctgaatggtggcaagggtgttggcggtgcaaacacatccgacaattccttcacaatgttgttgaccactgattcttgcactacatcactggtcaacgcactaatcgagccactgtactgctctttatcactcacaacctacatatcacacaccatcgtcaactgaatacgagctgcctgcgtcttctgaagtttatgagctttaatatcacgcacagaaccagttataattccatgtaaccaaaccctctgattcttatagaaaaaccgcatttccagcttcttaaactcccaagaaatacgtcccaatgtctccaaccactgcacacctaacaccatatcaaccccttgcaatggaatcaaaagaatgtctgattgaaaggtagtagactgcagcttccaagtaaaccctttaatctgtccatccacattcaatttcctaccatctgcaactgccactttagttaaccctgctgactccacatgacaacccaacttagcagccaccgttgagtcaatgaaattatgagtagatcccgaatcaatgagaatgaaaaggtctcgcttatcaactgttcctttcacccccattgtcttataaccagaaatgccagaaactgcgtttacagagatctgaggcattggtttttgttcatggtcatcatcactcaaaacttccacagcgtcctcaaactcttcatcaacatccatccgaaataattgagtcttcttatgtaccaaataatgctccggagtaaacttctcatcacaaaagtaacaaagtccctttgctcttctctcactcatctcttgttgagatagctgcttaggttgctggctaactggcttataagaactcttgttaccaaatgatcactcttctgctccacttccttaacaggtctgtatgaacctcctgatctagtacccttctgcgaccaagttgaagaaactgtcttcttaggatgagccctctcatagtacttgcccaaacgcaaacagtccctcaccgttttcggttcaaacattctcacatgcatttgtgtatcagttctcagccctgccaaatacacactcaccaagtactcttccgacaagttaagcctcaccttaatcaactcaaattgctgatgatactccacaattccatcagtctcctgaagtttctttaactctgccattggatcatcacaagcatcttcaaagcgatccttcagcaacttcacatactctggccaattaaaaaacacatctaacccaattccagactgaataaacgagtgatgccatgtagcagcatgactatcaaagtgtattgcaaccatcttaaccttcatctcttccggggtaaaatccacaccaaaaaattcttccaccttaaacaaccactcattgattctacttccatcaaatctaggaaaatcaatcttccccaacctagtaagattaccatattgattattcacctcctgtcttaccatctcaggtcgaaaatcccgttgaaagtcccgttgatgttcaacaaacccagatctggccatcgaagaagttgacgaacgtggtacactccgatccaacaccttctcaccttccgtcaccctcttcgccgtcgttctactcatcgcactcatcatgtcagccatgtgcttcagcatcgatttatgctgctcagccaccatctcttcaagctttgtcatacgagtagcgataagatcctccttctcaacccctttccctttcacatcctcctcctgacttgaccttgtcaccaccatcttctccgaggaaacgaatggctctgatacctttaatacagagaaactatggattctctgtttgaatggctcaaaatcctttgattaattaactccacaaaaccggccaaatcaacgttcaggaaacgcccaaatgacaactcgctagctctcaagatgagaggatctagcttacaaagaaaataagaatttaatgttttacaaaggatttcgataaagatgagaatgagctgaacaatgctcatatacacgaagctaacggcatcttttgatcgcccactctccaatagccacgcgtcagcttctagaatactctttattcccacttgatgtcgcacgtgtcactccacacgtgtggttctgcaacagtgtatacagaggaggcggtggttgatacgaaaaggcatataccggtggccgctgtgaggaaggtggttacggaggcggtgacggaggtcacaggggagcggtggtggtgactggtaaagtggtaattgaagatcttttggtttagctttttttaagtatgttctcttcaatctctttttatgctggttctattgatttttctcttggatttgatgctctttcacttttctttttgcagcagcaaaattccagagaattctatatgagttgttcacaaatcacttaacgaatgcattgatatacatgcacacatacatacatgattctttgttaacttatttgcttgcttcctcattttctatctccattccttggttagtcatttacttcgtcagttccttgcgtgtgcttatttgtttccttatttttcttctttaattctttgcttatgtacttgttacatgcattcatacacacatacactcattcatctatgcatacacacataagtattcttgcatacttccttgtacagagtcataattgcttctctgtctttgatttgttgtttacttctttgcttccttgattctttgtctgattcgttgcttacttgtttttctgccttcatgaattgcttgcttaatttccagtgtccttggtttatctttttacttcattgtgtgtttgcttcgttccttgtgtccttgcttgcttccttgattccttgcttacttgtttgctctcttatttcattgtgtgctagtttgcttccttatttttctatccttagtaactgtctcattttatcttccattaagatatgcattttgcttacatagttcattatttggttcattgagcgtttgtcaagaaaaattcct

SEQ ID NO: 32844 - DNA, 1434 bp, Arabidopsis thaliana landsberg
gggggcgggcgagcaagcggaccgactcacccgaaacggacgggcccaagggcaggacaaggatttgatgaaatgggcggagaataataaaacggagtatgaaacttcaaacaatggaaccattgtggtgaacgggcgagtgtgtgttctggccaataaggggctaagggaggaaatacttagagaagcacatcaatctaaattctccattcacccgggattacataagatgtatcatgatctgaaaagatactatcattgggtgggaatgaagaaggatgtggcaagctgggttgcccggtgctcaacatgctaactaatcaaggcggaaagccaagctcctagcagactagttcaaaccttaccaatgccggaatagaaatgggatcacgtgacgatggacttcgtaatgggattgccaacaagtccattaaagcatgatgcggtatgggtagtggtcgataggttgaccaagtcggcacactttctggcgatcgcagaaaccgatggagcccaacgtattgcagaaaggtacataaaagacatcgttcgactatacatggggtatccgtgagtatagtctctgaccgggatactcgattcaattcaaatttttggagggctttccaaaaagccctaggaacaagagtgaatatgagcacggcgtaccatcctcaaaccgatgggcaatccgagcgaaccattcagactctagaagatatgcaaagggcatgtgttttagattggggtggaaactgtgagaagcatttgacgttgatagagtttgcatacaataacagttaccaaagaagtattggtatgtcgccttatgaggcactatatggaagggcatgccggatgccttgatatatccctattttcactgattttatctaggtcttagggttaggattttgagtctttatgttatttctcgagtctttttagtgtcttttcaggtatcctatgcattgggacaacaatggagatgaggagacattttggagcaaaagctaaataaaaggaagctaaggtcaattttggttcaggaatcaacgaggagtgtcgatcgacacactcctggtgtcgatcgaccccccagtcggcccagcaaaaaccctaaacgctttcgagtttacagaacaacaagtttgtcccaaaagatttccctatttgcattattagtccctgaacgtttttagggtctatatatattgtttttagacctaagtttcttttatcaagttctttgcaaaccatattgtgagagacataagctattcatcaattgttttcagagtttcattccagttcttaattcagtgaagagatcttttctaactcttatctctactgctgtgtttatgctttctatctcaattatgttgtttgtttcattcaatatgtctgagtagtctgcttgttaggaatagg

SEQ ID NO: 32845 - DNA, 75 bp, Arabidopsis thaliana landsberg
cgggccgccgcggaccgagaagaaaggaggcaccgcgggaagaggacagcaccacagaagcacggagggaaaccc

SEQ ID NO: 32846 - DNA, 1348 bp, Arabidopsis thaliana landsberg
cccactttaaatataacccctaagaaaaggctctaaatagttttgattattcagttagaaaccactcacactttgtagtccccagccataaataataattgctagaaaggattgatgcagactaaataacaaaacatgcatctttatgtccattgtgcaagagttatagatgttacctttcccccaatacggaaaagctctgcaagatcatggaactgtccatgaatatcaccgcagattgtcacagggcttttaacaggctgcatacagtaagaatataaaaattaaggctctttaaaccaaatgattgtttagttacacaatctaccacatgggttttataattggcacgagatgcaagatcaagaactgacctgaacgttgctttcatcattaagatctccttagctttctcacataatgctctgacctaaagcaaataaaaaaacactgcacataagaaatccatctttggcctcttttacttcctagagagatacatgataacagtattatctagtatcagaaccataacattaaaaagtcaaattagatacaccaatttgacacaagcagcaagcacaagtaagctcctctcttatacctgcaaagtgaacaaatacgaattacataccatttccttcctaattcaatcagaagccttaaagctttagagggtaatagattcataagagtttgagtttacttacacgtctaatttctcaacaatggcgctttctttgagaacttcaagctgaaattggtgacacggagggccactccactttggaatagtgtaggggacagtattctacttcacggttcggggccgaactagattattcgcgtcaacagatacggaatcgtctttggattccttcattggagagggagccaaaaaatttgatatgtaaataaccagtaaagaatcaaaatcatttacatatcgattgacctgaaagtatattcaacttggagcattagcgccgcggaggctatttactatagaaccgattataatctgatcaagatcttcacactgaaggagaattagtttccaacttggatcggagagaaattgaacacaaatccagttcgtttatctcgttggataactttttttttgggtctttgttttttttagataccaattattcaccgtttatttttattttcttttgattacaaaaaccatcacatgactacttacgttgggcttcaatctcaatgaattattgggcttgggatttgtttattgggttttcaatatttattattttggttatgttggtaattaataaacaaaatgatgcaaacaaattttataaataataatgttagtataaaa

SEQ ID NO: 32847 - DNA, 798 bp, Arabidopsis thaliana landsberg
tatataggatcacataagaataaatattggaatatattattttttataaattatatttaaaatcaatactgtaaattcaaaccgaaagcatgtcttttaaaatagtatagaacattgtagtgtcttactatatactatagtagcagtaatagagaacacataatactaaactaaacgtacgacgaataaagaacgttatattctaagtgatccaaatgatggagttaaactcatctgattccaagaaaaactatatcctaagatacaacattggcaacccaagcaaccgagataaaacgtagcggtgatgttgacaatagcgatggtggtagtggtgacgataacgatgacatcgattgtaatggtagcactaacggtgataatgacggtatagaaagggaattttgcacccatttttttatgacaacttggcaaaaaaaaaaggaggcaaagtgataatatgaaagtgaagattaagttgatggggaaaatgagattaaaaggctgttattagattgaggtttttaatagacttgaattggcttgataatatgtgggttttgattttaaagtttaatgttttacgtggattttgaaatacttgataaaatgtttggattattttttttatgttttatgaataaaagtacattcaaatcctaaatgaaacaaatcaaataaatattgaataacacttatttttaattcattttagaatatatcaaataaacattaatccaataaaagcagattttttaaagtagttttataaagacataattgaataacacgtaattt

SEQ ID NO: 32848 - DNA, 603 bp, Arabidopsis thaliana landsberg
aaggtatttaccttttgcctatctgaaatgaggctgaacccatcatcatctccaagctttaagtcacttttaagaagtttgatgaaccatacccaaatgtctgtattttctactggcacaattcaccatgcaacatgaaagaattggttgttggcatctcttccaatagcagctaagagttggcgttttacattgttctttaaaaaacagccgtctatcccaattataggtcgacaatgagcaagccagattttccggagtcctgctaaacacacgtagatcctgtcaaacttctctacaccatcatcagtcatgacagtccccacctctatagttgattctggattagacctgcggatcaacaagcaacgttaaagataatttaagttatatgaatttgagagataagataaataacttactctattagctctaaacggtagtccttaagtctagcaaattgttcctcatgctcatcttcaatcgctgacaatgctttagctttgacttttctacattgatcatttgtcacaactaaaaaaaacggtcttcaattgtttcttgaatggccttcggcttggttgtagaagattttctatgtca

SEQ ID NO: 32849 - DNA, 1806 bp, Arabidopsis thaliana landsberg
tgacactacaaacatgagtttaaattgataacgttgtagcagtgaaaataactaaactgtaataaaacatttagtaaaaaaaaaaatatccaaaattaatttaaataagatattcaattgtaaattgtactattacttttgtagcattacccttgtaaattgttatgctcttgattttgtaatattcacttttaatccatcaaaaatataccatctctttgattggttacaaagtaaacattaaaatttgtactataaaaatctcacattgaaaaaaaaaaaccagagcagaaaaatttgtggagaagaaaaatatagaggtcaaatgtggcacaggtgatttgagagagagagatatatgagctgcctttagaagatacagccgccaatgtctgtttctctcgacacaactatcacttctcatttctcatttctcatcagtcaacaacttagaaaaaaataatatatatttcgcggttaattcgttccgttctttattaatcatataaaataccccaaaagatagctgtataatatacgctacaatttcttcttcattttttatatcatgaataaactgtgtcgaccgaaaacattagctattatatatatatatatgctgctcactaccactcactataactctttaaatattcgaaacaaatgttgctacataagctaaattaaatttgcgaaattattaaaacggacaaaagttgactagtaggctgacggtcaaacccctctatatcaccttcacatgtgacaaaactaaaagtatggttttaaaaccactagactaatacgacgatgtactggctgattgaacctggagaaggtggtggaagcaatcagctgcagtcggtcggttctcttggtttggttccaaacacttcccctgaaggtctctcaacatctttggtacattactcaatccacacgtctttatcatataacccactccccaaacatctactttcaccgcatgcaagcctctctccatctccggcgcgtatctcccacgttcatcctccctctccttattgtctaccactttgtccgcggggcggtgcgggttaagctgtggggcctcgaccgcagcgtcaaacccacaaacaaaccaatccgtgtcagttgttgttgtggtcgtcgccgtgcttctcattacattatcccatcccatgtcacgatgcatgaaagaaaggtcgtgaagtgcaaggagcgctttagtcacacacatcagcgagtcgatgagctggtcaatgtttcgaggtttgactctgattccacgtggcttaaaactcaacgagagatccttctcgcttgccatatccaaatctccgcgtgtggaactctttggtcgagaaaatcgtagattcctttaacacccagccattttcttttgcttgagtaataccttgtcaccgtatgaggcgttaactcggtcacataatctccacgatctattctctcgaagtcattgtagcatgaaggcctcgtagtgcaccgatctgcatgcaaaggtaaaagggaagcgagacggtaacaaggaaccaaggccttgattctatccgacggtgacgagacgttgaatgaataaagatcggtgcagatcactcgatcttgtgatgataggctcaaagcgcagaatgttacggtgaaccctattgcgtgatatccaagaatatatggaagatcgttgtacgaccaaagaatcttctcggccaatagagaagaaggatcagcagctccttctcgtaccttgtcagcttcttatactcttcataagccatatcctttaacata

SEQ ID NO: 32850 - DNA, 336 bp, Arabidopsis thaliana landsberg
attggatctgcggatcaaaaagagtgcgtggagaaaattctcagtgctctggatgatcagtcctttttcagaataaagagtaccccaaggcgcagctcatctccagattatgagacgaaagagatcaaaaacatatacatcgactgtgagtgaatgttaatttgtcgatgttgtgattcagttctcctgactatgagtttcgttagagtggttggcaggttggtggttggagtctggcgtctactaacttatcacctatttgaaggatacattaacgtagtgcaggcttacagaacactgcttggttctgataggaggaagctcctatttagctgt

SEQ ID NO: 32851 - DNA, 4944 bp, Arabidopsis thaliana landsberg
atgtgaagctgacgttctcgttcttttaatagcacattatgaaaactccattggatctcgtgaaccttgtttttgaattcagtgagactttagacaaatagtctatcacacacccataaaagcttggaatagttaaaattattcattttagaaatgtgtgggatcttaagcatgctgaaacatggtttcttgaactccaattgcctaaggttgggttcattgtttactaatgttgattggtgtgcctttctacaggatcctgctttctatgttcttaaagaagatatctccccttgcatatttggttcaattgagaagcagaggtggtcatatgcgtgtgcaaagcaactgatcgagagacttgtttacggtaagcatttctgtttaagatgatgatttggggtaagaaccagaaggcttacactcaactcacttgtttcttgtgacagctgagggtgctgagaatgggcttgagttcaccatcgtacgaccttttaactggattggacctaggatggatttcatccccggcattgatggtcctagcgaaggtgtcccacgtgtccttgcctgctttagtaacgtaagtgttcaaatccaagtatataacccaatgctattctgtgtatatatgcaagctcctagttaatgcatctctatctatctttcagaatcttctacgtcgtgagcctctcaagctggtagatggtgaagcatcccacagaacttgggtctacatcaagtatgctattgaagctgtccttttgatgattgtacgttccattgcctgatataagctttttgtttacaaactgttaatgttaaaagttcaaagtagtttcaactaaaacctataatgacattgtatgtttgtggttcaggaaaacccagagagggcaaatgggcacatcttcaacgtaggcaacccgaacaacgaagttacagtaagacagctcgctgaaatgatgaccgaggtgaggaagatggatcagttaggaaactatgaaaatagtttgatttctctgtcgctggttctcaattctcaaaacgaatcatgtttcaggtttacgcaaaagtgagtggagaaggagccattgagagcccaacggttgatgttagctccaaagagttttacggggaaggttatgatgacagtgacaagagaatcccagacatgaccatcattaaccgccaactcggtaattcttcataatcaccaacatgatagataatatgctttaaaatcaaaatcaattgctattctgatagaattttggactttgaaaataggatggaacccaaaaacatcgctgtgggacttgctcgagtcgaccttaacctaccagcacaggacatacgctgaagctgtgaagaaggcaacatccaaaccagtggcttcctaaactctccaagaccccaacgaaactcgttaaacacgcgtcattttggcattttactctattcgattctattttttcatcccagagaaaactttttttttttttcttttttttcttcttaagaaaacaatataatcacggtggttcgttccaagtatacctttcgtttgtaagttttctctttttgtttggtttgtttggccatgtatgtcggagctgtcagaaagcaaaaggttaatcgtttgtagcgaatgataaatgttcgagtttatattttaaaaatgcttcgtcttacatgtgtacaagtacaagaacacatctaattatcttttgtcaagtaacacattgtgtttcgttcagaaaaaaacaagtggactacagagagtatgaaagaaagtgtagtagtttcggaacgctcgacaatgtctttttaccaattaaatttgattttatttttaaatcgtaatatataaatcacaagtagcgtctgtagtccaacggttaggataattgccttccaagcaatagacccgggttcgactcccggcagacgcattcttttttatcattttaatcagtttagaaaaacataaaagataaagacaaatgtgaattgacgaagacgtcctcgtctttatcgaagcgagcaaggtaatagatcagaacgcgttaacagggcattttagtaaattgggccacacaaatgttagatttctttgtgataaagacagtacacaagtcctttctctttctcgtttgatattttccaattccgcgtctttctctgttgaaatcgaaaagattttcaaaacaaaatctaaggaaaaaagagcaacaagtttcaaatctcatttgggtttttcattttgaaaagaaggacccatttttatctctctcaatgttttgttttctcgaatctgaaggagtaaagttaaaagctttgaaggagagaatcaatggcgggttacagagcagatgatgaatacgattacctattcaaggttgttctgataggtgattcaggtgtgggcaaatccaatttgctttcacgattcaccaagaacgagtttagtctcgagtcaaaatccacgatcggcgtcgagttcgcgactcggagtttgaatgttgatgataaagtcatcaaagcccagatttgggatactgctggtcaagaaaggtctcatctttttcaaccacattgttcatttctcgatctggttacttatattagaacattttgattgaagttttggggtttatggttttgtttggttgccaaagacagtaaattttcagcttaggttagatctgtatcaattgatttagatccattggtattgatcacttttataagaagagatctggattagtatgtgattttgacaacttgggttttgtgtaagacaggagaatcctatgattatgattataaagttatcagctttatcaaatttcttctgttgtttttgctattttaggtttatgtaagagagcttgattggtttcagtagcttcatttctacgattcttagctcttctttctcagatttcacctaagattcttcaatcattatcgatttcttctgttgtttttgctgagtttatgtatgtaagagagcttgattggttttagttggattcttgaactttcatttgaagcttttacttggtcttaatttcgaaattgaaaagcttcttgctttgtatgatttgctattctccatttttctgatcagttttgtgaagcgcgcatagtctgaattcgaatgtgtaaagctttttgcctttttatgttcctgatgttttggttaacttaattctctgtttcattgacaatgtttgaatagataccgagcaatcactagtgcttactatcgaggagctgttggggcgcttcttgtctacgatgtaacccgacactcaacatttgaaaacgttgagagatggctgaaagaactcagaaaccacactgatccaaacattgtagtcatgctcgtgggcaacaaatctgaccttcgccatcttgtagctgtgcagactgaagatgctaaatcattcgccgagaaagaatctctctacttcatggaaacctcggctctcgaagccaccaatgttgagaacgcgttttctgaagtcctcactcagattcaccacattgtgagcaagaaggcgatggaagctgctagcgaatccgctaatgttccatcgaaaggagacaagatcgatattggtaaagatgtttcagctgtgaagaaaggtggatgctgctcgaactaaatggtcttatgtcctaaagctgaaatcggtttttaaattttacattcaaattttgtttttgaagatgtttgcttttttttaggaaaacaatctatgttattatgccttttgatttgcttgtttgaaaattgcttagctttggtctgattctgtaccggttgagggattttgtaatttaaccggttctggtctatggtttgttcagtttgtttttaattcaatccgcaaatatctctaaaccaatatttattgtgctaatccttaaacacaactaatttttgttataccaatttagaaaattttggtcaaaaaaatagagatcacaattcagtttctaataatagaaacttttaataacaattcatttttagaatttgcttttgttttctcatttgactattcttgactttaattttatcaaaataatccatgtaatcttttaaaattttcttaaaacaaatcacgtcgtcagtaacgccgaaagaatattccgttactaagatgacggattctaccgtttcccgccaagaaaacagcccaaagagaccaaacgacagtaacggcgaattcaaacgtctattagttcccgaaacctctcagccagaggaggacgagcttcacgaatcaccaccggagaatcaggtcctgaacgtagaagaagacagagaaaaaacctacgattcagttccgccattctcatgggcgaagctatggaaattcaccggacctggatttttcatgagcatcgctttcttagatccaggaaacatcgaaggagatttacaagccggagctgtggctgggtactctctcctgtggcttcttctatgggcaacgctaatgggacttttgatgcaacttctctctgctcgtatcggtgtcgcgacgggtcgacatttagcggagatttgtcgaagtgagtatccatcgtgggcgcgaatcttgctttggttcatggcggaagttgctttgatcggagctgatattcaagaagtcatcggaagcgcgatcgctcttcagattttgactcgaggttttttacctatttgggttggtgttatcatcacatcatttgattggtaagcaaaattaggtcaaaatttaaagttattaggaagttgaatagtattttaagtgatatatatataagatatgtgcatctccacttattgtcaattggttttgagttgtaagtccgtctaataaaaagattagcttcaaaattggacgaagttttgatttgcgttgttgtgtgaaaaacagcttc

SEQ ID NO: 32852 - DNA, 684 bp, Arabidopsis thaliana landsberg
cacgcaagggcgcgattacgactgtcagctgatccacgaaggcttcaagtgcccggcgctgcacgtcgcgctggaccaggtgctgaccgatgaagtcgccgccggccgccgaccaccggtcctgcgcttctgggaatgggactcgcgctgcgtcgtcatcgggcgtttccagtcactcaagaacgaagtcgatgccggaggcgcggcgcgtcacggcgtcaacgtggtgcggcgcatctcgggcggcggtgccatgttcatggaagccggcaactgcatcacctattccatttatgcccccaaggcgctggtggcgggcatgaccttccaggagtcgtacgcgtatatggatgccttcgtgctggaagccctgcgtgaactgggcatcaaggcctggtatcagccactgaacgatttgacgtcagagggtggaaagataggtggtgccgctcaggcccggcgtggcaacgccgtgctgcaccatgtgaccatggcttatgacattgatgccgcaaaaatgctgcaggtgctgcgcatcgggcgtgaaaagctgtctgataagggcacgacctcggccgcaaagcgagtagacccattacgcagccagacgggcctggcgctcgaggttattgacgagcgcatgctgcaaacctttggccagcgtcatggcctgaccccaagcgc

SEQ ID NO: 32853 - DNA, 1442 bp, Arabidopsis thaliana landsberg
cgatgatagcttccgttaacaaagattaactctaacataaacaacggattcagtatcattcatccaaaacaaaaagtgaaaaccctaaaagttcatttctgttcacaaatcgcactgagaaacgccaagtcacggaacagaatccttaacaaacacataacaagctaaaagaatccaacagagaaagaaaaaaagagagaaaggtaccggagatctcacagagagacgataatcaggagacagtcgtagtcgcaatcgcaatcgccgcgtagagagaagctctgagaatgttcgcgaaactcacaaagccccatgccaaaccctatataccctcatctttatcccaaaacgatgtcgcttttgggactgcaacagtgcaacaggacgccgtttgccagttttccttaaaatggccttgtttttttgccatctgccactgttttcaaaagggacgctattagtttacgatttcaaaagagttttactggtttaaaatgttatataaaatctgttgttattcaattaagatttattaaaagtatgttaaagtcttgtgttatttatttaagatttgtaagaagtaatttaacatttttataaatttggagttattgtattcatactcttacaaaatcattaaaagtaattttgtgttattcaattaaaacaaaagaatctctgattggttcatgactttttacattttttttacaaaataaagttatggaaaatcatgaaaattattataaaaataaagagattgtttgagaaactttataagattataaaaaactaatcaacaagattataaaaaaaactctctaacaatactttataatcatttatttatttaaatcatgaaagtatttactttctagaatgtgattgaagtcatccaaatcctactatattatttgggaagtacattttaaatgtaaccttaatttttgtaattaattacatgacaatgccattagaaaaatttaatcaaaaacaaaatcttttaatgacgtcattaaggttaccaaaatcatttaacgtcaatattcatttcttaattgtagggcttattggatctaaagacgggtcatcaaagattttttaaactgaatcaaaatataccgagtattccaatatctatctcttaccagatataaacaaataagttcgtaaaacaatttaatattttatatacgaaatcaattaaatcttaattacataaaaataaaaattagcgcaaaaaaaaagtattccacaattagatttttatcaaatctctctgttatataagttttgataatatattcgaataaagtgtaatataacttttcaatttgtactctttaactaatttaagctaactaatatatttgttaatcttatacctatcaaaacagactatcgtttcttatctctatagtatttttgcaagactttttggt

SEQ ID NO: 32854 - DNA, 962 bp, Arabidopsis thaliana landsberg
  unsure (1)..(962): unsure at all n locations
tggttatccagtagccaactatgtacgtgtgattgattgtgtagtaatttccgtcttgtactttgtaagttgggttcttattctgctgcatttggctattccgtgtctgatgacctttgttttttccttttgcagctttgttagagtctcatttagatccatgtctctttgctttaattggtcacaatgcttcttctggttttattgcagcggaaacggtttattgaacaaacgaagactctttatggtatgaatttcctggcatctgtttcaagtttactttctaaaacctggaagttcggcacatgagcagttccttttagaacagtttgtttacttaaacctttgacgcccttttgtgtactggtataaacctcctgcctcttctctcatctgtttcaggcttcgattccacccttcatattacagtcgcaattacaaactagtgtcaatgagagaacccaattcgatcagaggtatgctttctcttcttgacaacaagnnnnnnnnnnnnnnnnnnnnnnnnnnnnnnnnncttttatggctttggttttgaaaagtgaaatctttatgtgaaagttccattgggnntttttaataggagaggagattaatgagtaatttaaaataagtgagcctatataggccctaaagacaaaaacaaatcctaactttttgtctttttttattaaactaaaatatcaaggtcatgatttacaatctatattctttcttgatacttttcatgattttagcttgtaaaaaaaaatgtataacaccataaaccaataacaccataattgaaatcattaagaatcatagattcatttgatttagattaatcacatccagttctaatgactttattaaattatgaatctaatagctcagcatctatcaagactttagatcatgttgtataaatcacaatctaataacactaactgtgaacagaatcttat

SEQ ID NO: 32855 - DNA, 1023 bp, Arabidopsis thaliana landsberg
  unsure (1)..(1023): unsure at all n locations
ttctctatgttctgaccgtttcgctgaatctcacgtgaatctctgattttccgggaatttcaattttttctcattgtctctctccctacattgtttctcatagcctacgagaaattacgtggtagcttgtcggaaactcaacttccgttgacagaaggcgcgagaaagaagcaagcttaggttcgatcggaaaattctagggttctctagtgtttaaacggtagagataatcgatctctaatcggatactgttttggatctccattcacaccctctggtgagctgattttgctttagagatcgccggcttagtttctctaatggatccgacttctcgacccgctattgtcatcgacaatggaactgggtacgttcaatgataggtttgatttgtttatgcgcttaacgtgttcgatgaaatgctgcaattagattcattcttgtgtgtgtgtgtattgcaggtatactaaaatgggatttgcgggtaatgtagagccatgttttatcttaccaacagtagttgcagtaaacgagtcgttttgaatcaatccaagagttcttctaaggcaacttggcaaactcagcacaacgctggagttgctgcggatctcgatttctatattggagatgaagctcttgcgaaatcgcggtctagtagtactcataatcttcattatccaattgagcatggtcaagttgaggattgggatgctatggagagatattggcagcagtgtatatttaactatttgagatgtgatcctgaggatcattattttcttcttactgaaagtcctcttactcctcctgaaagtcgagaatatactggagaaattttgtttgagacttttaatgttcctgggctttacattgctgttaattcagttcttgcacttgctgctggctacacaacatcaaaggtatgttacacatttcttttctccaagtatntacgttgtttgctgtgatgaaatgctatgtattagcctacttgctgtgatgaaatgatatgtatttaagttg

SEQ ID NO: 32856 - DNA, 5616 bp, Arabidopsis thaliana landsberg
tcttgatcctgcaattgaacgaagttatatcagtattacgcaattatactctagttatgatagtgttacttagtattacgcaattatcaatatgtacctttccctcctttgctttctgctcatccttgaatgcttccaacgattcaactcttctatccaaataagaaatcattattataatttcattcagctggtctaccatcttcttatccaagttttcaatcctctcaaccacagaaaccaaactcgggatccggaatatcctccgcacccggaatctttggacctgcggtgatctgcagggcttgaatatcctgctggtagagctcatcaaacctgattagatggccctctttacgacgcttctcccaactttcaaccaccatatcagccacgtcaacgtcgtcttcttcttcagtgattgctttcatgagtttttgctccccaattccaggtgtgacgatagaatcaatgacctgtaaagataaacagtatgaatggattattataagaaaatataataactatcatttgtgaaacagtatatcttaagacaactaacctgagttgtacccaattctgcataaatggtatcaagaggaaagcctttcaaatggttcttcttgaacttcaccttgcacatcctaggacatcccggatctgctcctgcaatttcctcaataatttttccctcaactgtgggattgcctcgaatgcaagaagctacagaataagaaaaccattttaaatcacaaatagtattccacagtattatcagtattgcaaacaatcacctattctctataagttgtaactaacctccatcggaagacagaaacccggaaccggccatatgtacttctcgttggtggtgactgaaccattcaaatgattcaccgtgtgtgagatggttcctaacatgtcatctaaagaatacctcccccactgaaaattcctacagaacgtgagatcactcaccaccttgaggcaaaattcatccacttgaggtgccttatctccggtcttgataggcgctatgataatgctgcttaagaaatacaagaccatcatcctcaacctttcttttgatctttcaccctccggtaccattcctatgagcttctctctcacgtcttcgcgtttcacaacagtatccttgaaatgcttcctcttgaaatccaaattccccgtatttttgtaaccaagtttatagttcttgcaattgaactccgatatcaatgcatgttccaatattccatatcggattggaacgccattgacgatgaaccacgcttctttcttcctttcaatgcacgccgtgcgaagaaggagcatccacatccccataagtcggtggttcggatctcttggcatgtggaagatatgttggaaactaggatggttctcaaaccataacctctcggacttgctcatcggcggctccaacttatcgaatgtagtcaacaattcgtgaatatagcaccgagttgaaagcttgattttcttcacatattccgagggcgggaaatacatactcaagggtggtactgcttctgtttcctcgtcgatctcctgcaacagacattcattcatattactaccgatggtacatagaatcatacacatagttatatcctagtaatgacagtattatccagaaatcatacacgtagttgtttcctagtattgacagtttgacccacaaacgcatagttatatcctagtaatgacaatattatccagaaatcatacacgtagttgtttcctagtattgacagtttgaccaaaaaacgcatagttatatcctagtaatgacagtattatccagaaatcatacaagtagttgtttcttaatattgacagtttgacccaaaaacgcatagttatatcctagtattctccacaaatcatacacgtagttgtttcctagtattgacagtatgacccaaaaacgcatagttatatcctagtaatgatagtattctccacaaatcatagtattatcctgttctaccagtttcaaaccattcaaatactgagaattgactcgaaatccttaccatagccgccggaatttccactgcagttgatgtctcatgcatccatattctcatcggaggaggtctcttcccccaagcttctactactatcatctgaggactcttctccggcaacattctcctcttcttctttctcctcttcctcctcttctcttcttcttctttctcttcttattctttctcttcttcttctttctcttcttcttcactctcttcttcctcactctcttcttcctcaacattctccggatcttgctctgtcagcgacggctcctccgtcctcgtcggcgcagtctccttcgttgccggcgcagtctccttcgtcggcgcagtctccttcgttatcgtcggcgcagtctccttcgttgccggcgcagtctccttcgttgccgtcgcagtctcctccgtcgttgatttcacggtcgttccaactcctctcttcctctcctttagaggcggcattgttttcggcggcattagggttaggattagaggagaagaaacgattctgagagaaaagagagagaattagggttcgtgttgttgagaatttgagtgaaagggagaggagttgtttgtgttcacagagaatcgagagagagagagagagcggtttctctcggaactcgtttctttgagtgaggaaaaaacgaaaaaattgtaagtgttgagtctgaattctttttttttttggttttcaaattaaagtgagaggatatcttggtaaaatccttcatttatgtatttaaattaaatcacaaataggttctgttttttgtgggaagatatgagattttcttcaagcaaaaagggagttatgagatgattggtcgtcctcgccggagaaaagatacgagacttctctctcaatcctgaagcagactcgattcatccatcagtcaacaaatcttccttcacaatgggtatatctctttaatgttccttacttcaatttcagtttcgattctagaaatgaaataaactgattaattgtcaaaacccaattcccagatttttcttaatccccagattaaaattgtcaaaaacaaaaaattggggttttcataaaaatgataaatttcttaaaagatgaaaactttatgtgtttttttcttttgggtaacagatgaagaagaagcaatgttactgctaaaggaagaagatgaaggaacaagaagaactagtgttcctacacaactcatgaaactaaaacgaacccattggtggattcttgtctttataagtatcttcttcctcatctctgctcaagccattgctgttcttcttggtcggttttattacaacgaaggtggaaacagtaaatggatctctactcttgtccaaacttgtggttttccgattctctatctccctctttgtttccttcctgcttcacactcttcttcatcttcttgttctttcaagactctggtttggatttatctttctcttggttttgctattggtttagacaatcttttatactcttttggtcttttgtatctctctgcttcaacttattcgattctttgttcttcacagttagctttcaatggtgtcttctcttattacatcaattctcagaaaatcacttgtttgattctcttctctgtgttgtttctctctgtctctgctgtgttggtttctcttgacgatgattccaatagcccatcaggagattctaagtggagttacttgattggttgtttatgtactgtttttgcttctcttatctattctcttcagctctctcttatgcagttttctttcgagaatgttctcaagagtgagacgttctctatggttctcgagatgcaaatctatacgtcgcttgtggcttcttgtgttgcggttatcgggttgtttgcgagcggggaatggatgttgttgagtgtggagatggaagagtttcacgagggtcaagtcatttatgttttgactttggttgggaccgcggtttcgtggcaattgggttctgtaggagccgtggcgcttatatttctggtttcttcgctgttttcgaaccttattggtacgctctcactcattgttacccctctcgcggccattgcggtgttccacgacaagctgactgaggttaagatggtggcgatgcccatagccttcacaggattcacgttttatatctaccagaactatcttgatgacttgaaagtacaaagagcacgagaagctcaggccgaatgatttattaaactctattaaaaaagctctaaagattgacattgagtaatatttctcggttgcatgtctccaaaatatacttaaatttgtcgttacgtaatacagttcaatctttgtgcactgtctaaaggaacctatactgttcaataacttatgaatttataacttacaaattgtggtctaccaactcatttgcttctctgcacattctttacgaagtctttttgttcaatacactgtctggaataaacactattcaattagtcattcttcattttcactaacaaaacaacctcacagcttcacgaaaccctcgcttcgcaaagacagtgtaaactgctactacaccatcattctctgtaagttgaagaagcatcatcagagaatcctcaacactatgatcagttacgctatggtgtcacctaattatgaaactccatcttctttcattttcctaaacaacacataagcttcctgtagtaggcgtttactacacaatcctgagatcattgtagtgtatgttacaacatcaggcttaatgctgaggctacaaaataaatcccacgcttctcccaccttgccagccttgcacatcccttcaatcatagtattatatataacaatattaagttccatttcactcttttgcagatacttgaatatgaccaatgctgtatctagcttcccataactacaaagtccatgcaacaaaatgctgtatgtcataatatctgtaggcacacgattagaacccatctgtttgaataccatttgggcagaatcacagtcgccagcttgaaaaaacccttggataatagtggtgtaagtgactgtgttgccaactaatcccctttgagacatctcgcggaagagttccacaccatcctcaacccttttacacttacaaaatcaatttataagcgtattataagtctgtatatttggaagacagtccttgctaaccatgaacttaaacatctgcttggcctcgtctaggcgattgtgcatgcaaaacccattgatcaataaattgtaagtgatagtatctggatctatagacctttggatcatctcctcgtgcaatttttcagcctctacaagcttcccctctttaaaaaacgcatcgatcaatgcattgaaagtaacaacattggggttgattttcttctcaagcatatcactcagtagtcgagaggcatcactccatcttccgtaattacaaaggcaattaatgagggaattgtaggtgacaacattaggtctaattcccttggtttccatttcagtgaataagtcaacagaaacttccaaatgtctatatttgcagagactatcgatgattgtgttagga

SEQ ID NO: 32857 - DNA, 3646 bp, Arabidopsis thaliana landsberg
catttataccaacaattcttaatctatatgaattagtaaaactaattcataatgtagaatagtcgtgtcggcaagtatatgtttgttgttccagtcgttcaagacaaaaacttaagaaaaaaaaatgatgaatttaactgagttattattagttaagtttatagtcattatcattaacaagccaactatacagtcaattataaagataggaaacaaaaacagagataaacatgaaaacaaagttattcccaaaattatgaattaaattgaatttactaataagttataggagtgaagtctctcattaattcattttacttaggggaagaaggctaatataacgctccaaaaatctcagtgaatgatattgtctggtccttttatgtaaaattaataataataaggttgattagttactgggatcaaacaaaatgattaatattaatattaatagcaaattccaacaaacagtaagtgttaaacaaataataacatgtacttgtttcgcaactctctcttcatctcctcttcctctggtctttttttcttttgttgcgacttttcttcttcttcttcctcaggaacttaagtttctgagtccatgaagatgccagtaagtacgtttctccctttctttaattcttatttttgatttttttgtctaatgagtttggcttaatctctgtctgcaattctatgattctctcagttaaattttggtaaagaaaatcatatgaaatcgagatagcttctaggattcttacctcagttctgtgttatttgtttgtaatcgagacctctctgcagccaaatctagaaatctgtctttagattcctctgttttttttttgtacttacaggctctgttacttggatcttcatgtcagtgtgttctgattgatgtttttcttatgaccgatgcttctgtttagtttcatagtttgaagtttatgaactcttatctctgtttatgaggttttccaagaggagaacttatcagattcccctgaatttcttccatggaaaccgaaaatataggagagttcatgtttttaatcagatatgattcttgtcaaactcaatttacgtttagctttcccggaatttcctttacgcaaacgttttttgtttcccttcacatatgactatcgttagtcatcacatataagatttgctaacatcatcagttttgatctaattttgtcgaatttagactgattttctcaagttgtaatgcaggtggcattggtctggctactggcattcactattctactgatcagtggggaaggcaataatgccatctgcaaggagaattttaagttagaccctagacctcatagtgtttcgatcctcgagtttggtgctgtgggagatgggaaaacgttgaacacacttgcgtttcaaaatgctgtcttttatctaaagtctttcgctgataaaggtggtgctcagctttatgttccaccagggaaatggctcaccggaagcttcaatctcacaagccatctcactctcttcttggagaaaggagcaacaattcttgcatcaccggtatgagtgacctctctagcaaatcttgtaaagctaaatagtgttctttaggtatctatagctctttaagaagtgtttggtagacaagttttttgtaacacggtctctcaattgttgtctaatgtgctaggatccgtcgcattgggacgttgtcagtcctctaccgtcctatggtcgcggaattgaacttcctggaaagcggtacagaagtttgatcaatggagacaatctaatagacgtagtcatcaccggtaaacaacaaaatcatgccatcattaccttaagtttctggcttgacaacattaagactcaaagcttctttattttttggtaggtgaaaatgggacatttgacggtcaaggtgcggcatggtgggagtggcttgagtccgggtccttgaactatagccgacctcatatcatcgaattcgtctcctctaaacacatcctcatatcgaatctaaccttcttaaacgcgcccgcaatcaacattcaccctgtttattgcagtcagattcatatccgcaaagttttgatcgaaacatccgttgattctcccacgttcttggagttgcccaggtatataccatttcctcattcttttccatcactacaaaatgttaccgtttgaaagctaatttcttgaaccgtttttcttcaagattcttcggacaatgtttgtatcgaggactcaacaatcaacgttggccacgacgcggtttctctcaagagtggttgggaccaatacggtatacactacggccgtccaaccaccgctgttcatattcggaatctcagattaaagtctcccaccggtgctggaatctccttcgggagcgagatgtcaggcggagtctcggatgtgaccgttgagcgtcttaacatacacagctcactcataggtgtagccttcagaaccaccagaggcagaggaggatacatccgtaatatcacaatctccgacgtcgatctcacaagcgttgacacagccatagtagccaacggacacaccgggtcacacccggatgataaattcgaccgggacgcactcccagtcgtgacacacattgttatgcggaatttcaccggagttgatataggagtagccgggaatctcaccgggatcggagaatctcccttcacgtcgatatgcctcgcggatattcatttacaaacgcgatcagaagaatcttggatatgctccaacgtctctggtttctcagacgacgtatcaccggagccttgtcaagaactcatgagttctccttcgtcttgcttcgccggtggtagcatatacgagggtgatgcgacggctcagtcgtattacagttggtaattatagtaaaataaaatggtgatgaagaagaagaagaagaaaaagaagaagagagtgcatgaggttacgatacgattggattttcgaattttttttgtcaataagttcataaaatttgttgtcagagagcgagaggaagaagataaaaaaagaaaaattacgttttaaggtggtgagtttcaagaacagagcgagcttttctattgtattaatgtacagcttccatttctttcattcatggtgtaacaaaattcatctttttttctttctgtgaagaagaaaataaaaaattatatgtgaaatgattagttatgtcttggatgctctttgttcggttatagatagatacttccaatttcaaaatgctctcatgttttggaagatagtattagttcagatgacgaaacacacaacaatgtgtgggattggatcagcacaacaaggagtcctgtcggaatataggaagttcatttgaatcaagtatcattgccaatttgccattttaagattctttctttttgttgattgcattaacttgtttgctctgtttgtgagtttcaacgtttaactatcatttttgtttatcaaaatcaaatgttaggtttttgagtacagctgtgaaattgatggattactacctgttatttatacgtaacttccaacaatcttaattttctccattgagatgaaaaatgctatcattacataattatgtgagctttgacaatgcagatcttggaacctgtcattgtagttt

SEQ ID NO: 32858 - DNA, 605 bp, Arabidopsis thaliana landsberg
atctaagtccccaagccatcgtggtatgtatttccgggcatcttaagagtccatagtagtatataagtatttgatattacttttgactatctgaattacccgttccaaatatttacccgctattttttcgatatcccgattagattcacccatagaattagtagtgaaggcgagagaagattatatttccttttagaaacaatattattttatttttattttttttggaaaaaactgttaatttgtaacaataacaaaaaaaaaaaaattagaagcagaaataatttagttttatataattgttttagcatttatatgtatgtattgacaaagaaccaatatatattgactcaagaaataaactgatttgccaagtcaagtcaaatattatatggagtcttacctacccaatagagcaagtcttacaaaatattttggtcatatagaactcaagtggcaaggttataaatattaaaaaatactctctattatctttatcacgatacataataatggtgggttggtagtaggtatctgtcagatctataagtagtgtatactaatgtttccagttgaattactttgatatcaactatttaaaaact

SEQ ID NO: 32859 - DNA, 1259 bp, Arabidopsis thaliana landsberg
acggtttagtcctatgcatcattaaggacaacacagggctcttggtatggaacccttatttggggcaaactaggtggatccatccgagaaacaattaccagatagaagataggtatgctcttggatatgataacaaccgtacccacaaaatattgaggattttcgatttgtatccaagcagcaaccgcgtttttgggtacgaagtctacgattttagctctaattcatggaaggttcttgatgtcattcctgagtgggatatacagtctcattttcgtggcgcgtctttgaaagggaatgcttattttcctgcgcaaaagaaagaaacagtgggaggaataaagacaataaatattgaagatgttctactttgtttcgattttacaagggagagatttggaccgcctctgccactgccgtttcactcttacaatgcagacttttttgtgtctctagcttgtgttagggaagagcagctcgctgtgttatatcaacgctggggggcatttgagacaatcgagatttgtgttacaaataagattgatcccaatacggtttcgtggagcaagtttttgataacgtccactggttttccggttgacactttttctgggagctttttcattgatgaggagaagaaagttgctgtggtttttgatttagatagatataaaccgactgagacctgtcgctaccaaatagtttatgttattggacaagatgaatacttcaaatctgtcaacatgggagttgccccaaatatcgcgaagaactcgtaccaagcttactgtgttccacttgtgtgctcttcttcctatgttccaagcttagttcaactacaaatcaacaaaccgggcaaaaggaaagaaagtaactagttccatttacactactttttatatttttcttgcatcatcttcttttgtttcattccattgactttgatgttcttttgaacgatcattaacttgtgttttgctatttatctgcttataaagaagtggggggttttgtgatacaatcagctcggcctttaactaaaatcatactagttgtttagatgtaggagtccatatggaaatagatagataagttaagagaatcatttactgcctctgtttataaaaaatcactcgaggtattggaaatgcttatttgtttgatggctaggtggtctgatgcatcgagttctgtgttttgggttcttaaactcttgaatgaaattggcataaatttgagtcttcctcagcttattcttg

SEQ ID NO: 32860 - DNA, 686 bp, Arabidopsis thaliana landsberg
ttaatgcatttacataaatttattttcctctcggcaaattaaagccataatgtttgttttatttattttaaagatcgagctccgattttggactttctctaaggtttatcataacaactaatatttgatcagcaagtctaattcagattttttcctgattttatcttttacttggggttactttcaattaatgcattttttttttcaaattctatctctcaggtcaatacatttccaagttatcaaaaataaacaacaagctcaattaatgattagtgttgtttaatttaattttgtttaataatatttgatgtttagtagaatattcttataaaaaaaaacctttaacatttttttttttttttttgataataagtattgctaactaaggaaaaagtaaaattctcaaccgaacttttgttatttccttatttccgcagttctattccaaaaaaaaagaaaatctttatatctatttcgctgtaaataaattaaaaacgaaaaataaaaaggaaatactgaatgaagttggttagatctcgcattaattgcttatatatttgtgagagactttattcccaagctattacaagttctcaaatttttccactttcacttaattaggttttgcttaaagcttgttgccaaatctatcaaaagaattcaaccgttgttctatttgcaat

SEQ ID NO: 32861 - DNA, 560 bp, Arabidopsis thaliana landsberg
  unsure (1)..(560): unsure at all n locations
tttgctgttctttaattgaaagaaacgtaaccaggttttctgtcgctgccggagcgttaaatgtcaagctccagtcacggttgaactccacattgcgcagcgtctccaatggcctgaatttgtcttctacgaattcataacctatatcggtcttcaatactaatccaggttttaagttttcaaaaacctgatgtttcgttacataattcactttcgccgccaaccctttattgctttctttgtcttttgatgagaaagtatttacatcataattacttagagccatttccgccttcaatgaagaatttttagtgatggcatattctgctgcggctgtnnnnnnnnnnnnnnnnnnnnnnnttaccaataaaataacaggatcccaatctccttgcctggcaccgtttacaggttgtatccatttgaatacccttccattagcattgccatcatttactgctatataatctccttttcctgcgcctacattcgtaaaagtgagattatacaacgtgtccttttggtcaatagaatatttataaatggtatcacttattcca

SEQ ID NO: 32862 - DNA, 1004 bp, Arabidopsis thaliana landsberg
atataactatcaattttgaactcatgataaatatgactttttttttttttcggatttattgtgattaatacaatattgtagtggcaaaaaaattattggttgactaagacttgacaacaaaccaaaaatgttatgttatcgttggtagttgaaaaccgttcaaatcaacttaaacattctacaaaatgcctaatcatacccaaaaatacatttatttttaattcggatgattctaaaagcgtttacatccaaaaactaattatggatccgcgaaatcatgttaaaattctactaattatggatacgcgaaatcatgtaaaaattctaactctgatggctaacaacataattaacagcaagttttaaaaagaaaattactagaaagactcatattttagaattaactactagaatgacataccaaaaatatgggttatttgagtaattttttagaccaaaatgtcttttatttgctttgttaggaaaacaaatattacaagaatgcaattcttatttaattaaaaagtacttttaattactaaattgccactccagaagtttagtcgaatttgaaaaatttggtattcaagttgcgacagatttattttgtacgacagatttgtttgtcaaccacagattttgattggcagatttttcttgttccacagatttatttagttttagttacgacaagagcagagttattttgtttctgtcgtagatttgtttaggaaaatcaagtatgtaacagatttgtttagaaaaatcccagagttattctgttttggtaacagatttattattttacaatttaaattgtcgtgttgccgcagttttttcatccaaataaaatgaaattcaatgatgatagatttgttatatgtgatcaaagattttattaacttgtttgtaaatctgtcgttttaaaatatatttttctttaaaataaataaattactacacagtatcctagtgataacaaatttgtttttagtgataacagt

SEQ ID NO: 32863 - DNA, 654 bp, Arabidopsis thaliana landsberg
aatgtcgcaccggacaacttatttttacggtccactaactaacttaatgctcttttgcttttgggtctacagaggggtcggtcgtgactaggctggagtgtatgttaacatcggattgtccattgaccgatgcatttctgaaaaagaaaagctcacatggtacaaagaggattcataaaaggccgagtccttctctcagtgaagatagagaggaatcaacacctgatcaaacgataatgctcaatgcgtatgttaggaaggaggaaggaaacattctatatgttgaatgtggtgacgactttgttgatcttcttttctctttccttgctatgcctctggaatctgtatgggacatctcgggcagaggaatcatccttggatgcattggaaacttgtgcaaaagcttcaaggatttgagtagtgcttccgcaactgaagcttcagcttttaaatgtgttcttcctcattactacaagtgccagaagcagctgctaaatgatgttgtcacaacccatcagccaccaacttattaccgttttgtatcgttctctacggatcattttagagagtaccgtttgtctgaaaactctggtaagcgacttgtgtatcgttgggataaactcgggccagtgacttcgttagatccgaaaaccg

SEQ ID NO: 32864 - DNA, 2554 bp, Arabidopsis thaliana landsberg
tcttgtgttctgattccctctgtttcttgacaaacaagaatcttcctctgatgatatttggggttttggtattctcatgattttgcatctaatttgtttgttgaaatgccccaactaaccaccttttgttgctttttcgtattctttgctctgttcttatatactttctctgtgcagaacacattgccttttttaggaaacactgatctatctggcttgtctgctatagattggtttatttgtcaacttgtcactgattcggttctttttcttcttgtagtattgaactttaagccgatatagagttgttgtcatagatatatacagcgagttattgaagcaatggatgttaatgaggttgaagaaaatttctttgcccctggtgatgccaaggtatcttaatcagaccttttttccaataatgtttttgttgagatatctccctaagacattaaattcttggtcctctaacttgatgtctatatgtatccgtctttgtttcaattaatactctcttctggttcttgattttgctcgattgatcctgtgatgtacaataaaatatgtctaacagattcttggtcctgtggtttttaaatacgtgttacctattgctgtaagtgtaaggcattggctaactgattcctgtttcagctacacggaaaaatgtgcaatgccctttcagtgatctactgcaagatcatgtctattttcccgtcgcttgaagctgctaggccgagaagcaaatctggaattcaagctttgtgttcacttcacgtggttttagaaaaagtgaagaacattctacgccattgcactgaatctagtaaactttatttggtaagttttctgtttagttatgtcttaaagatttcagaactaattcagttcttcttgtggagattctcgctaactagctggtttgacatgtaggctataacaggggattcagtagttttgaaatttgagaaggcgaaatcatctcttacagatagccttaggcgtgttgaagatatagtccaacagtctattggatctcaggtagttagttcttcgtgttcccgtatcttggtactcttgttttcttctctcacagcaagtgaatggaaagttaaagcagagaagcaatatctctagagttcagtgcttttattttaacctgtatattttactttgcagcttttggagattttgatggagttagagaacaccgagttttcacttgatccagcagagaaggaaattggcgatcaaatcattggattgctgcaacaaggggggaattttgagagctcatctgataataatgaacttgaggttttccatcaggctgctactagactaggtatcacttcttctagagcagctctcacagagcgaagatgcctcaagaaactcattgagagggcccgaatggaggatgacaagaggaaagaatcaattgtggcttatttattacatctcatgaggaaatactcaaagctattcagaagtgagatctgggatgacaatgattcacagggtagtagttcattgccttgttcacctactatccagggttctatagacgatgcccatggtcgtgcttttgaccgtcagctgtcaaaactgagttcctttaacttcagatcctgcaataacaataggagatcttcgcagatgtctgttccgccagaagaattgaggtgtccgatatctttgcagcttatgtatgaccctgtcattatcgcgtctgggcaaacatatgagagaatctgtattgagaaatggtttagtgatggacacaacacatgtcccaaaactcaccagcagctctctcatctttgcttgactcctaactactgtgtcaaggctctaatttctagctggtgtgaacagaacggcgttcaggtccctgatggaccccctgagtctctagaccttaactattggaggttggcgttgtctgtgtccgagtccaccgatacgagatcagcaaaacgtgttggttcttgtaagttgaaggatgtgaaggtggttcctttggaagaaagtggaaccattaaagaggaagcctgtgaatcagaataccaggaagatcaagttactcttgttgaaagatgtacggaattgttgaccactttaactgacgtggataccttaagaaagaaatgcagagttgttgagcagataagagtattgctaaaagatgatgaggaggccaggattctcatgggggaaaatgggtgtgttgaagcgttgcttcagtttctgggatcagctctgaatgaaaataacgcttcagcccaaaaagttggagccatggctctctttaacttggctgtggacaacaacaggtatgtgagcaaacgatgtctcgttttctctctctcaatgatcaagcacctaacttaaattagtctactaacacattcggttatcttgagaatgttgcaaaactatagatgggctaagatttcaagttttcaacaacaaaatcaagtgggttattcttatcttgccaactggaagattatatctcatttccgttgtattttttaagatttcagggaca

SEQ ID NO: 32865 - DNA, 2301 bp, Arabidopsis thaliana landsberg
gtacaaccttcacctataattttgtttaaagtttatattacaatgaattaaacatcattatttgaaagaaaatcaaaatgatattaaagcaatagttgttaacttgtgtaagattacgaattacgaaagtgaacatttacctttttagccctagagagagtatcaagaacatcaagaacctcaggatcgtaagcaagtccatactgtttagacaaattaacctctctaaattcctccaaaggaattagcgctgcaataattagtttgtaacttttaaatgatcaaaatacaaattttgatcataatatggagttaactctactaatatatattaaagagatgtagtaagttaaatacgtgaaccggtttcctcgaagaggattttgcgggtatgatcggcgttttgtggttggacgtgaatcaagatgacggtgtcgccgtcttcaaggagattctccgccgcccaccggagagctaatttgctcgtcggagaatagtccattcccactcccaccgtacgtgcctttcccatttttctctcttgccctctcgatgatctctaagtggaaattgattacggtagtctaatttatatgtatataataaccggtttgatggtttagactttggagaatattattggcgcacagagttcgagatatctaatgattgtctttttcttctatggggagattcttgaaactactaggtctctttcttgcttcttttcttaattttttttgcaaccgagtattaatgactagtcatttcttttgaatagttttgtctttttatttcttttgtgtgcataacatttcagtaacctcatatagtttgaaaagaattatttaatatacttgatattgaaaacatgattaaaaagtgataagagcgaatacattttggttttcttttagtcgaaatcttaaattgtgtactgatgaaagccatagaagattcaagatatgtatttgcacacgtagagtattagtgaattctctttatctcacttgctctccaagaaaagtaatattctttgtcaactttcagcaaaggcgaatttgattcttcaacttttcttcctttattggcttatttttttttattcattgattgatggaacacgtaccaacaccttcggtgaaatattattccaattcaaaattttgtttaaacttattaaaatgaagttactgttgagtgttgataaaacatagaaaacaagaaacaaataaaagacattaaacaaaacaagcactaaagtaaacctaaagaaaatttcaatcaactattgatgtaagtgcaatactgcttgacagaactactaaagaaagaattgctgagtggtttaaaaatggcttgagtacagtcttcgtcgatctcaacaatggccttgcaacattctggtcctatcgtaatttgaggactaaagaatgaaccgaagatttccgccacgcaggcttctccgtctcctaggtctggaaaacacatcctagctaactcgctattatcactgttaccgataatcccaccgaagatggaagagagcgaaaatggaagtggaggcgagaataaggaggatgcggttgcacttgctaaagatgatgagaggacaagaacgagtactagagaaaatggtttcatcatgatgaagaaacaaatactgataattaattaacaagtgtgagtgatatatatatatagtggctttgatgcttgaatcttggtgaagcctctacgggtttcagagttttgtatatacaagaaataaaaaggaaataattattttcgctagaagaagatcttttagttacactaacaatataaaaagatctttctcttatgattctagcgctttaatattcgttaaattggactagcttactctgatttttcaagcgaagtttaaatggtttatatacgacttacgagttgtttacaaaaaattatagtatcaaacttatactaatttgtaacaggaggtgttttgggttaatttgtcctcatttatgaaaaagctatgatggctttagagtagaagatgcacaagtattccgtttacattcaaatgtgaatttaggaattaaatttgaaatacattagcttgaaagaaaaggttaggcctttgagcaacaagaacagtccgttctcatatacattctgactcgttggtatttgaattaataaaccgaaaacacttgtgtattaagaagtgaccgcggattccacacgtgattaaaatttgcgaaacaattgaagagaagtgatactatttaataatttcgttttggtaaattatat

SEQ ID NO: 32866 - DNA, 1670 bp, Arabidopsis thaliana landsberg
atgagcgagcatagggctaaagcaatcacccaataataatattagaattttcaagcatacaaatatatgtttacgtaatcttatattaaaacattatgttatacgtcacacagacaattcatagtttattgaacgtttaataacataagggaaacgtacatttgatgacctattgtcgcaaaacaaccacattttaaatctaataacatgtttttattgttgaaaaataaaacttgttatcaccatcaaatgggcgggaccgtccatcggttcaatgtcgaatacatcaattcaattttgaaatatttgcttcaatgagaaaagaagaagaaaatagcacagagaataatatcctttacaaataaaccaactattgatgaaatactaaaaaaatacacaatcttttagaggtaacagtttcatatttatataagtatcatatatgcagatgtgtatcatgtataagttagaacttagaacaacctttaaggtaaagcaagccccccctctcctctgattgctttgtctgtgagaaaaaagtacttcagaagattctgtgcctgaaacaaaatcatacaacagttatattactataagagtcatgagacatttagcaaacaaagaagaggaaacaaaaaaagaaccttctctttgcctctagctgttcctgatttagtaagtgccacaagaggtggaatcactccttctcttatgacattgttgcagaatttcgggctatgcgtacaaagctgcaatagtgctgcagttgcattctctttgcctcttgctgaacctaactccacaacttccaccaataccggtattcctccttcttcgcctatcgcaatctttccttctctaaccgttgcaagattcgctagcaccaccacagctttctccaccatcccaaaagcaggatccatcagttcaactaagtatctcactgctccagcttcgattactttcgttttgttctcatggtgtattgagaggttgaataaagccgtggctgcatctttcttcccactgagacttccacttcctaagaggtcaacaagtggctctatagctcctgcttctcctatctctgtcttgtactcttcgatcaccgacaagctgaatagagttgctgctgagtttgctttagcttcttctaagtatcctgttttgagaacgtgaataagcggtacgatggctccactttccgcgatgagggacttgttgttgtcgttgatggataagtttagtaagcaagtcactgcgtctgcttggattctctcatccgttgagtaaagaagactgactaacgaagggattgcttcgcaccgcgcaatgacaatgcgattgtctgtactgtttcttgctagtatcctgattctagctgtggcctctctctgtgtatccaatgaagaactcttgagatcatcaatgagtttcttcacctcggtttcgatacttgaactgcttcctgtttctcttacggtcgctgggatgatcccggggtgacgccaatgcctctcttctggaaatttccaaggggtattactccgtgtcagtgatctatctgcagcagcattgttgtttcttttggttctgcaaaccacttcagagacaatgcctggcgccgaagcagacctactaaagacctgacgcagttcctctgcatctaa

SEQ ID NO: 32867 - DNA, 2430 bp, Arabidopsis thaliana landsberg
actatcatatgttaaaactgttttaatacaattcgaagaagaattcaaacttgttttgacgtgaagtttctaggaatatcaatacaaacaccatataaactgacatttttaatactgagtataacgttatgtgattgatttcaaatctttaaattcgcataattattctattattagtaataacatacatgcataaaattcgcgacatcaagaacatcattgttctgaatatcaagaatatgcattgaccgcgacatcagaaacatcatcacatcgagaaagaagaacggtcatttccgcaaattaatgacactttggctgcgttaaattctaccaaaagcttctctcagattttactgaattctttgctttaattttgatttttgccaaaacttcaattgtttaggtttagtgtaagaaaagaaagtgattgttattcaatgggaaaaatgttgttttatacgcgaactttcaaaaagtagccattctatacgtgaactctgacgtcggccaaaataaacatgaaaaatacgttgaccagccattttaacagaaacaaaacgttgacctcgccaaaatcccaagacgttaactcgctgattaaccccgttaagagaacgttaatgaattctgttaagaccaaaacgccgtcgtttcaaacctaacgaaacaaatcaaaatgcccaaatcgaaaactcaatccctaattctctcattggtaaaatcgtgtttgttcttcgattaatcttgttgtgattgccttagcaatggaaggcgaagtcgacattgctcctgttccaccacgacgagtagctgaaaccggagatggagttcgagctccaccggagacggagtttgatggtggagttctagctttgccggctgttgttgtagcacagtcttctgtcggagttgaagctcaaagaagatagattgagagaagttggatataagaaatcgatttggggaagatgaagacttagggtttgagttttcgatttggggattttgttttgtttcgtttagaacaaaacgacaccgtttcggctttaacggagtttattaacgtgctgttaacggggttaattgggtctggtaatgcgagttaacgtctcgggattttagccgggtcaacgttttgtttatgttaaaaaggctggtcaacgtttttatcatgtttaatttagccgactttaaagttcacgtattgattgaccactttttgaaagttaatgtataaaacattattttcccatattgaatattaacactccctcttgagctctttgattgaaaccatagtcaaatttaaggatttgaattttgataccttttgttcgtcgtgaattgacctttgcttcccctgagaaggagtaactcatgggcggtgatcttttctggaaatcagcgtagttagcagatccgtgtgtgtcccttttgattgtggtttctgttggacctgtttttgcaattggttgtgctccctcttgactcattgtcttctgaatcttcttgtaatttgtgtcaattatttggattagtatacttgaatcattgttgattagtattaacaaatataatttcatatttaaggcttgcccaaacagggtttcgggttataatacttaataaatttagtccattatgtgatattgttaaatcttttgaactacatttaagcattatgaacccttttgaactctcgcatttcccattaacttacaagaagcagttaaaatcttttttgtttgtttgatttgagttgattcttttggttatgtgggtgattcttgagcttatagagaatagaaaggtgataaagcttgagtggtttcagtttgtggcttaagttattggctcatcttgagctattatcagaaattactcatatctcataactcatccaattgggtaactcatcccatacgagtaattcttaatgccaatttctgaagctttagataattattttttagctttcagtattgttatgatgaatttatgcagaaatcgtgtggcattagtttcttgattgcctatatatgacgctgtaaaagttatataacctcttttgcagtcgctgtgtttcttctcattagcagcaagctcttcagatagtattgcttagtaaagccactgaatatgcccgtcaaggtacatcttcatcacactttttatttagtcagtcacttattttatattatagaaacaaaacaatatacaatatggcttatgttatgttcattgacttaccagtcacttattttatgcagaatggatctgaatattatgcaggagttaaaagttcttaccactaccatggctttgcaaaagtttacctcttggaaatttgatccaagagtagcaaacctagtccaaagtacttgctgaagatgcagagtcaatcaatcggctgatggcgatcagagc

SEQ ID NO: 32868 - DNA, 757 bp, Arabidopsis thaliana landsberg
tagtgatgtaaatacggaaagtatttttcttgcacgctcacgcaaagagtgtgaatcgcactcaacaccaaacgtttaagagtcacttcacactagaaatcatattgtatactatggattgtaaatttaatgctttggatgattgattacaaaggtcatcattagtagtgcattaagttagttttgtcaaaccgatttaagtttatgggagttttttcacaccacccgttatacttgtatagttggattttacatttttggtatgtggagaagtatatagttcacgaacaatgaattttgtaggtcaaaaacatatagtttggattttacattttatggttaatgattgaagcgcgtgaatttaagccgcatggaggattgtgttggggcatagtgagagtattgacttttagatcacttaaaaaggcgacactgtaattgatcaatctaacggctataaaacgcattggtctgaatatcagacggcggagattctttgtttgcaaaaatgctggacaaacgaataatatgtcttcacatacttggcctcagtaggtaaagaaaattcaactctagatttaaaaaaacagtgccaaatataaaatctaataattgaatgacaaaaggtttcaaattatttatatttagcttcaaaatttcatgggtggcattttaataaaaacattggtctttgaatgccgaagggctttggcataattcattaaaattttttcatttaatgaatggccatattttt

SEQ ID NO: 32869 - DNA, 629 bp, Arabidopsis thaliana landsberg
tgtagagatcgaagcagaaatcgcttcgccgagtactaattcctgctgtgagactaggaattcagagaggttgcttgaacggagaaacgagatttgaaatcggagatcgagggacgaagaagatcttgaaggtgaagatttgaggaccaaaaagagagacgctgagagagtaattagactgaccctacggtcagtttccggcgccaccattccttctttttactaaaataaaaaatatattaaaaagataaatttcacgaaaaaataacaaataatatttggtttctttttatttaagatttatctaaataataaaataaatttaatataaatttaaaaacatttaaatttataaatatgtataatgtattgtataaacctttttaaaacctaactacgctaattttattaatgcaaataattagaattttctcgcattaatcagtgacaaacttatcatttatgtatacatttttttccaatcaggccatttgtgatttaaaagttgtaatagccaacgagtttatcatatatatatacatgttagagagtagagattatagattttttaaaatttgtcttttgagagacgtaattgggtagtgagacaagcttaaactaggattgtg

SEQ ID NO: 32870 - DNA, 936 bp, Arabidopsis thaliana landsberg
  unsure (1)..(936): unsure at all n locations
ttgctcttctgcaatgcatgaattaattgtccatgattttgcacttggacgaatcttagagaagcattagaagttccttattgtattcgcagcccgactctgtctcttgttccccaaatcttaacttccaacagctcaagacatgacaatttccctaagaaatgccctgattgttccacatctcccgtagttctgatgttatcagttattttaggactttcacaggacatgacaataagcaagaatacccagaatatctatatccacttgcatcatgatataaattactatcacatattcacatgtacttaaatattatatgtaaaaacatttagtgaaatatgactactaatattgttttttctttaaatttgaattaattcttagtagacttcagttttaataattttacaggaaatattccttgtaagtgcgacaatatagtatcaattatataataaaaaacctttttctaaacacaagggtttatacaaaaaaaaaagttttaatgaaatataactctagtattcacaattctatttatagaagttatactatactaatttttaaaattttatctctcaactattatcaattacctatttcaaccagcaataaatatttaactaattatacgtcgcacatttttagtagtactattaagattaaactctttttactcaatgcagaccaattgtatagtgtataaaataaataaaattattttttcgacaattacatttaaagaaaacaaaaaagagttgaacagcagatatgcatattgtaaattatcaacgcgaagttgtgtgcttttgcttttcttttgtgacgacattatttgtctcgctacttcgaatcttcggctttattttctcttaaagtattaataaactaacaatngtatgatcccttcatggcaaggtttatagttttagc

SEQ ID NO: 32871 - DNA, 3574 bp, Arabidopsis thaliana landsberg
  unsure (1)..(3574): unsure at all n locations
tgtgtttcgaagaggaagaataggtaaagcaaacctggtagttgtagttgtactttctttaaagctgaggagctaattgcaggaaccaaaacgtcagtcataaataattttgaatcgaaccaaaccccatccgagtttattcggtttcagtttatcctgaaggggtgttttttgtcttgtcggtcggagaacctcgcctatataaataaatgcttccaatttgaagagcagctaaaccctaaccctaaaatctccagagagagagacgatggatcgcatggcagttgcggaagagcaaatcgtattggagagggttaggagaaaaatcgaagaagtaaatgcatctggtcagtcgcagctctctcctattcaagaacatatcagtttcacccttctggtatatatatatatatatatatatatttctacaatcatttagtacaagtattgctatatcttgtaacaaactagggcagaaaagttaattagttttacttttgagtttcgctaaagatttatgcacctttgaatgatgatgaattgcagcaagcttatttcaaatgctcaaacgagtgctttgagaaaagaagaaagccagaagtgacaactaactgtgttgagctctgtcgtgttcccgttgctaaatctcaacagcaattcgatagcgatatggccaagtttcaggtacaaaaatagtccttaactgatcccattaagcttttgccatgtactgagaaacttgcatttggttaactaatgcaggataggatgaacagatctctcatggtatgtcaagacaaattcgaggctgcaaagctactgaatatgaacaggattgatgccgccaaagatatggagggttgcgtaaacgatgcagctgcagcattacttggcggctaagcaaccaacggtgtttattagggttcttaaaagtttttttgtatttctatacagttgatttggatttacttgtgctgagatagactctatcgtttaattaaaatcttaaaaccggatcaaaccggattctattttacccggtcttatgtccaaagtcgggtttagctagagataaaaggaaaaaatcaattttaaaaagtcaccatctcaatcgaatgggtctccttcccgtcgtcggaattacttcgccggcgctcatcacccacaaaaatcacgccaatccaaagatacagagacataatcaatctacctccgagaccactgtttcatggacttctcgcatcaatctcctcacgcgcaatggtcgattagcggaggcagcgaaggaattctccgatatgacactcgccggcgtagagcctaaccacatcactttcatagctctactctccgggtgtggtgattttacctccggaagtgaagccttgggcgatttgcttcatgggtatgcttgtaaacttggtcttgatagaaaccatgtcatggttggcaccgcaaatatcggcatgtactccaaacgcggccgttttaagaaggctagattggtttttgattacatggaagataaaaattcggttacttggaatacaatgatcgatgggtacatgagaagtggtcaagtcgataacgctgctaagatgttcgacaaaatgcctgaacgagacttgatttcttggacggctatgataaatggctttgttaagaaaggttatcaagaggaagctttgttatggttccgtgaaatgcagatttctggagtaaaaccagattacgttgctattattgctgctcttaacgcttgcacaaaccttggtgctctctcatttggattatgggtacatcgttatgttttgagtcaggatttcaagaacaatgtgagggtgagtaattcactgatcgatttgtattgtcgatgcgggtgtgtggagtttgctcgacaagtttttgacaacatggagaaacgaaccgtagtttcgtggaattcagtcattgttggttttgctgctaatggaaatgcacatgaatcattagtctacttcaggaaaatgcaagagaaaggctttaaacctgacgcagtcactttcactggggcgcttaccgcgtgtagccatgtaggtctagttgaagaaggtcttcgatattttcaaattatgaaatgtgattacagaatctcgcctcgaattgagcattatggatgcttagtggatttgtatagtcgggctgggagattggaagacgctttgaagttggtgcagagcatgccaatgaagccaaatgaagttgtgattggatcgttgcttgcagcttgcatcaatcatgggaacaataccgtcttatcagagaggctgatgaagcatcttaccgacctgaatgtgaaaagccattcaaattatgtgattctctcgaatatgtatgctgctgatggaaaatgggaaggagcaagtcagatgagaaggaagatgaagggtctcggtctaaaaaagcagcctgggtttagttcgatagagattgatgattgcatgcatgtgttcatggccggtgacaatgcccatgttgagaccacttatatccgcgaggtcctggagcttatttcttctgatttgcgattacagggctgtgtagttgaaacccttgctggtgatctcctcaatgcttgaaattcaagaacctccacatcccattttttgttcaagtccggagcgtgagcatttgctcaaattggttgaccgcaaagaagccttacagtggtcttagtcttagagtcttagagatgctgaacgctagaatatacctcattacataaccattgtcgcttcctccaacctttttgccaggccctaccaataaagatctgggtgtatatcgctatttaaacgtgctgaatagaggccacacaaggatatggtgctcccgtgttttgtaagcttcgaatccaagctatgtgaccttggcggccgtctcctcgtgctaataaggtaacctgaatctatgtgcattcttctgtgtcttgtcatgctatgttgatgttattgctggttactgtcaagttagtaaacagttcaataactcccacattttgcaacactttggtgttctgtttgcgtggattttgtgataccttggggcattttctagcatttgtttacctagcagtgatcatagcacaagattgattcagcgaaatgcataggcagtacaacatctataagacctgctagcttgagtgtaattattcccaacaatatccttgttaatgcatttttcgaagatagtgagttctgttctaggtacatctggtattgttaatgttgtatcataaaggttaaagtattttcacgattatatgttacacatatcagtttattcatagaagaattttcataattaagaatgtacaatcannnnnnnnnnnnnnnnnnnnnnnnnnnnnnnnnnnnnnnnnnnnnnnnnnnngtttcctctgcattgcccgtatctattttgggtagaactgtttttgggcggagataaacaccaatgtactgtagtcccaaggcatcataagtcccatggaaaccgccgaactgaggaaatttcccgagtttaaaagcaaatttgtcgttgctcgaaccgg

SEQ ID NO: 32872 - DNA, 1520 bp, Arabidopsis thaliana landsberg
tgataattttcttatcccaaactggagccaagaatttttttatatatatttatcattcatataatatattttctaaaccggaacatttttagaaactaaaccaaaaaagggagcagatggcattctcgtaaataaactaatcaccttgcattctggccaagtgtttcctaactttgccttcacagcctctgcagtggagagacactttaagaacaacgacctgctgcttcagaaaatgcaaccctaatcatcactcttatcaccatttatttacatttatgccactcatgatgctaactacaaaacaacttacctggtctgtatcaccacaagttgtcttcttctctgtcaacgttttgtcttcaccagcaggagcttcagcttctaccgtcttagccggatcctgatccacagaaccggtaatagaatccgggtccgatcccaaaagataccttgtagaacccacaggggttttgattaagtcacatgcgggtctcgcaacacagctgaaactcttccttgctaagccaatgtcattagtgatcagcttcaacaacgccgatgctccgcctccaccgccaccgcccgtgcttctcctgccagtgatgcttctcctgcctttatagatctctagctttttgttactcatctctccgtcttctgcggaagttggtagtttaatgaagtcgtcagcgaatgatcttcggccatctttaatgatcgggttgtggcggtctatagctcggccgctgtttcgttcatcttcgtcggtggtggttgatttgtgaacgtggttcatgcttgaacatatggctgtcgatgcttgcgaagcgcaaaacattcgtcccttcattatatggagaaagagagtgaagaactgatagtaagaaagaaaaaaaaaaaccaaacttttgttagaacttgaaagaaatgttgatgagaatgttaatatgtgtatacgaggatgtctttacttgtatatagagagagaattggattggaatagagacaaagaaagttaaagagtgtaacgctcatatgataagagttatttgtccatatatgtaataagttgttgagatggcctttataatttactcgggttcccgatttttctttggagttttatggtaaagtctaagggacaagacacggttacaaatatatatgaaaataagcaataagaaactatttaactttgttgtagatttggatggattctaatcacggatcacattatattacaaactaaggtaacataatcaagtcatgagggaaacctaaatgctttatattaatactgataaaaatacaaatgttttaaagcatttagttaagtataagtattagtattataaattgttaatgtattgcatgctcactgtcattagatgaagatgctgggcgtggaccgtgggacatcatccttcacgaggcttttggctttatattccaaatcttacttcaatatcttttggctggttttattaactttaaatgataaatgaaaccatctaact

SEQ ID NO: 32873 - DNA, 160 bp, Arabidopsis thaliana landsberg
gcaatcgattggcggctcgcgatcaatgttgcatccatactgctcatgttatacaaattccacttatacagattattgctatgcgggttctttgggttgatctttaacttctcttgtttcgcgaaaggagttattaggtgctccgtgggctgtatctgct

SEQ ID NO: 32874 - DNA, 359 bp, Arabidopsis thaliana landsberg
tgccatttaccataaaagtttgttcaatttcttatctacatatgttcctatttttgttcatacttttgtcattttcctttcttttttgttcttttttcactcattcttttttctatacctattgttcttttttaattatcgttactaatcggagcaaaaaaataatttttgttacattaaacctcatagttatttgtttgttttatttacaatatcaataatcttctaaatgtaattatttaaatttatatgaatttctattttagtaaatttttaaaagtggcaaattaattattatgagttggatttggttaaaaattttcttagatctcataagttggctaataaataatgagtat

SEQ ID NO: 32875 - DNA, 678 bp, Arabidopsis thaliana landsberg
tcgtacagggctgaatttagacaagacaatcataatctatggataagtaaacatgcagtctattgttttagaaaacacgaatgtaccttgatgcgctcgctagagggacgaacatcacggagaggtttgtttgaaagagaaataacatagcctgcttctcttggtgtaagaagcttcacttttccttcccttaactatgcaaacaatacatttgttaatagtgagaacagttgaataacaatgaaaataaaaacatgaaccataatcactccaatgttccaattttaagatgtaagtgatggttaccaaaccatcccaacgctttttagcagcagctatgtctctcatttgcttcaaatcaatatcttcatcaacagcttgcatcctaacaacacctactccctattcaacaacaaagagtgtcaaaattttactttcgcttccaatcaaaaaaatcgaatggagaaaacgagataaggccataaaaccaaaatagagaatcaacttacaaagcgacgaacagtggagagcgatgtgcctccaatgggggatttaagtgaagataccattgaagaggtcatcctcgagtgctggttcttaaaagattagaaccagaagctaacataggatttagaacgggaagagatagagactccatgttttaaggttctgagcttt

SEQ ID NO: 32876 - DNA, 6071 bp, Arabidopsis thaliana landsberg
aaaaacatttgaaaccgggaatgcgtgtacttgatgttggctcgggtttgttttactttctcttcttgaattagttttgtacattcttcttcttgcttttgaatatgatgaattttgatagggaccgggtacttaactgcttgctttgcggttatggttggaaccgaagggcgtgctattggtgtggaacatattcctgaattggtggcttcttctgttaagaatattgaagcgagtgctgcttcgccatttctgaaagaagggtctcttgctgttcatgttggtggtgagcatcagttcaagtttttgagatttctttggtgtttctgtttttacattgctggtttcttgatggttttaaaatagatgggaggcaaggatgggctgagtttgctccgtatgatgctattcatgtcggagcagcagcaccggagatcccagaggcgttgattgatcagttgaagcccggtgggagactggtgatcccggttgggaacatattccaagatctgcaagtggtggataagaactcagatggttctgttagcatcaagaatgagacttcagttcgttatgttcctttgactagccgtgaagcccagctgagaggggactgatgaatatgctcgttgtacagatgaatgaatcaagtaagctcagtcgcctttctaaattagcatagttagtgtagaactcaaatcacaaggatctctgtgagtaaaattctcaaatgagtaaacttgttttggtacaactaaacatattaaaccatttatatataatgcctccatcaagtagtagatgatgcaatggcgtaaagagggaataaacggtgaatcaccataccggttgattcagcgacattggtttgattttctttagaatcctccggtaatttccaatcataccgatgcacaaagttagccaaagccacctcaatcaagaccactgcgaatgatattgctggacaaatccttctccctgctccaaatggaaccagctcaaaattgtgacctcggaaatcaacagacgaatctaaatgtctctctggtctaaacttctctgcgtctggcccccacgtcgcagcctctctcccgattgcccaagcattgatcattacctgtgtaccggctggtatgtggtaatctcctaatataacatcttgtattgattcgtgaggagccaacaatggaagtggaggatgtagcctcgttgtctctttgattacagcttttaagtagctcatgttttgaatgtcttcttctgatacactcaaattacccttacaaatcgtacgaacttcttcctggagtgtgcgcagacactctgggtgacgtagaagctctgtcattgcccaatccataagtgcgtacgatgaatccgtaccagcaactaaaacatcctgaaaagcgatcaaaaccaaaaaaacaagaactacggttatatactaaaacatcaatgaatatgaatatgagatcttcttatccctttaccaagacgatagcctttatgcataaccggtcgatttcaaatccgatgctcttctctctctgaattctgagcaacacatccacaaaatcattcttgtgtccatccccatctacatgatcttggacaaccctctccaagaattcatcaagatcattgcttacctttataagttgaccatccaaaccgcggatccagtcaatccacgcgagccacgatacataactcccaacactaaactcgcctaatagcctcgttagccttttcattaagtctttaaaatcggttttaccgccgtatttccgtccccaagcaactctacatattacattgtttgtaagattcaccaggatctcgcttagatttacccgcaaagaacttgatatcctgatcttctcaatcatcaggctgatctcttcttgtctaacgtctcgaaaggatcgtaccattttgttactaaagagatggaggacgcacacacttttcatttgcctccaatactctccataaggagcccaaggccacatctcacccgttgtaaaaaatcttatcaaagatttttgaccgtggacggctagcaaaaacgcggtcatgcgtcttcaaaacgtctcgagctgcttctgctgtagagactacaataacggggacacttccgaagtgaaggagcatgagtggaccgtaacggtgactgagatagcatagtgatcggtgaggatgttgaccaagctgatgaaggtttccgatcaacggaagtctcggtggggatggaaagttgatgcttttgttccctgtcttatgtttcttgaagaagagaatggttatgatgaacaatattaagcctaagaaaagtatcatgatcatattttgtaaacttggattcttaagtacttcaagtttttctcgtgaagagtttcttaagtttgttgtgttcttcttgtggacttcgccacttgcgtcatatataagccaagtttcttctatgcgttacgtaacgagggtccactcaaattttcttctgttttgcccaagtatagtaggaaagtaaatttgcattaaatatattctctcaaaatcctatatattaaaggtaaaaaatctcaccacaatacaagtaagttgaccaaacaaaaaagaaatcttttacttttttttaatacctattttgctagatttttagacagctacaaggtccaagaaaactatgtatctcctaaaatatatagtccttatttgtatattaataacttttaaaattttaggtgtgattctaccacctatttgtttataaatgtttactagaatatttaaatattaaagctaataactttgaagaaatctgtgaaaacacaccaaaaagtaactcacctctaatctaaggcattggcatatctcttttcagcctcggaaatttggtaattgtttcgatttcatcaacaaaagcgttttaatgcctttcattttcctcaattatattgtctaatacttcaagtcttctagacaagcttttgtaataaaactcttcctttaatttcaccatatattatatttttatagcctattaatatttagataaactgttatattcctttgacaattgcgtgggaactgatcgtgccatttggctttcttaattagtgtagttacttttttatggtcaaactattagtgtatagttacttaagaactcaaatcttaaagatctctttaccagttacatgcttattgtacacttaacaaagtatatatatactgtaatgtctaaatcaagtagtaggtgatgccatggcgaagagtggaaacatgcggtgaaccgtaataccggttgattcagcgacatcagttttgtcttctttagattccttcggtagtttccaatcaaacccatgcactaagttagccaaaaccacctcattcaataccacagcgaatgatactgctggacaaatccttctccctgctccaaatggaagcagctcaaagttttgacctcggaaatcaacagacgtatctaaatgcctctccggtttgaactcctccgcgtctggtccccatgtggcaacctctctcccgatcgcccaagcattcatcatcacttgtgtaccggctggtatgtggtagtctcttaatttaacatcttctgttgattcatgaggagccatcattggaaatggaggatgtagcctgagtgcctctttgatcacagcttttaagtatttcattccttgaatgtcatcttcagatactcttgacttccccttacaaatcgtacggacttcttcttggagtctgttcagagacttcggatgacgtagaagctctgtcattgcccattccaaaagcgtgaacgatgtgtccgaaccacccacaaaaacatcctgaaaaaacaaaaaacaagaactaaaattatatatgctaaaacatcataaaatctaaaatttgtatcatccaaaaatgagtattaattgttcctcaccaacgtgattgcctttatgctgactcgctctatctcaaacccgggactcttttctcttttaaccctgagcaatgcatcaatcaaatcagtcccatctcggcggtcaccatcttcatgatcttgcacaactttctcgaagaagtcatcaagatcctttcccatcttatctagctgagcatcccaaccgcggatccaatcaacccacgcgagccacggtacaaaactccctatactaaacgttcccaatagctcgcttagtctatccgttaacttcttaaagtcagtttctccaccatatttccgtcccaaagcgactctacatatcacatcgttggtcaaacactccaagcccttgctaacattaaacggcaaagaactcgatttcgggatttttgccatcatcaaagtgatttcttcttttcttacatccgaaaaggatcgtaccattttgttgcttaagagatgaatgacgcacacggacttcatttgcctccaatactctccataaggagctgaggccacatcacgattgttgaaaagaagcttctggaagagttttgaccgtgggcggtttgcgaaagcttggtcgtgcgtcttcaagatttcttgagccatgtccgcggaagagactataagaacggggacacgtacaaagtgaaggagcatgagaggaccgtaacggcgactgagatcgcatagtgatcggtgagtgtggcggccgagctgatgaaggtttccgatcaacggaagtcccggtggtgacggaggtgtcttacctttcttcccactcaactgtttttttaagaagagaatggtcatgaaaattattgaccacaagagaattatcatcatcatcattttttttattattttgatttcacagttcttagagatttctcttgttaatttatgttctgttggacagggttatatatataatcaaagtttttctacgtacgttacgttattagggtccactcagattttcttctttctttgctttaatgggcaaaataaaatttcctctcaaatggacaaatcctatgcctaaaaagcaaagaaatctctacaatattactgacagcgcaatcacacatcacaattaaactgaaacaatccattttgctattcaaagataaaataaacaaaaataatattttaccaaaaaaaaatatatttcatcttctacttctatatgtttgattttttaatagccacagaattatttatctcttaaaattatataccttattagtatatttcaaataactttcttaaatacaataatatcataatttgtatatttcgaataccttactttgtagtcataaaaggtatccagtaaaaaggttttgcatgtctggattctgtaagttctttacacaaaattcttgtgagttttaaagttctttttgatcttttggacttatgcacaactttacactttacgtaattaccactcaatttttggatttatgtaatatatacatccacagtgcaaattattaatggatgcacaaactaaacataattatataacaaatacgacaaccaaaatttgtatcttaaataaatctgattttaacgtaattgtatattttgaaatcgaattaatcacaattttctaatgataaccaactttgcatttatttctacaatattaattatataacaaatattaaattttatcatgcttttaaataataaataagataacacaatttatatattcaatacaaaaaatgattagacgtactactaggaacactaaatttttaaataacacaatcagacgttctactagaccacctatagttttgcttgaacactaatagaaattagaaacacatacagataagacgattatttcgggtcattccacctttttttttttttttatatatataaacataagctcagaatagaaacaaaaagatcttgaacattttttcggatggtttcggtcacaatatgaaagtactgtatctcctagttagctgtataatcgttttgaaaggaaccaatagatctaattgtgattctacttcttttttaaaaaaaaaagtttgataaatacgttggacatactttgttttttttttcggccctg

SEQ ID NO: 32877 - DNA, 555 bp, Arabidopsis thaliana landsberg
aaatcaacataataggaccaataacaacagctactgcagatcttactattattctttttattaattcatcagtatattttattattttttcttgattgtttatccgattgatcttgtaagagataacttttgattattacataacttacttcaacatgttaaatgacgcaataaaatagacaatttatttttgatatccttttgaaaaatattaaataaatatttgtaatgactatgtgttgcactaaaaaatcgagataaccccatgagtgataatttggtaacataatctaaacttagagacaattaactaattaagttattatctgagaaataaattagacaatatttttattcgtgtgtgtaatttttgtggtataatattttttcttatattgtttcaattctacggatgttttggataaaaaggttaatcaaatttataaaatgtaaaattttgcttgaacaaatgaaccaaaatgtttactaattgaataaaagctggaaaaaaacagttatataatttttgttaacaaaaaaaatgtttatgtaata

SEQ ID NO: 32878 - DNA, 1798 bp, Arabidopsis thaliana landsberg
  unsure (1)..(1798): unsure at all n locations
tcccttgctaaagttaaactgcattgtaggtgcacaactggtttttccaaaatcgatcactcttttgatattgtcgctcgtatctaggtgcccacttttagactgtcaggggatgttatcgattcctaatttacaaggaattttgatgatttcaattaaatctttgaaatgaaagaaatgaaagattttaaatgattgttagagagttttttataatcttgttgattagtttttcataatcttgtaaagtttctcaaacaatctctctattttgataatactttccatgactttccatgactttattttataaagaaaaatgaaggaagtcatgaaccaataacacaataatttaaatcattaacaatcatagattcttttgttttaattgaataacacaaaacttataatgactttataaaagtatgtatctaataacccaaaatttatgaagacttttagattactttttataaatcttaaatgaataacacaaaactttaacatacttttaaaaaatcttgattgaataacaatagattttacatgacaatttatatcactaaaactgttctgaaatcataaacgaataacacccctaagttttgtgttcgaaaaaactcttttgtcgataaccaaatcaatcttaaccattaccggtttaattagactttggttcaatatcaaatactactacttcttggttgtattaacagggcccaatgggcctttgctttctacgaaatctctacaaccaattggaaggtttaatgttttacccttgtctcctccaatcatgtcgtttcaaaatcctctaatttctcagtcctagcgctaaagctcttcctgggttcgagttgatttctcagtcatcgattgaaattttctcgggaaaaagggcctcatcgtctaccatcgacaacgaggttagtcgttaattggattttgatccgtctctctaccacaaattgtttcctttcgtctcttgtcatgtgctcttaccatatccgattcgcatcaaatccgtagcaacatttaaaactaagaatctgcaactgagaactgtttcgtagctgggattatgttcattgaagcgttaatttaattctattgaacagttattgaaaggtggtggcttttgcttctttgtttcacagaaaccagaaaatgcaaagtcttagtcaacttggaccttcagagattttccttgtcgccagaagagaaaaacccagtacgaggttagttatgagcgactcgagctcgattcatgacttcttgagatattgcacttcttgactttggtgcttgattctatgaatttgcagagcacagctttggtttacgggaagactctcttttagacaagaaacaaatggtgagtgaaccaaaataatacaatggagaaaatgaatcttatctctttttttcacaatttttgaaaacaatatggtttcataacgatgttgttttttatagggattcgtttaaagaatagagtagagtttagtccaagacctgtacctccaaatctgatcgcagcagagaaannnnnnnnnnnnnnnnnnttaactctattcttcaagaagcaaggtcttagcaacagtctcttttctcggataatcaacaaatccgatctattcattgaccatttagtgtccaggctccattctgatcataaagctcgatacctcgtaagttccatcttttttctttaaaacctttactatttaaagagaaaaagcttggtcattaactctaaaagtttgacttgaacaagaaaaaaaccttactacacttg

SEQ ID NO: 32879 - DNA, 572 bp, Arabidopsis thaliana landsberg
gcataaaatttatagaatcgatcacaactgatttattaagattggtaataaaagtagattaaagtggagttattgttataatcgatgagaaaaatgcattacttataaaaatagctaaatatagtcgacacactaatcttgattatcttagaaggtgtatgctgatatcttttctatatgatgtaagcttccccaaatatctctgtgagctgcatgtgaatgaactgtgtagagctaccgaagcttcttatagaaggaatttgaccttcgaaaatgcaaacccgaaaatatctcatgtgatctctgttttgggaatgaggtctactttaatctttctgatcgttctttgtcttttttgcaataatcaacaacttttatttatctgctcgtttttcgtctgttcgttttttgttcttcttgcaataattggtattacaaattacgacatcaccacaatacgaattattgtttttttattcttcttcttttaaagtaagaaatccatatccctatacttatattccgagattacataaaaaaacaacccttgtattttataaaatattacttag

SEQ ID NO: 32880 - DNA, 1722 bp, Arabidopsis thaliana landsberg
tagaacaatccgttctcaggcacagtcgatgtcttagccggtcttcctcttgtgactctgtgagtaaccaaaccttattacacgtgaagctggtttttcttaaacatttattaacgtttggttcttcttgaatgttcctcaggaacattgcgaacaatgacttcacggggtggatccccagttctttaaagggcatcacattaatgtaagttctcatttcacacacatttgcttgtttctttaaacctttaatctcacttttcttgtttcttgcaaacagaaaagatggcaactcattcaatactggacctgcacctccaccaccacctggtacacctcctatccgtggctccccgagccgtaaatctggaggacgtgaaagccggtctagtgatgagtccaccagaaatggagattccaagaaatcaggaatcggagcgggggcaattgcgggcataatcatttcattgttagtagttacagctcttcttgttgctttcttcttgttcaaaagaaaaaaatcaaagaggtcatcacccatggacattgagaaaaccgataatcagcctttcactcttgcttcaaacgactttcacggtatgcacacatatacattacattttgcctttggaacataatttaagatttaaacaaagaaaaatcaacttaagactccatatggttgcagaaaacaattccattcagagttcttcatcagttgagacaaagaaactggacacttcattgtctattaatcttcgacctccaccaattgatagaaacaaatcatttgatgatgaagattcgacaagaaagcctattgctgtcaagaaatccacagtggtggttccttcaaatgtgagactctattcagttgcagatctccaaattgctactggcagtttcagcgtagataatcttcttggagaagggacatttggacgagtatacagagctgagtttgatgatggaaaggtaagatattataatattgttatgtaatcctaatctctatgtctcgaatgatgtcataatgttgttggaaaacgtcttatcttttaggttcttgctgtgaagaaaattgattcgtctgctctcccacatggcatgaccgatgatttcattgaaatggtatcgaaaatagccaatttggatcatccaaatgtgaccaagcttgttggttactgtgctgagcacggacaacatctcgtggtctatgaattccacaaaaatggatcattacatgacttcttacacttatcagaagaggaaagtaaagcattggtgtggaattcacgagtcaagatcgctcttgggactgcacgcgcattggagtaaattccataaacaattcattgcttagctcactattaaaaaagaaacgagtattttggttaactgaaagtattgttcttgcaggtatctgcatgaagtttgctcaccgtctatagtggacaagaatatcaaatcagctaatattttactcgattcagagctgaatcctcacttatcagattctggtctcgcaagcttccttcccacagctaatgaggttggatatacaaacgtttctcaaaactctttaccatttctcaacttatttggttgcttagatcattctgatatgtgcagttattaaaccaaaccgatgaagggtatagcgcacctcaagtatcaatgtcaggccaatattcaattaagagtgacatttacagttttgga

SEQ ID NO: 32881 - DNA, 3854 bp, Arabidopsis thaliana landsberg
ggagggtggtaaaaacgaacctaaggcatttatcttgatttttaatctccactatttattttctaccaaaccaagataaagcctttaccatcacaagctgcaacattcatacacatgtttagtctacttaaaacatatgcgacgaccacatagcagaaaagtcacctcacaggagcacgaatattatagaacaggtgacgcatgacatacctggtacaactttaggagggtgctgtttagcatcaggtgcacaaatatatctttgccactttataaaacacataatgaggaggctttggagcaaaagattcaccatcaggaagatttatgtagaatccaataacatcaccttccttatacccttcctcagcatatgtctcccttaaagccttatgtatcttacacccatcaatatccctaaacccaaaactattcccatcatacccaactggagcctgcaaatcccctttatcagtcgaccacccgagtcgtgtatgaccagtctcacctaaactcaaaactttaatctcaaagtaccaagctccttcaacaactcctcttgtagctctcaccatcctataccctttactacttcctgcagtaagtctatcttcacttatctcaactttctcagctttgtatactttagaaaggcaaatttccaagtcaggtgtatcgtctcccttatcgggaaatctaggcaccggagttatcaataccttatcttctacagctgctggattcggcgtgttggctttactcttcttctttcccttacgtgtgctcttagtcacccatacattattgttcttcttcttcgatttagatttcttagccgcactcgcaaccagagtcgccgcttcctccacaaccatagcttccgatggaagcacttgctctggctcctcctcttccttaacagcgactgaagtaagacaatctagctgcttaagcttcttatgcggtggatcatcttgctcttcatctccttcgtcttcttccattgcgctaccgttctgattagccacagaatccagtttcggagatttagggttatcggaggaagaagcagtcggagcttcttcagagaatgaatcggattcaattttcaaatcggatccgggttgatcaacatccatagctactacatctaatttctctaaatcagtatcgattggttcttcaattataccggacgattccaatggcgctaaatcattctcttcagaaggaagaagagcggttccggtggtagttccttcgggaagagaaattgagacttctgcttctgaagcagtttcgattgaattcttcgacagcatcggatgattccggcggcgctgaatcgtccaccagttcggagggaagaagaactccggtaggttcttcgggaagcgatattgagacttgtgcttcttcaattttgggattttgttcagcttcttcaattttggaatttgattgaagagactccattgaaacagaagttttttttgatgcagccagtttgtggcactcgccgacttgcaaatttttgagagactggcggatggcagagaaacagtgaattattttttttaaatgttagagacttatgtgggctttatgaggcccagtaagaaactagggtttggataaggggtgtccatgttttcttagtagtttagtccatttaaaaataaaaacggtttatgcatctaacaatagattatttggctttctcatatatttttttctaaaattttatactattatttggaaattactattatttagaacatttgaaaatagttttacttgatatttttaaagaatgtcatcaatacttaatagatcaaaaagttaaaaaattataagtactctaatttgatttttttataatagatatatttataattggtggtggttaaatataatgtataatacgatggaatgagttattatccttattctttactaaaatttgtttatcctatcgcttgcataaaaatatacatactaataaaaacttccgattacttataaattgagccaaaaaccaaatgcatgtattaaaacaaccagaaaatttcaaagaagtaggcatacgtcgtacaaaaagttcacagctttctttatttctaaagacgaggtatcctagccatccaacatctattcaatcccaattttccattgaacctgttcggagtaactcttcttttgctggattattaccaatataatcataaaaacaaaattttcaggaattttagctcaagcttctgataaaattttaataaaattgatttttttattgtaataaacttaaaaattaatttcatattatttaaaattattaattagttgagaaaggtcaaaacatgagattcattgaggtattgtatggtgattatgggaaggaagtcactgaaattattaagaaggatcctagtcttgatttagcaaaacaaaaaaaagaattctggtcgtgcattgcctacaatgatgaagaagaagcaagaagaatggagtacatgccttgctgaattcaaggaggtatgggctgagatatatatgaagaattttatcaaattaatcccttgatcacaaaacatatgacaaggagagcaaggctcgagtggttaagaaggctgagagaaaagaaggttgaggttaaagcactcactggttcctcaatgcatgatgtgaaagatttagagatctcaatggagaaaaaaagctttctgtatattcatgagttacgattttcaagtatttaattagattacaaagtcatatcttagagaatctatcaaaactatctatatataaacaactttaactcgaaagatatgaaacaacttcttgttctgtttattgtggaacagatcgcattatctgttaatatgatgacaattctgaatcctttaattcatgtcgtgtgcacattgtatttgttatatcatattttggggaaaacagagatttatgattattattttttaagtgatacacgcactcaatgccctcttagcatgcactttgttgtggtccacttttcttccacgttatatttgtacgaatttacagcttaacttttaaccgatgaaagttgtattggatctctcctaaaccacatatatacgtgatatcatgtaacctcatattatatatctaatcatagcttataaatgacagagaatgggggatggtgatggcctccataattatagaagtttaattaaatcattaatcaaacactaacatactaaatttatcaaacgtgatccacacattaattacgaaaatatttttataactatttatatttaattttcgacttaagtcgttgtgggtttaaaattatcatcgttaaccttcccaagaacttgttgaagatgatgagcgatatcctccggtccgtgaggttcaagcagtggtcggtcgggaagaacccactgtccatcgccgttcttgaccatacctttgttctcatcttgtctccaacaaggcggcacatggtactcacctctcaagaaatcacaactcttattcactaaagctatgtctctctttgtcaccaaacaaaatctcttctctgcttcttcgtcttttccatgataaccatccaccaaatgaagcaaagcttctaggttatgtgcacaacccaaatccttagtcggtttcagaaatgggcttttcttgtggtccaaggcaagctccacgcctacgtgcgcgtagctccacgggaatgatgttttttcttctacatacttctgaaactgaaacttctcgtttgtgaatatccctggaacagaaggtaccttgtcgtgtacattaacgactctcagaacttaacccctattcgtcgatcg

SEQ ID NO: 32882 - DNA, 3025 bp, Arabidopsis thaliana landsberg
  unsure (1)..(3025): unsure at all n locations
aacgatgcataagagaactaataactcatttagtaaatcatcatgcttacaaggttatctcctcattgttccctatgcatatgaaacaatcctaaatgaaacactctacactcgattctaaatgtaatacaactacatgaacactctgtttttgtgaaatcattttctctaatttttcaatttttttatttattttttctatgccttagatgaatgctgactcaactcaagagtatatacaatgcaacacacacttcctgagccctcccccaaacttaaatcacacagtccactgtgtgaccaaatttggaagagagtactcaggacaaaacacataacaaaaacacaatataaacatgagattatatagtacaatggtgaagtgaggcgcttaccttagtcgaagaatgaacggagttggtcgtcaatggctgcctatgattgatcctaggccatagacgagccgccctgttctgtatcagctccagcaggtgggtactcgacctcaccagctctgttgcggccagcaccaccctgagtatactagacctcccttcttctgctacgcccagaaccgcggtcgagtgnnnnnnnnnnnnnnnnnnnntaaaacatggtcgagtatttttcattgctctgtggtcgagtatactgctttactcgcagaatcagaatccatttcactaggctctttatacttatctcctgaagacactaaccaaatgcatcaaaatcaacaaggaaaaataaagatatgtacaaagatagacatgggatttcctcccaagtgagcttgttttaagtctctaagcttgacttctcatactcattaggctcagggtgggttgtagagaggaaatgtggtctcctctccttcttgagtagagtgatcatcatactcattagggtttcttgacaggtctgcaattgggtactcagaggccatgtcctcacagtaagcttcttttttatcaagatagtcttctcctctacaccattccgatgtgaattcacatccttctttgctgacaagaatagtggctccatcgtcaggggcgtccttgatgttgagtggtacttggttggcttttccattgagctccttgatttgatccttcagctctttcacaatatgtgttagctcttgtatggctttctcctgccatttagatctctccttgagttctaaccaatcatctaacttctgagtgcttaccatgagttgtttggtcgagcatgagctttcagggcaagttggaggcttcttcgagttgttggtggaatcagttggtcgagcatgtgttgaacttacttcattagctttcataacctttgtgtcagaccccatcaagcccttgtaaacctttgagccaactgttgccttgtgtgagtctaatgacttctcagaactcaaagtttcactagggagatacccagctttaccactgttggtcaaaacagtttttgagttatttgcttctttaagctccactagaagttcatcaactagcagatccttttcctcaactaagaaggtttgtccttctattgtcggcttcttcatagcatcattgatgtcaaacttcattttaaaatccttccccatattaaaatcaatctttcctttcttaacatctatgattgctccagatgtagccaaaaagggccttcctaagatcaagggatcttttggttcaacatccatgttaaacaatataaagtctgtaggcacctccacatttccaatcttgataggcaaatgttctaataacccatgcggttgtctaacagacccatcagccaaaatcaagaagatattgcaatatttatatttgttaaaacccaacctcttagctactgagagtggcattagacttactgatgctgctaggtcacaaaggcatttattgaatgtcaatgaacctagggagcatggtagagtgaatgaaccagggtctcctagcttctctggttcatctttctcctgtattatggcactacactaatggctcataactgttgttttctcaacctcttgaattctctccatgatcaagtctttcaggaatttttgggaatccgggatacgcgtgagagtatcaacaagaggtatcttggcttcaacttgttttatgttcttggcaaacatagctctgtacttatcttctaactctttcttgtgtcgaccaggaaatggaagtgggggcttgtaaggatgaggaatgaagactttttctttgtttttgacaacaactggtttcagagtagatggtgatattgctgggaatgtcggtcgagtacagtggtcgagtggctgctctagtgactggtcgagtggctactcgagtgatttgtcgagtggctgctcgagtgactggtcgagtgattgctcgagttgtttgtcagcttgatctttattgagactgaaatcctccccatcttggtatgtactgtccttagtgactgacttgggtctctctctaatggataactctcttccattcctgatggtgatagcatgaacattagcatactccttgggattctgaattgacttccctggaagtcctgtaactttgggaacagaggtagaagctgattgtccttccaagtatctgacttttgtgttcaatacctccactttggcatttaggtcattgtagctgcagtccagcttatggtgtaattcagataacttcttagcaatttccattgagctagatgcttgtccctgtagcagctgttggaccatttgtttcatttcagcatcaagagcagcgggactttggtttttgctgagttgcaaacccaggtggtggtggcggctggtagttcccctgaaattgcagcttaggaacgaaaccttggttgtagggaacaaaaggtttgttctgaccttgttgttgctgtggaggatacacctgatcctgaggattagcaacgttggtgctgcggtaagagaggttgggattgttggttttgaagttattgtatcctttgtagccaccctggttgttgttatgtc

SEQ ID NO: 32883 - DNA, 483 bp, Arabidopsis thaliana landsberg
aaataacatacctatacgttaatacaaaagacattttaattattactttttgtttggtgattcatttaaaaaaaaaaaatattaaaattggtgtatttactttaacaatggaaataataaaattattacttcatattcttaaaaccccttcttgaatggatcataaacttctgatactctatacatatatataccgctaacgttaactataaatgcaaattaaaaaaaaaaaaaaacactaaacggttgactttgttaaatgattggatcaaaaacttccattacaaccaattgctcaatcaaatcacacagacaacaacaacacttaagcccactaagtcaacccaattctttttttgtccaccagcttaaaacaatatacttttgtttttacgttagcaagtccaagcgatctaccaacaaaaagaaacttgattttataatatcttgggcctattccctatatcaatggcagagtttcgc

SEQ ID NO: 32884 - DNA, 6531 bp, Arabidopsis thaliana landsberg
aaaaatatcattttggttacaaaatccttaatcaagaattcaacataacatgaaaatattatcctatgtatcttattatacaaacattctgcaatcttcttaagaacatcactattaattggtgaatttaaaaacaaagagtcactgattacataaaaacattcggggttggttggcggcttttgcacttgaagactcaagcagtacgttcttctggagataaggcattgaacgtttcgatagcgtactgtttagctgcccctcgcctcttctcttcgtctagtttagcacaatagtccatggcattaactgaatgtagctcaagtaagatcacacaagcaattccaacaaggcttgaaaatcacacgtgaaatatatatgtcacacaatcaaatatgaaatgcttatcgaaacaggatcatgaaagacaactgatatgtctataatttgcatgttttcagtgttcattcatcatcattttgagtctagtttaatatccttcatcactgttttataccatttctcatcatttgtcatcactttgcatgtttaggatagttttgcacgcatgttgcatttctgagttgttttcaggtgatttggagctgttgtcgagcaaattggaagaggtggacctgatcatgtcaaaaccactcgaccacgaggtcgagtaccgtcatcctgaagttcctgaagtacttgaccacaatttctacaacaaatcactcgaccgcgacattcggtccacggctcgactacaaggtcgagtagacgacttccccacttcacaacaccactcgaccccttggtcgagtagctgccttcaccatcatcattcactcgacctatcactctaccaacatggcagagtatcaccatcatcattgactcgaccaatcacactaccaacatggccgagtatcaccatcatcattcactcgaccaatcactctaccaccaagtcgagtactacagccaccatccactcgaccaatcactctaccacatggtggagtcccttatcatcattcactcgacgtccttactcgactgccagcttcagagtcttctccattccgcactcaaccagacaatcgagcacaaggaagagaagaagactccatctattcactcgaccattcactggacaacctgggtcgagtgcagttcttaatccatcccaatactgcgtcgttttgagtattagggtttcggaatattttgctataagtagcatgtactttacattttcaagaagaagtttttttctaagttttattccgcagacattgtgttcattacattttgtaatccggatttctctaatctattcagtattcagcattttgttcttgattttgtttactgttgttcatcctgttatcatcatgctgttacattgttgttatcatgttttcatcctgttcaacgtttatgttctctacaatgatgtctaagtagtgaataaatttctgaggatgggttagagtagtgtacaattctcagtatgctaggtggttgagtttgattgatagatcccttctgcattagttgtttttaatgcctattgctttctgatcaactggaatttcagcccagacatttccgcgcccaaaagttgttcgataaaatgtctgaaccactaattccagagattcgtggctctgtaccaaggtattggttgcagggagcgttttggctttaactcgttgattcgtaatcgctctgttaggttagctctcgtcaatggtgattgagtatgggactaggttaacttgagggtttttgttgcggtggcacttagatttggttaatgaacttgttgtctagggataatttattgagcatgtcaatcacttgtaaactgaggaacgaaaactactcaattaccccatcctcgggaattctttatctaattgaattctttgtttactctactgttgtttactgcatcttgtcatctgttgcttaatttctgcaattctttcttgttactcgacctcatactcgaccacccagttgtctggcaacagactgtgcagtcgagtatctgtgttatactttctgtctgttactcgacctgtcactcgacctcacccagtgctctgcaaagtgctgtgttggtcgagtaaattattgtttctgcttgaatttctgttttctgcatgttcacttagaactgctagaacacaccaaaacctgttatgcttggcttcacttagtgacgtctgatcacatcgtgattgttagcatcacacccatttggattgacaaccttcagtagtacaacgacatgatagtgctttaggattaattgatctaaaaaacctattatcaatttggcggcgtttccaattgggtgtttgtttgttacatttgagatttcagacttgcttagataaagttctttttcaattttcaattcggttgctaactgtgtgtttttcttgttgtcttcttgatccaggtatacctctgctgtatgcgaactcgatcaacaggcaatcagaacctccttttcaacgacaacatcgaccgcatagctcgcgaactcagagaaaggagaaacacagtcaaccttgtaccccatcaaccactcgaaatggctgacaaacagaatcaacaaaatggccctgccaacattggtgctggagatgcaccacgtgatcaccgtcagaggaaaggaattgcacctcctgctatgcagaacaacaacttcgagattaagagtggtctcatctcgatgaatcaggggaacaaattccatggtcggccaatggaggatccactcgaccacttggatgaatttcataggctctgcaacctaacaaaaatcaatggtgtcagtgaagacgggttcaagctccggttgttttcattctccttgggcgacaaagcacacatatgggagaacaatctgccccatgactcaatcaccacctgggatgattgcaagaagccttttctctcaaagttcttctccaatgccagaactgcaagactcagaaatgagatttctggtttctcacagaagactggtgaaagcttctgtgaagcatgggagcgtttcaagggttacaccaaccaatgccctcatcatggcttcaagaaagcctctctgctcagcactctttacagaggagtcctaccacgcattagaatgcttctggataccgccagcaatgggaatttccagaacaaagatgttgaagaaggctgagaattggttgagaaccttgctcaatcagatggtaattacaacgaggactgcgacagaactatcagaggcacaactgactctaatgacaaacacagaaaggagatcaaagcgctgaatgacaagctggacaagattcttcgtagccagcaaaagcatgtgaaatcccttgtagaggtcgagcagtatgaagtccaaaatgagaagagtaaccagttgaaagaagtcagagaaaccaacaacaaccagggtggcgacaaaggatacaacaacttcaaaaccaacaatcctaacctctcctaccgcagcacaaacgttgctaatcctcaggattaggtgtaccctccacagcaacaacaaggtcagaacaaaccttttgttccctacaaccaaggtttcgttcctaagcagcaattccaggggaactaccagcaaccaccaccacctgggtttgcacctcagcaaaaccaaggtcctgctgctcctgacgctgatatgaaacaaatgctacaacagctacttcacgggcaagcctcttgctccatggagatggcaaagaagatatcagagttacataacaagctggactgtagctacaatgatctcaatgtcaagatggaaacactgaataccaaagtccgatacttagagggacattctgcatcttcttcagctccaaaacagacaagccaactaccaggcaaagcagttcagaatccaaaagaatatgctcatgctatcacactgcgtagtggaaaagcacttccaactagggaggaaccaaagacggtcactgaggacagtgaagatcaagatggggaggatttaagtctcgagtaagatcaagctgacaaaccactcgagcaatcactcgaccagtcactcaagcaaccactcgacctatcactcgagcaaccactcgatctgccactcgacaacgttactcgaccaacaactcgacctatcttcccagcagcatcaccaactactccaaaaccagttgctgtcaaaaacaaagaaaaagtctttatccctcctccctacaaaccgcagctttcatttcctggccgtcacaagaaagcgttggcagaaaaatatagagctatgtttgccaagaatattaaggaggctgagttgcgaatacctcttgttgacgctctagcgctaatcccagactctcacaagtttttgaaagacttgatcgtggagagaattcaagaagtgtaagggatggtggtattgagtcatgaatgcagtgctatcatacaaaagaagatcattcctaagaagcttagtgatcctggttcattcactctaccatgctctttaggtccattggctttcaacagatgcctatgtgatttaggagcatcagtcagtctcatgccgctctctttcaccaaaagattggggttcactcaatacaaatcctgcaatatatccctaattcttactaataggtcaataaggatccctcatggtttactcgaaaacctaccaatcgggattggagccgtagagataccaactgactttgtagtcctggagatagatgaagagcctaaggaccctttgattctggggagacctttcttagcaactgcaggagctatgattgacgtcaagaaagagaagattcatctaaaccttggcaacgactttagaatgacctttgatgtcaaagacgcgataaagaagcctacaatagaagggcaactcttttggatcgaagaaatggatcagttagctgatgagttactggaagagcttgtagaagaagatcatcttaacagtgctttaaccaaaagtggtggagatgggtttctgcaattggaaacattgggataccaaaagctgttagactcccataaagcgatggaagaatcagaaccctttgaggaattgaatggaccagcaaaagaggtaatggtaatgagcgaagaagggtcaacacgagttcaacctgcacactcgagagcatactcgaccaatgactcgacctcgaatgccagcgactctggagagctaatcattctaacttcagatgactggtctgaactcaaggcaccgaaggttgatctcaaaccattccctaaaggtctaaggtacgcattccttggtccaaactctacttaccctgtgatcattaatgctgagttaaatgatgatgaagtgaacctgctattagctgaacttagaaagtacaggaaagcaaatggttattcattatctgacattaaggggatttcacctagtttatgtaaccttaggatccaccttgaaaacgaatcctactttagcattgaaccacataggaggttaaatcccaacttgaaagaagttctgaaaaaagaaattttgaaactgcttgatgctggtgtcatcaaccctatatctgatagtacttggggttctctagttcattgcgtctctaaaaagggcggtatgactgtttttaaaaatgaaaaggatgaattgatccctactagaactaaaactggtcatagaatgtgtatcgattataaaaagttaaatgctgcatctaggaaagatcattttcctttaccattcattgatcaaatgcttgaacgcttagctaatcacccatactattgctttcttgatggatatagtgttttttttcaaataccaattcaccctaatgatcaggagaaaaccactttcacatgtccttatggaacttttgcttaaaagagaatgccatttggtttatacaatgctcctgcaacatttcagaggtgcatgacctctatattttcagatttaatcgaggagatggtggaggttttcatggacgattttccggtctattgcccctctttctcctcatgtttgttgaatcttggcagggtattgaccaggtgcgaggaaacgaatcttgttctcaatagggaaaagtgtcatttcatggtgaaggaagacatagtgttgggtcacaagatgtcagaaaagggtatagagtttgacaaagggaaaattgaagtgatgatgcagttgcagccaccaaaaacggtgaaggacatcagaagtttccttggtagtgctgggttctacagaagatttattaaagacttctccaagatagccaagtcgttaaccacactattgcgcaaggagaccgaatttgaatttgatgaggactacctcaaatcctttcacaccatcaaggatgctttggtatctgctcctgttgttcgagcgcctaattgggactatccatttgagattatgtgtgatgcatcagattcaacaaaaggagctgtttaggccaaaaaataaacaagaagcttcat

SEQ ID NO: 32885 - DNA, 522 bp, Arabidopsis thaliana landsberg
tcaattgtccctctgttttctcctcatcctcttcttcttccagacgctgtcaatcccgatcaggttcgcgcgtctatttttcttgttaggattcaagtggtgtttgttcttaggctttggtcatgagattgatcttttgaagttttttggtggcagacttgtatttaggaggagggtacgaggatcttgaaggagaagacgatttgaaggcagagtttatatgccctttttgcgctgaagattttgacattgttgggctttgttgtcacattgatgaagaacatcctgttgaagccaagaatggggtaattataattgatcatctatcaaaccctgctttagctttaggatagatatcttgatgctttgtttgattcttaggttgatcagttctttgccttagttgtgatccaatgctgcaatttctggtttatagttagaaaaattgaccatgttgcaatattttttttttctgttctatcgagatgataaactgttctctggctacctctgttgtttctt

SEQ ID NO: 32886 - DNA, 16515 bp, Arabidopsis thaliana landsberg
atcaaaacaactccaatttcagtcctctcaaagagattggacatgagaaattctaagtctggtggcttctcttttatacctgcaatgttgtcaacacctttggcaaaaagcaagtgcgttatcatagtcatgaaatcactataaacaagtaaacatggctcagctttaatcaaggcaccattcttgaaatgttcatgttttacttttatcctaagacaagagtttgattccaaatattctttaaataaatctaactctttctcaatgtttcctaaatatgataaactcatagtaacagttcttgaaacatgagaaacaaatcgagttaaagagttacttacctgagtaaggttcacagtgtgttcggtgcttggtatcatcatgacaaatggaagtggcgttggatctgggggttcttttggatcaaggcattgttggtgaccaacacctcctctctatagctatttaacaactctcctggtcgccattgataggtatgaaaagtactaaatgaagaaatatccatttcaggctcctctatgcattcttccctgtgttttagccgaagttggttttgataatcttcacgaggatctcttgattgactcatatgatgagtgcttatctcccgatcattagtcttcttgatttccccccaaagtgtacaaccttcaccaagagaaagcaaattagctttcattcgattttgggagtttagataaatacctccagttttaaatggtggtgtagcatctggtggtttatccttgaaaacaatattgcattcagctctaggtgattgtttgtggaccatgacagcctcaacttgagtgaatccaactaattgacgtggttcttctttaggtaaatctcggtttagaactggttgggatacatatggcggtcctttcttattcaagatggtgatttttgaaacatagccagttcgacaagcttgtgaagtggttgacaccaaatgatgattctcctcttttgtgctttcttcaattttgtcattctcatgctccataatatcacctgaatcaacatcctttgacaagaacaagtgcatgacacaagaactagaattttctaaaccttgactaactacttcactacttgagtttggtgagctcagtttcgattctaatgaagtattagttagctcaagtttttcagggcaagttgcaactaaatgtcctttcttacgacagttataacaagtgtctcctctggattttgaaagattagaagacttacagtgcattggctcaacgcttggttcaagtgatggttttaggctttgcttgggaactacaatttgttcagggaccttctttggttgacatgttgacttagcctccattttcatatttttaaagtgcttaattaactcttcaaaaagatcaggttgtgtcttagcctacacgggtgttgaggtgttcttttgatttgggtataagacttctttcttttcttgaactgctaatccttggattttgggattgccttttggagtgcattttagtgcttgtagagcatacttattccttagcagtttcttaagatctctccacaaagtgataggtggctccttataatataagcgatcatcaacttcttgcaaccaccatttgtaagcatctccagtgaggtggctaagtgcacaaacaaatctcatctcactcaagaagtttttgtaggaaaaccactcgtccatgtttttctcccactctaggtaatcttcttttcctgaaaatttaaaaagtgcattagtcggtttataatcagaatgaaacacagatttggatttgggagtgtgaggaattttctgtgggctgctctgtgttgatctcagtaagttgtccggtggcttagacttaagcttttgatccttcctttttcgtgctctgtgatgcccttgacgaatttgatctaagtagctgtcgaaaattttctccatttcaatggtaagagcttcaattagatgcttgttgcgcttgtggcttgatctctcctcagttgttaacattgcgacctgagaaacaaagcacaaatacaccagtaacaagttctttttgtaatagaaaggattcaacacaacaaacacaatatgacccttcaacttacacaaaacactcctagaaccctaaagtttggtctgtttatatgttttcttagacattgatactttcatttgatcgatattagatataaaaacataacaaaacacttcaattcagaaatttacaaactaaacattcaaaaaaaactaatctatataataaattccatgttgtgtcattgtcatgattgatatttttaaacaagttctaaaataagttacgaaacagatgatttatatacctaaagttctgtatgtactctatatcactaaagtgggtgtttatcagtaatttttatcaatagattaaatcaaactatgtggattacaaaagtttgtgttctaaagttttccaaaacgtcacaaaccagtcgctctttgcaacttatttgcgacaacaaaagaaaacagtcgcactttgcaaccaattacctacgtcgtaccaactctcgatttttgcgtttcgaaattttaaagtttggcctgtttatatgtttttttagacattgatcctttaattggatcgatattagatataaaaacgtaaccaaacacttcaattcggaaatttacaatctaaacattcaaaaaaacctcatctatatgataagttccatgttctttcattgtcatgattgatattttcaaacaagttctaaactaagttatgaaaccaatgaatttatatatacctaaagttctatatgtactctatatcactaaaatgagtgcttttcagtaatatttaacaatagattggatcaaactatgtggatttcaaaagtttgtcttttgaagttttccaaaatatcacaaaacagtccctctttgcacattatttgcgacgaaaaaagaaaactgtcgcatcttgcaaccaattacctacgtattaccaactatcgatttttgggtttgaaatattaaagtttggtctgtttatatgttttcttagacgttgatactttaatttgatcgatattagatataaaaacataaccaaacacttcaattctgaaatttacaaacgaaacattcaaaaaaacctaatctatatcataagttccatgttctttcattgtcatgattgatatttttaaacaagttctaaaataagttacgaaaccgatgatttatatacctaaagttctgtatgtactctatatcactaaaatagtagcttttcagtaatttttatcagtagattagaacaaactatgtggatttcaaaagtttgtcttctgaagttttccaaaatatcacaaaacagtccctctttgcaccttatttgcgacgaaaaaagaaaactgtcgcatcttgcaaccaattacctacgtattaccaactatcaatttttgcgtttcgaaatattaaagtttggtctgtttatatgttttcttggacgttgatacttaatttgatcgatattagatataaaaacataaccaaacacttcaattctgaaattttcaaatgaaacattcaaaaaaacctaatctatatcataagttccatgttctttaattgtcatgattgatattttaaaacaagttctaaaataagttacgaaaccgatgatttatatacctaaagttctgtatgtactctatatcactaaaatgggtgcttttcagtaatttttatcaatagattggatcaaactatgtggatttcaaaagtttgtgttctgaatttttccaaaacgtcacaaaccagtcgctctttggaacttatttgcgacgacaaaagaaaacagtcgcactttgcaaccaattacctacgtcgtaccaactctcgatttttgcgtttcgaaattttaaagtttggtatgtttatattttttcttagacattgatactttaatttgatcgatattagatataaaaacataaccaaacacttcaattcggaaatttacaaactaaacattcataaaaacctaatctatataataagctccatgttctttcattgtcatgattgatatttttaaacaagttctaaaataagttacgaaaccgatgatttatacacctaaagttctgtatgtacctctatatcactaaaatgggtgcttttcaataatttttatcaatagattggatcaaactatgtggatttcaaaagtttgtcttctgaagttttccaaaacgtaacataccagtcgctctttgcaatttatttgcgacgacaaaagaaaacagtcgcactttgcaaccaattacctacgtcgtaccaactctcgatttttgcgtttcgaaattttaaagtttggtgtgtttatatgttttcttagatattgatactataatttgatcgatattagatataaaaacataaccaaacacttcaattcggaaatttacaaactaaaaattcaaaaaaaaactaatctatataataagttctatgttgtgtcattgtcatgattgatatttttaaacaagttctaaaataagttacgaaaccgatgatttatatacctaaagttctatatgtactctatatcactaaagtgggtgcttttcagtaatttttatcaatatattggatcaaactatgtggagttcaaaagtttgtcttctgaagttttccaaaaagtcacaaaagagtcgctctttgcaacttatttgcgatgaaaaaagaaaacagttacactttgcaaccaattacctacgtattactaactcttgatttttgcgtttcgaaattttaaagtttggtgtgtttatattatttcttacatattgatactttaatttgatcgatattagatataaaaacataaccaaacccttcaattcggaaatttacaaactaaaaattcaaaaaaacctaatctatataataagttccatgttgtgtcattgtcatgattgatatttttaaacaagttctaaaataagttacgaaacagatgatttatatacctaaagttctgtatgtactctatatcactaaagtgggtgcttttcagtaatttttatcaatagattggatcaaactatgtgtatttcaaaagtttgtcttctgaagttttccaaaaagtcacaaaacagtcgctctttgcaacttatttgcgacgaaaaaagaaaacagtcgtactttgcaaccaattacctacgtatcactaactctcgatttttgcgtttcaaaattttaaagtttggtgtgtttatatgttttcttagacatggatactttaatttgatcgatattagatataaaaatataaccaaacacttcaattcggaaatttacaaactaaacattataaaaacctaatctatataataagttacatgttctttcattgtcatgattgatatttttaaacaagttctaaaataagttacgaaaccgatgatttatatacctaaagttctgtatgtactctatatcactaaaatgggtgtttttcagtaatttttatcaatagattggatcaaactatgtggatttcaaaagtttgtcttgtgaatttttactagtagttacaaaagagtcgcacgttgcaacgtttctgtaactgttttgtgactaaattgcgacgattgtgcaacgttttaaaattgtgtaaatttattaagtgtttctcgagtaaatattgtgtgaccgaatagggactaacgagcatttttatttgtaaaatgtttcataaatttcacaaaacagtcgctaggtgcaacgtttttgcgacgacaagagaacacagtcgcactttgcaaccaattatctacttattaccaacgctcgagttttgaatttcgaaatttttaagttctggtatgtttatatgttttcttatacgttgacactttaatttggtcgatattatatataaaaacataaccaaaaacttcaaatctgaatattacaaaccaaacattcaaaaaaacctaatctacatgataaggttcatgtgaattcattttcatgattgatcttttcaaacaagttctcaaataagtttgaaaccaatcatttgtatacgtaaagttctttatgtactaaaatggttgtttttcagtaatgtttatctatagaatggatcgaactatgtggatttcaaaagtttgtcttgtgacctatttcaaaatgtcacaaaacagtcgctttgtgcaacttttttgcgacgacagcagaacacagtcgcacgttgcaacgtttgtgtaactgttttgtgactaaattgcgacgattgtgcaacgttttaaaattttgttaaatttattaagtgtttctcgagtaaatattgtgcgaccgaatagggactaacgagcatttttatttgtaaaatgtttcaaaaatgtcacaaaacagtcgctaggtgcaacgtttttgcgacgacaacagaacacagtcgcactttgcaaccaattagctacttattaccaacgctcgagttttgaatttcgaaatttttaagttcttgtatgtttatatgttttcttatacgttgaaactttaatttgatcgatattatatataaaaacataaccaaacacttcaaatctgaatattacaaaccaaacattcaaaaaaaactaatctacatgataaggttcatgtgaattcattttcatgattgatcttttcaaacaagttctcaaataagtttgaaaccaatcatttgtatacgtaaagttctttatgtactaaaatggttgtttttcagtaatgtttatctatagaatggatcgaactatgtggatttcaaaagtttgtcttgtgacctattccaaaatgtcacaaaacagtcgctttgtgcaatttttttgcgacgacagcagaacacattcgcacgttgcaacgtttgtgtaactgttttgtgactaaattgcgacgattgtgcaacgttttaaaattttgttaaatttattaagtgtttctcgagtaaatattgtgcgaccgaatagggactaacgagcatttttatttgtaaaatgtttcaaaaatgtcacaaaacagtcgctaggtgcaacgtttttgcgacgacaacagaacacagtcgcactttgcaaccaattagctacttattaccaacgctcgagttttgaatttcaaaatttttaagttttggtacgtttatatgtttttttatacgttgacactttaatttggtcgatattatatataaaaacataaccaaacacttcaaatctgaatattacaaaccaaacattccaaaaaacttaatctacatgataaggttcatgtgaattcattttcatgattgatcttttcaaacaagttctcaaataagtttgaaaccaatcatttgtatacctaaagttcttgatgtactaaaatggttgtttttcagtaatgtttatctatagaatggatcgaactatgtggatttcaaaagtttgtcttgtgacctattccaaaatgtcacaaaacagtcgctttgtgcaacttttttgcgacgacagcagaacacagtcgcacgttgcaacgtgtgtgtaactgttttgtgactaaattgcgacgattgtgcaacgttttaaaattttgttaaatttattaagtgtttctcgagtaaatattgtgccaccgaatagggactaacgagcatttttatttgtaaaatgtttcaaaaatgtcacaaaacagtcgctaggtgcaacgtttttgcgacgacaacagaacacagtcgcactttgcaaccaattagctacttattaccaacgctcgagttttgaatttcgaaatttttaagttctggtacgtttatatgttttcttatacgtggacactttaatttggtcgatattatatataaaaatataaccaaacacttcaaatctgaatattacaaaccaaacattcaaaaaaacctaatctacatgataaggttcatgtgaattcattttcatgattgatcttttcaaacaagttctcaaataagtttgaaaccaatcatttgtatacctaaagttctttatgtactaaaatggttgtttttcagtaatgtttatctatagaatggatcaaactatatggatgtcaaaagtttgtcttgtgacctattccaaaatgtcacaaaacagtctctttgtgcaacttttttgcgacgacagcagaacacagtcgcacgttgcaacgtttgtgtaactgttttgtgactaaattgcgacgattgtgcaacgttttaaaattttgttaaatttattaagtgtttctcgagtaaatattgtgcgaccgaatagggactaacgagcatttttatttgtaaaatgtttcaaaaatgtcacaaaacagtcgctaggtgcaacgtttttgcgacgacaacagaacacagtcgcactttgcaaccaattagctacttattaccaacgctcgagttttgaatttcgaaatttttaagttttggtatgtttatatgttttcttatacgttgacactttaatttggtcgatattatatataaaaacataaccaaacacttcaaatctgaatattacaaaccaaacattcaaaaaaacctaatctacatgataaggttcatgtgaattcattttcatgattgatcttttcaaacaagttctcaaataagtttgaaaccaatcatttgtatacctaaagttctttatgtactaaaatggttgtttttcagtaatgtttatctatagaatggatcaaactatgtggatttcaaaagtttgtcttgtgacctattccaaaatgtcacaaaacagtcgctttgtgcaacttttttgcgacgacagcagaacacagtcgcacgttgcaacgtttgtgtaactgttttgtgactaaattgcgacgattgtgcaacgttttaaaattttgttaaatttattaagtgtttctcgagtaaatattgtgcgaccgaatagggactaacgagcatttttatttgtaaaatgtttcaaaaatgtcacaaaacagtcgctaggtgcaacgtttttgcgccgacaacagaacacagtcgcactttgcatccaattagctacttattaccaacgctcgagttttgaaattcgaaatttttaagttctggtatgtttatatgttttcttatacgttgacactttaatttggtcgatattatatataaaaacataaccaaacacttcaaatctgaatattacaaaccaaacattcaaaaaacctaatctacatgataaggttcatgtgaattcattttcatgattgatcttttcaaacaagttctcaaataagtttgaaaccaatcatttgtatatctacagttctttatgtaataaaatggttgtttttcagtaatgtttatctataaaatggatcaaactatgtggatttcaaaagtttgtcttgtgacctattccaaaatgtcacaaaacagtcgctttgtgcaacttttttgcgacgacagcagaacacagtcgcacgttgcaacgtgtgtgtaactgttttgtgactaaattgcgacaattgtgcaacgttttaaaattttgttaaatttattaagtgtttctcgagtaaatattgtgcgaccgaatagggactaacgagcatttttatttgtaaaatgtttcaaaaatgtcacaaaacagttgctaggtgcaacgtttttgcgacgacaacagaacacagtagcactttgcaaccaattagctacttattaccaacgctcgagttttgaatttcgaaatttttaagttctggtatgtttatatgttttcttatacgttgacgcattaatttggtcgatattatatataaaaacataaccaaacacttcaaatctgaatattacaaaccaaacattcaaaaaaaactaatctacatgataaggttcatgtgaattcattttcatgattgatcttttcaaacaagttctcaaataagtttgaaaccaatcatttatatacctaaagttctttatgtactaaaatggttgtttttcagtaatgtttatctatagaattgatcgaactatgtggatttcaaaagtttgtcttgtgacctattccaaaatttcacaaaacagtcgctttgtgcaatttttttgcgacgacagcagaacacagtcgcacgttgcaacgtttgtgtaactgttttgtgactaaattgcgacgattgtgcaacgttttaaaattttgttaaatttattaagtgtttctcgagtaaatattgtgcgaccgaatagggactaacgagcattttatttgtaaaatgtttcaaaaatgtcacaaaacagtcgctaggtgcaacgtttttgcgacgacaacagaacacagtcgcacttttcaaccaattagctacttattaccaacgctcgagttttgaatttcgaaattgttaagttctggtatgtttatatgttttcttatacgttgacactttaatttggtcgatattatatataaaaacataaccaaacacttcaaatctaaatattacaaaccaaacactgaaaaaaacctaatctacatgataaggttcatgtgaatccattttcatgattgatcttttcaaacaagttctcaaataagtttgaaaccaatcatttgtatatctacagttctttatgtaataaaatggttgtttttcagtaatgtttatctatagaatggatcaaactatgtggatttcaaaagtttgtcttgtgacctattccaaaatgtcacaaaacagtcgctttgtgcaatttttttgcgacgacaacagaacacagtcgcacgttgcaacgtttgtgtaactgttttgtgactaaattgcgacgatcgtgcaacgttttaaaattttgttaaatttattaagtgtttctcgagtaaatattgtgcgaccgaatagggactaacgagcatttttatttataaaatgtttcaaaaatgtcacaaaacagtcgctaggtgcaacgtttttgcgacaacaacagaacacagtcgcactttgcaaccaattagctactttttaccaacgctcgagttttgaatttcgaaatttttaagttctggtttgtttatatgtattcttatacgttgacactttaatttggtcgatattatatataaaaacataaccaaacacttcaaatctgaatattacaaacccaacattcaaaaaaacctaatctacatgataaggttaatgtgaattcattttcatgattgatcttttcaaacaagttctcaaataagtttgaaaccaatcatttgtatacctaaagttctttatgtactaaaatggttgtttttcagtaatgtttatctatagaatggatcaaactatgtggatttcaaaagtttgtcttgtgacctattccaaaatgtcacaaaacagtcgctttgtgcaatttttttgcgacgacaccagaacacagtcgcacgttgcaacgtttttgtaactgttttgtgactaaattgcgacgattgtgcaacgttttcaaaattttgtaaaatttattaagtgtttctcgagtaaatattgtgcgaccgaatagggactaacgagcatttttatttgtaaaatgtttcaaaaatgacacaaaacagtcgctaggtgcaacgtttttgcgacgacaacagaacacagtcgcatttttaaccaattacgctacttattaccaacgctcgagttttgaatttcgaaatttttaagttctggtatatttatatgttttcttatacgttgacactttaatttggtcgatattatatataaaaacataaccaaacacttcaaatctgaatattacaaaccaaacattcaaaaaaacctaatctacatgataaggttcatgtgaattcattttcatgattgatcttttcaaacaagttctcaaataagtttgaaaccaatcatttgtttacctaaagttctttatgtactaaaatggttgtttttcagtaatgtttatctatagaatggctcaaactatgtggatttcgaaagtttgtcttgtgacctattctaaaatgtcacaaaacagtcgctttgtgcaacttttttgcgacgacagcagaacacagtcgcacgttgcaacgtttgtgtaactgttttgtgactaaattgcgacgattgtgcaacgttttaaaattttgttaaatttattaagtgtttctcgagtaaatattgtgcgaccgaatagggactaacgagcatttttatttgtaaaatgtttcaaaaatgtcacaaaacagtcgctaggtgcaacgtttttgcgacgacaacagaacacagtcgcactttgcaaccaattagctacttattaccaacgctcgagttttgaatttcgaaatttttaagttctggtatgtttatatgttttcttatacgttgacactttaatttggtcgatattatatataaaaacataaccaaacacttcaaatctgaatattacaaacaaaacattcaaaaaaacctaatctacatgataaggttcatgtgaattcattttcatgattgatcttttcaaacaagttctcaaataagtttgaaaccaatcatttgtatacctaaagttctttatgtactaaaatggttgtttttcagtaatgtttatctatagaatggatcgaactatgtggatttcaaaagtttgtcttgtgacctattccaaaatgtcacaaaacagtcgctttgtgcaacttttttgcgacgacagcagaacacagtcgcacgttgcaaagtttgtgtaactgttttgtgactaaattgcgacgattgtgcaacgttttaagattttgttaaatttattaagtgtttctcgagtaaatattgtgcgaccgaatagggactaacgagcatttttatttgtaaaatgtttcaaaaatgtcacaaaacagttgctaggtgcaacgtttttgcgacgacaacagaacacagtagcactttgcaaccaattagctacttattaccaacgctcgagtttttaatttcgaaatttttaagttctggtatgtttatatgttttcttatacgttgacgctttaatttggtcgatattatatataaaaacataaccaaacacttcaaatctgaatattacaaaccaaacattctaaaaaaactaatctacatgataaggttcatgtgaattcattttcatgattgatcttttcaaacaagttctcaaataagtttgaaaccaatcatttatatacctaaagttctttatgtactaaaatggttgtttttcagtaatgtttatctatagaatggatcaaactatgtggatttcaaaagtttgtcttgtgacctattccaaaatgtcacaaaacagtcgctttctgcaatttttttgcgacgacaccagaacacagtcgcacgttgcaacgtttttgtaactgttttgtgactaaattgcgacgattttgcaacgttttaaaattttgtaaaatttattaagtgtttctcgagtaaatattgtgcgaccgaatagggactaacgagcatttttatttgtaaaatgtttcaaaaatgtcacaaaacagtcgctaggtgcaacgtttttgcgacgacaacagaatacagtcgcactttgcaaccaattagctacttattaccaacgctcgagttttgaatttcgaaatttttaagttctggtacgtttatatgttttcttatacgtggacactttaatttggtcgatattatatataaaaacataactaaacacttcaaatctgaatattacaaaccaaacattcaaaaaaacctaatctacatgataaggttaatgtgaattcattttcatgattgatcttttcaaacaagttctcaaataagtttgaaaccaatcatttgtatacctaaagttctttatgtactaaaatggttgtttttcagtaatgtttatctatagaatggatcaaactatgtggatttcaaaagtttgtcttgtgacctattccaaaatgtcacaaaacagtcgctttgtgcaatttttttgcgacgacaccagaacacagtcgcacgttgcaacgtttttgtaactgttttgtgactaaattgcgacgattttgcaacgttttaaaattttgtttaatttattaagtgtttctcgaataaatattgtgcgaccgaatagggactaacgagcatttttatttgtaaaatgtttcaaaaaggtcacaaaacagtcgctaggtgcaacgtttttgcgacgacaacagaacacagtcacactttgcaaccaattagctacttattaccaatgctcgagttttgaatttcgaaatttttaagttctggtacgtttatatgttttcttatacgtggacactttaatttggtcgatattatatataaaaacataaccaaacacttcaaatctgaatattacaaaccaaacattcaaaaaaacctaatctacatgataaggttcatgtgaattcattttcatgattgatcttttcaaacaagttctcaactaagtttgaaaccaatcatttgtatacctaaagttctttatgtactaaaatggttgtttttcagtaatgtttatctatagaatggatcaaactatgtggatttcaaaagtttgtcttgtgacctattccaaaatgtcacaaagcagtcgtttctgcaatttttttgcgacgacagcagaacacagtcgcacgttgtaacgtttttgtaactgttttgtgattaaattgcgacgattgtgcaacgttttaaaattttgttaaatttattaagtgtttctcgagtaaatattgtgcgaccgaatagggactaacgagcatttttatttgtaaaatgtttcaaaaatgtcacaaaacagtcgctaggtgcaacgtttttgcgacgacaacagaatacagtcgcactttgcaaccaattagctacttattaccaacgctcgagttttgaatttcgaaatatttaagttctggtacgtttatatgttttcttatacgtggacactttaatttggtcgatattatatataaaaacataaccaaacacttcaaatctcaatattacaaaccaaacattcaaaaaaacctaatctacatgataaggttaatgtgaattcattttcatgattgatcttttcaaacaagttctcaaataagtttgaaaccaatcatttgtatacctaaagttctttatgtactaaaatggttgtttttcagtaatgtttatctatagaatggatcaaactatgtggatttcaaaagtttgtcttgtgacctattccaaaatatcacaaaacagtcgctttgtgcaacttttttgtgacgacagcagaacacagtcgcacgttgcaacgtttgtgtaactgttctgtgactaaattgcgacgattgtgcaatgttttaaaattttgttaaatttattaagtgtttctcgactaaatattgtgcaaccgaatagggactaacgagcatttttatttgtaaaatgtttcaaaaatgtcacaaaacagtcgctaggtgcaacgtttttgcgacgacaacagaacacagtcgcactttgcaaccaagtagctacttattaccaacgctcgagttttgaatttcgaaatttttaagttttggtatgtttataagttttcttatacgttgacactttaatttggtcgatattatatataaaaacataaccaaacacttcaaatctgaatattacaaacaaaacattcaaaaaaagctaatctacatgataaggttcatgtgaattcattttcatgattgatcttttcaaacaagatctcaaataagtttgaaaccaatcatttctatacctaaagttctttatgtactctatatctctaaaatggatgcttttcagtaatttttatcaatagattggatcaaattatgtggattttaaaagtttgtcttgtgacgttttccaaaacgtcacaaaacagtcctctttgcaacttatttgcaacgaaagaagaaaacagtcgcactttgcaaccaattacctacgtattaccaactctcggtttttgcattttgaaattttaaggttttggcctgtttatatgttttcttatacgttgatactttaatttgatcgatattagatataaaagcataaccaaacacttcaattctgaattttacaaaataaacattcaaaaaacataatatatgtgataagttccatattctttcattgtcatgattgatattttcaaacaagttctaaaataagttatgaaaccaatgagtatatacctaaagttctatatgtactctatatcactaaaatgagagcttttcagtaatttttatcaatagattagatcaaactatgtggatttcaaaagtttgtcttgtgacgttttactagtagttacaaaagagtcacactttgcgacgtttgcgtaactgttatgcgactgatttgcgacgattgtgtaacgtttttaaaattttgtggaaattgttaagtgtttctggcgtaattagtgg

SEQ ID NO: 32887 - DNA, 851 bp, Arabidopsis thaliana landsberg
gaaactgatttttagtagctcagtatttggcttacatgacatatctgttcctcttcgtcatcctctcacccagaagcttatccatcatctcaaacagtgacctagtaggagtattcttccaaggaaatgccatttgaatcgcaacgaagacaaatgtccattcatcttcgttgtctggcaagctccatctcctcctcgcatctagtgagttctcatcataattactctaatgaacataactaagatagcacaagagattgtaacataagactatgagtgattgaatctatcacacatgaatatacattaaacataacttatcacaagaaccagaaactagttcgttacctgaaagaatgtcagctccacctgctacgattaagtcctatatgtttctctgaacactctgagcttttcctccaccaatatctacaacaatgtcaaaaagtgattattttaacagaagttacagaacaaaaactgcaaacaaatatgacaacacttttaatattcttcaaagctcttcaatggtttaagatagttaatactgaagaaatatggagcatgtgaaaagtttggaaggtagggcatgtactgcttagacaaaatcataagatgatggaatgagacacaatacgaaagaagtatatgaaagattttttcataagaaggtgaagtgaagagggattaaggtgtgtttggtatgtgaagcgttaaagcaacaagagcatgacttgatggtggtgtttttaatcgtatcaatttgaaccaagtttcaaaaaatataagatgaggtcttttagtttccgaaccgtgaaggtgaagagaatctaaactacaacaagaaagga

SEQ ID NO: 32888 - DNA, 1930 bp, Arabidopsis thaliana landsberg
tatttaatgattatatactgatggttgaagctgaaggagaaagactgttggtagtactcaacgatgaaccatgggatttcaaggaggcaaataaattcagagaatggcgagatgcttgtgaggaggagattatgtcaataatcaagaacaaaacttggagtctagttgatctccctgctggaactaaaccaatcggtttaatttgggttttcaagatcaaacgcaagtcagatggaaccataaccaaatacaaagcaaggcttgtggcaaagggatatgtacagaagcatgggatagatttcgatgaagtgtttgctccagtggctcgaatagaaacagtgcgttttatcattgctttggcagcaactaatggttgggaagtacaccatttggacgtgaagactgcatttttgcatggagaactaaaggagaacgtatatgtcactcaaccagaaggttttgtaaccaagggaagtgaagagaaggtatacaaactacacacggctttatatggactgcgacaagctcctcgagcatggaacattaaactgaatgagattttgaagaaattatcttttgagaaatgttctaaggaaccctcgatgtatcggaaacaagagggaaagcacctgcttcttgttgcagtttatgtagatgatttgttggttacaggctctaatcaagacatgataaacgactttaaaagggggatgtcaagtaactttgagatgagtgatctaggaaaactcacctattatcttggcattgaagtacttcaagaagaagaaggaatcagtcttaaacaagagaggtatgcaaagaagatactagaagaagcaggaatggatgagtgcaaggctgtcttgactcccatgatttcaggtctggaactttcaaaggcacccaacgagaagagcattgatggtcaggagtatcgaaaagtgatcgggtgtctcagatacttgcttcacactaggccggatctctcttatgctgttggagtacttagcaggtatatgcacgatcccaaagagtctcatgaagctgccttgaaacaagtcttgaggtatcttcagggaactactagtcatggtatttactttgggaaaggaaacaagtcaggattggtgggttttagtgacgctagtcacagcgtggatgaagacgatggtaagagcacgggaggtcatgttttctacttaaatgagtgtttgatcacttggtgttcacagaagctacaagttgttgcattatcttcttgtgaagctgagttcatggcagctactgaggcagccaaacaagccatttggctacaagatctctttgctgaagtcattggaacaacatgtgagagagttacaatacgtgtcgataacaagtctgccatcgcactcactaaaaaatcctgtttccatggaagaagtaagcacattcaccggaagtaccatttcataagggagtgtgtagaaaatggtcaaatcttggtagaacatgttcccggagttaatcaaagagcagacattctaaccaaggcactcgcaaagatcaagttcaaggagatgagagatctcattggagttcgagacttgtcaaatgaagacttcaagtttaaaggggagattgttggagtaaacttgaagataatgacttgagttatgaattatttaaatataggattagattaaatcttaaggagatatcttaggagataagttaggagttatctaaccctaatcctattgtgatttggttttaatctctatatatatgagtcccaaagttgtggtgaaccatatgagtttagagagattaaggctttaagattgtttaggtttgagtaatttcctaagcattaataagagaataattcttatatctttgagttcttaatcttctttgaaacttgaaggagggcttggggaagattcca

SEQ ID NO: 32889 - DNA, 3268 bp, Arabidopsis thaliana landsberg
ttcaatggcgttcttcttcttgcgattgttgaatttctttcactcttttgacttgtggggctagtacaagaatggctgccggaatttcacaaatttgttttactaagagaatacttttttctttctttctgggatttgatgtttgtgtttgctagctgagaataaaaatcaatctttaagagctgtagaattgaatatctggaagctttcattgcgtagaagctatagcttcttaaggttgatgataagtgaagtttacttttagctaagaaagcttttttggattgttgatttattaggtaaattcgaatcatgtcaaggcctgctcagcttccacctcgttgcccgattccaaagaaactttctttgagtccagttgcagatacattctactcttcttcctcacccattgaatcatacattggtcaatacaagtcttctactcaagattccaggctcgaagatcaacctgcttggcttgatgagttgctctgtgacaaaactgatgggttgctcactagaggaggtcctctgcgccgctcagctagcgactcagttgtgcttttgggagacatttctgctactttttctggttttgatcaaagtgaggatgaagaaagtttgagttctgaagcttgtggggacttggagtctgcttgtgtatatggtcccaactcgccaagagcaaagaacaactctagcttctctaacaaccctattgcttctgccttttcggattatggttctcagacaccgcctcagaacttggatgatacggtgaaagggatcaaccgttcacctgttgctgaaaatgcgtgtggttcaatgggcataccaaatgcaaaaaggtgagagaacattaatcttcttaagacattattatttaacatcattactttatttgtgtagaaattgataagctttggtcccttaagagtagtattctttatcggctaatgttgctaatattaattcggctgcatcaagtctagtccataagctcctatgtggtacctctgtgtctattctagatcaagatacatcggtttctggtttgtcagtgagaaggaagaaaagaatagttccatatctctgttttacacttggatttgtagttggtggggattcttatgactactaaattggcagaaatatgtgtctgtgtccacaagagtgctcttagaatgccaattcggtacttttacattatcttgttgtgtcatatgttgatttttctatctttactctgccaggaacccgggacagcgttcaagggttcgtaagctccagtacattgctgaacttgagagaacagtaggcatgttgcaggtagagattccattcaagctgtgcgctttcttaaaacacaatcgttattttttctgtggacagttatatgtacaaaatgcaatgttgtatgttagatctctgtggtaagatgatctagttgttggtgttactacatagttagatgcagagcagtaaaacattatacagaaacctagcacattgtttttggtagtaaccaaatagcaatctcgttttgcagacggtggaagcagatttatcagtgagagtggcttcacttcttcagacacgagcaacactgtccctggagaatagccagttgaagcagcagatggcgatactaaagcaggacaagctcataagggaaggtaaatcaaaacatgacataaaccacacattcaaggagtctgaattacagcttgtgatcgatccactgatgcttgttccgaaatattttctgtaggtgagtatcagttactgaagaaggaagctcagagattgaaatctggattgggatacttagggagcactaacaacagtaacaggctggtgaggtcatattctgctggttcaaatgtagctccaaggacagcttcgtcccacttggactggaatttgctagatctgaccaaactcaatctcaactaaagacaaaaccctccataagaataagtagcttaaggaattcaagagttaacagttctatgttcggaaaatgaacaaatctttgtcgatttgtataaatatgatttaggagtattaagtatcccactgtcttgggatgtagtcttttttagctaaaatgctctgatattggagacattttaagggttcctattttgtagctcattgagtaattgtggtggctttgactgagagtatccttctatttctggtgttctaaaaagctattaatttgatgaacgttgggatctaatatcactaaaatgtatgcatttgagtattactataacaaataatttgggcttcatgtttcatgttcaacttctcaagaaactcaaaaacttcacttctcagcaacatatcttacacatcatttagaatgcgatgctgtagactcccgattagatttccttataaaataatataatacagaccaaatctgaggattcaaggttaatgaaactgctaagcaaaaaacttattacatacagtaacaagactttaaaagcatagtcgctggagatgaatatttatgcacacaaagaggtgtgtaaatgggatttagccccgaagtgatgcacgtggtaccgctggtaatccccattcatcttcagcctgttcatcattacaccatcataaaaatctctcatcagacatataaaataagttccaagtccagagtgtgtaatattcggtagttattgagtaagaaaaatatgcaaaaagccatcatcactcatttagtaatcaagcaatttgtgtgaataaagactagaccagcctcataactaaagataagtttgtaataggaggacatttgtttttagaggtttatcatctgaattctcaaatgagtaagtggaaactcacctgagctcgtccgggtggagctcctgtatgccccattggtgctgaaggcaagttgagctcatcattaagatccggttccttatcgggttggagataagaaggcactccgtctgcttcagtctcgttccccatgtcagcttcaagagcatcaagctctgaattcacaaaccgatataacgtataaggagcagaatttaacaaacacagggaaattgtttctaccaaccccaaggacaagcagcataaagagcagagaaagaacttaccgcccaggaggtcatcttcgtcaatgtcatcaggaacattgtagctcaaaccacctgtctcttgaatttcagaactctcatccataaagtcaaacatatcatcttgcaaattctgtggtatacaaccaatggttcttgcc

SEQ ID NO: 32890 - DNA, 3892 bp, Arabidopsis thaliana landsberg
  unsure (1)..(3892): unsure at all n locations
ccattatttgttgaaccatttgctcaatactactgccactaactaaagttgaagcagcttgaccataggtgtcactttgtgccctgcaatggtgtggagatcatagagaatatagaacttgattactgaaaaacaaaannnnnnnnnnnnnnnnnnnnnncaagaataaaatttacgttggttgttcttgaacgggagtagaatttgaagccggcacagcaatagactgggttgtcgacggagctgcaagctggttgattgatagaaacttgtgttaaatgaaccaaggaaacaaaatgtggactgcacaattcccaaacaatgtaagaaaattaccgtggttgaagatatggtagatgtcgtggtagaagtaggctgtgagatagaaagaaagttcttcaacgaggaatactgaactgaccaagtgatgtgcacaaacatgagaaactaagaaataaacttacctgagtagaagagggaccagctgaacttgcagttttgctctatccattgcaaaaaaaaaaaaagcaaagatgttgtcagcacaagcacataggttcccttgtagcgtttcttaatttgttatttattcacttatcatctaagcttccactagaaatatgtattgcttataacaaaaacaaagttttatcaatatgagtttctgctattgcgatcattagtcatagaaaacacagccactatatctaatgggactaagaaggatatataaatccaggttgcttagagtgactcacactaagcactatctaggatcataaaagaaaccagataggtaccttgctaagcatgacgacaagaaaaccctcctcggtaaccttgttctccaccaaggtagtttcatctttcaaaacctttccattgtgaatcagtaattgctgcccacaaggatagttgtctttgctttgtgaatcttcaatattcttcttcaccgccattatcttcaaagcaaagtagaaaaattccaggatataaccatgtaagaactcatagacaaatacactcactcaacccatccatttcatcggaaaaaaaaaaactcaaaattctaaatctagcatttctagaaagctgttcaacaagtcacatgtttcataacccagattggtatagcagcatctctcatcttcagaagatatctaaatctactgatttcctaatacagtattacacgtaggtacggaccaaggaagcggaaaaggagaaggactaaccgtgtcggtgggaagaaccctaatctcaaaatggctacccttgagagtcttaacagtgagcttcatgtcgacgaatgagactagaagatataaccggcggcgtcggcaaagtccggcgagggagcgaaaaatagagagtgacctaaaagagctttttgattttcaatcactgtacaacaatgccgactttatcaaacagtcgctgtcaacaacatagcgttttaaaacgcggcaagagctccacgtgcatcgcacgtgacacacccttctttctaaaatttacccggataaaacattaatcaatccagtgcaatttttttaatttccggtttactaccttaccagtataataatcataacaatgatcggttcgtttaacatatgataatttaatcagaattcattcataccagccttgcgccaccgttttgaccaaacaaaacacaaacgcgaatcgggcaaaacgcaattgtggagaagtcgagacagatgaaaattacgagaaaggaatttatttatatcatcttcatattacagaagggccaacaaaggtcattcgtgattaagcacacgatgttctattatagtagaaagatcgaatatttttttacaaattgaagattcatgaaaagttattcagaatctcaagtagatgcattagctcagaactcacggtcggggaagagaatgggagcaacaagggaccagatgaagagaccagcagtggcccagctggtcacaacacggacccacactgaatgccacccgacatccaccagcttaccactttcaccaactgaagttgaccagccggttaggagcattgcagagtacatgctcgcaagggagaagatgatgtggaagaatgcgtatgagtatgaaactggttttttattctctttctcttccttctcttctgctttcccgtctatcggaagcagaggcttctctgaaaattttcattgaaaggaaatacgttatgatacttagaagcaactctcaaacactcacacaacaaggtttcaatatagggatttagaatatatgtttcaattcaggtttgattcgagtttccgaatgaatccttatcttgcaatataaggaggcaaagtataggagaaggttttttttgtcagaaacatacctgcgcgaggagaatcaggaggggagagaagagtagtggaagaaccagcacgaacagcagaataaacaaccgagagaacagttgtgagtaagccaatggtcattgtgcctgttgaaacagctttagagtgattgtggagaccattgcactcgtaatcccggggttcacttgcaagtccactgtaacagaggtacatgcagtacagagatataaccgatgctggtaaaatgcttccaccgacctgcaaaagaataggttaatttgacttcagtgagcctgaaattgggaatcaaataagatctcagataagagaaatataaggtttcagtcaaaacttacagtaggatgcaaaactacaatggcaaagacgaatacaaatatcaaagtcatgataatgaagaaggtgttgagtccacaatcatgtccagatggagtaaaccagtggaagagaaacccagagaagacgaatgttgccaagtaacatacaagagaaacaacgagcaaagcagcatacctatatataaaagtcaagtacttagattagtagtgggataatgaagtcacatgatttaattgcaaatatatttactaaccagaactgctcgtcgtagccaacccatgtgtcattccatccatgaacaaaatccaaaagaagtacaacttgaacaagcaggaaaaatccagcaccaaactttgacatcgactctgcaagatgtaaaattgattcccattagttccaagttaatcgattcactaatcactttgcaatgataaacagaaacttaccatagaaactgatgatttcatttggaaggaagaacataaagatgactaaaatgcaccaacagattattttcatcatccaaccaccatggtgtataccatcacgagggtctttctgatttttcacaccgatcatcataaccgatagaatagagaaaaacaagaaattccctaagctgacacgcaacacagcatcagtctcaaaccattcacgatcaggtgtcttgtgaaaatggttaatccctgcacacaatgtcaatgattagttgcatacgccaaaataatctcacgagaagtataataacaaaaaaacttacaagggagcttctccatgagaggagcagcaacttcacggagaatccatgaaacgattaaggaaagtgcaaagagaccacagtaagcaattctagcagaacgtctgctgatcccagaaaccacagtacggcaagcatcgcaggcacaagcagcacaacacgatgcgagacaagaagctgcaaacatcttctttctcctctcagattaaaggttggattcaatattcagctgctagtatcaaccaaaacgcaaacacaaatcatcaaaacacaaatcatcaaacaaacaaaaaaaactaatttcggatggagacggtaagaaaagcagctttttaaagaccgaataaaaaattaatcaattttgctcagagataaacagaattatttggaatcaattgaaattggttaaaataagc

SEQ ID NO: 32891 - DNA, 486 bp, Arabidopsis thaliana landsberg
cacacaccaactttatttttaaaaggattagggattaacccccggtatgggatctattagattatgtatacattatatgtttggtataatgtatatatggaataagtgataggtgtataagcgtaaccttattgtataacatgaatgtgtaaggttattgagtagagaaaatacaaacttaaatttaaacttctatatataacccatgaacatgtatatcttaatatatattaagaacttatatcttaaaccttgatcattaatatatccatgtaatgggtacaccatgatatctggatatattatatcaatccatgtgatatcgtgtgtatacacattattgacaaaagctgtatcaaataaaagtcaatatcttatgtactcataaccgccatatgtaataatcacggtttttttatgtgtatttacattatgtaaagacatatttgatcctaaacatgatacaacttcgtatttgtatgacct

SEQ ID NO: 32892 - DNA, 768 bp, Arabidopsis thaliana landsberg
agatggtcagaaccagcggaatggttgaattcaacaacacacagttcaacctgagtagaagcctccctttcttgaacatcactgtccctagtgatgaaatcagggtctggtcgagttggcagttctcgatcctggtagatggtgatggcgtgagcggttgcatactcttttggattctgtatggacttccctggaagtcctgtaacttttggtgcagaggtagatgctgattggccttccaagtatctgactttggtattcaatgcctccactttggcattcaggtcattgtagttgcagtccagcttatggtgcaattcagataatttcttagccattttcatggagctagatgcttgtccctatagcagctactgtagcatctgtttcatttcagcatcaggagcagcaggaccttggttttgctgaggtgcaaattcaggtggtggttgcggctagtagttcccctgaaattgctgcttggaaacaaaaccttattgtagggaacaaaaggtttgttctgaccttgttgttggtgtggaggatacacttggtcttgtggattagcaacgttggtgctgcggtaggagaggttgggattgttggttttgaagttgttgtatcctttgtagccaccctggttgttgttgatgtagctaacttcttctaactggttaccctccccatcttggacttgatactgttcgtcatcaacaagcaagtgcaccccgcttctgctaggctaagaagaatcatatccagcaaatc

SEQ ID NO: 32893 - DNA, 471 bp, Arabidopsis thaliana landsberg
atggcggatcgctggggtcgcaagcttccgctcatgatgtttctcgtttggttcgccgcgttcgacgccgggagctacgtggcgccgtcattcacgtgggtcctcatcttccggacactctttggcttcggcatgggcgccgaatggacggtcggcacctctctcgcaatggagagcttcccgccgagcaagcgcaagctcgcgtcgggcctgctccaagcgggttggccggtcggcttcctcatggcggctgcgctcggcatgttcgtcgtgcccgcgtggggctggcgcgcgatgttcctgattgcggcggtccccgcaatcctcgtgatcccgatccgcatgttcgtgcccgacaaccacgacacgtcgtcctcgccggcgaggaatgccacggacggcaaggcgatcgacgccatcgcggtcaatacgaagggcgcggcttccgagctgcttcagcctggcgtgttc

SEQ ID NO: 32894 - DNA, 1540 bp, Arabidopsis thaliana landsberg
  unsure (1)..(1540): unsure at all n locations
taaaataaaatcaaaatcataaaattttttttattttacgaaagaaaaatgaaaagcgtcaagaggttgcatagatttttttcttacaatattcaatgaaaataaatgctaatccgcaagtgcaaattagtttatggaaatacggctggaaaattttaaagataaaacataattaagttgacgttttattcttttcatttattatgtaacgagtttcaacatttttcaaatttgnnnnnnnnnnnnnnnnnnnattattttactataataagaagtacatataaggcttaaaaaaaaaaaagtacatataaggttaggtttttgtgactgatagcatctgcttatgtttgtaaaaaccttctttgtacttacaattcttctttatatannnnnnnnnnnnnnnnnnnnnnnnnnaatatacaggccgtagaaaattatgacaaatagaaaaaaaaagggaatgtgacacgtttaggtacttttagagaattttattccttttgaggcacttgtcagggatgaggcacttttccaactttttcattaaacttttgaccaatttgcccctgaaaattaaaaaattataattaaaaaaaaagtttcatctctccacgttccttttttttccttcttcttcgtcgcttcttcttttttttctctctctctctctctctctctctctctctctcattattacttttttttctttccttgcaaaatcaaacatttaagagtttatcaaaatcaaacatttgagagtttatggaaaacccaagttggcaaattccagtattaaatttcatatccatttgatcgctttgtttgatacaatttgattctttcttgataaattgatgtttcattgaacgtctaaccttaaaagcatattcttttgcttatgagattcacttagttccacatggtcacgtttaagtggacaagttatcatggagacaaactatccaagcttccaacacaaattatttatgtagaacccaataatcttagatgtctccaaaactaaagcacaatctgtagacattgctttcaaatagcaacacacaaaacccaagtagttaatgatagtttagtccatgataaattgtccacttagacttgaccatgtggagtaatggtgaaacatgacatagaaacatgaaaaacactggaacacaaatgtttcatgtgtagagctttcatcaaaacaaattgaatgaaaaagagtgtcattggtgacacaagaatcacaacttggtcaaaacaaatcatgttatttttttgcttattcaacacattatttcacttgtatatagacactccaatcattataatatatattcatttagtcaagtataaaaaacaaataagaaagctgatacaagcatggacaacaaagaagaaagccgatacaagcatgaaaagttcacttgaattgctattttattctggttgaaaacatcaccccatcatcaagaaccaggccaatcccctaaaacttctcaagtttcgcttgtctttatttttaaagagccaattgctt

SEQ ID NO: 32895 - DNA, 400 bp, Arabidopsis thaliana landsberg
aaatattggagaaggcctttgtggaaaggatgatttttatcattttttccaaatttgagaatttgagtaaagctgtggatgtagcagattcggtacatgcttatagtgagattactggtgagaaaatcaacttccaagcatacttaaacagaccttctacaggtggtggtgtctggttcattgagcctaattcaaagaaagttggtcttatttccggaaataaatcatcacctgaagaaagcgacttccaaagttgtctaactgcgtactttggtcctgaagttagccaaataagagatgcaggtgataggcgctgccatagtgttttggaagaccttctaagcttcttcgagtcagaaaaagcatgtccaaggttaaaggatcttgcaccatacgtgca

SEQ ID NO: 32896 - DNA, 733 bp, Arabidopsis thaliana landsberg
tgtttaattcagatgagagagagagagaaatacaaagaaaaataaatggagaacggcaaatgcaacggagccacgacggtgaagttaccggagatcaaattcaccaagcttttcatcaacggccagttcattgatgctgcttcaggttcttttcttgtttttacttcacttctttactccttaatttcacaatttcaaacgttgactttaacaccaaaaaaaagatccttaacgattttggttctagttctcgacataatttcctcaaatcctattctctaaacccatatatttatatcaatagccaagaacacatttggcaagtttttttttttttgtgtgtgaatagtcgatggatgagtattgagtggtccaaaaaatcaaaattaagaaacaaaaatttagcttggtatgaaaataaatgaatatccggagtacagaaacatgttccactataaaacacatgaatttgttggtctaccctgagatttttttcttctcaactacaaaattcataattttcttctaattttctttcctcttttaagaagcttgaatgataaagctaatgttttgtacttacctatacaagaaggactcatgatttgaacattgaaccaaatggtttgatttgacatatattgataacttagttttggtttatttgggctaaaaattaaagggaagacgtttgatacgattgactctaggaactgtgaagtgatctcaacaa

SEQ ID NO: 32897 - DNA, 770 bp, Arabidopsis thaliana landsberg
tatgcgtctcataatatatcgtatgcatcgaatgtgggtgttaagtgatccgcacgtagtaagagaataaaacccagcggtgctggatagtattcgcgcccgtcagggagacatccattggtcataatgagtcacctcgcgaggtagaatatcatgggacttgggatccggtacgcaaagggcaggttcaaacgtcgtcttcggtatcgcgcacagggtgccgttcgagtttaggttctgtggtcctgcgattccatgtatcgtgaatcgttttgaaagcatcgatggacgcaaaaggaggatccaactagctttgcgtatgggggaaacaacgatgagtagaagaaccattgttaagagattgattgtgcttataagttccattaaaagaaggaacacaagtagctcttttttttttctttttttttggtagcaagaacacaagtagttgacttatattttccgatctggataagcaaatctggttatagataaaaacaaatgtatcttagtaatgtacacgaccaagttctggatcgaaagggaacaacataacatttactattgaacaatgatgcgatcggggatacctaaaacataattaaagttgttaagaaaattgaacaacatatattaaagagctcactaaagggtaagatattttttgatgacagatagagagattacctttagtaagaagttcaattagattgataaaaaataatgttcaatttgataaggcggtaaaaaaaactgaaaataacagcttt

SEQ ID NO: 32898 - DNA, 798 bp, Arabidopsis thaliana landsberg
gcttagctttggtctgtgaaactcttctagaaccggaggtgcctgcatgtagagagtgttttccccctgtttaacacttgcttttgacaatagaagcttcgggtgatcttcaagcatctcaatgaactaggagaaagaaaaacaaaacatgaaaaaatggtaaagaattgagacgcagaatatacatggacaaacaaagcacgagtaaattgagatttagctaaaaccaagcctggaaaagcgaggagactaaagaaaataacagccaagtgtcgatacagggataaaagtaaatgtatcaatggagatagtagtagagaagataatttagtatgaatgaagcaatacgtcagcatgaacatcaagataatcgtggtataaaaaaagacaatgagatgataatgcgagaggaaggacctttgataaagtgactgaggtgtccagctcaatcagaatgcccggaccacatacaagacattcggtgtccctctcgaactttgtcacttcagtgtaaagaccctctccaccgttataccttgcgaaaatgaaaaccaaccaaattgcaacattgaattatttgtaaattcatatatttaacttttagtagtctagctgtactccgaacactagcaagtaaggtagacagaaagaaataaaccattcgtcaaataatttacaagcgttttgctgcatgcagacacaatcttcatggttacaagtgcacaagctgcagatataatcgcattggtggaagcaatcgcccgtattatgtttttaaccacaccctattcaataaaa

SEQ ID NO: 32899 - DNA, 2886 bp, Arabidopsis thaliana landsberg
  unsure (1)..(2886): unsure at all n locations
cctttgagatatgctcgtctgatagtatagggcattcgagtgttatgaaaaattcgccttttcgtcttctgatttggttttcatttccttcagctaaatcttcgtaatacttggatcctgaatgattaatcatagctagaatccgtttggctttgttatttgggtcagagattctgagaggacgctttaaagagtcaagcttttcattcctctgaatccgtccttgtattggacgtcttgatctctgtatgctctcctggagctatcgaatcgagtttctcattgactgatgctcttggttccgaagctgtatatatgcagaggagcagtggcatcnnnnnnnnnnnnnnnnnnnnnnnnnnnnnntctttctcttcgaatggcattaacctgcctggatcaatggttcttgatggatctccttcaatgcaacacttacctcagcagcagcagcggcaactactagaacagcaagcaggacaaggttcagttccaatgagggaaaacagttattcccatgtagataagaaaccgagattagaagtgaagcaagaagacttgttgcagcagcagattttacagcagttgatccagcgccaggaccccacgggaagaaatccgcagatgcaagctttgcttcagcagcagagagtgaggcaacatcagcagatgcttcaatccatgtcaccctctcagagactccaacttcagaaacagcagaagctgagacagcagttacagcaacaaggaacccaacagatttctcctaatgtacgtccttatgaagttggcgtctgtgctcggaaattgatgatgtacttgtatcatctgcagcaacggcctgctgtaagctaatactaacctatggacttctagttatttcatcacatctattcaagttctcccatcactgataccttttctgtaggaaaattgcattacttattggaggaaatttgtggcagaatacttctcacctcgtgcaaaggagaggttgtgcttgtcacagtacgaaagtgttgggcaccatgcccttggcatgtttccacaggcagctccggtcagtatcgtctttgctctgtgtgttttggtctgttatgatatctgtgttgtgcatcagcatatctttagctatacacatctttactccacctgtactatttatgaatttcacttcactgattttttaatgaataagttcatcatcttctcattctgtttataggatatgtggcagtgtgatctttgcggcactaagtctggaaagggatttggtaagatagttgcaaatttcttgtttttacttgtatttctgtgcctttacttgagcacaatgaagcagcttacacatgctaattgctctctctttattgtttaaaactttgataatcgtattaaaaagtcttccgtcaaaatagtagctaaagtgtcatcttttcgttccgcagaggctacttttgatgtgctagccagacttattgaaataaaatttgcaagtggcatcattgatgagctcttatatcttgaccacccacgagaaaacagatttcccaatggactgatgatgctagaatatagaaaagcagttcaggaaactgtacacgagcagtttcgtgttgttcgtgagggccatcttcgtatcatattctctccagatctgaaggtatctagaaaaattccctggttaaaaatgtgtgactttcttccaattttcttttgccctgcctatttaccgaaaatatctagcaatcaccagtgtgctaatgcttacctaatcttgactgtgtttctttctagatactgtcttgggagttttgtgctcggcgtcatgaagagcttcttcttcgcaggcttattgctccgcaggtcctattctaattgcgtagcccttgcgttaactattaggagcataagattttacaaaaaccgtttgtggtcaactgtataaatctgtttccttaaacccttatgaaatgaggatatctcagaatttatgaaaccgtttgtgactatttccctaaacagtctgtatgaattagagcaaatagtttgtaaatctacttcagaacagacatatgctgcaatggttttgggaagtgtattgaaaacttattattggttatgcaggtgaaccagttgcttcaggttgctcagaaatgccagagcacgatttctgagagtggttcacagggagtttctcagcaggatatacagtcaaacagtaacatgtaagttaatccctaacactaaatttacctttgtacatccaatttggtggatgccgactattcttttatttgtatatgttctggcttttgtctctagtgctctatatcatttccggtgctaatttatgtgtcagggtcttgggagcagggnnnnnnnnnnnnnnnnnnnnnnnnnnnnnnnnnnnnnatgatcttggctatccaaaaagatatatcagaactctacaggtactcattagctcctttccttgttgttacttttgtatctgtagcctttggaaatcatgatagagtaactcgttgcgagtgacagatatctgaagtagtcaagagcatgaaggatctgatgaatttcactggcgagcacaaagtcggccctcttggtaagtctagaattcccatctacaacattcttcttgaatgagacccaaaacgaggttgcccctctggtgtaggatttctgtaactctccgatttaaaggctttgtatttgatatgattaaccttttgaagcctacttatgtcccttatgcaaaggggttaaaacagcttctggaacagacggcgacagtgaagcttcagagacagaaaatgcaagagatggagcagaatgtgacatatgtatatacaaatgggccacatcaagctcaactggagc

SEQ ID NO: 32900 - DNA, 660 bp, Arabidopsis thaliana landsberg
atcaacaaatttaaaatagtcatgaatttctttttgtccggaaatttattttttgatagtcattgatgtctgaaatctattacccaacggtacattaatttctataaaaccatacagggctactttggtttaacaatatatacttcctaagtttcaatgttagtgatgattaaatagattaagaaaccattggtgtttttttttctaaaacaaaattaaaacataatgttttttttaattaaaacctatttaaacaacaaagtgcagaacataaatgattaaaaacaaataaaataattaattttgcactgaaaattgaaaacatcaagtaatatgtaacaaacaaatattattatgtagcaaacatcataagcattccatgtattttgataacgctcctccacatagttatttcaagttttgcttgtaacttctttgtaaaagatgttatgaaaaagagattactctatattgtagaacaaatattactttagattcttcattttttttagtttttagatatcccaaaaatacttttaatggcaagattagcaaattctcaagaataaaaataaaattatttttgacgtatcaaagataatttcactcaattcactacacaaaaagatgatggttttagagaagaaagcaaacaaaagt

SEQ ID NO: 32901 - DNA, 1349 bp, Arabidopsis thaliana landsberg
gaacgaattttatctatctggttttgtcaaagagaaagaacaatcggaaatggtggatttttttcgacccagagatcgagagagatctttctagggttatctctagtgttttgcaatgtaaccacgcgcttactctctatatacaagtttaattaactaatcacgcgcacattaaacgcgtgacttgcaccttctatcaactatactataaggagatgttttttcttttctttttaattaagaaaaaagatttactattcagatttctttctctttttttttttatgaaaaagatatcagtgcaactaaagagatttacaattcagatttctttctgaaaatatattcgtgtgacagtaaagactaaaagagtttaacaattcagatttatgagtacattctgagttggacaatccaactggttatatggacactagatgatgtagagggagagagggcccaacttgatataatctttataatgaaaccaaaacaaaattgcaaaaatttcatgaatttggctgagactcttttggaaatgatgatgaaagcgtctggtaacaaccaacagtgacctccaatctctgatcatggatctctctccagggaaaacctcaaatcataagtctccttatttggttggtttctgtagtcaagatcggctttcgactcaataaatcacagaattttataagcatttgcatttcctatacacaagcagtgtgaacttaccactatggactaaaatggaggttcgagtggttcatcccagacatctgcactcccatttgagacttcatctacatcttcctccattgacaatctcgcatactctctctgagcaaatcgatcccactctgtcaaatttggatcttcccgttcctacagcaatgaaagagaattatacttgttctaattgcctcaatccgaactactacaaactgcctttagcagttaaaagaagtcatattctttgttatttttttccctcttgagtgctataaaaactccactggtaagccaaacttacctggcgaatgagaaatgggtcacgtgtttcaaatgccatgaacttattaaggttgaagagtatattgaaaacgtttgctgaaagtttcgatcctttcagatcctggagggtgatacagttctccttctgcaaggacatccaccatatagatgattccagtcaaataaatgataaataacaaaaaagctcggaaaaatcaaacaaccatgttctggtttgtaaagtaactaacctcgggtccaatcatgtcaattatttgacataggatatcactgaaaagaacagcttcctgggttatgcattccatgcgatgcagctg

SEQ ID NO: 32902 - DNA, 1194 bp, Arabidopsis thaliana landsberg
aatgtttggttggcccagatcagaccaaggggtcgttcctagtaatatagctgactattttatttgcaaagtcttgaataccttatcaccatcaactcataaatagaagatgttcgatgtattattcattccaaagtcgaacaatatacaaaagggaccgatgcatgtgttaatcttaatcataccttctttttgtttatacccaagaaaaaaaaagcataatatgtgaacacataacatagaagtcatgctttccctctatttttggctaacacagaaagaaattcatatctcttttttaggtctagaagaaagaaaaaacaaaaacacgaacacaaacgtagatagagaattctactgatattatccaaaatatagccaattcgatccaaacttcttgtttgcttgtgatcacgtgattcacaaaagataaattggccttgtttaacactatatgttagtcaaaggaattgcagcttatcaactactgttgtcttctagtttactaggaggcccttgttcaattttcctaattttctaagttaatttccactagagaaataggaatatgaatacgagttataaagttaataaaaccaaaactttcttgaattaatagttcagcaatttgatgtatttatatattcagcaaaacacataggaagatctagctagaaattctggagcttagtctagatacaaagactatgcagagacctttaccaacgactgatttgatataaagagaactttgggccaaaggttgatctagttcttagtcaatataaggttaggcccaaaccccaaaagccttgacccaatatattaactttctttttcattcttacacacaacaatcaatagcaacaataaatgaaattctcatcgttgacacacaaaaaaagaaaatctcaaccacaaaaatgtcaagcttggttcaaaaaacatcaatgcactttttgccctactcaatctctctctgattaaatgcattcatcacctaacatctctctctcttgttgggttggctttaatatatgtctttcaaaaaagctcatattcttcaatacacacacttaactttgcctaactatgagttaccatctctaacattgtctaactaagaatggagttatcattgttaaagctcatattcttcaatacacacttaaaaaaactcatattcttctatac

SEQ ID NO: 32903 - DNA, 915 bp, Arabidopsis thaliana landsberg
aatactactagggtaaggacatcattaacctagacggtattattataactatcaattagtataaaactggaataaaattctttggaaaatggcaatatttgttgttgaagctaagaacgaagggcataaacgtaatagcaaaaaccactgcaaagaaaatcttcgaaacggttccataaaacatgggtcccatccgcacttggacgttaaagaaagtcattggatcgtggggtccacgagcgcgtgagattgcgcgttacgtaatatctacacagaccaccaccacttgtgtcttttctttattggcaaggacaacactttaaattattaatagaacatatacgacgtcgttttctcccttttttaggttctttatttcttgtgatgaatgacgtttttgcaaagactttggaaaaaagctctgtgacgactccgcactcaacattttcaaaaatcaaaattacttttaggctttttagcttgtcaatcaaaagcttaatttgattttaacatgtaaattcgccattttttcctcacacttttaacttgtaaataggaagaatatcaggtttaaaaaacaatgttttgcaatttccatgcaaaagtctcatgacatttcgttatttacttctattagtgagtgctatttcaaatggaaaaaacgaaaagatacaagtatacaactatgtcatcaaaaaaaatttatatgtgtaagaaatgtaaaacatctgacatcatggaaattgatggagtgattttatgttatgtgagaacagggtttgggtttgataatactccatggttaacaataccagtaacaacgactaaacatacattaattgttgttggacttccttggaaacaataataacaaaggagcctccttgaagtgtgaaacacgcgcctaaaggatgc

SEQ ID NO: 32904 - DNA, 5035 bp, Arabidopsis thaliana landsberg
atggaacgcacgcggaagtccaactggaagatggagaaacgtttcccgaatttgaagatcagttcgtgaatcaacacgagcaaggaaatttcaaccagttcaaaaccatgagggaagtaagccgggaattgaaaaaaatgaggtcaaaattccatcaagccacaagctcggaaccaggtatcaaccgagtcatcgaagaagctagccgaacaccttttatcccgcaaaattgctagcttgagaatcagagattctcgaaagcttaacttggaaccgtacaacggcttggaagatccgaaaggctatctcgcagcttttctaattaccgctggacgagttggtctgaatgaagctgatgaagatgcatgatattacaagcttttctatgagaatctttgcgggaagccctgatgtggttcacccagttggaaccaggatcaatcatcaacttcaatgagttatcagcagtatttttcaaacaatactccattcttatgaataaaagcattttggataccgatctctggaatttatctcaagggccgaacgaaacacttcgggctttcattaccaagttcaagaatgtactttcgaagctcccaaggatctcacaacaatcggctttatcagccttgcgaaaaggattatggcatgattcaagattcaaagaagatttgatactccacaaacctgatactatccaagatgcattattccgagcaaacaattggaaggaagtcgaagatgaaaaagaaagttttggaaaaaccggcagtcactttcccacctaagaagttcgaacctcgggagaatcaaggtccaaggaaatttggctcacaaccgttcaacaataatgtcgggaagcaatttcagggaaaaggaaaatcaaacacttgggtccgagatgaaagtttgtattgcgatatacatagagtcaccgggcatctaaccaaggattgcagcgtcctaaaatggcatctcgcagaactacgggcaagcggagatctttcaaaattcaacatagaggacttcgtcaaacaataccacgagtcaagggataattccgaagctcaaaattcgaagagaccaagactgactaacgtagaggaaccgagaggttcaaaaggaaaaatcaatgtgtttcttggaggttccaaactttgccgtgattccgttagtgcaatcaaaaagcatagacggaatgttcttctaaaatcaagtttaagtgaagaggtacattttaaaggcgcttcaatatcattcgacgaaaaggaaacgcagcacctcgaaagacctcacgatgatgcactagtcattacgttggatgtagctaacttcgaagtttcaagaattctcgtcgatactgatagttcggtcgatctaatttttctaggcactttggaaagaatggggataagcagggcagacgtagtgggacctccttcccctttagtagctttcacaagcgagtcaacaatgtccctcggaacaatcaaattactagtcttggcgggaaaaatgtcgaagatcgtggattttgtcgtctttgataaactagcagcttataacatcatcatcggaagtccctggatctaccagatgaaagcggtcccctctacgtatcatcagtgcctcaaattcccaaccccaaacggagtggaaacaattcggggagaccaataagcttcaagaacatcttacttagctagccaccgattgaagatctaatagcaattaacaaagcccgcaaagaaagggatagttccaagattttctagcgggtagaaggtggatgatgttgtgatcaaagtgattctagaagaagataaaccagatcggaaagttcgaattggagctactttgtccagctaaagaaaagaagctttaatcgagctgttaaggaggaacaaggaatcatttgcttggtcagcagcagatatgcctggcatagacccaagtataatctatcacgagttgaatgtggatccaagcttcaaacctgtaaaacagaaaagaaggaaactcggagtgaacgagcaaaagcggtaaacgacgaagtggataaactcttaaaaataggatctataagggaggtgcagtacccggattgggtggcaaataccgttgtggttaaaagaagaatggaaaggatagggtgtgcatcgatttcacaaatctcaacaaagcttatccaaaagacagtttcccactcccacatatagatcgtcttgtggaatcaactgccggaaacgaattgttaactttcatggatgcttttttgggatataatcagatcatgatgaatccagaagatcaagagaaaacgtcattcattacggataggggcatctattgttataaggtaatgcctttcggcttaaagaacgcaggagcgacctatcaacggctggttaagaaaatgttcagcgagcaccttgggatgacaatggaagtctatattgatgatatgctagtcaaatcattgaaaaaggaagatcatgttaagcatttagaggaatgtttcacgatccttaaccagtatcaaatgaagttaaacccggcgaagtgtacgtttggagtcctatccgaggaattccttggttatatcgttacaaagcgaggaattgaggcaaatccaaaccaaattaatgcctttctcaacatgccatctccaagaaatttcaaggaagtacagcggttaaccagtcggattgcggcattgaatcattttatttcaagatcgaccgataaatcattgccttttattcaaattttaaaagggaacaaggagttcctttgggatgtgaagtgcgaggaagcattcggacagcttaaagcatatctgaccactctacctatattgtctaaatcggaagcggatgagaagctttatctatacgtctcggtctcaggtcatgcagttagcggagtcttgatccgagaagaccgaggagagcaaaaaccaatttactacataagcaaatccatgacagatcccgagaccaggtatacgatgatggaaaagcttgcacttgcagtagtaacctcagctcggaagcttcgcccgtattttcagtctcacccaatcgaagtcttatcaaatcaaccgcttcgaacaattcttcatagtccgaaccaatctgggaggttggtgaagttggcggtggaattaagtgagtatgatatagagtacaagagccgagtcgccatgaaggctcaagttcaggccgattttttaacagaattgccggtacttggcgggcgggagcaaccagaaaatcagacttggaagttacacgtcgatggttcttcatcaaaaaatgggtccagggtggggatcaaattgtagtctcccacctcggaaatccttgagcaatcattccggttattgttcactgcatctaacaatgaagcagaatatgaagcattaattgccggactcaggttggcacagggagttggagccgatgaagtgatcgcctactctgattcacaattggttgttaaccaattcaatggagactatgaagccaaagattcaagaatggaggcatatcttgaggtggtgagagatttggctacaaaattttaagaagttcgaactcattcgcataccacgaggagaaaacacaaccgcggtcgcactcgcagctttggcgtcaacgtcagaccccgaagtcaaagaatcatttcggtagaatgtattttagatagaagcattaaggaagaaaaatagacactcgtcaatacaaggtctcgagttacagcccgggatcgcggtgaacctgtgattgaattaccacctgtcaaaagacgaaaatcaaaaggggcagccgtacctaagccaaccgtgcaagaagataatagggtcgaggaagttgtcgaacgaatagaagatatagctccggaaaacactgttgaagccgagaccgaaccatgggttgacgaagacatcctcaaaccaaatgaacatcctgaaccagaagctcgaatatttcatgaaatcgaccaaattccggctaaagattggggagctgattggagggagccaataaaacattacattgttactggagagctcccaaaggatagatggcaggctatcgaaagattctttgcatagaagaggtgtaaacgctccctatttactttgcatttttgggcccaaagtcgagatcgttatgatccaagtgcacgaaggtttgtgtagcagtcattctttaggaagggctatggcttccaagatgaagaggatggaatagtactgtcatactatgatcgcggcctgcgttcagtatgcccatgcatgcaaacggtgccaactccatgtgcctatcatccatcgaccttaggagatattgtattagatctcttccgccatagccgttcatgcggtggtctgatggatattattggaccattgcacaggttaacccgaggtgtacaatatctcttggtcctaactgattacttttcgaagtggattgaagccgaagcatatgtaaacatcaaggattttacagtaaaaaccttcatttggaagaatatcatatgtaggcacggcgtccgatacgagataattacggacaacggaccacaattcatttcacacgagtttgaagctttttgcttggattgggggatcaaagttagtttattccactctataatatccacaagggaacgcttaagctgaagccgcgaacaagacaattctaagcaatcttaagaaacgtctaagtcattaaaaaggaggttggtatgatgaacttcaaccggttttatgggcatatcgcacaactcttaggcgctcgaccggagaacccccgttctcattggtatacggaatggaggcggttgttccagccgagctcaatgtgccaggacttcgtcgaatagaagcttctttaaacgaagaagagaattctgcgatgctagacgattcgctagataccatcaacgagaggcaagatcaggccctgatctgaattcaaattatcaacaagcggcagctcgatttacaattaaaaataaa

SEQ ID NO: 32905 - DNA, 645 bp, Arabidopsis thaliana landsberg
  unsure (1)..(645): unsure at all n locations
cccgcgtaatatggaactccgatcaccgttgttccctctttcgccatctcctttgtttttagtttttacggtcaaactcaacgatttcgaagataaagcaaatcaatcacaacgagagaaacagacgaagctgattcgaagagtatttatttaattccctttccgctatgaaaattcccagggaaattacgcggaagacgatggagattcaaggaaagttccaaatctctgacgattacgcgtgtgtacttaatttgagattaatcgcaattttgatttcaacgattctttgattctttctttcctctagaagatagagactccacacttaatgggccttttgtttataaacttaaatacttaatacagatattgggctcaaaaggcctaataattgtcttagacctgttcgttctagctttcgtctaaattgcaaggttcgtttttaaaagtgaagtttgagtttgacggtaacaaacaagcgatggactacaaaagaagaacgtgttggactacaaaagaagaacgtgttgtttaggcctctttgccgacatagcagagagtccatgtcacaatcaccttanttattatcttcttcattactgcaattacaagaagattcagcaaaatgtaatcattgaatga

SEQ ID NO: 32906 - DNA, 1823 bp, Arabidopsis thaliana landsberg
ctagaccttaataactcggacaaagttggtactcttgttggtgtaattcgatttcttcttctcacatctcaaatctccgatcaaaatccgaaaaaaaaataataaatggtgagagatattgtagacgatccgcttgacgaagatgatatcgctctcgtcaagacttatgtaagtgtacccttttagaaccctaaattttgctgtattttgtttctttgcgaaccagtttgatgttttctcatgagtaatttcgagctaattgctattttatgatcctatttagatcatttttgtgcttatatgactaactagcttcgggtgactctgcctcactgtttgaataagtcggccaagtgaaaaaaacgttcatagttatacttggtttgatatgttgcgtctccatatgtttttttgctgaccttgttaaaatctcaatccttcgcaggggttagtgccttactctgcacctatcaagaaagtggagaaagaaattaaggaactcaccgagaagatcaacgatctatgtggtttgtgcacactcaaatagtggtgttactttcattagtgacttctatttaccgaatgattaaattgcatatacgggtaacttgcaggtatcaaggagtctgatactggtttagctcctctcagtaagcaaatgatgcaagaggggcaacctctccaggtgggttatgtttcctgttttagatatatcccgatcgatctcctcatggatatcttttcgagagttcctgcaaagtctatagctaggtttcgttgcgtatccaaactctgggaatccatactttgtcgtcctgatttcaaggagttgttcatgactatgtcttcgattcgtccaccgttgcttcttttcaccttccaagatgatgatggcaatttgttcttcttctcttcacctcaccctcagattccatgtaacgagaatacgtctcttgtacccacccgttatcatgttcaacataccacagattctttttctgaaattggttctcctctttgtggattcatctgtcgccgaggtaagagaaatctagatactatggtaatttgtaacccagtcacgggagagtccgtatccttacccaaagtggaactgaagagtattaatactgagacaagaccttatttaggatatgatccggtccgcaaacagctaaaggtattgtgcatcaagtctgatgatatcccaaatacgtgtgatgagcatcaagttttgacattggagaatggaaaccatttatggagaacaatccaatgcaaaccccattatcctaaatctgatggaatatgcatagatggtattttgtattatacagctgggttcgatatgcgtgcaagggtttctatggtagtgtgctttgatgtgaggtctgaaaagtttagctttatcaacatacatgtattcatgttgatgaatgactcttgtactctaatcaactacaagggtaaactaggtgcacttcagtttacatgtttgtctccaaaacgtcttaggttctgggttctagtaaatgctgagaaaaatatatggaccaaatgtatctatgcattgcctcctttgtggaacaacttagttcagcatacggagttagccattgttggaatgactgatggaggtgaagttgtgttgtcacagtactgtctaatatacgcattttacatttattacttcaaccttgagagcaagagtctcacaagagttcaaatacaagatgttgaaatgttcaaacgtacgagagtttacacctctctaggctatgttggagattttaaacttatgtaagtgttcaactattggttta

SEQ ID NO: 32907 - DNA, 906 bp, Arabidopsis thaliana landsberg
atcttatcttagttgatcgcaaaataagcacaaaatcttatttttataaagagatagacagacaaagcgccggaggaaagacaataatatcagtttatcccctctcatttattacataaattctatttatctggccggctttttttttttttttatgtattttttttatattcacattctctattcttttgctcttaggatgttcatttatattatataaaaatcggaaattatatggtgtatccttggcggatttttttcctttttccatatttcatatttgacttacttaatcaattccaacgtgttctattattagaagatttattttagaaaaaatgttgaattactttgatctaataagtccaactagctattactattaattattaatggccatttttgtataaattttttggaaaaagatgtattacaggctaatctcaatatccaaagttttaaatttaggattaaaaaaaataacagctttctctgtgatttctttttaacattatgacatatatcttaaataagttactatatattaatgccaccacaaatagtatagctgtaactaataactctttctatatagactagttaataggtttaatgcatttgtgattatccaattgtcttatgctaaatcattacaatttccttatatttttctatttatataaggatggatatctatacaaaaactgcaaaaagaaaaattaagtatttatgtacaagtgttaaccctccaccagaaattaacaattggcatgaatattattagccacaagattaattacactattcaacattttaaaatatcttaatagccctttacgcgttccatacagaaagcttgactagattttaacagttattaacacaaataagtaaatatgacatctg

SEQ ID NO: 32908 - DNA, 777 bp, Arabidopsis thaliana landsberg
  unsure (1)..(777): unsure at all n locations
ctatatatacatatattttaatattattccgcctgaaatgtatccaaatttgctttttttccgacgttttcattcggactctaacttgattagctaggtcatgtttttgagtcaaatttcttannnnnnnnnnnnnnnnnnnnnnnnnnnnnnnnnnnncatccatctttataattatatatgggttatatatcactaatgcacatatctccccttcatgtgtttcatagcgataaatagaccctcgtgtctaaaattgacatttcccacaatcattagtcaacctgcagttcgtgtgatctaaattgacctgtcgggtccttgatattgtgtaacctagtgtatctacgtgagacactctgatttttacatatttttcatgtgatattagtagatctatttagtttgaagaagtcctatgtacccaactgaaataatgtaaattattttgtataagatttattataaacttttatttgctaaaactctacagaagtctttaaaatatatatgaatgacctaaaacatgtaccatacaaccacttctcattctcacacaacttatcatcacctactacaaaaatctcaaggctctagaagtaaccctattgaaacaaactaaatagtcagaatttaattaataggatagaccccctatccctatataaaaacaagcatacatggcatcaaaaaacgttcactatatcgccaaccaccaacaaaaacaaggaaaaggatatccattctccctgcgacttatattattaatcatgaatg

SEQ ID NO: 32909 - DNA, 939 bp, Arabidopsis thaliana landsberg
cgattaattgcatgtggtgtatatttatgaacagtatttaatatgtggagtatagttagctttatatcactaaacacatgggctttaattgtttaaaaagctacttaaactttgatgttaatttgcagagctgcaagaatgatttgaacagtttgtggatccatgagaacaaagatgagattgaatatttcaggcttagtgatctttgggactgttttgatgagccaagcgcgtatggacttggatcaaaggtcgacttaaacaatggtgaatccgatatgcagtactatgtcccgtatctatccgccattcaaatctatactaacaaatctacagccatttctaggtttgatctattacatataaagagtgttgttctatatatgtgacagtgtcaaggaacttgaggagtgaatcattggtttttgcaggattcatagtgatgtggttgattgtgagagtgaatgttggagtgatgatagtgagattgagaagttgtcaaggtcaatgagcagtggttctagcaaaatatgggattctgtttctgatgattcggttttcgatccggatggttcaccgttgctgaaagatagacttggtaaccttgactttaagtacattgaaagagatcctccgcacaagcggattcccttaaccgacaaggttctcttctctcctttcattttcatttcttagtaacctcattctcagttttgaaacgaaagtaacgttcttggttcttgttcagataaacgtattggtggagaaatatccgggactcatgaccttaaggagtgtcgacatgtctcctgcaagttggatggctgttgcgtggtaagtagttctttgttaagttaacaaaacccttccagattggataactgctagaaatagtgattgagtgatggtttgatgaatcaggtacccgatatatcacac

SEQ ID NO: 32910 - DNA, 1965 bp, Arabidopsis thaliana landsberg
caagcatcgatatgctagactcccttctgatctcacacagcaaaacgaagcagaattaacaatgaatgatctcaaacacttgcttctcgtaagtctttcacacacaccaatggtaagattaagatattgtttggatgcaaatatcatcagtttacctatttttgtgacaggatgtgtttgttgcgggcacagacacaaactctagtacaatggaatgggcaatgacggagttattccgtagcacggagaagatggtcaaagcacagagtgagatacggcaagtgattggtcaaaacggtttcgttcaagaatctgatatcccgagtctgccttacttacaagcaattgtgaaagagactcttcgtttgcatcctgcagctcctttgatccctagaaaatcagaatccgatgttcagattatgggtttccttgttcctaaaaacacccaggtttttctcatacttatctttattacaccaacattcattacttgagatattacaccaataaaaaagtttggtttggttaaaatcttccacctctgtttctcgagattaggttgttgtgaacgtatgggcgataggacgagacgcgagcgtgtgggaaaatccaatgaagttcgagccagagaggttcttgttacgagaaaccgatgtaaaaggcagagatttcgagttgataccgtttggatcaggaagaaggatgtgtccgggaatgtcgatggctcttaagacaatgcatatggtgcttgcctctcttctctattcctttgactggaagcttcaaaacggtgtcgtccccggaaacattgacatgagcgagactttcggtcttaccttacacaaggccaaatctctttgtgccgtacccgtcaagaaacctacaatatcgtcttcttattaataatcgtatcaatataaagttcgtgtacggatcaatattaataattgaagagaatgaaattataaaagatactgctttttatgtttcaagtaaaaatgttaatattagaaagtcaagaaagaggaaacacaatgcaatttgataaggtgttttatcgtctccgggattgaattgcgtaggtcaaaaacagacagttgccatttgatatcgacatataatcactcattcacggatacgtatctcttgtgaatggtcgtcggtcaattacaactttactgctcggcttaaactgacaagtggcgcctcctggtttcattcagaccctaccggtaggatgtaatttggaccataagtaagaaacatttgtgaaatatttactacacgaatatctttacgtatttaagttggcttttgaagctttgataattcactcatttgaaagaaaatatcacttgagaaaaaattatggatatcatctttgaacaagctttgttccctctattttgctttgtcttatcatttttcataatcttcttcactacaacaagaccccggagctctcgcaaggtcgttccatctccgccgggacctccgcgactgcccatcatcggaaacattcaccttgtcggtagaaacccacaccattcattcgctgacctctcaaaaacatatggaccaatcatgagccttaaatttggaagtttaaacacagtggtcgtaacttcacctgaggctgcaagagaggttctaagaacatacgaccaaatcctctctagccgtacctccactaactcgatacggtccattaatcacgacaaggtttccgttgtctggcttccaccatcgtcgtctcgttggaggtataattaacatcggtttttagttttatatggtttcagttttcttaagtgttctgattggtaatccgaaggattattttatatattaaggaaacggtgtcaacatgattctgtgatttaagcctaataattctgaggaatttcaataagtaagtgtaggatcttgcgatttagtaaatttcatgaccaaaagaagaaaaat

SEQ ID NO: 32911 - DNA, 3162 bp, Arabidopsis thaliana landsberg
ggattgcttgtatagttgggtgctccgatagcggtataggtgaaaccctagagaccgcggtctaactgtgtaattctagattattcatggtactacctttttgtttacaggaaaccttagcggggaatctgtaaaacggcgcgatgatcattaggccaaccagcttagattttacacctcttgcaaatatctataatgtttattatatatgatttcctcggaaaataaataaggatccgccctatatacgagttttggtaacgttttattcgtatatatataatgtaaagactcaaagctttaatgaaatagatggttgaaccaatgatattattagtctagtccaagactaacacaactcgtgttctcggaacgggttgaaaagccttaggccatgaaaacgaggaaaagattctcatggttggtcgactatgtgaatggtcgtgttccgggcacttggttgactagctacgtgggtctaacgtgacgcttctggatttgtccatagttttaggatggttcgggggtgttacaagcgtggtatcagagcatggtttatttatgctcacagtgaaatcatgttttaatcgttttatcgagtaaatgtgtcgcaaaagctgttaggaaactggtatgatcattttacttgtctttagatagttaggactttggacttacattttattttgttgcttgtgatacaggtcgtgatacgtgcgcgtggtcgaggccgtggtagaggtcgtggtcgtggacctcgtggtgggcggatagccgattcgactgtgggtagatccgagtatcgtcctattgtgcaggcgagtgtctcggagatgtccctggtggatagggaggcaagtccgagctttccggtgtctaatcttgagtcattcccgatcccatcacagaggatggggagtttggatgatgttgagtctgagacaggtgtggagggcgtgaggatgatggagtcacctgtggttgagattgaggagcaagaggtggagctaatccaagcgcttgttcccaatttcttcatggatgactatgttttgatcgagtcagagttggaagcggggaggattatgttgttcttcccaacagtccagtctcgacgctcgttggtgcagaaacggcgtttgatctcgcgtcatcgtctgatgacgatggggatcagattgtccctagtacgccagtgatgaccccgattgttccatcattcgcgtacccgacattaccggattcgccacttacctcgttatggcgagactacgatcgtatccgacatggggacactattgagaccgaggtgggagttcctttgactttggcaccggcactctgggagccctattgttatacgtgtgggtagttagggcattatccgaggatgtgccgctactaccagccgtacggggatcccgtgattcgatgtcttgcatgtgacgggatagggcactatgcgagtgcatgtccggtggtcatggcgggatcgtcggagagttcatctcatgtgtttcctcccactgcagctgacccagcgactctagatggtttttggcctagttgtgtttgtccttatactttgtggaggagtatatacggttaggatgacttatagctaagtctaaggcgaaggtacgtaggtttctaatccttttgttgtaaaatagtaacctagatgcctagtatagtaaagtcctttgcctaggtatgtaaccttaggatagttggtatttgtaaaatccttaggataagtatatttgtataattagaaaatgcggcatgtattacataacactataggattgtattatataacttagaaatcctaggatagtaatttaacggttgtatgaacttgatgttattatcttgttgtgatcttatgtgtttaaatgttgtgatgtattgtttatgtttatgtttattttgtgtgtgtgtgaaacgcaaacgagggaatcaacatagaaagcctcatccatttagatacgatggaatagaaatcctattttatagagcttaagtttaagtttaaaccttagaagattaggtagtgtataccttacctaagccttcttggcatcattagcattaactcaaaggacgagagttaaccgtgccccataagataagagagatagaatagatctagtgaagtagaaaagaagtagtttagtcttacacaatggaacgtgttattaagacttaaaagaatcaaaggggaggagcaaagctaggatagaataggataaagaaaacccagaagacaggagttcaaagaggttgcaagaagattatagaaactagcacattaagtaaggaaagcagggagtagctgctaattcataaaaattcgaggacgaattttattaacgggagaagaatgtaatgaccctcaccttgagtatgactttgcccgtggtatgcccggagtttggcccagtatgcccgtagtatgccccagtacgcccgcagtgtgcccgcagtgagcccgcagtatgccagtggtacgcccgcagtgtgcccgtagtaggcagtgtgagcgacccgcggtgacataagcatggccgagatgggcgtgtgctcgacccatggccggcacgaacggcgagggtgcgaccagaagttggccacgtcattgaactgcttaaggcgcgagcaggtgggtaagctgcttggtgttctgtggctgagaatcggccatgtcgggctgccaaaattttatggctgcggagcggcaccaagcaggttccggttggcagacaggtgggtgatgactcagggccggctgttgccccctgagcaaccccaggacgactgtcgaccagcgggatgcgctgggtgtcttgggcggtgactcggcgccatgtgttgccgggcgggatgcggttagtagcgagactccggtgactcacctactagccaaaccgacctaaaaccactttaaataccttcggccctcattaggaaacttcacccaaaaatcttgcccatagctagtaaacccgaggagaacccacagaaagaccctattcaaaagtcagtaagttttctgaccttagttgcttttagtaaccgccgattagtccttaataaaaatagattgtggtttgctagataaccgagtaagagaaggaactaatggattcgaggggtagg

SEQ ID NO: 32912 - DNA, 3353 bp, Arabidopsis thaliana landsberg
aaaaaaaccaaccttgttgtgaaataaggtggtgttgaaggcgaaagttgtgtgtttacccaaagatgggtgtcttgtttctctttagcttttgaccatgttttattttctgttgcaggttttagttttggaaatttgcaggttttggtttttgaaatttgcaagttttggttatctaagctctgcagttttattgaattttcaggtttttggtttaagaaatttgcatggtttggaagtttttgttctctattaagtcgcatgtttttttgtttgagaaatttcaagtttcgattttctaagttgtaagttttggtttttgaatatcgttaggttgttgtttgtatacttgtatccatgtttcaggtttgagtttgcattcagttttagctttgaatctgagtttcaggtttctcttcttaccctgagtttagtttcagtttcaagatttgagtttaacttggttaagtttatgttttagtttggtatcaggattgagttcatataaatcaatgttattgtttcaaaaaagtctttcaattagtcggtctaaccttcctaacttggcacacatatgacacttcaatataatgttcaggtttaacgttatcatgtaccctctattgcaatactcaaatcttcaagaatcgggtaaaacgagataagcaactgtatagcttcattattggcgtatacgtagacaaaactcacttaggcattgcaatctgcaaattcatctgcaaatttttgcgcaaaattaatacatcgatggggatggactcttgacgctgtcgatcatcactattcactaacaacgaacaagtcattgcttacctgcagaattcattttccacggtcaatttaatttggctggacaaaatacaacgtgttttttctcatgttccctgtacgtaactaaaaagtaagacaaaaggagtgaaatggacattattcaacgtaaagactttttaagtcgttgcgtttaacgtgaaaaacgcctcgtagggtcaagctgtgttggaattatctttgtggagtagagtctattatttttgtatataaagagatgggcatgaaaacatgttacgtaccatcacaatttccagattttatttttttgctttttcataatcaatattcaagaaaattaaattagcttaagaatgatggaaggcttttggaactcaaagagtatcattcgtattactctctcttttactttcttattcatttgtcatttttcggacgtgcttgcggctcctactaggcacttgtgtcgtcccgaacaaaaggatgcacttctcaagttcaaaaacgagtttgagattgggaagccttctcctacttgtaagatggttggcattgaatctcatcggaagacggagtcatgggggaataacagcgactgttgtaattgggagggagtcacgtgcaatgccaagtccggggaagtgatcgagctcgaccttagatgcagctgtctccatggccggtttcattccaacagcagtattcgaaaccttggtttcctaaccaccctagacctttcatttaatgattttaaaggtcaaatcacgtcttcaattgaaaatctttcgcatctcacctatctcgacctttcttttaatcatttttcgggtcaggttccatctttcattggaaacctttctcatctcacatctctcgagctttcttctaatcagttttcgggtcaaatcccgtcttcaattggaaatctttctaatctcacctttctcagtctccctagtaatgatttctttggtcagattccatcttcgattgggaaccttgctcgtctcacctatctctacctttcttacaacaatttcgttggtgaaatcccatcttcttttggcaatctaaaccagctgatcgtcttacaggttgattccaataagctcagtggaaatgttcccatctcactactgaatttgacgaggttgtctgctttattactttcccacaatcagttcacaggcacgattcctaataacatcagtttactatcaaacttgatggactttgaagcaagtaacaacgctttcactggaactctcccttcttctctcttcaacattcctcctttgattagacttgatttgagcgataaccaactcaacggcactcttcattttgggaatatatcttcaccatctaacctacaataccttatcattggcagcaacaacttcatagggacaatcccgagatctctttccagatttgtcaacctcacgctttttgacctttcccattcaaacatccaaggcccagttgactttagtatcttctcgcatctcaagtcgcttgacgatcttaggctatcctatttgaccaccactacgattgacttgaacgatatcttaccatatttcaagacgctccgttcattggatctctcaggcaaccttgtttcagccacaaacaagtcttcagtttcttcggatcctccttcgcaatcgatacaatctttgtacttgtcaggatgcggtatcaccgattttccagagatcctaagaacacaacacgaattggggtttctagacatttccaacaacaaaatcaaaggtcaagttcctggctggttatggacgctaccaaacttgttctacttgaatctttccaacaacactttcatcagttttgaaagctcgtcgaagaaacatggactctcctctgtccggaaaccatctatgattcacttgtttgcctccaacaacaacttcacgggcaagattccttctttcatatgcgggttgcgttctctaaacactctggatttatctgaaaacaactataatggttcaatccctcgttgcatggaaaaactcaagagtactcttttcgttctaaaccttcgtcaaaataatctgagtggaggtcttccaaagcatatatttgaaagcctaaggtcgcttgacgtcggtcataacctactggtgggaaagcttccaagatctttgatccgtttctctaatcttgaagttttgaacgtggaaagcaacagaatcaacgacacgtttccgttctggttgagttctctgtcgaagttacaagttcttgtattacgctccaatgcattccatggaccaatacatgaagccacattccctgagttgcgaatcattgacatatcacataatcacttcaatggaactttgccacagagtactttgtgaagtggagtgctatgtcatcacttggaaaaaacgaagaccagtctaacgaaaagtacatgggatcaggcctttactaccaagattcaatggttttgatgaataaggtttagcgatggagctggtacgtattctaacaatctacacagcactcga

SEQ ID NO: 32913 - DNA, 1323 bp, Arabidopsis thaliana landsberg
tagttttacatcaacaatccctccttgcagctctattaatcaaatcctatagtgcttcaataaacgaaagttcttgatcttttcaacgccaaataccatcttcccattctttgacaacggcagccacactttcttgtatcggacgtgcaagatgaacatattcttccctaacataatcattatcagaatcttcattaaccccacactctatcatcagcggttcaataacagtttcagaaactccattctctagcatcataggttcactaactgtctcacgctgttcctctagttcaataataggttcattagtactcagaattcctgtatttgcatccgcaaccattacaacattggcagccaattccccaaaattcacaccgcatgaacttcttcgctctactattggaacttggctattattactttccaaatcactgcataactctacatgcaaaactggtctaaatccctctttatccaataacgttaaatatatcaacacatcctcatcatctacaatataagactctctccatgctttagatatcatgtaactcaatttcagattccttttctcaccacctagagcaatctttctacagatcttatctattaaatccgcatatgttattctctccaaaaatgatgtcttaaacactataccgtatattgaatttttgcaactccactcatggtctgctgtatattaccctccatagtcaaagtgtaggttcgtctagatcctcttcttcatcgcctcctacaaatataaacaatatattagtaccagttgaaccacgagatgtatcagtgtctgattcaatttaagttcgtccatccattgtattctgcaaatatggtttgatgctgcttacacattgattcaattcaattacattgtactaactataatacttacaggagatggaagaactaaagaaggatcgtttccagattagccgcagcaaagatcgataaagaattcgatccaacagtatcgactcacgtagcacgcagcaccggagaaatcgacggtcggagaattggattagctgacctagcaaaggctccccagactcgacggagccaatgtcgaaaatcgccgatgtcggaagttaatcggaaatcgcctatctcgtcggaattaaatgtcggctcgaattaaatgaattgggtcggaattaattgggttgggtcgggattgattatttcgatttcgatttggattttgtttttgatttatcttttaaaattaattgatataattcattccgggctcaatagatattatccactacaagagtggaatgcagatcgaaa

SEQ ID NO: 32914 - DNA, 990 bp, Arabidopsis thaliana landsberg
gtttttgccgtaaaagaaaaaaacagtcaagcattaagatttggttgtattattatgggtgattatcacgggctttgatgctaacacaagtaagtggaagttgtctcgtaggtcccaacttcgttcctagtctttcgcaattcactggtttagttggaccaaattctattatttatagcaaacaaaatctacatcacacattcaatctagatcttgtttttgatatatatacatagacaacacaacaatggctttggtggctgtgtgtagtgattaaaagcgattgtaacttgaagcttgcgattgaaaaaagtcttaatgtcatgattattcattattgttgaatatttgtagatatatcgaacgctgattcgctaagctttcaatttatggggaaaatgctgaacttaatattaatcaacaacgacttatttaactaagacagtttagaaatctaaaccgatggtacaaattacaaaattcatatttaatatttggctgatatagttgagaactacgtactaaatcgacaggttccaacatgttttgttgtttcatataaacattgtcaaaattagactcatatgagcaatcaaaatatattttttgtttgctttgataaaaaatcaaccatgtttcattttttgttcaaattaagcattatttagagttttctacaaatcaatttgaacgttataaacttataacagaacataaacatagtcgtaaaaattatcataaagagatgtataattgtatatcattcatataaatcttaatcttcacttcaaagatgcgactttctcctccaaaacatatttacgtagatggcatctcatgatgttcacttaattataaattaacatcacgaatttaacagaataatattattaaaaaatccagcaggtaacatagttataaatggcacacgtgtggggctcatacccagataaggtctcgttccctatactcttaacgctcacaacaaac

SEQ ID NO: 32915 - DNA, 5701 bp, Arabidopsis thaliana landsberg
  unsure (1)..(5701): unsure at all n locations
ccatctgattatgtgttcttacatatacatacagggtgtagaatcagcccaagattctataagagtccatattaaaatcagagaaagacctgtttcaatgtagaacacaatcaaaacagaggttatggtatactcttattctaaatgcgagaaatgttggttgatactaatatagtacaaagaaataccagccatatctcctcctatgcattagctttctttgagtggtaaagccaatagggagaagtagaaactgatcagttagctagctttccgccttgtgaaagccgggtgcatagtagttccattgaaagaaatggacttgtcgattctctctttactctctcgcattctctctacaactagaggcactgtggcaatgttctcgtacactctttctttgagctgaatcaagctatctcgagattcttgttcgattccacctatatgtgctccatctcttgacactagaggttcttccaaacttgcaaggaacaaaataactgatgagttgattatcacaacagcaggttcactagagacttgtgtatattacaatgctatgaaatcttagtgtcacctaatgtggccacttattctcatggtatctgtaaacaaaaattggctaaacaatcattttctctcagcttagctaaacatatcatcacatagtctcatgcttgtcgattctaagccacaaaaatacatgatttattgtaatggaaaagccttgtatatgtatcatcacctcagaattaagcgtaataactcatgaacataatcatccagagggtatagtagcaagtatcacaatattctacacggatggcatgacacaaacctaaatgcaaaaaacgacatcacaatcaaaaggcaagtctgctgctgctaaacaacttggtcttcacaagaatgatacactaataatgtagaggatcaatctattattacatcatctagaaagaaaaagagactaaaattccagctgaaaccaaaggagaaggaaggtatctaactaaatataagcaaagaaaagtacgaacctgtgctagttgtgcgaaagcccaaagaatcgatgttgggaaaattggatctacgagaagaaatcacagaattgctcagattactcggtaggcttttcctgtactcggaaaccttgcgcgacatttgctccacctctgactccattttctccnnnnnnnnnnnnnnnnnnnnnnnnnnnnnnnnttcatttctgtgttcgaaagccatgagaatgtagaattcgtgctcagagatacccaaaatcccagggtttttccaagaccaacaaaagcgaggagagtggggaggtggcaacagaaacccgcaaatcacaaatggatacaaaactataaaccggccggttaagcaggtgtaccggttccatcaaagatacccccgcggatccaaaatgggtcgtacgaaaactaatttgatacttgggcccataattttctggcccacgaatcgatctaaaggtgttcttgtgagagagaattttaaaacaaaaaaaaaaaacaagagaatttatagatagatgatgatagaggtgagaaggccggaatcaaacaatgtacatacagcgtgctacattgacattatgagtttgtctaataaaatcttttatttagtacccacccagattggtttttgatctttttattcgtcgccttgtactcgtaataatgtatcttatttaacttacgttgagagccattcagagcttcgacgtgccggagggttttggaggtctagcctctcttaatagggcctcttgcgttaatgatacaaccagctgttgttctcatattcaaaaacacataccaaaaggaattcttttatcacttatcatttccagatatgtatgtataatagggttcaaaagaatagagaaagagtacctctcctttcctgttgaacatttgaccagtcacaaaaccacgggtctcatgcgcagttggactcacaatctgcaagcagcatcctttgtgttgtaagtgggtgaacctcttacagcaaacaagtttataaaacaactctataccaaaaatcattttcatttattctgaacaaacatttgatctgaaatgttcataagaaacaaggatagaaaaaactaccacatagagcaaccactcgtcggctcttagaggtcggtgaaaccacatcctgcaaaccaaatgaggaatagtaactcgtaatagttacttatctggaagatccctactggaataatgcctcaatgtaattaaaaaatttaacccagacacacaaaactcatacatcaccaagagaaaataaaaacctacgcatggtccaggctaagtgcggcggatttcaccccttttctccggtgagggttcaaaccaacaccacaaaatattaaatccgaggcaaatgcaacgacacatctgcatatcaacatggctttgccaaatgattagtttgctaagaatgataaattgaatttcaatataccgtcagtttttcaatgctattaagaaagtttggccttttacaagtctcaacctatcaacttgggatactaaaacaccattgattcacttgtctacaatcattcttgcctttaaagtttaaaggattgttaccagatgaataataccaatttttagatggttaccttgatatacatagatggagttacttaccggtgcaaagcttgatcatcagaaagccttccctttgctctaaaccaatagttcaatctgcaagaaggcattgtgagtttcttgattttttttttaagaaatacttaatggaatttatgagtatacactcaagagtactctatgatataattgatttatttcagcgagttgttaacctcggaggagactttgtctgatttgttgaattgctgggctcacaaaatcgaatctctataggccatggaacaaagtttctagttgcaactttgttccgataactcctgaaagaaagaaacaattgcaagattggtccaacttgagcttttgatataagttatcatacattggaaaacactaccacttacctcggtaaatgaggatcagttatacggctttcacgcaactcctccagtgatagaagctgtagcagataatggtgaaaaataaaacacacaacaatttattggaacccttaaatctggagaaatgatttaccgtatcaggatctggtacagagggcatggttgactcctggtgctcaaatccttgttgttctttctatgaaagtaataaaagagaaaatttaagaaaacaattttcccagttttgtgaaaggctattctctcttggtggcaggtggacgtagagattcataagctatcttgtaaagaataaaatgggaaacctgaaatgatgccagcaagatgaatatgatatttcctttctgtactgcatcaactcttcgggtggcaaagttgttcccatcacgtatgcggtgaacttgataaataatggggactgcaagcaagagcaacaaactatgataatcagatgaatccaacagcagggtgggtttcaatagggaagaaaggcatcattggtggctagaaagtgccccagtgagattatgtacatactgtcaatatctccaacgagaagaaaataggagtgtaaactgtggacgaccttgagaaaatcaacagtttttgacgccgcagcaagagcctgtaaaatgttggtaaaagtgacttagtagtggttacggttatcactgttaacaagcaatatatatatgcacatgaatcagatcagcaaggtttacagagacataataatgtaaccttcctagagaaaatgcgatacctgtccgacaaattgtcctccaaaaacctttccaaatataggagcatcaggtagtgtgatccccctgaagatattcaactagaagaaagaagcacagagaaaaagagattcagttgccagaagcagaaagaaatgtgataaagaagaacaccgtccgtacgtacttctaaagggtcgagttgcaaaatgcgttccactaaagagcatttgtcaagtgacgtatccgattgccagatggaattagtctcaagcaaatgacagtgatcacgcggcaacaccaaacacgtaagctgcaatgacaagtgagggaagaaacttggacacgcttgtcgttggaatatatatcaaaagtcagcaaatacctgggacatagcaacaatgtctgctgaatgaacgttcccagataaacctgtaggaggaagaaaaaagacaaggaagctgagcatatatcaccaaacccaaggttgaacagaaagcattcatctctcaccaacgccgaagtaatcatactgtttcaagaggaattcggaacggttatcttcttcgtctggtccggaaacctgagcctgcaaacaagaatcaaattataacaatggcgaagatagatacatcgatatctagtctcagaaacaaacctctccttgcaaaataaaataacatccatcccaagtttgatcttcacgaaccacataatcccctttcccttcaataatacaatagagaacaacacagctcaatttttttatatcgtgaaatcagagagaagaataaatccgaaattgagaatggaccgaccgtaacgtttcggcacaacaacttgagcaattttcttcagagaagagctcggtaatttctggagtaaagggacgtttccaaggaactcgacaactacaaaaacagagcagcaacaacatggaattcgccgaaaatctcactacgtcattcctcaatctcacgttataggcttacctgactcggtgttcatggcggattcggctagtcggaagaaatcgccggttggatgatgatgattaggtgtgagaaaatgtggtttcctcccacctggcaaggtaaatcaattgtatcaactaccagctccggtttatggaagaatacgtggactcggttcgatttttatttctctcacgtgttataaataaaataataataattagtattaataaatgaagaaatatacaaataatattggtgtgatgtaatttaattcttgagatgaaacaaaaagcaataaacaaatcctacaacctcaaggcccattaatggctttaaggccttaaaataaatccgaactaagtaaatttctaaatggcccatgagaagagacgataataacagaatctcagtcagctgttattttaattcgtttctagtctaatgtttctatttgaatcagtatttatttttcttttcgtttaatttgcttgtttaaaaccaatggttactatatgcaagttatagtaaccactccggacgggttttcgtcttgttcgattatcactcagtggttaattaaattgttaccaactcctgaaagctgttatttttcgtttctagtctatgtttcaatttgaatcagtattaattttctccaaatcatggatgctttctcgatcgattgggtctcactgtcacgatggattttcctcctacttaatcttaaagcatatgtacatttggaaacagatattctctgtagctatgtgtttctcgcgtaacacgctaggtacctttggggtttatgatttcgtatcttcaattagttgttttagttgaaatgtttgaaaaaacatttcacaatctcaaccgtaggatgagtcatccttccccatcggacggtccacattgtt

SEQ ID NO: 32916 - DNA, 7331 bp, Arabidopsis thaliana landsberg
aattacttcatactcaagttttgctcagaatggaggttaatgtggtaatatatgttgtttgttctaagaccatcccattggtcataaaaataagagcgtctctgcaaactagtaagttttcaaaacttaattagaaagtagtacaaatactatttataatatgtaatatagtaataatacgtttttctttcgttagagagagaggtgtaattaagggagagagagaaaacatgtgagagagagagaaagagtgagtcatgggttttgttttttctttattacatttcattttccctacaattttaagaactaaaatactcgtttgtaaattttatttttctaaaattgattatataaataaaaatctatgttattttctttatcatttgatatgcattttgtttaataatttttaaattactataattgtgaaactagagatataaatacaatctgtatagcataatctgtacagcgcaatcagcacggcgcaatctgtgcggttgtatctgtatagtgctatctgtacagcgctatctcaaagaaaaacaatttttttagagagaaaacaaattaaattaaaatacataacaaataatacttggataatacataaaaagagttatgcattcatcagtaatacttgccactttgaaagaagtttaggtaatctgcacaacgctatctttacatcgctaactgtacaccgctatctggaatgcgctatcaaatgatgaaatgcatctgtaaagaaggatatttgtttgaaaccaagtacgtttttaaaattttcttacatttagaccactgtacaaaagaagaccaatgtatagatataaaaatctatgtttttttctctatcatttgatattcattttgtttaataattttttgtttttatattactgaacactgtacaaataatatctatacatatatctatacataaaatcctgacacacttgacccactctctctcacacgctatctctctcccttatacctctctctttcaccaaacaaaaacaaaacgtactatgactattctactaattataaatagtacatgtactagttttccaattaagtttgggaaacgtactattttccaacttattcctaaaaataaatggtatttaactataaaattaataaaaataagaataaaaaagaaataaaagaataaaggtgagatatgtgtctttctagagatatttaagaccttgtaagatttgtttaaagacctttccctccatatgttttctttttagggtaaattgcgggtcacacccgtttaccatgttttattttcatggattgtcaaagtcaaatgtggttttcaccatttgtcttttcgcctgcaaaatgacgcttctgcccttgcgcttctctcttagtaactgttgaaatgtacggtttagtttaacaggtttagttacgtacactgttccggttcagttgaagattttttgtttcacgtccacacgattcggttccgttacaagtgagattatttccattattccgaagtgacatcaacatttaatgcccccaaaaagtttagatgtgactattgtcacaattaatgcaaaatcatcattacatcaaataatattaaaaaaattattgataataattaattaaaaagttgttgagataaagaagatgaacccaggaacaaagaattattgagaacgtacattgctgttaaagaagtgttgatcttgtttttgtaccaagtttggagccaaaacaagcattgttcgtgtaagtaatgaagttcttttaagaagttttttgttatgtcatattaggatcttgattgtgttcgaactccatttttttatcagaaaatttgcaaaatctatatttgtttgtttaaaatagtcaaatgataattggtatttaggtttataaatgtgtagtatcgacattccatttgtttttttatatgtatagtatttttcagttgcatttaatgtgtgtctcctgaatttatgatgcaggtgggttatggatattcccgtatttactatggtcggtgagtggaaatgcaaagaaggagaatggaaatttgaacctgaggaaggcatctttggtcgttgtgtacgcgttcaggaaaccatgacgtacacggactttgtccgtacactccgagaggctttcagtttgaagtccaccgagatcaatcccataattagctactggatgccgggagaaatgtcagtgctgatagatactaaacgccctcctgtatacattgacagtcagatgggtcttgatacgttttttttggttcgtggtgggtatctttctctcaacttgttcgtctttttcaataatacagtgaaggcgttcgggaatactgtctctaggtctcatggtgaagtttttgaaagtgaccgtgtgtttgatagtgctacaaatgttgatgaaaataatgaggatgcagaggagcaagccgatgttgaagacgatacaacagaagaggatgaagtggaggagggcaacgaagatgatgatgggtgtgatgattatcttggtgtggatggatctattgggggaagtactctgtatcctaccacagaacggtagtgaaggtattggcgaagaatacgattacaacaagtggaacgatgtaatagtagaagaatatgtacaaggaaatcttgaggaagacgtcagtctcactcaacagactactcaacatccaggggaattcagtcgtttattggaaacgtgtacgtacacgggtgttagtgtacctggcggagatacaggggaattcagtcgtctcttggaaacgtgtacgtacactggtcttagtgtacctggcgaagaaacaatttctccattgggttacggtacacgctgcgaagggcaaagggattccaatcttatttgtatagacgaagtcaccggggatgaagtgatcgacggtattggagcttcctcaactgggacacaaaatgataatggggtagttaccgcagctgaggcttaccaagtgtataatgaatttcctaagttacatggtggcgagttggcgaatctcggtaacgatgctgctcctgtgttcgatgacttactcaattttcgagctgatgagacacaggttgaaatcagcaccacatgcgaaactttgtttgttggaagtgtttttaagaatagaaaagtcctgcaacaaacaatgtctcttcaaccgataaagcaatgcttttgcttcaagcaacctaagtcatgtcctaaaacattgaagatggtgtgcgttgatgagacttgtccatggcatttgactgcctgcgtcgtgaaggattcagaaagtttcaaaatcacttcgtatgctacgacacatacgtgtaacatcgactctcggaagaactacaataaacatgctaattataagctcctcggagaagttgtgaggagtagatacagttctactcagggtgggccgcgagctgtcgatttaccacagctgcttctaaataatctgaatgtgcggatttcatattctaccgcttggagagcaaaagaggttgcagtggaaaatgtaaggggggatgagatagcaaattacaggtttttgccgacctatctgtatcttctccaattagctaatccgggtacaataacacatctacactatacaccagaagatgatggtaagcagcgcttcaagtatgtctttgtctctattggcgcttctatcaaaggtctgatatatatgaggaaggtagttgtggtagatggaacgcagctagtcggaccttacaaaggatgtctccttattgcatgtgcccaagatgggaacttccaaatattcccaatagcttttggtgttgttgatggtgagaccgatgcttcttgggcatgtttttttgaaaagttagctgagattgttccagacagtgacaatttaatgattgtctcggacagatatttatctatatacaaaggcctaagtgtggtttacccgagagcgcatcatggagcatgtgctgttcaccttgagcgaaacctctccacctattatggtaagtttggtgtgtctgctttatttttcagcgccgccaaagcttatagggtcagggatttcgagaatatttcgaactgttaagggaaaagagtgctacatgcgcaaaatacctagaggacataggatttgagcattggacaagagctcactgtagaggagaacgctacaatatcatgtctagcaacaactctgagtccatgaatcatgtgttaacaaaagcaaaaacttatccgattgtttacatgatcgagttcattcgggatgtcctaatgcgatggttcgcatcgaggaggaagaaagttgctaggtgcaaatcttctgtgacacctgaggttgatgagagatttctacaagagttgcctgcgtcaggtaaatacgctgtgaagatgtctggaccgtggagctatcaagtgacaagtaaatccggtgagcattttcatgtcgttctggaccagtgtacgtgtacgtgtcttaggtacaccaagctaagaatcccatgtgaacacgctctagcagctgcaatcgagcatggaattgatccgaagtcttgtgtcggatggtggtatggccttcaaacgttttctgattctttccaagaaccaattctacctatcgcggatctgaaagatgttgttatcccacaacatatagtggatttgatactcattcctccatacagtagacgaccaccaggaagaccactgtccaaaaggatcccatctataggtgaaaaccgggtatgtactaacatcgttcattcatctacttgtattttgagtattaccatgcggagatttttaacttcctgtctttgtcacttcagaaaaagagacagaaaagagttttaccaaatcagtgctcacgctgtcgacaagcaggtcataacaagaagacgtgcaaaaatccaatctagttctggtgacaagtttctgagccggccaatatagtgtacgcttctgtgttttctcggtgtacgtaagtttatatataatccacctgtaactatgtacgttgtgtacgtacgtttaaactctacgttcatataactatgtacgtttttgtctgtgtacgtgttaaagttcatgtaataagggtacatagaggtggttgctcaatattttgagtaatttgaaataagttttttgaaaatctaacttattccccctcttaaatgaacggagttggagacatggttcggtatattgtggttatgttggtatttaatggaaaggacgtaactgttgctgtttattgtcaaatcaacgttataattaccctatatgacggttaccaggctattaccaaatatttgaatcaagtgtagttggaaccgcattaataactgtagccgttccagatttcctctttttaagtctcctcccttccttaattttatccacaatcctcattctaaacccatttcttgtgccggcagttatatcattcacaaaaaaaaatttagtctttcgattcgcttgttcttgctatccgtgagatggaggggtttcatatggtctcagaattgtgtcctctgatcactgggtggcgaatttatgtctttgtcgtgagagtcttcaagaaggttatatcgcccaacgtcttcgaactcggccttatcctggcagattaagaggtaatttccgttaaatcattatgtgtttttctcgttcattcgcttaacttatatattaaactctctactatcatgttctgtatgtaaagaataaccgtattgaggccaccgttgatcgtcgccttgctccgttttacgaagaccgattcgttgaaaatgagtggaagacgatcacctctttcttggtccgtaagtcaactgacttagtcagagcaacaaagcatgaatacggcatactgtttatggatcggaccgtcgtcgttcatgccccaccgagatcaccaccagttccagatttcgatttcactcccttcgactacattttggataaatctgcttacaagaacgttttagtcggtgaggaggaataactctgacgcttcatttattacatttttgaaaatgtttgtttattatctttgtttctccatcatctagatgtcattggagcgttggttgatgttggcgcattgactacagactattacggtctcaaactgagtttcaagttaaatgatagatagtaagtgttcttttcatttgttttatttacaatgtcactctaaacgctaactgtccttatttctaacgtagcaatgaagtcttggagtgcgaagcccgcaatcaacaggcggagtacttggatggttactttcagagtttgggtaagggaaattttgttgtcgcactcagcttttggcgtttaaccgaactgtctaacccgaagcttgagagccatggtgctatttcaaaggtggttgccaatccggacagatcagaagttgcggatatctcgatggtggttttttagctagagggaatgaaccattattctgcgttttaatataatataagactacatttcaattaagttttctttcccagttgttgttgttgtttccataagaaccaaactacatttcagtcgttgttgtttccagtttccgtttaaatgttaatctaatttgttgttttatgtacgtgccttgttttattgttcaaatcctctcgcaatgtacgtatagtttctggtgtacgctatcgtgtacgtatattaattttggtgccttcaacatcaaaaactattagatttatacttatgttgtgtacgcaatttcccaatgtacgataaaccaagtttaatgtactatatagtgtacgtacacaaagacatctagtaatatttaaagtggtaattcattcaaaagccagaaacataaaaaggacaggcagtttatataaagggaaattcataagataaataaactggaacgattcaaaaaacataattttttcaacgaagcatacacatgtgttgcaaaatatgtgtgcatccgtcataccaaaagacttgagagtagagccgagtagagtagcttaaaccttagcagctttgcttctagtagaatatagcaatctccctggcgtaccagtagaaaaaacaaaccctgcagccatgatggaacgtgcattgccctatgcaactcggcgggtggacaaacctccaagacctttcccagcggcgagcattttcagtgtgaagctggctgatgtgatacatcaccatctctgcaaccgcgtggccagcttcaaaggtgggtgtcatttcccagaacttttcgctgatcgggaggaaatccaagtgattaccggtacacg

SEQ ID NO: 32917 - DNA, 1567 bp, Arabidopsis thaliana landsberg
tacgggtccgtggttgttatcatcacccacgtcagatccttgtgtttaattttacctcttggcgtagtttagttatttcggttataatgcgcctttttttgttaacgacgttgtttgtttgccacgtcattagtttaccgtgtaagtaatggtcaaatactataaacaagacatgtttgcttcatccacgacttctgtaagaaatgcaaaaggtctcttttttttaatataaagggttcctatcattcctccaaaattggagtatggagattaacaaagtccaatttaacaacgataggttcaagttgatgctcgtttaactcgtaaaatatacgacgcatggcttagatagactctttctatgtcacatctccaactgattacatgttctttcgtgaaaatgtaatttgtcgtggtaggttaaattgtttgactatcatgataaatttaccgcaacaattttttaaatcagtagatttcacccaaagacactgattttcaaacataaaaactggtccggttatatgattctatctacatatatatacttttgatcgaggacaatttttttagatacaacattcattcgtacaaagagaaatgtctaaaattccctaaatatttatagaatactagagtcccagtcaacttaaattttgttaattatatacaattgtaatgacccgttcatatcgtttatacaaattaatcaatttccttctcgcatgatccacacaatttcatttataatgaaaatgatcctcttaccttttttttttttgtcttcttcaaaaacttcacaatattgtgcaacacatagaaacctcacatttttcaagatgatctaataaaagcaaatttgttgtttagatttgacataacacaattattgggcattagtaggccaacgaaattggcaaggtgaagaagaacaaaagtgtgggcaaaagtgtgtgccccatttacgtcacctataaatgcattacaacgtgcgacatatagtggaggtaggtgaaaaaagaatctaaagagagttatagagaagagagataaaagagcttccaaagcaacctttcttcttcctctttgttgtttttgaatttttgttcttcttgagtgtaaatctgtaaaaaccaaaagacaacatcacaagttagtggtgtgtttgtaatccctttgatatagtgaagtttgggagcaagacatctcccccgagacgtagcggttgaggccgtgaactcggttatcaattttctatgtctgtttatttctttaccaagcaatctctatcactcttttctccacaagtggtatcagagctccaggcttgtatagggttgctaaggagtttcagctaaggagtttcagatcaggggttacaagaagttttaaaagatgagtagtaacgctcgggttgaggttgacagatttgatggaatcggtgacttctctttgtggaaggtcagaatgttggctcattatggtgttctagggctaaaaggtatcttgaacgatgagcagctgctaagagatccacctgttatagaagaggaagctgcagtagctg

SEQ ID NO: 32918 - DNA, 795 bp, Arabidopsis thaliana landsberg
agacttcaccaaaccggcgatgatcatatcctctgtttctaataagttcagcgaacgtaacacaactctctgtctggctatgtcctctcgtgaccttaatctttacatgttctggtaatctcaatgtatacttatcttcttcctccggtttatttctcactatcgagtgtcccgtagaatgcgatctagagaatttctccggcaagttttgttcctttttgatgctactggtctgtcctgaagatggccaagtatcaatctgtgttgttgtctgctgacgatgatgatcgtcttcttcgtcgtcgcttgtttcttgaatcacatctatgatcatctcatcgacagtaggcttggtgttttccggtggcggaggaggatcaagatcccgacgacaaacagggcaagttctgtgagattcgaaccagagatcgatgcattcttggtggaacacgtggtagcatgttgtcaagagacgtagcacgtgatctccgtcgaattcgagaagacaaatggcgcattcgaggccgtatttctcttcccggagatctttaacggaggagtaaggaaaagtgggaaatgagttaatgattcgaagttcaaggccgggatttaccggtggagcttccggttgctggaggggattgtcggatacggtgtctccgccgtggtggagacgccaagcttgcaccattgtgtcgaggaaacacttgcaaaaataaagagtgaagaaaccgatgaagaagaaaacgaggaggattacggtgaggatcaccgtgagaggcggtgtgacttaga

SEQ ID NO: 32919 - DNA, 658 bp, Arabidopsis thaliana landsberg
gcaggtcgactctagcaggatccccatagtttcccacccagcaacaaaaacacccccacctgtgaagaaaagactccaggctctgttaggaggagatcccatagaagatgatcccactatcgtctacatggccggatacctccacaccctcaacaaccactacgatgagctctcctcccattgtacccacctaaactcccgagtggaatgcctagagcagcaagtcaaagagcttacgcaagagaaggtatctctccaggagagtctcagcatagtggaaggcgaggaagccaacacccgtgaggcctatcggaccttgaagtcagactttgacaagaagctaaaggcactcacccccaaaaagaagatccaaaagaagaccactaaccaaggatgccagacagagaagaagaagaagaagaaggcccctctagccctaccttcccccagaatcgatgactggtccgacgaagaagatgtatccctagccagcctcgatgatcttctcaaggcatttggggacaccttagacaaggactcactagcacctcgaagaacgccctcgtgtagtttttttctgtagtagtcttatgcttgtaatgtgatggtgtaatgaataaaatacttggttgagacaatttgcatgtgcataatagtg

SEQ ID NO: 32920 - DNA, 2102 bp, Arabidopsis thaliana landsberg
accccctccttgtgactcaaagcctggtggcctaaacgggcatgtgatgtaaatttaattatgtgatccgtttatctaaaacttttgtaaaataaacgattcaaaaaggttcaatccctttagcctttaggcctattctgggcttagcttgtttaattattaaaagaaaaatgtttgttggcaaagttaatttagatgctctccgaggcacttaaaattcctttcttggcaaagtttaatctcccaacaattaacttcttgtcggttcgatcaggtgggaaaaaagccaaaaaccgaaaaccgaaccatatagaaacgaaataaatagtttggtttggttatagttttatataaaaatccatttataattttattaagatttcgatttaggtttggtttggttaaaaaaacgtaaaaccgaatgtttttttttgcttttttgtttattaaaattaatttcaccaggcttagtattattgatccttttagtaattttagaaaataacaaataattatataagaaaaaaatccattacattttacttattggttgatatagtatttttattttaagtttattttcatttatgcatcatcaaatttatttatccttggtaaaaatatgaaattatcaaaagaaaagcgggcctaaactgaaaccaaaccgaacgaagatacacattgtttatatatggtttcaatatttatgaaaccgaaaaaccgtaaaaccgtaaaaaccaaatcgtaaccaaaccgaattacatacggtttttacattgttatagttttggtaaaactgtaaaatcgtaaaaaaaaaaaagaaccgaaatcaaaccgaaaaactgtacgcccaccccaaggttacatagatcatcgcaatttgcaaacccaaaatttctgtttaaaccaaaagatcatagtacgatatataaaacaaatgaattttaaaatacataatacagtttgatctctagtgtttatcacttgtttatgtgaaagaaaatgattaaccttaaaaaaagatcaaatagaaaaaataattggcaaaaaatttaaagactatatatatattttttaaatatgctattcttattcatatatatatatatatatatatatatctcaacatattatgattcccctttaagaagtgaaatattaaagttaatttaagattataaaagcaaaacagaatgaaacttaagatggagagtaaatgaaaaaattgtaataggttttattcattatatgaacataactagatgattatcaattaagtacactataagggatatgtccaaattccgttgcataatatttatttgttgatgttataaaaattagatgtgtttgatactttgttttgagaaagtgacatgtaaaatcttgggcaggttttgatataaagtgggagttatcattttgtattttacttcccaatgatttctcaatttttataacgttttgaatttcataaacctagtggctagtgatatgatactctcaagaaacctacccacctaaaaagagagaaaaacaaaacaaaagaatagtaaggcactaaacactaaaactaccacttctcttgtatcgccgacaaagctttgttcagtggcaaagatgatgaatcatttgcttttggctcttttccttgttggaaccatcgccttaccagatagaggaactcaacaattgaccaacgatggcctcaccggcgcgaggcgagagatactctctttcttagaccaaagacttgcagtggtgtacccagtgatccagagattcaagtcactcatcactctcgacccttataacgtgaccaagacatggattggttcagacatctgcagttatagaggcttccactgtgacaatcctcctcacaacaaaaccgcagttactgttgcttccatcgatttcaatggctttcagctctctgctccatccatcgaaggatttatcgatcaattcgctgacctagctctgtttcatgttaactcaaacaattttggaggtacggtgccttccaagatagtcaacctccggtatctctatgaactcgacatcagcaacaatagattcaccggtcagtttccgacaga

SEQ ID NO: 32921 - DNA, 6172 bp, Arabidopsis thaliana landsberg
tagtctctataatgcgtcaatctttagccctgaccaatctctcattaataaagcagctggtagcaccggaatcaatgagcaccactacactggtacttccgatatagtctctcatcttcatcgatttacctctggaaagatcagacaaggaacccaaagacagtatatgtaactcttcatctgcttcaccctcttctggtgttaagggctctactagctcttcaatgaggggactctcttccttttattcaataacattcagactcttcagtctctgctgcctacacctatgactagggaaccatttgtctccacaataacggcaaggattggagttccttacctctccagtgttcgtaataccactccctgaagcagggttagtatccatgtagggttccataggacgctttgacaacaccttgtcataagccctcacagtattttgaggttgtggaggttgtgtggttgcagtagaaggtcggttttgttgacggacttgatagttagtgttgtctctgtcctgagattcaatcattcgtgctatctctacaatgtccgtgaggtctactggtctgtatctcactacttgatctttcaagtgtttcctcaacccattgagaaaagcagattcaagtaaatctgcagtcacatgaggtaactcaacaatgagctcttcaaacctgcctctgtactcatcaacagtactcgtctgccaaatatttagcaaatgatccatagcagaacttctcctacttggcctaaacctaaccttaaacttatcctgaaaatccttccaagagtatatcttttccctatcattagaacatctccaccaagttattgaagctccagttaaacaagagattacctttgcaagtttttcctcttcacgaacattgtaggtttaaaaacactgctcgactctgaataaccaggcatctgggttaccaccttcatagttaggtaactccaagttggtaactgtcagatctgctcttaggggtagttgcgggtacacctgttctggaggtggggtgttaaagtgcacgtgttgtggcctagactgtgttaccggtgtaggacaagggcgcaggatgtctctgttctatctctcagcggtgggtaatggcgttcctggaaactgaggagaaggataggggcttaagaaggagagaggtgttgactctcttccatctcttgtttgaccatagatttgaaatctcaggagctgttgaaccccttctctaatcacagccatctctttctcttggttggtaacgccaactttgagaggtagagtaggcgaaggaatctcaacgggaggaggtgaactgagtcctggcgattcagaaccttgactcgggaccaacggtctttggatcttctggagccattgttagctctcaagaccaatgttaagcttgggagcttaatcgaactgaaacttaagaaataagacagggaaatagagaaatgcgcaggaaacggcggagagtaagatgagagaagaagtttatattgattgtaaatatttttggtaaagtaaccctaaagggaaactttcctttaaatagcaatcccccactaaaacccttaaatgtaagaccccttacaagttcaaaacgcaacactttgtcatgtgagacttattggaatagaggcaaagcctctagctcattcagagacttactgagacttagccacttttatataacacctttctgaagaagttctctaacttccttgcctttcttccgcatgtccttagtcttcttctcacacaagctagaggcaccttgagcctatcacattgttgtacagttaaacaagctaactgggtttaaaaagtacaaaatctcagatattatcttttttgatcggaagagaaaagccaccgttggaacagaggattctttcttcgagatggtatcgatttaagaaggagaaaattacaataaagctttcttcgagatggtatcgatttaagaaggagaaaattacaataaagctcagttatagaaggagttagaaaccctagctacttgtgtatggtttgagaaagttaatttcgaagggaagacaaagcctgacgaaaccctagctgttacaatctcttttgcagagagcatttgacaagccatatagagattccaatgcataaacgtagggttaattgtacaacctaaaccggtaaagattgattcagtcatgacagaaaaagagatgattgagtacttgggaagtcaggagaaggaatacaagcagaggattgagaaggctaggccttgtttgcttcggggatcgattcagcgagaggcaatgcttatgctaagagattaaggagtttaagtgcgaggcttttgcataaggttaacgaacgagttcttaaatggcacccagaccaagggtatagttttgctaatgttgtgagttttggtaacttgaacagtaaggaacttatttttgaagttatggaaggagacataactcagttgattattcagtttcaagataagcttggtaatgtagttgaaggtaacacacaaattcttgtcgtgcgcagggaattgcctaagcaggtatgtttctcaagttctgctatgtcagatatgtcattgttgatgtgatcatgatttagtataggatgatgacgaaagtgtagttatattatagattgatatgtcaggaaaaaattgacagacttttaacttgaacttgctatttaagtctgatggatgtaagaggtttaatcgcttcaatgaacccattgtacaaatgttttatattccagacatgtaatgatatatctcatttgttatgttagttttagtgatagtttctatgtttcgttgaacagcttcgccaaggctatgttttcaacattgaagctgggaaaaaagctctcagtaacatcaattcattggggctgttctctaacattgaagtcaatccacgcccagatgagaaaaatgaagggggcattattgttgagatcaagcttaaggagctagaacagaagtcagctgaagtcagtacagaatggagtattgttcctgggcgtggaggagctcccacattggtatgaatccttccttactgaaataagtacagattgtaaaatttgagaagttccattgagtttgattgttattgtttatatgcatcaggcttcattccagccaggtgggtctgttactttcgagcatcgaaaccttcagggtcttaataggtctctcatgggttcagtgaccactagcaacttcttgaatcctcaggtacattcgataagcttacatgattgatacatctctggttcaacttttcggttgataacatccatctatttctgtttctatgtgctaagcacaaaccttatgttacattttttcctcaggatgatctttcgtttaagcttgagtatgtgcacccgtatctggatggtgtttacaatcctcggaaccgaacattcaaaacaagctgcttcaacagccgcaaacttagcccagtattcactggaggacctggtgttgaggaagtgccaccaatttgggttgatcgagctggtgtgaaagctaatataactgaggtaagcttgccaatcctcagtgccataatcgacttatattgtcctacaaacacttaactgaaacatattttcatgcagaacttcacccgtcagagtaagtttacatatggacttgtgatggaggagataacaacccgagatgaaagcagtcatattgctgcaaatggtcagagactactacctagcggtggaatcagtgctgatggacctccaacaactctcagtggtaccggtgtcgatcgaatggcttttctacaagccaacatcacccgtgacaataccaaatttgttaatggggcagttgttggacagaggactgtctttcaggtttgctttcccaatgatcaaatgagattataatgatgagtcatctgtatattgtaagctttacacaatgtatttgcaaatcacaggttgatcagggattgggtattgggagcaaattcccgttcttcaaccgccaccagttaaccatgacaaaattcattcagttgcgggaagtagaacaaggggctggtaagtcacaccaccagttctagtcctccatgggcattacggaggctgcgttggcgaccttccaagctacgatgcttttgtcctcggtggtccgtactctgtccgtggctacaacatgggagagctcggtgctgctagaaacattgccgaggtaatacaacaaacactcaaaacaaaaacagtcttttctcctaaacccgaaaaatatgtgtgtctaatttggtttcatggattataggtcggtgctgagatcagaatacccgtgaagaacacacatgtctacgcttttgttgagcatggaaatgatttaggaagctcaaaggatgtgaagggaaaccctacagcagtctacaggagaacgggtcagggttcatcctatggtgcaggtgtgaaactcggtttggtccgagctgagtatgctgtagatcacaataatggaaccggtgctctgttcttccggtttggagagaggtattaaggtaatgtgagaagcaagctcatgttatccaccttagtcttttcatttactctgttgaggaactgctatttttctctttttttccttttcttttgtgttttttttttctacttctttttcaataattgcttaatgttagtgtttgatgacgttgctgagaatcgggaaagagtttgttcttcgtaatatgtctagactttggtaggaaaattttgaaactttcaagtttcaaaaaatcgtatgaatagttgacaaatgaaagtttatattgaaatcacgtatgcatctgagttcttctttaaatattaccaacaagggatagtgcaatagaatttaatcaaatgtcaacaccaaacatctacaaagtgaagtgtcaaaggctttcgaaaacttgaaattgttgacattaggaaacaaaacatatcttcaatcttctctatattttgaaatctttcaatttgattctgttgagatggtagatgctgtcacggagttcgttgtgggaaagatcggcaactatctcattgaagaagcatctatgttgattggagtcaaagacgatctagaggagctgaagacggagttgaggtgcatccatggttatctcaaggacgttgaagcgcgagaaagagaagatgaagcctcaaaagagtggtcaaaactggttttagatttcgcttatgacgtcgaggatgttttggacacttatcacttgaaactcgaagaaaggtcacaaaggcgaggcttgaggagattgaccaacaaaataggcaggaagatggatgcgtacaacatagttgatgatatcaaaatcctcaagagaagaatcttggatatcactcggaagagggagacttatggtataggaggcttgaaagagcctcaaggaggagggaatacttcaagtttgagagtgagacaacttcggcgtgctcgatctgttgatcaagaagaggttgtagttggtttggaagatgatgctaagattcttttggaaaagcttctttattatgaagataaaaatagatttattatctcgattttcggtatgggaggccttgggaagactgcacttgctaggaagctctacaactcaggagatgtgaaggaaagattcaaataccgtgcatggacttatgtttctcaagagtataaaactggagatatacttatgagaatcattagatctttgagaatgacttttggggaagagtcggaaaagatcagaaagtttgcagaggaagaattagaagtttaccttcacggtcttctagaagggaaaaaatatttggtggtggtggatgatatatgggagcgagaagcgtgggagagcttaaagagagcgttaccttgcaaccatgaaggaagtagagtcatcatcactacacgtattaaagccgtggctgaaggcgtagatgggagattctatgctcataagttaaggttcttgacgtttgaagaaagctgggagttgtttgaacaaagagcattcaggaatatacaaaggaaggatgaagatttgctgaaaaccggaaaagaaatggttcaaaaatgcagagggttaccactttgtatagttgttcttgcgg

SEQ ID NO: 32922 - DNA, 880 bp, Arabidopsis thaliana landsberg
actatgactctacttcagtattggtagtcctctccttttatcaattaaactaagacttaaaaaccatgaagggagcaatatgttttgtttaagcactttctgatctctggaaacattaatttgcatactctagtctagaattagatgtgtagttaaaaatcgaacaattcttggttcaccttttcattcacctctttcagccaattagaatatgtcacctaataaataaataaactcatttaattataaaatctataatcttaaccactatttcataaactcaaaccgatatataattttgtttaattacaaaatttaaactctaattctattttgtaaatccaaaccgacatttaaactcgattaattgtaaaatctaaacttaaatcgttctttctaaaactcaaaccgacatttaacctcatctaattgtaaaatccaaacccgtttataactctaaaccgacatttaacctcgtttgattctaaaatctaaaatcgtttataaacctaaactggtatttaacttcgtttaatcataaaatttaaactttaaccctctcttataaatccaaaccgatatatgattttgttttggtgaactattagattttataattaaataattgttattgttttttattaggttgtagattctcattagctacagtaaaaagggatgaatataaaaatcagactttgtcctttacaaaaaatcacactttgtccttttttctattttatttaatgattatctgcatcatactttgtcctttacaaaaatcacaccttataatagatatgccaaatcatgttggatttaaaaattattctacatagccatgataatctaacctaattattgactctctaaaggcatc

SEQ ID NO: 32923 - DNA, 663 bp, Arabidopsis thaliana landsberg
aatgtgacctttagttacccggcaagaccagaagagcagatctttcgcgggttttcactctctatctcgagtggttcaaccttggctctagttgggcagagcggaagtgggaagtctactgttgtgagtctgatagagaggttttatgatccacaaagcggtgaagtccgaatagatgggattaaccttaaagagtttcagctaaagtggatcagaagcaagataggacttgtgagtcaagaaccggttctgttcacttcaagcataaaggaaaacatcgcctacgggaaagaaaatgcaacagtcgaagagattcgtaaggccacagagctcgcaaacgcgtctaaattcattgacaagcttcctcaggttgagattaaattcacctctcctctggtatttttttgtctctgttttcattttgatgaagcttgtaaatgtaactgaattaactaactgtacattgcagggtttggatacaatggttggagaacatggtactcagctttccggtggacaaaaacagagaatcgcggtggctagagcaatctttaaaaagatccaagattcttacttttagatgaagctacaagcgcccttgatgctgactttgagagagcggcttatgaagcgctagaccgaactttggtacaccgtactact

SEQ ID NO: 32924 - DNA, 1366 bp, Arabidopsis thaliana landsberg
  unsure (1)..(1366): unsure at all n locations
tatacataatatctgctagacatttgcatgtctgttatcttcctccccctatattatattcttaatgggaacctatttggaatcatcaaaactgaaatgaaagataccaaaggtccaaaactaccacaaagaatatatgtatgaattggaatatgggattggtgatctatttactctccatttccgaggcccaagcattaatatatgagaaatggtttatgatcttttaagttttggactttatataaaacattttttaaacggatgaattacgaaaattaaaactgaatataattacctagtgtatgcttaattatacactgctgatatgattatgattaatgaacataaatattacaacataaattgattttacatgtaaagaagaaaaatataaaaaaacttattaggcggatgaatgctaaacattttactacagtaaatcctctataaattaataatgttgggactgtaaaattttattaatttagagaggttttaaattatcgataaattaatatttattaatttataaagagattttcctattttggtaacttttaaaaaatttctataagatttttttcattataaaaaatatctttctaaaattatttacaagtacaaaattatatcatgtctagaaaacaataccaaactttttttggtacagtaacaaattagaactaaatttcaaataagaataactacaaatttaagtaaacaaaatattataaatatatttcaaaaacaattcttacatataatgtatatatatagttgattcatttatgtaaatattaatttatgatattgatgggatcatatatttacataggactttcaaaaaaactattatcttattaatttatcgatttgcgacactttttacattggtcccaactcgggatcgaaagaatatattaatttatagaggttattaatttatcgagtattaatttatagagattttattgtaattgattttttaggaaaaagaattgtttcaaaaaaattgatttttgaggtttttttatgcacttttaaaaaggaacaaaggaagatacattttaagacaaataaaattgatttagaattattgaaaatataaatcacaaaaattaatacaaaattaagtgctaataaatatagataatttggtcccaaaatcatagaacttatttttatataaattattgaccataaaatttgaaaatgtacatgtacgacatacgttgaacaagctaatcctgtgatacatgacgaacgacactacctatagtactcttagtactgaaacctcccatagacaattaacaatcaacaactaanaaacgaatcccatacttcatgtaaaggtttaaag

SEQ ID NO: 32925 - DNA, 2385 bp, Arabidopsis thaliana landsberg
acatgaatgtaatcaatatgggtgtatgaacaaggattcaatgaattcaaacttttgttttttggctgtgggtgggaaaaagatttgacatttgatttaagcaattttgatatgagttcaattatatgtatgtgttgattgatgcagacatagatggactggaagatacgaagcgcatctatgggataacagctgtaggagggaaggtcaagccagaaaaggacgtcaaggtacattttcgtctttaaaatgcgcgtgttagactgattcatttgatgtttactataatgcgcttattgtatttatgttttttactttcacttttttacttatgagaggtcatggcaaaatctaacgtcgcttttttttttatgtttgtgttttgtctctgtgacgtgaaatgattacccaaccgtggacgatctgaaatttgtgatgatttttaattgtttctgcagtttatttaggtgagttccaataaattctctattaaacaatttatttcatctctttcttctttcttgtgtatttaattcccttctgaaacgttatcattctctttatatttaaatttgtattaatatgaagtaaattgtttgttatgttcaggtggttatgataaggaagataaagcagctagagcttacgaccttgcagctcttaagtattggggtcctacaactacgactaatttcccggtaattttgtctctcatttttgtatgtctgtctgaatatgtcaggattgtattttagttgattcattatctggctaaatacttgtattagatatcaaattacgaatctgaacttgaagaaatgaaacacatgactcgacaagagttcgttgcttctttaagacggtaatcattttatttgagatagatacgttttttttctctcatagttgttccacgaaaatcaaatctatttgttaaccaaaatacatttttttatattataggaaaagcagtggattctctaggggtgcctccatgtacagaggcgtcactaggtttgtttattctctaaccagttgattttaattcttaatgattaaattaatgtgtatgttcctaataaaatgattcaactttattgcaataatgcagacatcatcagcatggtcgatggcaggcacgaattggaagagttgcaggcaacaaagacctttatcttggcacatttagtgagtcccatttgaacatttttatgaatacatttagtgagtccgtatcaatatttttatgaattctgatctaaataattgttatgattatgatttaacacaaaagtatttggatgcggaatttcaggcactcaagaggaagctgcagaagcttatgatatagcagcgatcaaattccgcggtctaaatgcagtcaccaatttcgacatcagtcgatatgatgtcaaatcaattgctagctgtaatctccctgtgggtggactaatgcctaaaccttctccagcaaccgcagcggctgacaaaaccgttgatctttctccatccgactctccatctctaaccacaccgtccctcacgttcaatgtggcaacaccggtcaatgaccatggaggaactttttaccacactggtataccaatcaaaccagacccggctgatcattattggtccaacatctttggattccaggcaaacccgaaagcagaaatgcgaccattagcaaactttgggtcggatcttcataacccttctcctggttatgctataatgccggtaatgcaggaaggtgaaaacaactttggtggtagttttgttgggtctgatgggtataacaatcattccgctgcatcgaacccggtctcagcaattccgctgtcctcgacaactacaatgagtaacggtaacgaagggtatggtggaaacataaactggattaataacaacatttcaagttcttaccaaactgcaaaatcaaatctctctgttttgcacacaccggtttttgggttggaatgagtattcacatcttagtgagaactaaaataaatatgtaggaaaaaaataaggctctgtttgaagaaatcagatattttcttcttagattatttaagtagtttaaaaaaaatattttttaagtgtttcacttttacgtttgtctgctgaccacgaattttgctggatctgacagtactaactctttgtttaatgaccttatgggttccttttttactttccagaacttttatttacttttttcttcatttttcttcattttttttgttgtgtggacaatatgaatgattgaagatggaaactgcttgcatgtgaataaacgaaaatcaaacaatcttcggtaacttaagtatcgtctccacgccgctccttcgtcatcttttttttttatgttgataaataaaa

SEQ ID NO: 32926 - DNA, 6813 bp, Arabidopsis thaliana landsberg
  unsure (1)..(6813): unsure at all n locations
tcaaaaatatacacaatgcaacacacacttcctgagccctcccccaaacttaaatcacacagtccactgtgcgaataaacttggaagagagtactcaggacaaatccaatcacagaaacaaaaaaaaatgaagaaacaaatcacaacagatgatataatacaatggtgaagtgaggcgcttacctcagtcaaagaatgaacgtagttgctcgtcaatggctgcctgtgattgctcccaggccatagacgaaccgccttgttccgtatcagctccagcaggtgggtactcgacctcatcagctctgtggcggccagcaccgctctgaggatactcgacctctcttcttctactgcggccagcaccgcggtcgagtgatctcctcgagtgaatgaggcgtgatctgctgctagatcgagtgagtgtagccttccttcttctcttgtgctcccgggactcgaatgaagaatgcctagccgggacatgtgagattctctgctcgctaagctcatgtctgtgctcatgctcatcaaatctcctcgatggcatctctagaggaggttgtccctgtggaatagcagtagtggaggaggaacaactcagcttatctgtcagaaacttgatagtcttgaaacacttggcgagtaacttatcttgtttcttgcacaacttctacaacttgctgttgttcatgtgagcttcactcaaactcttgctccccctcgctggaggtacatgctcactaaaatgatacatgctcgtgtcatactccacttctctagcttcatccatcccatccttagtagcttcttctgtatgaacatcctcatttgttggctgagcgttctcgtagtagaggttctcaagctcaggcctgaaatcaatgttatctccctctattatgcgtgtaacctaaggactggggagaaggatgttggctttcttatctgtagagtgctcaaacctgaaacggtccctatcgccaaccattgcaaactctaggaattcgcagtgatgcagatgctcgatatccattgcccgtggctcaagtccatcaaatgtgattaggactccacaagcgatcagaatcggtgtcagaacaccgcctatgcaaagagcgcatcgtgctctcttgtggttattgctgacagcccagctcttgtatccacataggtggatttgaagaagtatagagagagatgtgtcattgatttcaccttggagagacatattgttcttagtttggcggagagtgcctttgagagccatagcgatgatctccatatccgaattggtaacaatccctgtgatctcttgggagcagaggacattggctatagaacgttggaagtacctgatgaccagactgcgtatctgattgctcttcgatatagaagaattcagcggtacagagctgcgaatggtgatccataagtctttcaactcttctctgtcatacttgggcttagtacccgttccacttgggaaaccaaacaatccttccaagcgtttgattgatagcatataatcatgaccatacatagagaatcgcaagattcccaatccttcgcattccaaatcatcggaggtcataccttggtaaagctccacttacagtgtggagaggaactgaatcgtttctccttcatatgctacatatggataagccattagactgtccatatgacgactctggtacaagtgctgaaaatcctccaaaaatccaagttgtgcaagtgtggtcgagcatgggtatcttgtgctacagaactcattcagtttgaagagcctgatatactcctcagtaggcaatacatcaggttcgtgaagaagtttggtggctctgcgagtatgctcaggcatgtactcggcttccagatcctcatctataagctcatacctctctgtcattgctctcttcccttgagctatctcagcttttctcctgaagttatcatattctttctgttctctttttggccttgaagacgacgactctgtcttatccatgttatagtcaggatcaattgaagaactgccactgtagttactcatgattctcctgcaaaagatttagaactcaaaacccaaatatcaataggttagtctcaaagataacaatgaaaccataatcgttatcaactggcaatgaaatggaccacattggtcgagtatagccttgtactcgagtaaacagggctgtctccgagttctgctttagtgaatcgagcaaaatagaaaccggtggtcgagtaaacctttggaggtcgagtaatgttgaggaagtcggtacagctggtgagttcagacggtcgagtgctttgtcggtgagccggaattggcaaggacgaagccacaaatcgatggtcgagtcttgtggatgtaatcgagtagctcttgggacttcgacggcaaactaggtggggactcgactgcggcggcgcaaagacggtcgagtatggcgagaacaaagagacgatgaacggtgaagtgaattggtcgagtagcgatggaaatgaactcggcgacggcgggcggaggtcgagtgctttctggaggtcgagtaaacagatgtggctaagtacggtgaggaagagaggttgaataaggtcgagtagttgaaaaaaatgaagataggttggtcgagtgatttttcggaaggtgtggtcgaaattgagtttgacattctctctccatcttagcttcagtgcgtggtccacactttgttgactgggaaaactgcaggaaatctactgtaagcttggcaaaatccctacaagtctctatagctccttttggtcgagtacagtgatgatttaaaacaattttgggttttaaacatcacatttagtcgactgatgtacttgaattcagggtctccagatgcaacagaaaactttcaaaattttgcactccatcgggctatacactcgatctccaggtcttctgtaatgtaaaagttttgaaatttttactctatctccacgttgttcctttgttcctgagaaccacaaacacaagttagacaaatcaaaaataacaaaaaaagaaaaatttatttacagagataatcatgggacttcctcccaagtgagcttgtttaaagtcattagcttgactaccatactcttttaaccatcaagaagttcctggagatgaactgaagtcacctctgaaaggatttgatctgctaagtatttcttgagcctttgaccatttattgtgaaatctccactcttaccagctaatgtgactgctccataagaatggacttcagtgacacagaagggaccaggccatctagacttaagctttccttgaaagagtttcaaacgagttaaatagcagcacttgatcaccaacctggaaatccttggtgatgatcttcttgtcatggaaaagcttagttctctccttgtagattttagagctctcataagcttctaaacggatcttatcaaggtcactgagttggatcaaccgcttctcctctgtagttttaatgtcaaagttcaggagtttaaccgcccacatatctttgtactcgagctcaacaggtaggtgacatgattttctatagagaaggttgaaaggagttgtaccaatgggggtcttgaaagctgtcatgtaagcccacactgcgtcatcgagctttgcagaccagtctttccttgtaatcccaacagtcttttccataattgtttttatctccctattggagatctcaacatgcccgcttgtctgtgggtgataaggtgtagcgaccttgtgctttactccatgcttcttcaggaggttctcgaaaaccttgatgaaatgctttccaccatcactgattactaccctcggaactccaaatctcgggaggattatggtcttgaacagtttcagcacaactttcgcatcgttagtaggactgaccatagcttcgacccactttcatatgtaatctacggtgaccagtatatacttgttaccgtatgaagatgggaatggacccataaaatcaattccccatacatcaaagatcttcacttctaagatcagattctgaggcatgtcattccttctactgatgttccctcttctctgacacgagtcacattttgagataaattcctaagcatccttaaacattgtcgtccaccaaaaacctgcttgcaggatttttgacactgtcttgaatgttgcataatggccaccataggcagacccatggcagtgcaatttgatgccatcagtttcgtcttctgaaacgcatcacttgtagatcttatctttgcagagtgtgtagagagaaggctcgtcccagtagaaatggttaatgtccttgaagaacttcttcttctcatagcttgacagattcggaggctcttcaccactaaccaagtagttgacgtgatcagcataccacgaaagcttttcttttatggcacatacttgatctnnnnnnnnnnnnnnnnnnnnnnnnnnnnnnnnnnnnnnnnnnnnnnntagctgttcttctggcatggagtcgtcaatagggacctcgtgttcaattctcatcctagacagatgatcagctacaccgttttcaattcccttcttatcaactatctccatgtcaaattcttggagcaataagatccatctcaacagcctaggtttggtattcttcttcggcatttatatgccttagtgatgcatggtctatgtagaccttcaccttagaacccactaggtagcttctaaatttctcaaaaataaaaaccacaactaacaactccttttctatggttgcatatcttgtttgagcttcgtccattgttctgctggcatagtagataacatgaagtttgccatcaatcctttggcccaagacagccccaactgcataatcagatgcatcacacatgatttcaaatgggtggtcccagttgggtgcttgactgataggggcagacaccagtgcttcctttatcaaatggaaagctttaagacaatcttcatcaaagttgaactcagtttccttgcacagcaatctagtgaggggtcgagcaatctttgaaaaatcttttatgaatctcctgtagaacccttcgtggcctagaaagcttttgatatccttaactattttaggggtttgcagctgaatcatgacatcgatttttgccttgtcgacctcaattcctttaccataaatcttatgccctagcacaattccttcatgaaccatgaggtgacacttctcccctttgagtaccaaattggttttctcacacctttctagaaccctgcacaaatttaacaaacatgaggagaaagatgatccatagactgagatcatgaatactccattatctcctcaataaaatccgagaatattgaagtcatgcttctctggaaagtcccaggagcattacataaaccaaaaggcattctcttataggcaaaagttccatagggacagatgaaagtgacttttttcttgatcattagggtgattgcaatttgaaagaaaccactatagccatcaagaaaacagtagtaataaacatgataagctagcctttctaacatttgatcaatgaatggtaaaggaatatgataatttctagttggagcatttagttttctctaattaaagcacattctgtgtccagttatagctctagtgggaatgacttcatctaaatcatttttaactacagtcataccccctttcttaggtacacagtgcacatgagagacacaagtactatcaaagattgggtagatgatgttagcgtcaagtaatttaagaatttcctttttaaccacatctttcaaattcagatttaatctcctctatggttcaacaatagtatatgattcattttcaagatggatcctatgagtgcataaactaggtgaaattcctttaatatcagctaatgaatacccaatttctttcatatactttctaagctcttttaacaactggtttacttgttcagtagttagctcatcattcactatgacaggataagtatcatttagtccaagaaaaacgtaccttagcccttttggtagcggtttcaaatttaccttgggtgccttgagttcaaaccagtcatcggatactaagttggcttcagaggaggggttgtgatcgagtagttcggtcgagtatacatcatgggttgttggtcgagtgatgtggtcaagtatatattccccccttgccttttcacccaaatcttcatattctcctggattctcaactgctttgtgttcatctaaaagcttctggtacaccaaagtctccaaatgtaaatctccttctttgctatcctttgttagannnnnnnnnnnnnnnnnnnnnnnnnctagctcttctagcatttcgtcagccaacatatccatttctttgatccaaaagagttgccttctattgtaggcttcttcatcgcgtctttgacatcaaaggtcattctaaagtctttgccaaggtttacatcaggcttccctctcttgacgtcgatcatagctcctgcagttgctaagaaaggtctccccacaatcaaagggtccttaggctcctcatccatttccaagactacaaagtcagttggtatctctacggctccaatcctgattggtaggttttcgagtagaccatgagggatccttactgacctattagcaaggctaaaggatatattgcaggctttgtattgagtgaaccccaatcttttggcgacagagagcggcatgagactgactgatgctcctaaatcacataggcatctgctgaaagccaatggacctaaagagcatggtagagtgaatga

SEQ ID NO: 32927 - DNA, 1874 bp, Arabidopsis thaliana landsberg
  unsure (1)..(1874): unsure at all n locations
ggcttgcaagttaagggataaaggtttacaaaaaacaagaaaaaggttcatataatgataaattatatagttgtaagtaattctgaataaacttttttataaaaacaaaacacttttgagttgaaaagccaatcatatgggaatgtactaatatactagttgcaaagattttgattgattgatcatcaaagtatcaaacacattagaccaatcatatggtctctgtctaataatgtttagtgaatgttttctttatcagcaatctaatgctccaccacggcactgagctatggagccgttcttaaatgttgcaaagattttgattgatagatcatcgaagtatcaaacacattagaccagtcccttgtccggtatgtaatcattctctttattatcataaaccaaatctttgagaaaccttttctaaccattcactggtctctgtcgaatgttttctttatcagccgtctaatgctccaccacggcactgagctatggacccgctctagatgttataaatttttcaaaccctaaattttattttaactttaggtacaagacatacctcttggtcttacatacacacacatatatacatcaaaatttcggaagaaaatagaaataaataaaagcaaagtaaaaacgagtgctttgatcaatctgctagctttgtctatctctcgcgatcaaacttcatcgccgggttcaagttttgtaacaccgatatgatgttgctaatgagagccagcaagagaatgaagcctatgatcattctcatgagattattattgtaacacccgccctgccttataggacaagacgacatattattcatctaatattgccaaaacgttttctttaaactttacacatgaataaaatattgcacataactccnnnnnnnnnnnnnnnnnnnnnnnnnnnnnnnaaagaagaagtgagtaaagaatactaagtgaggagaatcaactctacccacagaaacatagaacactttctaaaactatacaaccatcatcacaacatataaacttagacacaatcaatcaacctaacatgctttaacttctaacaacacattcataacaatcatcttatccataatagcaaatacatacatatcgttaggtccagtcatctttgtgacgactagaacctcatgagtggaggctggccctcgtggctcagacactccatgcattccgggctcgtcagcctttcttgaccagcatttaacccgtcggcgcatcactgtccacattactagggagaccacgacccatagctcgattctccccagtcatacattcatcatacatacactcataatcatatttaacatacatatacttataatatcatacataacatcacattatcaaacatcatactcaacagccataaagtcatatcatcatgtaaaataatactatgcgatcagatctaagcctacatatcatgcgtcaagaagcataacaaaagaaaatgatatcatgtttcgcaaataccaccctcaccttggcctattgaagatgacaacagaattctccttcttcctcatttagacaaacttactatctcaactgcgaccacatgctcttaagctctaacttagttctccttcaaccaagacctgaatccatgattaatgaaagctcctacaaagctttagctcaactcaagctcaatttcccaataaaacaaaactcgtcatgatttactccatataaatttgtctcggaaacatacttataagtcaggaactaaccgttagaaacgtgatccctgtaacgcccgcgatcctcaataggatcgttggctaggacttggtccgggagaagaaggtggagtctcggacaagtgagaaagagctg

SEQ ID NO: 32928 - DNA, 5387 bp, Arabidopsis thaliana landsberg
gatctggccttggagatcacatggaagaatgatttgttgttatttgaaacagttataatcaattctaaaacagagggaatcggagcttaatcggtatcgaacaaaaatatttaaggtacccaaaaatacctgaaatacaattatatattaacaacatattaaattttcaaagaccaaatagtcaaaaatacttgaaaattatataaaaaaaattaaaataaaaatactcaaaataaccaaaaaaatatccaaatatattcaaaaatacccaacaatacccgaaatatctaaaaatatccaaaacaaaatatccgaatgggatactaaattttaaaatcgcaagattcgaaaccaaacaaaaatttcaaaacacacaaatagatactaaactttaaaaccgaaaaaaaccaaaaatagattaaccgaaccaatataaccgaacactcaaattcccacaaccagaattttgaggaaccctctagtttaaaacatgtttcgtgaatgattctgtttgtgttcttttatctattcttctttaattgggaagttttggcaggtcttctcacatagtaatgaaattttgctctctgtgttgatgtggtagccgatattatcagatcgtataggatggagaaattcgtattatcatatttaccattggttccttatcggtattatgcaagaaatagagggtaaaatgtcatttcatagactgctcttagtactagcactggtataaatgagaacaacaaatgaagcaattttccctctaaaattcacaagttttctcattagtttctttctactccatttcttgattttgtggtgtttcgtctacaaatagaaagacgaaaacagaaattagggtcaaacaaacttggaccaagagtaactttttttgtggaaatttttgtactcggattattcatcatgccgttatgagatttctctgaaactgagctatttttcaggaatctgagtttcgatttcactgagatgttcgactcctactctctttatcccaccggaaaactatctccggtggttgattcgtacgtcaccgccgagctcgacggcgaagagatgagagacgactacgtgtttttagagtccggtttaaaagacaacaaatctcagtttatctcttacgcaaaacgcatcttagtcggagaagacgctgaatcagagagaatcgaagctttaaagcttcttaccgcttgttgcagttacgattccatcaactatgcttcgtcaatcatcaacggcgacgttggatcggtttcatatatcaacgatgtttgctccgatacaggactcttgccgttgcacacagcggctgagtctcacgcgccactgtgtgttgagatgcttctgaaacgacgcgctcgtactgacatgagtagcaaagacgaacgcgctttgattcctctggagatttctctctccaatgtcaggtaatcgtctctttgaatcataagcttgaacctaatgttgactaattttgtttctctgtgtcaattttgcagcgtagatgtgaaatggaaaccaactagtgaatcgattgaagactgatcgttttgcttggtgacaaggttaaacactaattcctttggtttgcttggagcctgattatggaatgtgtggtgagtcatttcttatgtatataggacttaaaggttgtgaaactactcgctgagaagacaaagaaagtggacgttgtggcttatgcatatgccaaggctggtgagatagttccgttgactgcattgttgattgtagcaagtgggaagatcacagaggcaactgtggcattacgggatgatgatgatgattctgtggcaaaacgggagagaaagacgatctatgaggcagttattcaagaggcgttgcgtagtaacagcttgacgcaaagtgtatgcagtgagaaaagaatggttctgcttagagagattgagcttcttcaggtctttggtgctgcagtttttagtgaatctgtgaataagcaaacttcaccacttatctccattatgcaggtgagacttggttactacattggtgttattgtgtgcactccacatgcggattattaagggatgttatgtgattcttgtaggcaggagatgaagctgttcttgagctgtttataaacaccaacttcgatgtcaacgagaaaaatatagaagggaatactgttcttcaatgtagcctgaaaggatcgtctgtgccacataaaccaggtatgatttctctctattagcttaatcatatatataagaaggtcgcatgatgattacttcacaacctgagaatagtacatttgtgtttccagaatcatgaacctacttattgcacacggtgctcgagttaaccaaaagaacaagttgggtttatctgcagttcactttgctgctgcaaatggcaatttatctgcacttgaggtataattcgcttgtttttttgcttctcatcctaagctgaaacaagattatgacatttcagatgaatttgagcctacagattctactagcggccaaccctgacttggttaacatgaagacggtaatcaaagagacgccactattcttcgctgtgaagaataatcatcttgactgcgtggagctgcttcttcgatgtggtgcaattacggagattcataacctacggtgaggcaatactcaaaaccatttgttttatcaaactcattgacatgtatccctttgtgacttaatccgatgtttcatacatgtgcagaaagcagagaccaatagagttaacatagtcacaagatatacgtttcctccttaacacaacaaatatcagttgttgtaagtatttgttcttctctatggccaaaagctttcaagaaatatgcttttcttctaacataaacaaccgtgaaatctgcagtcagcaaagaaacagaacttgcacagtcacagagtgcagcagtttcaccaaatgcaagtgatgaggaaactcttggatttctcgaagattctgttccaacatggctcaaaacatttgtaacctggcttcctctgtacctccgagatacatcagcgaactggaaaggggctggatatcccctgtcatccttcaaagccgattttcgtgctgtttttggaatggatctcgatcacacctctcttgatttccctaagcacatcgactttgtcaaatactttccaagactctgtcaaatgaaagtcgtccccataggtaaacttggagctgcaacacactgggtcatgctacccaccaaatctaagtgttctcagctcaaagaaagacctcctgagccactcattatcactaagaagagctctgttgcttctcccagcaaagctaaagccttatcagttcctccagattttaaagtcatacaaggagcaggtgactctagaaccttcaaagctccaccacaaccaaaagctcaacctcctcctcccttaacagcatcgtacaacaacaaccaacgtcaactaaaacacccggttcttgagacacttacaaagatcagaaacagcacttttgtcttctttctccgtgagtttgacttttatctagtaagcaatcaaatcccactccttactctttcatggtttttatatatctgtttctcacttggtgagtcatatgcatttggcagagctatgagacatttttaaaggaaggcatgtgtttctggtgcaacaagaacatgattcgatgggcaaacttcccttgcagacacaaactttggtgcagctcttgtaaacaacagattactcaatctacttcaggagagaagatccttgaggaagaccatcataagtgtgtggtctgtgatgcaaaagtggaacgtttcgtcttgtctccaccgtttgaatccggtcaccataggattttaagtgatcgccctaacaacgccgaattagccacttctttccttcagttcctcagcataaggaagtaatcatgtttcccactttgtcttcttattcactaaccactttcatctgttaataaaaacttcttctaacgttttgttttacgttactgtagctccatgaacaagatgatatatcgcgggatatagagaaaggaacttaccccaacaacttcaacttcgtgtcgtgataagtggattttactaaattcgtaaatacaaaagatgatggagatgaaagctcttctttaacaacatttagagtacatatggtacatttttgagatccaaaccggtcttacaaattatgatatccgagtttgagttttctcacaatctcgtcaagtcaatgcatcaaaaattgtctccttctacaattgttttctgcataatcaaatttaaaaaatccccatgttaggttaatcctaaaaagctacaacgattataaaacactattaccagtaaaaaggtaagtgtagaagattataggcataacactatcatcatattgtgaatggtgtatatttcttatgttgaatcaatataatacaatgagttatttatacaagatgaacgagggagactctaggtttagctaaatacagaacatgccaaaagcagagtaatcaaatattatgcttttaatgagaatcttgtcatatttcttacacgccccctcaagatggaggagcttgagctaccctcagagcaccaaaggattgtgcctacaagaaagcaacaaattccaaacatgagagttctttacgttttaaaaaatttcagcggtttaattaccgaaacagattttcgattccttgtgggtgcattatgcgaaaacgaaagatcatagagatatttaacaaatttcggtatcaattacagacctatattcaaaagtttgtccaagtactctattctaacgtttgctaacaaattcgtttaaatttagaatattacctctctagtgagttgttgtggtgcttctacgtctacaattgtttcggccaaaagtttttatgaaccactctggtttgtagaaaaccaatatgtatccaattgttaaacccaagacaataccaggtatgaatgctattgcagctgctatccaactaatcacctcttcatcttcttcctctgtttccggcgttttatattgttgatgcgaagctggcgtgtgaatatctctgcaaacttcttcaagagtagagccaaaaagtcccaggttatcttcaaaggaagagcaaggctgcgttagaaactgctggccacctggtactagacctgcaagctggttatgagagaagttcatacacgaaaggaacgagaggttccctatctcttgtgggatttctccataaagcttgttctgggaaacatccaacgactcgagagctgtcaggttccccattgatgaagggatgtggccggtgaaagcattgtttgacaagttgagcacgag

SEQ ID NO: 32929 - DNA, 3343 bp, Arabidopsis thaliana landsberg
gtgttcagtttagtctcaatggctatccatattacgctaatggcttcaatgcttactggctcatgtacgaagctaccgatccgaccacaagatttaagatcactaatgtgtttcaaaacgcaactagtctcggtttgaccatcgcccgcacctgggggttccgcgatggcgccatataccgcgctctccaaacagcccctggttcctacgatgaacaaacgtttcaggtaagtgtgaagccttttcaacctaaatatatgttactttttgttaattagtttgtcttctttttttcaagggtttggattttgtgatagccgaagcaaaaagagtcggtataaaattgataatcccccttgtcaataattgggatgactacggagggaaaaaacaatacgtggattgggctagaagtaaaggcgaagtggtatcttccaatgacgatttctacagaaacccagttattaaagagttctacaagaaccacgtcaaggtaaaaaagatacaaattaaccaaaatctatatatatcttctttaatctctcaagattcgtaacaaaaataaattttacaccataatttatccctttatataagccatgatatctttatctctatttgtagactatgttgaacagagtgaatacatttactaaagttgcatacaaagatgaaccagccagtatggcttggcagcttatgaacgagccacgatgcggtgtggatagaagtggaaaaacccttatggattggattaatgaaatggctccttttgtaaaatcagttgatccaaaccatctcctctctactggtcatgaaggtttctatggtgattcatctcctgaaagaaagaattctctaaatccagtttcagccaacacagttggagctgatttcatagctaatcacaatatcgatgccattgatttcgcatcgatgcactgtggaagtgacttatggtatgaaacaatgcccatctatatataatgataatctgacatattcacactaagttttataatgtacattcatttaggacaaacaatctttcagaaataattttcttgctctttttttgttccttgtttaacacctcagcctaggaaaaacatttattttgcttttataatccacccatgctatcatttgggatttatcttcctagattttcttttgcaaaagtagcaattggtttttttttttttttatccatatcagtatgtaaaactacttattttcatctatcctaatcgtatatatgtcagagctaaaaactctaacatcgattctataaataaaaaatgttattagggtttacaaatcaacaaccactgaactttttggatttatgcacaggtttcaaaggttggatcagaactctcgactggccttcataaaaagatggcttgaaggccacatcgaagatgcgcagaacattcttaaaaaacctgtaattctagcagaatttgggttaggatcggacacaccacgttacactctggctaatagagacggcgtgttcaccacaacatatgacatcatttacgatatctgcgcaaaaaggcggctcggccgcgggagcattgttttgggaggttattagcgaaggcatgagcaactttgcaggtccctcctccattatacttagtgacaaatcgtcgacggttaatattataagtgagcagacacgaaagatgggtttgcttggtgggaccaagggaaagtaaagttaagtcagcaaaatcaaaaactaacatttaaataaggtctttcttctgtaatactttatagcatttataatttgaaacaaaaacaatatgtaagcaatggtaaaaataaaataaaattctgttatatactgaaatgatatccaactttttatacattccaaaactatatttggatgtctcttgatctcaactctgctcataggctatctaacaagtcatcagtaatataggtcttcagtgggcctctgcttattgggcctcattatgataagtaaagttctcgtagtggcttgcctacaaaaatcatatcgaggggaccagataatagcttcacgtttagaagttttataaacggaaaactcatatttcatttttgttattgttgacgtataaacaatccagttcataaaaaaaaaagcgtataaacaatcttaaaattctaaccacttccaaattagtttttctggagcctatttgtgcttttttgtttgttttgctttgtggattttgattgaaaaagagaagaagaaatattataggttttgcgtttgcatttaggttttttgtttgggtttagaaatattgaaactgatgtcttaactcttaacatagactccatccgtcccatgaaaatagattttttagaaatttcacattctttaaaaaataatgtataataacaattttaacctcttaataatatttaaaaataattataatcatttatctaattatttaataagggtaaaacggataaacagttttaaaatttacattggaaatataaaacttcaatctttgtgggacaaaattttttcctagaaaatttatttttgtaggacggaaggagtatatttagcgctattgtctaacgttgatatagtttggcattttcttttttttttggatatgctgtatgcattagcgttaattgtttgcttttgcattttcacatttaatttgaatgtgtttgcattcaagataattaacattatgcgtttttttttttttctttttcaacattggcatttagctttgtatctgtgtttgagttatcggttttctttgtgttggcttcaatggttttgtatgtatgttttctatagactctgcatttagcgtttaaacgaaaccttatattttctgtgtttatatttaacatttgtgtttgtgttaaacatgtaatttctgtttagcatttttaaaatttaaatagttaaactataatatactagaatgtaatataatatacggcacctaataatacgataaattaatattaattgttgaaacaatgtttttgaatatttccccgaatttcattttagaatatattttcttgtttttgttcaatttagaagaaattcaaactttaatagatagcaaataaattttgacaaaatgacatgtatcttttctttagaagaaaattcaaacgattaaaattgagaattaaatggaaattttaaatgctgaacgaaataagggttttctttcttgtttttggcaaaggatatgggttttcttatactctatagaatataagaagtggaacatcaaaattggtaggatatataagttgaaaagtcaaaaataatctaccaatcactttt

SEQ ID NO: 32930 - DNA, 833 bp, Arabidopsis thaliana landsberg
acttctgttcattaaaggtaagaactttaccacctactgccgtgagtttcgagccgtctgtgacagtttttgttccattggaaaaccagttgatgagcatatgaagatatttacctttcttaatgggttgggccgtgaatatgacccaataactacagtccttcaaagctctatgtctcgtattccatctcccacctttaacgatgtcgttttggaggtctctggttttgattcgaagttgcagtcgtatgagacttcttccgatgtatcgcctcatcttgcttttcaaactcaaaaaggcggttactttggctctggtcagagaggtcgtggtagcaatcgagggcgaggaggctactcaactcgtggtagaggcttctctcaacaagtaaactcctctggctggaatccaaatcaatcgggtaactcctctaactctcgacccgtgtgtcaaatctgtggtcgtactggccatgttgctcttaaatgctggaatcggtttgataactcttatcaaagtgaagatgttccccaagctctcgctgcacttcatgtctcagatactagtggtcgagaatggctcactgattctggctctactgcccacatcactccaaccacgacttctcttcagactgcgactccatataatggacctgagaatgtaatggttgcagatggaagcttccaacccattactcacgttggttctactactctcacaacctccacaggtagtgttcctcttaatgatgttctagtgtgtccgaccatggagaaatctcttaaatcggtctcaaaactgtgtgacgactatccttgtggggtcttct

SEQ ID NO: 32931 - DNA, 3800 bp, Arabidopsis thaliana landsberg
taaatatgatttcaaattagccccttaagttgtactgataatacaatttacccttaaacatttgacttgtgctatattgtttagatggaacgcatactgtccacaagtaattccggccaataaattgtgaatttaagtctgaccgtacgtggagacacatacgcaaagatggatatttttgttgtcaacaggtggaaatttaagcagctattatttgttcatcgaattaacttacgtacgtatatgatgacgacattaacattgcagtttattctgtgttaggtcggggtttgtgataggaccaacgttctaatgagtgattaaaaattactaaatcatagataaactatcactaaactaattgctaactgaggtttagcagaaattcaatgaattaaaaataattattttggttttaacaatcattaaagtcgttgtagtatagtggtaagtattcccgcctgtcacgcgggtgacccgggttcgatccccggcaacggcgtttatttttatttcccttttttgtaatgggccgtttctgtacctgaaaagaagtctttataagcccataaagacgaactaataggcccaaatttgtgatcttaatatattatggactgtgttttctttttcgtaagctcttcaattcttaactgtttacacgcaaaagtgccatagtggttaacacttaaaccaaataaagacacctgaaatgttggaaaatatatgactctcagcagtcagcatcacgtaatcgtcgttgagccgcgctatctattttgtgcatttttctttaatatgtactcataaggtttttttttttgcatgagcataagcagcgataagttgatacatgagaatgtttacgtgtggacggaagtaaattgttttgcacttgaaaagataaattttatgagtcaatgccattaaacattcttattacaagtttattttctcgaagttgcatctgaataacattgtagtattgattacgagattgaatttatctcgaatagtgagtctaatgagtgtacacatatcggattttggatgggaccataaaacacgacgtggtatttgataattataatttattaagtactgtactgtctgtctgtgttccgaagataatgttaaacaaataacaccacaatctcttatagaaagacaaacctgtcctcataacctaaaccaaatttttcattcaccttagggtgaatatgtcatataaggtaataaagccaatcttgtaataacatatagaattatagatatgattctataattaattaacccaaacaataagtagatatctatattaaaaatcaaatcaaatctagtaatcggaaaaaaaacgaaccgtccctttctccactcaagtagttaaattggttctgtgaaggaagataaatccgctgttcctctcctctctctctctcttccggttttcacttttgttcgttctctggcggccgatcccgtcgctcgctaccttttaagatattttttttatctaatgaacctgaaattgtaattaggcatataattggggattatttgctgaatttctcatttctagatcgaaaaaagcgaataattcgttttcatttgattcctgcctaatcttagggtatgtcctcccccttgatctgtatagtttttttgatgttgtgatttgttagggtttgcgaattaattgtttcagattgggttttgctcctttttccatttttgtctgctttagtttataggttaggtttccggatttggtcgtggagtttctaattttgctttgaattggattattagcccattacgtttcctaggcatagacattgatcaattgcacggtgaatgttttaactttttaagctgttttgatttccttaaactgttcactgattactatttatgtgcagtttatgcccccatttttgagtagggatgtagaatttcttgatttaaaagctttaataatatggtttgtgtgtttgtatatgcaggtgtctttatttatctaccaaaagaatgtctaattatcgaggagatgatgctgagtacatggaagacgtagatgatgagatggaagatgttgaagatgatatggatgaggagtttcgtggcgatgatcttggtgcttcagattctgacgttgaagaatttgactattcggttagtatgatgagatggaacatgttttgttggctatgctactttctaatctcattttacagctttttttttttttaaactatgttgtaatttcgtgttatatggtttcagaacaataaagtagctgataccacggctgagcaagctcggaaagggaaagatatccaggggattccgtgggacagacttaatatttctagagagaaatacagacaaactagattagaacagtataagaattatgaaaatgtccctaattctggagaatcatcagaaaaggtaagggttatatcctctgatcctctatttgtattagtgttcaggttagctcagtcacctaatacatcattttgtatggattcaggtttgcaaggtcacacagaaaggaggactattttatgacttctggcggaattcacgatctattaagtctactatactacatttccaggtttttttttttttaatattgagagctcactaacttggactagttgatagtctttctctttctgattggatttatttattgtgtttggcgtgattgtggacataacatttgtctactgctaaaaacctccatctgatcaagaatttttattggtgtcatagctgagaaatttggtatgggcaacttctaagcacgacgtgtatcttatgtcaaattttttggtttcacattattcttctctaacgtctggaaagcatgaagttctcaatgtccgtggtcatgttgcgccatctgaggttggtttttgtcagaatgtagaagttctacattactgtaactctatgtggtgctgaactgcttttgctgcatttagaaacatcctggaagtttacttgaaggatttacgcagactcaagtaagtacacttgcagtaaaagatgactttctggttgctggcgggtttcaaggagaacttatttgcaaggtaactctagatttatctatcacggattaatcacattatcgacttgcaattctgttctatgagattcatctgtttccactttggttcagcatcttgatagaccgggtgtcagcttttgctctcgtatgacttatgatgataatgctataaccaatgctattgagatctacaacaaacccaggtatttgcatgtcttttgcttgaggttgtatttgccaacttgtctcttctaactgattttttgatgtctgtctgtctgcagtggggcacttcattttactgcgtcgaataatgattgtggagtcagagattttgatatggagagataccagcttgttaaccagtttcgctttccatggccggtgaatgtaagtccctactttttccttgatttttttttttgtttttgttttggtataagttgatctgtagtgcttgtagcagtaagtttcagttacaaatacgttttgtaatctgatatcttcttttacattacgaaattgtaaatgtaattgcaccccaaattatttaacgaaagggggtttttgtattgatagcacacatctttaagtcctgatggtaaattgttgacgattgtgggagacaaccctgaaagccttctggtagaccccaacactggaaaggtacagaaacgatctctgtgttacgtatccctgaataaatatgctttct

SEQ ID NO: 32932 - DNA, 345 bp, Arabidopsis thaliana landsberg
gaagtaagacgatcaagattatgaaatggttttatgggctcagtagtatttcttaaccaaacagtgatctagaagacatatttctgcaaactaaagattagaacacttgtaaggggagtgggttttgtgtgaactgaaatatttggtctttttctccctgatgttgttttcaggttcaaccgaaggaaccatcgatttcggatcatggccagagctcttatcgcgcatctacaaattgtggaggaatgagtattgcagtggaaaaggtaccatgggccatctgggccttaccaagccatacagatctacgatcctttcaagggaacttggctattttaagatcaa

SEQ ID NO: 32933 - DNA, 1664 bp, Arabidopsis thaliana landsberg
tctctgtcaccggcttaatgcaggagctgttggtgcagtgtctaattatatggtcaagtctgttccgcaggtatgcatctgatttctgaacctcacactaataaccaatcacttgcaaacttgtcactaggtttctcagcttaagtaggagagaatgatacagcagtctagctttacggattgatttggtttttgttggtaatctggtttataatgtctgagtattcgacttggtagggggcggcaacaacttgctatgtggcattgaatccacaggttgcaggagttacaggggaatacttctcagatagcaacattgctaaaccaatagaacttgtcaaagatacagaattggcgaagaagctttgggatttcagcactaagcttactgattcgcaatgatgattaccgttgcagtagatagttgttcagggaacctttactttcgatgtctctattgtgacaatacttatttcagtctttattgatacgaaataaaatgtaaaaaacaaatctgaaatcatttccatttcaattctgcaaaaagatggtttatccaatttcagcctaaacaaaagtgttacttatctgttttctcattgactcaaaacagttgtccagtgaactaactcgtagacataagtaagtaagaaaccaaacagaaagagcttaaaacatcttctgattttggagttaactcatgttattggtgggagctattttaaggacatttgttaaatcctttaaaaagaaagttgttaataaatccccatcatttgactttggagatgcactattctacacttcaacctcaacctcgtgagacatgaggattaaagtaaagtaatcacatttctgtcacatatgaacaaataaagttatttaaatcagaataaaagcgaaatcgcttgaccactcaagaagagaaaacgctaacaagtcccatagtttgtgtttattggacttctttcctctcatcttctccagcagaaacaaaaaaagctgaaagatgtggttttttggatcgaaaggagcatctggattctcgtctcgttcaactgcagaggaagtcacacatggtgttgatgggactggtctcactgccatagtcacaggttttcttctatcaacactttcatgccattttgcgacatggggttgtctaaagttgtagactttttttcttataatttccagaactttttgtcctctctgattctgtcttcgaattgatttcatatctagtaaaaagacttgacttttattgtttagacaattggaatttgaggtttttatcatcagggtctgtctttgattcggtcaactctaataaatattgaggtcatcactgtttcttattcgaaagttgtcttttttttcaagaatttggattgaaaattccatgtttggtgaattttaaagtacaacaagtttgggaccatatgtataattgcatgttaagggaaaataactcgtctctgtttcagctgcttgtaagttgtgttatatatcacaactctatacaattcctggccaagggaagaaaaaatatagatttgcttgtagaaatcgtttctatattttgatcatattacattagggcctgaaacaagaacaatggagtccttgaattgatagacccctgttaggtgacactaaagact

SEQ ID NO: 32934 - DNA, 6038 bp, Arabidopsis thaliana landsberg
gattttacacgagtatagaactgaacaagttcattctgaaatcatgcaaaggcatccaagtcaactatgttccacaatagagcatcattcataaacgattcacaagagaacacgattcacaagtcaactatgttacacaacccataacaaacatgattcacaacaaccatcattcacaacaaatccacaacaagcatgatttataacagaacacgagtttatcttcataggtagagaacacgagaacaaattagaggaagagaacataccacttggtttttgaccggggaatgggagacaatacacacgtccactgttccctgtttagcactaagagtatcgcttgcagagccaccaccgagtcttcttgtagctttggcaacgtcccatgagattcctcttggaagttgttcacattttatattgggtttcggcttccatattttgtagcccaacaaagcaaagggtagtcgctaagtagtctcatttttgtcaccttctatattggttttgggcttcgatatttggtagcccaacaaaacaaagggtagtagcttaatagtcgcatttttgtcacctttcttaatgggtttgggcttcaaaatttaaaagcccaacaaattatattcgtgtcgctaagtagtcgcatttttgtcacctttattaatgagtttgggcttcgaaatttaaaagcccaacatatcatattcatgtcgctaagtagtcacatttttgtcacctatattaatgggtttgggcttcgaaatataaaagctcaacaaatcaaattggtgtcggtaagtagtcgcatttttgtcaacaaatcttacttttgtcgcgcattagtcgcataagagtcaccttttacctttgaaattaaaataattctacatatgaaataaatatgcatatatcataaatttattcaaatatttattcaaataattatacatatattcacacatttatacatcttcatcttctacttcatcttcgtccgaggacgataaattacatcggaattcgtcttctggttcagcatccccgacatcgtaatcaaggattattgggtttaagctttctaccggattttctagtacaagattttcaattgtagtgagtaaaacagcatcatcattttctgtttgcaaaagagtcggatcattgttttcatattctccagaaatgttttctctcgggttgacttttaaaacattgagccaaatgttctttggtttcttcgtatatgagtacggaatataacaaacttgatctgcttgagatcctgtaaacacaagttatacatatatatcaaacaagagtattaataattaaaagagaaatataattgacctcttaaaaattacgtaccaagaataaatggctcgtatttattatacttcctcgtagatagaacgtcaacaacgccaccgtggcttcgccgagtgcctctctcaatctttgggtcataccacttacacttaaaaagtgtgatcctcaaattgacaatgccctcatactcgagttctatgatatcagttaaggtaccgtagaaatccgcttcatcagatgaatcagcgtaattttcacctttaacacataccccatagttacatgtctttcgtccagcgccgtgggtttgcgtatgaaacatatatcctcttgtgaaatacattgcccaagttttaaccttgtcaaaggtccttgcacaatctcttgaacccaagtaggaaatggagaattagtgttccaatatgttacctacataatatagataaacaatatcaatatgatcttaaattaaatcacgctagctacaagaaaacagacaaatagttacattcatgaaccaaaattactgtagacttacatattctttaacccatagatgatattcttctgctcttctgacgtagagttctttttcggacaatgatggatatttcgcagaaagataatcctcgaacatactgtctcaacaaacgaagacaaataaatcaaagtgatcttatctatgaataaatcaaagtgattaaaaatacctctcaaatggtttaaaatattcacaatttcttaaaacatatgcatgtgcattttggtaatctttctctgaaagccattctacatgcattgcaccacttggacggccgacctgcataaatatgttaggtactccagggacatgatatacaggaacttcaccttcatcgaatcttgttaacctgccacatataattgaattaagatcgaagtagtatagcaacatgttaaataaataaaggtatttaccttgattttgtttgtatatgatcggcaaagtagtgctctgaaaaataagcaatctcgtcattgatatatgactcaacaattgagcctgcagcatatcttttgttctttgcttttcctttcaactttttgaaaaacctctcaaatggatacatccacctatattggacagggccacccaattcagcttcgtatgggagatggataggtagatgttccataacatcgaaaaatgatggtggaaagatcttttccaagttacagatgattaaaactatgttctgtttgagaatttgaacgcgacttgtctgtaaagttctcgaacataggtcccggaaaaatgctccaattcctaaaatatatgtggaagttaaataattacataaaaaaatttctccataaaaaatagttagaattgtacctgataatgcaaggtggacattccggtcaagaagttcagcaaagataaatggaagtagtcgctccataaaaacatgacaatcatgactcttcatgcctgaaaacttaccattctccaaatctacacaactagccaaatctgaagaataaccatctggaaatctaacatcatgtttcacacattgaaataaactctgtttggcttcttctgtcaatttatacggtggaaaaggagctttacccgtactatcaatatgtaagcctgggcgagaacaatatttttcaatatccaatcttgacatgatattgtcttttgatttacccttaacacccaagagagtgttcatgatgttgtcaagaaaatttttctctgtatgcataacatcaatattatgtcgaagattgaggtccttccagtaagacaactcccacaatatgctttctttgtgccaattatgttccttcccatagcctcgcatcttcttttcatgaccgttcccaccaacatccttcgttttgggtggatttacactagccaaccgctcgtaataaacttgctcccctgtcaaagattcgggtggatactcgctagaagcgtctcttcctttgagaaagtcttttttgttcctacgagatggatgaccatgaggaagaaatctacggtgacaatcaaaccaacatgtcttccgtccattgggtagataaaaagactttgtactttccatgcaaactggacaagacaatttaccatgagtagtccatcctgataacatgctatacgcgggaaagtcgctaatcgtccagagtagtactgcttttagattaaaattctgactcaatgaaacatcgtacgcatcgactccagtacaccacaactcttttagctcctcaataagaggttggaggaagacatcaagactagctcgaggatgatttggtccagaattcagaatggtaagaaataagtactctgtattcatgcacataccagggggtaaattatatggagttaggatcacaggccacaacgaatgattacgagacatgccaaatggattgaacccatcagtacacaacccgagataaacgttacggggttcttcagcaaaccggggatgtaactcttggaaatatctccactctgccgcatctgaaggatgattcatttctccctcctttgattggtgctcagcatgccatcgcatagccgcagctgtcttatggctctgatacattctcttcaaccggtctgcaataggtagataccacatacgactatatggtactttggttcttcgacggtcgtccttaggcttccatctttgtgcgccacaaaatcgacattgatcttctttttcgtcttctttccaaaataacatacaattgtttttgcaaacatcaatcgtatgatatggaaatcctaaattgcgcattaacttctcggtctggtaatgtgaagtggtagcctggtttccttctggtaaaaaatctgtaaacatctcgcaaacggagtccaccaacttttcactcatattatactccgctttgttgtgcatgagtcgagatgctaatgataactgcgactgcccttcacgacaaccatcgtacaatggattatttgcaccttctaacaagtcgtagaacttatttgaatggttacggaccggttcttccacattctgataattatcatcatgatgatagttatcatcatgatgatagttatcatcataccccacgttaaaattaaatgcatcgttcaccatatccacatatggatcttctacaatattacccacttcttcatgattttcactaaaatatgtcctatacgtgtaactcgttcctatatccatattcatttcttctccatgcttataccaaacataataatcaggcataaatccttgactaaacaaatgagtactaactcttctactcgagatgatgtgtttttcattcttgcatacactacaaggacaatgaaaatttcctcgactactctatactattggctgactattagcgaatgtcatgaattgctcaacccatgcgacatattcgctgataaattccccgtcacttcatcaaatctcttgtacatccaatcttgatagaaaccgccactaccgccgtaattgtagttttccaccattatacaataaactaactaaaatttttttttataataaatcgtttttttcttcgatgttgttgttgttttgatttgttggtgaaagaagagtttggtgaatatttattatataggcgaatatttatgaataatttacgactacaactaattaattaggtgtacctacttgccaatgtgaaacacgttttccaactactttttgcgacgcctatgcgacacttatacgactacaggctgattaagaattgtagtcgtcaattagtcgctaaattagcgactaaattatttagtcggtaagatagtcgtcaattagcaactacgtaacaactaacatgtcccttcaataatagaatcgtcaaatagtcgttaatggacaactatggtccgacaaattgagttagtcgtaaaataacgactatgttactactaattttcgtgttgtcgcattgtagtcgtcaaaccgttgccaaatggtcgcttgataatacgactatgttgattgtcgctcttcgtaatcgtcttttacctgttttcttgtagtgataggttaatgcgtcggaggaagaagatgatagtagagtgataggcggctagggtttcaaggaaaggatgatatgtatacaaattactattttgtctttctaatttgtatgccaaccacgttgttagaggtttggtgaatgtgcatgaatggtcgataattcgaaatgattgaaatgaccacatggtcatagtttggtggatgtgtgttgatggtcgataattcaaaatgattgtagtttgataatactatccataaaacaagtgttacgttatgtaaaagatgttgataaaatatgatgaaacaagttttataattatttttaggtttatggtcatatgggtttagggtttagggtatatgtatatagtttagggttaatgtctatgggttaaagtttagggttcagggtttagggtttaaggtttagagtttagggttaagggatttatgcttaacatttatggccaatggcttagtgtttatggtagatggtgtagggtatatgtatatggttaacgacttactgtctatgtgttaaagtttagggtttacggtttaaatttaggaattagggtttaatgttatagagtttagtatctaatatttatggtttaaatttaggagttagggttt

SEQ ID NO: 32935 - DNA, 3954 bp, Arabidopsis thaliana landsberg
tgctacatgttaagtttagtgaagtactgaaaaggattattgatttagggtctctaagtaaattaaaggatggtgaagtactcaaaagtaattcatatatttttgggagaacgattctttaaacgctgtcgtttggctgttgttccaaacgtcaccgttggtaattgtgataaaaaacgctgtcgtataatctcgctctcgaggtgataagagagtcgacggcaacactcagcgacctcacttaacgaacagagacgagaaatgtctctgaaaccttatttctctctactacacgtatcaccaactaatgcaaaactttccaacttcttaatcgctcaacaaccctccggtgaccggaaaactaccccggccgaggagttttctccgctggttgagaaattcaaccgacggtttcttctgggtgtaggatcatcctctgttcttgcgattggtgcgaatttcggaggaaccacgagttttatactcggtttatcgccagagataggccggaatctaaaactcgacgtcatttatccgattgggggatatagcagatgtatcgataccggtgaaggattcggttagtaagtcatcgaatttctccggtttaagatattaccaattcgaagataaatcaaatgattgtcaattttgtaatcacagaatttatatatccggctacgtgggttggagaccagacgcttttgtatagagcggcggagaagtcagaacgggagaattcgctagaccttcctccggcaagaaacagtcgccggaaaaacgttaatgaaccggttgttgcatttggaccgcccggttcgaccggtgagcttaatgtcagtgttatcgtttcccctgtctcacccagtttctcgtaagtaaaaacatcatcttatagtaaaaaacattcattgttctgtggtaacgactaggtgatatggtttactagatcttcaaacaaacctaattgatcatgagaaaaaattgtaagactagatcgattgttttagtggtctaactagtttcaaagttgtaattttcaagattgtttattacactactacatctagtagactaatacatgtttgaactgaaacaatatatctgtgtgaatacataattctctttactactttgaatctttcacataagttagtttagacatctgattccctaggattgttaagatatattaaagtctgtagcacctagatcgattttcgagcatcgatgttttcttctatctataagattaagacgaacagttgtcattttatttcaagaatcggaatctgttttatgaaagtgtttattgtttatgataatagaatcgaagcgtttggagggccaaaagaagttggagaagcaatagtaagaacagtgacaggatctggtcaacgaacagatttgaaaggaactttgctagaatcaagtatcagacaagattcagagagaaacttgaagtactatgagttagagtttaaagtcgaatcacctcttttccggcggcataatgtagccgtttgttgcgctcacagtggccggctttatacactgaacgctcaagcgccagagtcagcttggtcagaggtgaaatcggaaacttacactactgctaaatcgttcaatatcatttcttgaatgtaaaggatcggaaaacaaattgtaaaaacccaaaaagaaacaagatactacaaagcaaggcttattttttcttcatattgatagggtctctttgtttttcttaattaattcatactattgagttgaatacgatgattaaggtcaaaaatacgaagtgacaataaaaagagaaaagtttcgagcataatcatgtcttcttgatcgtgccgctcgctatataaacactgcaccaagcaattactataaatttttttatcaattaaatattaaattttgagaatatatttctatattaatgaaaaataatttaaagtaatcataagtttgtatctttgaacaaacgaaactagaaaacgcctatctctgctcattggcttctccatctccgatcaaatccgcggtcgtagtcagagagagagagacaaatggctatgcctagggcaacctctggtcccgcttacccggagaggttctacgctgctgcatcttatgtcggtctcgacggatctgattcgtcggcgaaaaacgtcatctcgaaattccccgatgatactgcactacttctctatgcgctataccagcaggtcagcaacttccatttctgatctcttccatttttgatctcacgattgtggattttgcttttgaatttcacgagatctggtcgtttgggtgttgatttatttgttttagtcaccgattcatattcctctcgccgaattcttatcggatgttagaaatgacgcactttacttgtctgatttagctgtgcttgatcgttattttcgatcctggttagtatattcgaaatgctcagtaaaatgttgcccgagatctcatcatcgatttgattggaaacatgattgaaacagttttattttattagatctcagggagcgttggtccgtcagtcgtagtttacttggatctacattgattctataacttgattcgtagtcaagattagtatagtcgtagatgaatttcttacgagggggtgaaactggctgttccttaacatagagagaaacgttctcttgtactaattataatgtcgagtactcgagtctactagtttttatccctgggatagataggctcagtgctgatgatctcttggatttaacattgaaacaggctactgtaggaccatgcaacactccgaaacctagtgcctggagaccagtggagcaaagcaaatggaaaaggttagattgggtgctgtgttttgcccatacttatctacgattaacatttatgcatttatcactggttcttttatttctattcttgcgtttgtgaatcatacttgtaggaatatgcttcatggtagatattaataggagatgtcttagatttcatcaattactagagcgtaagaatccaaatgcattagggaaacgggaaaggagtactttagtgtaagctactagaggaaaatagaaatgcaggatttgaatgtgcatccctggggaaaaaaactaagtgcttacctatgttttggaccttttggtctacattactgaggttgttaatgcttacgatcctttttaaaggaaaataagactttaaagttgtcctcgttcctttcctgaaagatacacatgctactgttctgaagcatttcatatttacttagttggcaggggctcggaaccatgccctccattgaggcaatgcgtctctttgtgaaaattctggaggtaaccgacaaagaggtctatgggttttttttttttaaagacttaactggagcataaccttgctttcttctctattgctcaatttttatcaggaagatgatcctggttggtattcgagggcatctaatgatattccagatcctgttgtagatgtccaaattaatgtaagttttggtatcccatgggattcgatgtccaaaccatgggaactattacacatatcttttgcttgattgaagaaaattatttgagttttttagtgcattcatctttgtagcagagagcaaaagatgagcctgttgttgagaatgggagcacatttagtgagacaaaaacaatttctacggagaatggacgtttggctgaaacccaagataaagatgtagtctcagaagactcaaatactgtttctgtatataaccagtggactgcaccccaaacatcaggtcagcgtccaaaagctcgttacgaggtaatttattttttctctctcttttgaagaataagtaaaaggttatgtcattcatgtatcttctgtatttttctaagtcttgtttattaaaattgaaaacagcatggcgcagcagttattcaagataagatgtat

SEQ ID NO: 32936 - DNA, 824 bp, Arabidopsis thaliana landsberg
tcctatgcgcgtgtgaaagccacgatccaatcacgaagctaaattcttcagcttcgttgtataatatattgttaatcacgaccgtcatattcctattataccctttgacagcgacacactctctctccaaccaaacatatctggaaactacaaccacgcgcactcataagcgcgtgagacttctatttttctcttttattcactgacaataatcgttacaactttatctgcttatcaaataaaagctaaataataataaaaatatttttatatctgaatacttcccaaatacagagaagccatttcaacagaaaatcgacacgtgtccatcagaggttcgtcttctgagggtaaaattgtaaactcacgttgtctccttcatcatctctctcttttaagaatttccagagcgagagagtgagaaagagagagagtttaaggtgcttttttagtcgttctcgtcgagagacttatttatacacgaaaaaggaagaagaagactgttgaaagcgagagagagagagagagagagagagagagagagagagagagatggaggatatacaggaggaagagaacggtacggacgaggaggttctgggatcgagcttgaccatggagaaagtggccgcagcgaatcagtacatcgagaatcactacaaagctcagaacaagaacattcaagagaggaaagagaggtaccaatctcgcttcttcttcttctttctttcactaagagagacttgagatttagaattttgttttgatttcgagacattgtttagggtttaattagttgtttgagctagattctctcttaatct

SEQ ID NO: 32937 - DNA, 730 bp, Arabidopsis thaliana landsberg
gcaatgggaaaccggggccaaaagaccaaaaaaccacaccccagcctcatctatatccttacatatctaccaaatccaatagcaccaatatataaatcaacttcaataaccacagtgacacatcaaatgacagggaaataatactacagcggaagcgacaaagtaaagagttaaagagaaactcaccacatccaaagacctctcactatatattagagaaaacgactgatacaccccctcgggacgaggatacccctgaaaaataagctacaagagaaccaccatcgctagaagtataagaatatgaaactagataggtacggcgtaactgggcatcggggaactaatgaaatcgttgcatgacaagttctttgaatgaataccatagccctcatgaactcgttactaagtatcgcagtgccagctcaacggagactcatcatcacatcatccacacatgaacttactgtgcgtggtccagatatgatcctagaaacatggctcaactccagatgcttcttctcttttccagagaaccatatcagaacacttctatactgaaagtgacaggccactctttcttacaatagattacacaataaatgtcatgacccgtccatgaataaatgataatggaatatggcggcacttaggtggactattactgaagagaacacgcttacaagacactctaatatgaaaatgtaccacacatgacttacattataaa

SEQ ID NO: 32938 - DNA, 851 bp, Arabidopsis thaliana landsberg
ataataaaaattcaacttaatattcaaaacataaaattacaaaactaaagaaaggttttaaatttaaacatctttggaatttgatgaatgatatgtgagtattagtattcttgtagtatttttatttgtgtaatattatgtgtgaatgcaattgtattgtcattgtgttactcttttgtaattaattttgtttaacatactattttgttgtgtaatatttgtttttaatactgtgtaatattttaaaattttagttaatagtataataatagaaaatattagctttagtgtgatatttagttttatggttggagaagaaaaatattttaatgttgaatctacaccaaatatagtgttatttcaatactaaaatggtgttatggtgagtaagaattggggttaaaatgtttgtgttaatgttgttgtgttgcttgctatttaaattcggacttaatgttatgcatatacatattctaagaaaaataaaaaataaaataaaatttgtcagtttgtaagttgtcactgctacatttactaaaatctgcctgatactcctgtctctcattctcagccgctcagtgtgacccatcttttgtacagagtacgtcccagacttttacaagtggacattcttgcttttgttattcaataatttccattaacacaaacgcaaaaaggctgattcacttttaatgaactacaacttcttaaccattactaataccatgaaagaaaccttattcattattgaacaacaataatgtaaatgtatgcttgtgatattgtaatctcgaataatctgccaatgctaaaagcatttaacatatcacctgtttagtttgctttaatcg

SEQ ID NO: 32939 - DNA, 1978 bp, Arabidopsis thaliana landsberg
acgttaacgggatcaatcatacattgctttgcattagaaaaatttagttttttgaaaagttgataatgttggtctttgataactagtacaagtagtacaacaaaatattaattgtatgtttgtgtataaaatttcaggaacttgatgatgaggaacaacctatgcagccagagaggatgttttttagtccaagcgaatacgtaaagacgtgtaagatagggacgagatgcactgtgcagcagacagtgaagtatttggaggagtttaaagaatatttgccatggttcaaggcgcatccacagtttaggcatgtattccacatgcctgaggagaaaaaccacatgacccaaggcttgtggatgcttttgcttcgcacagcacagacagagatggatagggagtgctggtttgttgttaatggagtgcctattaggtactccattaaagagcatgcgttgttatgtggtttcgattgtcatgattacccggaggagttgcagccgagtatgaagatcgtggatgcagatttgaagtttgccaaaaagatctttaagaaggtctctgggattaagatcgttgatgttgagaaaaagttggatgaaatgaagaaatgtggagaaaagaagaagacagataggaagaagttggctatcttgctttttttgtgcaaggtgatcgcgaccaagtcaaaggctgatggaaacattgacaaattctttctgaagattgttgatgatgtgcgtgcatgtgagacattcccatggggtcgtttcacatttgatggatgtatggaaggtatcaagtcggtaatgaaatcgatgaaagggaaagcaaaattgcagacttgtttctccggatttattcttccattagaggtaacaatttagagtaatatccattataagatgcattagtagacttaaaaataatactaatgtgacttttactttgaatgtgtagattttgccttttgaggctattccacatttgggacaaaagtttagagaccatgtaaggttcgagaatgagtgtccgagaatgtgtaaggccaaattctctagtagtgtcatgaaagggttctcgttgcaagagataaacgaggagcttgcaagtgtaaaggtacgagttgtcccagttatctctagagttgtcccagttatctatgagctagaatatgattatttttgatgtgtgaatttgtataggttatctctagcgttttggaaccggattacgaggagaaagatttgttgaggcggattgtagatggtgatcatgttgatgatgggatagggtttgttgatccggttgtcgatagctggagaaaccgtttgatcaaagagaggaagagaatcttctggaaggatatgtttgaagcggatgtccgggcccgaagcggcggcgagcaaatggaggaagagaatgttcagagacatgttccgggcagcagtagctcttgctctttgaaggaacctattgatgaaggctttaagagagtgatggcgatgttggcggaacacaatgaaagccttgtgaccattgaaaggagacaagccggtgagagtgtgcctccatttgagaagaaggtccattccgatgtgaataaggagaaggaagatggtggtaagaatgagcccgaggctgttgagactgatgctgttgagaccaatggtgttgagaccggtggtgtggagacccatgatgttgagaccgatggtgttgagcctgagggttttgtgcccgagtttgttgaacctgagggttttgtgcccgagtttgttgagcccgatgatccgagttctgccatggttctttatgttccgcatgttccaatcggtatggtttgttttgtcaatctttgatctttttaatatatgatgtttgtaggttatgaatggttgtcttttcttttgaaggtgatgttcaagttgaaagggaaactgaagcggataaaggcgatgatgagacgccgaagaag

SEQ ID NO: 32940 - DNA, 3451 bp, Arabidopsis thaliana landsberg
aattttttcgttgattgttaggagttccccattcaactaaattacaatcaaaggagaatggtacaagtattgtacgtgacaacacgctcaatgacgaagaaattgatcattctaaagttatatattctgatagtggtataatgttaatcataattttagaatgaccacctttatagattatgtatgaaattgttttatttgtgctactttcatgtttacttctgtctacagataggtcagaggaattcgatgatcatatatttgactgtagtagtcaagaagagtatgagttagacaaagattcaccgaccgatgaagttgttggaccaaataatatgattgacatgaatgatttgttaagaaggaatttaaacaaggagtttgctgcagcagcttcgaacaaagaacatggcagttcaacaactagcggtgataattttaaaacatatattatatatattagaaacaatgaaaaacaacatgtattgatgtttgttcgattcaagttatcatgacgaaggtgatgcgaatcacacatgtgtgcattgtggtgcaattttctggtatggtgaaagactaaatagaagaaggaggagtagcaatccggtttatacaggatgttgtatgcaaggacagattgttctacctatgttaaaagaatcacctgaatatatgtggtggttgcttacaggcgaccatgaagatgctaaaaattttagagcaaatatcagaccatacaacatgttgttttcattcacgtctattgggggcaaggtagatcgctaagtaagaaagggacgtggtccatctatgtttgctctacaaagagaaaactatcacttgataggcgcgttgaaaccaaaatctggcgattatgcaaaatttcaacagttttatatcatggacactgataataaatttgaccatcgaattgaagttatgaggtaagtgatagttttataaataaactttatgaaaaaaatttattttagaagcagctaatacattgtatttattaaatgtcttttgtaattatacaaaattgcagcaaaggtaataatggtggaatggaaggtgggaaacaaaagttcaagaaagaaacagtttcagctttgctaaagatgttggaaaatataaaccctcatgttgcaaatttaggattgcccgtgatagattcaacatagagaaagaaaagacaaattttcatatgaggattatatctaaccgcgagacagatggaagctgaagttgctgcattgatacctggagatttcgacgacaatctagataaaagagatatagttctacaaatgaagtctggaaagttaaggaaaatacatgaatgtcacgtttcatatctagctcttcagtatccattgttatttccaaaaggagaggatgggtataggcttggaataaaaaaaactcctaccaaaacttcaaaaggaaagaagaagcaggaagatgttagtatgaggcagtggtttgactaccgtttacaagcgagaaaagatgagaagcacatcctccttcgctcaaagcgtttacttcaacaattcatggttgacgcttttaccatgatagagtctaatcggttaaggtatataaaaaaaaatcaaacgaagttgcgcagtaccaacaagcaggcagttcaagatgcttctgattctggaaataatgatttttctaataaaggaaaaagttgtatcattcctccatctttctctggtggtccaacttatatgcaacataactacttagatgcaatgacgacctgtaaaaattttggctttctcgacctgtttataaccttcacatttaatcctaagtggcgagagatcacaagatttgttaaagagcgaaatttgaatgctgaggacatgtcggatatcatttgtaggatttataaatgaaactcgacaacttgatggatgatctaacaaaaaatcatctctttggaaaaaccaaatcaggtacgaaatgatttcatgttttttaaacatatatttcatgaattttaatttacaagtgacattaactcataattgttatgttgaacaactatgtatacagtaggatttcaaaaaagaggtcttccacatgctcacatcattctttggatggatcctagatacaagtttcctacagttgatgacgttgacaagattatctttgccgaaattctagataaagtaaaagattcagagctatatcaagttgtgtcggaatgtatgattcatggaccatgcagattggttaatcctcattcgccatgcatggaaaatggtaaatgttccaagtattatccaaagaaccatgttgagaacacgtctcttgacaatgaaggttatccaatatataggcgcagagatactggtcgtttcatcgagaagaataagtatcaatgtgacaaccggtatgttgttccatataacgctgtcctattacggaaatacagggctcacatcaatgtatagtggtgtaaccaatccgtctctgttaaatacttattcaagtatgttaacaagggacctgatcgtgtaaccgtctcagtagagcctcatcgaaaagaagttgtctccgagcaaaacaatgtaggagaaacaattaatgatccacaagaacgaaatcaagttcaggattattttgattgtaggtacttttcattattttatttcattttatcttaaacattcttaagagactatttgaaatataaaacttaatgaaaaataactcaaatgtcgttttacagatacgtaactgcatgtgaggattgtggaggattagagggtatcctatacattatcgacaaacatcagtaactaaacttacgttccatgaaaaaggcaagcaacctatttatgtcaaggaaggtgagactgctgaatctgttttgtatagagtgaacaatgataaaactcagtttactgcatggtttgagcttaataagcgtgatccggaagcagcaaatcttttatatgaacaaagacctaatttctatacgtggaatggtaaagataaggattttcgcagaagaaaaatatcaggttttgctgttggtagaataaatcatgtacctccaaagatagatgatgcatatcaccttcgcatccttattaacaacataagaggttcaatcaaaaccgtcgagggtgttgttcataaaacatacagagatgcatgctatgctctaggtttgcttgatgatgataaggaatatatcatcggtattgaagaggctaatttttggtgttctcctaagtatgttcgcaagttgtttgttattatgcttattttcgaaagcttgagttccccagctgttgtatgggaacacacatggaagatactgtctgaagattttcagaggaaagtaaaagataagttaaaacgtccaggttagttaaattatttttaggaatgttatatacgtatttaaaaatgatatttt

SEQ ID NO: 32941 - DNA, 998 bp, Arabidopsis thaliana landsberg
  unsure (1)..(998): unsure at all n locations
tgcaggtcgactctagaggatcccctacctttttgttgacgaaagaaaaaagttaagacctttaattcccacttagatgaattatcaatgactctttcattcttgtttactctttaatacaattaatacaagtggcttgttcaacaaaaagtcgtaactccatcatccaataaacgataattagggtctgaagataaagatatcaaacagagaattgttctctatttcatcaaaatcttctcaatggaaacagcaaagcgtagaaccatgtcaacaatcgtctccaggcttagctctgtctctgagcaaaccagagccgctgctttagctgagcttagactcatctccaaacaagatcctgatagccgtctaatcatcgccgacgccggagctattccgtacctcgccgagactctttactcgtcgtcacactcttctcaggaaaacgccgccgcgactctcctcaacctctcaatcagctctcgcgaacccctaatgtttttacgcggcttactcgacgcgcttttttacgcgctggggcatcacgacaccaccacttccgcggccgtggttcaatcctccgccgctacgatttatagccttttgatagccgaagagtcttaccgacctatcatcggatctaagcgcgatatcatcttctccctcattcacatcattagatatccagattcgcatcctcgatcgatcaaagactcgctcaaggcactcttcgcgatcgctctgtatccgatgaaccgatcgacgatgatctctctcggcgcgattccggctctgttttcgctgatcgtgaaagattcgcggtgcgggatcgttgaagatgcgacggcggttatggcgcaagtcgctggatgcgaagatagcgaggacgggatgaggagagtttcaggagctaacgttctagcggatctgttagatccttgcactggttcgagcctacggatcaaagagaactncgntggtgcgcttttgaatctggc

SEQ ID NO: 32942 - DNA, 2627 bp, Arabidopsis thaliana landsberg
ctattttggcccacaaatccttaagctcctctctgtcaaatctgggtttggtttcctttccactagggaaaccaaacagttcttctaacttcttgatcgaaagctgataccgctgttcattcactaagaacgtcaagaagcctaatcccatggtatccagctcaaagtctgtgagtgcttcatacatctccacttgcagcgtggaaagaaactcgattgtctcctccttataggcagggtaagggtaagacatgagtgtctccagatgacacttctcgaacaaatgttgcacgtcctccagtaaccccagctgggctaacgtctcataacacagataccttgttcccaagaagtcattcatctcgaagaatctgatatactcctccactgtaacctcgtcgggtttgttcagcagcttcgtctccctgcgccatgactctggcttatactcagtctcgatatcctcatcaatcagctcatatctacttgacatcgccctctttcctctggcgatttcagctcttctctgattatgtcgggctgtagagcgttcgagctcatccctcaagctctggtaaacatgttgctctctcggtctagcggaccagtactcagcttcatccacattgtagtcagggtccatagaggattctccactgtagttactcatgatgaaacctgaaaacaaacaaaactcaaaaataaacgttaatacgttagtaacagcaaaccaaaaacacaaaccaatcaagtgaaccggtcgagtgtacccaaattttttatttttttttttcttctttttttcggtttgatgaactcgcggtcgagtgttaaagagatggtgaggcggtgtgtcttggcgaggtcgagtggctgtgaaaggcaggagaggagcggtcgagtgatgatgtgagcttgaaaggcggatgtgctcttgccgtgaagtcgagtgaattgagtaaatcggtgaagttgttgatgaattgaaatcgagtacttggtgagaattggagtgagcgatgatgagagagatgtagtgaattgagtgaagtggctatgaatgagagatggtgaagtgggagcggggtcgagtgatgtatggactggagagatgaagcggtcgagtggtgccgcttggacggaggagaagggggtgataagagctcgagtggttgtggtgtgaaggtgaaagggtgaagtcgagtggttattaaggaaggagaaggcggagtgtgagcgagttcatgtttggtcgagtgtttgagagagggtggagtgtttgaggaagagaaatggcgaggtcgagtatttgtggagagaggggcgatgggatcgagtgaagtgataaggtgaggtcgagtggaggggataaggagggttgaggtcgagtggtgcagagaagaagaggatagattcttgtcttctggtcagctgcatggggaacataggtgtaagcagtgggtcccaagtatgtttccatgtttcttctccttattctctgttcactagaaaaaccccaggaaatcccgcaatcttctgtaaacttaataaactccctgtaagactctgtagcttctgttggtcgagtaaaatgatgattaaaatttttattttttttgggttttcaaacatcactcatactcgaccaatgtactcgatctctaggctatcagtggagtaaaagttttgaatttttactctaccttcacgttattccttttttttctgagagccacaaacacaactaaaacaaatcaaaaataacatgaaagtaaaaattatttacaaggataatcatgggacttcctcccaagtgagcttgtttaaagtctctagcttgactcctcacacttatcaaaaagaaaatgaatgatagagagggtctgcatagtcctctctagtatcatcatcatactcagcgttctccctggagaggtctgcagcagaatactcaattctcctctcttcaaaatatgtttctttcttttctggagggtaatctatctcttcagaccatcttgaagtgaacttctttctcgggatagtgtcaatcccgcctttaggttgagttttcttctgcaactgattcagcttacttctatgttcctaacagtgtgggctagcttctttatagtttcatcttgcttatcagacctctttttaagatgctttactctttcactctcatatccttctcctggatcactctatcgtcttagagtttttttttatcttctgttgactcttgtggagttttgttgatgtcaaactgcaacttgatgtgctttccaaggttgagacttattttcccttccttgacatctatcactgctcccactaaggctaagaaaggtcttcccaggattaggggatccttatgctcttcttccatatccagcaccacaaagtctgtaggcacttcctctctattaatcatgacaggtaaatctttgagcatgccgaagggttttcttgaagacttatccacaaggattagagttaggtcacaaggcctatattgaaaaaattctaactttcttgccacatagagtggcaataaactgacagaggctccgagatcgcacaggccattgctgaaagctaatttccaatggaacatggtagag

SEQ ID NO: 32943 - DNA, 436 bp, Arabidopsis thaliana landsberg
catacagaggaatgttatagaaaagtttatgaaaaattggactaccatcactggtgtggagggcaggagggatgtgtgggaagaaagatttcgatgatgagtttgagagaataaagaagaggaatgtgcgttgttgggaattcttggaagggataggtgttcaagattggaggagggcatattttgaaggagagaggtataatctaatgttaagcaatattgcagagtcattaaacaaaacattggtaccagctagaggcagccctctattagcagtgatagaattcataaggaaaatgcttggaagatggtttgaatcacgcaggaaaagaataacaagaaccgtaggtgatatcccaatagccgtagaaagggaattgctcatacggcttaagtgaggcttgcggatggcagtattggcagttggatggtggga

SEQ ID NO: 32944 - DNA, 7858 bp, Arabidopsis thaliana landsberg
taaaagaaccacaccgacaagaatgaatgagatgcttcatttttgcctatatacagtgtatatatctttatagttcgaatttgttattttgccaggatttcaaagttatcaatataagctttgttgaaatcaaccgtgtctctcttctcttgaatacaaggcatatcatcccccactcaacgaaacagatacaaaatgagtcctgtagctgtaataagataaccaagagtggcccatattattatcgccttctgctccctcggtaatcttcctcgccctctttatccttcaatagacccaagaaggccagaaaaccaaagaagaagaacccacccgaccagttgactacaccccctcctcctccaccaccatctccatcatctcgcggtgggaacccgtctcctccatcgtctaggcttggtgatttctccttagctgaaaaccaacacacaataagttcgaactcttggaccacatccaaaatagttcagataagataaacacctaacaagctctgacttgtagctaaaccctctttgtaagtaatgggagaatctcaattcatagttttagatacacatttggaaagcttcctatccctaaatctaaatctagcaggagtttggacaggccattattcattagaagaaagcaaaaatgaaacaaaggacactagaaaaagtgagagagcttacagtgtacaggagcctgtgttatagtcggtgactcccgagtaacggtctgtgtttgtccttcactgcatttcgcgttctgcaagggagataacaaagaagaacaagatgatcattttgcaattagagatagatgttatcaatgaaaaagcaattcagtgaagcaaatcccaatccatagagacatgtgaggttaagatgactaacaatggctgagtgacatatcaaaagagatttccttctacttccaaggcctgagcttaatccaaccgcactcaatggagagactctattttggcttttgattccgccgagcgatcctgaactatgaatccgtggctttgctatatcaaacaaaaagctaggtttacactcttggtccaaaaaatgatcggtaaaaagtttcaatcaacaccaaattttgatacctcatctttaaaatccctagggataaaaaaaaacgtaacccagagccagagcataaggaaatatacggcgagctaatagagtgagaaagaaagcgtaccgttgttgctattgaaggagagcggagaagattggataatagacgccgccatagccatggctaaagcagcttgacgggagacgaaggagagaagaaggaacaactttagagatagataaatccatttcacctgcgcgtatgtatacttttggcaacttgcagccaataatgaaacggcacgtgggaatatttacatcctttttcgtttcgagtcctcgtattttcttgaaaatttattttgaggatgaaactattctcaaggttaaaatgatttcgagcagttgattgatgttttgctcaaaataacgaatgtcactgtatttgattttatttgagacaaaaagagtccctcctctctatggatttgatggtacaacaaagactttgatttacaacagaataagaagaagaaactcatttaggggggtcccttcaggtgtaataaagagatgttgttaaacagtgactggcgttgcttcatcaagagcgacgacaccgggaagcactttgccttccaagagctccaaactggcaccaccacctgtggagatgtgactcatgactcctgctactcccactttctccactgctgccaccgagtctcctcctcctattatcgttgtcactccctttttgcttagctctgctagtttattcgctaccgcctgcgccattcaaccatgctacatattagttccaacaaagagtcaactaacagtatataagagtcagagaattatatgcacctcagttccttttgcaaacttttcaaactcgaaaactcccattggtccattccaaatgactgtctgcgtggtatccagagcttcgttgaatgttttcaccgagtctggaccgatgtccaatcccatccacccatcaggaatggctgatgctggcacaatctacaacattcacattacactcagtaccctcaacacatccagtcttaaaaaacaaaaccatttttcaatctttctgtcaaccaagaatgccaagcttttagcaatagttattggagacgaaccttgctgttggcatcaggagcgaacttgtcagcaatcacaacatctgttggtaacaacagagagactcctctggccttagccttggcaaggagttgtgtagccaattcaagcttgtcttcttcaacaagggaggagccaacggaaagaccttgcgccttgtagaatgtaaagatcattccaccaccaagcagaaggatgtcacatttctcaagaagcgattcgataactccaatcttagatgagaccttggaacctcccacaatggcagcaaatggtctctttgggtttgaaaccgcaccaacaaggtagtccaactcctgcgaaatatataagataaccaaatgtgattcaattcaaactcataactcaattcaagtcaatggactcctccaaattgcagttgagaaacctattgaaccttgagtttagacctcttacatggaaagacaaagatgaacaagcaatcaatcaattatttcatgatcaaggatatagtggcggcacttgtggtgcttctaaattcctcaataatcaatttaagaaagaatcttgtatcaaaatgtcaccttttgcaaaaggaaaccagcaactgatggcttcaagaacttagtgactccctctgttgaagcatgggctctgtgagcagtcccgaacgcatcgttgacataaaggtcagctagagaagcaagcttcttagcaaaatcaggttcgttcttctcttcctccttgtaaaacctcacgttctcaagaagcaaaactccaccttcaggaagggaagccaccaaggtttccacttctggaccaatacaatcatcagctttcacgacctgcacatttcacaccccaaaaacctcaagagatttccacaacaagatgacagattcagatccgttgaaaatcagggtagtacctcaataccaaggagctctgataatctgggaacaagaggagccaagctgaactttggagtgacaccctttggccttccctgaaaattagagatgaaaatgtaaagacttttgtgtggatttgagttgattagagagatgggtaaactgtgaaccataccaaatgagtggagaggatgaccttagcaccattctcaatcaaaaacttgatggtgggaatggcggctctgattctagtgtcgtcagtgatattctggttgtcatcgagaggtgcattgagatcagctctaacaaacaccttcttccccttcaaatctacagaattcagatctccaacactcttcttcgccatcgtaatcactcccctggcgccctttccgcgcacggagtggaccttggacgccacgtggaccgagaaacgagagtcaacgacggcggagaagccaaggcgacgcgcggagacagatgtggagggaatgtgtccaaaggaggcgcgggaggagcgtgtaacggcggcgccaccggtggatttgatgatcgaaagagctgcagttgcggcggtggaagccatgtgaagtcaacagatagtgagagtgaaagtgagggaataaggaagaagtgagaggattggatgatattactagttcatggattttgtcttatcgttgatgagaggttatcataattcttcgccttccctctgcttacaatcgttgcccacattcacaaagatcatgtcttttgatcgaaaagtttacttccatatatggaaaagacaactctaaaaataaatataatgaagttaaataactcatttgcaatatttaaatagctaaatgggctttacacggcccaatgaatttctgtcctttcgaatataaacgtcgtttattttattttggaaatcccggcgagaagcacctctaatggctttatctccgtcgtctcctccatgtctcagatctctttcgccttctttttctcgccaaattggcttccttgttccacgcgtacagtctctagtctttggtagcgtccggaagcatgagttgcggaggccgagcgcactcagggaatggcgggagtacgaagatgctgtgaagagaaaagatctcgccggggctcttagattcctcaaatctattgaaaatgatgaacagcgtgattcggttgaatctattgtcacggctaagttaagcggcttgggagctcttgaattggagagggattggcaagttttagatgcgtgtttgaatgcagatgatatgagacttgttggaagtgcgtttaggtttcttaaggagagaggtcttttggccaacttcggcaaattcaccagtattggtactctgttttctcttctttgcgccttcaaaatcaacttctgtttagatagatgtacaaaagtaatgtttagctatgtgtgcgagcatttgaactgattaatttgtatcgtttcataagtttcttgcttctgtatcactgtgatgcagttttggaaggaacaagagaggtaacacctactgtcctgaagtctgcaactggcttggaaggtatgtagctcaaatttctctcttcagtcatctttgattactcagtgtgtggcgatggaaacttattttactgtttatattggttagtgactaaactttcaccgaagaagtggggactttctggtggttctagcattgctctggctgctttgctgggtggagtctcctatcttctttcacaggagattgatgtgcggccaaaccttgctgtcattttgggtctagcttatttggattccgtttttcttggtggtacctgcttagcccaagtatcatgctactggcctccacataagcgtagaatcgtagttcacgaagctggtcatcttcttgttggtaagacattcgtgatcattagtatttttatgaaatttctttctcgttttgtggctaacgattgcagcttatttgtcgtgcagcatacctcatgggctgcccaatccgtggtgtgatattggatccggttgttgccatgcaaatgggggttcaaggccaggtattatttagattcactctagtgttatactattctattttgtagtgctgtgattctatgttcttttagctacatatggaaccgagtacataaatggattatcatgtgtttctctaggctggaacccaattctgggatcaaaagatggagagtgagattgctgagggacgacttagcggtagctcatttgataggtgattattagtcaaggtgttgttctctccctctgagttttctctcattcacaaacctaatgctggttcagtttctcttaggtatagcatggtactatttgctggtattgcagctgaagcgctagtttatggtgaggctgagggtggagagaatgatgaaaatctgttcaggagcatctcagtccttctggaaccaccgttatccgtagctcaggtcaggactaatgaaattcatatatatctgatttgactagtataatatgtgcttccacttttcttgcacaagtgtacagattgttaagcattgcgaatctgtgcgtttgatcatacagatgtcgaatcaagccaggtggtctgttctacaatcttacaatctactcaagtggcacaaggcagcacatagggccgctgttgaagctctccaagtgggaagtcctcttagcattgtgattagaaggattgaggaagccatgtcttcaagcaaatgattgaagcaccagcattttctgtaatttattactaatacggacagcccataaaaaaaaaactcatttggaatgcatggagaccgaagcagataagctctcggtatctcggtatataaaccacctgactgcaactggaatggcgagaagggacgtgtatctttggatcgatgttcaagtaagttaaggttttatccactaagggagatgtggaggatgacaaggtttaaactttaaaggaataggagccaagcttttaatagcataaagaaaatggttgtaaagtagcaatcacatgaaagctgtatagttgaattcctgtgaagtaaagttttgggcattactagtagtgattttctttctatcattcttgttattatttaatgcacatgagaacaggaactgcattgccatagatatagactggggatatactaacatgtcattacagaacacaatagaaatggttcccagcagagcagagctaccttactacgatacaaccaaacaaacgaaaggggaaaagttttaagactcatcagggtgttgctcctggggccagtgttgcatcatcccctgttgttgcaagtaatagtatggcggggaacccaccaccgatggtatggtccctttggtcacgcctaagccttcttctttcagctcgtccctcgggattatgtccacaaggaaatcaaacacgtcggtcctggaaatggcagcggcgatgtcgttcttctgcaaggtcctcctcttgttctcctcggtgtggatccaagcacgtagagtgagctccaaaatgaacatctcacaggccttggcaaaaatcacaggagcctccgcagagatcatcctcacatcttcatcagctttcatgatcttcttgatgcgggctaggggaagggtgtggttcttgaaatcagtggtatgctcgatctcttgcatttggttagcccagaacatctgaagctgctgctgttgttgctgctgatggtggtggtggaagtggtgagcttgttggaatgccatatgggaagctgcatttactggcccactctgataagcatgaggaggtacataatccatcactccctgttgctgttgctgttgaccctcttctgactgctccattgctaagctatctctgttaatataaaattgtagattgacagttaatccaaagttaagggatttagaaccaaagtctaaaaaaaatcagaaaaaaagaagcgcatgcatgctcgaattaagctcagatatgctggtttcaaatccggatttgggagtcacgacccaagcagagcacgattcacaacatggaccaaagatgataacttttgatcctttactacggttttgtcaaagctaaaggatcaaagaagtgaagaaaacgaaattggagagagaagtttccaatagaaacagaaaatggaagaagaaacacagacataccagtgagagtgagatctcgcgaaaccctaagataaatgggtttggggcgggttagctttttatcaagcgtttctggtggtgcgtatcttccgcctagttgacacgtgtcgaaaaagcgggagttttttacgttacttccacctgtatgcttttcattggttatgttgtgttattccagaaatttctttatcggacggtttcgaagaataacgaagaacacgtgaagtgcgcgtgaacaaaagtcacgtgacatttgcaacgtcgcgcaaacttattttcgaagaagcccattggaccttgtgggctgtaaatcacccgggccggatcaaaacttgaccctaattgtcaacagagtaaagggaaacgggaagcagaggaaaggaaaccatcgaaagaagttgcagaggcaaaggatccatcttgtgtatcgccactcttctttggggttcgaaagagccagactttgtttaattatgccgataattatgtgcagagtcgtcgctagttttgttctgtaaggagcagaa

SEQ ID NO: 32945 - DNA, 1423 bp, Arabidopsis thaliana landsberg
gaagtgtttgttcgcctcaaccgccgtaaccattagatttttatttatcctctttaaaaaacagaagtataaaatttcaaagtcaactaaactataaaatgtcaaaaacataaactgtaggctttgatattcaatctaaaagcccaaacgaaactaatcttcacccacgtggacggaccttagtggccagtcactaccaactcagcatcacccgaaaatatccatataggggcaaattagtaacttcgttatcaaacctccacaactgtttatttcccgccaccatcgtcatacaatctcagttatcgctacgaatcagccataagtgtgaaatctctgtaactaactctaatcacgaagacgagagatctctgaagcaacaaaaatggcgaccaaaatcaccggcgttttcatcctcatactcacgatcaccttctcctcctcctccgccgtaaccgcgacgcagcaagcaccttcgtcttctccaccggttctgacttgtacggaggagctcgtcatgttctctccttgccttccttacgtctcctctccaccaaacaatatgtcagagactccggatcctatttgctgctcggtttttacctcctccgttcattctagcaccggaaactgtctctgttatcttctccggcagccgatgatccttggattcccgttggatagatctagattgatttctctttctcagatctgtaccgatcagaattccgaagaatcttttgaatctctctgttcggtatcaggttaatttcgaatcctcctatgtaattgaatcgattgaattcgaatctcagatgtgtgatttctatggttttgatctgtggtgcagagtcgccggagcttcctccgcttcagagtattcagttcacaaatccgtttgtttccggtaagaaacggattattccggtggattctgttttaagtttcgttgacatgtaacttgcttcattcattaatattctgcaggtaataatgtttctgcctctcctcaatcagtcgacttagcaccggaagtttcaccaagctccgatctattctcaccggaaacagccaccctagcaccaccaccaccaccaccactaccagttctacaatacttctcaagcgactctctcaagatcagaaacttctggtttccatcgactatcatcatgacttttgccacttctattctcgctcgtatctgaactgttttaagctctctgtgctttttactgcttatgtttacttcattgatacttaagattttaccattgggcttgtgttaaagtcttccctatgtagaaacgcagagaatagagatgatatagtagaagaagatgtttaggtttacattgcactatcttttgcttcatatacgcaataaggaaagaaaaagttcaacacatgcatatcatcatcc

SEQ ID NO: 32946 - DNA, 6262 bp, Arabidopsis thaliana landsberg
acgcgcttacttgactcaataaaaaccccattttaccctctcatttctcttctctttattctcttctctttattcttcttcttcttcttcgtattcttcttccccgtttgattcttcttctcaaaaaaaatgtcaggtggtcagagctccaaatctgatgccaacaacagcaagatgagtgtcgggcagggaagttatggacaatgagctgggaacgttcttgctactgtggtagatctacaacaaagttgaagtcatggaccgatgataatccgggaagacgattcttcagatgtgatgttcatggctttgtttcttggtctgatattgagaaacaatgcagttggcaaaaattgagtttattggaagcaagatatgaattgaaggctttgaaggagtctcttagaacaatcaatcaacaaacaattgaagaaaagaaaactcagagtagatttgaattcaacagcgaagaagaagaagaaaagaagatgaggcttgaagaagagaagaagaagcttgaagaagagaagaagaaaattgaggaagagaagaaaacacttgaagaagagaaaaaagtatggaaagaaaatgaaaaactgctaagccaattcattgcaatctcgtgggcaggtttcattgttacagtagccatcatcattgcccttctaaaatagtagttatgttcctgtttggtgtaatgataagatgttatgttgacttttctaatgttctgtaatggagaaataatagtgcattcataaaacaagtgttcaggatccaaaacagaagaacaaaacacataagttcaaaaaaaaaaaaaacgcaacacctaaaaaccaagttcaacaatgccaaaataaggatctgaaacacaacacataagtcgttagtcttcattagccctgcaacctactggtttggccgccaaacatcaaagacattattggtataaggtgacatgaaatagacaagaggttttggtttatcagattctctgccgcgtcccctgccacgacccttgcctcggctaccacgaggacgaccacgacccctgcctctggaaatagtaggtggagctgttgatggttgtggatcagttggcgttgattggctttcttgaacatttggtgtggattgactttgagctgctctataccgtctaggtgcattatgtatactccatggatcatcattctattacaaaagcacaaactaattaatgataacacaaccaacacaaacacaagttatgacacattatttagacttacttgattttccttggtcttcctctctttcttggagggtatgactgaccgcgggttgagtacaagtacccttattatgtccagtcctcttgcagttggagcatgtcatagttcttccgtgtcttgtaaccttgtttggattggttgatgactcttgagcctcttttatccttgcatacttcttaggccttcctcttttcttccttctttcaggcacatgaataagttctttgccttgtctcttccacatcctttctcctcttacaggtttgatattgtctgagtatgtgtcttgccaccaagatgtcaagaagtgtttatcaacgaagctgcaacatgtgacagcatatttagatctaaaaaacagagactacaagatatgaaatcatcaagagagctgaaacacttactcatccggatcacggttgtgttcagtgataacagttatcgcatgaggacaaggaattccagtgatgtcccattggttacaaccacaatgcctatgactaaggttcacctcatacttggctttgcggtctttttacctcatacaaattctcgctactcttcttcaatcatcatacaaattctcacatcatcatttacttcttcaatcggatcttcacccttatcctcaactggcccttgtgcatcaacatgatcctcatcatcatcttcttcatgttctccgacacctacttgatgaatgtatatgtcaatctcacccgttgtcagtccttccaaacacatctgcctaatctgagaatctttatcatcatagataacccttgctgaaccagtttcttcatgtcgaagcttgtaccatatcttttccaccaacccagaaatcccaacttgttcacaaaattcgtcaaatatggaccacgtcacataatcggggtccatgatcatgtcttccttcactaaacctcctttgtaatcaaagacatcttcattcacagaaccaaatccaccatagtgcatacgcacattcataacatcacttcaataagagaaaaacaaatagattagtcgaattcgaatgacacaaccaaatcgaaacccaactaagcatcgattatggactcgaactgatttcccagttaaattcataacataaacggtccctaacataaaccttaacaatctcgatttcacaaaacataatctataataatcgagtatagaaacacatacctcattctcgcgaacacacttctcgattactcgtcacgaacactctttacgaacacacagacgttcttactcgtcgattcaggctatcgccattgaaaacccccaaatcgatttgggaatttcgagaaccctaaccctaattttgtttctcaatttgggggctcgataatgaagttttgttaagggtaaatatgagttttaacccacattgattagtcacgtgttaatataattaacagcgtttacgacttcgtcaacgtccgttaacgactagttaacgctgggaatgaaaacgggcaaataaatttgttcaggtatttttatacaactcaaatataatctgggttttattctgggtacgaaaaaagttggagcaggtttcttgcagattttaaatagttggggtttttttcaggaatttttccgagaaaaaatacttagcgggatgtgaatttgtgtagtattttcactaaacatagttatatttttaagagaatttacagtttaggttagagaaaatcacgcacacaactcaaacataatgattatgccaaagaaaaaaaaattaagaattagctcataaaataacaaaaatataattaatacgcaaacaaaaaaaactaattaagtctggttgaataaatctttctatagatataagaaaatactcgatcaatttctacaacttaattaagcgttacttaattcctatctctaaatatatatatagagtgatagatttgttctttgttctcgttaccctcttaacatttgtctaaaaatatataagataaatcatcaataattctctgtttttcaaaacaaccaataatgaatgatatgtgttctatcacgtgtatgtgatccataatttttaatatattagagacggtcatggcgaagattacttagctagaactcgtcattagaagaagaagacttgtcgtcattaggagttactggcgcagctggagcttgttgttcactagtgatatcatttgtgtcaatatcatgctgttcgagactagaagcaaggctgagattagtatcgcttaaatccccgtcagaatggtgtaggcgcgggtctttttccttggttgaatgccaaaaaatgtgtggaggagcatacttcttcacggcgcgtgtcagtttagtgatgatcaaactatgacatgctgatgcggacatcaaccttacttcacaaaccgctgaactacaacctgtaccacatcatgtactacatcctataccagaagtcccggagggtatcatgacacgttcaaaggctaaacaactgaagaaaatgttcaacttagctgtgcaagatattttgagctccctagagctaggagtaaactggtccgtagcaccccataccggatatgatctaatagccgaagaagagcttgctgaagcattcacccaaatgagtcttgaacgaactactcccccaggtatgaaatatcgtttgacaggttcaaggacctctagaaaccaagagaagactttggagcttcaagagatagacgattcaagtgtcacatctgaaagtgatcgagagagtcaagatcgagagcaagacatcaaggacatggaaaagcacgaagacatttatcaagctactcaagaggaactccagaaagacccctacttcaagtaaccagccagcaaacaagcacaagacttgattccagaagtacctcaagaagtactacaggaagtgactcaggcgtcatctattgggcctaaaacgcatctaggtaaggtttattcagtttatattatctttgcaggtccaaaaagcccagacaatggctagagtcaccctcaatcgtgctcctcaagagaacttaattagtttccttattttagcttattttctttcaaaaaacaatggtttttgtgttttgattatatttgcttccttgttgcatttttacatttaatttcggtcctagggctagctgaaggactcttataaagtccccctgcagcagttgtacgatttttacctttgattatcagtaaaaaaaccgcattttctcacttcttctctttaagtgttcttaagagaataaccttgttctttgtcttgtgtgtgcgattcaccaaggtcaagttcgtgtactgtatcaaagactcatcacatctctgtggtgtacttcaatccgccagcacttcccctccattagatcccacacgagagaagcgatcgccatcgtgttagatctccatcatcgaccatctttccttcacaagagaaaagcgaccgccaatttgtgaagccaccatctctatttaatacaaggcctaccatcgagtcttgcatcatactgatcctaatagagtccaaaggtaagcaatatgtgactaaaattaccaatgttttttcttccttaacttttattattattatgtaatgtatggttttatatatttattcatatggatgctcattcaaaattttggcatactgagactcaactacacattcaaaatagagtaatttacggtatattgttgatttggaacgcaaagtagagattcttgagatgtcttatacttcattattcaatttgaaacgactgcgcttttgaaggtgagacatatcacaatagaagtaacaaccatctacttgtcacttagagtggcatttgagaaaaaaccatataaaatatgctagtccctagtatggaggggtaaataatttgagaattaacattaatttacatttaatgtagataaataaatatgtatatatatatatatatatatactaggatttaacccgcggtttaccgcgggcaatcggtttatttggttcttatactaaatatttgaataaatttgagatcctaaacttataaatataaatttttgaattaaacataactaaaaaataattgagattttttttgaattaaatcaaataataatttagattgaagggaattaattttattgaatggtttagattgaatcggatcatataaagtttaggagattgttaagaccaaattacccttaatgattttgaatagcaaagaacaaaatccaaaattgaaattaaaattgaggccaaattagacaaaatttcaatttgtacttcccttttaataataaggggatgtgctaccgatttaagtgctcactatttagtcgcagtgtcgtcgctaagtatagtgattgttatgcgatatctttgccacaacatgacaattgttttgtgaacgttttggtgactgagttgctactactttgtgactgattagaggtttaattcttgatttagcctccaaagaattcttgataaattgattataattctaatttattatcaacagacttgttaacacataagaaatgtgtatttaaaacagaaacaacaaaccacacattcttgttcaattcaaaaccaaacaacctatatgttcaaaacaaaacaaaaattcttattcaaaccaacacacgttttcaaattcagagaaggatggaaaagggacctatgtttggacatcagcagtagcgggatcaatagattgagactcgaggaaggcgagaatgtttgggtcggttgcgctcaagtacttcttcacgatcatcaagtgctcagctgcaatttgcaaagcctcttcttcacgctctgcttgtaaagtttcttgttccttcattttgcagttagcttccttaagctgtgtttgcaggcttgtgaaagaaaaagagcttttcgggtacttccgcttctcgttggtgtaatttcctactcttctaactttagaatattctcctatgtcgtt

SEQ ID NO: 32947 - DNA, 212 bp, Arabidopsis thaliana landsberg
ctaataatcaatttagaagagagtatgagtgacatagaaatccattttttattagtgaatccttaagcaagaaacacagagagagaataatgaaataagggcacaaccaatgaggaagattcaaatggataacatttgtaacaaaaccggttggtttgatttggtttggaagttggcatagacatccgatctgataggaacaagtgaaaaaa

SEQ ID NO: 32948 - DNA, 1052 bp, Arabidopsis thaliana landsberg
gagagccatgtattttcctatgtaccttggattgtagtactttctttgtggcttaagtcaattttagacacggagaagcaaacactttgtactcggtattaatattgaagatggttttgttgagttgagaaagaaatgatagatattacctactagaactgccaaaaaattacttaaaataaattcagatgagaaatgagactattcagataaatatgaataatctcaaaaaatgagacccttatttcaaacagaagattaataataaaatcttagaaaagtctcgaagaaaaaatctcacattcaaaactttcatctaacttaccaattaagcttcaaaaaaataatacaactaccattaagtccaataaactacagggaagtaaatcattctctaacaccaaagggaagtaaatcattctcaaaattgatatggtttgagtggctcgcccggaaagagacaaattgaaccgagtaagcagtttttttgttcattggtctcatgggtcttgatttcagagtcacataactcgagattttatagggtataaaggacaatggtgtctctcatctattcttactacagaagatacgtcggaaaaatagagccttctactcaactctacgaatgcgatgatgagaactttcacctccaaaccaaaacgttacaaatttgaataatgttttcaaatcaataaaaaaaaacttctttttgaacaacaaaagaaaatcataaaacaaagctctgtaacattttttctattaccttttgctaaagatcttatttacacaaaagctttcaactcaaagaaaaatctcaaagtaagcaagaaaagaaacatcaagaagaacgagaataaggaggaggggaagcaagaagaagagggagacaggtattggaactatggaaaggaagagagtataaaatatgaagtcggattcttctcggaaaaggcgcctgagaaaaaagatgctccacaactccggcgagaaccaccgtgtactccttcatcatctcagcaatcaaagtcaccagccacattttttagttt

SEQ ID NO: 32949 - DNA, 2586 bp, Arabidopsis thaliana landsberg
  unsure (1)..(2586): unsure at all n locations
tttttttcctcttttctctcgaaaatccgatgatgattacgaatcgatcatcatcaaccgtcatctagatcattaagtagaagaaaaccaaagaagctcgtctcttatccgccgtgatcatcatcatctacaccgacggtgctcacatctgcgaattcgatgaactaaatcggagagtttgtttaaccaaatcggaaatttatgtgaaactatgctccaatcgtttgataaagggtgaaagcaactaaataacaactaataaatgagttaattaacaaagtggtaataagaaaacaaaattaaaagaggaaaaatttatctagaaccaacttgtatactgcaactagtacattaacaattagatttgagttaagtaactaactaatcaatagtttctccatttattccttttttttcgggaaaaatgttctttaatacaccaactttcaaaaagtggtcatttaaaccatgaatttcatatatggccaaataaaacttagtaaaagcgttgaccggccattttatacatcccaaaacgttgacccggccaaaaaccctgcgacgttaacagtcgttaacagagtcgataacaggcgttagcagacgttaattaatccgtttaaacacaaaacgacgtcgttttgtgtttaatcgaaaccaacaaaattctcaattcgattctcaatccctaaaatccccaattccaattctcatgccctaaaattcccaaattcgaaaatcttcaaaagcctctccatttttgttcgtttgagctcgaaaactccaatttcatagccattttctgcagatatgagtgtagaaatctcgagtgttggggaagaaggaagtgggaaccgtgggtttccttcaaagtgtcgttgtggtagacatgtcgtcatctatacatcaagctcgaagaagaatccgggaagaccttactttcgatgtccaacctatcaagatgtaagtagatttgattttgttttattgtttttggtcataagtaaataattgtcgatggaattacaagaccatttgtttaaatgggttgaagattgtgtgtatgaagaggttgtagatgcaataccgagaatctctatcattgacagcgaggtaaacaatgccaaatcggaagttgctgtcgagattgctgaattaaagggtttgatccaagaattgaaagaatattatatgtggatcaaaagagaattgatgagatggaaatcgctgaccaaagtgtgcttggtgtgcctttgtataattttcattgcaattgagatcataatgttctacaagaccaaaaatgaggaacttgttcttggttactagcgtttgtgtttggttagatggtttgtgtttactagtgatgtgtgtttggttactagtgtttgtgtttggttagatggcttttatctaagtttgtaatgaaatggtacatggtaatgcaatgcaatgcttgttttgttcttggttactaatgtttgtgtttggttagatggcttttatctaagtttgtaatgaaaccatgattggtaatgcaattcttgttttgtttcacaatgattaataatcctaaacaaagttcatacattaaaaacgattcatacattataacactaatgtcacaaagccaagacaagtcaaaacaacaaaatgaaatcgatactaagctaagtcataaagacaagttcaaccaccaaaaagaaacttatgactaagctgcagacaataacaaaaagaaacttgtgactaagattgtctagaacactcaaaccatgattcaaatcgacgaagtccttgtggttctgcttgtgcttgtgctgaaccatgtcttctatcaggttgcggtccttgtgatggtccacctgcttgtctttgtgctccacgatcaccacctgatgctgtttgtccttgtgctccacgaccacgacctgcagccctttgtccttgtgctccgcgaccacgacctgcagcacttggtccttgtgctccgcgaccacgacctgcagcacttggtccttgtgatccaagaccacgacctgcagcacttggtccttgtgatccaagaccacgacctgcagcacttggtccttgtgattcaagatcagcctgtgatccttgatgagattgtggttgctcttgtgatctaagataagattgtgattgctcttgtgatccaagataagattgagatccaaacacttctggttcctaaattaaaaaagagagtcagaaacacatgttggattgttaaaaaggagagtcataaatgaatgttgcattgttaaaaaggagagtcagaaatgagagtcacaaacctgatttttcctaggacgacctcttggtctctttgttggattcaagacagttggattgttgcacctttgcttgttgtgcctttcttgatggcagttagagcatgtcatgattctcttttcccgagacatcttgtttggatttgaaggagctgcatcttcatttctacctttccttctagcatagntacttggcctcccagcattgcctctttccatggtggtggtatacaggcaacctattcgtccacaccataaagcatcccttgga

SEQ ID NO: 32950 - DNA, 1359 bp, Arabidopsis thaliana landsberg
aacccgaggcgtgtgttacacgcgtttacatgaggcttattttgacgtttaagcgctctatctaaagaacactggggtccgggcgatgaatctttcattcatgaatgagctcaacagtctcatcagatcttcgatccagaaccgatttgatcatcgatctccgcttcggatgcttagcaatctttcgatcggaggtaatgacgccgacgaagtggagaatcagaaccgtacggttaatcgcgatgacgtcaatgataagagtccgacgagtgttatggagaatgaggatctgaatcgctcttcgcttccaaagagcatctctgtgagatctaatggctactctaaggcaagtcagggaggtggtggtgcggctgctcaaagtggaaaacctcgtggaaccgtcactaagcctgggacttgtggtcaagtcagtactacggtatatttcttctttgttatcttgattactgtggaaacttggtgagttcttgcttagttagagattagctttggtttagtgatttgggaataaggtaatcattgagattattgacttggttaactgttgaatctgacttgcatatgtgattacaatcctcctttgtgatgcattaacagttgactgttctgaatataagtgtggatttagattcttgagcatgagaaagaaacaaaagaagaagtgttttgatactgtttgctttctctgaactatagatgtaaagagtaatagtgagcttgatgctgtttgatttctcttgaattattctggtttagtgtttttggaattaggtaatcactatagacttggttaaatctggcatgcaaatgtgaatttatggctgcttatagcatttgtacatttggtggtgtagttaaaaggtttatctgttagagacataacattatataccaacaataagtttagatttagattctggagaagaactatcttgatgctgtttgctttttccaaagtctgaactatatgtgtaaagagtaatggtaatggatgaatgaatgaaatgcaggaaaaagtatatctgagaaggttttaattagagtcgtttttggtttagtgttggttatcattgacgcactatagaactggttaagttgatgaatctgagctgcaatttatgacaccacaatgttctattgctctgctttctttgatgtatagatgtaaagagtaatgggaccttgaatgaatcattgacacactatagactgttgaatctgagctgcatacatgactttgttttatgatactacaatcattatattcctatgttttctttgaagtagaaattgatggtggatatatgaatgaatgaaatgcagcagaaggtgtatgtg

SEQ ID NO: 32951 - DNA, 1789 bp, Arabidopsis thaliana landsberg
tcttgctgctactgctgtttctgctgtggaggtaaataaaccttctcgacacttttccccttagctagtatttgtgtgatctctggaccaatgttttcgtatgacctttgagcattatatgcaagcaccatggcacattctcatcacatattaacttagttggtatcagtttagaatctagattaaaccatgatttttatcttttagcagatatacaatggttttcctttagtgattattcgttcttcttcatcaatttctccgattctgattctgattcctctgatttgttcagcttgcattgatgaggaggagatttgatgcaatcatgtaagctcctggtggaggagttaagtgaaagattttagccttagaaaacatcaatctctcaaaatgtaattagaaatgttgtttataattaatctgaattctttttccacctttcccaaatcaaatttatatattatgattgaaattcactatattgactttatcaaatagataagcatggttaaatgatttcaaatgattttctatttaacacaaactaaacttaaacagacacaacttttgttcatgtagaattttaactattcatggcatttaggatttgaactgttgaatttccgtttaaaattaaatgtcatttttaatgcattattttaaaaattatttacatttttatgactttaatttaaatgtattttaataagaaaatttataaaatatattaataaatagtaaaaaataggtttttcatatgtatgtcaaattttaaaattgtttttttatataaacgatatttatttataaacggaaggaatataattttatgagtttttttttttttgtcatccgaaattaattaaaactcaaacgagccaatctcgagggatattgtttacacatgtgatatgatgcggttcggtacggattttccgcgccaaattatccgcttttacattagcacttcgagaaatcaaagataaagaaaaatttgtgaattcttctttgtcgctttgcaaccggccattcggttagagaattttatgagttatgagttagaaatttagaatataattttctatttaggaatttagaagattgttagaagagcaaaagtcaaaattactaagtgagagtatttactcgactcagccaaccaataataatccgacacgtcatataaaagttcgagaaaggtaaaaaaaaatcacacacattaaagtgctttgaatacaaaagcagactccactatccaattaaattacgaaaataccacttcggttaactccactcttttcatcttcttctctgccgtcgtcgctcggagctcgcgaagctctctcatcagaaatcaaaaaccctaaaaaaagtcctttctgattcatctatacagacacatactgtattctcaaaacaatggagattccttctctgaataagcagcaagagttcactctcgcctccgtcactgatctcacttctccttcctcatctctttcgtcctctcctgttgtagctacgttttcatgcgttaatgaagtcaaggaactccgatttcaggaatcgaaatcgtctgatggtttcagttttgatcttagttcgactcaggtggctctcgattcgatttacaatttgcacttcttctggttaaagaatctactttaatctcgttttgaaacgtttctatgcttggttaagtaatgcactaaaacaatctctgtttagttaggattattaaattatacgtgtgggaagttcctgttctttgagctagattctgatt

SEQ ID NO: 32952 - DNA, 9308 bp, Arabidopsis thaliana landsberg
  unsure (1)..(9308): unsure at all n locations
gtgcctggatttgaatggaaatggactttaaacatgctttaaacatgttttttaaacgatttacaagctgctttataaggattttaaaagtgttgaaaaagctgcagtagcggttattatgaaaaaaaattataatcgtttttaaaatgatttacaaccgttttaaaagagatttacaaacctgttttaaaaacgttttaaaagtgttgaaaaagctgcagtaactgttattatgaaaagatttacaaccgtttttaaaatgatttacaatcgtttttaaaagagaatttcaaccgttgaaaaagttacagtaatgttaaacactgtatctgttactaattgggcctaggcctgttatttagaaaaacaaaatgttttagtaaaaaaaaaaactaaaagcccaaaaaaactaaagcccaaaaattcactataacctaaaaacaaattaaacagggattggctgctgacatcttcaccgaattagggtcagtcactttgtagaagtagcagacttctaatcaaaaagtagtggagtacaagatagatttataaactttgtcaattgaatattttatgaacatctgtatggaacaagatttatgaagtttatttagttcaactcttattttacaaaattagtgtataatggttgtttgggttaacaggtgctttgatttgaatggaaaaggactttaaacatgcttttaaaaagggtttttaaatgaattataagctgttttaaaagcgttttaaaagtgttgaaaaagctgcagtagctgctattatgaaaagatttacaatcgtttttaaaatgatttacaaccgtttttaaaagagaatatcaaccgttgaaaaagttacagtaatgttaaacactgtatctgttactaattgggcctaggccggatatttagaaaaataaactgttttagtaaaaaaacactaaaagcccaaaaaacactaaagcccataaattcactataacctaaaaacaaattaaacaggaattggctgctgacatcttcaccgaattagggtcagtcactttgtagaagtagcagacttctaatcaaaaagtagcggagtataagatagatttatcagcttttgtttcttatttaataaaactttgtcatttgaatattttatgaacatctgtatggaacaagatttatgaagtttatttagttcaactcctgttttacaaaattactgtataatggttgtttgggttaacaggtgctttgatttgaatggaaaaggactttaaacatgtttttaaacagggtttttaaacgatttacaagctgctttataaggattttaaaagtgttgaaaaagctgcagtagcggttattatgaaaaaaaattacaatcgtttttaaaatgatttacaaccgtttttaaaagagatttacaaacgattaataagctgttttaaaagcgttttaaaagtgttgaaaaagctgcagtaactgttattatgaaaagatttacaaccgtttttaaaagagaatatcaaccgttgaaaaagttacagtaatgttaaacactgtatctgttactaattaggcctaggcctgttattaagaaacactaactgttttaataaaaaaaaactaaaagcccaaaaaacactaaagcccaaaaattcactataacctaaaaacaaattaaacagggattggctgctgacatcttgaccgaattagggtcagtccctttgtaaaagtagcagacttctaatcaaaaagtagtggagtacaagatagatttataaactttgtcatttgaatattttatgaacatctgtatgaaacaagatttatcccgttcccttagttcaactcctgttttacaaaagttactgtataatggttgtttgggttaacaggtgctttgatttgaatggaaaaggactttaaacatgcttttaaacagggtttttaaacgatttacaagctgctttataaggattttaaaagtgttgaaaaagctgcagtagcggttattatgaaaaaaaattataatcgtttttaaaatgatttacaaccgttttaaaagagatttacaaacctgttttaaaaacgttttaaaagtgttgaaaaagctgcagtaactgttattatgaaaagatttacaaccgtttttaaaatgatttacaatcgtttttaaaagagaatttcaaccgttgaaaaagttacagtaatgttaaacactgtatctgttactaattgggcctaggcctgttatttagaaaaacaaaatgttttagtaaaaaaaaaaactaaaagcccaaaaaaactaaagcccaaaaattcactataacctaaaaacaaattaaacagggattggctgctgacatcttcaccgaattagggtcagtcactttgtagaagtagcagacttctaatcaaaaagtagtggagtacaagatagatttatcagcttttgtttcttatttcataaaactttgtcatttgaatattttatgaacatctgtatggaacaagatttatgaagtttatttagttcaactcatattttacaaaattactgtataatggttgtttgggttaacatgtgctttgatttgaatggaaaaggactttaaacatgcttttaaacaggggttttaaacgatttacaagctgctttataaggattttaaaaatgttgaaaaagctgcagtagcggttattatgaaaaaattttacaatcgtttttaaaatgatttacaaccgtttttaaaagagatttacaaaccattaatanagctgttttaaaagcgttttaaaagtgttgaaaaagctgcagtaactgttattatgaaaagatttacaaccgtttttaaaagagaatttcaaccgttgaaaaagttacagtaatgttaaacactgtatctgttactaattggcttaggcctgttatttagaaaaacaaactgttttagtttaaaaaaaaaactaaaagcccaaaaaacactaaagcccaaaaattcactataacctaaaaacaagttaaacagggatttgctgctgacatcttcaccgaattagggtcagttactttgaaaagatttacaaccgtttttaaaatgatttacagccgtttttaaaagagaatatcaaccgttgaaaaagttacagtaatgttaaacactgtatctgttattaattgggcctaggtctgttatttataaaaacaaaccgttttagtaaaaaaacactaaaagcccaaaaaacactaaagcccaaaaattcactataacccaaaaacaaaaaagaaaggaaaccgtgaaaagacaacaaataagtgacccaaaaaaaaaaaaaaaaaaagaataccaactgtcgtcttcgtcttcttcctttcaacaatctgaagaaaatctgattatccagcaaaaaggaagcaattgaaggtaactaatttacgaaactgaagtttaacatttgggtttgttcgatttttgccgaatctcttttttgttctagcatatctaggtttttcggttgaaaacgaaacaagtaaaatagattgatatttgggattttgaaggagtgttggaaattgttatataattttgatagatttatgttttaaagtttgatatttgagtttcaaaaaccttcaaagaagatttcaaatgccgattaacttctctgttgtagcaatttcaaagttttttcgttttgaaacttcaacagtaaatagattgatgtttgggtttgtgttttaatttatagatcttcacttaatttatgggttaccagttgataggagttggtttggaaaagggttttttgtttctattttcagcggttgtgttctttgaaaaagattaaaattttgtttttggaatggtttcaaaacggtctttaaaaaggattatggagtaatgactgtgttttacaagggtttttaaagtcttaaaacgacttgtaatgactttgaaaaatggttttacaagggtttttaaagttctttaaacgacttgtaatgactatgtttatgtttcgaaaactacaaatgcataatagatttacaaaaatggtttttaaaaccatttcaaaaaactgtgttagcttaatgactgtgttaatgtatttaatcaggttttgagaaatatgagtacaaagaaactgttcttccctaaaagattgttccaaccaggcagcgaagtagataatattacaagggtatcaaagcattcatccttcaaaattgtctcgactattaggaaagctttagagccgatagagttcaacacattaatggacacattcttgggtcctatagtggaattcgctgaaatggacttagtattttcaagccatattgttcatcatttactgcagagaagaatactaaccaacaatgacgaattgtggtttgtatttgctgatcaacctatgcgattctccctgagagagtttatcataacaacaggacttccaatggatgatgcatcaggaagcagtccaaatgtgaagagaaagaagaaagaaaagtggtggataaaagataatcagactttgaagggaaagcagaaaaaagatgtgtggattaacaaggaaatgacttttttagatcttacatatgttttggaaaagcgttccaaaaaaatgcagccagaggagagactgagattggcgggttcgttactagtggagggcatattgctagctcgaaatccgactaccatgctgccaattgagaatctgaagagagctactgatttcgaaaagttctgtaagtatccatgggcgcagattgtgtactcatatttggtaactgaagtgaagagaatcggtaatgactatttgttaaggaaacaatatggtctatttggatttgttcaatcaattcagatatgggcattatcatcggttcagaagttgggagaaaagtttggcactagagatgaatcatctagtggaaatattccattaattctccaatggagatcaacatcgtctccaagtgcaaaagctataacaatgatagcagatggtgacaaggtacattttcttagctgtggctttttttatgttttaaacactgtttataaataaagagtatgttttacaatagtttttacaatcaagttttaaggatttacaaagggttaaaagcaatttaaactatttacaacggattttaaaaggttaattaagaattgtgcattatttttacacagtttggaattttgtttatctttgcaggttgaagtgacactaatagttggtgttcatactcatgaatacgaccacttggtttcacagaagaatcctgaagacaaggatctgttggatgtttttgatcttgtgatcaaaggatatagaatgagcaagaaggattggtgtcagggatggattcaagtggaacaaggacatcaaggaagaattgatcatgtcttgaaacctgcaattgaaacagttgtgcatcaaagcagaaaaaggaaatcaatgtcctttggtgagaaggtaaaactggtatatgaaaattgtgaggttcttaagaagaaagttggaaggctggagggctatttaggcatcaaaagagttcctgccagttatactagagaagaacaaaaagaagaggacgaaaaaaaggagcaggaagaagaaaagcaagaggaagaaggaaaagaagaggaattagaaaaggtatgtgtttttacaagggattttaaaagcttataaatcgtgttttaaagatttttagccgtttttaaaagataggcagtgttagatatgtatttacaagggattttaaagacttcttaatggggttttaaatgatttaaattcgtttttaaaggataggtagtgttcgataagattttacaacggattttaaaagctttttaaaagtgatttacatgactaataactgtgtcctggcttgtatttgggaacttgtaattatttatacaggttgaatacaaagatcatcattctacttgcaatgttgaagaaacagaaaaacaagagaatcccaaacaaggcgatgaagaaatggaaagagaagaagcaaaagaagaaaaagtagaagaacatgatgaatataatgatgctgcagatcaagaagcatatataaatttctcagatgatgaagaaaatgatactgcacccacagagaaagaatcacaaaaaaaaaaaagaagaaacaaatgtctgctttccttaactttttaaaaaaacatgataaattgtcaaaaaataaaaattttgttttgatcttttggtttacaggttttaaaagaagaaaacgtagaagaacatgatgaacatgatgagactgaagatcaagaagctaatgggactgcacccacagagaaagaatcacaacctcaaaaagaagaaacaacagaggtatgcattctttaattgtttaaaaagacatgataaaattgtcaaaaaataaaaatttgttttgatgttttggtatacaggttcctaaagaagaaaacgtagaagaacatgatgaacatgatgagactgaagatcaagaagcatatgtaattttgtcagatgatgaagataatgggactgcacccacagagaaagaatcacaaactcaaaaagaagaaacaacagaggtctgcattccttaattgttttaaaaaacatgataaaattgtcaaaaaataaaaatttgtgttgatgtttttgtttacaggttccaagagagaccaagaaagatgatgaagatgttaatcaaacaccactctctacgcaagaagaagaaatcacccagggacagagcagtcgtaagttctttttacattcacatatgatttgccttgataaacaacttctaaattttttttttgtttgtttttgtatcagttcaaactcctttgacgccggtcatgttgagtcaggaagtaatggaagaaattgacctaaaagttaaaaaatgggcgaaaaacaaattaataagagatctactatcgtcagttgaagaagtaagttaaattacatcattgttttgctgtaaaagattttaattctaatcattttggaatttttacatttcagattctttggcccgacagtaaatggcaaaacgtcaaaatttgggaaatgtgggacgagaagaaatacaaattagcattaaagaaagcaatgttactcattcatcctgacaaactgcctcgagctcatccagaagtgaaatacctagctgaacaaatctacaagataataatggttagtgttaaactcttcctttgtataacgatatatctttaaaaacttgaatattataattatgcaaaaaataacttacagtttgaattttatttgcaggtagagaaggacagagctactaaggtaaaaatggatttagttctttagactgacttatttcaaacatgtttattttacttttattatttggaatctatgattgtacttgtattttaattatgactgtcaaatctaatcaaaatgctttactattgtcaattgtttatggttttataagaattgtcatgatttacaagtgattttaaaggcataaacagcttacatggtttgctatcggtttttaagtataataaagtggtaaagcatgatttacaagggattttaaaagcttttaaaaggggtttacttgattaacaatcgtttaagaagaataagttaatgtcagaaaatgatttataagggattttaaaagcttgtaaaagtgtttaacttgattcacaattgttaaaagtatatgtaagtgacataacgaaatatttacaaggtattttaaaaggattttcaaagacgtttaaaacaggcttttacaaaatatttttaaaagttaaattattggaattactattaaaattacttgtaaagtttgatagtaattttagtaaacgacttacaagacattttaaaagattcaagttaaaagcttgtaaaagtgtttaacttgatttacaatcgtttaaagtatatgtaagtggcataacgaaagatttacaaggtattttaaaaggatttaaacagacgttttaaacaggattttacaagagattttaaaaggtaaaatattggaataaccttcaaaattacttgtaaaagtttgatagtaattttaacaaacgagagtaataacacgacagaatgaaggaaaaattaaaaaacccaacaatattcaattctctggagataaagatatatctaagttgcagcaacacaagttgatttgttgtgacccgactgaccacacctactgcatttgtgtaattttggttttggctgagaccttacatgacaagataataatggacataacattatgaacatattgatttctatgcttcatactctccgtaaagctccgcccatacggtagctctatagcattcggctgcaaaattctcataagctattggtttgtacaatagagcattcaaagcatgtggatttttggcttcaagacattttgtgaagaaatgataatagatggagtgcgtcatggaccaccacatgtaataacgagatttgtcaaggcggacacaacttagagtttcctttgaatacacaaccgatttaaatggtggtccagctttcacaaagggtttcaaagcatccacgccttcttcagcaacatagctaacaattttagcaagtactcgtgccagtatgtgaatttcagggataatagcaacctgcattaaaaaaaaaaaaaggttggaaacaattggttttttgtttatgttggatgtcaaacgtataagactatagcttatgatacgctgccctacctttttgacacctgaaacagatgatggttcactcatgtcgaccttcgttaacttgagcattatttatatgttttgaagttgaaactgatggaatgggtatggaagaaacttaaacgaatcgtgggaggtttttgtagttagagattattatggttagatttatttttatatttttccggtttattaaaagttgtagttgggaaggtgggaatattcctgtaataacgaagtttatcaatgttatggagggaagtaaatttagattgttctttcaagctaatagagaataataatattctctatataactaccacatgatctacatatccacataattttttttatttttagttacctaaattaggaatatttacttttacagcgtcgctccaaatcaaaacttatctccgtaaaacgtgcgaaatggttcagatagggaatattctgcttttcaaatttcagtttatggggtgaaattaaagaaagtagaagaatagaatggatatcaaccatattgttttttaaataagta

SEQ ID NO: 32953 - DNA, 463 bp, Arabidopsis thaliana landsberg
ctccttaaactacgtatttggtcactttcagaaactattaatccattaatccaatctcgcattctaatgtttttagtgattgatgaaaaggaaactacaaagggtgaagaacatctcactatccttaccctatgttaaattattcaagcacaaacaaaattcaaacgcaacttagagtcaaaaagtgaaatataacattacagacgcaccaaataacttattggtttgacaagccaacaccactgtatttctatgccttaaaccgcctaggactaggaaacagctgctgcttgagacataggctaagcaaaagttggtcactcttttggcaaactcagagtcttgcccacaagactgaagcatccccgctgctcatcgaaggctcttctgactatagctacgcgatcaacatccttaccacctcatgaccgactcgtacaaaacagactgtgcactatcaagc

SEQ ID NO: 32954 - DNA, 561 bp, Arabidopsis thaliana landsberg
caaaacccacaatagtacattctcgttggtttcttcttaatattatattgttgcttgttttgtaccaacaaaaaaagtacgaggcacacactttcgatcgtgattaggcttctttcaacaaattttgattagtaatataattaaactatcatcgtctacataacatatgttatccgtttcactcaacctatctatgttatctctttgcgaatctggcgcgggtacttcaactagtgtagaaagatactattcaaaaaaaaaaaaaaaaaatctaagatcacgagattaaacatgatatatatatgatgtttaacaataacaaagcggtttgttcaaaaaaataaagcggtgccggtatgctagagagggaacccttgataatttcgaccccaagttgtatgagaaaaattattggaaccttttgtatttcatgaccctgagaaaaattgaaaatttgacttaacgtggagtttgctagagaaaatgactcaacaaaattatatccctagctttgttttacgtcaaattgttactctcttttcagttggttcgctagtttga

SEQ ID NO: 32955 - DNA, 1569 bp, Arabidopsis thaliana landsberg
cttagtataatagattcataacggcctccagattatcacgttgggtatgcaatccttctaagcaatttcctaattacctgaatcatgagccaagtggcaacacaggaggtgataagctctgaaggcatttgagcttcgtttttctctgaaccatcttgtgagtttaaatcgttgttagccacaggctctgatgcatttgaaggagatgggttgtgatgatgctctatactgccatttacatgctcgtgatgtttgaccatagagctgcgtaatagctgatttttgccaaccaactctaaggcttcttggatcattgtgttcacatcttccccttccttcacagatgatgcagcctagaaaccgtagagtgaccataacttagcaaaacatatgtatgttcgagaatctagaaaagtggatatatcgatacctttatagctgcatccaccattgcttgcgctcttgtttttgaacccttgacaatttctagcatctctggctccatttccttgtcacacagcacaagaataagtgtattcaagattaatcagaaggaatgaattacgtgggcactcaaaggtccatttattatgatcctattcgatttccaaaacattttaacaaatgtaccgatatgaaaaatagaatatcagtaatccattaccttttcatctaaagcatgctgtagcgcttgtgcccgttgaatctcagcttcttttgctttgttataagttgtgatatatgaatgattagtctgccgtggactactagtgttgcttgatactttaccatgcagaatgggagcaatcatatcaccctgtagagaatttatgaattaggcataaaatttacatgaacatgcacaggaggatctaggaaggtttacaggctttgacagaagtagtcaaacttccatctttccctacctgattcagaggaggattcatggaaaagctgacattttcaagtccgcaaggagggaatagcacagacacaccaaggtttgtattcccgcttagctgtgcttctttcttcatagacaagcacttatcaatttgcctccttagaccctctggcatgtattccagtggatttaaaggcatgcaatcaatgtcctgtcacaaaaggagatgatcaaacaactgagaccttattttaccaataaatcatcgcgtatatggaactggtattgtatttgaactaccataaccaactcaacgcccgggtcatcttagagaacattgcgtttgttatgatcaacagtgagaatttttccatcatgaatctcccgtgttttgggatggatggcaatgactctgttcccaactgctaatggccgagccaaatctgtaggaagcccctccctagcacccgttcgaagctctgtataatgctttcgcacagattcgcggtactgtttaagtttctcccgctcttcatgtaaaaatctctcagagaatcttcgtggtctaccaagagaactgcaaaaaaacgaaagaaaccttttataatctacctatattctctgggagtatccaataacataacttgaacaaaccttttaatgac

SEQ ID NO: 32956 - DNA, 1309 bp, Arabidopsis thaliana landsberg
agaaccctcggaacattgtactgaaaatttgccattcttaatcaaggctttcgatcagcacgaagagaaactctacgggggtcattgcatgaatataccctcgtagctaggaaccgaagttatactgtgaaaaagcagatgataaaaccacacaatcgtatacataaccttccgtttctgcctttgtgaagccatacaatttattaagcgtgtaaaggatcaagacttgaatatatacataaagattcgactgtgttcatctagagaaattcataaccaaaacatacaataaacattcataaccaaaggataacgtaagtaaaatgaatcatgggaggtgtatcattgagccactgggtaacacgatacaggttcgactttcgaggcgtattgcattccagattttaacaatgattgacaacactaacttatggtgacaaccaccaaactaaagttagtaatagattacatgaaaagtccccatatatcattatttgactacagctttcttcgaaattcatttcaactttagtggacatttattcttttttgaataaaatgttaaattatatttaaaagaaaataatttttttacatcaatagttgatgcttcaacttcaatgaggtctcagttgctgccgttggttgactcagatggagtttgatttaatgattttgctccctttaacctctttttcgtttcatctgtttttaagtttagaccttctttattaactcgtttctttaactagattaatgttaatgttcttacacaatggagagggaggattgttatcccattccatggtctttggtggttgtcacattttcctcatttagatcctttttgaggccctagatcacatatctaaaacagaaacagacaaattctaaagggatagttttatacagatatatatcatgaaaaagaaagaacaagtacaacagtttttccaagctgttttgctgtctcaaaatatcaaaaaaacaaaacaaactgataatctttctaatctcctttgaaatatttccggtgacaaaaccaaaaagaaagaccaaacgtctcaaagctaattgtgttgtcactgcgcagtatcaggctagaagcttgagaaggaagaaactctcaaaacagttagattcgagggtatcttctagacttttgtctttgttcttcgacttcattcatccaatctgaaagccacaagagtcccttatagccatagtatgaaaccccccccagcatcgccactaacatcacgaccaaagaaacctctttgtggtgacagcaagtctctgcagagaagcc

SEQ ID NO: 32957 - DNA, 821 bp, Arabidopsis thaliana landsberg
tttgatctttaagaaattactattttttaatgtatgacactaaaaaggaggatatgttacctaatttaggtgcccttctatatgctgaataaagatttacatagttctctagaaccaattaatatgtcatagtccatatagctcgtacgtaattgtattaaaaaaaaaaaagctcgtacgtagtagttaaatccctctttattaagtttcaccccccagccagaacggtttccagggcaggtttaagtgttttcattaaaaaaagctaccaaacctaataaaaatgtcttcttgtacattctccacttgcataataattagagttgtgtttttgtttaattttttttgtaggtttgtacattatattccctctaaaaatggactataattcgatgccatagaccagagttcataaaaacaaatcataaatgaagtcacggagtgccccaacgtcagatacctaactgcttcgcaaaagatttttctctatctatctgcttcaatctgacagctaacaacataagtttacttgacatgacacaccaactattgctataaatgttaattttgtcttaatattctataagcattaatccaagcaatcaaacacagtataccaaatttgtgaaacacacaatctattatagactcttaaatttttttggtgggttttggtgcctttagttttaaacatcttaatatatcaaaattaacattttacgatgtgcatgtttgagaatgtataataagaaatatatttatactagaatatacattttgcagctacaaagttagtaagaattagattacttatactagaa

SEQ ID NO: 32958 - DNA, 7756 bp, Arabidopsis thaliana landsberg
  unsure (1)..(7756): unsure at all n locations
aggttttggcgagaaatttcagatacaaagacgccgagaagattctagagaaggtaagtaacatcgctgtcttctgctgtttggtcgtgatcattcagtgtatgattatgcaattctgattgttccaacaatcaatgtgtagtatagtatgaaattagagaatggctctcaggtttctaatgattcgttgatagttagcttcttgatgaatgatcgctagactttgaaaaagagagatagatgtagcaagttgaacatggtactgaatctaatcctgtgttgttgggttttaagtgcatagcttactggccggaggatgggagaccgtacgtggcattggggaagatactaagcaaacaatccaagttagctgaagctcgaatcctgtatgaaaaagggtgtcaatctacacaaggagagaattcatacatttggcaggtgctggttggcttttaatttgattttgacatgagttttgaaggaaacacttgaagccaactttttgtttctcatgcatatcttgtacctgtctactttgaaacagtgttgggctgtcctggaaaacaggttgggaaatgtaagaagagccagggagttgtttgatgcagccacggtggctgacaagaagcatgtagcagcctggcatggatgggcaaacctggagataaaacaaggaaatataagtaaagcaaggaatcttctagccaaaggcctcaagttttgtggcagaaacgagtatatctaccaaacacttgccttgttggaggccaaagctggccggtatgaacaggcaaggtacctgttcaagcaggcgactatatgcaattcaaggagttgtgccagttggttggtaagtgttttgtatcatcagcatgtttacgatgagaactagccaactaggacaatgccatttcataagctgcatcctgtgattaatcctcttagataattgtgtaaaaagagaatgctactnnnnnnnnnnnnnnnnnnnnnnnaccacattctggccccccctgtattttcctcatcagtcacataatttagtttctaaaaggctgcttgtagttatgaatgagcttcccttttcttactaaatgttcaatttatgaacaggcatgggcacagttggaaatacagcaggaaagatacccagctgctagaaagctttttgaggtaactactaactgctacatccttttttatatttgtcattcacaatgaggtcaaagcagtggaggctgtatattcatcccaggaatgacttactgcctgttaagcgatcgagctacatatgaaagcgtattttattttttcacagaaagctgtccaggcaagccccaagaatagatttgcgtggcacgtatggggggtgtttgaagctggagtaggtaatgttgagcgtgcaagcaagctcctgaagataggtcatgcgcaaaatccaaaagaccctgttctccttcagtcccttggcttactggagtacaaacattcatctgctaatcttgcccgggctttactaaggagagcatcagagctcgatcctagacatcaacctgtttggattgtaagtatacaagattcagtttggttgctctttacatgattgatctgctcaaataggttttgtttatacgttttccttaaagtttgagctttagattttgctaatagttctttacgcccgttttattggtttatcttgtaaattaacacttagcagactttagttttacccagttctatctggctagcgaattcaagagtctttacaatcgtgtatgaaaggggaaatgattggtgaaagtgtattccggtttaggcttggggttggatggaatggaaagaaggaaacacaacaacagctagagaactttaccaaagagctctctccattgatgcaaataccgaaagtgcttctcgctgtctacaggtataactaataaattcttctcgctgtcctctcagcgaatgaacataaacattgtaaaaacgagggaataagacttgctagccaaaaacatttgaatcataaattagctggcaagtttgctaaatcattagcatattattggaggatgctgaaacaaattctttgtctctacaggcgtggggagttctcgagcagagagcaggaaacttatcagcagcaaaaagattattcagatcttcattgaacattaactcacaaagctacgttacatggatgacatgggcacaacttgaggaagatcaaggagacaccgaacgtgctgaagaaatccgtaacctctattttcaacaagtaagctcttgtacacattcttgatattatagcaggttcttcttgtagagtttatatattaatctttacttcattgcaaaacagcgcacagaggttgttgatgatgcttcgtgggtcacaggattcttggatattattgacccggctttagacaccgttaaaaggctcttgaactttggtcagaacaatgacaacaacagattaactactactcttagaaacatgaatagaaccaaagatagccaatccaatcagcaacccgagagctctgcgggacgcgaggacattgaaactgggagcgggtttaacctcgatgtatttttacgctcgaagctgtcgttggatcctttgaagctggacgttaatcttgattctaagaggttagagagattcactagaggaagaataaatggtgcttgaaaaaataagagggatatttattgaggcggtgtaaagatgaagggtcgatgtataatttaaagaattagcaattgttataattttagaaaggttttgggagattctcattctcactataaaagatttggaaagcgagtcccataacctcaccggcggtgataaaattttctcaccagagtcgttgtctcgccgagcagaacgttcaactatgtcttctgcttctccatgggatatcgctgcatcttctcctgttccaattcgggcttctagattttaaaggtgaggctaaatttgtacacaatatgaagaaaggagaagctgtgagggagcaacgacagtatctccctatattttctgttaaagatgaactattgcaggtaataagagaaaaccaggtgatagtggtggttgtcgaaactggttcggaaaagacctctcaatttacacaggtaattatggcttactagggctgggcagggaattcatttactaatacgtagttataaaacaattcaaacattgcacttatattctgttcctttttgttagtatcttcatgaggatggttacactataaatggtatagttggttgcacccaaccaaggcgtgtagcagccatgagtgttgcaaagagagttagtgaagagatggaaacagagttgggcgataaaattggttatgcaattcgttttgaagatgtaactggtccaaacactgttatcaaggtaaggtgttctcaagtaatgaactgatttttccttatcttttatgtttctggtttagttggcctcagaaagcttggcttatcatgcttttagcatctgcacttcaataaaacacgtagatttcttctgcaacttcattttttcctttgaaattacagtacatgaccgatggagtactactgagagagaccctcaaagattctgacctggataagtatcggtatgtatgctttaaccttacctctgatagatcatgctttgaactagataaatatcgttgctaactccttttttggactctgtatagtgtggtggtgatggatgaagcgcatgaaaggtcactcaacacagacgtcctttttggaatactgaaaaaagttgtggctcggcgtcgtgatttcaagctgatagtcacgtcagcaacccttaatgctcaaaagttttccaatttctttgggaggtaggttatcatcatccttcacataagaccaatttagaatctgaagaaggattttatatgacagtgtttttgctttggtaatgcagtgttcctatcttcaacattcctggaaggactttccctgtcaatattctctactctaaaactccttgtgaagactatgttgaagctgctgttaaacaggcaatgacgattcacataacaagcccacctggggacattctcatttttatgaccgggcaagatgagattgaggcagcgtgcttttcactaaaggagagaatggaacagctcgtatcatcttccagtagagaaataacgaacctactcattctcccaatatactctcagttacctgctgacttgcaagcaaagatattccagaaaccagaagatggagcccgtaaatgcattgttgccaccaatattgctgaaacatcattgacagtcgatggaatatattatgtgattgacactgggtatggaaagatgaaggttttcaatcctagaatgggtatggatgctcttcaagttttccccataagtcgtgcagcctctgatcagcgtgctggaagagctggaaggacagggccaggaacatgttacaggttgtatactgagagtgcttatttgaatgagatgttgccaagtcctgtgccagagattcagcggacgaatctgggtaatgttgtgttgttgttgaagtcattgaaaatagacaacttgctagattttgatttcatggatccacctccgcaagagaacatccttaactctatgtaccagctttgggtgttgggtgctctcaacaatgttggaggattaaccgacctggggtggaagatggtggagttcccattggatcctcctcttgcaaagatgcttttaatgggtgaacggcttgattgcatagatgaggttctgacgatcgtgtcaatgctttcagtaccttcagtgttcttcagacctaaagaaagagcagaagagagcgacgctgcaagggagaagttttttgtgccggaatcggatcatctgacgctgctgaacgtatatcagcagtggaaagagcatgactatagaggagactggtgcaatgaccattacctacaagtgaaaggtttgagaaaagctagagaggtaagatcccagcttctggatatcctcaagcaactgaaaattgaactcaggtcgtgtggaccggattgggatattgtgagaaaagccatctgttcagcgtatttccacaactcagctagattaaaaggtgttggggagtatgtgaactgcagaaccgggatgccttgccatttgcaccctagcagtgcactgtacggtctgggatacacaccggactatgtggtgtaccatgaactgatcttgaccacaaaggagtacatgcagtgtgcgacatcggttgagccgcattggctggctgagttagggcctatgttcttctcggtcaaggactcggatacatcgatgttggagcataaaaaaaagcagaaggaagagaaatcaggaatggaggaagagatggagaaactgagaagagatcaggtggagtcagagctgagaagcaaagagagagagagaaaaaaaagggcaaagcagcagcaacagatttcaggccctggcatgaaaaagggcaccactttcctcaggcctaagaagcttggactgtgacattgtaatgtaataaaaaacataccgaaaacgtcacccaaacaaaaaaaacggaaaaaacacagccaaaatggagcaaactgtaatcaccatgtatcgttgttcagatatttcttgatgtgaacaatattaaattgttccacgcttatattgattctttataactaattagttagagatcctctacgtctctagtatagtaaagttacggtccaatttgtgttctctacaactctataataagcaaattactaatcaacagaaatagtcacaatccaaaatggtgtgtttccaccattgatgatttcagctgtttctcttcatagagcatctacattctcagaagatgggttccctccagagttgatggcatgagtcgcgtctagtaatacacttttgagtctgctttgattgtgatgcagtgactaaaataccttgggagttcttatcaacttcaatacgagattttatttttctatcaaaaattaggaatactacaagatatcaatacttttgacttggttaatgtttttttttcttcttagacctgagatctccggatacttcgaacaaaagggttgatcttttcattaatgtttctaatagtttacattagtaatccttcatagtcgctgctacatctcatccttctagagagctgagttttgcccatcatcttgtcgtctctgaaacattctacatttatatcaagtcttatggattttacaatgcttaagaaccctaatttccaaatccagtttttggagttatgtggtacacaaatgtcatcaaatccccctcctaaacaaaatacattttgccatccatacaagtttccaaatctccctcatcaattcacattttgccaccaccatctacaacacctttttgcaactctaatgctccggctccatcatctgtgtttaagccaaaaatcaaagccacattataacttcaattcaacacacgcattgaacccaaagagcagaaggaagatgtggtgaacctgaggagatttagaaagcccctatcaaatattaccgctttctccatctgatatttcttcaagctttgcgatggcatccataagagctagttcatgatcctaccatttccaagtaaaactatatagtcagcatctcttttcatgatattttggagtaaacaactagattcaacaacacatgtatatagttcttactctcagcactctctttgccttctctacctctgctgggttggggttaactgacccaaaaactttttccacctgttacaaatattcataagattaacaactgtaaaacatttattcccatatcaaaaaaacttgaatgattacctcttttaacaatgtctcagtgtggagaatttcgatttcgcctaaagctttctttccgatgccattctgtgtcttaggttgctgcatcctcatgcttcccctacctctaccacccgcattgcttgcaggaccaccacgagccatggtttttgttccacggccttgcccaggatgtcctcctttacgagaaatcccaggatcttcaccttcccatctgatatctcccggagatatctatgatatatatatataaagaacattcagaatcatatgtaaccaagtatccaagaatgagatgagctcttaaaacatacttttgagatgatatatatatatatatatatataaagaacattcagaattatatataatgtagaggatcgagcactaatcatacacttttgtcctctgccccttacagatggcaatcaagaaactgaaccattagatgagaaactaatggatgggtgagggcaactaacaattgtttttaacatcattcatgatccaacttgggtggcagcgaacaagtaaaactaatctctcacttctagtgtgcagaatcgaaatgaattgcagttggtataaaaactgacaagcctctcattgacgtgcaaggaatgtcgaatataaaccatcgagatcataaccaaatagaagaagacaaacaacacatggtctctccaaattttacgacatagcatcatcttctgtacaaatgtgaaagatatattagacaagtagaaaaacagaaatcaccattacctctttaagatttacccattcccgaatttcattcgcagagttaatatcatacactaaagcatgacgcccctaaggaatt

SEQ ID NO: 32959 - DNA, 634 bp, Arabidopsis thaliana landsberg
gtgcgccgaagagatttttatgtgcccaagagattattggatgctttagattattagggtttttgatataaaagaattaggcacataagcatataaaagcccactaacaattttaaaggcccattaaatgtggagagattacatgacgtcctttaagaataccgaaaccgatcggtttaatgtttgaaatcggagctaataaaatcggcttggttcggttaaaaaggaaagtcctctgctagaaatagaaagatgaaagatggaagaagaagacgggcatgtctctgaagattccggctgtttaggatctcaatctgtatgtattttgcttttgatcgtattctctctgtagataatttcaaattgttgggtctaatcggtttctggattatccaaatgataatgacgatgatgttctgatactgatttaaaggatatatatattattattgagcaatgggagcttcgtcgttgccaaaagaatatatcttccttgtgttttcgtttacatattcgtaaagttttcattttttctccattctattctgatcctgggttttatttatctgaatagtggtctgatgaatccatgaatgatttatgtgggagaaaaatgatttgctattaagtttgt

SEQ ID NO: 32960 - DNA, 1470 bp, Arabidopsis thaliana landsberg
acgaacgaccaattcacgaacatgaaagcctagcagcggtttgattcattgaaatgaagaactttcaacagcgctgtctgctcgtgagataccattcttactatgcttgaagcacatactcttcctggagatggagttattcctgtaaaacaaaatttagattccaagtcaaccaatgatttttccaagaaaatgtcaaaatgtttcccaagaaaaaacaaaaacctgttgcatgatcttggggaactcagagcaaagacctttacgaccaggttcgtcaagggtcttgtctagcattatgtcttgaagggctacaagagtcgtttccagcatgtctaaaccggtttggtttgcgaatgtgaaaaccggtgaagcctacagatgagaatttatgtcagtcatctcaagaacatgttctagtcacaaatacaaaatctgaatgggaagccttgttacttacgtttgttttgagggagcagcacaagattgcatcagagtgattccagagttgatgcagcaacgtgtcaccactggtttgagaatcagatccaaagagatctgcaccagtgtgaaggctacaaagccaaaaagaaaagaagagaaattcagataaaatactccatagatcatgtaaacaaaagcagaaacctagaggctaatgataatgaagtacctgtaactccgggagatccaacggaccagagtgagagcttcaggggaagtgggaacagatattggactgatattggagccaggacgaggagcaatggctagagcaaccctctgaatcgatcctactatgcttcgcacgtactgacgtgccattgaagcaacactgtctcttgaatggttatcaaatgtgaactggaatgctatggttagtaccgacctaaagttacagccatttgggtcggcttcaccagcttgacgtgtggatccttctaaagctgaggctaaatccagggtacggtttgcagatgcaccgttctatatgacagtgaaggattagaaatttagaatattgcgtcaagaataaatgatttgggactgatccttaaatggctttttggcatgttaccggagtagatttctgttcaagaggtatgatgcggaaaccggaaggaagcaaaggtgcatcatcagcaaatgattcatcgataggggcaaatacaagctgtgcacaacctccaaccacattttcatcaacaccgctacaaagctagacaagaatcaagaatccaaaatgtcatgaagagaacaaaggagcatagaaactttggagttaaagtatgaagtcaaacctgtagcaaatacatatcccgagctaaacccatgtcttcgggtgagtaagcgtgaccttcaagtctaaccacctcaagtgactgaaacaagtaaccaagaaaggtttcaggactataacacgtatttagagagaggagaaagtgaagctgtgttattctttgataaaag

SEQ ID NO: 32961 - DNA, 775 bp, Arabidopsis thaliana landsberg
aaccaaaaaccgaaccacactttcaatgaattgtttttaatataatttttctttgttctcttatacaatgatttttttttttttgaaatcacatatgtctattaaaaaagttattaatgtttaattatgcatatattattttctacactaactaataacaattcataacatttaaatattttcacatattttttttttgaatttacaatttctaaaataataataaatgcattaaaaaaatagaatatttatttttcgtggaacaagaaaaccattaattgttgacaaaaaaagtcattaatcttcaaaaaacaaatggaatatatataaaaaaccgaacaaaatttaaaccaaactgaagaataatagtcagatcttaaatcaaaatttcgttgaaataaggatttaacaaaatcaaaatccaaattcaaccaaattatctattttagtttgataccattatttatataaaccaaaaaatctaaaacaccaaaaaccaaaccgaatctaaaccgaaatacggagtcgaataacacttgtacccactcttagaccctctctatgaaccagagactgtctcgtttctcccgccaaatgataataccatgaaattagggtttacgaagctattaatcgtctctccttcccaatttcttccaggtagaatctctcaaaaacattgagattcatcgattcatgtgttgaatttgacgcgaatttgatttcagaaaggccgacgaagaagactctctctggcaattagatattgcaaacg

SEQ ID NO: 32962 - DNA, 894 bp, Arabidopsis thaliana landsberg
tactcctccaacgttttcaatcactgcaacaataatgtcgtcgtaaatagacttctgctctagtaactgacgtagataccatccactgctccaaaatattgttctctttaatcatcaatgtattccagattattatcgaataagcctaatgctttacaagcatctttcaactctttatataccacaccattagctctctagagctcttcaaaacatcttggtcgtggttgaacattgaggattattctcaaatagtattgatcttctatatcacgaggaacatagtttattatttctatagcaaaacctttgtttctgaggttaaacttcttttcttgtgcatcataggtaaatctagtggggatgtctgcataagtcagcttcctagcaatcttactaactttatttaattcgaaccaagcaaggaacatagagccatgtagatcagtccgataaaaacactgtttttacttcttcatcatgtttgaaaacaataagttgttcccctggcaaatggaacgaaagcttcgaaacaaccgtagatctataatgtataggatattttaatattcttgaggctgctttggaagaagaaacatatctgaaattcaaaattatacaaccaaaaggaacatatatatatatatagtattaatactaataaccttttaataaaacataccaggaattcaaaaagtcttcacttcattcttcttctttatctctaatccatctgaatcagcattgtctttttgtttaccctttcttttattttttgactttgaatacgattcaacaacataacacgatctggtcctttatgaatataccttaaatatgtatttgacaaaacatgtttgttacaccactccacgttgatgtgagctctgtatc

SEQ ID NO: 32963 - DNA, 1502 bp, Arabidopsis thaliana landsberg
  unsure (1)..(1502): unsure at all n locations
tgagttttagggtttctttagaaatctgtgaaattttgtaaatttggcaaagataaagaagctctagtaaaagcttgaccgctgtttgtgttgatatccagggttagggtttcgacgtcnnnnnnnnnnnnnnnnnnnnnnnnncaaacaaatcggggaagaacaaaatctcgtcggtggctactccgacaagaagatatttggttgttcaggaggagattttggcgacaaaacatgaaattctcaaggagaattatgagaatttggaaaaagattacaaaagtatagaggaaagttttaagcagatgaatgaaatgaacgagataatgaagtttcaatatcagaagcaaattaaggaactcgaggagaaaattctaagcttgcttaaggatttagagaaagagagaagtgagaaagaggagtatatgaaggagatgaagggaatgatcagtgagaaagaggccattatcaatgatttgagtgttaagaatcaggagcttttgattgcgaaagaggaagaagtggagaagctgaagaagatggagaacaagtatgctgaattgaaagagagatttgatgcggctgaatcacaatgttcattcttgaaatcgctttttgatgctgagaatctcgccggtctagggagtagcgatgtggctttcgaaaatgaggttattgtggtggaggattataatgtgactatcaagaatgaggttattatggtggatgatcataatgtgaataacactccaacaggtatgtatgtatgttcttgatatgttggtgaacctctcttgtaagaaaatttatttgaatattttctgttgtgtgcagatacgattgtgatccttgacgagagtgatgctgaaaatgataatcctcatccaagagagagtaacataatctctgaaaattctgttgatgtaaaaacagacaacaatcagctggccanngctcatcaaaagtaaatcgtctattgtcatcatcgtcgtcatcatcatcatcatcatcagttgaacatgtattcgttgagcttccctttaaaaggtcccgggatatttataacaagtcttgaacctttctcgatgcagtgatcactgagccagaagaagttgctcactcttaagttaagctagtttaaggtatatcttatcgatcctccggtttattgttttttgttttgtcccggaggttgtaacattttttggacgagatagataaaaaaaacgattagtatctgattaggtgaatattttggctgtatgttttttgtaaaatgtttggattactcggcttaatatcaaatcgcatctaaatcgctttgattcttgagtcactcctccatacttaaaacgcctatagcattgtataagcataattacttaattagtgatgattatgaaacagagacaataaaataaaataagtcttaaatctaaacgcttatttaaatggattctcggaataaacaaattggcttttcttcctcattctatacactc

SEQ ID NO: 32964 - DNA, 967 bp, Arabidopsis thaliana landsberg
  unsure (1)..(967): unsure at all n locations
tctgcaatttcctaatgtttttgtttttgtcaattattcaatttgaagaaaccttattctgtatgattaggtgaagtttgtgattgaattaggtggtgttttagatctatttaaatttggtctgtccttgaaatattttagatgttcagtgttgttaggttcaatttctgtggtatgttttgtttttagtatttgtttgtagatggtgaaccaaatttgatctgatgcatgatttgtgaattttgagctgagcaagatttnnnnnnnnnnnnnnnnnnnnnnnnnnnnnnnnnnnnnnnnnnnnnnnnnntcgtgacttcgtgattttttctgaagaacaatagataatagatgcacgttgaatacaaaaaaagttgtttggatttggatttacccttaaggttttaagatagtaaatgactctgaacgagtcggcgtagaaggatagtggcaggttttcatctgtctgttatgggacatgaatatgtgtaggctcaggtaggaatgttttgtgttctaagattttggaaatatatcaagctttgcatctgccggagctccttcagacaatagtagctctctttgtgttaagggtgtggctcgaaatggttctcccccatggcgagaagatgataaggatggacattacatatttgaactgggagatgacttaactccacgctgtaatcccacttttctattaccaaaaaactgttttgataaaatcctgaagataccttttaaatttctctagatttttttgtcaatggctttgaacaaactctaggtgttgtggtggacctcgtgtatattgttttgatttcagtattctgatttctctatgctcttcttgctttgcagataaaatttatagcaaaatgggggaaggtatgaatttatggctgctgtacaagttattttcataggtcccgtgtagttatcgcatctgatttcctaaactttcctt

SEQ ID NO: 32965 - DNA, 5450 bp, Arabidopsis thaliana landsberg
cactgaactcgcaattcactatcttcaaacaaaatcaaaacttctcgaattgatctgccagttaggttccgcaattgattcagataccaaaatcaatctgagctagtcagagaaacaggtcttaaggaacaattttacgaaaattggaataaattaggtcaagatcaaaaaggtcgaatcaatctaaaccttccatgacaagagattattccgcgaaacaatagaaaacaagggtgaaactgaaattataaaccctagagatacaacacattcaaaattgattaacaaataaattaaagagaggaaaaggcgcgaaagcttacgaattcgatgagcttctggaaaaaatctgggcaaaatggataattgatcgagaagaaagatccaaagggtagagagagagagagatagtgtctctgtccgcgaagaagctcaatgtacttacttcgtcatttaccaaattaccctcttctctactactaaacaagagaaatcaagggtatactcgtctttttaaatatcctctttcagttaaaataatgattcattgtggatttaagcatataaatagagaagagagaaatctatatcactttccatcaatgtgtgatattgtagtacttaagaaatcataatctgtttaacaacatgagtttatgtatgaaagataggctcacaaacatttgagaatgtttcaggtaaagctatggcttcttctcgttgtttatcttcttaagcttcatttattcatgtagatagagagagtgtgatcaagcgtagagatcaatgttccaaaacttggctggttggttcgtgcggtatttcctctccatgcttttgatcacttccatgtcctctttcgatagttcgaagtcgaaaacctgaaagttctcttccaatctcgcaggctttgatgtctttggtatcaccaccgtttttctctggattccccacctcaggacaacttgtgccactgtctttttgtacttctcggccacatcctaagaattcagataaacgcagtccttttttaattgtcaaaggttcaatccaaacttttaaggtttagaggatggggcttactttgagaactggatcatccaggcatgacacggtgccaaaccactcggcattggctgtggcacctccgagaggagtatgagcagtgacacagataccatgtttctggcagaatttgacaagagaatcacgttggaagtaaggatgtgtctcgatctgattcacagcaggtttgatcttggagtaagccaagcaatctctcgttagaaagacatcatagttactgcaaaaaacctaatggtcaaaaaattcatatattggcgactaaacaagagaacttgtaatgatagtgagagaagttgaacctgattccaatgctgcggactaaacccatagaaacaagcttttccatgtcgtgccatgtagtttccagagagatggtcgtgtctatgtccaataccccgtcatcgcccaaagcactatcggttgtccctactcctgcaaagcatatatagaagacacttaagaaaacttgatctcagtcagtgaaaaaggaggacttgtaataaaacgaaatgcaatggttctctgactctagactaataaaacgctaatgaggcagaggcctcaccggtgtgtttcgttgctacgggaaaatgaacgaggaagagatcgaggtaatcaagttgaagtttcttgagactgtctttgcaggcctcaatgacatggccatggtctgaattccatagctgcaaaaaaccaattcagatcacagatcagagcttgctcacattaaattgagatcatagctgtatagttttcgattggaccttggttgtaatgaagagatcctccctcttaaccagaccagtcttgaatgcttctgtaagagcatcaccaacttcggtctcattcctataatcagctgcaccaaggaaaacgaacacaccaaaatcaagacttaaaacaacgcaaatcacacaatagaattaaaacaaagctgaactctgtctataataagtaacaagttaaaagctattatagaacaatctgtcatcaatacagcaatagaatctagatcattctatgattccaaatacttagaacttcagaatcagatgcaaataaagatgtacagagagcatttactttagataacaagtttatagagactatgaaaaaaaaaacaaatcttaaagacatattttccaagaaagattccaactatcaaaaagttccacccaacccagtattcaaatcacatatccaaaaaaaccagaagcaacaaagatcagaaagagaaggttttaagcagtgttaagttagcccagcacagtcgagatgacgatgtccgatcttgatggcatttaatgataaggtctccaagctcgtcttttttccattctccaaactcctaagccgatgatcggcattttgaagccactgttcagtgtaatctccatttcttcttcgtgcttctctcctcaatccgtgattgggtagatatctgctcagaattgagagtttcccagtatggtaagttggtaacgcacacgttaatataaagtggtcatgattcctcactattcgaggcccaatgggctagtaccgttttttgtgaagcccaaactgttttacaaagacatgaatcaatacgcaccgcatgggtatatatatatacaagcaacgttatcacaggtcctcaaagtttgcatctttacttgggttgtgtctggaatcaattacttcctaaaggtaattttattggtcgggtagctcaatcggtggtttttgagttcttattcttctctgataatctcaagacgagctttcaattttgtaaagtttttagctttggtattgtttgtatcgatcccactcttgatcggaatcttctgttctggggatttccggtgaattgtttaggaataggtttccaaggatcttacttgggtaggtttccaaagttgaatcgttcttcgaattttagtttttttttctgatgctgagattcgaaatttgagggcttaggttttagattaaagtttagttatctgttaaagtcactaactttgatgttccttccggtcggaattgttgccctcaattgattattgaaacccgtaaattaaagagtgcccttttctcttttatgatttggatctcttgtaattgacttgtgtgaggtttctttttctgtaggttgccatttgttaacttactctgttagtctactaccaccaataactatggtaagtgtattcaaagctttcctttttaaccgtttgtcttcactctagcttgtttatctcgcacccttggtttgtttgtctaaacctttggaacttaaactcgatgcagtttttcgatggataccattatcatggaacaacctttgagcagagttaccggtgttatccggcatcttttattgacaaggtttgatttcatctctctacttttagtttaattccctgataagtgaatctgagagtgctcttttgtaatgttaaaatcttagtcgttgtcatgttctactaagtgagttctataagaaagctcagatctagtaatgttaaaatcttagtcgttgtcatcttctactaagtgagttctataagaaagctcagatctagtatctaatttctatttccttttttcttccctgcagccacaacttgaaagtggtgacaagagtaagtcttctatctagacaccaatgtttgtttccatctatattgttcaagcctgaggttttaatttgtgttaattatatttcagttataatgccaccatcagcccttgatcgtctaggtatgctcctactggttttctcttttggatttggtctaatatttgtttaacttagaaatatatcatatcgctaatattggggactttacagcctctttgcatattgactatccgatgctgtttgagcttcgtaatgctggaattgaacgtgttacacactgtggagtccttgagttcattgcagaagaaggcatgatttacatgccatattgggtaagaatcagtttcctctttgtttgtgaatccaagtactctggatcatacggacttaccagactgattgtttgcttctttgatataatccagatgatgcaaaatctgctgctgcaagaaggagacattgtgagagttagaaatgtcactcttccaaagggaacttacgttaaactacagccccacacaacagacttcctggatatatccaaccgaaagccatgtgagtccgacttatttctaccctcttgtatttgagccctcatatactttcccacatcatgttgtttattgcttagagaatgtattattatatctaagttcttcccgttttctggctcgtagttgtttgatgtcactctttttatcttgttcccaatattctttactgataattgagtgaacgttgcagcttggagactgctttgagaaattattcatgcctaactagtggggatagcattatggttccatacaacaataagaagtacttcatagatatagttgaaacaaagcctgctaacgcaatcagcatcatagaaacagactgtgaggttgatttcgcacctcccctcgattacaaggagcctgaacgtcccacagcacctgctgcagctaagggtccggcaaaaggtatgtatccatggacatgaaatcatcagatggacttactatcagcttcaagttgttagattctcatgtgttcttttctttccaaatttcacagctgaggaggttgtggatgaacctgaaccaaagttcaaccctttcacgggatctggaagacggttagatgggagacctcttgcctatgagccagcgccagcctctagctcaaaagacaaacaacctgttgtcgctaatggtaatggacagtcatctgtagcaagtagctcagagaaagctacacgagctcagggaaagcttgtatttggggccaacgcaaaccgtgctccaaaagaagctgctcctaaagtaggcattcaaagtttattgataattgacaaaacaaaaactgtaatggaattgagagacaaatgcatatggttgttcatctcttaattattattttttcaggttggagctgcaaaagagacaaagaaagaggaacaggagaagaatgacgagcccaaatttcaagctttctctgggaagaagtattcattgaggggttgatcaactcacacaatgggtctactcagtctatttatgacctctcatgttgtgtactaaaaatacaaggaaaacaaataagtgaataaatctctggctcctcttgacgcggcttgttttctttatcagattcaatgcaactttctataattctctgctcttttatattcttactgtaggatataagattctgagcacctcactaacacaatttgttcatgaaatagcag

SEQ ID NO: 32966 - DNA, 550 bp, Arabidopsis thaliana landsberg
gtttctcactggtgacctgttgtgtcctgctcgtcctactgcccctacatcgcccatgattccggataaggctactaacgagatggagttacttgtagactgacaatcagaagtaggatgaggttgttcatgatggtgctattcttgcttgtagtttggaggatcgtcttgctactgatattgacattttccccaataacctcctccaaagtgctgcttctgaggacattgatcattgcccccttgtgcttggacttaacagcaactgctttggcaaaagaaggttccattttgaacccttttggccaaagttggatggattccaggaagctgtcagtgaagcatggttgtctatcgatgatggagtctgcctagttctaaactttgacaggagattaaaagtcactgctagatctttgcagaaatggagtggaaaaaagattgggcatgtggcctcacagttagctttagcaagagagattcttcacaggcttgaaatagcccaagatttaagacttttgtcccctttggagcgattggctgagatgtg

SEQ ID NO: 32967 - DNA, 1242 bp, Arabidopsis thaliana landsberg
atgccactcatgtcaaacgcctcaacttcttcgttatcaacggaggatcttcttccccgagatgaactctttctccttgaatccatggagattggtggtgagcttcaacagggcaaacaagaacaactctccaaggggtatcaaaatggaatggattcggtttctttggtgatgaaattttgtgcttaaaaccgattaaatgtgtgaggatagacttgggagtgatcgagtaactttggtgaagtattggtgaaggtgagaacgaattcttgaagagtgatagggagagtttggaatgaaacttttgaagctttgtgagagatagagaattgcaaaaatgagatgatgaaagagagagtttcaaaagggtttggcgaattcaattcaatgggtggaggagaatggtctttggttctgttcttggaagagatagaaaagttgattggaaatggtgaggagcatgggtgatttctttgtccatcgagtaaaggagtgttgggggaataagtggggtcacacaacttcactccttggtctccaaataattcaagctcgagtaaaggatcgagcatcttctagaattacgcattactcgatcgaacggtggagaattccttgttcttgatcactcgatcaaacggaccagaataaacctcaagaagtcactcgatggtgaggcttgtctcatttggtcattcaatccaatggcttaaagcagtcctcctcattgtactcgatcaacggttgagatgattcttgacttgttttgaatttagtcgaccgttgacttcctaagggtcaatagaataaacctaaaacacttaaacaaaaacatcaaaaataacaaggaaaatatatagatatatacatggatagacatgggacttcctcccaagtgagcttgtaataagtcactaagcgggactcttacagagcttagtcagaaaaaaggatgaagagaggaacagagaagtcctcatcttcagtggatgaatattcagatcctgaatcatattctgcatcctctcttgacatatggtaggatgagaactcatttgatttttcttcaaagaaagcttctttctaatcagcagagtattcatcttcttctgaaccaggcgcctttgaccaatcctcaaattcaaaactaaggtagcctttaaccgtttattgaagttccaagatcgcatggttcagtccttccatcttgaaagatagctccccaatggtatcctcttgagc

SEQ ID NO: 32968 - DNA, 2012 bp, Arabidopsis thaliana landsberg
cagctttggcactgtgaaacaaccttaagctctcatatgtatgaagattaaccttcctgatctcatcaacatcaactgaaagatatgaagctactttttcaatgatggcttctcctatatatgatccttgtacatccccaggagctctcagcgcggttctgctcacagtgtttgttttgcatactttcacattgaaagacagagcaccccaatcatacttcattagtgctccttgtattcccttcggcataagcgggcttatatcttcggttaaccctgcatcaagtaacacctctacatctaaagcagtaatctttccattggatttgaatccaacactatatgtgactttcatcggatgtcttcctccggtagttatcatatccgtttttcggttcacatatgtcctcaccggacgctgcattttggatgctgcaagtgcacaagctgcagcaacctagaaaacaatttgttgatagaaagagaaatgttaaagccaaaacatcaaaactctcacttgatagtactttcaaaacgcgaactcacaggcattgatttcacggctttcccaccgaatccgcctccaactcttctagtgatgacacgcacattgttctcaggaactccaagacatccagcgatggtttgatgtacaaactcaggggtttgagtcgagctataaaccactatacagttgtcttcatccggcactgcaagagctgtttgtgtctccatatagaagaagtactgtgacccgaaacttatctacacaatcacaaagattttatatgatggttagaaaagagcacggctttagaggtgtatatgtcttggaaaagaaccacctttgatccaagaatcttatgttcagcttcatccattcccttggtgatatcaccaaccgggtaaccacgcagaggtggagggacctcgaaaaggctaaagttttcgacagcttcttctaaggacagtataggtggttttaaatctttggtgtcgtaatctatcacaacaagatttgctgcaatatctgcatgcttttgactatctgcaacctgtagataaaacatattgaatctaagttttattctaaataaaagattcagagaaaatgagaattcttcaccaaacttaccaaaaaggcgattatctgacccgcacaatgagtgacttcttctgcgaacaaaagatccgaggtaaagaaaccgttggtaccgatattttgcccgcctttgggaatatctttgtaagtaataatgccaagaactccttctggaactctgttttgcttgaaccttatacccttaatccgcgctagcggcattgtactgtaaataaatgcgccgtatagacaattttccggagcaggaatgtcgtctacataaacagcctcacctgaaaatatattacaacattaacaaagaagcaatgtttcacattttcacctggaaaatgatcaaagagcactcaccagatgcttggagacaagctccagcctttgtaatgcctttcccgaccggactatgctcttgattttcaactatttgttgtgcagatgacagcatagcttcaggtttcaaagattcaacattctgatcaaaaccaatctctttgcatcctccattgagccaaccgtttgtcgttttagcgttttttttagttaaagatccgaagaactcgaagagaaaagtaacagccaagcttgatctatacccgggattcgaagtacccttatcaggtactatctcatctttaagtaagctaatagctaccatcaaaacttcatcagatatcacttttcctgtaagaaactcttctactttctttgccctgtgtgcatgtttggtcccataagctccaaaaactaattggcaatcacatacaacaacgccatcacgtgcttcagcaacttcagctgagaaagccacatacagacatgccaatgcgggtccgagaggacgaggcgctgctctgtaacctccaaatagcacaatactatctactgaaaaacc

SEQ ID NO: 32969 - DNA, 1348 bp, Arabidopsis thaliana landsberg
aaaatgcatatcctttgtggttgacctcggttatctgtgagatctggtttgcattttcttggcttcttgatcagtttcccaaatggtaccccattaacaggtagacttatcttgaccgtctcgctataaggttggtctttataagttgatgatcatctacatctggtttacattacttgcatttgactttttggttttaatccttaattatagatacgatcgagatggtgaaccatcacagctagctcccgtggatgtgtttgttagtacggtggacccgatgaaagagcctcctcttgtaacagcaaacacagttctctcaatccttgctgtggactacccagtggataaagttgcgtgttacgtttcggatgacggttcagctatgctaacttttgaagccctttctgaaacggctgagttctcaaagaaatgggtacctttttgcaagaaattcaacattgaacctagagctcctgagttctatttttcccagaagatagattacttgaaggacaagatccaaccttcttttgtcaaagagagacgggcaatgaaggtcacttggactactataattgcataaatagcttctgcttgttttatccattagacatatatacgagactaaagagtgaatgtcacattttcttatgtcccacgttggcagagagagtatgaggagtttaaagtgaggatcaatatcctcgtcgctaaagcacagaagattcctgaagatggttggacaatggaggatggtacgccctggcctggtaacaaccctagagaccatcctgggatgattcaggtacactagtataatcacttccttttatagtaattctcctagatgggcaaatatttatctataatgtttgttgattctaattattttgttacaattcaggttttcttaggccatagtggaggtctggataccgatggaaatgagctacctaggctcatctatgtgtcccgtgaaaagcgtcctggatttcagcaccacaagaaggctggagctatgaatgccttggttcgttttatctttcgtaaatctgttgtgctctcttttgttcaatggcttggaaacggtttattgtgttattagacaagaagctgtgtatgctgccatgactacatctctagggaatttcttagtctattacttgcgagtatgcatttcttctgatctagatttcttacattttgacagattcgtgtttctgctgttcttactaatggggcatatcttttgaacgttgattgtgatcattacaaaaacaacagcaaggcgattaagaaagccatgtgtttcatgatggtccctgcaatcggaaagaagtgttgc

SEQ ID NO: 32970 - DNA, 467 bp, Arabidopsis thaliana landsberg
ggggggattcaggtattggtaaaagcatcaactgttattttttttcaaatgcggctgataataaccggaggggggcctttcaaggactggagcacgatatcacagacaacgtttctcctggtttttcatatgaagtctctgctagtgctagagtatcacgacccgatatagggaccgcgcaggtcttggacactgtgaagttagagcacaaaagctcagctacgcactttcgactaattggaaagtaatggaaccacataacttctttgtgatatatagtcaaaaagacccagaaatgttgacattgataatgtttttatctgcagaacttatgcttcgaaagatatttgtaaaactctggaaggaacttttgaagtgtcaggaagacctgaccgtgttgtattcttcttggaagggccacctcctggaattgcccttcttgtaaagtcaaacaccatccaaaacga

SEQ ID NO: 32971 - DNA, 575 bp, Arabidopsis thaliana landsberg
cgagaagacgatttatgttctgatatttgttgtctaataatttaacattaaatgttagtatttttttttggaaaaattctttgtaatgcccttttcacactaacccttttcaattctacttttttctatttatcattttcatttatatcctatttaaaattttaatgaccattttacccctatttgtaaattgatttaggttaacaaaatgaaatatttatatttttctcctaaaatattccaaaataaatttttctgccaaaattttcccgccaaaaaatttcggaaaaaacttttccgccaaaaaatttctcgccaaaaaaaaatttcgaaaacatttttcccgtattttttttttttggcgggaaatagatttacaagagattttaaaagatttacaaaagattttaaaagggtttaaaagatttacaagagattttaaaagggttttaaaaattttacaagggattttatagggctttaaaaaacttacaagagtttttaaaagatttttaaagtgtaaaaaagtgttttaaaatatttacaagagatttttaagtgtttgagttatgtca

SEQ ID NO: 32972 - DNA, 261 bp, Arabidopsis thaliana landsberg
cggaaagaatcctctttttccttcgctataaattcaatcaaattttaattaacaatccaagacttgtaaactagatccatattgactatcaagaataatttcatgaccagttaaatgattactctccactgcgatctgcactaaccattttaatattcgtatttatattatgtcatataaaccatgctaacgactaccttatgatcatgattgacgtatttctccggattcataaagttcttccatcatctttgacacatt

SEQ ID NO: 32973 - DNA, 1123 bp, Arabidopsis thaliana landsberg
tgaccaaacaattaattctgattttataactagtaaggaacttttgtataatttgatccgtgttccattatattattttttaacaagaaaatattacatatatagggataccggcctacaatgcatatgtgtttagcctattaattcttaactacagaaacttttgatttttaatactaaaaccgaaaaatctttttctggtgaagttttgggccatactatttgattgagatcattaattttctgttggagaagttggatttataattatatgtttgagagcttaattatgttttttaatttattgttgcttgttgccatcaaagagaaatttaaatgtatattctgtatttttttttttttgtgtcatagaactttaattttttggaagattcttcttcaaatgtggaacttcctgtatcacaagttcttgaaatcgatcctactttttcatcatatgatatacatgcaattaatttgcttggatgagggggaaatcgaatggtcataataataaaaggaagcttctcggcctaacaaagatgaggttgccactaatctccaaccactgagggaatctttcttaccaaactagattaactgccgaccagaccacaggcatataccctgtgcccatttctttccattataacatcatttttattttaagttaattgaatctacttttgagtttatttttccagttacgaaacgatgttttttctattaaaaacaatacaacacatcggagaaaaagtgtgaaattgtaaatacagagcaaaataagaagtttctctcttttaggaagtagcagcgcagaaagattcccaattgagcaatcccctgttatcccgatcgccgtggacacatcttcttgatacttgaacattctcaatgcccatcacttcatcttcatcttcatcttcttcctcttcctcctcctcctcgtattcttcggtttcttcaggctcaatagtctcttcttcgttctctacaaactcattgcagtctttcaagatagagagacggagacgaccattgctacggtcagcttgaaagcatccgttacgaggaggcgcgtttgtggcgacacatgaccaatcttcggttttcacggtgtggt

SEQ ID NO: 32974 - DNA, 723 bp, Arabidopsis thaliana landsberg
ggccttatatatagtcaagcaagatgattacattgggtaagctttggagcccaaaacaaattttaggctttttcaaaacaacccttcatatctccgttcttagatgcaatcatcaggctcctaaagaagtaaggtgataaaaaccaaaattcaaaaaaacgaatcaagaatatgcctcataggtagtgacaattgtgatataattcatcactatgaaaatctgatgaaaacacatcaatagatatacatcaccggcacaaaacaaaacatcattaacaatttaaaaggtgcatcagagagattcccatctagacttaatcatcattatacttctcccaaaggagaatctgatgtccctgtctttttatcatcacttgcacacacactaaacttgtaataaaaactagaaaaaataaacctattcacatccaaacttcaaactggatttcataaccaaagaaaaaaagaagattctaaatgcctcagagttgatttttttttcgtagagacgcatctctcaaagtatatttaacaccatcacaggcatcaaaatcaaaatatacataacaaaaacaaccaaaaaacttgcaaaaagatcaaatctcaaaacattaacataggtcaattctagggtttatcaagaagtgataaatagacgtatttaagaagagaggcggagctaattagggcagagacaagtaaaagaaattaatgggatttcta

SEQ ID NO: 32975 - DNA, 1583 bp, Arabidopsis thaliana landsberg
ccgagagagagagagatcgtccgaacccttaaccggagagatagagagagagtccgagctagaaatcaccgagccttaggatagtccgagagagagatcccaagtagaaaccatcggtcgagttaagaagattcatcggtgattatgggttccgtttttgttttgcatgtatgattatccttcttgcatgttctcgattctcccttctcttagttttgtggttgatgtggttgaatttgttgaggttgttaaccgaatagctggattgttgaaaccgaagcaccttcccctataggagtggttgtgatagaatagcaccattcgcttgagagggatggttgcgttgtcaagacactactcgctagtattcgggagacttttagagagaactttatgaacatgtgtgttgaaaacaaaccgcatgtttcatagtgttgattggaagatcgtagtgtgtggagcgtggagagtatccaatttaactccataagcatgctacggtcaagtgggatgtatctgaccttgccatgtgagtccgttctttcgtggggtgtgcttgacgagatgcaagtgacctcaaggggttcgaaggacccagagagactgggttaggtacccaaggcccggtgtcgcttacacgacagtgtagccaatgtgatgttccggttatatgcctttgtggttataactcgggtgttcacgatatgttgaggaaggcagtgcattcgggccctaattaaaactttaagaaacgttatctccttgttgtgttgtgtgttgcttacttccttctttgtgtactctgattatttatgttatgcatgtgggattatgggtggggattagactaacatttccttgggaaacccgagctcactgagtaatactagattactcatgattctacttgtcttacaggtaaccttagaggggattagagggaatggtgaacgctagggaacccggagtagtttttcagtgttcttttgtaaaactcaaagtatgtattttagaatcgtgtacttttgggcctcatgccttggccataaaaaaaaatatttatgttgtgattttcccttgtattttcatcactcttaagtaattaaatcggtatttattttatattttacgaattttaaacttataagtcttagtcctagtcgacacaacatttgggtgaagtgtgggttggcaagcctaaacggatcccaagtggggaaattggagatcttgagtgggctaacggtgaggatgtgttcttgaacctcgactacttaatgagaactcatttatattgtgaagtctccgggccgtatcggattagccgagtcctagtacggtctggggcgttacaacggtggtatcaaagcatggtttagatgcgtttgggatccgagttttcaaatgttttatcgagtaaatggtcgcaaaaggcattttggataatctggtttgttcaccactattaggatagaagggggggggaataaaaacttaagaaccttgttgaaatggattcaaatgtcaaggcaggggtcggacaggaaccagtcgaggaatgagatatctagccgtgggaattt

SEQ ID NO: 32976 - DNA, 2341 bp, Arabidopsis thaliana landsberg
tagaaaatgattcttcatatttttgaattcgaaaattctttctttatgaaaaaccaaaagccatttcgagtggggtcatagaaaattacaaccaattagactttcatagtttaatgttacaattaatatccaaagaaatttattaaaatgaaaaagtttttaaggtgatccttgaagagtttttatattacccaaataaacgtcgctttactttactagtcaacttacaaaatcagcattaaccacacaaagcaataaacaaaaaagattttttaccatttgcttaccttatccaaatctgctcccactgactcttccttcaatcttctcctctgtaatctcttcacaatcccaaaaaatctcacaatcgttttttgcttatctctttcaatggacacctctctctcccaccacggatctctcccgtttcccccatcgcgccgcaatttcgttaaacaaaaccgcggcggcgattgcgtttttctcccctcgcgtcgtaagttccgatacgattcgttggtggtggtttccgctgcgtcttcgggacagagcatcgacgcgcctctagttccacggtcgcctcagggaaggtttctaagttccgtcttggtgaaaaaacggcagctctttcatttcgccgtcgctgatttgcttaaacagctcgctgatgataaggaagcttccttatctcgtatgttccttagttatggttccgatgaagcttccctccacaggttccttttaacctccacttttcttaatcacaatcgcaagtgtttgttgtcactgtagaatcgccgagttgtagaagaaaacaaaatctgtaaaattgcagaatccagaaatgtttgaatctttggttgaatccagaaattatgctaatcaatggtttattagtgttggttatcactatggaatggttgtttctgttttatgttctatgatctggcttttatatggagactgattaacgtatttgaatcgatgttttgcagaaggatagctcaacttaaggagagtgattgccaaattgcaattgaagacataatgtacatgttgatcttgtacaaattctcagagataagagtgcctcttgttccaaagcttcccagttgcatttacaacggaagactcgagatctcgccttcgaaagactgggaacttgagtcaatccatagctttgacgttcttgaactcatcaaagaacatagtaacgcagtcatcagtttaagagtgaattcgagtttgactgacgattgtgcgacaacggagatagataagaatcgtctcagtaaagtatacacagcttcggtcttatatggatactttttaaaatctgcttctcttagacaccaactcgaatgctcattatcacaacaccatggaagtttcactaagcaactgaggcattacatttctgagttcgatcccaagatattgcggagatgcgcaaaaccaaggtcacatgaagcaaaaagcctgatagaaaagcagagtttagctctttttggtcctgaggaaagcagcaaagagagcaatggaccatcgttttctagcctgaagaggatgcttcatgaggctgtggcgtttggtacgtttctatgggacacagaggagtatgtagatggcgcgtttaagctcaagtagtatgagaatccagagtaataaccttatagcagtgtttcaagtatgtatgaaccagtttgctagaagaaaacttgaatatcttatatggtggacattgcatataatatatagattaaatcagggtcaatggctacatgaaattatttttgtctatagtttgagtaatcatatgtatagtgtataatgcatgatttaatagagagattggttttgtcattttatatatccatcaatatattgcaacttcagaggaaaagaaaatagttaaaaaccacatttattctaggtgtctctcatatttgaccagtttctcatctctcatcaattttcacttgtggacgcatgttagttaattgaaaataaaaagacaaaatttatatgtaaatgcagtatactgtatactgaatatagtaattatgtttttagttactactccttatgtttcacaaaaagtatcattttacaatttttaacacaaattaaaaaaacatctaaaaatttcttttacctattgtaatacactttttatttttaattaataattgaaaaaacagaaataaaacagatatttgatttcaaaaacggcatcgaaaacacaaaacaacaatctttgttaaaaaaaacaaaaaaatcttaaaacgatattttttgtgaaacagatgaagtattttaaattaaaaattgtacattaaag

SEQ ID NO: 32977 - DNA, 724 bp, Arabidopsis thaliana landsberg
tttgtttttcttgtgattccttgtctttatctctcttactccttgaaattttaggacttagttaagtccaagatggtatcagcggataaagaaaattcaaagaagcccttctttcagctttcaaagtctttgctcctacaggaatcagtaagtatacatacacctcgtcttgacatcggtggaaactggacttttaaatatatactatagatgctggaaataaagaaattggttggagaatgggaaaaactgcaacgagaaccaaatggacaactatctactattttcatgaagcatgattcattgctgctcattcataacagatcagttaacattggagttcaaaatatgaagtcagttttcacattgaactaaacatgttttctttttctccaggccaagagattcaagacattaatcatgatagttgtgctgaagttggctcaaattcctcagatttttgggtaatggtagcagcactcaaggttcgtaacttgaaagacctcacttcaaagcacatacttcatattgatatttcaaacatggaaggggttgagaacgtttgttggggttttagtatttttttgatccaagttagcttttttttctgattcccatcaacatggctcaaattcctcagatttttctgatccaagttaaccctacttattatatgcatcatctgcaggagtttatttcaaatgaaggtggtggggaggtacca

SEQ ID NO: 32978 - DNA, 733 bp, Arabidopsis thaliana landsberg
gtgattgtcctaactcttgagcaatcgtttagttggtatttgggatcaaactaaggtagactaaattgttaatttctaattctattccaacttaatcaccaaaagagatttaaataaaaacacacacactatgatattaatagtcttcattcaagtttccaagcataaagaaacaaacaaaagtcatgcaatggtccaaaaccacttgatgctgaattataacgactcaaaggactactccctcctccgctatctccttcctccgcatcgctaaagctctcatctaccatcgctccaaccggaacaggcttaaacaaaaacaaccctgaactcgctgcagtctccgaacttgcaaacaaccaatcatgaacatcatagtagaccattaccggtgttctatccaccatcaccatttggtttcccctaaatttccattgtagattcttcacgttcacaaccacgatcccatcaacgcttatccacatctctggctccgctgctccattagagctctccaccaccacttcatgttcctttctttgttcgtcaaaccttgcccgagtcgaaaacgttttcttcccaaatatgctttcttttttaaagtatatgaacccttccaccaatgccggtcttgacttggtccgcttataagccttttgctttaaatctcccaacaataaaacaacctcttcatcagaaactactgccacgtaatagtctgacacgggttcgg

SEQ ID NO: 32979 - DNA, 979 bp, Arabidopsis thaliana landsberg
ctcatcgatggcatcatttagttttctctgggtaaacgcaactgtatcattcaattgtccgagagcatttcttatattaaagagctccatctccatgctctctgatactttctttgtctggatcatttcctcctctagggagcatttttctgccaagagatcttcagcttccgctctaatgtctttattttccgctgacagcttttcttggcacttccttgccttttcagtatccacttcaaggttgcgggttatttctttgctctcttgcagtcgaacttcaagcatttgggcgtgagaaacagcatcttctagttcaaaggttttcaaagctagtgtcttttctaaagcttcaacatgaaccatgatttcctttgtttcatctttcttgtccctggaattggaagcagattcttgtagtaggctgaggtcaaaagacaacccctttagaacatcatcctttctcaaaagctcatcgtggagattcagattctcagacaacaactcttgtacatcaatctgcaaagattgaacagtgtctgcgaatactgaagccttatcgacgttttcacatatcagttgcaacattttatcagaaatagccataccatctctggttagtttctccagtttcttgctatcttcagttagatgtgagcatttggcaatgcttaacctcgtgacatctagtgctttaaattgatcttcaccaaaatgtatgaacttgttcttaagggatacgttttccttcttcaacgaactgacaatgtcagcataaacgtggacatccctttctttgatatccaattcttgtgcagttactgaccgggagtgttcgagactgtaaagttcagaagctttcatcgccagttcttgctgtaggccagtgatgctagactccaagaaaatgactctttctccaaaatccttgtttacttcgtctatttcggcgatcgtttgcactctgcgaacaagatcc

SEQ ID NO: 32980 - DNA, 1156 bp, Arabidopsis thaliana landsberg
actttattttctctttgcaagaaactaaagcttctttctttcttcgtgtaaacaacaacaatggattcttcaatgtcgacgaagaagaaaaccaaattgtctgtgagaaaccaaacttgtttcaagaaatcgtctctttcttcttcttctactgcaaaaaagaccacgaatttgtctatgagagaagagaccatgtttaagaaagccttggagctttcaactctgtgcgacatcgaagtctgtgtcatatattatggtcgtgacggagaactcatcaagacatggccggaagatcaatccaaggttcgagacatggctgagaggtttagcaaactacacgagagagagagcgacgcaagaaaagaaccaacctttctctgtttctacgtaagaagatcctcgacaacagtaagctctcggagaaagtcttagagatgaaggattcattagaaagtggtctacgggtactacaagataagcttctgttactacaacccgagaaaaaccagaccgagttaggtcagatccccgtcatcaacaatggacagaaccattggtgaatatcggtgtgtcaaacacagagcaagacctatcgacgtcaccattgagtcaacatcagagcaaattttcagtctttctctataaccatgacaactgtagcttctatcaagtccgtgcctctgtttctacttcagatatcagattatatgaggttaattgtctgatgaagagtttgtgttgaattgtatgtttttcctaagtatgaatgctatcttctcaatcctatttttgtctgagtacgaactaagaatatatatacatttcattacatagcttaatagtcaaattacccatcatctaatccagtagaaaggaatataaaacagaaaattatgccaacaagctactagtctgtgatgaagagcgatccaacacatagtagcagcgtaagtcatacgcgaatatgctcatgaaatgacaagcacaaaatgagaaacaacttcgttattctcactatcggtctgatgtctgtattatgatatttggctctggttgtctaccaaaatcataatattcaaccaccgatacattgccctaatcatataaaaaaagttccagactaactgtcttttttgcacgaagagaaagatcaaag

SEQ ID NO: 32981 - DNA, 1620 bp, Arabidopsis thaliana landsberg
gattgttagatctgtcaaatgtttttcgtgttatataaaaaacatacaattgtaatcctccaatatcatcttaccccatcacacttcttatgcaattcttcacgtatctcgtttcttggcttaaccttttacaaaatttatatttttattgttagagaacaaaatttatgtttaatcacctaattctgtaataagatggataatatactttggcgtgtaacatacatatgagtttgtttatacgattatttttgtcaacggttcttgaaagagtcaagaacttgtaaacactaaacgtcctcttgagaacgttacaattgtatatatataatcatcaaatttgacaaaactattagataatatcattttaaaggttgtccactttacttggttcttcatttgaccacatttttttacatataatgaggatagagattttattttttccaacatcatgatgctatagtgattgactaacttgatttaatttatagagaggttcaatataagttgatacgtgaagaattgcataactcgaccgttcccagtttaacccacatgacagggagcctagttcctatttaaagggttgatttgtaaaaatttatttatttttgttcaattcggaaaagaattgaatcagaaacacccataaaataacaaaaacaaaaaaagacgttaagagaatttgctgaccaacacacacaaaatcttcagctttaccaaaataccaatatcatcttgcaaaaaaaataatttcacacaaaagcacgagtgattttccggctgtatttccttttacttgatctcttgtgatccgattgatgaatctttagtcattttgtcgttcctctttctccttaatttcctttcctcgaagaggattttcgcaaacctaaatttacaaatatcaaagaacgagattacttgtgatccaagaaacccatttatggataaaaacatttgaaacttattaatcacctcttgagtttttcatcattgttaatattttcagcagcaggttcatatgtaccagtgtcgatgttcatttgcatgactctgtttgtcagcatcttctctccaagttttataagattttctaaattagactttgtcgatagatccagagtgcttgcatctccttccaatgtatcatcctgcaatggattttcatacataaaacaatccaatcaatcaaacgatcaatcagaaattaggagacacacatatatatatttatatgtagctcttacgtacatcgattctgaggtacttgtcttcagattgtagggctttaaacacaacagagctgtgataatggactatgtcgcggcttgattcaaaggtaatgtctaatatcggagtagttccatcttcatataaccaagatatgattccccattttgcagccttctttgcgctgtacctctcttatttttttgcagatcctgttcctatcgatataacgagaaactggtcgtaacctaacggattgagagtacccatattagggttattatttacaatcctgcttcgtcacagcattgatggccaccaaagtttataacaaaaccctacataacagagctatttttgcttatttttagttatcgggaaaac

SEQ ID NO: 32982 - DNA, 590 bp, Arabidopsis thaliana landsberg
  unsure (1)..(590): unsure at all n locations
gttcgacggtggccggggaaaaggagcggcgtccaacgtgacaggatgaagacccgcctaaaggagtcactggccacagcaacagaggggagctcgactgtgggggagctcgatgcacaccggaggctagtccatggctaggaagtaagggagctcggttgcatggagaggctagcagccatgggagtcctgggcgcctgcacttggggatttcctgcgccagggagatgcagagggcgcctgctcttgtagaaaggctgggcgtcgtggggcagagaagagcaggggtcaagtgccacggcaagaagaagggctcgacccactgctcaaagccagccatggaaagggcnnnnnnnnnnnnnnnnnnnnnnnnnnngcgacttggcacctccatcgcccagggggaatttctgcagggcaaaaagaaacgccaggggagcttgaaattgaggggaacagagagggtcggattccaactttggggtgtcgagctcatcttagaggtagcagcgcatgggagaagcttggttggggagggctgctggacatggggcagaggaggtcggcgttgagggagttgttgaggggac

SEQ ID NO: 32983 - DNA, 4404 bp, Arabidopsis thaliana landsberg
ttttttcttaatatttcatacttgcatgtgtgtagatatattcatcaggtttaaaggagacgatggaaattttaagaaatgtctgaatgatgatgtaagaggtatgctaagcttctatgaagcgtcacactttgggacaacgacagaagatatccttgaagaagcaatgagtttcacacaaaaacacttggagttatttttggtaggcgagaaagccaaacattatccacacatcaccaagctcatacaagctgctctttatatacctcagaatttcaatttggaaatattggtggcaagggaatatattgacttctacgaactagagactgatcacaatgaaatgttactaaagttggccaaactcaactttaggttcctccagctgcaatacattcaagatctgaaaacactaaccacgtatgtatattcatttatatagatgcttcatatatatgtatattttctgaaagttttatcgattaggtgtatgtatgcagatggtggaaggagctagatttagtatctaagataccagtttacttcagagagagattggcagagccttatttctgggcgactgggatttattacgagccacaatattcagctgcacgaatcatgctggccaaatccatcattttagtggacattgtggacaacacttttgatgtatatggtactattgatgaagttaagagcctcgttcaagccattgaaaggtacgaactatatacgatcatttgttaggtgctttgtaatcacactcatggtataaacgaaaaacgaaaaaagttacaaagtggaatgaatttaaaggattaaaaagtcatatttaaaggatataaaagctcaacatctaggtctctttatattgttggaatgttggtgttctatttaattataaatcattagatgtgatccctaataattgtatggatccaatattaagtaaaggtgggactccgacgccgtagatgtcctaccggactatctcaaagtcgtcttcagaacaacgtttgacttgtttaaagaacttcgaagaatatgtgagctctgaagcaagatcttttactatgcaatacgcgtatgagcaggtactggttcttcatctatttcttaaatctaagccaaactattgcatctataaaaatagttactatacaactaatggtttaaaatgtctccaaacaacaccattctcttatatgagtaaaacaataaggagagcatttggatgttgggaatgttcatttcctacgtggtattctttcctagatcatttagctccacaaattcagccaaaaaataaaatatatatctctatattaaacgaagaattgaaggttatatatagttcgtatttaatataatgttttgcagctaaggatactcatgaaaggatacctgcaagaagccgaatggtcaaatagagggcacctgccaagccatgaagaatacatagaggtcggggtagcttcaaccgcaggtgaagtgctgctagcaatgaccttcatccctatgggagatgctgcaggagtcggagtttatgaatggctgaggtcaagaccaaaactgacccatgctctttttgtgaaatctcgtctcagagatgatattgctacctataaggtaacagaagtcctatatatatatatatatatatatatatatatatatatatatgtatattttaaatgcaaattataaaaataaaatgctaataaatcttatcgtatagtatttcacgtcataaactactttttagttatttgattgataattttgacatgatcgaaatatatgatgaatttgcatcaggaggagatgaagagaggagatgtttgtaatgggatcacctgttatacgaagcaacacaaagtaagtgaggaagaagcgtgtattgagtttgagaaaaagactaatcacatgtctaaggtcatgaacgaagagttcttgaaggcagccaaatttataccgcttcatattctaaggcctgttttgaattacggacgcttagcagatgtgtgctataagtatggagatgggtacaccttcgctggagagaagatcaaagattatatcacctctttgtatgtcgatctcatcactctttaagagtcttcagagtttgggatcacgtgaatggccaagccaaatttgtatccgcagccgcaacccaaaaataagttgtttcagtttaagttgtctttgttttcttggttgttagtctgtcttgaaaaccatcttttaatcagtaataaagcttgtcattagactatcaaaactaacaataatccgaataacaatctatgaatacgtagttaacacttatagtagtgggatttggctttctctgcagatgtgcaattatctatttttttattagcaacgataagaaaaaagaagatattaattttttctttgttattcgcttagctaataatattaaaacggacattttccaaaacatattatttacataagtgatatcaagcggttcagcacgaacttttcgtgccaaattatccgccttgacatttgcattacgagaaattaaagataaaaaaaagaagtgaactcttccttctcgctctggaactcctccaaatacgctgaaaatgctagccattcggttggagaagacaccatcttcatcaggtctgaacagtctgttaaaaaagctacttcttggttgtcgactccaatcatacacttcattgcccaaagtaaagcttcgactttgatatggagaggagaaagacttttacgcagattagcagctcccattgttgacgtcacctccattaaatgaagtacaaagccaacctagacatgaaaacttgtcggtttctttccatgaaccgtccacaaatcaacgacagccagagtagacaatgtcttgtgagatatccctcacccaaagttggttttccgatcgataggagacttggttttcagtattgagctctacttgagctaactgccataaatgagcctctttttcttctagacataacacgtctagcgggtccttatccacattttcaaacactttttcattccttgctttccagtattctaaattatccatggatatgcggatgaatcaaattctaaagggattctttagaataaaatccaaatttgcataaacttaataagtgggaaaaacgtgggaccgtaggaatcttagaaagagctcatatttgtcttaccggatgacactgaaaaatagtatggtttattgtttcctctatagtgccaatctgacacatcctgaattacaatttaatcctcttttccgtaaattctcagttactggcacgcagcctgctaatatttgccataaaaaatggcgcaacttaggcgagcattgcactttccacacttgtgctttcagagctttgatttctgggccaatgaaagaggagttgtttcccaagatttccatctgtgccttatggtagccggatttaactgtatcggttccagtttttgtgaaatgccaacctagggaatcctcccttgttgacgtacccaagtgcagtgcacttattagctggacatttctaggtcaatgagctctttcaaaagatcaatgttccaaaaatttgaccggctatctatcagattttgaacttttaaagatgggtaaataattgaaccacggctatctatcgactgaacttccggtgtcaatgaggattctttgtacttcgcagttccccacatcgagtgatattacgagggcgtcgtcgtgaggtttatccaagtcgcaggtctcttcctccgaaaatgaaatttcaggccagtcagcttgattggtcttaggctttttcgccatcggagtgactactttcctttcgtgctgcttaatggcgctgatagaatcccgaaagagcttggatcctcccataattactttgaccatcttcttcgggccctttggagcgacgggagctggttcactcttttgctttttgttggggggtgaagattttttggaatctaacacctcgtatgctgtctgagccagatcgattgttgtgacgtcaatgtcaggaatttcacccgaggcaaactttgcagccaacaaccttcccaaagccttacagtcctttgtggcatgaccattcattttgtgaatttcacagtaagcgttaggatctcggacccatttgttacttgggagagctccattcttgccttttggggagaaaggcagttttgacggtgacgcttttggggaagttttgggcggctctttctctacagaaaagttcctgctgctggctttcggagctcggcaggtttcttcgaagtagcaaaagaaaaagcttttggtgaagcgctaaatttcttagccaaaaaagctcgctcttcttcggcattgatccggtt

SEQ ID NO: 32984 - DNA, 1440 bp, Arabidopsis thaliana landsberg
  unsure (1)..(1440): unsure at all n locations
atgtggtaccacttgcaggtataatgtacaattttttgtctctcctttctctttctctctctctatatatatatatatagatatacaatctactttcaattattactcatgtgtttgtttgttaagtctatcaacagacctatgagccgtggagagaagcgagatcttcagaaatcaattaaggaactacctgcaaaaaatcttgaacgtgttgctggaatcatcaaaaaccactatgtagctttggggaaagaaatgcctgatgatgttttcgtcatcaacatggaggaggaggtgggcttcttgacatagatttatggtccaatctcgttcatatggaaaattataacacaattcaaaacaaatgtctgttccaggacaaagtactgctttggagattgcattattttgttgtcgcagtccagagcgcaaggaaactcgctagctgagtagtccaggtacatatatactcaactccttgtcccagattgtgagtatattaggaaatgacaaggagaaaacctggtacccattgtttactcggattatcttacaattttgactagaaagatccgaccggttttggttcagtacatggattataggaaatgaaaaagaagataattttttttttttttgacttttgtggattaacaaagaaactgcaagatgaagtttgtgtaactagagatttagttctttacaaatttgggttttctacattttaatgactcctgcgtatgagttaggttttatgatctacaaataagaatccttaatcaggaataatgcccaaagttatgttgataatgactcctgcgtatgagttaggtttttcacaaattaccaaacaaattttgtactttttcatcaaaggtttgttctttatcagtcattaaagatctaaatactgattttctcattagagaattgactgttgaagacttgagagtagttaagacatatgctagtagtatgtgagactgagttttaagtaattttggaatatttacttccaaattccgcaaatagaatctttagggttattttgtagtgtaagagttttgatttgagtactttgttaaatcgtcatttttagttatctattggccttaagagtcaagcattgtgcttaatattagattcacactcttcaacttgataatgataattcgatattacgacatacattataaaagtaaaaactcagatgcctggatgagttcggaaaatagttgcatgaatctcttgactttgaatcccaaatgtgaaccatcttagttcgattgactcgaatcactcgtcatgtgtcgaaacatgattgtgcatgtcgctgtgtgggcaagattcttcatcatggcgaagactaaaacangangcacagtagccgaaaggtttgaacagttcctagctcattccctattttcttcggaaatcctt

SEQ ID NO: 32985 - DNA, 5802 bp, Arabidopsis thaliana landsberg
attagcctcgtccagagtaaggaagtcttatgcctgtttatacccagaccagagccttttttaaactcatccagaatgcagagaattccctcaagagaagagtcagatccgtcaaagaagactagaacatcatccgcgaaactaagatgagtaaccattaggacaagacactggggatgaagctggaacaggttagtaagatcagaacgaagagatgagacgacattggatcgccttgtcttatccctttcttcccttgaaagtggcctatcaactcaccattgaaagcaacactataagagggagtagagatacaaacccggatccaaccaatgaatacttgtggcagctccatggcagtgagaatgttgagaaggaaatcccagttaacattatcataagccttcgtcaagtcaatctacaagcagcccctagacgtctcaccagccaagtgaaaatttttgactagctccgaagccaaaaggacgttttcacataagaggcgacccttaatgaaacccacctgattcccttgcaccacatcagggataaacatcttgagtctcttagaaatgaggcgagtaattgatacaagggttttgtgtgtcaattccctaaatgcattttatgtcattgtagcatttaaggtgtcaatccaattgggtgtaattgctaacaatcaggatgtgataagagaatactaagtcaagccaagtgtgaataggtttggtgtgtttctactaaacctaggcaacaagttaacatgcaaatcgaattcagaaacaaaactatactaagcagaagataaagaactcaaataacaagagcagaaatgaaactaaagaccaggaactatcaaatgcaacaaccagaaagtaaaccaagcacaaagtgaggcactcggccgagcatactactaaaacaggtcgagtagaatactaaaaacaccaattttgcacgagaactaaacaaaacgagtagagtactaaagacacgagttttgcacaataaaacgaaacagagctcttaagaatgggttaattggttctagtggactcctcaatccattagctaactttcaaactccatcaagctatccctagacaatagatttaaaactagatcaatccacttcgatgacaatgatcctcataactttaccacttcctaatctcaatttccattgatgaaacatagcaaagcaggctttaaacaccaatctattaaagtcaataaacagtctaaacatccaatgtcttgggttagaatctacaaatctctaaaattagttggttcagacaattcatcaaacatttgttaggtggagaaagtctgaaatcaattttcaattgattagaaagaaaatagcattaagaattcctaaaccataagggaatcatgcatataaacacttagctagctaaagaacaatgaaatccacctaaacctaacccatcctcaagaactctgaaaaagactactcaagaaccatgaagaacatcatacaaaacccagaaaaatcataaaacccagaaatcattataaacttagtatgcaatagatctaagcaagataaacaactttgtaaaagaaaataattgcaaaaacttaaaaattcaaaaggaaattaaaggaacatatttagggttttcacaaaagaggctagaacaaaaggaataaaagaggaatctccattaggtaaagggaaggggtctatttatagcaaatactaggttgccctaattcgctagaagacaaaataagaaagtcagcgcagcaccactcgggtctaggccgagtagaaaagtcgagcagcttcccttggtcacatcactgggctgtagtccgagtagcttggtagagtaggtgcgaatcttcaagattcactttttcttcacttactcgacatgcacgtcgagtataaaggtcgagtacaacacaaatcctcaaaaatggcttctgctgcacattctgttgtcactgttgcactgctaaaacttctgatgcaccactcgaccttatcccgtgcttagatctcgagcatagcttcatttctttgcgtggcatctctttggcttgatcactcgacgacatcccgagtattgaccacgagctcaacttcttagttccaaaaactcccaaaataggtccaaaagcacctgttccacctgtaaaacactccaaatgcaaatatgctatgtactgcaatgcaaaatgtgaaaaggaaggaaaatggactaagaatgcatgaaaaaggcatgaaactaagctaaatgcatgaaaaacaagggcttaaaatggttaaaatctagtgttatcagtgagtacaacaactagaaccgcaattggattttaaaagcctaagtattgtattcttgtaagaagatacaaagacaaacagtcatatgaacttcggctacaccatcaaagctttaagaagcaagaagaagcttggttagtgttttggagtgaaatatgacttgatgtgatgtgtatgagtgagtataacaactagaaccgcaacaagattttaaaagcctaagtatgtatcttttacattgttcgtttgtctatagctggattcagcgaccaattatagcgacaatcgctaataactgtcgctgtgttgttcgtttgactgtcgctataaacagtcgctatattgtttagaaaaattaattattttttgtgctaatttatattttaaaatcaaaatgtaaatcatatatatcatacaccatgagaaaaaataaattaatatatttctttattttagttttatcaaatttaatttgactataattagcttacattatttgaatttaatttattttatcttcatttaataaaaaaattaataattaaactagaactcaaacccctcgtgatatcgcagagaaaaatatgataaatttgtttatataataatttctttaaaacaaatctaactccaaatgatgcatattataaatttttgtagttcttcaatagtatatatataagtaaccggaaaaaaataaccgtaaatattttgactgaaaatgacaatataggaaagttgcaataaaagacacaagcgagaaatatcaaccgtcaatatttttttacgaaaagttgcgatgaaaagacacaacaattcagaatgcaaaagacatttatttaagtttcatttaatttaattctgtttaatttaattatttttaattattctttaacttatattttttgatcgctaagttgttcgtttgcatgtcgatggattcagcgaccaaaagcagcgactaatcactgaaatcagcgcctgatcgcaaaactttcggcgaccaaaaattgcggtcgctggtcactggcgactgtcgctacttttgatcgctgtcgttggtttcagtcgccagcgacaggcaaacgaacaggacctttgttagaagatacaaagacaaacactcatacgaacttcggctacaccataaaagctttgagtaggaataaaaaagcttggttagtgttttggagtcaaataagactagatgtcatgtgtataattgagtataagaactggaaccgcaactggttttcaaaatcataagtagtgtttccttgttagaagatacaaagccaaagactcatacagacttctgctacaccatcaaagctttgagaagcaataaggagcttggttagtgttttggagtgaaatatgacaatatgtcacgtgtatgatgtagtataatgatatgtctaaaatttgcatgttttcagtgtccattcatcatcgttttgagtccagtttcgtatcattcatcactgttttatatcatttctcatcattcttgcatactttgcatgattaggatagctttgcatacatattgcatttctgagttgttttcaggtgatttggagctgtttgcgagcaaattggaagaaacgagtcagaaacagaagacatactcgacccccaggtcgagtgactttggagccattcttcccacatactcgacccccaggtcgagtgactttggagccattcttcccatctactcgaccaccaggtcgagtaacctcagctcgaccgttcactctaccacattactcgaccccctggtcgagtatcacttcgccacaccacctgaccacactcgaccgttcactctaccacattactcgaccccctggtcgagtatcacttcgcaaaccacctcacaacactcgaccattcactctaccacgttactcgaccccctggtcgagtatcatcactcaccaccatcaccatcactcgaccagacactcgatcacgtcttcacagtctactcaaatccgcactcaacaagacaagctgagcacaaggaagagaagaggagaagacaaagtgtttggaagcggcctggacctccatcggatcacgaagcccatctcggcccattatcactctatgggtcgggcgattaggttattggcctgcctactatcattttatttcgttttgtataaatagatttcttagggttctgtcctgagacatctagtcgacattgagtttttgcttcagttttattttctgttttactctgctgcgccgcttttgcttctacaacctgtaattcgagatttttccaagttattcagattccgcatttgatttcatctgtcatcttgtttctctactctttatctctttacttatgcaatattatcgtttatctgtgtttaagtctttgagcatgttgtctgagtagtgacttagaattatttgggatagagtagttgtggaatccgtagtctgtagaatggttaagttttagaattgattgaatccctttaggactagttgtgttactgcttatttctttctgataaactggaattcaattccaagcattctcgcacccagaaggtgttcgatggaatgtttgatcccctagtttctgagatattcatctctatcccaagggattggacttttagagtgtttattgactttattagtctgttctgattgcctgcatagttagattccgttaatgggaattaatctgggctagctttgcttgaggatttctatcacgggaaagaattgatctgttgttgaacctgttgtctagggatagcttgattgtgcttgttaaccattcgaataggctaggataccactttattcgattaccccatccttaggaatttctcgtctatctgatttctctgttttatcgttattgcttaatcgttctcattgcttgattctttatttttgtaattattcgaccagtatactcgaccacacctagtgtctggcaacaaactgtgcagtcgagtatatctgtttcatatcctgtctgttactcaacctgttactcgaccacatcctacttttggcatcagcctgttgtggtcgagtgattttagtaattctgttattgtttctgttttctgcatgttcgcttaggactattagaaaccccaaaacagttattgcttggcttgacttagtgacttctgatcacatctcatctgtttgcatcacacccatttggattgacacctaaaatactacaacgacatgattggtgttttaggataattgactaaaaacctattatcaataagctattcatcgattgttttcaaagttttattcagatcttaatacagtgaagagatcatttcgttccctgaatctatttgctgtgtttatgttttcatactcaaatatgttggttgcttcaaccaatatgtttgagtaatctgcttgttaggaatagggtttctcattaaggattgatatggtttagtagattgccc

SEQ ID NO: 32986 - DNA, 456 bp, Arabidopsis thaliana landsberg
  unsure (1)..(456): unsure at all n locations
aaaaacggaggaccgagcgccgcacacgcccggacgaacaaaaaattgtatcacgactttaaggcgaacagcctccgggggagggaacaagggaggcaagggaagttggcaaaaaggaaccccaactacgggaaaaggatcaggacagagggcagggcctcgacggacccagatcccaacccgaaggaagataacggactgaacgagcagcagccgcggacagagcgggacgacaggggccggccgggggacggacagggaacggcacgcgacgggagcagaaccccgggccgacgaacagcaaagcacagaacgggcacggacaaggggaacccgacgagcgaaccaaaacaaagcaaagcgacggccccagcggacgcgaacgcaaagngagcncagcccagagcccngaaagacaaagagaagaaagacaaccaagcgcggcgaaacggcagg

SEQ ID NO: 32987 - DNA, 177 bp, Arabidopsis thaliana landsberg
aggtagacatcacggctgtagtggccgtcaacaacggcagtgaccaagttgttcggccgccagaagtcattaatgttttcagagtggtaagtgtgcccgtcttccagggcgataatagccggattctccttgatcagcatgctgatggccccggcgccttgggtaacctcgccggca

SEQ ID NO: 32988 - DNA, 7310 bp, Arabidopsis thaliana landsberg
  unsure (1)..(7310): unsure at all n locations
aattccaaaaaggaagttttctaaataaagttgaaataaagggtttttttttaagaaacccaatgaactatttttgaccacaataaattttaaacatgacaaatgcatcgaacatgaaaatatttccacctaaaatagaactataattatttattaatttatcaatggagcagtattagcggatgcattattaaaagaaatagaaaatattttgtttgttaaattatattcttctaaaattatttttattaattaaaagaaaattactagctaaacccaaatataggatataattactagaatgtctccaaaaatctgggggttagataggttatttccatgaccataatacccttattctcatttgataggaataaaaataaagtcaatagtaccctttaatttttttttttaaacgttttcgtaaaaaatagattttttttttggaaaaatctgttgcttagttgtgacaagtttatttttctgtaacagatttatttgtctatgacagattttttgcgacattaaatctgtggaaaaatataaatctgtcgcaaaaaaaaatctgctatcattatataaatttaaatatagttacgacaaatatttaatttgtaaaaggctttattatgaggatagacttttttacgatgacaccatacactttttgtaaatttgacagagtttttaacaatttggcacatttaatttgttttagtggcattagacttatatttttaaaaactaatctgccataaagtaacatattttatgatgaaaatataagggtttgttacactatgaggcactttcggaaaaacttaatgcacttaagacactttaaaaactagaggcactttgccttgcttttggagtgaaataagacatatatacccccacaatttcgtttgagatatcattgcaaaccgggttatggtttcgtttggtattggtttaaaatatacggttataatgtgcggtttaaaaaaaacagtttgtgcgtgacgacgatcgtcggatttcaatagattaaacggccgagatgaaacattgtaacttcccttgctttccgagttaaaaaaaaactgaaacacgagatcaattcaaacacataagattctgggtttcaatcatcgatctttggtcaactgtcgtgtccaaggaggtacgattgttgaaaactgatatcatgaaattaaaacgaaaatccgtgcattctatttgttatgggtatcagaatataaccaaatctttttttcgtttatatgtacagggatcgatggacgactatatcatggttatatgtggagagtggttttgttcttcgactggagagtggaaattggagatatgtaaccaacttttctcaagggttgtaccaattcatgagggaataacattggttgcgttgaacgaagcaattctacaggagtttggcgtcaagggtttaaatcctctgttaagttactctgtaccgaataagaacatgtttgcaacaaaggataagactccaccggttctggttacaagcgagattggacttctgaagaatcatactgctatctggctgaatatttgcatctaatgaagctaactaatcctggaacaataacacatatagaanccgaaagagatgttgtagatgagagcaaagagaggtttttgtatatgtttttagcttttggtgcctcgatagcaggatttaagcatctgagaaggatattggttgttgatggaacacatttgaaagcaaagtacaaaggggtcttactaacagcgagtggtcaggatgcaaacttccaagtctatccacttgaatttgctattgtggacagtgagaatgacgagtcttggacttggttctttatgaagttggagcggattattgcagacagcaaaactctgactatattatcagatagacactcgtcaatccttgttgctgttaagagagtttttccgcaagcaaatcatggggcttgtattattcacctttgtaggaatgtccaagctaagtacaagaacaaagctttaacgcagttagtaaagaatgcagaatatgcgtttaccggtacaaagtttaaagagctttatggtcagattgaatccacgaaccaaaattgcggtaagtatctacatgatatagggatggctaattggacaaggcattatttcaggggacaacgtttcaatctgatgactagcaatatagcggagacgttaaacaaggcgttaaacaaaggtcgatcgtctcatattgttgagttgataagatttatcaggtctatgttaactagatggtttaatgcgcgtaggaaaaagtctctcgaacataaaggtcccgttcctccggaagttgacaagcaaataacaaaaaccatgttaacaactaatgggagcaaggttgggaggattaccaattggagctacgagataaatggcatgttaggtggaagaaatgttgttgatcttgagaagaagcaatgtacttgcaagaggtatgttaaactcaagatcccttgcagtcatgctttggtggctacgaatagttttaaaatttcctacaaggctttagttgatgactgtttcatgccccacgcatgggtttcgagttaccgggaagcagtattccctgaagctattggaagagacgacgaaataccagaagagcttgaacaccgatcgatgttgccaccatatacaaggagaccatcagggaggccaaaggtagccagaattccatcaacaggagaatacaaggttagaaattttttaagataaagtcttactttctaattgattgttaaaacctaatgcataatgtggtttgtacatggtaaatgtagaaacctaagactggaagaacgcagcagaaccggtgctcgaggtgcaaaggcacgggtcataacaggacaagttgtacaaatccaatttgaacaagttgttacggtggatgactttgagattgctatttaggatattaattgtttttcttttgtaatgtaatgcgtaggtgtaaaaaatctaaatatttattgtttattggatgctaattagttttatcatttatactgcttatgtcactccagggactcgcaagaatgtcgcagaaaaggtaaaagtagatgaaaatcaaatattactgttttctatccaaatatagttgaccaacagatcatatcgaatcgtttgattcaaatagatctatttgtaaaattagtttgatttacatgcttcaatattgtaagataccccaatcagttatatgttgaaaaattagttattgtgagcaaattatttttagatcatctcagattttaaaaaatggaattagaacctatcagccatgtaaacaaacatcttttcccattatattcctttttaaaacttatgcaattgccaaatatttgctaaaaaacatcgtaatgtaaaagtgcatgtaaggttagaagtttgttggttttgaataaacaatgtgaacatttattgaattggataatatagaatagagaatatcgactaatacatgtgatttcatattatatagcttagtttttaataataaaaaaacctttaaaaacttgggaatgaaatggatgtctctgaatatttacatgtagataaaaaatgaatatttatatgtctatccacataccccagaccaatcagatataaccaatctttagtatttttggaattagtatagtcggaaaattttgctatgcatgctccaaaatcgaaagagtccctataagtcatgataaacgagaaagatgttcactagtttatacgttaaatacaagagagaaatacaatttcataataagattacattaataaactagataaaagagggaaacaaaagagatagttatattctgaaagtgggtaactaatgtttgtaaataaactaggaaagcaaaaggatgtctctgaagaggaagaagtagatgcaatgtgaacatctctcaccattatattcgttgtaaaattcatggatgagccaacagtctggataatcctcataataaaagagctcagcgtaagatccgaatcgttttggttccaaatcagaaatgtggtcaattagtgtcttggccatgatatctacatctgtaaaacacttgttctctcgtttgaaagtattaaacgcgtctaatacttcattacctgcgcagcggtttagcgcaatgtaaagaagcttggctataggaatgacatctttacaatcattcaataatgaaatggcgcctttcatgtcgagagaacagaaccctagcctcaagctctggagatacatagcgtaagggtttctttttgcaagacatttggagtagaatgagaagtgaacagagtcgggtgaagacatgttgatgaagtcagggcttttatctaaacgaactcgggatagtgtctcgacagagaaagctgcagatttcccttcatgaccagatttaatccagtttttcagagcctcaattccttcttctgaaacgtggctaacaattagtgcgagaattggttccggaatatataatctcgcaatcttcctctgttgacaacacaaatgaaaagttagacaagttacatatactttgtggaatgaatgaaaactatattgtttaaatggatgaaaaattaaacatgtgtgctgataggttgtgtgatagagtgtagacatttggatgatgtactcattttgtcaatctgttgcgaataacgaaagagtaagatgtgttagagagagaagttttagtactgatcaaaacggtttacaaatgactaataaaaacagagtaattaattggaagtttctcttaatagcttacaatcgtgagggatgaagcttagtgaggagtacgggttcagttttatattaactcgaaatataaaagctaccacttgaattccattaaagcaaattcatatacaaaaatgcaagtcatagttctgaaacaactctaatcatttgtataataattgttacaccttatacttgaagactcgaacaatatataaataaagttggagaaatatgcaaaacaaactaatacataaaatcaagaataaaaacttagattcaaatattttttctgcaatcgagaagaacgataagatgaacataaatgaaattggtacttctgaaagtattacttatgaaatgtgtgcaatttcctgggacaggtaatagtaaatacatgtgttacaccactgtccctcatactcattgaggttctgatggtccgaccaacactcaccgtaatcctcaaactcccaggaatttttgtatgtcccttgatgacgtggaccaacctcgttgatatggaacattagcttatctgcgaataagtcgacttcactaaatttgtagtaccttcgcttgtactcagtataaaattcccacggaattgatccagcgcaactatggagcatgatgtaaagtagaccagcatgtgaaaaaacatcttttatgccatccaaaatatcaattgcttcctggagctcacacatatgaaatgccaacactaaactctaaagatatagtgcatagggattttttaaggctaggcattttgtgtaaaacatgtgataactagaagattcatgagccatatgaatgaatacaggggacttatctagtcgaacagaagaaagagtttcccttgaaaaaacagcggctttgccatctggtcctgattgaatccaagcctttaacatatctacaccgtcctcaaaaactaagattagtatattagcagctacgtgttcaggcatctgaaaatcagggaacggaggaagctgagataaaataattctcaaagttaacattaaatttgggtgtttattcaaatagcgaagattagtagttaaacattacctttaggtgaaattgaaccaaaggttgacgaggaggctggacagcaaattgatttcccctaacaggggcaagggcacttggtggtagccagaaatgtctagtagggccattggtcgagggtggatacatttgcctttctcgcatacgattttgggcattttggattatcgactcggatagtactgaaggtgtagaaatagcgatctaataatgaaaatttaagtaactttgagatcgtgatagaatgggaaccctaataatctgtcacattggagagggtggggtgtggtggtgagatgagttagtggcgacatatgtagtggctactacaaaataaaaaaaatttagacatgtaaataaggtttctcatgtccaaaataaatcatgtgtggccaaattatgttattcaaagatatatatctctatggtatataatatacagacgtggatgtcttgtaacatgcaatccaacggggactcatttatgggggaagaggttttccataatcaatcaggtaatacatacataaactgtaatcattaaacaccaaccacaaagtaagatggataagccttagcaaatatagaaatgaagattgaatagctaacgagaatataacataaaaaagtcagactagcaaaagcataaatacaaaaaacaagttttagaaaaatataaacatgtatatagacatataatgatggataacacattatcaaaacattgtctttcaatatttgggacaattagctattttgtgtgcccgaaatttgcaacgggaacaacgtggaatactctctcgaactcggggttgagcccaataagttccatcaattttacccatccccaatcctctccataaggttccatccataaactagatctatagcattcatcaaccaaattctcgtttgctattcatttcatatacaacagttaaagcatgtggattgttggcttcaaggcattttgtaaagaaatgataatagatggaatgcggcattgaccaccacataaaataccgaatctgtcaaggcggacacaacttagtgtctccttggaatagacttccgctttaaataacggaccagccttaacaaagggtttcgaagcatcaacaccagattctgcaacgtagctaacaattttagtaagcaccagggccggcaagtaaatttctgggatagcagcaacctgttgaaaaacaaaacggaagagattgttagtatttgtttaaagttgtagttaaaactgtagaaaactaagtactttaggtttggatgaacaaccattttaacatatgaaacagatgatgtttcaatgttgtttatcttcgtaaacttatgcataatttctctgtgttcaggttttaactgaagaaatgggtaatggaaaaaacattaaagaatattgggtgtttattatatagag

SEQ ID NO: 32989 - DNA, 2125 bp, Arabidopsis thaliana landsberg
gttaccttcccataaacaattcaatatagaaatatgattaaattaaaaaatgttatttaacatagaggccaaaaatgctaattaatgacatgtccaagcgcaatccgttggattaaatcctatgtggacgcctttagaagcaaataacctcaaattttctatagtatagactatttctcacattaagcatgtacctatgtaaatttgcgggtcaattaatgtgtgcattctagttgagttagtaatggacataaactgtgaggtatacttacttggcttgcacattagtgactccattcttgcagacatcacaccaaaacttggttttgatgacttcaatgaagttgtgttaacaccagcatgaatgtgagtcactttcttgttgcaattacgacaactaaagtaataccatgaccaatctgtgtcaagagcatagatggtgcagacaaccctaacctttccaatatgaaattataaatttatataaatcaataaagggtattatgatttatagtacatgtaaattaagaactcaaacctccatagaatgaagaaaatcacggattgacttcctctcatattgcttacagtcatcatcctgtttcacagtaaccatgtgaaactttggaacactttcacggaaagtgagagaaagaccatcaacatgtaaactgttaaataacatataaacggaaagtgagttaaagacaaagaaaatagaccgagaaacaaaagcttgaacttcagggaaatccgggttgatgtggacttgagatgcataaaaagagttagaaaaactcctaactcctacatacattataaagtagaacatttaattatggtaataaatgttataatcaatgagtagaatcaagaaagttaagagtagacatgtacctttgtaagacttaatcttggcaaatcgcagaacacaaataaccatttaaccatcagcagattcacatgcactaaaaacactctgagcaaatgcttcccataaagtacaggacattcgctcatcactaaacaaaacaatatatcagagagattgctttctaaattacattcttgaggatttaaaacataggtacatagacttacgtgtcgtcccccaattcgaagtcaagctttgtggtaggtttgttgttagcctcgagagtttcaagctcaccaatattaaccacttaaccataacatctagtaaaatacacagtcagtcaatgaaacaatatagaaaagaagaaatttacagattttcaaaattttaacaactggtcataggcttaccaactaaaatagccggatttgagttaccacactggatattagcgaaagtagctaatgaaaggtagctagaatcactaacaggatcacaccggatgacctgtgtcctagtgacaaaagacatcttgtatagatgaccagtaggtcgaaattgacctgatgcatggtttagagcaaaggtttttataaacctccactcattcaaaggcaagttgttcacatacttgctaaccaagtccctcttcactgatgcatgaatcttgacaccctagtataaacagaaaacatatatttagcacatgtcaataacatagtgcattaacttacttgtgagtctgccaacactaactcgagtgtttcaccagtcatgctagtgtattgacgccaagagtgaagcacctttacttggacacgccatgaggtcttgtatggacggacatctctcaggaaagcaaaagaggcagccatttgaaaggtacgcaaagtgtcttattttaaaatggaacgatatcttgatattctgcaatgtgtagaaatggtatgcaatatagagtatatttataatgttgtgagattgtatagggttttagattatagagtaggcgtaatctttttcgaatcaatctgtgaatattctctgcagatatatgaagctggatatgcggcttgatcaatatctttatattgaaggcgattgaatatgttaagtagatactagcatatcttgaatgtaacttccaaacagagtagacccggcttttgattgttttggtaactgcatttcaaataaaactcatcacaggacagtgaatataaatggtttgaaagatatatagttagg

SEQ ID NO: 32990 - DNA, 920 bp, Arabidopsis thaliana landsberg
tattccaaacattccttgactcatattttgatattattgtatccatccaaactttttgtgtaaaccaaatcactataaacaaaagtcataagaaagttaagaatttcatttctttgaataaccgctcaaatatcaattatcttatcattcaaaattgacattaaattcatcattaagcagaataaagctataataatccaccactagctagaacttattggttcaaccgtaaagaagtgataataacctaaataccattaaataactcatcaatgcttgaatgatttgagaccgaacccaccttcccagtactggagcgttactttccactttctagactaaagaaatctgagtagacactcaaatcattcagatatttccgcaggtaaaccaattttagaaatcccaagttgataactaaaccttaagtagctcaagtcgaattaaaccccaaatcctaaatctgagtgatattttttcccgaaaataattggtttttacgatatgaatttatcaccgtaacaactaccttactaacaccatgtcacaacaggtccgagacatcgagacacaactctccacataaaaactggactaaactaaagtgttagacttcaaactcaaaataaaccggactaagtgtttggaattaaattaataaaccaaaaaccgttaataaaccggactaaagtgttttaactttttaaccatcactaattgccgattatccaaaataaataaaccagaataatccaaaattataagaaaaataggttttagaatacctagaaagtaactggtcgcatgagataaatgtacttttaacatgaaataataactagccgtcaaaacaaaaaaaaaaaacatgtaaatgaaaaataaattaggtataataattattatttaaatatattaattga

SEQ ID NO: 32991 - DNA, 362 bp, Arabidopsis thaliana landsberg
gcggtatttaatttcgcgggcacatcaggtcagcagcggccaggaatgtttcttcccccgcccgacactagataacggcggcgtatagggacctcacgatggcgaccattgctgcgcatggatatcgagtgacccagtgctccgactctaccgcagaacctagctacgtgatgcgtaggtgatcacgaattcagcagaggaatccttaccggtgataaaggcgcccagggtgtgtggtcaacggggaggagcggcccgcccagcgcggtcacggtgagccgtggcagcgcggtcgtgagtgggacacacgagttcgaggacggagcataggggctgcacgcgatctatgtgagcttagcgtc

SEQ ID NO: 32992 - DNA, 715 bp, Arabidopsis thaliana landsberg
caaaaaagtaaaatagtaaaagtggtgtaatttttttttgtgattataagtgtttttttgaaatatttttgtgtgattataattctctttgggagggaatatgctcatatttagatagcaaaatgaagtagagataccaattattgttgaacggttaagattgtctactttagatgctaaatccgattaggtacttgaatccgtgattaagacaccattacttctaacccacccgaaatttaaaatgcggatcctataaactttaatagattgagttgaccaaattacccttaatgcttgtgtacaaaatccaaaattgaaattgaaattgaggccaaatttgtctattttttaatttgtacttcccttttaataataagaggattatttttgtttccaatagttcatatcaatgaaatctcctacgagaatgtttaccgattttgggattttttaaaaaagactacttacttttgccttaaaaaagaaaacaaatcctcgattttacaacaatctttgtttaaacacacgccagaaaaaaactagatagacaaaaaatctctataagtatattgaacaccacaaatagttcgagacccactttcgatatgaaaagatcaagatctgacaacaagatatcttctttagaaaataagcgttaatactataacttaaaaagtttaactttatatctccaaataaaaattatatttat

SEQ ID NO: 32993 - DNA, 597 bp, Arabidopsis thaliana landsberg
gtgaacataattaaatattgttgacttaacttgagcaaattttctgtttagttttaaatgcaatctgagtgcattccatgttgcaagttttattaaaaataatatttcttgggcatcactcaaagctagcttctggaaaacagtcttggagctgattaacttagttaatttgtcataccagaggtgagatgcgttcaaggattgaatctctggagaaataactcagtagaggtcaatgatgagatctttaagggctatcgtcaaggaaatcatgaagagatcatcaatgaggtcgctgcaggttattacacttctcttatcatatgtctctatttttttacttttgcaacttctgactctttctctggttttatattagcatacgatctcttggacactgataggaacaagttcaatgtgaccatctggtataactcttcttacaagggtaatttcaaagtacaagataggcgtgtaaagtatgtccgagtacctcgctcagtcaatatggtaagaaactgagtgcacattgctttgtacctaggacaagtcttttttttatgaaccatatactttgctatataactgtaggtttcg

SEQ ID NO: 32994 - DNA, 332 bp, Arabidopsis thaliana landsberg
agtctcaaccggaattggagatggaaaaggaagatgagcgtgcgctgccttcatcggctgtagcagttgatgatttctgatggaagtgatcttctgtaatgttgtacagttttatggatttggattcttcctcgtgtaattcacaaaatgttatagtttctgtgtataattggaacaagttaaacgagggataaatataaaatgtatactctttagttttaatgttgtatacgttatatatcatttgtttttagctgatcattcgttcgaaacaacaaacaatgcttttcaatattttagtacatttggtgaaagaacaaattctttgggtt

SEQ ID NO: 32995 - DNA, 670 bp, Arabidopsis thaliana landsberg
tctattgcactctacgttttatgttagttggtctctcaataaaggagtgatcgttgatgttgttaagtctatttatttatatgaactcggcttctttttttctcttaccggtgacagtcagttattgaatcatggaccgatttaccgtagttaatgatttatcctcatgtactcattaaaacgtcgaccaagatttgacatttgatggataaatttaagtacacaatgtgtatgtaagacaagaaaataataataattggacatttctgtaaaggcacaagcctctgcgcacttgagcggcacttaagaagaaaaaaagagacttcaatgaagattttctctatacaaaaagtttctactcggaatttactctgagacatctcttccaaatagggtgctgattgccttcccgggatcgctttgtttaataagagattcgccgactaaaacctaataacaggaaaagaaaatcacatgggagctaagatcaggtgaaccaatatcattgtgggcaatgttatcttgaactataaagtttgtgaaagcttactgctttgacaccggcttcttgaacaaaggcgatatcttcgggagtgaataacccagattctccaaccacctacaatgtgaagacaagttgaggatatacaaactttaagtaaggtgtgtg

SEQ ID NO: 32996 - DNA, 991 bp, Arabidopsis thaliana landsberg
cagatcgcgcacaaggcaggcgcacaatcagtggctaagtttagaaagataaggattagtttcccttttgcatgccttaatcataggagggattggttaaaattagtttccttttcatatgccttaataataggagaggttagttaagattagtttccttttcatatgccttaatcataggagagattggttgaaccagaggctatatatatgtcgtgtaatagactgggaaataatcaagcaagatcaattatccaaaactgctcttctcccttgcctctctcaagccaccggtgaggaacccctcacggtgaaggtctggagcgcgactacgaactgcgtagcgcggtccagcgacgttgggcgtcgaggcgcttgacaagatcacttgcgccacatccgcgccgtcctcgacgaacttctccgccatgtcctcttcgtcaagcgatccaagtgcatttttgggtccccatcggtggcgtacctaggccacgtcatctccgcccacggtgtggccttggacccgaccaaggtgcaggccattcacgactggccgacacctcggtcggcgcgcgcggtgcgtgggtttttgggcctcgctgggtactaccgcaagttcgtccatgactatggcaagattgcagcacccctcaccgcgctgatgaagaaggagggcttctcctggagcgacgaggcccaggcagccttccaggacctcaagatggccgtgacctcggctccggttttggcgctgccggatttcaccaaggccttcatcgtcgagtgtgacgcatccacacatggctttggggcggtcttactgcaagaacatcatccgatcgcctacttcagcaggccagtcgccccccgtcaccgcgcgctggcagcttatgagcgggactcagtcgggctggtgcacgtcgtgcgacactggcggccgtacctgtgggggcgcgcgttcctcgtccgcaccgaccactacagcctcaag

SEQ ID NO: 32997 - DNA, 2820 bp, Arabidopsis thaliana landsberg
tctctttatctccttcacttcactttcttatcaaaaacttttcattatattcatttgtttcctccatcattcaggctccggtctactgaattttagttttgagtttctcccaccttagttcttgatgatgaacaggcgctcgcttttgtcaaggattcggaacaaagctctctccccatcgaagaggtaccaaacaccttcttcgcatgcagcagctcgaggaccttctgaactatcacccttggggtcgagcaggagagaacaagcaagtttcgagatcgatcatagtgaatcgagccaagaggaggaagtgatgcaagaagaggagaccttcagctctccagctggaaatactcgatcccgaaggtcgagtaagtcctctacaagggaattctcgaggaacaaggcatatatcactcgaggaaagaagcccgtggggaggaggttggaactggtagatgaagactccgaggaagaaatggcttcaccagaggaagatgatcaaacagagaaaggaggcaatgatgatttggaatcagagaagtgtgcaactcgaaacgagtactacaaactactgaagcgcaatgagtttttaggaactcgataccctcatcccgagaccatggagagactcggcatctatgatgatgtaaactatatatttaagcagtgcagcctgaatattcatatgtttcggccaatggaggggtatgaggaagagaccatccagtttctttcatccgtggaattgttcttatatggagagtcaaaggacgatgaaatcaggtcagacggaagtttgggatacttggagttctgtgtgtatgacgtagagtttcggcttccaattgagcacctcgagctgatgtatggatttctaagcggaaaagacacaagtcatcgttttgacaagagagagcttcagtcattctaggccacgcttgagtctaaacatgggttttcatcctctaggaccaagagcaacgagataaggagtccggtggtcagatactttcataggtctttagccagtgcactatttgcaagagagaggaatgggacctttgtcaatggagagctagaattaacggagacagcgctgcaggagctacttggtttagcatcagatggtacagttctagctagagatcagacagacgcttcaatctcattctacctaatcgaacatttgctgaattacagaggatgggctaagggacttaagaaaccaggaagaatggttgtgggaggagttttgaccccaattttgagagcatgcaatgtacctatgcattcaaaacggattcctccgagatggattgatatgcagcatcttatcaattccaagagtttttggtcgcagtagaagaatggcctatataaatataggttcggtcaccatacaacaggactatctattttcgtcctcccaaatgcagcttccacttcgatcagatattgtggcaacatttagttttgcccaccagtggagaacctctatacttcaggtgatgaagttgtgccgatggaaggagtgaatgatgatgaggctccaatccatcattcagataatgagacagaacctatggacgagtcttacgcaacacatcagttttactttgaggagtactccgcgccaaggcaaagtaaagactataaagaaatttacaagcgccttggttttctctaaaggatggagtaaacttcaagacaaggctctcgcggcactcaacaagaagtttaacaatctccaactcaagatcttttgctcttcatcaggtaaggcaatgccacagaacatgccgtttgggagaagcggatccactagtcacgaacctatgcattttggtccgccttcaccaccaagatagtcttcatatgagccgagggaacaccatgctgcaccttcaccaccaaggcaatcatccttcgaacctagagaaaaggaaaagaggagcaactttaaaacgcaaagaagaacaaggaaatcagatgctagagcaagccactctactgcaccacttgaggagccactggatcaataatccgagcaaagggtcccccccccagctaatccaagttcagcacaacccgtcttagagttacacaaagagagtatggacgatttcgtctcctcctacttcacctgatcactaggtaacaccacctcaaccattgtacataccatagcatctttttatttttgtttgtgtgtttcgtgctttggtcttgaattctctttcagatttttattacacaagagactgtgtaatttaagtttgggggagggttcaagacaggtttaactttgtgttcttttttcttatttcaaattttgcatcatctaaggcagtttcccatacccttagcctagccttatttcaagtcaaagatcatttgtgtgtgattgtgaggtcttttttgattgagcttagtataacgtgttaggtatgacccgacaagagtagtgtttcatgtagacctagcccacgctttttgggttagctaggactaggtggagacttgtatttgggattgggattgtgtatggaatgattggaaaagagaatgggaatgaaaagaaaataaaaaaagagagtaagagtttagagttcttaagggggaatagcaaagaaagtgttagtctagtaaagggtttggaactcaaaaagagttagacattgtaattcaaagaaaagggtaaaacgccttctatgctataagtttaaaagaaaagccttccgtttaccaaagcttaaaaccaaacccgctaaactcttgaatcgaaataaagaagcacccttgagaacctgacccgaa

SEQ ID NO: 32998 - DNA, 1335 bp, Arabidopsis thaliana landsberg
gaaacttgtgcaacacatttttccaagtaaatgtgcccacctccacttgcagggataaggagtgttcgtgacggcgttataacactattaatgcatgcaggtgtcagtcgcccaggctgctcaaaaaccaatcagcttcatgcccgggagatggatgcaggaaacaaattcttcaaagaagctccttttttctttctatgagcttttttccctaataccagaggaaactgtggaaagcggcagccaggcgactttttttattatctttaaaacccatcgttaactgaatggtctaacaataatgtctactattgtgtatcacagttaatcctaccaagtccccttgctgctacatcagtggcagtcattatcgggcttcgtccactcttaaattctgccaagactcggtctctttccgattgggtcttgtcaccatgtatggcaagagctggccatccgtccattctcaattgtctagtcacttgatcacaccctctctttgtctccacaaaaattaggattttactcccatccattaactgtttaagtagtgtaaggagcctatcaaacgagaaaaaaggcataagtatcatatcataaaagaaggcaaataaatatatatataaatcgcttcttatctaatggtagaaaaattaagaacctgtcgtatttctctggcgtcggtacaatctcgattacttggttaatagactggttagcttttagatctgttgatccaataatggcctacaaaataacaactgttttcaggggacaagataaaacatcccctactttattcaacaacagtatactcaatcctaataagttaaactaaatagcaagtaaaccttatatggatctcgtagaaactgcctggcaagagtttcaacctctcgtggccatgttgcactccaaagaagtgtttgtctatcaggtcggatctgtgaaaaataaggaacaatctcaagttctgaacaaaagccgtgatggttcttatttagcaacagaacaataaactgggaagataaaatctatcgactaataatgttggtcaaccaccctttccttaaagacactacatgatagctttggagaaagtacaaacatacctgagatacaatctttctaatttggggttcaaatcccatgtctaacattctgtcagcctcatccagtacaaggtaagtcactctcttcaattagtgtgttgacattccaacatatcaatcaaacgaccaggtgtagcattacaatctcacacctgacaagccatcatgattcataacttgatgtccatccaagaccagacatgaaacacactattaaaaataa

SEQ ID NO: 32999 - DNA, 1005 bp, Arabidopsis thaliana landsberg
  unsure (1)..(1005): unsure at all n locations
tatccaatccgaaattcgcattatacttggtacaaaatataacttcttttctttctttctttttttcatttcccttcaaacatatatgtatacgaaatttagaatcacgattatgcgatcttaaaactaagctggttcaactcctccatatgttaaagaaacaccaagccagtgacaaaaagtgcttatatcatttttaactagttttattgcacgatgtagattgaatagaaaatgtgaaattggattatgtaggtgaatggtggaatgatgacgtggacaatgttgagaaagcgatgatgaaaaccggagctggggctaaagtttccgacgcttacacccttaacgggcttcccggcccactttatccatgttctaccaaaggtccagtttatttctcttaaccgatgatttaagttccaaaccggatcgattcaattcaggcccaatttggttcgtttctcactgattatgatcgtctgcagatactttcacggggaccgtagacgccggaaaaacctacatnctccgcataatcaacgcagctttaaacaacgagctctttgtcgctgtagcgaatcacacgctaaccgtagtcgatgtcgacgcggtttacaccaaacctgttcataccaaagcaatcatgatcgctcccggtcaaaccaccacccttcttctccgcgccgaccaactcccctggcggtgaaatttctcatcgccgcaactccttacgtcacttccgtctttcctttcaacaactcaaccaccgtatgattcatccgttacaccggtaaaaccaaaccggaaaattccgtaaacacacggcggagacggcgattaacggcaatgtcgacagtcgcagctctcccgaatatgctggatacgaaattcgcgacgaaattctccgatagcatcaaaagtctgggatcagcgaagtatccatgtaaagtcccgacgaagatagacaagcgagtgatctccacgataagtctcaatctccaggat

SEQ ID NO: 33000 - DNA, 587 bp, Arabidopsis thaliana landsberg
tggaatatagcctcataaatctcatcctttagacgtacacaactcaaatttacagctgctaaagccaaaacatctggttgatggtcttttataaactttagaaaacgatcttgatccatttttttacgtttctggtcatttacatcccgagaccgcaatgcaatggaacctgcgtaaagcacatcaaccagctctcctgatgaatcaagcatcacaaatgtagtttctggatttacaggtccccaacaacaagttaggaccctcggtgcagcttcctcatccgaggtattattattctttcgatatggccctgaagacactttgttccataaaacctgtccatactctgaaagcaactgagtcttcgctctgctaattagcaaggatcttgcttctttctccactgacggcaaaagtaaaccatgaaccgcatcgtccagtatcaatttcctctgctcgttccagagttgagcatacttactaacaccaacacttagatagtgttcactgcattcactaattatcctattcatctgattcttaggcagcttgaaagttactaggagaagcttctcctcatctgcttt

SEQ ID NO: 33001 - DNA, 5576 bp, Arabidopsis thaliana landsberg
agattttgtccaaggaagatctatcagtttacgctaacgtgtatgacattattactgtactttagataagtaggaccggccaaatatgctaacgtgtaaaaaaaaaaaaaccacctggccaacacgataacgattccaagtttttttcgccgacatccgtaccggtctatcctcctccgccttccaaaatcaaggcaaaatctgtgaatatcggatacagttctggagggatcaatagtttaaaaagcgtatggattgtcagcgaaagaatctctagtgttttttttgcttttgtataatctgaggtgggttcgttgagattatctgatcaaatgatatagagagagctgtatgtttctgttctatgttgttagaattttgttcataattttcggattagcttttgaggttgatcaatgaagcagtagacatcgcataggcgacaccatagtccatgtaatttttgaaattagcaaattagatgttttatcatctgtctcaaactaccttgaggtaaagatttctcaaatacgggagatttgttataggaaaacagagatgcgcaatgaatgacatgggcaaaagtggagtggagtggaggaatataagggacacgtgacagaagcttattggagtgtttgtctagtatgacaagtgtttgttgtgatgatgcgcttgaggatatgataatttgttgaagactgaatccagtggtagtagctagctctcactagaaagggatttacagtgtaggagtatcttaatttaaaaacaactaaaaaaactctcttctggtctgtgtcattattgcgtcagtgtctcgttttttctctcgggtttactttgtgttatcgatgtggataagttgtttttacctcattatatataacctcttgagtggaactcaaattgtttgagtagaacaaacaaagttagggtttaagaagaagtctgtaaatacctaatctccatcaaatttggtacttgtagccatgatgatgattatgatgaagatgggtttgtgctgtagattcttcgatatttattttatctcttagcttttgtttctccttctctttgccttaatccattacagtatcagagtttggtgcttatgagctctgtttttccaggaccaagatttttgtccttgttgcaacagaattcgaaaaccctaattcaagctaagcaaatccatgctcaattagtcatcaatggctgccatgataattctctatttggcaaactcataggccattactgttcaaagccatcaaccgaaagcagctcaaagcttgctcatttactagtgtttcctcgatttggtcatcctgataagtttctcttcaacacattgcttaaatgtagcaaaccagaggactcgattcggatttttgccaattatgcatcaaaaagttcgttgctttatctcaatgagcgcacttttgtcttcgtccttggcgcttgtgctaggtcagcttcgtcgtcggcgttacgggttggtagaattgttcatgggatggtgaaaaagcttggctttctatatgaatctgaattgattggaaccactttactccatttctacgctaagaatggagatttacgttatgcaaggaaggtgtttgacgaaatgcctgagagaacctctgttacatggaacgcaatgataggtggatattgttcacataaggataaaggcaatcacaatgcgagaaaggctatggttttgtttaggagattctcttgctgtggtagtggagttagacctactggtacaaccatggtttgtgttctttcagccatttctcagacgggtttgctcgaaattggttctctcgttcatggttacatagaaaagctcgggttcacacccgaagttgatgtcattatcggtactgcacttgtcgacatgtactcaaaatgcggctgcttgaacaacgcattctccgtgttcgagctaatgaaagtgaaaaatgtctttacatggacttcaatggcaacggggctagctctcaacggtagaggaaacgaaacaccgaatcttctaaaccgaatggcggaatctgggatcaaaccaaacgaaataactttcactagcttgctttcggcttatcgtcatataggtcttgttgaagaaggaatcgagctgttcaagagcatgaagacaagatttggtgtcacaccggttatcgaacactatggttgcatagtagatcttcttggtaaggcagggcggatacaagaggcttatcagtttatattagctatgcctataaagcctgacgctatcttgttaagaagcctctgcaatgcctgcagcatttatggagagactgtaatgggtgaagagatcggaaaggctcttctcgagatagaacgagaggacgagaagctttcgggttctgagtgcgaagattatgtcgctttatcgaatgtgttagctcataaagggaaatgggtagaggtagagaagctgaggatcgagatgaaagaaagaagaatcaaaacaagacctggttacagttttgtttaacatagcttgttacaggtcaggattcaaaacactactcattttgcaatgaaagttttttagtttcatcaagtcattaattaacattacacaacaaataaacttgcaggtctcggttctgttaaaagctctgttatcccctgaagactctcttgtcttcttcttcttctttaagcacatgcattggattcatcacatcaagatctacacatagattaaaaatattcagatcccaatcttcttaatctatattaagaacaaagtcttcttaccgtgtagaatcttgtcaagttcgatgtctcttgatctcttcttggatttgtgctctgtatcaccaccattaacagattgattattcttccttgtaccttgagttccaacaaactctttgcctgtaatatcgattatatcatcgtcgctgtcaatgatatgaactgcatccagtggatatttggtctcgcaagccgaaacattgaagattattacacggaaactcgaattctccttgtattcgaacaagagaaagtggccttcctcgatggaatgagcctctgcaaactcactccaaccctcatggaaccaaatctcttcaccgatccgtttgagcttaatggaacgcttgaaacccgcaggagtctctaatgtaacaacctctgagagtttagacccttgtagcttcacgaatcttggcggaatcttctgctcaaagttattcaacataatgagattttcagaaacaagtaacaaaatgtcagatcttaaattctctacatttcttaagaacaaatgatcagattagtgtatcccttttagatctctagtccaagataaaacaaaagaaatggacactgtttagtgaatcttcagatatagtccctagaaattgaaacagggataacaacacacatgcaaacactttatttcaagttttttctaagtgttaagtaattaccatcatcttatccttcatcgttgaaggtaagaccaacttgaagaacttcttcaccggcgactcaggatcttgctgtgatcggcggtgagagacggaggtgactctggcaatcgtgttttgggttgtaaccatttttgtttgccttgttcagagaagagaaggtgaaaattgagagtggagagtgatgagtggagagttaaagccggaaaagagaaaccgataagtttttatctgacaagagtgacaaagttgctttaactctatgtcgttttccaagactcattttatacagttctctagtcaaaagataagtcttaccattattgaagttataccagtataaaccttgtatataaattaaaaaaaatatcatggaaatacgcttttatcaataaccaatgtataattcgttgctacatgtcataacaatcaaaggctagttacatcaaatagtaaaagcttacctaccgataacaaaatatattttctatactattacaacattaatataaacgagacgaaatatattctcgaaaaggattcgtcgaggcttccacgacagtagaacgatcacctcctcgtcgaaaattacgttcgtattctaacgttgacgaccggcaattgggaaacacggcgactttccccgaaacttttgagagagaatacaaatgtaaaaatcaatatagctgataaaatccagctaaactgaagattcgctaacgcttgtgccataatttctgtacaaggagactctcaaaccagcccactatgatcaacaatagtactgttgttacttcttggtgtatcggtcgtggttctcaagcaacccctatatggacataatttggatctaaaaacattaaccccatgttcaagaaccagcatccttgaaacatgagcgaggccgagaacacaagagacgcataaaaagatttagggtaaatggtcgacgcaagagctgaagagaaggagacgaaggcagcgaattcgaggaggacatggtactggccttcaagacctaagtgatcagtggagtgagaatcaagaaagaagagtacttcttgcatgaaaaccaatgttgcatgaagcccgatgaaaccggtatatatccttatcgggaggatttattacgtcaaagatgagagtggaagacgcaaacgaaatgagttggaagactatgcagatgtgtttgatttccggtttgaaagacgataatttaaggaaagggaaatctgagtttaggaggaaaatggataagaaagtaacaatgataatgacgatgagctcgagatgtttgagttttttgttatacgggaaagggaaccagaatcatgaggtgaaattttggtttggggaatttagagagtaagattgtatggtattgattacatgccagagaccgagaagtgcaagtgagagaccaggcacaaaatatcctaagaaggttcccatgttttaaaatgaattttcgaatatttgtttaggcttataagtttttattttgattattattccatctctttgaaggttttggattaagtgatgtccttatttatgctagatgcattaggttgagctttctacatcatattataaacattcaaacctgatagtcagctaaatcttttggggaatttgccttgaagctttctccttttgaggaagttgccttgaagctttctttttaacattttagttttttttgtttggttgtgttttgaacaaataggcttcggttgtgttttgaacaaataggcttcggttgtgttttgaacaaataggcttcggttgtgttttgaacaaataggcttcggttgtgttttgaacaaataggcttcggttgtgttttgaacaaataggcttcggttgtgtttggcccaatgccacttagcttttgggtctccaaatcgccgctgaagctgtgccgctttggagagtttctgtctcaaatgagaatcttgcatgtggagtcatttattgattttatttaattataaacggctgctctaggttttttgaactaaaagccttaatatgggctgggtttattctttaaggttgaaaagaaaaaaagaaaaaaaaaaaatccgacct

SEQ ID NO: 33002 - DNA, 561 bp, Arabidopsis thaliana landsberg
gaatatactcataagggggagtaattgtatgttgcactctttttcccttaaccatggtttttcccattgggttttcctggtaaggtttttaatgaggcagcattttaaatactttacgagttatgatactataatggtcatcagggggagtgttatgaataaagatggatgcccattataaggcccatcatctaagcccatcatctagatgtttctagggttttaccctttccttgtacacctatataaagaaccctttatctcaatggaataacacactcatttcttctatctcgttctctggttataacaaaaataaatgatttaaaacgaaagatcaggatgattaattcattttattgaaatcgatgttttttacaggatattaaaaccgaaaattaataaatacttatgagagattttaggaatgatttcatttgaagtaatggtggagttaatatatgagagattttaggtaatacctttgttaggtaaatatttgatttaactgttagaataaattcagtggcattgagtcgtaaataagttcaaagtccagaa

SEQ ID NO: 33003 - DNA, 1512 bp, Arabidopsis thaliana landsberg
cttttcccatgaactaaacaaccctgtggtaagggaatgaacaattatcatggccccgtaaattatgtttctgtatggacgggttcatgaaaaccctaaacataaattggtagtatagtatatatatatataactaatttagctcatcttatactatatccaccggagatcaatggagtgacttgcaaggttttgccgagggtgattgttctttcaaagacccaagtgcgggggagcacatacattgcctgatcactcattcatctaattgattcaaaacaagatattttcctgtgaaattcactaagccaagtctttgctttaattacatttactgggcaccttattcttacgttagatttttacaaaattcttctgcttacaaaacaacattagcaccgattggattacacagaagatgacttaacgtttaatttggttactaattaactaattaataagttacaaaaaagatagatctttcagcataaaccgttaataataaaaaagcttctaactttagaaactttcatggaggagatgaagtgtagtactgattattactctctctcaatccaacacttatcgccgcacaagccaaaggctgcgtcggaatcctaaaacagctcatcgcaccactggaataaccggaacaatccggctgcggccgctgcgaattcctcccgggaatacaattcccaacgaaatcaaacccgaaactaaccctggaagaacattcagagctaaacccagagaagaaattgaacgcaacagtgagattaatcagattcctcaacgaacaaaccaaatcaggaacctccccagagaatttattgtgagcaagattcaaaatttcaatcgccgacaagcaagagatcgtatctggaacatgacccatcaatgcattgtagctaacgtcaaagacttcaatttcagagaacataccaacagattccggtatacaaccggttaactggttattcaaaagcaaaacttccttaaccctcgatcccgtcagaccaaaactcgtcggaatttcgccggaaaatctgttattcgcgagattaataaccgaagccggagaatttccgaggtttcttgggatttctccgacgaattgattgttattgaggagaatcgcgtctaaccgtttgttgaaaagctcttcagggatgaaaccggttaaactattaaaccggagatcgaggtaaaccagatttggtatgtagagtgtgactaaagggaaaggacctgagagtttattgttgcttagatcaagttcttgaagagaagctaaagatttgaaagaatctgggatttgccctgagaatctgttactgttgagatggagaatattgaggtctgagagtaaagctaggtctttgacaagtgtgcctttgagatttgcatggttaagatctatagaggttatagattgaccaaaacagaacacacctttgtaagaacaaacatctgatccaacccatgttgtagaacattgatggatcctct

SEQ ID NO: 33004 - DNA, 1040 bp, Arabidopsis thaliana landsberg
aaatatctttagttgtttaactataggcttctatatttgtcacctactacttaacttatctgcagcaatcgagacgcacacacatgaatccattccaacagtatattcgaacttagccgattctcaagttttttggtctgaggtcgtaatcgggaacccatcctctccactaaattataaaactacaaaagaagccaaagtttgggccactcgatcttggattttaggagaataaaattattgatcgatgtgagattaatatctttaaattctaaaaagggagtatatcatcatcatgataaacgactttgtttgtaataagacgagaccaagttgggcaacttgcatgtctacttttcattctcacggtcacgtacacgtacaaaggtatgtgccaagtttgtcaactttcgtcacacaatatatgtcttgtctactgattccatttccttgtaaaatgtgtgatggacagtctcatgtatttgtcttgatttatataaaggtgaattacgtgattatttctatatttataacttttattatattagatgagattggctcgtatactcgaagttagatgatacaaagtttagaaagcttttcgaatcacactgatttgtataatgaaagtaaattttaaaattagccgcacactgtgatttgtattggggtaaggcgttcaaattaattgctctctttggagaggcacgtagctacaaagatatatggttgtttaattatgagccattcattcataaattttttttaaaaaaaatgtgtcattcatatgcacctaatcaaaagagtcagtcataaattcgctagtcgtagtccgacattttgtaactttgatcggggctccctatgcagaaaaggcatatatctcaacacaaaagtcgtgttacttggatacgaacgaagaacaagttattcttgtctaatgagtgaccttggatttggaatgctcacaatgatgttgaagctctaagtgaacttgtttatgaaacagagctcaatcgctaatgaacttgtttcagaga

SEQ ID NO: 33005 - DNA, 3602 bp, Arabidopsis thaliana landsberg
  unsure (1)..(3602): unsure at all n locations
taaccgaaggcttaaagaaactctgagaagacttggaggaacgagctcgtcgttctgatttggagggaaccgtcgtgggtaagctctccatctcaatccacgagatagaagagtgagagaagagaagattcaaaatctgagggcaaaaactggaagagaatcgaaatgaagaagaaggagcttttgactctgtgtttacttcttcttcttcggtttctctgtgttggatttgcttccgagatcggttactatggccaagttcataaactgatcatagacatagggggaatttaatttctgccaatttgttttttttaatatctctatctataaagagactcgctggttagaccagagggttaggttttggtctggttgtaatactgtatagcccaagctaggttggccaaacgaaacctttaagttgactaagccattttattaagtatggattttatgtatggtcttcccattgaaaaataaaatctgtattatagttaaaggaaaaaaaaacttaaccgtacattatgaagagcatgaataattattatttcatttacccacaacaacaacgtaatgtagaagttcttggaggaagtcctcggaatagaatgcaaacaccatgtttataagataaacctgcacaatatttagagcagtcttgattcatgaatcttccagtacaatctggtccacaagtcggaggtaaagcttgtacgctaattcccatttcaactatcaatcatgaaagaaaaaaaaatatgaatcttcttttcaagaagaatacaaaattcgttatcttatagtaaaatatgtatatatcaataataacctataccagagagaatgtcacacgaaatggtcagcatagcaacgacaatgcatgtaaccatcaatttggaggaacccatttttacaaaccaatattgtatgttttctaagatataatttgatgtccattaatcgagtatgaaatgatctatatatataattttaattttttcatagccataaatactttcatatatatttgactgaaaagttaaatctttgactcaaaaaatataaattttaaaaggaaatcatttgtttggtcaaaaacttcaatccttttaagaaaatctatagttaagaatacccggcagtaattaaaagagttttctacaaagaaaaaaaaaatcaaaataatattttttttgtaagtttacccttaacttgtagaaaaatgtagatcaaacatatgaagtcgaatttcatatgctatataagatcttatgtgtatctttgaattttgtccaaaaaaagaatatgcatcttcgaatagtttgtatgatcacattcatgaatgtttttaaattctaagaatagatctaggcttttcatgtgacgggttaaagcttcccttccattagatctatagaaattaaagcattgtgcctgcaagtaagatgttttgcctctcttatgtcttgaacgacctgcaaacttttctataagtttttttttaaagctttttatagagatctgatcttgtgaataatcagttgctatattatattaaatgcatcacatttatatcacatgtattgaacttacagaaaagtttgagataatgggataccctaaccccacgtagatttaacttcatcctcgtactccaacaagtagattagaaaagtttgagataattgagataatggccaaacgttattgacgtttttacaaataagcctcttgaactccgaagattcatgccttgatggagttttaggctcatgtgaaatcttaaaacagattgaataatcatgagttctaaaattgttaatgatttttcaaattacatgaactattaacagattatctctgaaaccaacctctatttatgtaatttttaacgaaatcaattctagcaatatatatgtacgtatcctaaataagactttnnnnnnnnnnnnnnnnnnnnnnnnatctttcctcatgtgagtctatcactacaacacctttccattttcttttcatgctcatttgaattaggactttatcttattgatcctgctcgatcatttctttttttctcatcatataataaagttgcatatgtttgtgaataaacctagtgttgcaatgattcaactaaaaatttcagccgtttatgaaaagttacgattaaaagacgaaaccatagaggacatttattgttactgcaacttaaaaaaaaatactaccgtaaaatactgtttttgtttaaaataatatacttttataacattatataaaacaaaccaaaaattacaattgttcgtaaaataaaaaaattgttgcaatgatttaactaaatactttcaatcatttatgaagagctaagataaaaagatgcaactgtagaagacatttattcggattgcaacgttctaaaaaaataacaagaaaaataatatttttagtttaaaaaaaaaattaatgtaaagttgcgataacaagacacaaatgttcagaactgcaaaacacatttattcggatttttatttttataagaaagaatgtattaaattgtctattcctcaaacatttttacatatttaagaatacaataaatgcattaaattcgtcaatcgtaatcttagcgggccagcccgttgcaatcttacaaaaacagatgcctattgcaggccggtccagattaaagcgggccggccgttcgacacatctacctatgaggatttatccacgagcaactgatattaaaatttgcatagaggtgaaaaaatgtacaagacatgattttttataaaataagaggttctattgttattatatgtatcatgaagaattatgataaatggacaaaactcaagtaatgcaacccatttgtaatgaaagattatgcgaatacaatacaaaaagtaatgattaagagacacaatcctccaattaataaatagaaggatgcaaaatagttataagtaaaacgaatgaagagttatgatgaaaaaatgaaatcatccaaaatatttataatagtatcaaaatgttaaaagtgagaatgtataaaactttttctatatagatgaaacatgatgttacacccgattagaaagataccaaacgagctctccttgttcccaagtttaatatttcaaagccaaaataaaaaaataaaataatgttacatatcataagcacaagttgacgtcgaggacaaacaataagatgaccatttctggttttagaaacaagttgactatacatatcagatactcaaaaggagaactttaataaatcatcacttgcagatgaacaaccaaactcactcagatcactgagaaatctctcttcattccttttgtgatacattgagttaaccgaggaactcttagcggctagccccagcgcctggtaacaagcttgtgagcgaaggcacgccttgtctcctcatttcctcttgtgcttgcttcatctcctctggatctgtttacgaaaacattttaggtgtgttcatcagcaaacgatgactaactcttcttaacttgcaatccaccaaccagttcaagagctctaaaagctcctagattggtgaaatgtgataaggaacatcaaatgtc

SEQ ID NO: 33006 - DNA, 2617 bp, Arabidopsis thaliana landsberg
aattccttggcctagtcctagtcctgatcaggggattacaacggtagtccattacctccgcgttcccaccttgccgagattgtttctcggcgtccaactttgacactctcttttaaagtgccatgtttgcccgcaatgataacaagtcattggttcatcgccgggagcctttgattgcccgtgatccatccttggcaactttggatcgcatggtccttgcttccacatcggccacatgcacctatggccttccatcaagttccgctatgattctttccccaagtcggacattcctcgcgcttagaatcggattggtttgagcagttcggaatcttttcctgattcatgagtttctcctcctcgatccctattttaatcatggccgccctttccactaactcagagtcttaattaaaggtgcgaatcaaacaatggtttcatatttctacccttaaccctcgaatgaaacgacgcacttgggattgctcatcctcgagttcccttcccacaaaccgcctaagacgattcaattcttcgtcatattcatgcaccgtttggttaccttgtaccaagtccaagtaggcacactcaagtctgtccatgcttccggtggaaagaacttcttgttgaattcctcctcaaagtccgatgaagtttggatctgatcacctttccgtttttctacggttagccaccaattatgcgcttctccttccaggaagtggatcgcagtgtatttccggtaatcctccggacaacgagatgagttaaagttcctgttgagtcgactcctccattcatcgacaacgatcgaatcagaacttccataaaaatgccttgttcccaactttgagacatgctcgagtaagttcaagtagtctcccttcttcctcgaagaatgagatggtggaatgacttccacaactcccgaatcaccatccctcggattttcaatcgcttgtggcacaggatccgacacaagagatttagccaatgtggccatttgtgccatcatcgctttcatcatgtcccactgctcttgggacgatggtattgcatccggattctccttcccatccgatgcatcgctattctctggatcttgatgaaccggagagtcctgcccagccacagttcctgccggattagttccatcctttgttgtctcgacccttgtttcctcaatgacttgtgtctcgtcggaaaccaatgtctctttgacaacacccttgtctttcttactcctcccagccttttccctcttacccatctgcgaaaactcaaaaattagccacataaacttaaaagtaatcgttagggtataagaaaacgtctaccgcgagatctcattaagccggcgagtggtgaaccccaacccatactaaagatcttaggaccgtaatcactctgataccaacttgtacggtcccattcccggatttctaatccggtgaggtttcccatgaagggatcacttaagtggtccgagccttaatccgattttagggtccattcctttcacattacttttctatcatattctgagattcattactagagtcatatgcacaaaagagtagaataaacaagaatcagggctttattgattaagcaaaggattcgatacaacctatgagtttgcatataagctattacaagtcatataatcgatccctagactatccgaactatcaccacccatcatcccggccttgagtctctcgcgcctaagccaagtccttcccacgatcaccatttgtttctgaaagtcatagagccataagtaatctcatttacttaatcatatgcaagtccatgcaatgctctatatgccatacactactcggatccgtggagagaattcagagaggggaagatcgcgcatcagtccggccgattctcggcaggtcagttaagacccgccggtcctccgccgagccgcgtccccgcctcagccgatccctacccggaccgagtcttgtgtaggatgcacatgacccggatactacccagccctctagtcgatcctttcaaggatccgactactaactcacatcctagaacccttagactcaaagtctaggatcccttaccttccttctcgaggttaggtcgatccgaccctccttctttattgccggccacagcccggcgaccgaatcctaagactatttattctcccaagagggagagagttttaatggtgagtttcttgtgttttcggtgtgttgtggtgagtggaatggtcctgggcgcccttccttatatagggggcgaatggatgcttcccaaatcaacacattccttgcacctttccgaagagttgcacctttccgaagagttgcgcccttccgaagagttgcacctttccgaagagttgtatctcttcgcccataaccgcccagttagtccgtcactcgtccagctaccttgagctagtccgtcactcgtccagctacctcgagctgaaccgtcactcgtccagctgcccgagctggactgtcactcgacctgagtaaccgtcactccttccagctgagcttgagctttgggcgagctgacccagctgatttctttatgatcctagcatagcctgcatgatttcccctttgtccga

SEQ ID NO: 33007 - DNA, 890 bp, Arabidopsis thaliana landsberg
ttttttttatatttgtttttgcgacaaattttatcatttgcatttgacatttagtcgcgaataaatcacaaatgtcgtaaaacgatatattttctttagacagataatcacagcaaaattacaattacacaaaataaaaacttaaaactttttccatttttgttaaaaaaaatttggttctacagggaggttattgaagaattgatatatacgcactaccagttccacatttaaaaaagaaaagggaggttaatattattgtgccagatattgaaaaaaggggctaaaaattgtcctgggctgggccaattggtcaatcgtcagcccattaaggaacccatgaaaaatcaagattattatagttagcccacgtgcatctgaatcgcgttgttataaggcccatttattcattttaatatacaaaacaaaataaataaatccaaaattcgtgaaaacggcaaatttctgaaagttcatgttacgcacgcacgcttggttccgctctgtcttctctctttctctttctttctttcgccatggatatggcaaccgagaagacgatgtttcacacaaatccataaacatttcacctttcccacagaggataccacattaattccgattccaaattatgtccatttcgtgtctatatgaatgggtgaattgccaaaatcacgattacaggtctggatttgggatcaccattgatgaccttgtacgttgtagaatgcgtataagtacaccttatgtgattacttagtgtcatcattatttgaaatttcaatatatgtgaacggcttgatgctcttcaacattcacaatctgggtaatgtaagaagatcgatacaaagttcaattctctgaccattgaaacgctctgcttctgcaaa

SEQ ID NO: 33008 - DNA, 697 bp, Arabidopsis thaliana landsberg
tctaaaaatccaatcttattaactcataggaagaaaaatggcttctacatttcttcaaggccatactcaaaaactcacccttcctttatctcatttcacttccacacataaaccaactcttagattccaaaacatatatattggtttcccctccaatggaggtcaaagccgccgtttgatcatcagatcaccaatcacggtcgccaaatcaaacagcaagaatgattctcacgatgataaaaagcaattaaggccattgaaaatggcggcgggagcatccctagcactagcttgcgccataagtatctttggctttaagataaataatatgagctacactgccgcggcagctgcctatccaagctctgccgacatgatcatatccgggaagccgacttcagccgcatccgctacttccggtatgtatcctttcccagctaaattcgcattgcggtctctctttgaagttagctcaatgcttgcttcggctaaacccattccttctcaaaaaccattcaatcttcacaagctcccttctttgccttcaaaggacgatattgactccatcaaggtacaatctgcaaacatataaatatttgttcaaatagtttagtgtcacgtgagatcttgaacctttaagactagctaggagtattgttgaaccactaccaacagctggattattcgggtttgcttt

SEQ ID NO: 33009 - DNA, 548 bp, Arabidopsis thaliana landsberg
gaacaaaataaacttttaggtcaggtcatttgtatgccttcgtattttagcaacaaccctcttcgagtttgctatctcaatttcctaaatctgaaaatgataaaaaaaattatgtattaatgaagtctcaaacaataattaagaatattcatcataatcattgaacaacaatataagcaaagtatgtgtagtagaaactatgacaatttgtttcacccaaattattacaatggaaagtgactagtcatcaatcatcatcatcagtgctaagtacttcaatttagtttttgtaaatctccatgtctggagagatacctgtttgaaatatttgttataactatataacttgtcctaggttatagtcatttcttatttaaaaataaaatgtagaaaagtctattctcttttagggcaagattaaagtaagtgaccaatgttctattttttcccaaccgttggaaagaaaaaggtatttctcaattcattatctcaacacgcacaactctgaagctctacatgtcactcttttttgaaacatgttttgatga

SEQ ID NO: 33010 - DNA, 2849 bp, Arabidopsis thaliana landsberg
taacctcggtcgttagggttcttaagtacggtagtaatcagtcaatacagagaagtagaggaatttctcatcaacgacaaggatgattgtgtcacgagtctcggatcttacccggatgattcttctacttgtcacgacccactaatctctctgacactcccaagtttcaaaccaaacgacgtctatcaacatctccagacccaactccacgatcatgacttgtccgagcaaatatcttgtaagattgtcgaagcccaacaacggcaaacaagtcaaagtgtttacttgccacaacaaccacctttattcataatcgtctctgtcaaattgacacacaaggtttacgtcgttgtgcctccgttggcaacagatttggaccaagagatgagccaaggagaagaagaagaatcgaagacttgtgccatctgtttggaggaattgtcgacatccgatgattactgcgagatgcctaattgcacgcattgttttcatgaaccatgtctcactcagtggttgatccgagataataactcatgccctctctgtcgcaaacctgttgacaaacaaccggaatctaattagggttgcagatttgttctatttgttaacttgttgttttggaagtttatttagggttttcacttttatgttttgtctaagaggcagattagggttttccgtagtttatgtatctgtttttgttggcaacatgtaatacagtatgattttatcaatttcaattacaagtttgattctagtatgcgacacattatatctcttgcaacacaaaacactgacttaaaccaaatatagtttcagattaaaaagaaggcaactttgattttttgaggttggcttaccaaattgaaagtaacaaggaaacaatcaaaatacacactaccaaagtttcagaagtgaactagacgtgatcctaggttctggatattgatacatctttcaaattaccaaacgatactaatgactcttcaaatgaccattgagacgcatatacctcacagagaaaagtcttaactgaccattgagacgcacataggttccatctctgttccacaagcttacctccaaactaaatgtgatctcaccacaaatcagattaagccgtagatactaaccgcacatactacattttctagcgtcgacagtatcattcaccctctaaaaaagggcacaacaacaccaactacaaacttcaaaactgaccatttgtacctaaaaacaatcttgcatactctgccaaaaggaatagtttctgtgagtttaccatcgtttacagtcaaattggcctgttccatcatcaagagtgaatctaacttgtgtgactttgaaacatctttgtcacacactaatccaacaagtgagacatgattataccaaaaacatgacacaattgagtaaaactttgacttaaaacagggtgatctggaattggttttagaagagagatcatgtacgtttgttagtgagattctattgatgatctagattctagaattttgtgtagcgattcggaaactttcgatctgttgtctaactcgtggaattaaaccaaaaggaagattttagctactcggaaagttagtttggttacctcaagatccgaagcacaatttatgttgtatattgaacactgctactttaaacagcgcttagcataatcacatttaaatagtgtgttccttaaaagttacaagttacgacatgttatgaggttgtgcaatgtagttttcaaactattgccatatgacaagtacaaaagaatttttgacggaaaccaaacaaaagtttaatttgtttgattctaattggcaaaaaaaaaaagatttaaaccaagaacaaaaagacaaaattcctgaattttttatccaaactatcccaaaaatattggaaagtgtccatacttttaactgttaataaattgtctgctatttttgaaacttatcatttttcgaaacaacttgctaattgacaagaaaataatgttaaaaggataattttgtatatgtgaatcacttgatgtaatacgtggacgtcacttgtgagttcaagaatctaatggaaggagctaatgcaccttgcatagagacaatatgtgatggagcgttttacacacatctatcaaatatatattacttaaagcattattatacgtatggtctttcaaagatacacatatggtgttttataggaaggccttgcatgcatatggttcatgttgtatatcgatatgtggatggtggtggcgcattcaagaccatgctttttgttaaacggtatttgtattcacttacgaatattgcaacaaggtgtagagaaatcttgttttatatatttcaaaagctattgaagactgatgaaaatgatagccttcaagaaccatatctcacatcacctaaaaataaaataaatcacccgaagatagacttcaacacaagagaagtttattgaatataaataagtgaaaattgaaaagagtgaaagagtgaagaaatagttttgtgtcaatgcatttttgttattgtagtaatctaaaattatttttgggaaatgtagcacatcacatcattaattttggtatattatatatatatatatatatatatatatatatatgtaacattaactttggtattatttatttttgacttgtattgtattttattcaaataaccgttagacggtaattcggcattcggtaagaacctaacaccaagataatttttttttttttttttaaatgataaataaatttaggtctacgcacttagaaatttttgttttctattttttgcaaaataagttgaaccatgtccatcaaatctaacattgag

SEQ ID NO: 33011 - DNA, 3731 bp, Arabidopsis thaliana landsberg
gactggaagtgcctacagacttggttgtgctggatatcgaccaagagcataaggatcctcttatcctgatagacctttcttaggctgagtgggagcaccgatcgatgttaggaagggtgaataaatatcagccttggaaagcatatcaagctttagtttgacatcaacaaaactccacaaaggttaacagatgatggaaagacctctgaagacaatagagtgattccaggagaaggatatgagactgaagagtaaaagagcttaaaaagaggtctaataagcaagaggaaactatggaggagctagcccacactgttgaggaacttaagagtaagctggatcagatgtagaaagaagcctaacctaaaggccggattgacactattccgagaaaaaagttcacttcaagatggtctgcagagatagattaccctctataagagatagaaccctattttgatgaaaggcgaattgagtaatttgctgcacacctcttcagagaggatgctgaatatgatgatgagatcagagaggactatgcagaccctctctatcacccattttcttcttaaagagtttgaggagtcaagctagagactttaaacaagctcacttgggaggaattcccaagactgtttctgtaaataaaacttttattttcttgttatttttgatttgtttttggttgtgtttgtgattctcaggaacagagaaacagtgtggaggtagagtaaaaatttaaaaattttactctacagagcaacaggggatcgagtattccagaaattcaagaatttgaaaaacctctattgcactcagaggccatgaggtcgagtattattgatgattctaaaaaccaaaattttgaaatcatatctatgctcgacagacagaagctacagagacttatagggagtttaacaagtttacagaggattactgaaggttctagtcaacagaaaacagtgcttctagacaaatagacagaacgtggcccaccacctctcacctttgttcccccacgcgttttaagagataacaaaatctcttccttccttccccaccactcgatctcaccttatcctctcccaccgacatcatctctctccctctccaaacactcgaccaagaaaattcactctacctcacgtttctcacttgaccaaacctcaccatctctcttcctctccaaacacttgaccgcaccatcacactcgacctcaccattcactcgatctctcccctccggcttcaccatccctcgctgctttgtcaccctcttactcgaccaaacctcactcgtcatctctctcaccgcctcccattcactcgattgcaacgccctcttctccattcgccgcttactcgacctcaccgttctcttccttctcaccactcgtcgttcactcgaccactccgccctttacttcgccggaagcttcaccgtctcatcgtcgtctccttctcactcgacctctactcgacctcatctccgcttccaccattcactcgaccacatcgcaatttggacaaagaagctcttcattcgattttcgacaaacggccagagtttctctctctcgttctcgtgagccaactcgacttcgccggagcttctcgccgttcactcgacctcgccattcattgcgcctccattcgtctctttactcgaccgctcctccaaccgccaccgtcttctctaaattcgccgtttactcgaccacgctgttacgtctctcattcgtgtacactcgaccgctatacccgaagccacaatttcactatactcgaccgtttcactcgaccgcgtacttgactggtttagtatttgtgtttatttgaactaacatattgatatttggttttgagttacattctttttcagggaatcaatatgagtaactacagtggcgaatcctccatggatgcggattacaacgtcgatgaagctgaatcttggtcaactggaccagagagagagcaataggcttatgagagcttcagagctgagacccaacgctcagtagctcgacgcaatgaaaggagagctgagattgctagaggaaagagagcgatgacctgtagatatgagttgatcgacgaagatattgacgtcgagtatgagcctgagtcatggcacagagaaacgaagctgttgaacaagcctgatgaagttacaatggaggagtacatcagacttttcgaggtgaacgacttctggggaacgaggtacccttgttatgagactctagcccagctggggctactggaggacgtacatagcttggaagaaggaaacaatagagtttctctccactctacaagtggagatgtatcagggacttacatcagataagctggagagtgaagggttggagttcttgaccttttcagtgaacgagcagcgttaccagctatctatcaagagcttggaaggattgtttggtttccccagtggaaagggaactaaacccaagttcgagagggaagagttgaaggatttgtggttaacctttgggaacgatatggcgctcaactcagcgaggtctaagagcaaccagatttgaagcactgtgatccgctactatcagcgctctgtagcgaatgttctgtactctagggaatctacaggcaccgtgtctaacacagacatggagatgattgaatctgcactcaagggcattctccgcagaacaaaggtgaagaaggtcctgaagggcgacctcaatgatgcaccaccggttatgcttctgttgacccacctgtgtggatacaggaagtgggcgcacaccaaagggaagaagagggcgcgaggagccctttgtgtaggaggtgttgtgacaccgattctgattgcatgtggtgtacctctcacgtctccggggtttgatccgaggatgatggatttagatcatttgcgtcgttgtgagtttctggagtacgacatggttggcgatttctatcgctacaaattcgagcactccctgacccgaacagccaacattttgcttccctgcatcgaggccacaaccatacttcagggtgagaacattgacttcagacctgcgcgtgattacctctactttgagagcgctccaccgactgatgacaatgtccctacgacggaagctacagaggatgatattgctgagatggatgaggataagaaggaggagtatgatacgagcatgtatcatttcagtgagcacgtacctccagcgcgggagagcaagagcttgagtgaagctcacagaaacaacagtaagttgcagaggtggtgcaagaaacaagataggctacttatcaagtgcttcaaagccatcacgtttctgacggacaagataagttgtttctcttctaccacagctattccacagggagagcgtcctcaggacatgccttcgaggagatatgacgcgccagggccaagtcatcacaggcctgagccaagttaccacaggcctgagcctagtgaccgagtagtcccaccagtccctgcaaggcattcatcattcaagcctcgggagctcgggagaaaaaagaaggctgcacttgctcggtctggcagcaggagtacacgatttctccagtcccgtagcttacgcgaccgcggtgctggccgcagcagaagaagagaggtcgagtatcatcagagcccccctggccgcgacgaaggagcagaggtcgaaaaaacccagggggaagctgagacacaacagggagattcttcg

SEQ ID NO: 33012 - DNA, 897 bp, Arabidopsis thaliana landsberg
tttttttggcggaaaaactttgtgtctgaaaagttttggcggaaaaattttgttggcgagatatttattcttttggaaagttttagtcgggaaaaaatcaatatttcattttgttaacctaaaacattttttaaatatgggtaaaatagtcgttaaaaattaaaaaaaggtataaatgaaaacgacaaacagaaaagggcataattgaaaaagggaagtgttgaaaggacattcttagcaatttttcaagttcaaattgaaataaaataaaatcatgtactgatatagcatatttattttataaagaagtaagaggagactatccagacatcatttaaccaagactacatctcgatggaaattacatggatgacagtggtatagagcctacaaaatctgattagtgatgtacatttttatacaaaatctttaatttgatgaaggaacttatgttaattttaaattaatttgtgtgttgtttttcattcatgttgtaatatttgcattcatgtgataaattttaaatataaatataaatataattttagataataattcacaagacctaatagatactttttctaacataaattcttagtttataataactatatcttagttactgtatttatatatcatatattttaaaactaacttaaaatattaacatattttactatattactttcaatttatagtattataatacaaaatcatcataattaaaatttattaaacaatcataatttatatgccacaaattagccataacctagccctgagatttcggaaataacagattaaattgacccggttaacccgataatttcggttatcgacgttgatcgaattgagcaggccaaaccgaacgacaaaattaatttctgtaatcggata

SEQ ID NO: 33013 - DNA, 2214 bp, Arabidopsis thaliana landsberg
aaacgtcctagagtttaatcctatacactctgcagttgagatttaccttattagcaagacctgttgaactgtagatctcccttctcccctcctagaatggattaaaaaaacgtattcaacgctttggtgcagggttgctgtcgctatggtgttgaagagaataattttggtactggtaattccatttacccaatctgaaccgtttgtttaccgttgattacttctatcatttttatgctggaagatgaaaagcttcaggaccaacattacttcttatattcctctctatgcagctcctttaaaagcaccaaaatggtataagcgcccggttggtgcatcttttggatttgggggaaagcttgtatcgtgtcacgcaagggcccctgcaaagggtacttcgagcattctatccgaggtaggtatctatatacatatatttatttatccggttataccccttttgtcgtcaattctaatttgacttagtgtcatgtttaggtttttttgcacagcctggtaacagaacagagtttggtgagtcgaacttctgaatttgaagctgcaatagaaaatggagatatgacttctctaaggggtttgtgcgagaagaaatctgaagagactgagtatgccatccttgtgattgaaaatgttgatattcgcccttataaaaactcatgagataactcagtttggaccattttattccactgatttcgcagatccgaagaggagaaagagacatggggcttgctgaaaatcatgttcgaagaggaaggaacttcaaggacaaagttgatcagccatcttggctttactttgcctgttgcggaaaaggatcaggcagtagatgggctctcatcagatctcaatggcattagattagaggatactgcggcagatgcactggatcttgacgacagtaacgaggcagctgcatttgcgatggataatggagaagacttctttaacaactttcctgctaaaccggatacacctgtatctacatctgccaaagattttatgccttctgacacagatttttctaccaaaggagaagaaacgcaagaaatgcaagaagaagaggaagaaagttctgacccagtttttgataatgccatccagcgagcgttgattgttggagattacaaggaggcggtggatcagtgtataactgcaaataagatggccgatgctttagttattgctcatgttggtggtacagcgttgtgggagagtactcgtgagaaatatttgaagacgagcagtgcgccatacatgaaggtatatgtatattctttcccaacttgatatgtaggtaagtgccatctacacccctgtttgtggttgcaaaatctgtaaactactgtatgtttatctatttcaggttgtttctgcgatggtgagcaatgatctcaggagccttatctatacaaggtcacataagttctggaaagagactcttgctctcctctgtactgtaagtttctccgactgagggaaaaatacttagaaaagaaaggaaatttactaattgatattgtctatcaatgcactccaataatcataaaggaaatggaatctgctttttcgtgtcttactcagcgaaaacattttctgctatcacttttaactcttttcaacaatataatgtgatgttatctccgtgcactcgtgaaccaagatgaacaacttgtcagctacgctattctgctcactagaaaacttctttgtaatgaatgctgatcttatattcattggcaaacagtttgcacaaggagaacaatggacaaccctgtgtgatgcccttgcctcgaagttgatggctgctggtaacactttggctgcagttctctgctacatttgcgcaggcaatgttgacagaacagtagaaatttggtcgaggagccttgcaaatgagcgggatggaagatcttatgctgagcttcttcaagtgtgtatcactttctatgtttcgcgcataaatttttgctgggcttctccgctcatatttttctgcccttatcttataataggatcttatggagaagactcttgtccttgctttggcaactggcaacaaaaagttcagcgcatctctgtgtaaactctttgagagttctgctcagatactggccagccaagggcttcaaacaaaggcaatgaagtacttgaaagttctggattctggtggccagtcacctgaactttcaa

SEQ ID NO: 33014 - DNA, 1019 bp, Arabidopsis thaliana landsberg
  unsure (1)..(1019): unsure at all n locations
tccgccgcgcctgccacgccaggaaccccacaaaggccagcgatggcagcatcaaggccaggttgtacagtaccccgtggcactccgacgcccacgataacggccctagcgacaccgcagcgccacccgacgactcgttggcctccggcgacaccgccagtgccatcccgccgtccgcgagcagcgcccgcatctccgacaccggcccgcgcgccaggaaaggacgacggagaagggtgcgcgctagggtttgggtcggtggagggattcggttcgggaggtggaattgcacggatatnnnnnnnnnnnnnnnnnnnnnnnnnnnnnttccactggctcgtgggtggagccgtggagcacggatgttaggtcaaaagtagagattgcaacatatacactcactaggtgtatgcccgtgcgttgcaacgggaatacgctgggatgatcatcgacacatatctgagtggatcttatattttcttgggggtctggagaaagtttgctcggaagccaaacatgttaagacctgagcatgtgttactcatgtgccccatcagcacactgttccgcgcttgtatgagtcttgctaatttgcatgcctcgtgcatagtttctcatgtctcggtagcagtatcagattcccttcagccgtgggtaaaccaaggtgaaagattacagaacagtgggcacacgcactcactataagtcgagacatttttgttatgcagttctcctttacgtgagcgacatatatattatcttatcatcagctgctcttaccacaccatgctattcagagttcaagacgcagactccaacagaaatttcaaatccaagatcaacagccacgtgtaatgagatatatagttgtgtgtaaaagctgacagatataaacgtgttaaggacaaagtggttcaaggacctccagcgtttaattgtgcaagaaggcgaataaacccccaaatatatcttccatttaccccangaacatccatgaatttcatgtgagagttgtcgta

SEQ ID NO: 33015 - DNA, 695 bp, Arabidopsis thaliana landsberg
tgtatctgtttacagcctacagagaactttacagcaaagggttatggatgattacagagtttctcatacgtaaaaggatatgatatgcgttctgttcttgccgctgcacttgaattctatcagattcttgtaatggatttgttgcagaagatgaaatacctatgtaatattgcatttgtgctattaatgagcttgccttctattctataccatactaagttttgcgtaccatgccctatgatccaattgaaagtttgcatatcggtttcagggaacgtaaatctcaaagtatgagttatgattctccaactgatgatcgaaagcttcaaacagtatcgccatgaatagtatgttcatcgttacacagcataaaagttcttggaactgaggaacgagtcactatcaagtgatgttggtaagacatgaaacaaataaacaacaaggaagactaaaaacaaaacagatcaacaatacgaaaagacagattgtaatggcttcagagttttgcataggtcaagagtagagatcaatgaagaacttgtcaacaatgttgagaggataggtcaagagtagagatccgtgaagaacttgtcaacaatgttgagatacacgggactgcttatacgagaatagtagtgaagcgcctcttcaacgtcaagggcttgctctatatctactggcttagtcatatacat

SEQ ID NO: 33016 - DNA, 1140 bp, Arabidopsis thaliana landsberg
caaaatttctccaatggtaacatatccttgcgatggacgaaatgatgtcaaacagtttttttttataatttcatataatattcaaaaaaaaagaagttgttttttccaatcaggtagtcttaaacaaatctgcaacataagttatatgttttaaaaaatatactttatggttatttgggttatattcatcaatcggtaggtcagtccatgacaacgtactctaaattattaggagcaaaatcatgatctagtttaataaacggtctaaacagactaatttttttttttctgggaataagatagggttagaccacatggataatatgcatgtccaaattctttaaaatctaagccctaaaatttgttgaaaatcagaattcttttctatgtctcttgtagaacaaattataagtatataaagaagcttaagtacaactgatattcgtagttataaatgtcaaaggttgtattttttctataacccactatatatatgttgattaagttttgaaaacgatatatttttttttgtgtttttccgctttcacatactggaattgttgaaagattgtggattagagaaaaatgtaagttatttaaaaaaaaataccgaaaaaattggtgtacaatagagaatttgtacaaatgaggttttcaatgcacatattaaatttgattgtgtaagatagtttggagttggttagtaaagatctggataaaatcagggattatgttacatatgtgcaggggtctaagtctagagaaaacatgtttcaaaactgtacgaaaacagttggcattcaagttaaaaaaaaatctgattttaaatgtcacaacttagagtgttagttgtctcattgagaactgcaaaaatcaaactaatattatgctctgtagaatttgttatgttcatcttctctatgttcttgaattgtattcaatgtttaatgaaccagtcatggacaagcatattatgaagcgggcattaaatggtcattgtcgttaacgaacatgggctttaacggactggacgtgatggatatgaccggcccaatgttcataaaatattaggataagtgatttggggcaaaatagaaaaacactaatcgtcgaaaaatatgtcttggtttctaaaacagt

SEQ ID NO: 33017 - DNA, 1736 bp, Arabidopsis thaliana landsberg
  unsure (1)..(1736): unsure at all n locations
atggggtggtttgaaaaaaaaaaggtactatggtttcaaaagtcgcgagagaaatgaatagctttgggggatagaaatacacaatatttccatacttcaaccataatccggcgacgaagaaacatgatagaaatgttgaaaaatgagatgaccaatgggtttcagaatcgcaggagctggaagtgatggctatcgaatactattaaaagttgtattcaatggatgatgttgaggaggaggttgacagactcgcacccgaaggttttgaagagttaacaacaagggagctggcagacttaaacaaaccattcacgaatttggaggttgaatattcagtaagaagcatggggagttttaaggccccgagtccagacgggtatcaaccgattttttatcaagattgttgggctgtggtgggagaatctgtgacaaaatttgtgttgcacttttttgaaacaggacagctaccaccaaaaatgaatgatgccttgttggtactcattgccaaggttagtaaaccggagagaatgtcgcagtttagaccaatcagtctctgtaatgtcttgtttaagataattactaagattatggttatcagactgaagaagttgatgcctaagctgattggtccaactcaatccaatattattctcggaaggctcagtgcagataatattgtggtagttcaggaagctgttcattcaatgagaaggaagaagggcagaaagggatggatgcttttaaagttggatttggagaaggcttatgatcgcgttagatgggattttttggaggatatgcttaaggctgcaaggttaccaggggctttggttcattggattatgcagtgcgtcacaggaccttccatgagtgtgctttggaatggcgagaaactgatggttttgctccacgtcggggattgaggcagggagatccgttatcaccatacctctttgtctcatgtgtttggagagattgtgtcatcaaattgatagagcagttggggctaagacatggaagccgataaggttgtcgtgtggagggcctatgctatcgcatatttgctttgcggacgacttaattttgtttgcaaaagcctctgtggcacagattcgtgtgattcaaggaatactggaagctntctgcaagtcatctggacaaagagtaagccttgaaaaatcgaaaatctttttctctaaaaatgttcatcggtttcttcgagaatttgtttagtgatgaaagtggtatccggtcaactaaggatttgggaaagtatcttggtatgccggttttgcaaaagcggattaacaaaggaacttttggtgaaattctggagagagtgacatcacgattgtcgggctggaagggacgagtgttgagtatggctggtcggcttacttagacgaaggcagtgatatcttcaattccggtacattcgatgagcacaattgcgttgccaaagttcaccttagatgagttggataagattgcgagaacgtttttatggggtagcactactgaacaacggaagcaacacttgatttcctggaaaaaagtgtatctgccaaagaaagagggaggattgggaattcgttcttcaagagatatgaatacagctttgttggctaagattggttggagattattggaggataaaacatgtctatgggccaaggttttaagatgtaagtataaggttaaagagatatatgacccaacttggatagtagtaaaga

SEQ ID NO: 33018 - DNA, 3691 bp, Arabidopsis thaliana landsberg
cttttaacgaatcaatatcgtcagtaatatattcgtcggtattccgtttggtttaagactgactgttaaccgagatatgactgatggttgttaccgacgacgaacatgtaagttgccgatgcatttttgtgccgttattactagagggattaccgacgatgatggaaaatgcctgacgaaaacaattgatttaacaaaaagaaattataaattatgcaaactaaaaataattaaattttaaaatgattcaaaataaaataactaaatggaaaaaccattcatattacaataacattgtatccaaaataaagtattcacactaaaatttaaaagaagaactaagaactagaattgggaaaccggcattcgcatatcttccatgaaacgcatcatcgtctcggaacttttcttgttttcggctatctcctttgccatctcatcggttcggcgcttgttctcagctttctcttcggccatttgagtctccaaagcttcaatccgtgcttctttctctttgagagacgcctcaagcatgggatcacatgaatacgacgatgtggaatgagacttatatcgagctacacctagttttcctaacccaaatatccgaccctttctttttggagtttcctacaagcaaagaagatataatagtatgtatcaaaaacgatattatataaaatactagaggagagacgcaacatagatctatatggcaacaaaatctcaacataccaatcaaatattcattaatctattatgagatagtaattaaaaaaattaaaaaacataagtacctcaaaaacgaatttgttgacaatctccattgggacgtcactattctagacaccatctatagatggttgggtaaggagatattcttgcttcctcttctttgaattctctaaaacttcctttgcaaccggatcttgaatttgtttggtttttttgtgtgtgtgtgtatcttccatcaacgttagatgatccggatacacaccatctctctcggcctaaatccaaaattaaaaaatattaataacatatattgaatagaaataggaataagttgaaatttagtacgtttatgaaacataattatggaagtagtacactcactatttataattaggaaaataaccgggtccactttcgagtgtaatacgcgtcccctgtaatacagaaaaacatgggccatgattcgtttgaggaaattatgtttaggggccgccgcttgttttggtcgttggcagaaaaccctctgattgagttgagggttttgctttacaatatacagcaaacgtcatgggcctagcgtatttctagatgggccttaaacaaagtctgttaacagttttataattcatggcgaaggcgttgaagtcaacttcttcatcgtcggcttattcagttccggagtgggagctgagagaaacgtctgcatttatgaatgtttcaaatcaacggaattagttaacaggttggtgaataaaatgttataataatcaaattctccttaggtttttctcgaaagtagctaaattttttgggagaatttgagctcgtttttttagaggattagattaggtttaagtaacaaaaagagatgatgattatcagtttcggttgtgtttctttgctacctggaaaattcatctttgcgtttctcctatggaaggtggaattctaatcagaaaatggttttgtaaatttctcctaataatgtttaaaagccttcagtctgataaaaagtgaattccttttttgcagtggatgatattgtcgttgtacaggctggtagatggattttgtatagcaccggtgaatgggaattcaagcttgattcttgtggtcacggtagggcgatgagcttgatggggttaataactttaagggatttagagcttaaggttcgtcacatctttgggctggagaaaccttccatatctttggagcttagctacattttgaggacagactagctctgttatctggtgttcagccgggtccgacaatgattgggtctgattggcagtttagatgctttaaatctctaagtattggtgataaatctgtgaatctgtttgtgtgttttagagaaggcgattcagttatcgtcggtcctgcctgcgaacctggacagactagcgcaagtgttgttaagtattttgaagctggagaaccaacatttgcaggcattgtacagtctagagataaacctgttccggcggttggaggaggttactttgcgggattattatctactgttcaagataatatggatgcccatccccccaacaatcactctgcttttgttcagagtacaaccgtttgtgatttatccagtcaatgggacataagcgatgaactctgttagaagccctagaagcagtggagaagtctggagcttttgtcaccgctgcaggggtggatacatccctaccggcagaagtacctgattcaggtgatgattcagagtctttagcagaatctgacgaatcttcctctcttagtacaggtagtgacttagaagtttctgagttcgacgacgataccctccatgaaaacactctccaatctgataaagagattgttgtacatgaagacatcggggatgatgatttcattgagcagcccccccaaaaagaaagttttgcttcacaataccaaccctggtgctatgacagagcttttggaaacttgtcagaaaggtataagcattgatcaagtgtatgggtacgaagatctcgagccgatgtttggggacgatgatattgatgcaaaagcagcttacgttgatttgacaaaagaggatgacaatatgtttgttggaaggacctttgcatcgagggaagatttcaggattgccttgtccatttatgccattaaccgtattttccgctttaaatttactaggtatgagaaaaattacttggttgctgaatgttatgacaaaaaaaactgtgattggagagttagagcacaccaagttggaggtgacagcgaagaatatgaagtgaggctggcaaagttggaacatgtgtgtaaggttcagactaggagccgcttttcaaaacatgttacgtccaaggttgtagctgctctcctaagagctaagtatgccaaggccttctgtggtccaagagcaagagatttacccgactccattctaagggatcacaatgttcggatgacgtactggaaatgttggaaagccaaagaattggctgttgagacagctcaaggcactgatgagagctctttctctttattgccggtttatcttcatgtcctacaactagcaaaccctcgcacagtttatcatttggaaacagagttggatgatattgaggatgaccgattcaagtatgttttcctgtcattgggggctagtgtaaaaggattgaaatatattcggagggttgttgtcgttgatggtacacacctttttggtaagtatcttggttgtcttcttggttttcttgtcttcttactgcgagttgccaggatgcaaactttcagatttttccaatcgcctttgccgtagtggacagcgagacagatccatcttggatatggttcatgaataaacttcagaaataataaaagatggccctgacttgacatttgtctcagaccggaatcaatcaatattcaaatccgtcggtggtgtgttccctcaagaacaccagga

SEQ ID NO: 33019 - DNA, 4875 bp, Arabidopsis thaliana landsberg
atattatcacacacgtacaaacaaaaatccaattaggtacctaaaagctacaaatcaccttggaatgaggatttgattcgagtccgtatcaatttctttttgttttctctttttgtctttgtattattattaaattatacgtcgtcccaaaataaacaccaaaaaatcattaaactatgaaataaagtaaaatattattatatacattgctaagataatcaactaaccaaatacaataaagctaatcgtacgtttatgtcaaaaacggacgagttggaaattacccgaagctctcgccgtgaagatgtgctaatcaaactttacaagaatcctaggttccattctcccccacaaacaaacactacatgtgaagtgtataaatataatgggcttgtaacgatccgtaaggtacccattaaggcccaattacaataaatatcaatttctctaaaattatttcaaattaaaaaataagtagccaaaatacgaaaccaatccaatctcttctccgtcgtcgtaaccatgtcttcaatcgtcgagcacgtcgtcctcttcaagctcaacgaggaccacgttgactccggaaagataaactccatggtcaacggaatcaacgaactagtcaatctcgaccaagtgcttcatctctactgcggttcaatacaccgccttagctccaccaccgcctccgacttcactcacgtccttcatagccgttacagatccaaagaagatctcaacgcttacgctatacatcctgatcacgttcttgttgtcaaggaatcagaatcgattcgcgaagatatcatggccgttgattggatcgccgatcaagctccggaaaccctagcaccgcctccttgttcaatcggtaaaatcacgcttcttaaattgaaagagaatgtcatggaagaagcgaaattggagattatggaagtgatgaaggagaaatttgaaggaattgatcagattactgtcggagaaaacttttctccggggagatctaaaggtttctctattggatcgatttcgtattttagggatttgggtgaaattgaggctgtggatgatcagatgaagttgcagaatgataagattcgtgattatgttgatgataccattgttgttgagttcaatgtgccgtcttcttcataagtcttctaagtgtacctgtaaaatgctccaatttcattccttaaccgaaattttaaaccagtttggtctccggtgtaatttcgtcgattacagtcgtcgccgccgccgccgccgccgtatgtattaaataaaatctttttttattcaacacatttaaaagctcatttacgtcggtattaatcatattagaccaagaccaactcggtttcataagagttaagatgaaactagaagcacgaacactacacaccgttttcatcaaccccaactgagagataaacggcaaggctttcgcaattgaaattctcacagtggttaaaggcacttggatcgatggtgccttaggcttcattcatcatcttgctacataaccgtagaggaagacgaataggtttgatctgccgaggtaataattaaactgcaattaggtgagttcatgcttcttcttcttttaactgtttcttgatttttagtaatcttcaggaagcccttacatctaattttagttgttctatctctttccattacgatatctgttttgagtctctcaaagggcttttctttcatgtgaaaatttctaacatttcttaactggaacttaaaaggagtattttgcaatttatcagtattttgagaatcgcatccagattaggttgatacaatttatctcgttttttcactcgaaattagatggttgtttgtgggactttcaatattcagtcttggtaaattttgatgatgcagattatatataattgcgtgaagaaaagagaaatggtgggtggcaagaagaaaaccaagatatgtgacaaagtgtcacatgaggaagataggataagccagttaccggaacctttgatatctgaaatactttttcatctttctaccaaggactctgtcagaacaagcgctttgtctaccaaatggagatatctttggcaatcggttcctggattggacttagacccctacgcatcctcaaataccaatacaattgtgagttttgttgaaagtttttttgattcccacagggattcatggatacgcaaactccgtttagatttgggttatcatcatgataagtatgatctcatgtcatggattgatgctgcgactacgcgtaggattcagcatcttgatgttcattgttttcacgataataagatacccttgagcatatatacatgcacgacgttggtacacttacgactccgttgggctgtcttgactaatcccgagtttgtttccttaccttgtctgaagatcatgcattttgaaaatgttagctatcccaatgagaccacgttgcagaaacttatctcaggctctccagttctagaagagttaatactcttcagcactatgtatcctaagggaaacgttttacaattgcgctctgatacgctaaagagactcgatatcaatgagtttattgacgttgtgatttatgcacctctactccagtgtctgagggctaagatgtactcaacaaagaactttcagatcatcagttcgggtttccctgccaaactagatattgatttcgtcaatactggtgggagataccaaaaaaaaaaagtgattgaagatatcctcatcgatatttcgagggtcagggatctagttattagtagtaatacttggaaggtatacatcttaacatttgagcatatttgtttaaaaatattcctccacaaaagtttctcaccgtaacatttttttgttcacttatgttaccaggaattctttctatactcaaagtcaagaccattgcgccagtttcgttacatatcccatttgaatgctagattttatatatctgatcttgaaatgttgccaacgcttcgtgagagctgcccaaaacttgaatctctcatattggtaatgagtagctttaacccttcttgagagctcctatttacacatattgtttgagataacctcttatatgtacctctctactcaatttgttttcttttatttattcttttgttcctgtttttgcaggaaatggtcaagaaccaatccacgcgacgtcatggggagaagcgagaaccaaatgtgatggtttcaacagtgccttggtgtttggtatcgtcgctcaagtttgtggaattgaaacgttcaatcccaaggtatgaaggagaaatggagctagtaagatatttcctgacgaattcaacagtcctgaagaaattaaggctcaatgtttactacacgaagaaggcaaagtgtgccttccttacagaactcgttgcaataccaagatgctctagcacatgtgtagtccttgttctttaattacttgaaaggtattgatgaacttttcgtttaaggtcaatcttttggtcgttaaattagttgattttcggaggctttgagccacatgtaaattttgcagttaagtccttcttatgctggttgctgctcatgtaataatcatcaatcaccaagtttgtttcgaatttgatggatacttccaccaagtcgctgtcaaatattttgtatgctcccatggataattattttgtatttttgtaactgaatggtgattccttacatttcaggcttgttagctttgcaattttgttatttgtattttggtttgagttaattacgagttggattgttcttcttacctactttatggttcctctgaataatctattcgtagtcttatcaaaaccaaatccaaaaaagtacttgtgaatctatttcctttttaattattgcgttcataaatgaaaatgacaccattttcatcatagtgaggagctcaaatttcaaaacttttgatccgagacatctaagtgtaccgaaatttgaaacgggttatgtctccggtgtaatttcgacggcggatttcgtcgattacagtcgtcgccaccgtatattaatacacatttggaagctcaaataatgggcttcttgcttgaagcccattgacgtcggtactattgtatttgcaatgattttaaacgtcgtcgtaaaagtaataaatcagaacccctaaaacccttttcatctctccggacacttcttctcccgacactttcctcttcaaatcccaaacgtgctatctgactttggaagaaagagagattcagagtggagaatattatggaaggaactttagatgaagagaatctagtcttcgaaaccaccaaaggtatcaaaccaatcaagagtttcgatgacatggggatgaatgataaagttcttcgctgcgtttatgattacggatacacgaaaccatctgagattcagcagagagctttggttccgattctcaaaggaccagacgtcatagctcaggctcagtccggtactggtaaaacctctatgattgctatctccgtttgccaaatcgtcaacatattctccagaaagtacgtctctgttttcccctgagattgaaaacaaatagtaaccctttttcagatttccaatttaggtcactaaaatttatcagaattacatgattggtgatcttactttgtaattaagatgaggaacacttacttaagggctgcaatatctgtttctccacatttacttattagtattatatggtgaaggatcttgctctgtaattaagatgtggcacactgacgactgcgaatctgtgttccattaagctaatttaattggcatcactcggttagagattctgctttgtgaattggatgaggaacactcttttgatactgcagtatttgt

SEQ ID NO: 33020 - DNA, 470 bp, Arabidopsis thaliana landsberg
tgtagtgatcaagcaacaatctcttcttcttaagaccttcagcttctcccactactcaacttacgagtgggtcgggttttgtgccaaaaattgttcaaatttctgttagatgagttcaactgttcaagtaagtttttgctacaacaaaggttaaacattaaattttaccttcccaaatatatatacataattttttgtcaaccgatttattaaagagagctcaattgagtcattcttgtggaatgttgtttacataggtgatatgatgcagttcggtacgaatttttcgataaagaatccgcttttacgtttgcactgcaagaaactaataataaagaaaaagtcgagaattcttcccatcgctttgaaaatccgtcaaatatgctgaaaaagtcgaccaatcagttggggaaaacaccatattcaccaggtctgaacagtctttttgattgtcgacaccaaatatgccg

SEQ ID NO: 33021 - DNA, 918 bp, Arabidopsis thaliana landsberg
tacgggtttgggcaaaatttcaaacccgtcatgggtacgggttttttaatgggtgtaaatatttttcacgggtacgggtttgggatagcaaaacccggtgggtttgtacccgttgccatctctactcttgtccattcttcggagtgggcccacagccggtgtatccccttcggagcatcgcactcccggttacattcgggaccaaggaaaacttccgcacagagaacgtccagttcgacgtcgcggaggttaacctccccttcaatgccatcattgacaggccagccctataccggttcatggccatttcccattacgggtatttggtcctcaagatgctgtccccggctggggtacttatcgtgcggggtgaccgcgccactacggtggtggctatcgagaagctgcacgccctggtgcagaaactgctcgcccggacgatggaggaggaacccctcgacctctggtaccaaggcacctacgaaggtgtcgaaggtgcggccatccagctctacgcgattccccctagaccactcgcattgcgggtgatctagaggaaaaataggaactcgcgctcgtcgccttcctccaggcaaatgccgacgtcttcgcatgggagccgtcgcagatgcctgggatccccagggaggtgatcgagcaccatctgaagatcaaccctgatgccaaaccggtgagtcagaagcctcggagacagtccattgagcggtaggacttcatccaaaaggaggtccggaagctgctagacgccggcttcatcaaagaggttcatcacccagtgtggctggccaacccagtcatcgtccccaaggcaaatgggaagcttcggatgtgcatcgactacactagccttaataaggcttgtcccaaggacccgtatccacttccacgtatagatca

SEQ ID NO: 33022 - DNA, 3374 bp, Arabidopsis thaliana landsberg
aagaacattagacaggctttcaagtgggtccttaggtatattcagggatcattgaagagaaagccgtgttacactaataagggagatttcataattcaaggctactgtgattcaaatcatggtgcagatcatgacggtggaaggtcaacttcaggagttgtattcactataggaggtaacgtggttagttggaagtctagcttatagaaagtagtagctttgtcatcaacagaagctgagtatatggcattgacagaagcatcaaaggaagcagtttggttactaggactcatgaatgaactcggttttgaacaggaaacaattgacatttacagtgactcacagagtgccattgcattggctaagaatgcaattcatcatgacaggactaagcatatagagatcaagtaccatttcattagggaattgatctacagtggtttaataagagtgaagaagattgccacagagaccaatcctgcagatatattcacaaaggttgtaccagtgggaaaacttgaggaagctttggagtttctcagagttacagagaaataagaagagcgggttaagcctcaaaatatgaagctgagtgggtttactcaggagatatgaagctcggtgggattactcaggagataagaagttgagtgagtttactcaattggtaaaagctggttgggtttaaccaggtccggaggtggagtccagaaagctaagtcatggcattagggtcaaggtggagaattgtgaataagtgacccaaatgcatattatccttaagtataggaaagcctctattcaagaaagaaggtcttcggttttgggttagtcaaagcttaacacgtgagagcacacgtgcaaatgactccaactcagaatcagctttataatccaagtctctattttaatctgttgtagagtttgttttgtaacagaaagagagagagagagagaagagagagattctttttatcgatcaatattctttgtggcttagtggattccggagagagcctccggcgagacgtagggttccgttttggagcctgaactcgtaaaactctggtgtcttttctttctttgaaatcaaaggagagtcgtgagtgaagtgagctagattcttcttcgattcaagtcagaatcgtacaacaaccctcttctgtctcctgtccaagttaagaggagaaaagtctcacaaaaagagttgtcctccaatcagaaggaagaacaggcggcagccttaaagagagggataacattgtctgaaatatatggctttgaagacgttgaaccaatgttcattgacagtgactcacccgatttcagaggtcataacattgatctttctaaagaagacgatgttctgtttaaaggaagggtttttgaaaccaaggacgagttcaaagtggcactgtctatttatgcaatcaatcaaattttccggtttaggtttgtgagatacgccaagtgttatcttgtagcacaatgtgttgacaagaaatgcgactggcgggtgtacgcgcataagattggtgatagcgatgagtacgaggttagaaaagtgaagcttcaacatgtgtgtgatgtggaaacccgaggtcaatttaccaagcacgccacttctaagataatcgctgctttattacggtcgaagtatgtcaatgtcacaactggtcctagagcgagagatctaccctaagctgttttagacgagcataatgtgacaacttcttattggaaatgctggaaagccaaggaattggcaatatcttctgctcaagggacagaggagacttcttacttacttttgcccctatatttgcatttattgcaacatgcaaatccagggacatattaccatttagagatagaggatgatgatgtcggagatgaaaggtttaagtatgcctttgtctcactgggtgcaagtatacagggtctgaaattcattcggcgtgtagttgttgtggatgggactcatcttcaagggaaataccatgggtgcttattaactccaagtggacaagatgcaaatttccaagtatttccaatagctttcactatagtggacagcgagaatcataattcttggacgtggttcatggagaaacttagggatattgtactggatgggtttgatctaactatcatatctgaccagtcaatataccatgctaagtcactagtgtacactcaggcgcaccacgtctgttgtcttgtacacctgaggcgcaatgtgagaagcttgtagaaaggaatgtccggacttgtatggaaagctggggatgttcagagttaaggatttttagtaaggcctatgcatgtattaaacgaaggaagcctgaatgttgggagtaccttgaggtgattggtgttgaacattggacccgtgcacacttcaaaggggagcggtataacctaatgtctagcaacattgcagttaaacaatgccttactaccggctagagacagcccagttgttgctcttattaaaaattttcagaagatacttagtaggtggtttgaagcccggaggaagaaagtgtctaacactcttggattgatcccgtagaagttgagaaaatcttattgaacagctgccagactcaataggtgtaagtattcgaactgcatcggcttgggattatgaaataacagcaaaagatggaggaaaattccatgtatcattagagaaacgtacctgcacttgtcgctcatttcagctgctacaaattccttgcccacacgcaatggctgctgcccatagcagggggatggaataccgatcacttgttggatacatgcataagaatgacatatgggctccaacgtttgacggtgttatcctaccggttcaagacccatcagaggtgggagtacctgatagcgtcaggatccgctgcattcttccacctaagactaaacgtccttccgggaggccccctaaagtcaggataccatcaactggagagtttgaggtgaacattcttgctcttcatttatattatgatgtaactaattcatactcacaacaaagtatgattatttatgcatggagaaacataatactggtacaagaaagaacaaatgcggaaggtgcaatggtttaggacacaacagggttcggtgctctgttccgttgaaatgaagtgcatttgtttggggaatggtgtacaaccagagagtctttactggttgtgtgtacactcgtttttatttttttcggctttaagaaggggatgtgatttttgatactttaagagctgaagaactatagcccaatccattttttggattgacataccccttatttgatactctttagtaaatgtgtacacttgttttgctatgcagtatacacccgtgtactc

SEQ ID NO: 33023 - DNA, 2703 bp, Arabidopsis thaliana landsberg
cctctgcttaatctgttggccttaaatacgttccgttttaaacaaagacctgattagccattagatttcggccacgttatgtactggttctgtccattagatttacatactttagtcttccgctaatacgtttaaccagcagaaagctgccacgtcactctatgttgctcaccgacaaagaattaaaacgacggcgttacgtcagttttcattaataaatctaattattaatttaaataataatatatggtaaatatgtttacaaggtcccacaaattatttatttattaattagataaaaacactgttattttattgaaaaaattatgcacggattaaattagatatttgaaattaaaattaaagcatttgatgtattataaatagataaagaaaatgaggtaatataaatttgttaagcatgacaatattttggcgacttgtctaatgttaatattggattattatataaaataatatgatgattcaaatgtattaaatcataaaaatcagaactagtctctatgattaagaacctaatttagacctagatttgtattaacttgatcggaaattgaaaagattttattcagaaaaggagtggcattttacaggtaaacctcaacaaaacttgtcacattttcgtacattattataattactacgtactatttaacttccttttacagtagcggttcattgttaagccgcggttttaagctcttaagctgcagccactcttggcattccgtagctagctgggccactgctgtgagtcaaagtggtctcgagcgtgttgaacttgaccctccttgcttcttcgggtgagatttggaacccattggttatgacttcaagtggtaaacctctcaagactgaggttcgtcccgccagagtgttgatttgcgcgttagcgtttgttttgaactcaacccactggaatcggttgcttgttgcgcgtttcacctccgagaaaccttgtggtacggctatgagctgtccttgagagacttgtccgtcaaacactctgttaccattgtcgtttacgatctggatttgggcttccccgtctgtcacgtaaagaatagcgttcgcgtttgcgttccactgtggaagcaccattgcgttctacacccacacacgtttcaagagtcatgtttaaatatagaaatggacatattaacatgcatcaggcatgcatattttactaggttatagtaacataatatttatgtttacttacttgacggatagatccacggagggctgagagacggatgaagcgaagaatggggagatcgtaactgttgagagtgctgatgtaaccgagctgtggcttgtacacgtcagcacgagacgggtcatcgaggttatcggtgcacctggcgctgcagatggtctcctctaagccattaccgtgtcgtccatgtcgtccttcttcttcttcctcctcctgaggtctctggcccctcaaaggcggcctaatgacaccgaacggtccttggactcggacaatgtttccacggttgtcatcttggttctgaagttgctgtgctgtctgaagatcgatcttcaaagcttgagcaataacctcgggtccaaatccattgaaaatgttcttctgtggctgttgctctcgtccttgtagccatacttgaccttgtgggttgtttccggctaagtaaaatggcttcatgcataacacaccacgaaaaataaaccacataattattttttgttaatgtgactatataatgattcttttgagcttttggtttatatatacccttgggttgcggtcaagctggttctggtgactggctagatcgaagacgctgacgatgacaagtggctgctgtccgtcgttgtaaaaccactgtgctacaccgggtgttgtggcaatggtatcaccgctcctaatgtgctccactttctggtgcatgtcacggaacctctggctttgaccttgaccttcgaagcgtggttggaactctgatgagtcttggaatgtttcggcgcatccagggatcacttttcccataagacctcgtcctaagcatgtaacacatataaattatatacgtttaaattaaagttgaaagattatggactaatcctaaagaacatgaaccataaagtcatgaattcgaatttcgatatagaaagagtcgtacgtacccttagccacgaaagagagcttcgcggtgttaaagaaagagggcaagtagagacccttagactcgatgatgtaacgtgcaaaggagacacctgagcaacggagctgaggagcgtggtggtcccacacctcgatgcgaccagcctcgctcttcagtacgtgtgacggctcgagcgcattgagctggtcgagctggcactcgttcggaaactgctgaccctgctgaccctgttgagccgcgtagccatggaaaaggatcaaaagtgttaagcagaaagaaagaagagaagagactcgagccatttttatcttcttacttatttgtggttctcacttgatttatgtgaagctatttataaagggatttattcgggaaagtgtttagggtttttggggataaattgatcgagataagaaccaggtatacaaaatcgaccacgtacaattaacacttcacttaaattgcttatttcatgtcgtcatcggaaaatagattttggcatcatactgtaagagaataaatgatg

SEQ ID NO: 33024 - DNA, 1558 bp, Arabidopsis thaliana landsberg
agcctagtagcgatctcttcctgctcaccgggggtggacaaggcggatatgctggtatccggcaatcatcacgtgtaggcgtcgtgcatcccatctgataatcatcatcaaccgtcaccgtgtctccgtcgtcgtagtttttctcctccatttttgtccgctctctcgcactttcctaataaggttcttaattagattgcttctttattacactagttttggaagtgaccgtagcttgttctggaagttgctaggtacttgcggtctagaaacttacacgtggaggaacgtactgccacgtgctaaagcgtagttatattcaggtgggaatagttgccacacataccccactcgagtcaaatgctcgtttataatgtggcttagttaaaacgaagcccattaagctaaacaagggcccgaatttactggagctaaggccattaaccacgttaaagatttgcgaaataaataaccggttggtttttagttgaaagactaaaccggttgaaataatccacggaacaacaacatatgttggagtctggaacgcgttgatgtcttggttcccaagcagctcaaaagtgtgacataaattgttgtcctcaacaaacaccataaaaatcacaaatttcgttctgggctctttatttttttcaatcaccacattttcacttgttaaaattttgttactttgctctatctgaaaccaaagctgccatctttctccttttgggttttgattagatctccgattttgggtttctatatattatgcgagctcacttttgttcgttctgattatctgacaatgatattctccaagcttggttcttccctcgctcgatcctcacgttctaaggttcgtttcgttgtgatgctttttttccgacgcttgttaattttgtgtttaattcctatttttttcaattttccggtgaaattagggatttgtgtacggcggtggtgtgagatcggcggtatttaaccaagggaggttacgagcgccgcagaatctcgaggcggccgtcaatcaggtggatggtggattagggtttttgaggcggcactttgcttcttttgctgctcgaaagggactagaagccggtgatttaagccgctctttcgctaaccctagattgcgtcggttcttttctagtcaaaccccaaagaagaagagtatgtagcaaaccctaaatttttatacggatcaaattaggtgttcacagtaatttgagagagaattggaagcctaaattgcttttcttttgcagattatgagaactactatccaaaagacagtaagaaagcacccaagaatgagcagaaatctgaatccagaggtgacggtttatgtaacattctcgtatttttggatgacgagtccattgggacctatggagaagaaattgagtagactagctgatacatttgagagtatcgggaagcatgttatcgtcttattggattcgataatagggcacacgattgtaagattgttgtcaactatgaatatatgaaggatagggagagagagcgagaagattgtgggaacagaata

SEQ ID NO: 33025 - DNA, 703 bp, Arabidopsis thaliana landsberg
caaaaacatttcttagcgaacatatttgagatacaaaacttgaaaacaagatcaaaactcggtttggttatatagcgaccataagacagaacccggggagctagatgaaagacattgatctcaatgatatggagaaaataaacggtttgctataggagagttaaaatacaaagcttcactttcaaataggaggaaagcacgtggctgagagaagccctaagaaaagaaggctgcaataattgtaggaagaaaagaagaaagccttgcctctctgtacagtaatgcatgaccgaccaatcgtttattacttttggattttgtttttcacacatacgactctctcatactaatggtataactaagaagtcgctttggctaaaaagagaaccgatttggtgtctggagcttatcttggaagctttagtaacaacattgaccctcgaatttgtgggaaaaaaacatatgttagaaatatctcttagcttaaaagcaatattagaagttagaagacaatacggttaacggacggtaagagtttattaatgaggtaggtatgttgaccttgacagctgtggtaagtgatgtgatgcaggcctttagaaattactaacaagagagaaaagtcactaattcacatctatatacatgcacgaaggtaaagtacaaacttaggagttacgggcacagatgaaaaattatcatt

SEQ ID NO: 33026 - DNA, 315 bp, Arabidopsis thaliana landsberg
gctatagttaatcttgattgaatcttttcgttaatcaaagagatttccattattagggtttaggtttgagtggttccgatgattgatccgggaatcctctaaggagaatttcaatatgaatttcatttacttgcagattactccaccagccaccgactctatttcgagcttaagttttagtccaaaggccgatatacttgtggcaacttcatgggattgtcaggttctctcttctttcttctttactctgctttaacaatttaacatgatcggtgtaatacaccaaattataatgcactcaaatcaaatcttggc

SEQ ID NO: 33027 - DNA, 713 bp, Arabidopsis thaliana landsberg
gagctacagttacagtcgccggagaatctctgaggattctctactctgtcgtcgaagtttaaagcataactcccaggatcatactgaaacatagtttgcttcttcttcttcgtcttcttcaccgcagccttcatcctccggaacatctttttccggtactgattcaccgcctcgaatctatcctctaatctcatttttactcagaaaattcagtttctggaattaagcgtaaaagggtcttttgaaaatggatgaaagttttgatctttttggagcagaagaaagagaggaggaggaatgaaggaaaaagttagcagctttttaaaaatgggagttgaattcgtgtgaggaatttacatagggggtcacgagaaagagatataacagaggaagaggaagaagaagaaactttgggcagagtgcctaaaacatcattttcggatactctgtttctttttttattttattgttcaactgtttggtctttgtctcctactatcttaacgaatcaatattcctttttttctttcttacaattaacattcttttttttatatacttcaaaaatataaataaattcaaaaacctttagagattttgaaatgaatttatctaagaaaatcaaaattttgtcaaataaaatcggaaatacaaaaatttagttggttgttgagattttgtttttgtttttactgtttctaggaataataatg

SEQ ID NO: 33028 - DNA, 843 bp, Arabidopsis thaliana landsberg
  unsure (1)..(843): unsure at all n locations
taaacggcccatggaagatcctttgatagatcaccatagatataagcccaattttagcaaacatatattgatatcggtttgtgatatgataatggacacacttatttgctgataaggtgcatatggatactggaagatgtagaaactgagaactattttgctaaagacacttgactgcacatagaaggggaatcttccaacagccagatgccaacgcaatgccacagaggcgaatgagaacaaacgcactcgattgaaacaacaaagaaacacaggaacacaaaatgcgcttcccaatccgaatgataataagaatcaaaaggagatctctaggtttattcttgaaacactggaaccactctcttcaaactctttactggttccgagtcttttctcttctcttcaatcatcttgtgcaagaggaacagcctgagcctacaagacgcaaagaaacagtagaaaaacgacattagaaacagacaaaagtttcagtctttcaatgcaaaaagagtttaagaatgcataccaatgggcgatacttcaatgcatagaacatttcaaggtaacgacgggcctcaagacggtcaagattcgagacatgcttccagaatccatacacaccagtcaatgtcaagagcctctgtgaatagatttgccaagtgtatctgcaaaacatacacaagataagtcagcacctagtatactagtgaaagaaccaagccatgatgagtttattttttttcttacttctcctcaatcctctggagcccctcctttgagatctcatcccagtgagatggatcctccttacactnggtgaagacatcagcaagagtatcagca

SEQ ID NO: 33029 - DNA, 945 bp, Arabidopsis thaliana landsberg
  unsure (1)..(945): unsure at all n locations
gtttagtatgaactgaaccgcaactttcttttagccaaagaaatgtttcctagggaaagggtgcaaagccaaagacttatagggagttcggctacaccatcaaatccttgagaaggaagaagaagcttcgtcactgttttggattcaaatctgactagaggtcatgtgtatgattaagtataagaacttgaactccaattggtctcaaaaggtaaaatagtgtttccttggtagaagatacaaagacgaagattcacgcggactttggcaacaccatcaaagctttgagaagcaagaagaagctcggttagcatttcggagtcaaacatgactaaatgtaatgtgtctccttgagtataagaactagagccgcatccggatcataaaagtctaagacgtggtgccttattagaagatagaaagccaaagactcatacggactttggctacaccataaaagctttgagaagcaataagaagcttggttagtgttttggagtcaaatatgactatgagtcatttgtatgattaagtataagaacatgtaccgcaatcggttcccaaaagttaaagtagagtttcattggtacaagatacatacccaaagactcatacagactttggctacaccatcaaagctttgtaccttctaatcgagaatatatcagtattactgatattggacgctcgtaaacgccaagaacaactctctttggcacactttaggacatagcgctccttatccgacttcttaatcacataaccaaaactgttagcaaatgcagctctatccaccacctcgtgcaattgcgccttgtttggaaattcttgacgtaaggtcaacccaattctgtcttcccactctttttttaaacatacccggntctacagcaggtggcaactcaacatactgttcccccctatcagaattattcatagactcat

SEQ ID NO: 33030 - DNA, 967 bp, Arabidopsis thaliana landsberg
ccagatccatctttttcatttgtgaaagccattgaagtgttcaatcactttctgtaagacttagcctgaaaaaatcagacaagagatgtttcagtaacaagcattgagcttatacgttgaggagtacatgtcgcattcaattttaaaaaaaaaaaaaaaaatgatgaagacaatgacacaccagccactaacttcttggaaattttgaaggagtcaacacatgactactgcattaggcagagaagatttgtgtttcgcgcgttattacaaaggcaatattaattaagtcgcatgaagggttctctttgacaagcaagtttgtaaaagagccaaataatgctttcttatgacacaatggtggtaccatttgcagcttgaactcaattcagataagaaacttcagatggttcaaaaggcaatcaaaagccaaagtaacaatgtgcagattctttaatactatacaatatttagggtaagcaaagactatcatgaacccttaagacagagagagatagttaacttgtgtgtgcagtcttgtgccttaacagccttcaaactcacaggagtgtagtcaaaagtattctaaaccccaaacctttctccaatttgctgaactcttaaaaagtctttcttcttcctgagtaatctagacctttgtgagagagactgagtgatgtaactgaaacctgagagatctcaattgccatctgggtttctgctggacccgccatttttggagcttcctttacctttcccaccgccttttgtcttgctagaaggtttagagttagctggtttgctgctagcagcttgtgaatccacatcagcaagaccattctccaaagctttcaccagattttcaaagaaggttttggttactgtagtcaaaccagttaatttcatccggaaagcattgaaagtatcggatggatcttcacttttaatgaaaaattgtttcaactcattc

SEQ ID NO: 33031 - DNA, 980 bp, Arabidopsis thaliana landsberg
  unsure (1)..(980): unsure at all n locations
actcgagatgatattgaaccacttctatacatatctctccgtgataacattttataaaactttaggaatgatagctagaaactttgagttctaaagaagaagagacagatttatcataacttgttaatatgataatatcagtaactattggattactaattcagctccaggcttagcaatttcttgctttacttaaaaaataacacggaattcgaattcgaacaaacgattctccatggatatgttgtaatcaatttcataagtgttggggcttcttgacgtgatgataattttcttcgatgactagatctttgtcaactgaaacattattaatcaataaagtaatcagagatgtggcatcaaggtgccccaacacttcgttaaacatatctaaagtgtttgttgggattcacttacttgccggcttaagttcaatatcttatccttaatcgctaaaaatcatttcccgaatcactagaactttgatgatcgacgatttaactaataaagccagcaaaataattatttactctatcatagcttattaattattgtaattgaacaatgttgagtgctatcaacgtatgtgaaagaaggaaaggtatatattcaaatgtggattctcaagtgtaattatcaggtaacgtgcttatggaagtgtttatgttatgtaattatgattaacacattcccatcttattctttattattatttttatttctaccacattttcaacccaacttcttgataattcgtatccaaatccaatacccactaactccatctttttcctttacattctaaatcaaaataaactaatgactccttataattatacctttttaaaaaatcatagttttatctaaatttcgctatattttacaaatattttcttcggattgtgcaagcgaagtcttcaacaccaaangattataattttcataactctcacacgttagggggatatggatatacattt

SEQ ID NO: 33032 - DNA, 3011 bp, Arabidopsis thaliana landsberg
gggtgtccatgtaacgttgctcaatgacagtgtaggcagggagcttaccttgctttgcatgatccttaaaagagttcccatagctatggaacttaaaaacgtatttgagtttccttaggctttgataaaacaatactgccggaatattctggtagtatataccgaaagagaattcttcgtcgtcaagattgtcgaaaatggttctttgaggataaccctttgcaagggagatagggttgttgctggtggctcccgctgacgtccctgagtgtacaaacattctgtttggctgtgtcgatgatggaaccgatgcaaaccatctgttttttatgtataaaaaatatcagatttatttcattttaatatcaaattagtgtactaatgaatttaatatgtactaacggtagttcgcccccccaataaaaaaaatacatgaaccaacgttcgttcttcaaaaaaaaaacatgagcgaacggtcaaactccagtacacactaccacaaagagagcgccagtaagactatattattagtacttaacaaaaaccaaaaaaaaattatatacgtaataataataatacttccataaaccatttaacaaaataatagatatcgataaatcttccatatagagaggaaaaaatataagatattaaaaaatggagaaatatcgacgggaaaaaaagtgtaaaggagaatataactgaagtggaacatatttaaatcaatagttttatatttaaatcaatagttttagtaatatattttaacgaaaaatattacgtaacatactaatttagtgttgttgtaagatgagcatttgcacccaaaaaaaaaaaaaaaactgagccaacaagacgacaaaggaaacgacaacaagattatatgacgtaatactaattccaaaaagacagtgaaagtatattattattacctatcgaaaacagcgaactcggagacaagagacttgtagacaggaaccttatcaggttcaaatccattcataacacttgccgacatgttaccactagggtcctcggaatatgcttgttgaacaaacccgttcatcggtggaggatccattgatgtatcatttgacccgaatacttgctctcttatcgcttgaaacgaatgaccagggtccggatctacgtaatgcgaacctgacccgaattttatttttctagaggaagggtccgacaccgagaccgggtttgactccgacccgtccacaccgttgatctccgggtttagtttcttcatccatccaagcatgtgatcgaaagatctattttccatcaccacaactacgatggttttgatcggacttgttgcatgaacatggttgtataaaatcgtgacggatagtagttgaatcaaagcaaatgctttaatagacattttgttttgggggaatggtagattttgatggtggagatgataaatgagtggataactttataggcttctttttctattatttgtttttttctgtatatgtttgtatttttctaggtgtgcatgttcttttttttttggtcaaaggtgtgcatgttctaaatctctctccaagcatgtgtatatattataaaaaaagattgacacaagtaaatggaaacgaattttaaacaattttttattccccaaagaaacaattcaaaaggaacaaaattaaaaagacaatctcacattttttatgtattagctaaaagaaaattctaaagcagatggtgtaaattaggcctccatatattcaaaaattcataaatattgattaccaaatacatagatagcatataataacgataagtaattacaagccctttaacaaacaaataatatactactgataaattgacaagtgaaaattgtattaataaatgactgtggtaaaaaagatgtcaaacatatctttgggttatatatgaaggtaaaaaagattagcacaaatacatggaaatgtcttttaaactttttcttactactgaaagcaaagcacttagcttcaatattaatcacaacaaagaaagatatattaaactcttaacaagcaaattaaaacttatctagaaatttactgaaaagcaacgaagaaaataaatattttaaaaataacaaaaggagtaaattccttttccatctaaaaatgtttacataaatcaaaagggtattggcttggttgattcatagccactattggattcttattcatgttttgatgttgtaatggttgagaggtagatccaaccgaaccctggaaagtcatcacttcggggaaactgacatcatctcgaaattagggttcccattgctactacttccttggtatggattgtagcctctacggtttgaagtttcatacccaatttgctggtatgttacaggtttaggcggttcaggtgttggaaaccattgatctattaagtaataacttttattctcccttaaactatcaatgttaattattcttgttgcttcatttgtgttcctagctctctcaacgtctagatcaccccctaaaaaagcgtccttagtggtgctcttaaactgttcgacttgcacctcgaatggaagcaccggtggatcacgaagaggagaatgctgcatgaaatcaaacttcttcctaaaagacatgatagtttcccttgagtaagatagtaatgtatagatctcacttaagttaagatcatggattctacgaccgcgttgtagttgcatcatcaactcattactgacatactctttattcttcttacaactctttatcaacttttcattaaccttatttgtcttctcatttagaaataattcaatatccatctctttcttaatatgctcatacctcggtaaagcaaagaaatcatctagaaggccacgagcctctcaactgatggccagaccattagctcagcttcattaggactgaaaacgattgtacaagcctttatatcacacaatatggatagctccctcacttttttaactaaccctaccctccttttccttaaactta

SEQ ID NO: 33033 - DNA, 2313 bp, Arabidopsis thaliana landsberg
aactctgtctgaccacgaggattgtatgaagccgtattaccttgagtattcccctgacccggaatcttgtaacccggtggataaccatgaacctgaaaacaagtctgaagagtgtgtcccaacttcccacaatgagtacacaatggtcgattactcttaggtcgatatgcattataagcagcaacaaattctggctgttcaccctgatatgaattaccatcataagattcagaagtctgaaaagcaacattgtctgtcttgatcatcggtttaacaacacgttgacgcatcttgtgccacaatgttatatgcttcttcaatactaggaataggcttcaacatcagaatgtgttttcgagtctgctcataagcttcatttagtcccattaaaaacttagtaacccgacttctttgttgtaatctttcccaaagtactgcagcattacactcacatttaccacaagtacacacaggtaactcaatgtaattcttgtactcttcccacagagttatcaattcagtatagtaagcactaacatccaacgatccttgttggatactactcaatctttgttcgatttcaaacactcgtggtgcatcatcttgcttagatctactcatcaaattattccagattccttcagcagtagacatgaacaatagactctgacctatctttttactcactgaataaataaaccaagttgcaaccatatcgttacaccttgaccaagatccagaatcacgatgattgggaggaggtttagagattgtaccatcgacgaatcccaatttgttacgcacattcaacgccatcctcaccgatcgtctccaagaatggaaatctgccccagaggttaatcgttctgtaaccagttgtaaacagccatgatcagtactatggaggaggaacggattatcgtaatgatccataaccgattgtctattgacatcgttgtggtgattgaagttattcgatgttgcatcaagaaaagatgaacgaagtggtgttgaacccatagttgatttgagctcaaacgatgatagaaattgctccggattgaagatataaagagaatcaaagcaataaggtaaaaaaaaacgaagaagaaactcagatttctctcacgaacatgaattaaaaaatcgcgagaaagatgatacaacatgaatccaaaagaaaacaaagaagatgaatgagaacgacttcaatcgaagaacaactcatgatcggagatgctctgataccatatcaggattcttcaatctctgtaacaaactctagagagagagtgaaagaagaggaagaagataacagaaacaaagaatcgtttattctcattaatttggtaaagtgtacaatgtcatgtatttatactctaatacatattttatactatagagtaaaatactcgttatacacccccgcaaacctttgaatccaaaacagtaggattgaaaaggtttgacaaagacattcgagtaagtaaagaataaaagattcgagtatgcagcggtttggtgagaatatctgccagttggttctcacttgtaacatgtagcagcttcaagtttccaagcttgatttggtctctcgttgtgtgacagtcgatttctatgtgtttggttctttcatggaacacagggtttgtagcaatatagatagcagacttgttatcacaaaagactttggcagttgcagtcacagtcactctgaaatctttcaatagttgttgtatccatagaatctcacgagtaacatcagctagacttcggtactctgcctctgtactacttctccttgccacttgctgcttcttagacttccaggaaatcaacgaagtgcctaagtaaacacaaatcccagagactgatcttctactatcaggacatgtaccccaatcagcatcagcaaaagcattaatgcacaaatcagtcgttgcagaatagaaaagtccctgtcctggactacctttcagatacttaagaatcctatgtgcagcttgtaaatgaacatctgttggagcttgaataaactgacttaacttgtgaaccgcataagcaatgtcgggtctagttatcgtcaaatataacaacctgccaataagctctctaaatggcgtagcagataccaatggaactcctgtgtctttactcaaggtgacatagggatccataggtactacactaggtttacacgcaagaagaccagcatcttctaataagtccaacgtgtattttctctggcaaacagatattccttttgaagttctagctatctccaagcctaaaaagaacctcagctgacctaga

SEQ ID NO: 33034 - DNA, 1149 bp, Arabidopsis thaliana landsberg
tcggacggagacagagtttgcgctgtctgctctcatggagatccctccacagtactaagcaacgatagagcttaaccttttagggtaagggacccaaatcaaaactctgataggtgtagctgcgagaaactgctatattgttaaacaaaatgctcacctttctctttcccttacatttttgcagggtaagaaatggaaatatcccacagagaatcccacttccgccaccggtgcagagtggatcatcattctctagttcccggataccgaattttgaaccgagtgtacctccttatccatttgagagcaagcaaatgagtagtgcagacgatattcaggtaattagtagaaacttaggaatctgtttgaaatgttaagtgaaataagagctttggaactttttgttgttaaactcgtttgtgttattttccccttgaacagctatgtccgatatgtctgagcaacccgaaaaacatggcgtttggttgtggccatcaggtaaaatcgaaacaaacacaatttccatcttctgcatctacttaatcgatcaaaacatcaaactaacttggcttctgtttttgatacaagacttgttgcgagtgtggaccagatcttcaaatgtgtccgatttgccgtgcaccaatccagacaagaataaagctctactaacaaacaagtagaccagacatcgacgacccttctctctctttcatcttctttcaacttcttttgggaatttagtttgaatctaatcactgaaatttctccgagaaagatcggatctttgtacaaagaaaaaaacaatgcttgttcgtttactcactttcctaacttcatcttgtcccaaaacctttgacttctttctttctttctatctttcttctttgcttggagtaaaaaaattgttattcatgtgcccatgtctttttttttccttctttctttgttcaaataaattttgattcttataatttggttatttgaaaattgagaaaatcataagaaatacatctactttttctttcatataaagagcctccgtattagctatactatacaaatcacatgctgtccgaaaaagtggtaaatatatacctcacaatggtacaaatcatctaacctcgtaccttaggtcagtaccaaaaatat

SEQ ID NO: 33035 - DNA, 587 bp, Arabidopsis thaliana landsberg
caagaagaagaagcgatttcaccgtctcacacctcaccagatccaacggcttgaattttttgtaaaccctttttctctcagtgctttctctgtttttgttgttttctgttctctgctgattttgctttttgtttgtagaactttcaatgagtgtcaacatccagatgacaaacagaggaaccaacttagtatagagttgggtttagctccaagacagatcaagttctggtttcaaaacagaagaactcaaaagaaggtttttgttttgttttaaagtttctctctttcttgttctgtcttcatagaagtctcttaattttgcttctctgtttgttttgttgcaagcacaacacgaaagagctgataattgtgcattgaaagaagagaatgataagattcgacgcgaaaacattgctattagagaagctattaaacacgccatttgccccagctgtggtgattctcctgttaatgaagactcttactttgatgagcagaagctttgcatcgaaaatgcacagctcagagatgaggtctattgtttctgagtccttattagtgcattgtgattctctttactggtagaa

SEQ ID NO: 33036 - DNA, 4028 bp, Arabidopsis thaliana landsberg
atttagtaattcacgtttgttttattagtttaattgcactcggctcaatcttttttttactaaaaaagattgagccgaggttatctgttgtatatactattttttttgatagatacatacttaaatttagatagaaaaaaaactcttcaataaaaaaaagaagattaaacacaactacaattttgttattgtagtgttgtgtccacaagaaatcctatacgaaacatggattcttaattcttaggagtgttatattctttcgtgtcagggcttgaaccaagtatccccgcttcttctaccccatcctgcatgttgtccttttcttttcattccgtattggaataaaaaaagtttttttttatattagtatacgagattttactaaaaaagttcttaatattcttatattcataagcgaagaacaaatatttcttttttttttatgagaattttacacaatataagaaaatccttcttttcatttagaattaaaattgattcatttcaattactttacttaataatcttagcaattgcatcgatatgttttgcttactctgaatagaaaatgaactattcaaaaaaattttgcatttttcaattttttcattgaatgactattcatctattgttattgtattttcatttaaatagaggccagaagctctatggaaaaatcgtggttcaattttatgttttctaagggagaattggaatacagaggtgagctaagtaaagcaatggatagttttgctcctggtgaaaagactactataacacgcatcagcctcaatgatcagatgaaaatcaatgctgaggttggaatccgctatgtgaagttgtaccaagatgttgccataatgctagtgtcatcttgatcagcaaccctgtgaactatactgtccccattgccgctgaggttttcaagaaagctggaacttatgatcctaagaagctccttggagttactacactcgatgttgctcgtgccaacacatttgtggtcataatgcctaatgattcctcactccatttggttttgttgagttttaaacactaagaatttatctttttaaattcttgtgcaggcagaagttcttggccttgatccaagagaagtcgatgtgccagtagttgggggacacgccggagtcacaatcttgccactactgtcacaggtatcatatgaataggacgaaaggttcatttccattacattagcttctctgctaactgattgtttttgcataatcctttttcctcaggttaaacctcctagcagcttcacacctcaagaaattgagtacctgacaaaccggattcaaaatggtggaactgaagttgtggaggcaaaagctggagctggttctgcaacactttcaatggtaaaaccaaaccaaatcactttaatacatcatcattacacctgtttatttctctggaacagtgtactgaatccatgtgaaatgtactactactataggcatatgctgcagccaagtttgcagatgcttgccttcgcgggttaagaggagatgcgaatgtcgtagaatgctcttttgttgcttcacaggtgaatcttgaaaactctttcactctctttcattgtttcaacggttttaacttgaaatggcaattgaccacaggtgacagaattagctttctttgcaacaaaagtgcgccttggccgtacaggagcagaggaagtgtatcagcttggacccttaaacgaatacgaaaggtcagaaaaaacataactcatctctttcaaaatacttatctcagagagatagaaagagagttctcaagcttaatttccttattcttatgtaggattggtctggagaaagcaaaagatgaattagccggaagtattcagaaaggtgttgaattcatcagaaaatgaaactgagagataatcagagagatacaataagttatttcctcaactctatgatcatgtactcatcatcacatcatgcctatgtctcctctgcttctgatacaactttgtataaatccttatcagtttgtgtacgatatatgtgaccttttcaacgtacttctctattgttttcgattatccaaaaccaatctttaggacccaaaacagagttcatcttcacaaattaaaaaacgaaaaataaatttggcttcgcccgggttcgaaccggagaccttcagtgtgttagactgacgtgataaccaactacaccacgaaacctacatgcttctttccaacctcaacaatatatatatacatatagataactgtttaatattgtaacttgtaaccagtgtcggctaatttcgacttttgtagatctttttctgctctttctctctctctctctctctctctctctctctctctcttgtattatttctatctcccccgccgtcgaaagagaaacgtcgatcggagaacctttgaaatgtcgactggattagatatgtctctcgacgacatgatcgccaagaaccgtaagtctcgtggtggagccggccccgctcgtggaaccggatccggatccggaccgggtccgactcgccgcaacaaccctaatcggaaatcaacccgatctgctccataccaatcagccaaggtccaaatccgttctacatctgttctttcttcttcttcttcttctctctagtttcgccggatctttcttctcagatctgccgattcataatggaaaatagactctgcgttgacgttttctttaaaaaagcttttggtgttgatcaatctctcaatacgtggaaaatatcaaacaacggattcatttggttgtataggcgccggagtccacctggggtcacgacatgttctccgatagatctgaagatcaccgatcgggacgttcctccgccggaatcgaaactggaaccaagctctacatttccaatttggattacggtgtcatgaacgaagacatcaaggtgcctaaattgttctttaccctaattctttgttaatctgcatagttagggttcctggaatctagcatcgtcttacctgaatagataccaaatataatggattcgatcctgcgaagtagttaatatgaatatgtttgttaatatgcaggaactgtttgctgaagttggagaacttaaacgctacacagttcattttgatagaagtggaagatcaaaggtacttgtgaattgtgatgatagttttgtatgtctccttcctcttattgagtcttgatgactgaagtattgtaaactactttattaccattagggaactgctgaagtagtgtattctcggcgtggcgatgcactcgcagctgtgaagaagtataatgatgttcagctggatggaaaacccatgaagatagagattgtgggcactaatcttcaaactgctgcagccccgtctggtagacctgcgaatggaaactccaatggtgctccatggaggtgagattaagcactgctcattactatgtgttatatgtaaaagcttcttccatcttgtgaggtgtattgaaagtgtgtttgtcttactgggttagcagaggaggacaagggagaggaggtcaacaacgaggtggtggacgaggaggcggtggccgaggtggtggtggtcgtggtaggcgtcctggtaagggccctgcagagaagatttctgcggaagatcttgatgcggatcttgataagtaccattctggagatatggagacaaactaaggaacgtgactgatcttctcaaaccggtaggggttttaggaggaagagaatcgagaaaatgtttgcagaggctttaccacttagcgcctttttggctgtgttgttcatttgtttcattagaatgactttacagaattgagaatatgtgttatttaaagttgttgtctatcttaataccctcaagtgaaaggcagaggaaggaataccaatttcgtttacagatcatatgcaggcaaaagagttttcagaaatcaggtttagttacttgtattgtgtctcttatccaagccatgccttgtggtattatgagcgcagaattttga

SEQ ID NO: 33037 - DNA, 2043 bp, Arabidopsis thaliana landsberg
aacataacataatgccatagatcatcctcaataacataaatcacatcatatgattaccatgtagaaagtaatgctctaagcctatcaatctcgacttctttggcgagtaacctttctgtaagggtatgaatttcgccttgcataagacgaacaatttcccggacggactccaaagcatgattacatgctagttgtccatgtcttagtgcggaacaatgtgagtgatttaccttctcaagctcctcagttaccgcctgatcccaccactgaataaggtggtttcgggactcgtactcttcatcctgcgaaagagagaagacttcataaatataggcacttgtactttgttgttccaatgaaatgaaacacaataacttattttaagcattgagcatttgtacactctgtcgccttgcctgtaaccagttttgcacacttcaagttttgcaggcttaccacaaaaacatttgactggaacaccccaatttgcatcggcattcgcctctccactattccaactagctttggatgtggatggttgagagtaactatagggcatctacagaatagagaaagatagacatatgttacaccgaaattacgacgtctagaaactccagatctactttgaaattacggcggctagaaaccctagatctactttgaaattacgacggaaggaaaccctagatctactttgaagttacggtggcgagaaaccctatagaaaccctatatcataccttgttagttgttgtcatcggcggcggctgggaaccctaatttcagttgttgtcgtcggcgatgttgagaaagagagaagaacgagagagagagagagaaaggaagaaagtgagagaagagtgaaatagaagagagagagagaaagagagatgagatcccgaataaatagggagaaactatgtagtgtgaacgcaataatcgtagtgtgaacgcaataatcgtagtgtgaacgcaagtcatggggtctatttttaaaaaatattatttattagaatattcagaatatacatagttgtatgtatatgtacagttggccggactcacaaacagttgaactattctaaattttgtgtttttgaagctgaatatgaaaaaccaactcatttttttagttggtcccataaattttaacatattaatggattttaataagttttgatagaatcatatttagtaaatatctgttttcatacataacgtatgtacattggacaatcatgaactatatgttccttgttatacataggtgatttattaggaaaccagtttatgatcaagtttagtaataacaatgttgtaatatcatattttggatttattcaatgtttagatgttgataatagctgaaaatattgagaattattttatcattttgttaaccctaaaatacagatacatatatcagttgtctcagttgaacttaaaagaatacattaaacttgcaaagaattcaataaacttgcaaagaattcaataaacttgcacatattcaatacaaatacgaaaacataaaacagttgtcgaaatttaaaatagtacatcacacttacaaataatataatacaaatacaaatgaacacagttgtattggttgaatcctttctgcagttggccaggttgttccggttgaaccctttctgcatcagacttaatcttcctcaggctgcagccaagcttccaagtttattccaggttgcgattttctcctctttcgcgcttcaccagctgatggaaaccgcttctcttgatttcgtcctggtccttttggtgtgtattccggcggaaaggcaactaactctttaatatgggcaggaagaacccaaaccgactcatgtgggactacatacaacgtccggtaataggccaatgaccaactatctatcaagtaatacacagagcagagtccgtagatggttgtattcgcatttctcccttccttgcgggcgaggtgccttgctgcggccatagcatggacacacgggatcttgtctatatcaaaacatttgcatgaacaacttt

SEQ ID NO: 33038 - DNA, 423 bp, Arabidopsis thaliana landsberg
  unsure (1)..(423): unsure at all n locations
tgtagggaatgaaacattggagaggcttgccacattcggtttgatggcgaatttcatggtgtatatggtaagagagtatcatatggaccaagttcaagctgtcactcttatcaacacttggtctgctctcaccaactttgctcctatcatcggagctttcatctccgactcctacaccggaaaatttaataccattgtcttcggttccatcgctgagttgttggtaatctttttttacttgtaacaattttctgatattttaattgatgcgagttttcatgtgaattatgcatatgatctcaattgtttgttaacctttttaacgcttgcatttgcttttacatttctttttttattattgcaaatgaaaccaaagcatttaaaaaagagcttttgtttttttgcacatantctctttgcaac

SEQ ID NO: 33039 - DNA, 2279 bp, Arabidopsis thaliana landsberg
gaagttaacaaatttatgaaactatagtttgtttgggtttgttcgattttatttatttttgggagatgtgttctctgttattaaaatatctagggttttcgtttcgcaatgtcctcgcaactacctcgcaattttgggagggatatatttgcaggttgaaatgaaaccaataattggtgttgattctaatgaatatgaccacttgctttcacaaaagaatccttaagacaaggatttgttacatgtttttgatcttctgattaaagggtataaaataagcaagaaggattagagtcagggatggattgaagtggaacaagtacacgaaggtcgaattgatcatgtaatgaaacctgcaattgaaacacttgtgtatcaccagcagaaaaaggaaatcaatgtcctttggtgagaaaataggactggtctatgaaaattgtgaagtacttaggtacaaagttggaaggatggaggactatttagggatcgaaagagtttctgctagttctactagagaagaagaaaaggaagaggaagaagaaaattttgtgagggatagatttttcgcaaattttgcgacgttctcctatctgctcgcaatgtcctcgcaattttgtagcaaatttgcaagggaccttttccatcgcaaatgttcctcgcaaatcgcttgttttcttgtagtaaaaaggtttctaaaagaattttaatgcgttgaaaaagttactgtaatgcttacaatttaactgttagtaattgggcctatacctcttatttttgcaaaagcaaaccgttttagtataaattcactaaagcccaaaattcacaaaaaaccaaaaaaaaaaaaaaaaggaaaggaaactgtggaagtaacaaaaagtaaaaaataaaaattagagaaacagtcttctctctcattgtgtcttctttcttagaacaatttgaaggatttccgtttctccagcaaaggaatcaattgaaggtaacaaatttatgatactaaattttaatatttgggtttgttcaattttatttctttttgtcgaatctcttctttgttataacaatatttagggttttcggttcataagtacctcgcaattttgtgagcgatatatttgcaggtttaagtgaaaccaatagttggtgttaattctcatgaatatgaccacttggtttcacaaaacaatcctaaagaaaaggatctgttacatatttttgatcttgtgatcaaagggtatataataagcaagaagaattagagacagggatggattgaagtggaacaagtacatgaaggtagaattgactatgtaatgaaacttgcaattgaaacacttgtgtattgcagcagaaaaaggaaatcaatgtcctttggtgagaaaagaggacttgtctatgaaaattgtgaagttcttaggtaccaagttacaaggatggaagactagttagggatcgaaagagtttctgtcagttctactagagaagaagaaaaagaagaggaagaagaaaatttcgcgagggatatattcctcgcaaattttgccacgaattagcgatgttctcctatctgctcgcaaagtcctcgcaagtagctcgcaattttgcgtgggatatctttgcagtttgaagtgaaaccaatagttggtgttaattcccatgaatatgacaacttggtttcacaaatgaatcctaaagacaaggaattgttacatgtttttgatcttgtgatcaagggtataaaatgagcaagaaggattagagtcagggatggattgaagtggaacaagtacatgaaagtagaattgatcatgtaatcactacaaaaaaagtcttcattgatagcatatctttatagcacggattactcaattgctattgaagatgtcatgtaattttcgttattatagtacagcagttgataaacgctaagatatagttttaatattgggaaaaatatcgaaaaaattgtgaactttcaaatttgggacgaaaaaaacatgaactttcaaaatgccataaaaatcctaaactttactttgatattttgaaaaatgaccaacttttgttgactaggccgtatcgggcatgacgttaatttttcgttaacggaacaataacagaattaactttccgttaacagtcttcgttaaaccaaacgacgtcgttttgaagtcactaaaaaaagaaaaaaaaaaactgagcactttaggaatcgaacccgtgaccagatgatgattttaagagacttgcaaccattgagctacaacatgaattacatt

SEQ ID NO: 33040 - DNA, 922 bp, Arabidopsis thaliana landsberg
  unsure (1)..(922): unsure at all n locations
tagcggcttatgtgttgcagaagaagcaagaatacgcagaaaagcccaaaggcttgtcggaaaatctgttgaggacatttgttaaggggtataggagtgtctgcgacgccaaggatcccattaacacactcaaagacttgtcgcagatcaagtatgtttcttgctttctttcgctcctcttttctcctatggaatttgggttttctactcttcttattgggatatgggttattgggtcattggtttcttgtttgaggtgcccttttttcgcaatggtggaaaaagatgtgacctttttgtgtttctggttcgaaattcttcagtattgatcgagttgggtaatgatttagtgactanaattatttgtttatttgtcttttttatcgagtttacatacattggtggttcttgttaattttggtttcagcaatgcgtttgtgtttgttttatctgacatttgaagtcaagaagattgagactgttcttgaaaattggaggatatgttttaggttcagcaatgtttctctgtttcttttcttagttttagtttttgggtggctttgcttgcatccgcctaagtgtttggttcttgattttggctggatttgttgcataggggatttggcaagtatatggttaagctcatgcaaggatattttgttactggtgctgcaagttctgagcaagacgctttacctggaaatcgtgctggtaatgttgtcatctaatatctcacattgttctcttgaaatatcaatgtaatgtttatattctctgttcagggaaaaaggccaagggaacagaaccgtacaggccacaaagaaattctgcgccttatgcgttactaataacattgcacaggtttattcttctcgcaatgtacttattttcttttctctaagtaaacccttcttgaggaccg

SEQ ID NO: 33041 - DNA, 4255 bp, Arabidopsis thaliana landsberg
atatcagttgggtggtcatctcttcttttaaccgctgagcaccttccaagttccctgactcacaaagaccatctattagagtattataggtcacaatactgggatggatatccccagctctcaagtcatcaaacaagagagaagcctctacaaacttccccatcttgatgtatccatgcatcagagtgttataagacacaacatctggagcagccatactagataacagctctctggcatcatctattcttccaaaatcgcagagagcacgtatataaatattatacgtggatgtggttggataaatacccgcattgagcatttcgtctgtaactccccaagcatcatcaaacaagccttgtttgcaatacccttcaatcaacgggttaaacgagtaaggtgtaacagcgaaccccgatctccgcatatctccatgaaaccgtctagcttcctccattttaccattcttggaaaatccattgatcagtatattgtaagtcagctcactaaattcaatatttcttctcttcatctctaaccaaatcttgtcaactcgctccaaatcaccagccttgaaacaagaatctaacatagtattaaatgtaataaccgtaggcataataccatgctcaatcatcgtctcataaaccgctgaagccttattcatcatccttgaatccctaagaaccttcaaaactatgttacaatttctaacactaggtaaaaaccctttcctaatcatcttctcaaaactcaacaaacacttctccgccatagatttcttagtgtaaacccacaacaacagatctaaaagcttgagagcaatcaacttatcaaagctcccatcaatcaaaagatcatcaatttcgtgcataccaagatcaatactcctctcagcaaccaaataagcttcactcatcaaatcattctcagctaaaatctccaacatcgcagcaaaagcttgccttgactgcttcacatcgctctgtctctgtatccaattgaaaaaccgaaacgcgatttcgggtttgacccgaatcatattgaggactctaataagcaaatttggatcagttaaagaagacgaaactgatgagaagaccacttccgattaggtttattactatctccgtgagagctcaaaatgagattagcgtaataagactcgagattggaagatgaagaagaagacgatgcagcgcaatgaggaagagtagagaatcgaaagaggaagcgtgagaggttattgttgttgttggtagtagaaatagagaagaaagatctcgaagctctgagacagagacggagacataggatcattgaggaaacagagaggaacacataggaaccaaagctttgaattgatcaagacttcaagagtatcgatttcaatggatccgagagaagaaggaggagcggccattaattctccacgaagccttgtggtgccatctctccctcccgtgcgtcggcgatcaaacatctcccggagcttaaacaaaataagggtttatctcaatgttctcttaaccggaccggttcaaccgtgattcaatctcgtaaaatccacggttaaaaccgttaaattcggttctttgctcaactttcctttctgaagtcaaaatttccgaccggttaaagcacgacccagaaatgcaaccggtttaccatttcgatttagttttggaaaaacattctcatgtgatacttacctacttgtcatttatcaagtaaagtcttacaaggttgctacattcacatgatcatgtctaaagaatgttatgacgaaaacaaaatctaagtaccatatctataaagttaagaaacgtgtacaacacattgaacattagatgaatgttactacaagacgcaagccactgaaacaaaccgaaaaaaaaactcaattgcaaaatccaaactaactgtcaagagtaacattctgcatttcaactactagctcagcttcacatcttttatccaattcagtttccatatgtttcaaggagtttcgcagcttcccgcaagctcccgaaaagccgtctgaagaactcttcaaacgctcaacttcagtttcaaattcgtctagatttccctgtataaccttcactgtttgcttcatcttgttcatctcctgcggtggatagacacaagcaccaagctcatcgatttgtacaccagttccttgacacagcttcagtagcttctcaagcgactccacaaacccactattatcctttggattctccatcttaatcataccagtgataactcgaatgagttcttttatcaccatgatagtttcagagacaatctcagtaaccattgtagcaacttccatttcttcaggagacaaatcatcgcctaaatcgtcatcatcatcatcatcactagacatattatcaccagatgcctcacattcagataaaggacacgctggcttcacttctttcatctccctaagaacatccttcatggaaaccgcaacctgtgtaatagctctaccaatcgcagtaatgtttgttgcaggaaccttcttgaaactggaacatgcttcccaaaccactcccgagagctgcggaatagacggcttcttatccttctcatacgatccctctagttcacagatacaaaaacaaaaccatcaacaactaagcactcactagaagtagcaccttgaaagcaaatcaaactgtggcataatggaagaaagtgtaaaactttcagttaattaccgtatagagaaacagaaccctgcaacaatctgaagctagaatcaacaatttgcttaacagaaacatgtatgattgaagaaagcgtaggtccagcaccaagagtgcttccatggcaacagagtaaaaacccttgaagggcattgaagtaagactccatagtctctttaagtgaatcagcttttggagattctccagtccatagcattcccactattaggagtagtcccaagcaccaattgagaacaggaaatcacaaaaggaatcaagaaattataacaagtgaaataaaaacctatggtggcttgtttagagaggtgatcagacatctgaagaacatcgttccaattaactctttccactgtaggagaagctgttccatcgaacaactgcaaaatttgtagcataatcttgtgtctaaattacgaatctaattgtgtgaaaagaaccaaaaccgataagaagaaaatttacctggagggtttcgtagatggtgttgagacgaggaatcagaaattgatttagatcttctttctttgttttcaccatttttgtcttgcttcaacctcttgacgtctctactagcttaagggttttgtcgaagctaaagcttcacaggttcgtaacgacgtcgtttgaagactttggaaactagtgttattatttacagaaaagcccttacaaaattttgcttttcaagttaaagaaaaaacttcaagtctcttgttattgactatgaagcgatcaaaaacattgcataggaaagtattaaagaaagatcagagactataaacttgggaaaagttttcagatcctttaaagaagcagagtcatgtttaacaagaaacgctcatgaacataaagtctcaaagaaagatgaacttgggaaaaggtgaagcagtctttaacttataagagacatgtctgtttctcatgtaaatgcagaggaaaccgaacattgaccctatggtatcttgtttagagggctgctcagagatctaagaacatcgattcatcggagaagctgttggatccaacaactgcaaaacattttggcctaatccttgtcgaattcattgcgagaaaacatgaaacaaaacaaaaataggtaagaagaaacatacctggagagcattgtagagagtgttttgacgagaaatcagaatttgattcaaatcctttcttttttccaatccaacttccatgagtttgatcgcgtctcgcagctttctgcaaactcccggaaaggcgttggaagacctcttcatatactcaacttgagcctcaacttcatcgagatttccctctagtatcttcaccgtttgagttatcttgtctatcttcagcggtggatgataaacgcaagtaccaagctcttctatcactactccacttctttgacacaacttaagtagcttctctagcgactccacaaacacgctattctcatttgaattctccttctccatcatcctggtgaatctcgaatgactattattaccgtcatcgcctcatacacaatgtca

SEQ ID NO: 33042 - DNA, 2753 bp, Arabidopsis thaliana landsberg
tctcatgtttcttggcttcagataagttatcttgtcatgtttgcttatatatcactcacactggagattcacctcgcttaaagtccttttacattacatccaaggtatgctaatggttcattgttagaatctctgtattgtagtgttactctgacactcttaatgaagttactttcaaaccctagtggacatatttccttcttaatttcaggttctgcttggtctatctggtgttctacttgtcatgctttctgtccttggctctgtaggatttttcagtgccgttgggatgaaatcgactctaatcataatggaagttataccttttcttgttttggctgtaagtcgtgtctatttctaatattgcttgcaacttaaatatgttagctgatgttgtggcgacgttcttcatattgttcttaatttttttttacttctacttggaatatttttatcgacaggtcggtgttgataatatgtgcatcctggttcatgctgtcaagaggcaagagcaagagctgcctttggaaagaagaattagcaatgcccttatggaagttggaccatcgattactctagcaagtttagccgagattttagctttcgctgttggtgctttcattaaaatgccagctgttcgagtattctccatgtttgctggtcagtaaaactcttcagtatacagtttgaatgctttcattatctactttttaacgagtatatgcatcatgcttgcagcattggctgtccttttggactttcttctccagattaccgcgtttgtagctttgatagtttttgacttccgacggacggaggataagcgagttgattgcttcccgtgtattaagacatcaaaatcatctattagtgctgaaaaaggtaatcccttttgagggttgatgtatcatcgaatccttactcattgtagaattttgtggaatcaaattttcattggagttgtcttgtgtcacctttcaggggttggtcaaagaaaagctggccttttgactcgatatatgaaggtactttaataatcaacttatataccatctaataaaacataacaagtggtttttgttctacataattttgatttataaatgtacattttgtatgcttcattgtacactttcaggaagtccatgcacctgttcttagccattggatagtcaaaatagtggttattgccttcttctttggcttagcaatggctggaattgtgagttgatacattttctgatacataagaaaaatgttatgttatcaatttagccgtttaaatgatcatctcgtaatcatcctattcgtggaccatataggcattgtcgactcgtattgagcctggtttggagcaacagattgttcttcctcaagactcatatcttcaggtttacattgaatcttgctaatgtaaaagtatcaaatctaagatatctaacaagtgctcctcttttccattttagggttacttcaacaatatttctacatatcttcgaatcggtccacctttatactttgttctgaagaattataactacaggtattccacgttctgttagctactgatataatttgttccaactcattattaaaactcaatttgcctcatgtctcagctcagaatcaagacatacaaatcaactttgttccattaacaagtgtaatcctaactctcttttaaatgaggtatatttctcgtctgcatttattttcatttctcctcatagtataatttggttagctgtctttaatatatggtactattaactgctacagcttctttagctgttggcattaattgtgtctcagtaattgaataggcatattgttagcagagaatctgttcttattctttttgaggatctaaatttcattattttccatagattgcaagggcttctttgactccggaactaagctacatagctaagccagctgcttcgtggctcgatgactttcttgtgtggttatctcccgaggcgtttggatgttgcagaaagtttacaaatggtaccttttgcccccctgatgaccaggtaggtatttgtttttaatttcactgccgaggtttagagtccagatactttaaatttagtggtcccatatacagctacaaacataagtagagttgaatgaactgacatgcagaaaaaagtagattcagtttttataagcattctgtttaatgtcccacattgtttataaatgggactaatcattgcattgtgttatatgtcccactgttaaaacttaaaagtcacatgtgcatccccactcataagctagcttttgggtggagtgttctaaaaagtggtctaggtggtcgcctaggccccgtttaggtgataggctcttagatgacacctaaacaaacgtttcgaccgcctaaattcgttttactgtattcttttttccattttttaactacataaatttaaattataagtcgtaacttaatatatattgtttgatatgaattaaacaaatgtttttgtctaatttttgtttaaaatttgatatttatattttttaatagatagttttatatagtttttatcaataatattatatttataatatgttatgtaataaacgcctaaaccgcctaaaatcgcctgggtcaccgcccgcttaatgtctagcgctttcttgaacactacttaagctcttatccaaattcaaaagtagcacatggatataaaatatcgtacttattaccgaggtccaaaaatgttttacaacttactgaa

SEQ ID NO: 33043 - DNA, 1631 bp, Arabidopsis thaliana landsberg
tacaaagcttgagagaacatgccatacttgatacttgattacaaattgaacttcacatatcagtccaactttacaaaacattatctcgttgcttcatctatttcagcgtcataggtcccaccggccactacatatttcagaccgacttcatttttgtctttttaccccgaaaaagctgcttttgagataatagtaaattagtaatactttgtttgtgtgcgcatgcatttgtatagatatattggaacttaaggccatcaacgtacgtaggcgtgcatagtgtcttttagtagctccaaaacgcatacatagaagaaatgtgaataataacttaaaaggaaaaatgaaaaaaatgtgcaggacggtgttctatgggcagtacaagtgcacgggagcaggagcaaactatggagggagggtggcttgggcaagagagctcaccgacgaagaagctaagccttttctttctcttacctttatcgacggctctgaatggatcaaactctaaccatatacacctttttttattttctttccacctaattaataatgtacattttccctttaataaaataaaaatattttttaaaacatttcatatgcatgcacacctcattccatgactcgacgcccatattgaacaaccgaacattgccgaccaagtcccatcttgcgatacaccacttagatatgtttttgccaaagcatgtaagaattccggtgtagtccaatgtattttgaaacagattggtgtatttattttaattattttcatatgagtttcaaaacgatacaagtcttgttcagacaaactaacctggattttaccttttatgtaataataagttagggttgggggttgtgttttaaaatgacatgatttatcagtggtcatttttgtattttccactcccctgaaggctgaaaggtgtacattttattggtaaaagctgacaaattaatgttcaattatatgtttaattagtaagactgatgatatcaagaagagaaggataatacaaaaacttggaaagtgggtatattataattttaacacttccaacattagcactaaaaaactttatatgtttgtcacaaatgggacccaaaatcagtatgatgtggtaacaatttatgtatcctaatcaatattctaagtgaaggtgacatactgacattaaagtaaaaagattcctccgaagatcaataattgggaacatcaaatccttatcagaaaaacaacagcaaacaaccaactccattgatgattatctaagaagaagctccattgatgtcgaaatcaaaatctctagccttcgtaatcgctgctttatcttactccttcttctccctcttctcttctccaccaaagtctcactaccacgagctcttcatctccacttccttctccgacaacgcttccgtcgctctaaacctccacaccctcacgcgccgccctcatgtagccggtacagtggccaacgctgaagcagcggaatatgttcgctctgttttcacctcctctgctctcaaatcacacgtcgttgcttaccaagtgtctctaacttacccagttcatcgctctttggtactaacgccgacagactctgcaaagccaatcactttcttgc

SEQ ID NO: 33044 - DNA, 2875 bp, Arabidopsis thaliana landsberg
aaagtacatcaaatccaaacaaaccctttatggaagccacactagaccaaaacaccaacacagtcttatagcaaacaaatatcttggagaataggagacgagagagagaaagaagcactatacccgactaggaaacgaagcgatctgcctcctcacagccaccagcaaccgaaacccttatccgatctcagcataatcaatgaacgttctaacttctaagaacaatatagtattttatattttcaccatgtcccatggatctaaacctagcttaattcagaaacatcaacgccatctatgccctccttataaaactctagctcgttacttcggagacaacacagaacatgacaaaaacaaaccaacaaatctttgaattcacactgtggagaggagaacgtttaaactttgagaaatgtaactggataacaagaggtcattgaaacaaaagcagtacatatacataaaaaaccaaattaagaactgagaggatgcagtgcagttacacaaagtgggagcaaagcaagcaggagagagataaagagaccttgttctgtaatggctttatttccaacctgttcatgggagagaccatccatttgcgtagaagcatctttctcccattcttaagccccaatgataaggtcccactcaaagcatgaattaaaaaacacaagaacaaaaatagttcaggcaaatttctctgcctttttttttttggctttttcatttatataggaaacaaatgcatacttttcaggaagcacatgaaacaaaggaacaattggtactctaatcgatttcttcattcggtttagcatttgaccacttgtcatcaccctttcagcttgggaaaattagctatatcttcaagtagctttggacaataattgacatacacgtttctacggataggaagagtctgataattccagcagatttccgtgagttcaggcaatttcattagtaaaagggatttcaggttcccaaagggaacaccaatatctcgatgctttctggtcataatcactcctttcttcttatttattatttcttctatttgtggtgaagatcccacatgtagtttcttcagattttgagcaaataacagccgagacaaatccctttgcccttccaatttgattatagtcactttggagagttgcttaaaacctggagaactcatagatggaagaatctccattggtgaaagctcctttctttctttgctttcccaatctatccttatctcggatatgttgcagctcagaattccaagttgttgaagacctcccagagctatcgtgcttaatattacacgaggtgttgacatatcttctagacataaacctcgaatactactcgccaatctgtcatctccttgtatcctttccaaaatcgtgacatcctttacgtttgctgttaaaatcttcaagtgctccaagtgttgtaattccctcattaatatgtcatcaacacaaacagaggaaaaatagaatttcaacacttgcagatttggtaaggttgctactatgccatcaagactcgcaagattacaactgcactccagattcaagtagattagtttcctcaacttcttcagaccaactaactggtagcgattttatccctgtgaatgataaattgaggtattgcagggagcctaagttagaaatttcttccggcaattcaataagactcgagtttgtagaaagatccaagaccacaagttttggcataaacagaaagaatccaactgaaatatccaccaacttgttatctgggagtaatagggttgaaaggttggggcagttgggactgcaagatatcctcttaatatcagtacgaattatagacacctgtctcacaatctcccaactgatgtcatttggtatcagacgtacatgagcaccagatttcacacaaattgtttcttgctgattttcgaagtcagaatttatccaaagagccatctcacgtatcacatcatgcattttaacttcgctcgtgcgttcacattcaatcaacaaatgtgcacgaactaacaagccaattatatcataaccttggttggtacctccatcttcatatctgttcggatttatatatccttcgcaaatccaatattctatcaacttatccttctctatttcaaaatcttcaggaaacagagaacaatataggaagcacaatttgatttcaccattctttaagctatcataactgaacttcaaaatgggaagaattctttcttccatacctggaaacccgtggcctgcaggcgaattcagaacattaatcgcatgatgccattcttgtatagtctctttgcatgccatggcttccccaatgacagtgagtgcaagtggcaagccatgacattttccagcaactattcttgcgagtgcaggaatatctggatggcctttcaatgtgttttctccaactttcatttggaacaattcacaggcttcgttgggttctaggcaactgacttccatcgggtcatcaacccgcatacgcccacaaacatctctagaacgagtggtgaatactactttgcatccattttgtctgcttggataagggactccaagcacttctaaattcactttctcccatatatcatccaacaacaacacaaatttttgtttcccaaggacattgtatatgtcaagggctctctggttttcatttacattatcccactcttcgcctccaaggtctagtctcttcccgatgtctccttgaatcctatggatatctggactcttagacaccaccacccatatcacaaccccaaacccgctacatttttcaaaaaacttgttgttgattcgtgtgagaagggtggttttgcctacgccgcccatgc

SEQ ID NO: 33045 - DNA, 1676 bp, Arabidopsis thaliana landsberg
ggaagacgcaaaagagtacagctatggaaagggagagaaagatctctaacctttgtatatgttcgcattcgttgagtctgattgggccacagtcctccaccattcatgattcctgaatcattgatgccgccaacctcatttgaacatccgggcttaaagggaatgctgggaataccaaatgactgagaactgattgcagcactggacagctccgtctcaatgtctcttggtgtgttgccatagttgggaaccaagttttgaaagtccttttgagaatagagtgcatcagaagttacggcttcgagattaccagggaaagctaagttgtttcttggatgatgagattggcagtctccatcaaaaccaaatgatggtagtgggaaagtttgttgctgctgtacagggccaacaacatcaggacagtacgtcgttcccgctgtggatacatcgatttgatctgttaccgcgcttttaaatctgaaatgttcaccagcactcttcatattcatcatgccttgactgatccggctctcagtttttgtataaagctcttggaccggattgcttgcgcgctcaaagactgaatcagatgcagatacagatgcagcttgtccttgctgttgatttctgctcaggaaatttgtcggtgaaacattatcatgtcccgtgttattggcggaaggtgaggttgaacaagaaggagcttctccatctgtgtggccagaatgtgatcttccagcggctacaggatttttgttactcatctgtccttgctgctgaggactcacctgaatctgtggaggctgcatgaaagttgaagctgggaagctgttattaccatgtgccaagggctgttgattttgagacgacagaagttgttgcaattgatggctttgtgtctgctgcaacgctgataattgtggctgtaaggatgagcttactggaggaatcgactgctgctgttgctgctgctgtagcttctgcagtagctgcaactgaagctgttgtgaaggacttggttttgatgattgttgttgcatttggagttgctgaggattttgggacagattttgttgtaatgaatggagagaggactgttcttgctggtttcttaataactggctactgttatgcatttccagttgctgctgaaactgcatttcttgcgcaaacgatgtcatttgagacaagcctttattccccatagaatttatgttctggtgtgtcattttagcaccagtagggagcattgactgctgctgaagctgagactgagagaatccagtaggttggtttggactttgacaagagacttggttagcaacagcaatcgtaccattgttataaatcccttgttgctgcacctgttgctgtgacatctgtagttgttgttgttgctgcagttgtggctgcagctggtgaatcaacaagaagatgaactaatcaggacttttgtgaaattctgaatcaggctgataccgaaacagatgaagtctatgcacaaatgactcttcaacctgtgaataaggtctgaattatatcattcttcttgtgctatcttggtttaaagctgaggactttaatgctgatctttgcttaaaatgtgtgacagtatgatagagaagcattgctagcttctgatatgggcttgaagctaaacagacaagctactgagt

SEQ ID NO: 33046 - DNA, 1594 bp, Arabidopsis thaliana landsberg
gaccagctagactacaacggatttgtgataggtaacaatttataatatatttagacagtaattacgaaagagactgatatgttactaaaataattttagacagctttctcaattcatggcttgacggtaattctatcgtctcatcgtgtaaactactgtattaggtccgtagagacaagttcgaaacatacatcagaggttacagttacacagatacaggtttgaaacatacatctgatgttttatttatttgcataaccgcagtttctgacttagtgtgactctttacatggaactcctaatccctccacgacactcagagagccacaagtccatatgatctactatatgttgcctcactttgttcactgcatcaggtgaactgcaattcttggaatcacctgaatatgagaatgaaaaaagcagggaaaaataatatttttttaacagttgttccaatactagtctgtctttgacttcagggatcggaaagagagaagaggccagtaatatacctccaatgaccatgggagattgagggcatccacggagatcacttccatggccacagttgtggcaagtcacaatgtaagaaggcactgtgtcgtcaagtattaacttgttagtgtcgcatagaaagtatttgtctgagtgctactgtacgacatagactaagcctgagataatgttataaggatttgatcatactaaatggagacttacgttcaggagatgaggtctgtttggatgcatgacgccatggatcctgtgacccatttgtgaagataatcttggtcgctgcaaattacgaataagaagaaactgttggaatgtgcgaaaatatatgagtagcatcgagatgttttccgttattacataccagcaattctgtcacttccataatacaggtttgttgcatcgacttcagggtaaacacctttcccaaacagactcttgcatagatccaaatgatacctatcaaattaaaagaaacgtaagcaggacaataaatataaaccatgaaaaaagttatggataaaagcttgggactgtgtgtactctgtattgatttgatgagaccggatgctatcgtttgcaggtgccacttggaaatatgccacttcagtgcaaacttggaaccaccaaagcctatctgcactttctggggtgaccgcagtgtctagcagatgtttccggctatatgttttagagcttagcccgaaaacccccacacaaaactctctaacatatttagcatatgcttcctgcattaatacaccacatctaatgtatcagcaaatacaaatatttagtttgcaaaacgagttcttctagcatatatgatcaatcattgatcatatatacaccaagcataagcaaagagggatctaaaaagaaaagaacttaccactaaatcatcacgattcttctgagcttccacgagtggtacacatagtttatctgggtttccgtattggatctgccaaaatttttgaagataaacatctaaaactagaaagaaaatgaaaatcataagagtacgaaatgaacaagcttaccgccataacttctgcatctgctatcaagtataaga

SEQ ID NO: 33047 - DNA, 2324 bp, Arabidopsis thaliana landsberg
  unsure (1)..(2324): unsure at all n locations
atagggtgcatgctcatatcgtcatcttggtgagatctacctccttcgaatactagtcaatttttgtattccaaggggttggggcttgttctgatccataaagcgcctattctagccccaagactatggctccttcagctttgactatgcagccttgtgggtgctcaaggtccactacttttccaagatcttcctccaagaaggccgagtcgacatgcattggacgtctactccacttgattcgagccgttcgagagatgattagtctaaccgtggctagacgagcggcgggtgcaagtacctcgtcgtattcaattccggggtctagactattaccttgagctacctatcttgctgtgtatctttccacttctcctttagagtttttctttgctttatacacccacttcacgccaattgccttgtgtccatttggaagtgaagttaactcccatgtgtcattcttttgtattgatttgatctcttcatccatggcatttctccaaatcttcttttaaatggcttcttggaaatccatgggttcgcactccgcaaataaacaaaataaggtaaggttttcttgattttcggttacctcatagagctcttgtatacttctaaaacgcggagtcctttcactcgaactttcttctatttgagaacttgttggtgaagttggtggtgtagtaggctcttcacttggtggctcctctcttgttggctccggctcatcttcttcaaaatgtggaaagaagttataatcttcttcatttgagttccaatcccattctccttcttcatcgaacactatatttcgactaataattgtcttcttcgtatcgggattatagagcttgtagcctttggagttgttatcataaccaatgaagatatacttctcacttttgtcatctagtttgctccgcttctcatccggtacatgagcatgagcaatacttccaaagactcttaaatgagaaacaccgggctttcttccgctccaagcttcttgtggtgtttttccggagacactttttgttggagatcgatttaatagataaaccgcacacgcgaccgcttccgcccacaactcttttggtagtctcttacttttgagcatgctccttgccatctcaagaattgttctattctttctttccgctacaccattttgttgaggggatcttggcaccgttaattgtcttcgaatgccgttgtcttcacaatacttaagaaactccttggatgtaaattctcctccacggtcggatctcatggttttgatcacaagaccactctccttctcaacatgggctttaaactttttgaaaatttcgaacacctcggatttttctttcaaaaaatatacccatgtttttcttgaaaaatcatcaataaagaaaaggaagtaattacttttaccaagtgatttcggcttgatcggaccacacacatcggtgtgtattagctccaacggtttttgtgctcttgaacttgactcctttggaaagctcattttgaattgctttccaagtagacatccttcacacacttgatttggatgatttatacaaggtagccctctcaccatttccttccttgaaagcaactccaatcctccaaaatttagatgtccgaatcgaagatgccatagccaagactcctcttnnnnnnnnnnnnnnnnnnnnnnnnnnnnnnnnnnnnnnnnnttgaggacaaacattctatttttcgacattggcaccttggtaatgagattgctttcttggtctcttattgaaaggttattatcttttaatctaatatcataacctttctctaagagttgtccaaggctcaagatgtttgtcttcatgctcggaatatagtaaacgttggaaataaattgatgatctccattcttcaatcgaatgagaatgtttcctttaccttttacctccatcttcgattcatctcctaaagccacatttcctctcaccgattcatcaagctccgcgaacatactttttctcccgcacatgtgattacttgcaccactatcgaggtaccacttatgattctcttcttgttcatctttcttgtagctagccattaataacatgtcttcttcttgaattttttcttcaacgtagttggccttctcctcaaattttttgttgctaggagctttacattcagaagcataatgtccaaacttcccacaattgtagcatttgacacttgatttatcgtatcttgattttgggtgtcgatgcccacgacctcttgatgagttctcacctctttggtttgtgctgtcttcatgtggcctccaaccacgtgca

SEQ ID NO: 33048 - DNA, 918 bp, Arabidopsis thaliana landsberg
aggactgaactttctatatgtctggacaccattaggatttatgattttctttggaaacctaagcttgggggcatgggtgaaatggccttaaaagtagcctaacacgagatacaaagaatgatgtggaaagcaacattcatatgagtacttgaaaaatgatttgagggagggttcctggttgcgcggtgcgatattccttcctaattaagatttatggctttgctagtaggaatgtatttagtcttttatcttgctgctagttaagaggtgctttagatgatcatggatctctccaaaatgaatttaataggttaagatgcattgtttgcttggatttcttctttgacataaaatctttcattatttttatttttgatacgactgttttctgcttctttactgtccagtttattattggtgatgggaataatctctatgatttcacttacgttgagaatgttgctcatgcccatgtatgtgctgagcgtgctctagcttcaggaggagatgtttctacaaaagctgcaggacaggtatttgctttcagttgattccatgccgtagttttctaaggtggagtttggtctcagtttcacatcactatatttgtggtctccatagttttctagctgtaaatgtttggaatgaaatgctgtcatggtcaaccagtatttttgtgtacagctgttaatgcatacctaaagcataaacgtttcaggcataccatgaaaactgagataaaaactgtgtctactcaaacattatgtgaacttcaaagagcttgctggttttttcgttcgagattatttttcttgtctgttgtgtttagctgagatagagccgtttgagatgtttgccaaattaacatataaatgataacattgtttactgccgtatttgaataaagttaaagccctt

SEQ ID NO: 33049 - DNA, 490 bp, Arabidopsis thaliana landsberg
agatccgatcagtaacgcaatgaccccaacgggttactgtattgagatattcgaagctgttcttaagaagttgccttactccgtcattcctaaatatattgctttcttgtctccagatgagaactatgatgaaatggtataccaagtatacaccggggttagttcgtctatttctactatggttcttttacttttactttaactttcaccgtggatcatgtcttttttctttatatgtgatttctaacatatcattaacattcgggtcaggcctatgacgcagttgtgggagatgtaaccatagtagcaaacaggtcattgtatgtcgatttcacgctaccgtacacagagtctggagtgtctatgatggtacccctcaaggacaacaagaacacatgggtgttcctcagaccttggagcttagacctatgggtcaccactgcttgctttttcgtattcattgggtttatcgtgtggattttaaaacata

SEQ ID NO: 33050 - DNA, 1332 bp, Arabidopsis thaliana landsberg
gaactggtccaagattcccaatctccacttccccaatctcggatttccagagaagccataatccatcattttgcccaactgcatcaacccgataggagctctcaaatcccaatctctgacagatctgacctgccttatcacctccagcatgagtctcgaaaatggcaaggatatcagtcggaaatttcttcaataagaaccgaatagatcttcgaaagttaggtttatttgccccccgacaattccacatcatacaattcatcattaatctgtaaaacacggtgagaaaaaccggggcaatctgctatgcagtaacaattttcgtcgcctcctccgacgggttgccatacataaccaggtctgagccaacatgctctgaacttgcttccggcactgccgccgcaagagtcttcccgtgaccaggcgcaaccgtgacctcatctctcctccccgatgaagcattcgcgaagcacccacctggtctaccaagaccttcttgctcaattcgaagtcgcttccccgacgctgagaggtctgattccttcagggctgggccataaaccttacctctagtgggcctattcgacttctgttgtttgggccgagtattattaaaactcgagagtggtcccccttttgtatctttattgaccccacgaggcccattaacacttttttttgagcctgctccaaacaccacatccttgccagtcactctattcatccaacggttcccctgattcaatgaatccacattttccttattcgcatcatgtatatttcctccttcttccttctctatggtttccatttccgtagccaggctaccaaaactgttttcgatcgtgatattctccgctcccttcccaatctccatcacttcatcctgtatcattacaggcgtattttcctctccctctctctccaaatctaccatatctgcagctaagctaccaaaagtatttgaggtcgtaatccctgcgatcccctttcccttatctctcgtaacctgatttctttccatagaatgttttgacccttccaccatagtaggcaagttgccccgcggtggctccgccttgcgacctcgccgcacttgagtaaacccatccacccccggtttactaccggcactactacgtccaaccatctgtgtttccaggacaaccaccgtctcttgagtccccttagagcattggtgaactaaatgcccatacataccacagctagcgcaaatattcgcaagtccctcataagccacaaagaacctctccccattaatcaaaacggttcctctaagcggctttgaaagatcaaccttcacacaaaccc

SEQ ID NO: 33051 - DNA, 2334 bp, Arabidopsis thaliana landsberg
tggggaaaagtcattcttatcaatacctttggaataatttggatcaaactgtatcatatttttgtggataatttgtctctgatataaattaatctgatccatattatgcagtattatttcacagacctcttaatttggtccataaatttaatttgatccatgatataatttgataaattattcacaagcctgtttcttccatattgtttggggcctatgatgggccgaattgaattttgaagaaaaatcaaaaccttcagattcagttagagtgttatgataatgggctcttgtaagtttgtaaccgaggcccaatacgagacgacgtcgttgtttgcaatcgacctatctggatcggtaggaaaagtgtgcaagtcgttttcattcaccaaagcgaagctttattcgtttgcttgagctccgaagagtggaaacaaaaatggaggaagaagagcacgaggtttacggtggagaaatccctgaagtcggcgatacggatgttcccgatccggatatcgatatgtctgcagccgatgaggacgccgttacggtctacttctgcttcgttcgattttgattttgttgtatatcgtgtgtatacatctgtttgatttttggtgttttgatttcatggaatcaggagcttgctgagatgaagaggagattaaaggagatggaggaagaagctgctgcgctacgagagatgcaagcaaaagtcgaaaaagaaatgggagctactcaaggttttgtgactctttcgttttttttttgaattcgtttgctcgagactatctttgaatttgatatactaggaggaatctgttgattgtgtagattacttttaggaaattgaacttctgtttcttgcttaacaatttgtttcagatcctgctagtatggctgcaaatcaagaaggaaaggaggaggtggatgctcgatcagtttatgttggcaatgtaagatagcttattttctacttcatggtatctcttctgtgcttgaatcattgtttcatctaaacggctttgatctgtttgccaatcttagtgtggattagcttaggctgactattttgttaacttaaatttcatctttgataaaagaactgcttgcaattgtgtcttagctttgttctttatcccttgagattactgttagaatctgtatcaagaggctttctctaaatttaatgttgtgaagtaggttctttattgtttctagtttaagagtttgacctctatgtcctatataatcgcagggttgttctcataaatgaagttcttaatagctctgggttctcaactaagttttgtgactgttttgctagtttccttgttgtagtgttaaaatcattcttcccgtgcaatttgatgataaaaaagctataaaaaaaatgttgaaagtaaaaagaaaagagaaggaaaaaaatttgaaaaaaaaaaaaaaagatatagcagaaaaatgtggagaaaaatattgcatgagcttgaaaaaaaaaagaaggatttcttgagaggaaaaagggagtctgagtgagttgggtgggattagaaagcaaggtttctgttatccttgaggagatggtctctgaactctgaagagctggatcaagatgccaagatgctggatgctttctaaacaagacccaaagctccgcagggaggatacttggagctaatacaggtttggttgtttgcggatttcgcgagatgctgcagtttgatgctggccttttatcatgtatttttgaactcacgctcataaaatgaagactttcatagcgtttatgtaccatacataacttaggtctaatgttagacatggaaaattgctttagaacacacaagtttgtctcttggcttcccttagtggggtggttaacttatctatctgttacgttctcagtaagtcatggttttagttgtaataagaatgcttgtgttatactaagacctcattatccaccctgcaggtcgactatgcctgtacacctgaagaagtgcaactacatttccaaacatgcggaacagtcaaccgggtaaccattctaatggacaagtttggacagccaaagggatttgcttatgtggagtttgtagaagtggaagccgtgcaagaagctctgcagctgaatgaatcagagcttcatggtcgtcaactgaaggtatcttctcgtactaagaccaatactgaaggaaatggacagttcattgatctcaactcttctcttttggttttcatttcaggtctcgcctaagcgaaccaatgttcctggaatgaaacagtatcatcctgggcgtttcaacccttcaatgggataccgctttcgcagac

SEQ ID NO: 33052 - DNA, 724 bp, Arabidopsis thaliana landsberg
cgcaagtcctactgaccatgtttactattctataccaactcagacctaaggtgtggatcaaatggaattatgaacgtacttaagatcatgaaggagctcatacttgacagcatcttcatgttattatggatgagccttatgcaaattatgtcgccatgcatcctatgaagcatatcctatcctctgattattccctctttgtcctactaagttcccttcttcatcaatgtatttgatacaatcaccaaacgtaagatgattgtctttcaccacattagctggaatcaactattcacaaaacaaatcattttcttgaggagtcataggagtttggttattcggatcagtttaatcgggttttcggttgaaaactattccaaattaactgatatagatgtcgcggttcggttcggttctgactctagaattcgaaaataaccgaattcgattaatttaactttttgggttttaagtggcagaaactgatggcaaatgttctttccatttttcctaaccaagtgtaaacaaatcaatgcaaaataggataatattgagaggaaaaaagtgagtgaaaaagatagtggttaggagtaggtggagatgatgctactgcacatcttgaattgtgatgtaccatgtaatctaaactttgtgaaatttcttatctctatataccaatagttgggaagttaaacccgttttgttgtggataagggtttttgga

SEQ ID NO: 33053 - DNA, 1258 bp, Arabidopsis thaliana landsberg
tatcaccgtaagatcagcataaagagtatgaagccagaaaaaacaaagagtcagggaaacaaaccgtggctgcctgaggagaaacaccaagtgcactatgccccacattatcataatgagaaagacaccatcttttctttgcccggggagaaaaatactccgtcacaaatttcctccagtaaacaatactgctctcctacaaaatcagcaatgacacgactggtatctgtcaagagcttttttctagaatacacataaaacaaaaaatttgacgactacatgcacactcacagaaggcctttgtcgctgatgatataggtactgcatcaatcttcgagcgcaaacgctattttcataaggtcttggcccaccggttagttgcatttgcattccttgttgttgcaactgttgctgttgctgttggtgctgctgctgcaactgttgctgttgctgcacttgttgctgctgctgcagttgaacccgttgcaatggtgggagggactggagatattgttgctgttgcctcagcttttgttgctgaagcaagatttggaactgtggattttggccttgttgttgttgttgctgctgctgctgcaatatatcctgtctctgaagccactgacgtaaaatctgctgctgcaaagcatcatcctgctttgaatctaatctaggttttttccgtgcttgagttaagttgtttggatcctgaaagaacgattcagaagcacgccgagccatagaaagcgggatttgattagtttgtgatgtaggcagtgatgtagcactagagccacctagctgaacactaggatcatgccgttgtaccacagtcgacccatctacaactgatgaaccagatatgctgatattattagaagagaacgacataggagacgccggtaaacgcatatatgactcattattgatactagcactacgctgcaaatgaggaccacctccagagagccctgaattagcatctgtgacaagcgaactagctcctgcgcttggaccgggtgttgaaacactcatcataaccggattatgcatatcaccagaaaccatactgagattgtgatagccaccagtaggtccaccacatccaggagcagagttagatgaattcccataagaggaagtcaagtgagagttaatgaagctttgagattcatcatctccttgaaagaaaatcccagaagttgaagaagccattaaaggaataggtcccaagtgagtctgccatcctgtagtttct

SEQ ID NO: 33054 - DNA, 784 bp, Arabidopsis thaliana landsberg
tttcagtttcaagtccatcccctgtggtaaatcattacttatccataaccaattcatgagcaattcattttacttaaggctttagcctgatgaattatgtattgtccaccattagttaaatgactattaagcatgttgaagttcaagaagcacgcttgcaattctggttgcatggtccagctctatatttctattgacctgttttttggtcactttgatttactcaggaaaatacgaattggtgccgcattataagggtgagaatccggtctttgatgtttcacctcctgttatgcctgtatctgtagagcatcaacatgtcactgttccccaaaaatttcaggtcagatagaataactgcaaactcttataccactctgtgtttctataatcggactctgcttacatgttctgtccactaaatattgaactgaatgctcctttaggtaacaggattctccattgggggtcgcgtagttgacggtcattcagtgggagttgagggcgttaaaattttagtagatggtagtctaagatctctcacggacaaggaaggctattacaagcttgaccaggtatacgtaaatgctatcttcaatttaaatttataccatataccttgttccagttgtaagcctgccaaattggttgttactcaacctctcctagtgaatttttgggtgcatgtttcacggcttctagcgtctagagttacgaatatggctcgatttctgaaggttatgtactaagcaaagcatatgtattattatatatataaattttg

SEQ ID NO: 33055 - DNA, 995 bp, Arabidopsis thaliana landsberg
cttttccatggatgattgtgaatcagaaggaagagaatgagagatgtgttaaaagctattttcactgataatgaagagaatggttacagtatttagtcaatcgcttactcattttacaaatttcattagaaaatccatagctaaaaaatctttaagtaaggatgtaacttatctaatttgatggagataaaaagttacataaggaatcaaaatttgttacaaaagccatcatctgttatatcttgtgacatcaaatcaagagtaaagtatcagaaaatgttgttccttctccttactattgttttttcatatgaaataaatgatttacttcatatatttattaaaaatgaattttcagtgttttcaattaattacatcaaaatgatattcttaagaacaattaacaatgtggaaaaggcccaataagcccaaattaaatccagtaaatgggcccccattataatatttttcactaaaccttatgggcaaacaaacaagcagagagaaagagagatcgagattggcgtgaatggattatcagcaaaagccgccgcagtcttctgacccttcgccgtcaccgcctgaccgtccaccgggaatcagatcaccggagaccccctcgaacaatcagaataatgacatagaggacattatggcttgcgtcacagccttggaagctgctctgttaccatgtttgccggcgagagagcttcaggccatcgatcgctctcctcacccttctcatcaaagtcagtcccttttctactctccaatttcaccattctagggttttagtttgaatgatagtttggaagttgtgtttgtttttgtgcttaacttatgatctcagtgaattttgtgcttagaattcagttgaaaccgaagctttgattccatattcgatgttctagcttaattcccctcattgaactgctgcagttgatgtggagcggcacgccagagatttcatggaagctgcgaaaaagcttagcttt

SEQ ID NO: 33056 - DNA, 507 bp, Arabidopsis thaliana landsberg
catctaaacatactttggtaatagatgaatcctgaaatatttacctattaaaaaaaaatacgtataaatggcaaatctattattaaaaattacatgtcagcctaagaaaagagacttgtgtgaatgatttgaaaattgggtgttaatactttagtcgttgacatatgaaaaaagggagatacgggtttaattagagattgatttggtttgtaatgaaagcgacggttgttaataacgctttgttcttttgtgttaattgcctctctttaagggttaaacaaaaaagaaaagagagtccaaaatatgcgcattataaattcttttcctttgtttaattattattttgtaatacttttaaaagggaaaacaataataacataacgcccaaaaattaataataattactacactatagtataaaataaaataaaggtttggaaggttatgaactttattatggtcgttagccggtgctattctaccgccggccaaagtgcggtgccctta

SEQ ID NO: 33057 - DNA, 869 bp, Arabidopsis thaliana landsberg
cggctttcttcatctcatgaaggatgggaggaattttttccacagcgggggcataggctaaattcggaccatatagagcaagtgaaagatcgccttgtccaatagctgtcatgtccaacgcgtgattaaatccattctcatcaataaggtgacttctacctatcaacaaggacgcatcttctgtaagtaattaagacgagatatgtataaattgtttgggacaaaagtaattaccggaagagataagttcttgagaacggtttttgaaatggacgaattgacgaatttgaatggcaagagggaaggaaaagatcggaagagcggtggcgcccgagactgcgaaattgactcctcttttgaaatttggtgaaagtgaatccaaatatggactcaaatatgtcatctttaaatgttcacctgatcatatatcaaaaggtttaatcaaatatataacattacatgtacataaaacatatatttaaagaattgaaactcttgttgaaaaaaaagagaaagaattgggactcacagtagaagtcaacgatgagtcgaccgtcaccgagacgaccagtgcctctatggaagaaggtaatgccatgagggagtccgataggaagtccaactccagcaagaactcctccggtgtcggagttagagtcgccgaagtttatcaatataggtttcttgtttgacttgtaactagtttcagagttagagcaaaccaaaagagagagacataaaactaagaagaagcattgtagagaggaaacagtgtaatccatttcttttgaatatcttgctactcagataattttaatcaagattcacgatctgaagcttttacatatagtaatgtctttggcttggaa

SEQ ID NO: 33058 - DNA, 935 bp, Arabidopsis thaliana landsberg
aataaatctaatatttcttcttaggaaggaaataaattattttttaagaggaatataaatcttgactattttagaaaatgaagataagtcttaactatttataaaaggaaaaaaattcaatgtttgaaacttaagaaacatgtgaagactaactttggggtcacaccattgccatgaagctctttgactagagactaattgtagaatctcgtttcgatattttttttgcagttacataacgtttgggtgtatatgtgtgtgtttgtatatgtgtatgtattgggacttggaaaaaaggaatgtgaattgcgaaaacttccagattgtatcattatgacattatgtgaggagtggggcaaacacacaccctcttttgcaacttgcctttatcagttaaatagagggtatattaatgaaaaattgaaataaaaaaattgaaaaacaaaaaaacaagttttttttttgagaatctgaagttctagtggcaaaataggcaaatttcttgagaaaaagcatattttcttgtaaaaggttatactttttccttgtaataaacaaatactgatatgattttttttttaaatcttccttaaattttgtttgtagacaaaaatatttacagaaatcacatttaaacttaataatttatatgtaatatagttttatcatatatgtgataacggcgccgctttgtcattactcaggttcatatccccatagtgaatgtgtagaattggtcttccagacatgtttattatacaaatatacaccacttaattagaaggggttgcacttaaaccaaactaatataggttagaaaaacaccttttcgaattaaatataaaaaaacaatcgtaactcaccttatttaattatcggtagaaaaaaactgcttaccattatttaaaaagccttgaattaacctttttaataag

SEQ ID NO: 33059 - DNA, 554 bp, Arabidopsis thaliana landsberg
ttcatggatatatcaagaaagtgtatagatacaaagaaccaatctccatcaatgatgattgtttaaatctttcaaaataattgttgaatgatgatataattaatttgatttatttttacatttatgttgatgatttgtatattgagccctatataagttcatttatccattcattggaaatatatagatttttggaatataaaagaaaattgtttctaaagcctaggctatgtttttgtttatctaagttaggtggatttatttacttactaaacgtgtgagtatatgtcctttgtgtggattcactaaggtctagattcgtgatctcatcacaaagtagcagttcttgatccaccatcaaaaccatcaatcgatccaccgagagagggctatcgccagctttgttgatcccatatctaatctcacattcatccattaaacaaccagagagagcgaccaccatcttgttggtttcccggactccacctcttatcaccaagctttggatcttatatcagcccttaacacacttgatcatccgaattattaagaac

SEQ ID NO: 33060 - DNA, 678 bp, Arabidopsis thaliana landsberg
gaaaagttgcgatgaaaagactcaaccaaaaacaataacctgtttatattataacagaaagttgcaatgaagagagacagtggagaaaaaatcatcgttaatatttttacgaaagttgcgataaaaaaacacaaacgaaaaaatacctggtaatattaacgaaaaaataaccatcaatattttaacggaaagttgtgataaaataaaataaaaataatcgtcaatattataacttaaaattgcaataaagagacaaccgagaaaaataaccgtcaatatttttatgaaaatttgtgatcaaagacacaaacggattaaataactgtcgatgttaactaaagttacaatgaaaagacacaaactaaaagttgcgaagaaaaaacacaaaaggaaaaaataaccagaatgttaacagaaagttacgatgaaaaacactaatgaaaaaaagataacgtcaatattttagtagaaagttgcgattaaaagatataaccaaaaaataattgtcaatattataacagaaagttgtgggtaagagacaaccaaaacagaataattgtgaatatttattagaaaaataccgttaaaattcactaaaggaataattactgttgatgttacaaaagttacgttaaaatgcacaaacaaaaagtttcgatcaatataataatatgaaaa

SEQ ID NO: 33061 - DNA, 784 bp, Arabidopsis thaliana landsberg
gcagagatttttactctctgcatccaacgtaaagaagacttggttgaaagacaagttattgagtaagttcgtgaatttatctttgtggagtagtgtattattatgtataaagagatgagcatgaaacccaatattaccatcacacacacatacacacacaaaaaaaaagagttaccaatttccatttttctctgcttttttttgtttcattagcttgaagaacgatgaaagactcttggaactcaacgagtatcattcctttcactttttcttctctcatattcttcttattcacttttgattttcaagatgtctttggggttcctactaaacacttatgtcgtctcgaacaaagagatgcactactggagctcaagaaggagtttaagattaagaagccttgtttcgacggccttcatccgacgacggagtcatgggcgaataacagtgactgttgctattgggacggtatcacgtgcaatgacaagtccggggaagtgcttgagctagaccttagtcgtagctgcctccaaagccggtttcattccaacagcagtctttttacggttcaaaatcttcgttttctaaccactctcgacctttcctataattatttcagtggccaaatcccgtcttgtattgaaaacttttctcatcttaccactctcgacctttctaaaaactatttcagtggtgggattccttcttcaataggaaatctttcacaactcacttttctcgacctttttgtaacgagtttcgctggtgaaatgccattttttgg

SEQ ID NO: 33062 - DNA, 393 bp, Arabidopsis thaliana landsberg
atctacaatagtcattttttttccccgctaatccaataaatcgtaattgggaaaagtatgacatattataatgtactgcccttgattacatagagtcccctttttcagcaatggatcggacttaatattatgaagtatatcttatttaacatgtactatacttattggttcatgaagccaaaggtgaccaacgctcgagggcatcataaaacccacaaactggaccaaccacatattgaggaaagaaacttataaatcggatttttatattttatagaggtaacatctaagtgtgagatttaagtctaaccagtactggattacgaaaaaacttcttatgttagtcaagacaagccataacaaactgtgaatcagtctacccacatttataat

SEQ ID NO: 33063 - DNA, 793 bp, Arabidopsis thaliana landsberg
tagcagtaaagtgcgcatactttattattcatttttttggattcagaatcatataactaaagtatggaccttcgttgtcaaagtatataatcaaatgattcaaataacaaaggaatttttacacattggttaagcaagaggacaacaccacttctgtttgtctcgttgacaggagagccacatgtgagtcgctccacatgttcgtttgtgtgaacatttggactaattgtatttgctgaccttttatttctccgcacatatgtttttatatactgataaatgttttgtgaaattgtggggattcaaaaatcaattaaagaccagtacaggtagaaaataaatgaagcctttttagaacataaaaacaagaaaaagagtaaaatattcgacttgttgatggtctacgcgttttctaaagaggtgtttatattgtacgcaaaatcaattatagcaaaaatataaacttaagcctaaacctcattattagagatgtgatcagatcaccacgacattgtttttttttgtgggaaacaaaacgaaaaaggctacattataaagatcaccatgacttatcgctccaacatgaatgatcgattgattcaaacttgtatatttatttttacagtttgattatcgactgacttgttatgtaactagtaaccaaacaatcaaaaatacaaataatgaatatattttaatgtttggcccaaaaagaaaagaaagaatatattttaatgatgggttttctgtcaatagcctacacataaaaaaacgaaaacctatcaactgttct

SEQ ID NO: 33064 - DNA, 634 bp, Arabidopsis thaliana landsberg
cctggccgacagtaacttgggtcgttactaactgaccctcgtgttgaattgtttgccgaatatccgtttttgcgttagcgattccggtctttcaatttgtttatataaaatcaataaatcaatatcgtattaaatcaataaatcaataccggattacatacaaatatatttcaatctatatatacatttttacagtcattttgtgaaataaatcatggagttggaacttacttacaatggctgtcactggcttttaattattgattttttttttgcaataaattaattaacaaataaaaaacattccaaatatatttcaatcccatatatcacgcaaatttttccaaaatttgaactagatttcggtgactatttaaaacaaaaaatatttgaagaccaaaatacaattgcaatcccttaaaatgagcaaaacacacctaaatacatttcttatcaattcactaaacttatttctccaaaatttgaactagatttcgacaactatttaaaacacaaatgtgtgtgcaaactaacaacaatcgcatcccgtaaacattatttcattgttattaaatagcggggactgcggtcttttacggacggattgcggacggtttggagggcattcttatac

SEQ ID NO: 33065 - DNA, 631 bp, Arabidopsis thaliana landsberg
tgtggactgaagtttcaatggatttcatcgatggcttacctatgtcttttggtaaatcggttattatggtggtagttgaccggttgagcaaagcagctcatttcattgccttatcacatccttacagtgcactatcagtagctcaagcctttctggacaatgtatacaaactgcatggttgtccggtttcaattgtcagtgatcgagacaaaatttttacaagtgaattttggactgaattttttgcattgcaaggggtagcactgaagatgtcgagtgcctaccatccccaaagtgacgggcaaacggaggtggtgatcgttgcttcgagacttatctcagatgtatgacaagtgatcaacctcacatgtggagtaaatggcttgctttagctgaatattggtacaacaccaatttccatacagctactcaaatgactccttatgaagctgtatatggtcagattcctcctactcatttaccttatctgcctggcgagtcgaaggtggcagatggtagctcgttctttacaggaaagggagaatatgcttttgttgctcaagtttcatttgatgcgggcacaacacaaaatgaagttgttcgcggatcatcaccgtactgagaaggaatt

SEQ ID NO: 33066 - DNA, 427 bp, Arabidopsis thaliana landsberg
acaggagagtgcggcctatctgtagagtgagttgtgttggaagaaaatatggactatgttatctgactatgcttgtccttgcccctatactctaagtggtatttccaatgtttataatgatttttttacattgttttcccaccaatgtctttgactcctcttgtctttctgaattgtcttccttccattgtgacaaagaaccacatggttctgaaaagagacaatacataacttcacagtcttccgctggctacttttgcttctggttttaccattccttaactaattcaaatcacagaattttcggttcttcttcaataattacaaacagtctctgttagtctcataatgctgtcctttgttaaagaaaaactctgtatattagtttttaagtacaataaacactaactgtataacaattataaca

SEQ ID NO: 33067 - DNA, 215 bp, Arabidopsis thaliana landsberg
caacttaaaacattaactgatgctgaaaaagcttttgtatctttggaagattctcttttgataaggggagttcgttgaatagttactcactatgaaaggagaggcgctcttgatggtatgaaagtgtaattttaaaccttctgataacttcttactggaacagatcaagaatcctcttttttttttatgacagcttgagaagtatgacccaacaa

SEQ ID NO: 33068 - DNA, 2225 bp, Arabidopsis thaliana landsberg
  unsure (1)..(2225): unsure at all n locations
aacatgtgtaacagaccatatagacataagaagtggaaatcccgtgtaaccatctctgtctatgctatttggtctcaagacatatcactcatagttatatatcttgcgcacacacacacacacacacacaatgacacaacacttcatcatcaagataagtctctagatttttctattaatttaaaccaaaattatgtgacattggtgggaatccctctaggatgccaccgaatcagtactattaacaactggtagggtgcaacggtcaaaataggccttaatccaaaatgttgtctctatttaaggttatttatcactaagacatgttcccacatgaaacatctttttacatatctatgcaaatcacatcttgtccctcatttcctttggaacatcatccatcatcttcacttatgatcctccagcttttttttgacaaataatgataatttgcttccttaataattgtgtagctgactaagtttctgttattattgcactgtttatcaatctatattcgtttaaaattattgcttactcatcctgcttaattagatagttgtaaatctatattagtgagttgttataaatataaatatatttgtgagctagtatgtcttcattatttttcgaaatctactatattattcctaattacttagaaagtaaaagaattatattgaaaacatcaagcttttcaatattgaattaattttctaaaagaggaggactatttacaaaactttatcattctatctcaaaatgaataattcgtgatacttttacactaaattatgattcgaataattcctaatcttgattatcgttaaacaattgacgaagtacctaattacatgacctaatagttttattttaagtattttaacgagtgttgtcttttttaatggtcgtcttatccgaaatttagaaagatgattttctcacggaacaaaatgtaacaaggaaagttgtagctagcaacatcatagtgattgatcaacaaccaggttaagaaaagagccaatggtacatgaatttttctaataaaaggtatgacacacattcaatcacttaataatcgttagacaataaagtgaatggagagattaaagagacgtgttaaatgaaattaatagatatgtgtcattgtaagagacattttcacatctccatctacaacttctagttcactatctatcttttccttgtagatgtcaaaatctaatattaattttgaattggatcttatcctcatttttaagaaaagaattgatttttatttttctttctctaattcacttttgtgtcgtataaaaaaataacgtttgtaaggaaacgtatgttgaccaaaagactaatgatgatgtaagatgggtctctaaatccactgttatatttttgtgtaaagtcactaaccttatgcttttgtgggaattgaattctctctcaccatttaatttggatgcgctctagatggactagccaacttttccggtggatagttggagccaatgctccactccatattgactttatttttattttttaatcttatcctaacaaagtttttgacatattttctgattattttttcaactattaaaaacttggtaatgaatttctgtttttttcttttctggtcatgttatatgagttatgttgtttatttaattgtgttaaaacattgcaaatttctatgtaaatttaaatgtatatgataactaatgaccatttctgttctgcattatttttcatgattgattgaattctttttaactaaattcaaatgatatatatatatatatatatatatatatatatatatatatatatatataaagtatctaaatatcttttactttaaatatcttttatcttgaacagcatatagattatatattctcatttccatggaaagaataagggagggaatattccaatgttcatatacaaaatgaaaaaaatatcaaagccacctctgctcttagcccacgtctcttctctaagttcgcggacactgtctcaactatccacatctgttacactcatcatttttggttattaatgcggncctcaaagcaagagtcacattcacaatctgcactatcacatattatcttttctcttattcttttaccacacaatacaaccaaagtttcacgttttgttttgctctctttcggntaaaattactctactaaacaaaattttgatctttaggtttg

SEQ ID NO: 33069 - DNA, 917 bp, Arabidopsis thaliana landsberg
cgatactggagagactttttaatttctcaaatctccagactacgtacattgggcgtggaaggagactggaaactctactggattatagatgtgatgagaatgacaagacaatgctcacacaaaaagtcactgcagaggaggagcggaaagttctcttctcaatgccttcaaataaatccccaggccctgacggatatacttgtgagttctttaaagagacatgatcgatagtaggaaacaattttgtggtagccatccaatctttttttaagacaggcttcctacccaaaggagtaaactccactattttggccttgatacccaaaagaaaagaagctgcggtgatgaaggactatagaccgatatcatgctgcaatgttctctataaggtgatatcgaagattcttgcaaacagactcaaaatcattcttcccaagttcatctcttcaaatcaatctgcctttgtgaaagatagactattaatggaaaatctcctcctagcaacagagattataaaggattaccacaaggaaacagtttctcctcgatgtgccatgaaaattgacatatcaaaagcttttgactcagtccaatgggggtttctcaccacaactctacaagctctagattttccggaagtctacattaattggataaaggtatgcatctctacagcgtctttctcggtacaagtgaacggtgaactcgcaggctattttggtagtgagagaggattcagacagggctgctctcttagtccctatttgttcgtcatatgcatgaatgttctgtccaagaaaatagacaaggctgcaagtgataaaagaatagactaccactcgaattgtaagaagttaaacttaactcaccctctgtttgctgatgatttaatggtggttggtgaaacgaaacaaaaa

SEQ ID NO: 33070 - DNA, 941 bp, Arabidopsis thaliana landsberg
agttaaaggtggatgttactggttctgtcagtagatagaggtatttaataggggtcaaaatattagtggaaaaatgaaaagcttttagtatttcaaatatattttacaaattggttactaatttttttttttgtaatggtgctggtaaggacaaaaattctattatttgcttaggattctctcctttatgttttgatgtgagtatgtgactaatatttctgcaaacgatttagtgttgggttattagagaaagatatcctctggagaacgaaaatctggaggtgagatcattgctgatttgaattgtaaattttttatgaaaattttgtggtaatcaaatctagtggcgaaaattcatagacagagtcacagagatatgcaatttatacaacttttacgattatatatttttttgcggtttaatctatcaaaacatgtattataacttaaatagaagattattattatttgtttgtttcaaaaataaaaagagtttgcggaataattagtagaacatgttagagttaatataaatatgatagagaatgagttaaatagaatgttaattttgacacttctaaatttataattacagtaataaattatacataccacaggctatatataaaaatactaaaaaaataaattatatcactttaatatttatttaaaatgtgtaacaatctaaaaaaatggtctggtagtatattacgaattaaattttattagttatataaaaaaaaaatatgatgaagaggctcaattcctcaaagcaacttatgtgagagttcaattattattagatttctaaaattctatttttgagattggatttctaaaattctatttttgattttgaactttcaacgagttataaaattggaaatacaaaatcttatggaatcggattatctaaccgggtttaggttccaccgatcaga

SEQ ID NO: 33071 - DNA, 996 bp, Arabidopsis thaliana landsberg
gttattccaactatttagtaagtttaattataagaaaattattttctaatgtttttttttagttaagttaaggtattttcttgcttaatgattcaaatgtatctaccaatttttgatgtattttgttcaaaaaaatatcgtagtattattatgaaataattcatctgaatacccattatctaaaaaaatcattattaatcaagccaaggctgacactttttttagaaaaaggggtttcaaataatcattttatgtagcaaaaaaattattttcaacataaataaaaaagttgatctttaattgtcttttaattacctagaaaaggtttatttagtgatattaaaagtagagagagaattttgacaaataatagagagagagagtgacaaaaagtggagacctttcatcatcaaaggagagacccactttatatgtaactgaagaatcactggtgttagtggtggtgggttacatagtaagagctctctgctactattttaagaattatgaagaagattgattataaaggggttagcgttttcattacttcacaccaactaaagcctttctcgttagataagtaacaagcatttactcaaaagcttcttcctttctcactctctctctctctctgtctcttcttgtttgctttagacttaagatgggtgcggcgcattttagtaaggagagggtcttcagagggtttctggtttggttctgcttttggggactgatgtctctaacatgcgctgggagactcagtgtttcaaggcagaattttgaagtgcacaaacacttgaatcgattgaataaaccagccgttaagagcattcaggtttttgaatcttttttctcttaacctccattttcgattttttgccttttgtgtatttgtttgtatgtttggctgttaccaacctaattgattcagtcttaatattatagctttctgagattttatgagttggagatgattacttattgtttgctttagtc

SEQ ID NO: 33072 - DNA, 2002 bp, Arabidopsis thaliana landsberg
tctgatgttggaggaatttgccatccatgttcaatagctcgaggtcagtggttttcagacagaaagacaagttatagagacagatgcatatggttgtgaccaaaaaactaacctttcgtggggtacttaccacagctgctttgtacagtgctgttgtccgggcatatccagctaagacgtgttcacccggtgcaaactcttgggtgttcgaaggatcgtttcgctttgggaatggtcaaatgcatgacattggcaacttataggtcctaaagattccaaaagaataaatctcagtatacttcccaacgccacaattcacaactcaaaagttttcatatgtgttttacctctgaccgcttccttcttcatcatctcctggttcttcatcaagtacttcaactctggatgaaaagttttaaacatatttagattcatagatgaagcctttgcacttaacaagcacaactcttttgtgtgtgttggcagcaacaaataagtttcagctactaaactatcagatatgcatttgtgtgatattcaaaaattaggcataacatcatacagaagaaaggttcgaaggctcactcttttgtttctctatcgaagtgaataactttaaccacaaaccattcatccttatcagcactctctgcagtaactcttgcagcaacctgcataaatcagacattgtgagaatggaactgatcgcaatatcgaaagcaggtgcattataagaaagattacctgttcacccttaagacttgcatatgcttcgatttgatttctcatggaaggagaaagtcttattacatctgaatcaactttcatcctcttcctcttctgatcattaccttctgccaccacttatgtgattaacattacaagcataagtctttgccagagaataacattacagttcaattaaagtaacttgtgtgtacctcctaactttcttctttgatgccctgttggtccatatggaagcagcaaatccaactgagtaagcaaaatgttcgatacgctgcgcattaaacacaaagtccaaaacatcagaaaggtcatttggtggtaacattagtccacaatccattcaaagtctctaactttttttcattcattcaccattgtaacaagtataaagaagaaatggcttacgttacttcattttctgagagctctttcgcttgaatgtacaaattcttaagctttgctaatgaaatatcaccaggcttctcaactatctcaggagctacatcaacattacaacaaagcttaatttagcagtatctaaattaatcactaatctagattaattttctttaattacttcatgatccaaaatcaaaactttcactgataataattaataactaatcaaacacaaacatatccccaacaaacaaaaatttagtctcagatcatcacaaatttgttagaacagaaaaataaattactaaaattgttctgagaaattaagtttaaatagaaacacttacaagcttgaagctttttatgcatcttattgatctcaaccaaaacttcttcttggtctttccttaaccgaacaagttccatcgtgttttccaaaattccgacaatgtctggtgacgacattaccaaacaatcgtcttaacgaggaaacaaaaaatatggtaagaaaaagataaccagacccaataataaatctgaattagattgttcgaatgaatcacgaagtttttgatctctgcagctggtaaaattagattgttcgaatgaatcacgaagtttttgatctctgcagctggtaaatccaacaaaaaaaaaaggttagatttttcagttctcagatttttttctttaaataaaaagatttcagggtttttttggggtaaaaaaggaaatgtgattcgtaggtcaagaagaatccgacatcgtttgggacgaagaagaagaagctgctttggcatttattggataaaaaaagcccataaagggaaaatgtttttaaattgtaaaactt

SEQ ID NO: 33073 - DNA, 1167 bp, Arabidopsis thaliana landsberg
tgtcatggttaatggagtaaagtctaaggttaaaaagtctgagagtagtaagaagatgaagagaaataagcttgaagctgaccatgaaattgtaagtatgaacgattctcttctatatcttcttctcattacagtttcaattattgtcgtcttaattgctttatagatttgagaatcagtagtctttgatttgcaataggaaagattgatttgagaatcagtagtgtttaatgcttatcggtttttgtataacagcctattgtttggaatgaccaagatgaagagaaagtggtggaggagatagtaaaaggtgaaggagaggatgatgaggttgagagatctgatgaaccaaaaactgaagaaacagctagcaatttggttctgaaaaagcttcttgtgagttgattgaattgttgctcttatctcaaaattgtgtaacttgtttgtgatgatgaccattgttggggtcttgttgttgttgttgttagcgtggagcaagatactttgaccctcctgatgctggttgggtgagttgttatagttgtggggagcaaggtcatacaagtttcaattgtccaactcctactaagcgtagaaagccttgctttatatgtgggagtttggaacatggtgcaaagcagtgttcaaaggtgcggttttaagtttgatggtagacccatggaaggtttaggactagtcttattttactgcatatggttgctgagtaaagttttcgttgttttgacagggacatgattgttatatatgcaaaaaaactggacatcgagctaaagattgtccggataagtacaaaaacgggtctaaaggagctgtatgtttaagatgtggagactttggacatgacatgattttgtgcaagtatgagtactctaaggaagatttgaaggtaactttgctgatgatttctttcatataccttactgttttgttgttaaaaatttagtcaaaacaaactctgtttaaacgaaaaggaactgatcatgaccatgtttggatttatcattttttttcctgagtttccttaacttgaggagatatatcttctacacacagctggtttcacctttcttgagtttctggttgctttgctataagatagatcatatggtaatgctattttgctgtattttctttgacaggatatac

SEQ ID NO: 33074 - DNA, 1691 bp, Arabidopsis thaliana landsberg
accgcagtaccacaacaagcgtttgaggatcttaaagcggccttgtgtttagcgcttttcttatctttgcctctgtttgataaacaattcgtggtagaaactgatgcgtgtggtcagggcataggggcggttttgatgcaagagggacaccctttggcttacattagtcgccaattaaaagggaagcaactacacctatctatctatgagaaagaattgctggcagcgacctttgcagaccgaaaacggcgacactaattgctgcagagacactccacaatcaagactgagcaaagaagctagaagcatctatcggagcagcgctggaacacaccaaatcagcagcaggggctacctaaacagctcgaatctgaccacgagatccagcatagacaaggaaaagaaaatgtagtggcagatgctttgtctcgggtagaaggatctgaggtgttgcacatggctatgacagtggtggagtgtgatttgttgaaggatattcaagcacgctatgccaatgactctcagttacaagatattattactgcacttcaacgtgatccagattcaaaaaaatatttctcttggagtcagaatatactgagaaggaaaagtaagattgtagttccagcaaatgacaacattaagaatacaatattgctttggttacatgggtctggtgtaggaggacattcaggcagggacgtgactcatcagcgtgttaaaggactgttttactggaaaggcatgattaaagacatccaagcttatattcgcagctgtggtacatgtcaacaatgtaagtctgatcctgcagcatcaccggggttactccagccattaccaatccctgataccatttggagtgaagtgtcaatggattttattgaggggctaccagtttcaggaggcaaaacagtcatcatggttgttgtggatcgcttgagtaaggctgctcacttcattgcattatcacatccttatagtgcattgacagtagcacaggcttacttggacaacgtttttaagttacatggctgccccacttcgattgtcagtgacagagatgttgtgtttacaagtgaattttggagagagttcttcacgttacagggagttgcattgaagttgacgagtgcttaccatccccagagtgacggacaaactgaagtggtgaacagatgtttggagacctacttgcgttgtatgtgtcatgacagacctcagttgtggagcaaatggcttgcattggcagagtattggtacaacaccaattaccactcttctagcaggatgacgccatttgagatagtgtatgggcaggtacctccagtccatttaccttatctgcctggggaatcaaaactggcggttgtggctaggtctttgcaggagagggaagatatgttgctgttcttgaagtttcatttgatgcgcgctcaacaccgaatgaaacaatttgcagaccagcatcgaactgaacgtgaatttgagattggggattatgtctatgtgaagctgcaaccttaccgccaacaatctgtggtgatgcgtgctaatcagaagctgtcaccgaagtattttggcccatataagatcattgatcgttgtggtgaagtggcttataagttggctcttccttcttattctcaagtgcatcctgtgttccatgtttcgcagctaaaggtgctagg

SEQ ID NO: 33075 - DNA, 6392 bp, Arabidopsis thaliana landsberg
  unsure (1)..(6392): unsure at all n locations
attcactgccttaggattgtgcaccgctactagctgatcttggttacaattctgggttttttactcgcgccagaaacacgctgttgactcaaagaagctgaatctgtataaagcatgtgagtctgattcactgccttacgattaggaactgctagctactaacttatattcttttcaataaaagggttttgaactagagccagatcctacagttctaacctgaatctccgccgtatggtactgctctaactattagatttatttttcacgttcnnnnnnnnnnnnnnnnnnnnnnnnnnnnnnnnnnnnnacagtgcagcttcgtgatcatcttcaacagatgattcattggttggatgaagctattattggagatatgctgcctctatatgaacgtcgtaatgacatgcgtcaggttttagatagagatagaagactgaggtgtttatttaaaagattctatgatgaagnnnnnnnnnnnnnnnnnnnnnnnnnnnnnnnnnnnnnnnnnnnnnnnnnnggtcatcgatcacaatctgaacaaatttatggcttctccagagtacgaccagctgtatgggtgcgatgtagaattaaaaatcaagtgaagatgggagttttgattgagtttctagagtcaagtgttacagttcagtcattaggtactgtatatagtgaactacctgacgatgtaggagcggaggacattcacaaaatagttgtgctagatatcagatttggtaacatagataggaacttaggaaatcttttggtccaagcagaacctcgtaatgggtcagcagctcacctagttccaattgatcacgaactgtcattcttcaatgatgcacatccctacatcacttgtggcgcttgttggatcaagtggttaaaaaagattgataaagatttttcttcgcagttggtaaattacgttgcagccctcgatcccgatagagatttagaatttcttcgacattgtggttgggaaccgaatcaaaggtatattgaaaacttcacggtctttgccacattcttgaagaaagctgtttctcaagggttgacagctctgcagatcggattgttggcgtcatataagtgggaggaagatttagattacaacttgcattgtattgttgctagtgttcaaagggaagacaacaattttgttgagagtgtgggaacacgaatagagcaacgcttgagggaatttcatgagaacctacatgggaacgcttgagggaatttcacatttgcttattattaggatggtattggcctattagggtttgcttttaattgtacttttggattttttagatttaattttcttgtttaatgttattgggcttataaatttatgaaatctgaaacattattttgttatgcaaccaggagacgatattttgtttttacaaataaattaaatgatgatgtttgaactttacggttttattaatttagtattaaagttatttagttttataatcgtggtgcaaataaaaaaatagtgatttgataaaataataaaatataaccctaatactaccaaaataatgatattacaaatttatattaatattgatctaaaattagttcctccgtattaccgtttagtaatattttaacttttatgagtttaaatatgatgacccgtgttatataagggattaaattttatttagtacaaaaagattttatattatatattataaaataaagtaatttttttttgttagtctctatatagaatattaaaatgaatatattattattacatggttaatatgataatttatttgtctcacaataatagaattatataaagatgagaagtgaaatataatggttaactttttagacagtaaaaggaaattcttctcaaagatcttcgatatggaggaaactcttaaaacttagagacttggcaaaggatttctatcaggttgaaataaaaagtggcagagggacatctttttgttatgatacatggtcctctttggggaacttatttgatacttttggagataagagggtgcattaatttgggtattacaaaagaagcctcagtgggtgacgttttgtcctctcacaaaggaagacggcatagagtggagactttaaataaagtggaagaggtcatcaggaaaacaagggtgaggaggaaggtcgaagaggaagatttgatacaatggagatggaagacatgttttaaacacttctcctcaaacgaaacttggaaaatgctgagagttgaaaaaccaatctgcagatgggcgaaagggatttagttctcggaagctacaccgaagttttctttcatcacttggcttgcaatgcatgatagactaacaacgggtgcgacaatgagaacgtggaacacacaagtggatactacctgcaaattctgtgctgaaccgatagagacaagaattcacctattctttcagtgctcttattcaacacaagtgtgggagaatctcacgataggcctacttcaaggccattacacttcttcttgggaccgcactgtttcgctcctcacatgttcctctcttgggaggaaacctcttatgctgctgagatatacacttcagatcatggtacacaccatatagagagaaaggaataatcgccgacacggagaggagaaccctatcacacctttgaccattggaaaaaacatcgacaaaaacatttgcaatcgaatcactcttcttcagaaacaagaagcccaaaatatgatgatttgtttgtattttggctttccactaggttttaattggcatagctaagacaaagtatgaacctaacaactcaaacaaaaagcacttgatgtaaccatgtttttttggtgaataaaattttgcatttattcaaaaaaaaaaatatatatatatggttaataacaaattaatatggtaagttagatatcaattcttatttgttcagtttgattggttattctattttttgaaaattaataatgtatttttgtttttatgatttaattaaattacataattagtatttaagtttttatctttaatgagctgaattaatttggtaattgaaattatacagagggatggttactttcaattatgaacttccaaaataatagtatatgatgttttaaactcttttaaatttaaatattccccattctattataataattttaaaaataaagtttaaaattgattatacttgcgcgctataactaaaccattcaacaaaataactaaataaactaatataaacttataaatttagatgattgttaagtcaattttcccctatcattcggatttggattcatcatggttttatttataatatatgaccctcagtctatactttatagaattagaagtaatgaggctctacttcgattagtttgagatctgattttcttttcttagtcaaagcttttaaggtagtctcattttaaacaaccaaacacaattagctatctcattaattagcattttttggcatactaacatctttataattaactttttaaattataattattttattaagatatttatgaaaagtaacaataaacaatagagaatataaatgtaaactttaataaaataatatacgaaaataagaaaaatgtaaaatttaaattttaaaatacataaaatataagaatagcaataactaagataatacgtttcagagatattataaaggaaattttccaaattttcaaattttcaaaaactagaaaatatgttaatgttattatagaaatttatgaattttagtttaaactaaaaggaaaatactcctaaaatattagaaaaagtgagactaaacaactgaatgaaaaagtatatttaagtaagaacacaaataaaaataagttaatgatggtcgaagaaacttttagttttaaacaaaagaacaaaagagcaaaatatatgtatataaggttctaaattctaaaatagtgggtttgtgtataaatagtcatctaacattgataatggaacatagatacttgaaatatcaaaaatatattactctataatttctcgattaatagcaagaaaaaataactaatagataaagataaatataagtatgttcagacgtgtaaatattttggtaatttaattgttaaaaaaaagaataattgctttactaataacaaaatctttaataatatgaaacaagtaagaaaaaatgacacaacatatttgtaatattttttaccaaatttaccctataaactttttatttcttattaaacaaaaatttaacaaacataagtgatactaaagatattattaaaaaaaaacatttctttaaattatatcaaacaatatatgaacatttataattatgtatacagaaataaaacttagttgaaattttgaaaatacacaaaaatgaagactaaacgaatttcggcggccatctaagcaatgcttgaatgcctataccactttataaaacacttatttacttttggagacacgagatcacctttttttttcgtgtcccttttcctctcaaatctggtgctctttgacaaaaggtcttcttcatggtcgacgcatctcgagttggagccttatcactccacatctgctggatacatcccgtccgtatctacatctcttcactcttcgttatactttccaagcaacgatccacagtttatggcgagagcgtaatagtaggcgacatggggggcttgctatcccggtaacgcaacttgcaaagatcatcgacaagaatattcgaaacagattcagcacggctataaagtctgggaatacacgactccaaggcgggctgcagttttggtttcaaatccatagctagaaatcattctaattgttcttaactcttttagattctttaaaatcatgtcgcattcattgtaacaatcgtttttttgggtgaatatatttttacattctttcaaaaaaaaaaaaaaaatatatatatatagggcgccggcaaagaagagagcaacggcgacgacgagattgccggagaaattattgcaaagtggcatgtttttggtttatcgcattattaggagctagttaggagactcacgccttttttatttctctctctcgtgattttgtactaaacaattaacctatttatttatttatataaacgatggatatatgtgaataatgtatatagaaaatccactaacgtttttaaggttccttccttcacgaatatatcacataagaatcgtcatgtaattagggtttttgtgtttttactctgtgagattttcaatcgttcacgtaacattctgtttacctaagggaattaatatgaatccaataaacgtacatatatatttactacatatcaaaattaacaaaacttttagttacttacatgatatgccattaggtaagaaatgatataaatgtctcttctaccttaattgagatcattctcaatttctttccattttgccctcctctctttcggaattagattagccaagtagttttttctacaatcattgtaacaaaaacatatttgtctaacatagtaaattaatctctatattattaaaagaaaaaataaaaaacgagaatatagcttgtaacacacatataagatgttttgtaattacttgttaaaagagaattgctcatctagctagctaggattaatcaaaagaacatatgcagttaatagatgatgaagttgtgtatactatatagcaatctcattaattggcatatatgaacgaagaaggtcagagcttggggacatagtgagcgtcactccatgaacgcccgcactcaacatgggggctccaattgctgttgacatgggaggctttgtagcgtttccagtcacgaagagcgagagttagatcagagatcttagcaaggatgcgccggccccagttggcatggacggtggtgacagcccccatgtcatggctgtcttggcagaagccactgaattcggccgtactgaggaagccaacgttgagaccaagctggttaaagaagccagagtctaggagattcttgaggacgtcttgttccttcatgcccaaagacttgagcctcatgtcgtaccatttatggaagagggagatggtcttgttgttggaccgggcatggtagaatcccgtgttgatcaattgtcctctcacgttatttctgtccacgcttatatgcatatccaagctcacgtttagccgggacaagggactccttagccacatcacgtccgtatcctaacattgtatatacactacttgtttgagcaacaaattaagtgttttgttatatatgttacaaaatcaagggacggacctaaccgtgaaaataatatggtagccgcggctgaggacgtctccgaccaagcgagtcctc

SEQ ID NO: 33076 - DNA, 667 bp, Arabidopsis thaliana landsberg
ttttctagatacgctgctgcaggctactacgagaaacagacttatgtttaatacattagtggactctaggttttggctgggatgtttaacatggaggggtggatacccaacgtgcaactacaccgcatgattagtcggatagtttagattcggatcactcattttaattataaaatttagtgtatagatttttatcggacatacatacttgagtttagtaaacaaccaaacataactgtacgttacaacattctgtttcctctctttttctgccatcagaaaaagacgcgtacacgtttctttgcaactggttcgagaaattcccagagcacaaaggaaatgagttctacattgcaggcgaaagttacgcaggttaaataaaaatcatcttgtgttttttttaactaatatgtctaattcggttttataaaattttttaactaatatgtcatcttctgttaaatcatcttgtgtttagtttttatattgtctaattcggttttataatttttttgggtaaacgtgtgtgtgcaggaatatacgtacccgagttagcagaacttgtgtacgataacaatgaaaagaaacaatgatttgtcgcttcacatcaatcttaaggggtttttggtacgtttgtatgaatctctcgatactagctaactgtaaa

SEQ ID NO: 33077 - DNA, 514 bp, Arabidopsis thaliana landsberg
ttttaatcatacaattatatcgccgattaataaggaactatgtttattgtctaattgttatttttgactttataatgttagctgtaaaaattttagctataaaaattgcgagtttaaaattctttaaaaaacgacatttctactatcgccatctaattgacaggaaagagtttgtagacgttttaccaaaacaattattatttattttatttttttgtcaattaccaaaacaaataaaaacaagaaagaaagaaaaaaaggaaagagaaaaattcagagagcaaggaaaaataacaggaaaacgaaaaagcagaggagactcacacagaaacatcataatctgtaaaacaacgagaagaacacaagtaaatactgacatcaatagaagtggtggacatcaagagaaatggttcatggcaatcattgtcacagaggctgcagcgttgttgtgatattcggtcgatgagaacaaccttgtacttttttccatgttgtgtcatgaaagtataccctt

SEQ ID NO: 33078 - DNA, 5024 bp, Arabidopsis thaliana landsberg
gccctagcttgatcaaattagaaatcggatcagcgaatacaacagacaaagtaagaaacacagaaagtggaaaattgcaattgagtatcgacgaattcaattgaaggaaacaatccgatcgaatgaaagcagaattgagttttcccgatttcctccgccgaatgatcaaaaaatgtgtttcgatctctttcgatgggtaaatcaattaagtacaagccaccacccccaaagccaaaggcccaaaccaattaagaaatcgtacaatctcccgggttttggtatagggcagccgcggtttgtttgttttttaatttactttatccattttttcttctctacgtgtaagaaaaatgagggacaataataataaatgattttttcacctttaattttacttttatgaccgcgagataaatcgctataccttgcgtctcggtttcactagctttgcggtggtctgaactatacaaggtgcgtgatagagttatgatggcgcgtgttttaaactcagttttttctgttgtttttttttatattttttctgttaatattttcatatacttgtcattcactacattagtagtaattaaaattttgtgagatgaaagactgctaccaatgtaacgaaattttataaagtaaatgtaaatgtacccacattctcattgatttcgacatcttaattccatttactatgcatttatgtgatataattacaagatattcaatattcatgtcaatctatatttattactgtatattatattttttttgattaaaaaaatgcaacaattttagttacatatcaaaaacacaaagaaattggttatatagcaactaattttgttaataccaactcaaaattaaaaaaaattagttgataatattatcataattataaagtatgtgtcgttaatatggcattatgagaaaatatattttcattttaaatagtagagagtgtctcagagagtaaaatggaacctaattcgtctttccatagttgccattatttttatttgtagacttagagcatcattattcatgggttctaagaaaaatttagataatttcttaaaatattagataaaataaaatatgaataaaaaataaaataaaacggcttttagaaaagtaaaattagttcttaaataagagatttttgatacactctgtcttccacttaaaaattccctaatatttaattattatattctacatcaaaaatgttaagaattttgtctaagaattcatcaataaggatgatcttaaagcatcattattggtagtatgttacagtaatcttagggtagttcttatgaatatatataattaattttaaaaattttgatgttaagagtttggttaaaagattaaaattttggtaataagcaatggtgggttcttaagaaaaaaaatatatatgcaatttccacattttctagcatgtgaatctctgcaagaatagttcgtttatgagagagcctaacatcaacactcagaagtgtcttttgtatccaaatctggacagacaaaccaaaaaaaaaatgacatgcaaattgaaatatatttaaacaaaataatttaagatgaaaaattaacaagaagatcatctcttaacagaaaaaaataacgtataattaaaatgcgaattgacataaaatgaaacaaaatatctatggggaattgacaaaaatagcaccaaaagaaaatatctttcaaaattagcacaacatttctaatttcacaaatagcactataaacttcaattaaacttaattaaaatataagatagaaaataaaaatgagagcaaatactaatctaatattaaattgaatcatttttttttaaatagtgaaaatatataaaaatattactacctaccttctttagaacaaagaggatctctaacaggaactttgactccataattgcccatggttaactgagagagagagtgaactggagaagaaaaatttagggttagcatcagggatgagagactctcattaattcagggttgccatatgttctcttatttattgttgttgtgaattatttactacattgtcatctgttttttgattgatgctgtgaaaatcataatgtttctcatgtcaaaaattctgctactaatgacaccaaagcttattatcttttgtgcctcttcaagactcttatgaaattctcagaactagttgttgcatacggttaaacaaagggcttgttctttgtacctctgcagttttcagattatggtcagattaggcttcagacttgcaggatgtttgcttagtgccaaactttgaattccataaaaactgcagagaggattcgtctctgttttctttaagtttgactccatttcctttaacatttttttgcataacatctttatttaatttacaacattttgaaatagttgtcaaatgttttccgcaaaagtaataactctcaaaaatcttgttttttaaaaaggtttgaatatataaatatgaattggttgataaaaatgtttttccagtatttcagtgtggctaactcggtttggccttggacccatcaggtatgcccatcaatatttgctaaattgcattatcatatgcttagctatatatgaatgaataaaagtcttataattatgatgtgtgtacaactacaaagttttccttggagtatagtttgaggatttatccagaagtagcagaagaagcagcttcagactcggagagttcttccatgagttccttttgctccaaagcagcacaagccttgcaataagaataatgcaaacattcttcaagattcacattaacttatacaaacgtaagaaaaagtttaaggtttagtgtttaggacctgcactgcgtcctctaaagcaccgtcaagaaatgttgtaagcgcaaagttcatctttagcctatgatcagtcactctactgtcctgtaattttcagacataataagcaaaacagaatccatcaagttttcaaagcaaggctctggatccgtgtattaccttataattgtatgttcttatcttttctgaacgagctccagtcccaacctgtttccgcaagaatcgacatagagcagaataagatgaatatttgatgatgaccttgagtttagaaagactatggggataataaaatgaagtggacctgagatttcctttcattccttatcttctcttgttgttcccttacttttatttcatacctatatatagacatataatgtttcaacaaaaaaagactaaggtgggacttgatagaggaagaagaagagtagagagtttgctccttgaatgttgcttacagttttgctcgcagaagctggaaagcacgcgccttattcctaatctgggtcctttcttctgtacagaaaatgcgaatacctgacggtttgtggaatagatctatagccgtctccaccttgttcacattttggcctgcaccaagacctcttttcagtattattagcaagtgaaatgtgagagaaacagaaagcgaatttctttagcataacctccagcgccgccagatcttgcagatgtaagttcaatgtcctttgggtcaatcaccacttccacttcatcagcctaaaatgacaaaaaaaacaaagcagagatgacagttttggactggttaccaattatcaatcagaatatcgaaaaatggaacatgcgaaagctagtttacctctggcatgatggctacagttgctgtagaagtgtgtacacgaccctgtgtttctgtttgaggaacacgctggactcgatgaacaccagattcatacttgagcttgctatagacacgatttcctttaatctccatcacacacgtcttgtaacctccatgttcagccttataaaagtaggaagattaaaaagctatactggtgagcaacatgtctctaagttgttatgctctactgccattttcattacacactccttaaatgccaaaacaaaacacagagagcatctcacctctgagcatgaaaccattgaaaacttccaagagctgcgctcgctgtacctctgatacatccgcacctgcaagcaaaagaataatgcaaagcatactgattcatggtaggatctgaagtttttaattattgcacttgcttctcttagccatgaaatataggaacaataaaatttgaaagttttttaagaaataagactgaaacaaaacggtgaactatcggaaggcattaaaatcagatagaggatcagaagaaatcaaggaaagcatgtacctacaaggtcaccagtccaaattgcagcttcatcgccaccagttcctgctctaactgcggaaggaactaagatttcagactcgtccagaggtagataggtaaaacaatggcgggaagtccgagcaaaaggcagtttttcaagaaaaaaggccagtgtagacaaatgatactacttgtcgacatatagtttagtcagttaccttcaagcaaaatgtttctggcatcaagaggatcggaaggaagaagtaacacctgacacaagccaacacaatgttacgagttgagtatcagaatcaaatttttaaaatgagcaacattcgattttcagctgccgaataagtcagctatggaaccaaggctctaaaccttaagttgtttttcaagctcctcaatttctttagtgagcgagttgatttcacttcctatcatttcagccatatcttcatcatctccagcctctttcgccaaaactgaagcaataaaccaatcagtaaatcataaccagcttccgaggaacagaatcaaagcaaagtaaaagaaaggaggagacttgaagggacctttgctttctagtaactgcttctcacagtccttgaatcttctgaagactgttacaacctaaaattgaattcaatgttaagaaaccccgaaaaaagctgcaaattttgaacactaaaagaatgtgcaaatacctcgtcaagctccgacatggattgtgccagtttttggtattcagattgattcgaaacaacatctgg

SEQ ID NO: 33079 - DNA, 3530 bp, Arabidopsis thaliana landsberg
tggtttttttagttaggctgaatttggatcttattgtggggggggattgggctgtgtaccatttttttattctcataaattcataatagtagtaataataaaaaaagaaaagaaaaaagaaaaggaagactattgtatgcacaattaaaccaaatattgaacagagataaccagtaggtacatattgatgctcaagaagaactagtagaaaccatgtccccggttcagacttaaccaactcaatgtctctcttcacactcaccaaaccaaaataaaaccaaaccagcaatcacagaacccattttcttattctttctgtcaaattcagctttgctctccacgaccaggggacggtttagtagggctttcgagcaccagtagctgagaccgagtcaccatacgagccattggagacgtctgatacgcctgcaccgggctaaaaccctgggtcgaatctccacgagcagttgctctctgagccgaatgcgagctcatgctcgagaaggcgtaagctcgccctgatgtccggtacatcctcctgctagtcatcctttcttgcaacgcactcaactcagacgacagtgattgacaaagcctgtcgctggattgagcagacggtgtctccgacaattccctctcacggtttctaagaatcccaactgccccgctcaggtcacccccatccgctaaaaccctagcctctgacatagcttgtgaaacaaggaacctgtttagttgcctgtcaacctctatggacaccacttctttccctgttagcttcattggcctttggatgcttagttctccagattcaacatggactatctctttggtaacaggatctttgtagacgcatctaaccttcagcaaagacaaagattcagattccccagacccattgtcgcagcacggaatttctagaagcaccaggaagtccctttcttcttcagcgtacatgtctcccacatcgattgtggcggttcttgcatcaggtgctatacggcttctgtagcttcctgcttttatagaggatattttcaggccctgctcatgaatgcactcgatttcaacaacttgttcaagaatcacgacgctgagaagccctccaatgcattgcgcaaaagcatcctgaatcacagtctctgtttcgatgaacgaaaacgtgccactagagacttcagaaattgtgtgcattagctcagcatcgtgatctgagccaaacccaaaggtatgaattggaatccggcaagaactgggaagcaaagactcgtaatctgttctcagacggaccccagcatgagaaaaggtaaagttgtcctgtccatcagacaacagcatcatcccggaaacagggttcttccaccgtctaccctcaatcactctcgcaccaatcttgagcccctctgcaatgtttgtcccgccgtcagcaaccaaggagttaacagcctgcatcgccgcttgcttccctgtctcagacatcagtctaagagggaatagtctgcgagccatggaggagaaggagataacagaaagcctatcagtctcaccaagattctgaatcacaaaactcattgcatttttcataagctccattttgactccatccatgctaccactcacatcaagaacggtaataagatccaaaggagctcgagcgcgcctagcatcatcactcacaccctcagccttaagatgaaccagaacagcaaaatcagcacgagagaccggtttggccagtgcagagacttcagggaagagtttaatctcgagggcttgatgatccgaacgatgaccatcactgtggatttgggtatctccttgaggtaaaggctcgtcatcttcaaaacccctttgagccacaaaggtagggacagagtcaacatcacacaaagggacttgtttccactgagttctgcataaagggcaaatcctgtttccgtgtttgacgttggaggtaatacagtcaaaatggaaggaatgagagcactctgcagtaaaaatagccttcccgtcttcctttctaatctcatacaagcaaatcgcgcacctgccctgcaaattttcaaagaaaacaatctctattttacaatctttaaatcttagacctagaaacctaataggaaaagggacaactagaaatcaacactaattaaaagttacaacccattcggccacaaacgataaaattgcgtcaaccctaaaccaaaacttaagccacaaacgttgattatatatttaaaccaattcgatgatgaaattgcatcaatttcgcatcaccgacataagaaaaagagaaaatattggatttttggataatacagagatgttagagaggagtaagagagagaaccttagagaaacggaggccagaagaggaaggagtagagccagggcgagaagaagaagaatcgggacggttcgggtcaacggatgatcttgaggcatcgctgggagaaggagatgaaggatcgagcgttttgggaagagtgagacactcgttcaagttgagatgcgatttcgattctcgcaagttgttcgggttctccattgttacactttccgatttcgattctcgcaagtagagagattaagatggagaagaaggagaaagttgataagatcaaaaagacttggaagacgaataaaaagaagaagaagaagaagaagaagcggttaccataaagaagaagaaagcgaattgttcaattcaaatcactttagtaaacgtcaactatctatttattttttaatttaacttttttaacgactttttgtttacttttttggctttttctactggctgggggagtcatgggacggtggggaaactggaaagaaaagactcggatacttcttttaacatcacaaaatagttggagtattaaaatctataattgtaaaattatggggtcttaaattttaacttcgaagtttgacatgtttataaagttgtcgctctataatttgggttttctataaagttaaatcagtagtattttcaatcatcaatttgtgttgtgtgatcagactgtatttatatacatgaaagtagaacgttgcgtttcaaaaggagagaccttagccaacgagtcggttcctgactcactaaattagattaacgacagagattaggtaacctacttatacatatatatatactattattaactctctaaaaatcaataactaagaccctaaccatctctcctcttaggtcactcgtcgtcagaaagacaaaccacttcattgttgctctgcaatccactgctcaagctctgttgcggttgttgttcttgctgctgctgaattgacacagctgaatatgtcaaagcttgaggaggcactgacgaggttggagtagctgtggcgacgggagttgaagaggatggtctatatgagtttaggtgtggtgcaggagaacgcagacctggatttgttgcaggagtacctgatggagttggagctatgttggatatgagaggctgtctggaaaaaggcattggacagaccgcagaattataaggaggtct

SEQ ID NO: 33080 - DNA, 503 bp, Arabidopsis thaliana landsberg
  unsure (1)..(503): unsure at all n locations
tacagacgacattggatgtgaatatcgctctacgcgattcgtgcatttcacctgcaaatattgttttgtagtactttttatgttaaccatatgtattcgtgacttttatcgaatagaaatgcacatccaaatgcgcactggttaaaataacataagaccaggagccgccaaattcgaaatatggaggttttggcgtactttcttctccaccaaaaccgttattacaaatgggttggatgaaattttgggagatgtgaccttgttatggggcaaattcataannnnnnnnnnnnnnnnnnnnnnnnnnnnnnnttattgtgcgacacaaagcggtcctagatgcattcgcaccatgtttgttggatctttgacgtacgacatatcgtgctgccctgcgtgttcccggcttaacacacaaaactgcaactgaccgagttactaactctgcaactaaccgtgagaataactgagcagcacctatatttgtccgacgtaccgacata

SEQ ID NO: 33081 - DNA, 1169 bp, Arabidopsis thaliana landsberg
  unsure (1)..(1169): unsure at all n locations
agaaggcgaaaggcagctgatgcgccaagaaacagggacgcgcagctctgtacgaggagcgggcgaaaggaagacaaaggcaacgctgaaaagccagacaacaatggccaagggcccagaaaaggaagacgagcagcggcaaggaacaacagaagcggcagggaaccgaaaggcgcgaggggggaagcagaggacaagcaacggcgtggtgacggcacgggagagggcccaaccacgccggggaaagccgaggacggngtcaatggggcacccaangacatagccaaggacacgcaggctgcaaatgggaccagagcaatagttttcgagtatgggagcaggattcaaatcttcttccagaatactggcacactcacaacagaaaatcatccaattcatcttcatggacacagcttttatgtcattggctatggcacaggaaactatgatcaacaaacagcaaaatttaacctggaggatcctccttacttgaacactattggagtcccagtaggaggttgggcggcaattcggtttgttgccaacaatccaggtattcttcttcacaaaactcctaaacatcacaacacatatgacatttgctgataaaatcttcctttcataatgaatagggctctggttattgcattgtcattttgacatccatcaaacatggggaatgagcacaatgtttatagtgaaaaatggcaagaaggtgcaagagagtttgcctcatcctcctgcagatctaccaaagtgctagcttcattgaaattaacaaatggtgacagagaagtagttttccagaggaagattttttatggtaacaagcagggaaagaaaactacatacatccatttgccttgcccttattcattattgtagaacatatgaaatgtcattcaaagggatagagactatggtatagaagaaaaagagtaagattcttttattcagatattttaattatatggcggaatgcgatgttcgaaagtgaagagtaaaagtaaaaggattatgaattgctacaaagtgtgatgtatgtaccacataagggaaatccacaaataataaattcttctctcagacattaaaagtttaattatgggttaacttttctgaagtccagcacttctctccagttccagtagccaggaagaagaaaaagc

SEQ ID NO: 33082 - DNA, 961 bp, Arabidopsis thaliana landsberg
taccattctgagacttgtttttctttttcatgtaccaaaaggattagctaaagttcacgagcagacgagggagccgctcgatgataaaagaatagaggaagatagttcagaagaagaagaggaggaagaggataaccaagaacctcaagtagatgtaactcaacttacagggagacaaaagaagttgtttgagttgagacttaagatggtaagtctttttgtacagtcattagtaattcttttaaaaaatccaaagatcgttttatatatgtaactcttccataacgcttttgtttcagaatgaagcaagaaaatccaatcagacggatgtcgggagtgaaaagaagaaaatggaagcaccaacagagacaaaaggaatctcaaaacagaaatggttggaggggaggaagaaaaagattgggaaacttcttgatgctaatggtttagatatgacacaggcttatatgctcgatactcaagaagcagctgaatcaaaatacaaaaaatgggaaaaggaacctacgcctgcgggttgggatggtacgtgaaattcgtactgaattgaaactcttgtctcttctcatttgttatgtttcacttcgatgattacacaattattgagaggctaatgtgtgaagtgttgtatttatcttcagtctttaaccagaagacgttatacaacgcatacaagaaacggacaaagaacattcaggttgatctagaggagtataacagaatgagagcagctgatccagagttttaccgtgaagcttcaagcttgcaatatggaaaggtttgtgatttgtcgtttttggtcaatgagagactcaaatctaaagtaaagagtcatagaaaagctcaatccttgattaaacttttgcaggctccaaaaacttcgcaagataagatagataagatggcaaaggagctcttagacagagagcaaaagcgacaagagttt

SEQ ID NO: 33083 - DNA, 2133 bp, Arabidopsis thaliana landsberg
caaggtaaatctatttcacacaccttacacatacttctcaaaccagctacaggaaaaagtgcacaattgaacttagatgtactgaaaattcgagatttctgctatgcataagcctatatgaccttaacaagcgaatcgctaatacaaattgactaaaggatgaaaatttatgcacttatatagtctaaagtaactcagaaatgaacttagacgtactgaaattttgagatttctgctatgcataagcctatatgaccttaaagagcaaatcactaatacaaattgactaaaggatgaaactttatgcacctatatggtctacagtagctgaaaatcgaacattaaactctagcacaagtgctacaaaacaaggaagaacaaatcgaacctaaacaaatcgagattaaataattgaaatcgaaaagaaaaaactcgcctgccaagcatcgagagttccttggaagttctgaagccagcgatcagcgtgcacacgcactgtatcatccgggtgatgatacagtgcgtttagggcttctttgaccgcgttctgatgctccatagctatgaatctttacgcgttattcgctcgtacggtcaccaaatcacgaccagagagaaagacccagattgagaaatagaagaatttgcccaactgaaattcgggattttgtcaaatcgatttcgcccaacaaaaacaataaaaataaaaactttttttttccctctttgtcaaaaaggtttttttttggcgcccctcaacttgagtgaggaagagagatagagatcgaattttgatctgaaagaggatgaagaagagagaatctcagccgttagatacaattactttgacttaaagtcaaatccttcttcttttattttgaagacagaagttgtttactttttttcagttgttgcaataaattgaagacaacaaaaaaaacgtatcattgattcatcataacataaagattatacaaaggacaagatttaagaccaacatatgttactgaatcaattgttacaagttatataataggacaatacaacagtgttttataaagtgttaatctctctggtcactctcatattctatcttatgatataacagcaaaatgatacacacgcataggataaaaaataaagggttgcattcatttttactgcctacaaaacacatccatcaatcagagaaagactcttttttatgtggttcggttaaagttcccatcaacctgcatatggagccactccggttgagatactcgggtttcattagcttcttgttgctcgtatattgttcgatgaacgtcaatcggtaaagtcccgagctgatacaacacaccaagagcttttagatttagtagctttgattaagaaagataagatccttctatgtccctttagattcgggacttacatcaccggaaggaaaaactcctattgtcggaccagtacttgcacccgagttaacaacttctagcttcattgatagaaactgcagaccaaactccatgcttaggcatgtataattgtaacatataacagagaggtgttaacgacttttacctcaacttgccgctgcaatgactgaatataattgataatctcatcgagcacaagggcttttccgattatctgatcaacagaaatatcttgttgaatgttttttaggctataataacatcattcacaagcagggaccaaaagaacatgtaccttattacatcctggaattatatcttgaagagctgtcatcttctcactgatcttttctcttctagcctgtcaaagacaacattgtgattctaataaaaggaacagtttttgaggataaaatttatggtgattttagcagaagaattactcgctctgctaaactatgccggtcagtagcttgtcctcttcttgctctcacatgaatataatcctttggtggctcaggtttgttcttctgttccgttgctttgcttccaccaccacccgaacatgtttcgccttcaggtctcatcgaaccatctccatttccactttcagatccacacagttttcttttcttatcccctaattccctctattaaaaaagtaagcaaatggaaagctaaaacgatcctaaatcaaactctcaatctaaga

SEQ ID NO: 33084 - DNA, 627 bp, Arabidopsis thaliana landsberg
ttaaatcgatgatgatgaaacgaaggaagagagagaaagagaggcaaggtgcagcacgtttcaggttttgcataaacctgttgagaggagacgatgacgtggcaatctggaacggcctttcttctctaacgtgtgtgcttacttatttccttaaaactgcaaattagtccttcattattcgattaaggatggaagtttccctaaataattaccaaaagagagcgttttaattttcaaaagtggagaggtggtgttatctggtacgtcgcaccttggtaaactagaaagcgccagctatcggtgggtctatattgcatcatattaagccacgtgttaatagaacagtgatgtggcagcttcgtacgcgacatggtgtggtgtttaacttcaattttaattcctcgtgttatccacgtgttttgtatttgagaaaaacagttagaatggaccggttaagagttggttattaatagatatgggccttctgttattatttatatgggctttagctctctgtgatagattaatacccaatgtcataccatgaacatatgcaaacatgttttaaaataaaaaattgaatgttgatttttttttttttttttctttggttatggaacgaaatag

SEQ ID NO: 33085 - DNA, 617 bp, Arabidopsis thaliana landsberg
attctctctccagtcgtctcaaatccgctctctctcgcgctctcgttccttacttccctttctccggccgcgtccgagaaaaacccgacggcggcggaggtctcgaggtcaattgccgtggccaaggtgctctgtttcttgaagccgtctctgacatcctcacgtgccttgactttcagaaacctccccggcacgtgactagctggagaaagcttctttcgctccacgtcatcgatgtcctcgctggtgctccacctctcgtcgttcagctcacttggctccgtgacggtggtgctgctttagccgtcggtgttaaccactgcgtctccgatggaatcggtagcgccgagtttctcactttattcgccgagttatctaaagactcactgagtcaaaccgagttaaaacggaaacatctctgggatcgtcaattgcttatgccgtctccgattcgtgactcgttgagtcatcccgagttcaaccgtgttcccgatctatgcggattcgttaaccgattcaacgccgagcgactcgttcctacatcggttgtcttcgagagacagaaacttaacgagctaaagaaactcgcgagtcgactcggtgagttcaattctaaa

SEQ ID NO: 33086 - DNA, 146 bp, Arabidopsis thaliana landsberg
  unsure (1)..(146): unsure at all n locations
acccaagccgacagacacgcgagcgaaccgcccaccgccgcacgcgcggaaganancccccaaggcggaacgcccccccaccgaggcaggangacaacccacagcgccgggagagcgccaagccccgggcaaacacaggacaagag

SEQ ID NO: 33087 - DNA, 516 bp, Arabidopsis thaliana landsberg
cttaagtatctcttaattaacccacataatatatttacaagtggccgcctcatacttcccctctcaagtcctttgcttcatttcttataaaactaaaccaccttcttcatcatcattcatcaccaatctatctcatattcaatatactgaatatggaatcattctacttctgtatatacacatgggatccaaacttaaactttaccctctcttaaatcactcatccgtttttcacccagacagtcgttaccaatcggcccctacaatggaggaagagcaacaacaacttcgtgttctcttcgcgaaatacgagatgggaaggttattatgcaaaggaaccttcggaaaagtctattacggcaaagagatcatcggcggcgagtgcgtcgcaatcaaagtcatcaacaaggatcaagtaatgaagagacctggaatgatggaacaaatcaaacgcgagatttcaatcatgaagctcgttcgtcatcccaacatagttgaattgaaagaagtcatggc

SEQ ID NO: 33088 - DNA, 1024 bp, Arabidopsis thaliana landsberg
ctcaaaggtttaaaagcagatgagatcccaaccaatagactagcggaagaagaagaagaagagatcaagagtgtcaagatggaatccgagcttaaaagtatggattgtttagagatttcgaatagggagaaagattatgagattcttcttgaagatgaagaattcagacaagctctaagttggattatcgtatcagcgaggttaagagaagtttcagagactgtgaagaatcatgagaagattctagcaaataataacagagtgattgaggaagaagtagacagagtctgcttggagatttctttactctacgatgattttgatttcaagattcaagagaagttaaagatggcaactttcaggtgagggttcttgaaaaaacaaatcaaaacgttatgttgaatcttaacaaatgatcttttgtttttttttgaggctacaaaacttggagattaagattgattcaacgatggattttatagcagagttaaggcaaagagaatcagtttatagaacagcttttgttcttaggtctgagaatctcaggaaggcagaaactgaggtaaaatagtttgtgatttcgttcttaaaatgtgagaacttttaatgagaaactgagataaatttccaggttgatcttcttggagatcaagttgattcgcttgtgaagcttttacaaaaaacactttggacatttcatcaacatccattgcttctctgcaataactcagatgtaagttaaccctatctctattttcaagtagattgtattgcaagtaagttttattttgaaaaaaaaaaactgtattttcttattggctttttcagatattggagatctcgaagatgatcaagaaagagttattatctgaggattcataaaaccaatatagtgtttttttttttttttttgggaaaccctttttccatcaattgaatgtttcaaaatataccaattccaggtccactacaaccattctttttccctcgttttgtaatatcgttgttaatattaaattgatga

SEQ ID NO: 33089 - DNA, 551 bp, Arabidopsis thaliana landsberg
ttatgcaaaactatcactttatttttgttttgtgtttttttttttagtcacaactaggatgttttacgtcaaacacgtttaaatttcaaatgatcacttaaaaaataaataaatgcattttaattcattagacattctgcgactgtacatactaacgatcatgtgatgctttctgttttgcatcacaaggctcactgcaaaatcagtatcccaaaatataatgactatagtgggtctcacctcacgagcttcttccacgtgtcatcattaacgttttacaatccattgatgtatgtttgagagttttgtgtaacttctgaccataatgatgccacatgcatgactttggccatcgatttgttcttgagttttaataatccccctttgacatatatataatatgttctgtccctaggttcagttttgggggtttctgcatcttaattttaatggatagttttattttttccgacaatactggtcattggtaatttatttgggttaaaaacaaaaaaagtgaaagatgctctcttggttaccaattacgtaga

SEQ ID NO: 33090 - DNA, 1501 bp, Arabidopsis thaliana landsberg
aatttatacgtatagatatatcatattcgtgaaggatacatatttgtactatcatgcaaatatatcaaaggatctttttgcctttacgtcataagtagcaaatatatcaaatatatttgtgaaggatacatatttgtgaaagatcttttgcctttacgtcaatatatcaaagaatcttatatgtattcacccggcaactaacaaaagatagaaattggattgtgcgactaatataattcataaagaaatggatagtggatttgaccctgaaatcgttccaattgcaacagtaggtacacttctaattagtctggtccacgtccaaagatatgctatgtaaccaaattaggcgactaatgtatctcatttttttttttttataaaccctaatgtatgtatctcattaattattgcaaaaagatgtacagattaagttaaaaattaagcatagaataatagaggtgatgttaacaaattgacatgtaaaaaaattgttcattcggcgaccaatgtatcttattattacatataagtttcaatacacacacatatatattggtcaaaggaaagaaaaaggtctataatacattagtttgggagctgggtatttggtttcacatgcacttatctgatatctcagtgctcatttttcaatatttaagtttaaagagtttcacacttaccgttttttttggtcaactcacacttacttcaatcctctttcaaccgtcaaatgtaagagttcaaacttatctcaatactatctttcaatcgtcaaatttattcagagtttcacattcagttgtaaaaaaatcgaagaaaaagttcttaatgccattagcattgctttattaagtgggttttaaaaattaaacattcatttttgttggtgtcgctttatctaaaacgtctcttacaatttcttgcaaaggcacgttaaaatgcagagaaggcaacaatagctatatgcacgtgatgcgtcaattgtgatccataaatttttggggtcacgaacttacgatacggccgacatatatatcactttgtagtggttctatttaaaattcaactcttatcttaaaagtatatctcactttaactttttagtcagacaattgaagaaaaaactaactaattttttccttgtagcatatattaattgtttcactttgtattttacacgactcgaagtgttgttgaacttcagaattagaaatgttttcagaaaataaggcacatcgaaatttgatggagaaggcaacaataattatatgcatgtgatgagtaaatgcgatccataaagttctggggttactaaagttactatacggcccataccatatcttgctatatagatttgtaattgatgtatacagaactcaactcttttcttatatctcattttaatttcagtcgactataaattaactaaaatatcactttattaccctttttctacatgatattgtgttacttattagcaaaaataaatagtgtgtta

SEQ ID NO: 33091 - DNA, 3231 bp, Arabidopsis thaliana landsberg
  unsure (1)..(3231): unsure at all n locations
cggagtgttagttcttgagattataagtggtaggaagaatagtagcttcgacgagtcagacggcgcacaagacttgctcacacatgtaagttttgagaaagaagaaaaaatttgaaccttttaataatattactctgtttttcaataatctttacaatgagattacattcttctttttatagagattgagggagaaggatctagaacactctcgacactatacagatgtatgtaattttagtcattagataaggatgaaagaggattgaattagtttgagaggagcgtcttcctttctcttttaatgtttcctgcaggtacatgtacggatgagagacagcttttgatctttgtcatcttctgtatttgttgaccaggctttatagttggacttgatttgttatgggtttggcccatctccttagcttcacacatctcactcacattccccctcaaacttgtggtgggtggttcagctacaccaagtttgattctgagatcaatgaaggctcgtcttggtagcggttttgtgaaaatgtctgcaagttgcagcgttgcagatatgtgttttgtctccacaagacccaaagcaacttgttctctgatgtaatgataatctgtgtcaaagtgcttagacctgttatgaagagcaggattgnnnnnnnnnnnnnnnnnnnnnnnnnnntcacatttcaccaaggttggatgggtttgtgtaactccaatatccctaagcagaaaagacagccaagtaagctcttgagctactgccgtaagagctcgatactctgcttctgtgctagattttgacaccgtttcttgtctcttggctgaccacgaaatgaggttgcatccaagtagtgtacagaacccggttgtcgagcgtcttgtttccttacacccagcccagtcgctatcactgtaagctacgagggacaagttctggtttttcttgatgtgtaagcccaagtgaatagttcctttcacatatctcagaatccgtttgagcaaaccaaaatctgctgtagtaggagaatgcatcttctggcaaacaaagttaacagcaaactgtatatcaggtcttgttaaggtaagatattgaagtttacctgcaagacttctgaaatatgttggattgtcaaagatttcatcttgtgcaggtatagcagtcaactgaagtggcagaggagtaggcattggagcacaatcactcatcgcagccacaacaagaagatcttctgcatacttctgttgggagagaaacattccttctgaatgaaactgcacttgaatccccaaaaagtaatgtagtcttcccatatctttcattctgaattcagtattcaagctgtctaatagctttgacatcgcatttgaactgtttcttgttattatcatgtcatcaacgtaaagcagcagcaggatgatactcttgttcttgatgtatacaaacaaggatggatccggcttgctacattcaaagccaaactcaatcagataagtgctaaatttatcaaaccaagcatgtggggattgttttaatccgtagatagacttatgcaaaagatagacatgatctggctttgatttgtctacaaaacctgcaggctgcatcatgtacactgtctctgtgagatcaccatggaggaaggcattcttcacatccatctgctttatgtcccactgcatgatggttgctaggtgaagaactgatctaactgtcggagttctcaccactgggctataagtttccaggtaatcaatgccttcttcttgattaaatccctttgcaaccagtctggctttcagcttgtcaagggacccatcagcattgagtttagttctgaaaacccacttgctgcctaatacatgcatattcggtgtatagggcaccaaggaccaggttttagcttcagagcaattgtccatttcttcgtgcattgcaccagtccagccttcatcttttaaagcagctgtcactgttttaggttccgggtaagatactctttgactgtgtaaaacatacctcggatttggttttctgattccatcttttaatcttgttgtcatagggtgggtagactgagatggctgagttgtttggacctgagatgactcactgttggaagatgcactctgagaagattcactttgagaagattgattctgagtagactgttctgtagttgatggcagcggttgaatgataggagagtcttctgaggtagtgatttactgagtagaagaagaagagctgttgcctatagaaacaggatcaaagcctgccgtacacccagtactctcctcttctctcaacaaaaccctaccagaaggtactgaattctgatcattgtgatcttgattttctgttgaagtaccagtctgattctgttcttgtactgagcaaccctttaaccaagcagacatcaatggtgtaacatttgcaggttgcaagtgaatgtaagccatagatgaaaaaggaaagagtgactcatcaaagatgacatgacggctgatatacacacgccctgtggttggaagtaagcatctgtagcccttatacttgtcattgtatcctaggaacacacacttgagtgatctagggtcgaactttgtggttgcataatctcttagggtaggatagcagacacacccaaagacacgtagtgatgtgtaatttggagctttcccattagaacttcatagggactgcatttcttctccaatactgaacttggtagtagattgataagaaaatttgcagtgtagaacgcctcaacccaatacttctgtggcatactactttggaacatcattgagagtcctaattcaacaatgtgtctgtgttttttttctgctaaaccgttttgttgaggtgtgtgtggacatgacatcagttgttgaatgccatgtttttgtagatgagctatgaagtctttgcttataaactcacccccaccatcacattgaaaggttccaattttctgttgaaactgattctcaaccattgcttgaaacagagaaaatatcaaagcaaagtctgatttcaacttgaggggataaaaccagctgaagcgtgagtaattgtcaatgaaaacagcatagtatcgaaaaccttgtactgacattattggtgaaggaccccaaagatcccaatgtattctttgcaaaggtaaagaggatacaaacgaagaagcagaaaaaggtaacttaagactcttccgaagttga

SEQ ID NO: 33092 - DNA, 955 bp, Arabidopsis thaliana landsberg
caaatggcttgccgttgagtgtgacccatggtacgtattcatgtggcggctttaaattcttggttttggttgcgtacccaagtatcagctgcaatacaaataacacataaaagttggctatatgtgtatattattagtgctttttattcatatatacgtacctttctagaaagatcaccattgtaacaatcattgagagctttctcacgtccagattttttaacacatgattcccaatctttcgtatcgctttcgacgcaccgtatgaacgagtattgtgatttctgcgttccataaccatcacatttgtcaaactgtaattctaacattcagttttccctgaattaaaaacttagtaaataaatgcattcttcatatacctgatcgggccaagttcttatagcgcaagcttcaatggcgtttagtttgcattcctcttcaccatgcttcacaacattcccaaacatgattaataagagaaagtataacattaatatacaagttatattagataggaaatttatttatttatccacaagaagagggagaaattgaaaagaacctggcaagtgacagtcagattatcggagagttcggcattaccaaatggaaacagcttgagatcagtgatcgtgtagagatggaagacaaagattttccctaggtcataggcgatgaattcctcacacccgggacaaagtgattggtagtaaagattgagcttcacattgccagattttccagccacaaggttgtccgtgaatgtgagcagcagttagacacccaaagaacaccagcttggttaaatgataaggagccgttgttacgaaaatagttcaagttgagtggtaatgaatacaaccttgtgtaagcatttatagatactttttttaccgtgagagtaaatgctttttttactagctcgagacatttccacgtgaggtctcttttattc

SEQ ID NO: 33093 - DNA, 1108 bp, Arabidopsis thaliana landsberg
ctcaaagaccataagcccagcaagtgatcgggtaagttacatcagtcatgtaactgcgtgtgtgtgaaagtaacactgtaagctaatactttgtactaaccccggtctcactgtgaaacagttaactctttaagaaatcatagtagccatcaatgcatcgcggcaagcagcgcatatgatttcaagaggccttcataacaaggtacatatatgcatcccttgaggataataaaatctgtatcttttgttgttggatcagtcataagttatgttcttatgcttgcaggtccacacagttgagcgtatacttacctcacatggccgtgttaatacaactcagaccttgctcaatttgaatgaaggtaactaattcaattctcgttaagcttcataaatgttctaaagatgaaatgaaacatccttatataccgtttgctttcaattgcaaaattctgcagatgaattggctggtttcgaacagtcttggagtggaaatgctagaaggcaaatgcagttacccagccgctctggttcatttggaagtaagcagtcctattacacggtcaagttttcgtgttgtacgtttctttgtgaacaaagataaatcatctctttgatgttcttgcaggtggtcttgtgaacagagagcaaccaatgttactttcctcgactgatccaagtccttctcatgcacgagcagaatcatcccgaagaccgaaagctgcaatgaatgtaagaggacatggtacaaactaatctccgcctatatgtatggtttcgaaaatctttagtgaatgtaaccaaagactaattactttacttaggttgcatcatcattactgtaactgtatgatgacatgatttgagggttttaaacactgctccttgatgattattatatatgtatcttttgttacattaatcagttcttcgttgcttataatcatatagctaactgattaaagcttcaattctcagctacaaatctaaataaaatataaaccggacccggttcttactggagagaactaaaacaaacaaaaccaattggtgggacacagctaaccggagaatcatacttgcacaaagattcttattaaaaagcaga

SEQ ID NO: 33094 - DNA, 1382 bp, Arabidopsis thaliana landsberg
ctacattatccaagcaattcgcagaaaacaataaaaataaatttgtcaaacatcataagcctagtagagaagtagaagttgacattccaaattcgtccaatctctacctcaactagatttaaaactttttatcctaaggtaagtaaaatacacaaaagtagagcaaaatacgatccttgaattaattcaggttgtgtaaccgttcaatcttttctaacgctgtgacacatatttgaacccaactaactcaaatttttttattttaaatataatttataaatgtggaaaaaaataataaatttataaataaaaatatatgtcatcatttctatttataaatatcgaaattattacactcaagttctaaaatattttttttttttttaaactaaagtgaaaaaatagcaaagtacattactcacagtagtgaagaagcagccacctgaaaaaaaaaataacacacacaaaaaaagagagagagagagagagagagagaccccacaaagagcactaatcttcacaaccctaactccgatttttctcacacctcccaatctctctttctttctctctgatgaaaagctaacggaaaatggggaaatacataagaaagagcaaaatcgacggagctggagctggagctggtggtggaggtggaggtggaggtggaggtgaatcctctattgctttaatggatgttgtttcccttctcctcttcttcacttggtgtttaactcgagctaaatctctagctcttaacaacaacaacaacgctgtcttcttaaaaaccctcttctccttcttcgttaccaccgacttctgcttctcctaatccaccgtcaaagcagaagatgaagaagaagcagcagcagatgaacgattgtggttcgtatcttcagctacggagtcgtcggcttcagaagaaaccaccaattgttgtgattcgttctactaaacggaggaaacagcaacggaggaatgagacatgcggaagaaaccctaaccctaggagtaatttggattcgattcgtggtgatgggtctaggtctgattctatttctgaaagtgttgtctttggtaaagacaaggatttgatttctgaaatcaataaagatccaacctttggccaaaatttcttcgaccttgaagaagaacacactcaaaggtatcatctttcttcatcaatttcaacctaattttttgggggatttcttatttttatgaatctgtgtgaatttgttctgtttcttgagaaaactttggtattggatttgaaaatttccgctgttaatttgaaaaaaggatcaattttttgtcttgtatttggttaaaattgaaactggcgttttcgattttgaaatttaatgatatttttaccatgt

SEQ ID NO: 33095 - DNA, 586 bp, Arabidopsis thaliana landsberg
taatgaaaactgtctgattattgtttatctctctgtgataatatatgaagaggtctcttgaatttgcatatggataaaaccaaataaattagatggtgtgttaaaacattagaccgagtttttttccgttgaaattttgtgatattattacaataatgtagcgtggtgttatatatatataaaaggatgtagcgttatgatctgattcaatttggtcaatgtctgaaagtcgatcgagttcctggaatatgaagttggaagaattaaatagaaaaacttggtctgccacgtccagtgtacttgagtcttgagtggataagattatggggatgaggatgatgtcgatagacgtagttaagatcgtaatgttggtgatacgccactttaaaccggtttgcttctaattggcggcaagtgtggcggtggtattaagcgtcggcgaagggagtgacgcgtacaaagatgtgtacgctcaatactgttagaccatctccatcagtataagtaaggaaagtttttcataaaattaaaatattaatattttaattaaaacagatatattaattgttatttaatagttaaacta

SEQ ID NO: 33096 - DNA, 3869 bp, Arabidopsis thaliana landsberg
atggaaacacaatcatataatcataaatctatattattattttcttgttttaaacttgcatgtacgagatttgagtcgggagaaaaataaactttattgtatgtgttgagaaacaaaatctataaatatttagggatcccatatatacatcactctcttctgttggctcccacagacgatcaaaccagaaggaagacatattcctctgtttaaaaatatcttaaggtaaagagcatttttttgttcttattgtttttcttccactgtcgtaattttatttgttactcgaagtttgtatttttatatacccgctaatcttgtaacattctttgcgacaaaattacaagatcatagtttattagatgttgaatattgctgtagacaaaaaaatatgttgaataatattggttagcttatacaattttttgttatcaaaactatagaagatcaaactatctaaaccaataaaatatattctggaaatactaattcgattcatatattttgcatgtttctatgttgtgtagatgattagaccaacgtttggtttactagtctttttggctatattcctttttccggcgattgaatcccggagtcaccgaaattcggtgacttccaagattgaattttcagcgctgaattgccggaaacatagtgcaatactgactgattttggtgcggttggagatggaaaaacttctaatacaaaagcgtttagaaatgccataagcaagctcagccaaatggcaaccgatggcggagctcaactcgtagtacctcccggaaaatggcttaccggaagttttaaccttacaagccatttcactttgttcatccagcgaggtgctaccatcctcgcatctcaggtaagtgtgtttaaaaccgtttcattcatatttttaaaaaacttaagaacaatagtgactagagtgtaattgaatagaattaaacgtttctacgtttagtttttggtttaggttgtgttggatccgaattaaacgtctctacgtttcatataccataacaatctatactgatgaccaaatcacactactcctaatgaatcaaattttgcctagtagagacgttgacgttagaattttttctaaagcacctcgcacatttaatacacatatctaaatattgcacccggtttgttttcgacctatataacgaattaatatgtctttacaaaaaccaaatccgttcttgacataaacaggatgaatctgaatggccagttatcgctccattgccatcgtacgggaaaggaagagacggaaccggaaccgggagattcaacagtctcatctccggtacaaacctaaccgacgtggttatcactggtaagttccaacgcaatatatcacaccatgatatgcttgatgcatatattccgattcttattttgattgttttcttgattataggtaacaacggaacgatcaacggacagggacagtattggtgggacaaattcaagaagaagcagttcaaaataacaagaccgtacttgatcgagatcttgttctccaaaaacattcaaatctcgaacatcacattgatcgattcgccgtcgtggaatattcatcctgtctattgtaatagcgtcattgtcaaatccgtcaccgttcttgctcccgtcactgttcccaacaccgacggtatcaatccaggtaatgtttatcctacgtggcaaccttattatcctacctggcatttctaaaatctgacttggcacaatgtcatcctctgtttttgttgggtttccaacggctctgtttcttgttttttcagattcttgcacaaacacattgatcgaagactgttacatagtctccggagacgactgcatcgccgtcaaaagcggttgggaccaatacggaatcaaattcggaatgccgacgcagcaactctcgatccgacggctgacatgcatctccccaaagagtgcaggagtagccttaggaagtgaaatgtccggaggaatcaaagacgttagaatcgaagatgtaactctaaccaacaccgaatccgccatccgaatcaaaactgcggtgggacgtggcgcttacgtcaaggatatttacgctaggaggatcacaatgaagacgatgaaatatgttttctggatgagtggaaactacggtagtcatcctgacgaaggatttgatcccaaggcgttgccggaaattactaatatcaattaccgcgatatgacggcggagaatgttacaatgtcagcgagtctcgacgggattgataaagatccgtttacgggtatttgtatctcgaatgtgactatagctttggcggctaaggctaagaaaatgcagtggaattgtacagatgtggctggagttaccagcagagttacgccagagccatgtagtttgttgcctgagaagaaagctcaggcgaagaatgttgactgtgcgtttccgtctgatttgattccgattgagagtgttgtattgaagaagtgctttctttgacgtagtatagtgctattaacagattaagatgcattaatactttatatgaaatttcattataatgaaataagaagccaaaatccgtattaaagcactcttagtcttacttagaatgttcacaaagcatgttctggttcaagaagcaaaccaagttgactttttcttttgttgttgttgtcgttaaagttgacttgtgatcgattattgaagataatcagcttgtggttaagtcctgttttaagttttaacatttagttaggagtggataaggtttgagtgaggatttaacacagaagctaataggatgtgtgataatgatcttctccataaaacagagaagcaaggtagcaacaaaatcgaagatttaaggataaaaaagcagagtgtgatacacaagaattaaaatccaaaagatgacaaagataaaaagtttcttcaagctatgaagaaagatactcacttcttctcttctttctcagcctcagcagctctcttggctctaacaccagcatgtctcttgtttatgccctctagacggatcttgtcataagcattgaacaatttcatgtcagatgtcagcttcacaagctccattgttggcatttcacgaacgataggcatgtgatctacttggacttgtgttgcattggccaactcttgttgtgcagaatcaccaacctaaacacaaacaaaagcataacaacaaagagatcatatccaaatccattccattcatacagtccactgaaccctaaaccagttgcttgcgaaggagtaccttgaccgttcgggcacagcgcggaaagataaccaacttagccttgtaggttttcagcctctggacgttggtttgaaaaccctccaaagaccggttcttgcgatgatggtcaacagaaataccgattgtaggagccaacttcttggggataccagcagcctaaatttatcaacaatcagaaagaaaaaacaatttaaacgatatccaacaagaaacaaaacacaaaagctaatgaagaacagagagatattacaaacctttagctcttcaagagtgaatcctttaccggctctgactttcatgttgtacgtaagagtctgagcatgtacaacaggtcggataggtccagcagtgggacggggaaagatcttcacagccttattctgcctcgctgagtaaacattacacaccaaataatcaaattgagatgggattatggtaaaacttctaataaaaccatggcacataaaaccaaaaaaaaatatagtagtggtgacattaagatagcaaaagcagtagtagtggtgacattactactaaccaattcttcttctggttttcatggcaggttggttgaacgaagttttgacata

SEQ ID NO: 33097 - DNA, 1254 bp, Arabidopsis thaliana landsberg
tctcttttctcaaatttttagtctcttacactctatcagctcatttcaccgaaaaaagtcaagctttgcaaaaaaacaaaataaaaagattccaattgtaaaaaaggcattggtcctctacgactataaaaaaacacactttagtgagttgtcgagtcaacaacttgcgtggaattttcacattttatatatcctttacaattacgttacgcgttattttcttcaatacataatcaaaggaactcgctttctcaataagactttgttcaaaccattctacaaatacttttttttgaaattgaagcatttgtgatactttttatggctttgacttcttcttcgtctgacttcaagagataccatgtcttttccagtttccatggaccagatgtccgtagtggatttctcagtcatttacacaatcacttcgaaagcaaagggatcactccgttcaaggatcaagagatcgagagaggccatacgatcggacctgagctcatacaagcgattagagaatctagagtctcgattgtggtgctttcggagaagtatgcttcttcgggctggtgcttagatgagttggtggaaatcttgaagtgcaaagaagcttcggggcatgctgtgatgactattttttataaagttgatccgtccagtgtacggaaacagtggggagacttcggaagtactttcaagaaaacatgtgaagggaaaacctggatagtgaagcagagatggatcaaagctttggaatatatagcaaccgtagctggagaacactctctaagctggtttttttttttttctcttggctcaatgagttagaatgcttttctctttcttaattgtttcttcaaccgtggaatttctatcatttaattagacccaccaacttgattttgtttgcttttattagggctaatgaagcagagttgatccaaaagattgctacagatgtttcaaacaaacttaatcttacaccgtcgagggattttgaggggatggtgggacttgaagctcatttgacaaaactggactcttttttatgccttgagagtgatgatgtaaagatgattggcatttggggtcctgctggaattggtaagactaccattgctagagctttatttaaccaactctctaccggttttcggcttagttgttttatggggaccattgatgttaataaaaatgattcgaagttgtgtttgcaaaacaagcttctgtccaaaattttaaccgaaggatataaga

SEQ ID NO: 33098 - DNA, 804 bp, Arabidopsis thaliana landsberg
agtaaaactaaacatattgcgaatttcccgaatttaagttttggagtgcaccaaatcttacagaaatccaaagatttaaaaacgattaatttttgctaacaaacccaaatcaaggaattaactaagcactaagaatttcactatatcaaaccgaaatttatcccttctaaaccgaaccagaataataatacgtgacttttcttagattgaggaaaattatgaatataaaatgcatgatagacaatattttaattatttatcttttttttccatttctccaaaataaatcttaaaaccaacataaccaaattttaattgaataatgtttttcttttatatttcagcttaaccgaataggtttttttttgtcaaatttaaccggatagtttattcggttcttaatcttcataagtaaacggtatgactaggaaccgcaactatacattcggtttaaagacgcaaagcttcggtttgacttgtctcttcgtctctctcaatcctgtgattactctctttgacgttaagagtcaacacttaaatactgtgattactctgtctgacttgactcttcgtttctctcaataccttgaatattgtattcatctctacttgacaatggctcttagtatacatggatgcttgctctatctaagacaatgtattgcagttatattctatgacaccctaacgttagaactgtttttgtctcctcaccgcagcccatattcacagtggtcgaacttattggacctccttaacccaacttggatctgatgaccattaggaattcagttgttctttatc

SEQ ID NO: 33099 - DNA, 767 bp, Arabidopsis thaliana landsberg
acttatttgaaagcttaaactcataatataaaccgtgaaagtagtttggcattcaaataaaattctgaagctaacaaaataattatacaaactttaaattgtctagggtttgtgatgagtgaaataaaaacagagtgtagcaagtgccttagaaaatgtgagatggagagtatccagtgtttgccccaactgcttcagctgcaacagtttcagcttcgacagccacatgtgcgatctcagcagatgtaccagttgtagcatttggcacctcaggtctcaggttggagctgagaggttcagtcctagaggatcccgctcgaaagaggccagcgaaatctggatctttatcggcaaggtagtcgaagtacacatcaaagttactgagcttctccgcttggtttgcaatcagagcttcagcggcaggcatcttttgaaagtgttcaaccggatcttctcgaggaacagaaggacctatgtgagctgatgaggcttctagctgcaatgaacatgccccatatatcctccctttcttctttggagccacctaagagaaactcataaccaaaaacaaatgtcaagtcagtattacataatgcaaccataacacacaaaaacaaatcaagacaatgtcgggaaactattacataatgcaaccatgataagctaagtcacaatgccaagacaaatgcaaccacaacacacaaaaaccaagtcatgacaaaacactgaacacaatgccaagttacaatgccacaaagccaagtcac

SEQ ID NO: 33100 - DNA, 773 bp, Arabidopsis thaliana landsberg
  unsure (1)..(773): unsure at all n locations
aaacagctcagggaaggcactacagagacgaaatttggggctgggataaaaggatggaccatatagatatctttcatacctagggatccatcccataatcagccttcaaatgctgacatcattgcatacaccagcaagattttgctgcaaggaccctgatatagcatgactcttgcgaggctatgccagggcctggcaaacacaaaagtggatgcttacagttagctatcggatggaacacaggggtcccaatggaggagctagagaaagtactcaaggagctgaagggatctgcatccctataggtggaacaacaatatgaactaaccagtacccccacagcttgtgtttctagctccatatgttgcagaagatggcttagtcttccatcattgggaagagaggccccttggtcttgcaaactttatatgccccagaacaggggaacgccaggttcaagaagtgggagtgcgtgggtcaggaagcagggcagggggcagggagggtatagggaactttcaggatagcatttgaaatgtaaacaaagaaaatatcttaaaaaaaaaaacccagcagtgctaagaggaaaagtcatagctccagtgcctccaaaatgaaactggataaagcataaactagtagtttaacagcacatctgaaagctctagaagaagctttcaacacccaagagaagtatatggcaggaaatcatataactcagggctgaaatcaacangtggaaaaaaaaaaaagacttttaatgaatcaacaaa

SEQ ID NO: 33101 - DNA, 148 bp, Arabidopsis thaliana landsberg
aaattgtggagcaagcatcgcgtgaatcaactttgcagaatgagaacaccttgcaacaggcagctcaaacaattttttgaactaggaactaagcagcacatcccaagtctcgcagccctccaatagttccaccagcgtgcccagtatt

SEQ ID NO: 33102 - DNA, 720 bp, Arabidopsis thaliana landsberg
gactataaatacatgcatacttatcactctctactcacttttacaactaactcataagtaaaacacagacagtttttagatggctaagatatattccccttcttttcccggtactctctgtctttgcatttttactctcttgacgctaatgttcattcgggtttccgctcgacccgcgacattcgtcgaggatttcaaagccgcctggtcggaatctcacatccgtcaaatggaagacggaaaagctatccagctcgtccttgatcagagcactggtacaccaacgccacagttatatttttaaacggaaacattttgaaataaaggtgttttatgtaattactctaactgacatgtcatatttgtctttaaaggatgtggatttgctccaaaagacaattctattctgacgagtgagcatgaagatcaaaactcattcccgaagactctgacggtacggtcaccgcattctacgtaagtctatcatataactccactagttttgaatttttacacattcacacaacaaaaaataacattttcttgaaacactaacggtcaaatcattgatatgtctatagatgaactccgatacggccacggtgagagacgagctagatattgagttcttgggaaacagaagtggtcaacctaactcagtgcaagcaaacatagttgctcatggcaaaaaaaatacagaacaaagagttaatcatttgg

SEQ ID NO: 33103 - DNA, 1892 bp, Arabidopsis thaliana landsberg
gaattgtcgatgtgcaaatatcacggattatgactaagtagtagattgtgagtggttatgattgactatctaagagtgcaaacacaattttattaggcttatcatattaaaaaataaatataaaatgttcatgttaatctatttgcataaaaagatgacccacgttaacttgagcaagttttggaaactaataatgtagtcgtttatgaccaagtcaccaacgtttgtttaatttaaaaaatttcaaaatttttttccataaatataataaccaatttttctataaagattgtttccattgttttacaagaagagaacatgtaccttcaatggagtgatgcaaaagaagataaggatgtgaagcttgacaacttgataaaagacatcatccatatcttcttgctttagatgcttggaaagatgtgcaagtattttgcattgctaagagtaaaacaaaagctattgtggctagcgaaagtatcacaatcaaggggaaacaagttatggaggccgaatcttcaaaagttgaaaacaaaaagcagaagatagtctcaaaagataaagaggttagttattctcatcttattactgaatgtgattatacttttaataaaatctgtacatttaaatgattctaggttgataaggatgagaaatatagctttgcggatattctgaaggtgatgaaaacactgaatgagactatttcaaacgtaagcaagaatttgagttgtaggatcgatgctatgaagactatttaaaagtctaactagtgatcaacaaagtattttgaagtggaaatacaagctttaaaattgttaaaaacataaaacataaggcataaaaattaaagtttatgaagtacaagtcttacgattgtgtcctacttgattccaatactccatctaaggtaaagtaaatttttaggttaatgtgaaatcataaatagaagtcgattttaaacattatacaactagttaaactaaaaacatacctttatccgaaaatgtttgtttaatgattcagcaacatgcaatggcaatactttgggtccaactccacctttatccgaaaatgtttggaaataaacacacgaacatgaaactttgggtcatctctcaatggcttagctcgtactctccatgtacacctttttacccatcacttgacaattagttgatatggtgtcgatttatacacgaagtaataaaacttctgtaccacgatgagtatctttaatcgtgcttccaagtgctctcttgtttcgtaatgtgagacccaaaccccttttaggcccattaaaagcccaacctcctcaaataaaacctagacgataattatgtgtatatatatgtacgtattgtcttcctcatcaaccaggccgcaaccatttacgtcttcatcatcaccaccatcgttctaagttttgagaaacagatgcaaatcgtgattcttagccaccacaattcaccattgttgagttcggagctgttgtttgtgtgtgtaactgtgtctttaatcgagaataagtcaggagaaaggagtcgatcgtcgcgaaccataatgtcgagtcgtcgtcgtcaccggttgtcaccggctcattggaaaaagagaaaggagatatcagttcaaatagggatattggtgagcgttttcccgtcagatctgaaagaaccagatcacgaaattggtgttcttggatagatctcacaatgaggaatacacaacaacaaacggatctctgttacgaggtaaattccatccacaattcgtgtttaaaggtggacaaaagtcatagtttctgaacccagaaataactaagtatcagatttcagtttcaagttggggttttaagaggctgattcctgtcgtacgagaaaagttcagatgac

SEQ ID NO: 33104 - DNA, 1812 bp, Arabidopsis thaliana landsberg
attttgcataacatgaatattcataacatgggggcgaaaaatatcaatatgatttattttatctttttagttttttgatattacttttattttatttttcaaattatgtattacagttgggatgttcttagtagttcttgatcattttaagaatatgttaagaagaactaatatagtaattaaaaatatttaagaagaaatatattcaatgtctttaaataaaaatattattaaaaataaaataacaaaataatgtttaatttcacgagacggagttatataataggaagagtatggttaatactaaaacgagatggtttaccacgggtgaaatcatacaactaacaattaaaatacagttatataatttaaaatatataacaaaacaaaccatcttaacaaaaaaaatataattttaaattttaaattttaaaaatcgacttatggtgtattatatgataaaatcaagagattgtacaatatatagaaattaggattgtatatttataaaatacaaaacagtgtgttacatatagataatttataaacaaattatttttcagttttttttttttctaaaacaaatagtgccgcggtattaaaatctagtatatatataaatacaggactagtaacgattctctctctcttttgtcaaactagggtttctgataaaactagggttttctctcgatcagaaaacaaaaatcatgttggtaaccacttctagtagttgttgtggtcactggtacgtttttcaaggaatctgcatcggctgcaaatcaaaagtgcacaaaagccaattccgaaaatttgattatattttcaaaggtttacagctaagcaacgaagctgtggcattaaccaagtcccttacaacaaaacactcttgtctcaacgagaagaaactccaccttgtccttgacttagaccacacacttctgcactctaaactagtttcaaatctctcccaagcagagaggtatctaatccaagaagcgagttcaagaacaagggaagatctatggaaattcagacccataggacatcccattgatcgcttgataaagctacgaccttttgttcgtgacttcttgaaagaagccaacgagatgttcacgatgtttgtttacacaatgggtagtcgcatatatgctaaagccatcttggagatgattgatccgaagaaactctattttggtaatagagtgattacaaaagacgagagtcctcgtatgaaaacgcttaatttggttttggctgaggagcgtggagtggtgattgttgatgatacgcgtgatatttggccccatcacaagaataacctaatacagattcgcaagtacaagtatttcagacgcagtggcctagactcaaattcttactctgagaagaaaacagacgagggtgaaaatgacggtggattggcgaatgttttaaaactactcagagaagttcaccgtagattcttcatagtcgaggtcgaggaggtgctggagtcaatggacgtcaggtcgctgctaaaagaaggatatagactttgatcacaacgaagaatctgtagaatgatgatctcttcctctctcttttaagttctttagaaacctcagaatctttttgagaaatcttttatgtgttttgagatcactgccttgacaacacggcttctcttaaatttaacaccgttcttagagagaatcttagagaatgtcacaacttatatgctatatagcaaagacaattccacattaatgtgtttaaacagaaaaactcaaaaatgttcatcatggtcttgcaaaatttaaccaaatt

SEQ ID NO: 33105 - DNA, 651 bp, Arabidopsis thaliana landsberg
gaatatatgtacgtatttttggggtaatatattgaaatgtgggtttgagagttattgaggtattaagggggctggggcatttatgaagtcatcaaccttcctccttcaactgtatttagtttctttctatttattattgcctgctgataggattctatttattatttattcacctcttgaattatgtaacgcttatcatcaccatcatacatacgtgtaggcaacttcatgcttcatgagcaacatgagtacacacaactcgtacataatggttgatgatatcaaataatgctagtggaaaaaaaaaaaatcagaaagaggaattcagtagaactatagaaatctacacatttcaatgaagctccttacccatcacttattgatcacacatccaacttggaactctcacacatcatcatcatcatcatcattcatctccttcaaaactcaagttaatccaaaagaaaacaattttgcttttcaggattataatgtttagtactatatataaaagtataataacattgtttaaaactcttgagttaccattctttagatagatatgagcactgatatggatcataaatgcaaaataaatccttgttgagtaaacaaataccaaggtagacattattttatgccatgccaaaa

SEQ ID NO: 33106 - DNA, 786 bp, Arabidopsis thaliana landsberg
agtttccacagtccatgtcttgttgagttcaagagcatgtagctcttcattagctgcctttgtccacttctctgattttatggtctggcgaaatgtttttggttctgtttcaaaattataggcaaagatatacgattgaaacaatggagtatatcgatcatatgatatagtagtggaaatgggatgtggtaaagcctttttaggagatggaggaagtgtttgtgatgtgctttctgtaggtggctaggtagatatagaaggaacaagagaacaatgatactcagatagatagttaggagctctagtagtgcgtttaggcctagtaattggaacagaactagggtctgaatcatgcatctctatactagtattagatggtatgatactaggatctaatgcagatgatgatgatgatgatgatgatgcagtagtgtctacaagagagtcctcatctatcaaaggtgttgtttctacataatgcaatggggcaggcaaaggcaatatagtatttggaaacatgtcaacagccttacaaagtaactcactagttttaaaaggaaaagtctgttcatgaaacacaacattacgacatataaaaactgaatgagattccaaatctagcaccttatatcctttaaaaccagttggataacctaagaaaacacatgctctagccctaggtgaaaacttggttctttcattttgattagtagaagcataaaacaaacaaccaaaaaatttcaacaaagagtaatcaggtaatttctaagtaaagttcaaaaggag

SEQ ID NO: 33107 - DNA, 2761 bp, Arabidopsis thaliana landsberg
  unsure (1)..(2761): unsure at all n locations
gcctattccaattcggcaacctttagatacagggaaattctttcggtatggcttatattctgtgaaagggtgcaggtcctgnnnnnnnnnnnnnnnnnnnatgccaacaagcacaaagagcgccctgaccgtctcatcgacatgttaacaagcagccatcggtaagatattttactgttataattgctttcatatttttccactatgatccagcccattgaaaatagtatcactcgttgaataatcatatctcatggagtcactctatgtcagagatgtgctcatgtatgtaataaattgaatcgcactgtacaattatgcgggatcattaggctgatacacgtctgattgtaaacgagtgcagaaaggtgctggcttgtgtggtatgtggccgcctgaaaagcgcattccagattgcatctaaaagcggaagcgtggctgatgttcaatatgtagctcatcaagccttacatgccaattcgcacacagtactcgatatgtgcaagcaatggctagctaaatacatgtaaagccctgtaatctacacgataatagaagccaacataaaaactcgaggtatacatcttttatttttggcagattagcgattgttcttgcctcgtatttgttcctggctaaatttttcttgcaaaaacaaaggaaaaacacactgccttgtgaggtttttgcttgaaactttgggagcagattgtttaaaagaacatggagggaaatggttcagtctctcataggaagatcattaactgatgattcgcacatgtgagattatgggttttgtgtgttgtaacacatgtctacttgtaaaaatttatatggttggtatatttactattgaatgtatgaggttgataacttgcggcttttttgcagttgagtttcatagttaatcctatattgttgttaaaactatattggaatttaacacatatggaacaactcaaaacaaagattcaacaaagaaaaagtgttaagtgttgataaaaattcttacttttaccgggacgtttgatataatttttaaggtgcattgttttacaaaaaaaaaaaaagagtagaagggtgcgtgcattgaataaaataaataaattatttttaaaacacacataaaacaggttatcttttcggcctattaacagaacgatggcctaagtgtccttttaggcccaataccagattgatggcccaagtctccttttcgtcgtttcggcattttattagaagtagaaaaaattccaaaagcaacagaagtagagagatttggaaaaacctaatcgagcaatgtcagacccttacgagagagtgaatggtggaagattggcgttcaaaggaggagatctagcgacaaggaaatcgatcgaaaagaagaagaagaagaagcagaagaagaacaaagaaaagctcgacggtgttgaggatggagcgaagacagctcctgacggttcaccccctcccgccgctgccgctggagatgaccatatatactcaattgatgcggcgaagaagaagaagtacgatgacctatttcctgtggaggcgaagaagttcggttacattccgaaagcaaatttcgaatccagggaagatgctcttgacgatcgcgtcaagaagaaagctgatcgctactgtaaataaactcttcttgtttgtttgtttggatacccaaaatttgcagttctagtaacacttaaatctggtgtatttgttgcttttagagtgattaattatgcaacaaagtatcgaatatgaaatcacttgaaaagttttttcaaggattatagaagttatagaagcgcagaaactcaggttaataagaatgtgtttcaatgaatgcagctaaagaagtagttcattatggtgtgaaatcttagtacaagcagaactgggagacttggatagtcagtacttttgaaaaatgggattctcgaaactctttagataatcagatgtcgtatgtttcacttcaagagttaacacgtcagagattatgcaacaaagtactgtgttgttacatagaggtaaagcaaaataaagttgaaacttaagatgtcccatctagtaatctcttgtacgtgtagcctcaagaacctcttatcgggttaaaatgaccagaaattggatacaaggggaataaaggactatccacagtacattgaaaaattggaactgataatagttgtgtccatggtactaaaacaacgcacaacatctactttcaccagcaagaaaatctttggatcatatttttcttcgaaccagacctttgaaaaagtcaaaactgtaattgaaaacatacattttacattagatttaacaatgtaagtatagtgataatcgatttcaacattagagctcaacaaaagaattacctattgccatcagggtgaagctcatacatttgattgtcatctccaacagccagcaaatatccagaagaagtcaaaccctgcaaattttaaaaggagaagcaaaagaggatcaaagaaccatgctacaatgaccggataccgcagcctaatgcaaatgccaaatatggacaacatatggtgcattttcattcagatgatgcgaacggacatgcctcgtatataaaccaacgcaaaaaaaaaaaaaaaagaattatacctggatagtcacaacattttgaacaacttggtcctctactttgtcttcaacaatcactctttgctcgctgcatatttgtaagtacatggtaatgtttgtaatctctaaacctcaatgt

SEQ ID NO: 33108 - DNA, 549 bp, Arabidopsis thaliana landsberg
tgttggactatacatatcttatatataggtgaacaatgtgggaacgttaatgctcaagccgaccacagtttatacagcagaagaattctcgttgcttatggctacaaatctcgactcagctttccatatttcacagcttgcgcacccattgttaaaagcctctggctcagggagcattgtgctcatgtcctctattgccggagtcgggcatgtcaatgttggatccatctatggagcaacaaaaggtactgtatatactctttaaaacaatatttctttacattatgatttatatgcaagtgtatataaaagcattttttttcaggagccatgaatcagttggctagaaacttagcttgcgaatgggcaagcgacaacataaggactaacgccatttgtccatggttaatcacaactcctttgattagtgatgtaaggacaatttccttagaacaacggcgaataaaaaataaaaaataacttatgactctaactttttaactgatttgaaaatgcctcagcttctcagtgttgaggagatgaaaaaag

SEQ ID NO: 33109 - DNA, 788 bp, Arabidopsis thaliana landsberg
tatttatttttgtgattttttctttagttagtggtgatactaacattcttttaactttacctttaaattgctaagttttacagcacctttttttttgttatttttgattaaaccaaataacaggaaatatcttcagtaaaacaaatctcataatgttaacactaaaaaagaaaacagaaggagaaaaattatatagcgttgtttactttttgtaattttgtaatttgatttaagaacacgttaacatctactacgccacgtgtcaaaataaacgtaagaccgtccgcatcgtaaactttcctccttctccttctataaaaattaccagaccagaccgtcgatataatacgtcatcagccacgtcattttttaccgacacgtgtcggtaaaaaacccacacgccacatgatccattggctcgttcggtgttagccacccgtcttctgattcctctctctctctttcttcaatacttcttctctgttccccaaaaatattgggcgcacgagctctgtctctctctctcttagcggaagaagaagaaaaaaaaagaagcgaaaagacttctcctgtataatttatttgaaaaaccctagcacaagtccgacggctttgggaagaagaatccgggtattgaatgagtgtggctcctggggtaatcgcttttcatgtcaatcactcccgcgagatacgaatactccgatctgaattaggtgtaagcgtttctttcaaattaatggaaaacgaatagcattctgatcatgctaaaccctgagcatcacataaat

SEQ ID NO: 33110 - DNA, 8085 bp, Arabidopsis thaliana landsberg
atgcacaatcttaaatgaaacattctagactcgatcctaaatgtaatgcaactacatgaacactcagtttttgtgaaatcattttttgaatttttttaaaatttttttcgtttttctatgccttagatgagtgcagactcaagagtataaacaatgcaacactcacttcttgaaccctcccccaaacttaaatcacacaatccactgtgtgactaaacatggaagagagtattcaggataaatccaatcacagaaacaaaataaagaacaaatcacaagagatgatataatacaatggtgaagtgaggcgcttacctcagtcgaagaatgaacggagttggtcgtcaatggctgcttgtgaattctcccaggccatagatgagccgccctgttctgtgtcagctctagcatgtgggtactcgaccccatcaactatgtggcggccaacaccgccctaaggatactgagcgggctcttcttctgctacgaccagcacaacggtcgagtgatctcctagcgtggataacctaaaacatggtcgagtattcattcattgctctggggtcgagtatactgttgcactctcagagccaaaatccacttcactcagctctttatacttatctcctgaagacactaaccaaatgcatcaaaaacaacaaggaaaaataaagatatttacaaagatagacatgggatttcctcccaagtgagcttgttttaagtctctaagcttgacttctcatactcattaggcttagggtgggttgcagagaagaaatgaggtctcctctccttctttagtagagtgatcatcatacttattagggtttcttgacaagtctgcaattgggtactcagtggccatgtcctcacagtaagcttcttttttatcaagatagtcttctcctctagaccattccgacgtgaatacacatccttctttgctgacaagaatagtggctccattgcaggggcgtcattgatgttgagtggtacttggttgacttttccattgatctccttgatttgatccttcagctctttcacaatatgtgttagctcttgtatggctttgtcctaccatttggatctctccttgagttctaaccaatcatctgacgtctgactgcttgccttgagtttcttggtcgagcatgagctttcaggccaagttggaggcttcttcaatttgtttgtggaatcagttggtcgagcatgcgttgaacttactttaatagctttcataacctttgtgtcagaccccatcaagcccttgtaaacttttgagccaactgctgccttgtgtgagtctaatgacttctcagaactcaaagtttcactagggagatacccagctttaccactcttggtcaaaacagtttttgagttatttgcttctttaagttccactagaagttcatcaactagtcgatccgtttcctcaactaagaaggtttgtccttctattgtcggcttcttcatagcatcattgatgtcaaacttcattttaaaatccttccccatattaagatcaatctttccttgcttaacatctataattgctccagttgtagccaaaaagggtcttcctaagatcaagggatcttttggttcttcatccatgttcaacattatgaagtctgtaggcacctccacctttccaatcttgataggcaaatcttctaataccccatgaggttgtctaactgacccatcagccaagatcaaggagatattgcaatatttatatttgttgaaacccaacctcttagctactgagagtggcattagacttactgatgttcctaggtcacaaaggcatttattgaaagtcaatgaacgtagggagcatggtagagtgaatgaaccagggtctcctagcttctctggttcatctttctcatgtatgatggcactacactcatggctcataactgttgttttctgaacctcttgaattctctccatgatcaagtctttaaagaatttttcggaatccgggatacgcgtgagagcatcaacaagaggtatcctggcttcaacttgttttatgttcttggcaataatagctctgtacttatcttctaactctttcttgtgtcggccaggaaatggaagtgggggcttgtaaggatgaggaatgaagactttttctttgtttttgacaacaactggtttcagagcagttggtgatgttgctgggaatgtcggtcgagtaaagtggtcgagtggcagctcgagtgactggtcgagtggctgctcgagtggctgctcgagtgactggtcgagtggctgctcgagtgactggtcgagtggctgctcgagttatttctcagcttgatctttattgagactggaatcctccccatcttggtatgcactgtcctcagtgactgacttgggtctctctctagtggataactctcttccactccttatgatgatagcatgaacattagaatactccttgggattctgaattgacttccctggaagtcccgtaacttttggagtagaggtagatgtggattgtccttctaagtatctgactttggaattcaacgcctccacttttgcattcaggtcattgtagctacagtttagcttatggtgtaattcagataacttattagcaatttccatggagctagatgcttgtccctggagcagctgttgtaccatttgtttaatttcagcatcaggagcaacaggaccttggttttgctgaggtgcaaacccaggtggtggttgctgctggtagttcccttgaaattgctgtttgggaacaaaaccttggttgtacggaacaaaaggtttgttctgaccttgttgttgttgtggaggatacacatgatcctgaggattagcaacgttggtgctggggtaagagaggttagggttgttcatcttgaagttgttgtaccctttgtagccaccttgattgttgatgtagctaacttcttctaactggttaccctcctcatcttggacttgatactgctcgtcatcaacaaggaagtgcacatgcttctactagctaagaagaatcctgtccagcttgtcattcagcgctttgatctccttcttgtatttgttatcagagtcagttgtgcctctgatagttctgtcgtagtcctcgttgtaattaccatctgattgagcaaggttctcaaccaattcccagccttcttcaacatctttgttctggaaattcccattgttggcggtatccagaagcattctgatccgtggtagaactcctctgtatagagtgctgagcagagaagctttcttgaagccacgatgagggcattggttggtgtaacccttgaaatgctcacatgctttacagaagctttcaccagtcttttgtaaaaagccagaaatctcatttctgagtcctgcagttctggcattggagaagaactttgctagaaaagcctttttgcaatcatcccaggtggtgactcagtcatggggcagattcttttcccagatgtgtgctttgtcgcccaaggagaatggaaacaaacggagcttgaatccgtcttcactgacaccattgatttttgttaggttgaagagcctatcaaattcatccatgtggtcgagtggatcctccattggcagaccatggaatttattcccctcaatcatcaagatgagaccactcttaatctcgaagttgttgttctggatagcaggaggtgcaattcctttcctctgatggtggtcccgtggtgcatctccagcaccaatgtttgcagggccattctgttgattttgttcgtcagccatttcgagtggttgttgaggtataaggttgactgtgtttctcctttctctgagttcacgagctaggcggctgatgttatcattgaaaaggaggttctggttgcctgttgatcgagtttgaatatagcagaggtgtacctcaaccgagaagacaacaagaaaaacacacagtcagtaactgaaataaaaattgaaaaagaactctatctaagcaagtctgaaatctcaaatgtaacaaacaaacacccaattggcaacggcgccaaattgataataggtttttaagatcaattatcctaaaacaccaatcatgtcgttgtagtattttaggttgtcaatccaaattggtgtgatgctaacaatcaagatgtgattagaagtcactaagtcaagccaagcaataacaggttttagtgtgttctagcagttctaagtgaacatgcagaaaccagaaattcaagcagaaacaataaaacacttgaccaacacagctctttgcagagcactgggtgaggtcgagtgataggtcgagtaacagacagacagtatgacacagataattgactgcacagtctgttgccagacaactgggtggtcgagtataaggtcgagttacaaaaaagaattgcagaaaactaagcagcagatgacaggatacagtaaacagcagtggagtaaacaataaaatcaatcggataaagaattctcgaggatgggggtattgagtagtttcgtttcctcagtttacaggtgactgacatgctcaataaattatccctaaacaacaagttcattacccaaatctaagtgccaccgcaacagagaccctcaagttaacctagtcccagactcaatcaccattgacgagagctaacttaacaggcattacgaatcaacaagttatagccaaatcgctccttgcaaccaataccttggtacatggccacgaatctctggaattagtggttcagacatttcatcgaacaccttttgggcgcggaaatgtctgggctcaaattccagttgatcagaaagcaataggcattaagaacaacttatccagaagggatctatcaatccatactcaaccacctagcatactgagaattctacactactctaacccatccttagaaacctattcactactcatacatcattgcagagaacataaacgttgaacaggatgaaaacatgataacaaaagtgtaatagcaaaacgataacaggatgaacaacagtaaacgaaatcaagaacaaatactgaatgctgaatactgaatagataaagagaaatccggattacaaaaggtctagaacacagtgtctgcggaataaaactagataaaaaacttgttctcaaaaatgtagagtacatgctacttattgtggatgtcggattcacacacttaagtatttatttatttagtgagaaggattattcttgaggacaaatatactagaaaatagatagatgattatagagaaaactatgagttttgtagagaaaatgtgtatagctaatttgcacaaaaatgtgtgtgtctttacatggtctttgacccataatttatacccaaagaatacatttaatcctcatttacacacaattattctaccttaaatgtatccgtttctagtctttgaattaattattcaacgttcgaatttgaaaccactccgggcctcctggacttcacccttcggcccatttgtcttcttcaattcgagtagttctgacttcgatgctgcattcacctcgcaaaccaacatctcgcccatactctcacctcgaggatgcttacgggcccccccccctcttatgggcttcttctacttgtgcaacaatctttggctggatccaagcccatggtgcgggatccgacaccaacaggtgtgacaaatggtatcagagcggaggttaaagtcaagccggtgctaacccggaaggctaagtcggagagttttcttaaaagatagattttaacgaagtgtttaaaaaataaaaaagttttagtatttgataaacgggaaggggatttttctaaaagataaatagcaacaaaggaacgagacttgcttttaaagttgttctttaaagtttatgttttcatagagggcatatcatttcgatgattcaagtagagaagttaaagtagaaagaaagcaaagtcgattcaagtttgctaagaaagagatggaattcaagagatactgtggaaatcagaaggagtaatgcatgaagactaccgagaactttttaaagactacattgctcaaccagaaatgttgaattcgaggacgaatcctcagagaattgtgagacccaactccatactttagctcatcataggctcatctctcctaataacttataacactaaaagtgtgagtatatattggtgtatgtacgttcttcatgaaagccgtcaaaaggaaacgcaaaacctaaatttgaaggagatcatgagccacatctaacaaagatgacatgatatggccaaggagaagagaattagttgcaaagaagaagaagaaaccggagtagaaggcgagacatgacggagagataggattatcatcaacggaaaggaaaaacactgggagagggagatttcgttcaaaatagtaagggggattcacgctaaagaagatcaaagcatcctaggctggggcaaagcaaaacagaatcaaagaaggaagaagatgaagggaaaagtgtagtttcaagttgtggttttacgagggagattccccgtcatgacgaggagtatcagataacgagtaagacgtctttggaaagctcacaattccttgaatccacaacaacagacggagtttgaatcgaggttatattcaagaagatatgtgtgctttttcctagataagtaactgtagaatctggtgaacctggaaacctagaaatctaattcgtattggcttcttcgaggcaacgtttggaggtctgaacctatgtcgatcaagacgaaatttggtgcagagcttcacgatcctactggctagataatcaatggagggattaaagcgttaacagttcattgaagagttattagggcgtctttgaggcagctgaaacaagcgttctacatcagcaagtggccaaggtgagggtgtgatctgcggagatttgattacatgtttctatgtttatgcttcatgattcatttcattgcaaagtttggtgaatttgcatggatggtcgataattcgaaatgattaaaaattaccatatggttagagtttagtggatgtgtgtggacggtcgataatttgaaatgattgcgttttaataatattattcataaaacaagtgttacgttatgtaaaagatgttgataaaatatgatgaaataagttctataattatttttgggtttatggtcatatgggtttagggtttagggtatatgtatatggtttagggttaatgtctatgggttaaagtttaggggtttagggtttagggtttagagtttagggttaagggatttatgcttaacatttaagggcaacaataagaaggtttaaagtttagggcttggagtttagggtttatggtatatggtgtaggatatatgtacagtaaaacctctataaattaataatgttgggactgcaaaattttattaatttatcgataaattaatatttatcaatttatagagagattttcctaatttgataactttttaaatttttttataagatttccttcattatagaaaatatctttctacaaccagttacaagtaaaacataataatattgtctagataacaacaccaaaagttttgatacagttaaatataaaaactataatcaaacaaagaacaaatatgaatttaagcaaaaaaatattataaatatattataaagaattttcttacatctaatatatatatatatatagttgatatatttatataattattaatttatgatattaatgggaccataaatttacatagaactttcaaaaaaattattatcttattaatttatcgatttatgtcattttttacactgatcccaactcgggaccggaagaatttattaatttataaacgttattaatttatagagtattaatttatagagtattaatttatagaggttatactgtatatggttaatggtttagcgtctatgtgttaaagtttagggtttagggtttgaatttaggaattaagatttaatgttttagagtttagtatctaatgtttagggtttaatgtttagagtttagtatctaatgaataggaatta

SEQ ID NO: 33111 - DNA, 550 bp, Arabidopsis thaliana landsberg
ttaaaagaatagatccataatacaactggtagagaaaacttttctcatcggtaaccaacaaaaagtatttttcacccaaggagaaagctcaaagaataccaatcgcgtcgaagcttctaactaccttcttccaaaaaccatttgcttccgaagaatattatgatgtaaatacgcaaagaaatagattctttttttttcttaaaagctattcgttactcttatgtatcaaataggtaatctaatattccaaatcaggttaaaatatatttataaattcaacgtccaaaagatttagtataacttgagagaataatttcttttttagtatttttctctgattgttccttttaatatacaaacaccctgcaaaagaaaaagacaaaaaggaaaagagaagttgacacattgttcttaaacaaagaaaaaagcaaggtaagaagaaagtcataacaattatggatgtaggacgatgccccacttgccaatctcctctaaaatatacaaaactctcatcgaaatgtgatgcgtgctacgaagatcaccatgacaa

SEQ ID NO: 33112 - DNA, 645 bp, Arabidopsis thaliana landsberg
ggaatattatgtgtgattatattgctcacaatcaacgattttttcaaattgtgatgatcagaatttcagtaaaaaataaactctatatgtttttcattcaaaatggaaagctttatcattcaaaaaagaaactataattgacttgtggaagataaaaccgatttgacttcgacacaaccacaatttgaaacatttcagactgttgctaaacttacgacaaaacaagttcttattactgactcaggcctttaaattcctgatgttacagttacaaatagatgtgctcttaggctcttatctctcggcttatatgcattgcaaacgcaacacaaaaattgtgtaagaacaattgattataatagtattcggttatttttcttcactaatctattctatggtcctcaaaatgtcccgattcttgattgtagcaatattcaatcttctatctacgacctatgtgcactcttcaattgattttgcctgagagcctaagactcgagtttctatttaccccaaaatgttaccaaaagcatagccagaagataataacataacgtatcagaagttcaaattcgacttcgacataaccataatcttaaaaacattacagaatatttcttaacttgacaacgaaacacaagttca

SEQ ID NO: 33113 - DNA, 1187 bp, Arabidopsis thaliana landsberg
  unsure (1)..(1187): unsure at all n locations
cgtggagtcgttatcatcgacggcgaatcctttgatgaaaacataaccaggtcgcttatcttcgccggaatttccgtgaggattctttctcttctccgatctatttgaaggtttaaccgatttgagaaagtgagacttcgaaatcaagtgaatctcatcgctaagcttgtcatgtagatcccagattttctcaagaacagcttcgatttcttcgatctccatttctcccatttcattgacacaacaaaaaagcaaacccagaaaaaaagcaaaagttcttcttcttcaggaaaattctcactttaattgtggactcaaattaagcgctccgatgaatttgatttccggatacgggtgaaacccgacccggaaatactaaaacaagaaacagctggcacggactatgcacgtgtctcaaagcttggtagaatgtttgggctctacgaagcttctgaggcccaaaaagtaattggtctcactaatgcatcgaagagtcacggtcacatagtagacaagtattgtacacgtggactgttgaaagccgacgtgtcaaatgtaaattattacggaaccgttattattgtcatcttcccgtttcttattatgttttcttatttattaacctaaacaaaacagaaagtgtattagataacgcanagcaaagaaagaagaagtctaaaacgatgggttcatcaaaagatagtgctagtgtcaccaacatctccgtggaggagcactttagcgtctctcagtctagccccggtggacaggtatagattttgggttctttctttgtactacgtttatatttaatgcataataaccaactaacaagcgtgtggtagtggtagactagtggcggtagatttgatcattttgaaaggatgtttcttctagtacacgcttaaagtggattattttacattcaaaatgagtatcatcaagagttggcttggacgaagaaagattgtgaatattaacttggcccaactttgtagttaattattatggctgcgtaaagttaaatccgtacactgcatggtgttgaaaacacaaaggaaattaatattttgtttgatatacttctttcaaaaaaaaatttatgttgaatttttattttgaagtctcactatatcatgttaacgcaacgtaaaacgcaaatatgaaataacgaaaaacgtaaaaac

SEQ ID NO: 33114 - DNA, 672 bp, Arabidopsis thaliana landsberg
agacactacatatattttacgtatctatcttcttaattatttttgattgagtgaaggcaaaagaatattttggttcctagattatatacggtacttcttatattgttaagaaatcgattgatattattttgccatgtgaaacttgtttttgtggtatttagaggtatttgtcttttactttttgttatgtgtttatgattcatcagatctaattgatgtatttagattaataaaaaggtgatttaaagacaaaactttacaacattcattcataaaacatacgaaactaggctaactagctaaaaataattatttgcatgcatgtatacatttacaaagaaaaaaaaaaaaaaaaaaaactaacgcctttgttagtacatcatggactgatgctatccaaacaagttgcatctagatgttagcatatgaaacattttcatgggctaaaataaacaaaaatattctaatatctatagattaaaaaaagcatcatacattggttggtccatctaccaaattatcagaatatgagatgagattcgggtaaatcttattcaatatcttatattactatttccgttttttctaataaatttgtgatcgcttgttgcacatgatgatggtgtaatgcattacatcacatacatgattctattctcttgatcatccctt

SEQ ID NO: 33115 - DNA, 1457 bp, Arabidopsis thaliana landsberg
tgttctccattcagggagtcaaatagttcttccagtcaccgacttctcccttacggaaaaatgttttgttctctctaccagtactatgcaattttccggtcttattgatctccaaactgctcagattacgtagagagcaaagatcgataatctcatccaccaagccgctttcttcttcttccttagtaaaaggacatcctaagaattcggctagtctcttgatctgctcacgaggttcttctttcatctcctcaaacttcataaaaagcacatggtttggatcttccaagcttcctctccagtagcttaggacatggtcccaaaaaggcccgaaaaagttgactcccctacaaaacatctcaaacgtatcctcgaaactgcttattattttttcatcggtttgtttcttacaaaagaaatgccaatatgaaaccaatgtgtcttttacgtttctagacatatacacaattttacaagtagaacctttgagaccttcttgcaatgtatgtgacggcatgtgtgtcgaaaacagcctcgaagatgatgagaacttggtaaggtcggggttttcgctataataatagagatctatctcaaagtagggtacaagaacgtgtggattattagaaagaagaggatgatcatcatcatgagaaggctgttttgatctatgaaggagtgcgaatgtaagcgccttgagccaagtggtgccgcatttagggaacgaagcaacgatgatatcggtgtcttgaggcttgaagcttttctggaaattgaggacagcttggagaacattgtgagtataccaacatccttgatacttgcaaatatttttcccagtgaaatctttgtctgaaggaagtgaagagattagagtctttgctctcttcgtttaggtcttcaattctaaagttcaactccatctttttcacatccattacaaacaccgttgctactatatataataacatcatcactatgatttgtattgttttgcaaaacgcagcgttttcaaccaacattagtttgtttatttgtcaattattgtggtagctaggatttgctacggtagtagttttgtctgcttatatttttaaaatataatttgagtgatgacatatatgtgtagtaagaagtagcttttgttataaatgtgataattattcatcacgttacttctccttcaaacaaaatagcctccaaacaaagttgatgattatccaaatgaataattatgtgtgtaaatacatataagaacatttataattttattagttatttggccatcaagtttttttacttaataaatacatgtaagaagaagagaacatacttttgtgtgtgaagtaatataagcttcggctttttactctttatatttcgttcttatacacacaaacaatcgaataatttttactttttttacgttatattctacaaccgcttttatttttacc

SEQ ID NO: 33116 - DNA, 291 bp, Arabidopsis thaliana landsberg
cctccacttgaacctcttttgttaaaggcatgatccaatctccatataagtcaccaactaagatcggactgattttgaaattttgtatccattcccttcttcttcttcttcttctttctcctccatcccaactttcacttcttgcccgtatgttcgggttttcatctcaactctcttctttatcgcatcttccacagtcggggatgtcagcatatccgtcagtgcatgcttatcctgcaatgcgtatgttgccacgtcaacaggtaaggcatgcataaacttcgagttttt

SEQ ID NO: 33117 - DNA, 1890 bp, Arabidopsis thaliana landsberg
aaaaaacccaaataagtacattgcatttgtaccaatggaaaatgaacaattcattcatttttggatcgttgtaagttaattacagattcacaagaaaagaacatgaatggttgactcacactatataatcaattttacttttattgccaataaaaggaaaacaattcaaattttatagtatgaaatattgtttattattcaaacctctttcctcatttcccttttttacttccttctctttctttttaaatatctatttaaaagtggaattttgtttttcacatttattgtatgaacgaattcttttatattttcttcacctagttgttgatctagtctgtaagaagcaatttcatcgctgtcctcctatctttatggccctgaggcccatgaagccatgatatacgggcttcatctcaatcttaatggggttgtacatcacaaatgcacattatattattctcgacaaaggactaaaaactagggtttgacaccgctatgactgcttgcttcccaagcaattgatcatcacaagtgactaagtgagtggtttcaagtaattttgtacacatcaattttttttccctttttcgtataaaaggatctaaataattttgtatatatcccttggtaaaatctatggatacgattcgattgatggtttagtttgatttcttcgaaataaatttagatgttgttttgtaaaataccaaagagtgctaaaaataattgtaaaacagctaagagtcttggcatttttctttactttatctcgtcttcttcgatagtggttgctctcgctttcttgttgacttcgtgtctgggggtcttttaattttttcctcctggaccattttttttttgtttgttccaattgtgaatctctgccttaagagagattccatagcctacggtataattgtgaacatttgcggttgactcaacaaaaatctacacacaagtcaacccaaggcacattgatgggaccaacttgtaaattatttgtacatttatgtgcaaacaattcaaaacaccaaaatcctagagtattagaaaatgaacaccaaaatccaaatgttgaaatttgcagttagttctagtttatgaaacaagtttgtctttaacgaggagctaaaatagtaatcgatgcagcatcaatggaacaaagagaagacttatccatcgatggacctgcttgttcatgattactccggaagaaaaatccaggtggttgaggtacagcgagggcgatcgagctagtagtaagcatttggacgatcgctgacatggttggacgattttcagtatcttcttggacacataataaggcaatatggatgcatctaattatttcgtttctttgataactatctcgaaaggaagaatccacgaggtctagtggtgacccgtcactccatagcctccaagtctattaaacaattttaagacttaaaatatgttatgactgtttagtagagcaaaaaagtataagtgtttattatactcacatatgtaaccaagtttccaaaactagcatccatctgatagaggctgctatttttcctcccgcttataatctcaagaactaagacaccgaagctatagacatcagatttcattgagaattggccgtacatggcatactcgggagacatgtaaccactgccacgatacgtatatgtttgagttaatagaggatttttatatttaatagatggcaagaacaaaacttactaggttccaactactcttctcgtatgggcttctgtttggtccatttcgaagatcctcgccattccaaaatctgcaactttcgggttcatatcagcatccaaaaggatgttacccgcttttaggtctcgatgtatgattgtgagtcgtgaatcttga

SEQ ID NO: 33118 - DNA, 1404 bp, Arabidopsis thaliana landsberg
tcacttaaacacaatgcactcaaactcaaacataaacataaacactcaaaactcaaacactaccaaaaacaaatcatatctcacgcaaaaaaacctccaaacacactcaaaggtaacaaaaaagcagaacataacaaaagaaacaaaatacagcacaacacaaaactagacacaagaaagaaagaaaaaaatcaataacgtcacggttaatatctttttttcttattggtaagaactttgagatcctgttgcgaagtcaatttcaggtaagtatctttatcttcctatttttcttccgtttctttgtgtcttacaacttacaagttacaactattaatctttttcttaacaattttgtactttgtatgctattccaaaagagaaattcaagccactacaagcgaaaatggtgtcttgcatacaaaagtaaagaggtaaccaatgtatttacttagatatgtttcgtcctgtgattgtaagtgaaggggtatcggggtgatgattcaaaatccaagaaaaacactaaagttttagggtaaagcttcttgatttcttctcatttaattacttttgcttcatattttcatatgaatacatacttgagaaaggacaaaaccaatcgtaaaagctggtttttgtcatacttaatgaacatgttcaatttttcagctttggacattgtttcattgtcaaaattaatagaaacaccaggagcaaatcagtcaaatcccgggatggatcaaacttcgtaagatttcgttctccattagcattatttttgtggttttatttaatagtcttgtatttagtaactgctaatagaatggttttgtatcaagatggtggaagactcttaggctgaaaataattgaacaagaaagtgattcagtcgactaagaaaaaggaagtgtcaggtagataaactatctttgtctcttttcatatttgttttttacggtcctgtgtatttattatactgctaatagaatggttttataacaaggtagacggatcttaagcggaaaataacctaatttaagaaagccattcagtctcccctaaagaagaaggtcaggtaaataaacacacttttgctggaaacgtctgacgtgttcaagtggtctataacttgtaagaactagtcccatatcatatatctagattacatcttgattcgcaaggtacaatattaataatatcagggatgagtttttgttgttggagaatcctctgccaatgagacagccaaatattttctcagtcttaaggagactgattatcttcatcttctcttacacctatcctggctcggatcatacttagtaagattgtctctacatcagcattatttatgtgggtttattatatagtcttctgtatatagtgtattgcttatagaatgtg

SEQ ID NO: 33119 - DNA, 472 bp, Arabidopsis thaliana landsberg
  unsure (1)..(472): unsure at all n locations
taaagttagttaaagattatggacattagtctagttaatctttcaaccaagaagaaacctcattcaattggacatttaagttttcacttttcagctataaactgacaatcacacaataatgggatacctacataactagaataaggtttttactgtttatgaagaagaaattgaacaaatattggaacactctaaatgtttgtccttccaataaaagaccagcctaccactaatgataaataaccttttcaaacagccaaaaaaatgtcttaaatcttaacgaaatattatgatttgtgaaaatatatgccttatcaacatttttgtggatgactgtagtatgtcacattttagtggtaacatttaaaataaacgtttttacaagaattgtttactttatcaataatcacgaagctaactagaaaagctactgtgattgagcagcncataaaagatttgacagagaagagaa

SEQ ID NO: 33120 - DNA, 1378 bp, Arabidopsis thaliana landsberg
gatccttctagctccaataccagtctctgtaatcagtaaatccatagtttccttgcccacaaattcaagtacttgcattcctttcgcagttaatgcttttcctgtctgaagatcagaagtatgggataaatgaaatgttaagctatgaaagacagaagaaaacacaaacagcacaaacctctagtagagacggtgcaccagatccagcttccctaggcgaagaaccttgctggacactgttttcaagcctacaagagaaatagtggagcatcaataacttgatcttcttcctagggtaacgggtctgtacacatgaaacagacgacctctaggttcattaagcccggcaaccattgtagattcttatactaaggaaatcacacatatagcttccccaacattttattggtactaatgaaacaaaaatgagctaatttaccaaaagaagaatctattaaagtaaatgaactgagtatgctcattctgtggtgtgtcaacaaagtattaaatgctcagagactcagaaacggaatgctaaacaattgacgtaatttatttcggtgcagactttccttaagaaagatcatggggcattgataaattctttaaacacaaccctcaaactaaaggattactttccttcttgtcagggtataaactcagcggcttcaaccaattcgttcacaaagtttgtactttgaacacagttaagattaaagctttcagtaaaacagagacaaattaaaagaaacatacttttgcaccaaacttgtgcccccttttaacgcatttccaaatgcttgccaagctccagaagtgaaactctcaactgaatcatcgaaaaccttcaaaccctggaagatgaaagatcgagataccttgtaaattctaacgtctaagcaaacgaaaaataatgacttgacttaagccaacaacaaaccaacagaaaataacatatggaggaacaaaggtctatgtaggcaaaggcattaacgcatttccaacattatcaccatgagcatgaacaatgacttgtacataagaagcaaaaaaaaaaaacttgcctggctaagaagtgactcttcacttgcaccctccaatctctcaagagctgacttctttaacttcgcattctcatcatcactatcctgctctgtatcagcttcttcagttttctcttcttccttagcagaagattcagagtctttatccacttctcccatctctgcaatgcttttcgctgctttctcggccaccgctgcagcctacagtagtcggcaaaatcaaagagtctagatcaaagaagttcctttaacataccatacaaagctctaccataagctttggatccgatatctaaagcattatcagaaaacac

SEQ ID NO: 33121 - DNA, 623 bp, Arabidopsis thaliana landsberg
  unsure (1)..(623): unsure at all n locations
ttgttttaatatcattgaataaattcaaaagtataaattaattggagaaaaaaatcagaagtaagactaatggtaaaatctataaatatcctaataaaatttagatgtttaattaaatagattgagaagttccgagagaacgacacataagtatgacatttttgttaaaatagctttaatcttaccagaattaatacatggtgattttaaacacttttcacattttttttttaatgatttttctaaataaatgttcgtaaagcaaaaaattagcttccaaaacttataaagactatatcggtcttactaaaaaaatcaataaatgcattgtgttcacaatcattttctaatgaatctttttattctacatatatcatgaattatgataaataatatttaatacctacatacaacttaacaaaatcacattttaaaaaaaaacatccgcggtttgacgcgggttttgctctagtatttgtaaaaatgtttagtttggattgaaatctacatgctaccaaagttggatcgaaattggactnttaccgtaatgtatatgggctttactgggtctaagtctaagtaaaacaattaattagcatagaaacttgttatagaataaatta

SEQ ID NO: 33122 - DNA, 830 bp, Arabidopsis thaliana landsberg
taagttcaggtactttaagattcaatttattttttgtttctcatgagagctatttactaataactctatagctattatctcttgttttattaacatataagtgattgttatgtgcatacattgataaggagtatccgaagcgcttattcagacatggtagagagcctcttgttggaaaaatcaacaacttctgcaaaacaactctcctcaagagaatcatgaaagcttccccactagagtataaagaagtgaagagtgatcctctgtttgcacacgtctttgccatatttgaaaaccatttaggatactctgctcgtacggtgcatagcttaatgtatagacagttggtaactaggaagaaacatgaactctggtttgtgtttggaaacaagcctcttcgattttctatgcaaataccatgagatgccaatggatagattttttcaagcgatttagtgatcgagaaatgcctatctgacacaaaagctaagtcttcttcatccgctatgagtttcttaagttgtataaaaaaccattgccatgaagaatcattctcggaatcagcaactccaaatgcaattggatacaaattggagttaccatctactgctgtagctaccaacataactcctttgtatttgcttttcaaaaatgtaccgtcaaccacaatcactttccgaataggcttgtaaaaccctctaatagactgaccgaaagatataaatagatatttgaatctattctcaccatcaacttcgtagtttgtataagtaccaggattcgcttgttctagcatgtacaaggattttggtatctttccataacttttc

SEQ ID NO: 33123 - DNA, 1944 bp, Arabidopsis thaliana landsberg
tgaattagcgagaccacaatgcttgcggtatgcatattggagcaatgcaatctgcagggagatttgatttcaagtgaagagacagttgacaatgaaagttttgaaactattccagacttaccgtagtgaacacaggtctggtgccggaaactgttaactttaaaacctagatatttacaagatgatcaagcgaactatctgccccatatacttaaatgcctttgccgtttccttcaagcatttgttcttctcgtccctactccagtgcttcatttcccaaaagcatcaccaaaacatcagattttagcaactggtggaatgaagagttataattttcattgacaatctcacctccccaagcacgttaagcttctcacggacgcctttaagcaagtcttgtgcatccccttcccacctattgaactccagctcctttccttccagaagtttctcagataccttaatgaatcaactgatcagttacatttgaacacctcgcatataagggttaccaaacaattatgacagtccaaatcatgggatatattgataaaagtaagaaccagaacacaacagaaccaacaaaaagaatgtacagttatgataaatctcaaaaataaagacaaaagcatagttcacccgttggttaataccacattaacctaactaacagtcggttaacaagttcttttggggcaagctttaaactaattgagcaagcctggtgttggttggttttggtttaggatctgagtgtttctttatcacagttctatttgtaagttgagtctcaacgaagaagaatggaaatcttctcacattctcattctcattcttatcgccactctctcatacccaccataacccgcaaaactcccgataaacccaactctcctgaatccactatatctatatcaatctctaactctatcaaactagctgttaccattcaatatcctagatgtgacattatgcagttgaaaatttcttctatgttactctgtgaacacttatcaaagaaactaacctgtcttacaaataacttgaccaccagcaatgtgtgaaaagtatactaaacaccagcaaaactcccgataaatcgaactctgctgaatccatttatatcgatactaatctttaatatatcgaactagctctaaccattcaatatgctggatgtgaccttatgcagatatataactcttctatgttactctatgaaagctttccaaagagactaacctgtcttacaagaacttgaccaccagcaatatgtgaaaagtagatactgtagaaatgagaaagaacaaaaggagcactttctcctgcttgttcttccaaatactttgcataagaaactcctacattacttggttctggtataaccaaatcttgttctcttaaccattgtagatccttctcaatactttcacatctctctaatcctgttctcctaaagtaagcatctgtacattgaacacaaaccccattaacccaaatcattaccaaactgtcaaattcgagaccaaagtagggttcttacaagacacattctcagattcgtcaacaattcgttcaatagtatcgaagacaagcttgctatcaactaagtacttaagaaacccttctttgctaggcttccaagtctcttcctttacttcatcatcatcatcatcgtcttcttcttcttcttcttcttccttctcggtgtcagttttatcttcagaaagatctaattttttaccattaacattgcgtaatctcatggcgacgaatctcatttcctcagttataccaatgttttctcctgggtattgtttcctgtaccttgttctcttcctctgtgaggccttttgttgtgacggtgttggtgtcgaacgacatagaatgagaagatgcttttgtggctttctctgagttgagatttggaatgggaaagagata

SEQ ID NO: 33124 - DNA, 5858 bp, Arabidopsis thaliana landsberg
taataacatacataagcatgtgtactttacattcatacacaagcatctcaagaattttatatcttgtcttggaaatccagctgcccatctcctggtttgattttcatttactccacttattgttgttaaatacatacataaccacttgatttattggtaatgctattatattattgttgtgtgcttgttatggttgtagatgtagtagtgaattagatatagaataaacaaatatgttagcgtgatccatgttatgtcatcgaggtgtttcattaccacgaattttcttagaaattgtgaacaacatattgggaccgtgcgattaatttgatttgtgttgacaaggaaaaaattgttttataattttaacataagtttggtttccaacaccggtgtttagtactgttttaatattgtatacctaatgtaagtagtttattaagaatggacaaaatgtacattaactacttaatatttaaatgaacatttgttttaaaacaaatagcagagtgaaaaatttgacatagcaatgtcattttcattgaccaaaattaatatatcaaagtgcgattcaaataatataaacttatagtttaggtttttaacaaaatagtggaaatgtttcgagatgctttcacacaaaacaatactagtattttcttcaaaaactttaatacatatatatatatatgaatataatgtagttttgaaaataaattccatgaacaaaaaaaggtcctaataataaattcgaataaaatagtgttagttatttaactaacacatgttatgattaacaactttaagttctttgcaaaaaagagtttagtttttaaatcacgagttaaagtaatcgacaccaccaccatcttagattttgtagttaagactaattaaagaaaaaggaagaatacttccaacataatttagagccaatggatttgaagtgagacaaagcatctcagccgttgaaagattttggtctcgatgttttcaaaaaatcttcaaaaagccacaccagagagacactcaaatagagcaccggtccgtcagattcagtttcgaaaaccaggcccaaagccacctgccagacttgtttcccctctaattactatattgtccttctctcttttgcagtgtcttcctcgaatcttaagggtaaaattgggaattaaagtaaatattagtaatgaaccatctgcgtcagtttcgtctttttgctctgtttcctcggcatatgtaagatttttttttctttcaaaaaacactgtttcagatcagtgaccctttctttcattattttggagaaagtattcgaaaataaagtacgtgaaaacgggaaattatttaaactgagaggtggaattctttttttttattttcccttccgttattgtattattttccaatggtatgttggaagaatttgttttagatttttagaagataaagaaaaatcaaccaatagaaataaaaatggcaaaaacatgttttagttccttttgaggaaatgttgttatagagggattatccagttatagacatcatcgcaagatcactaaattcgttgtacacaaaaatgataagcaactagtactactttgttgtttcaaaatttacaagtagatagaattagctcgtacacaaacctctataatagtactatagaagaagcaacttacggccaaaattgaaagagtaagacaaattaagttgtagggggagagtagagtcacgcgctggatttgcgaagagactcgacaatgatggcacaagaacacggtacatatgtagataagtacatctacagacataagccacacatagaggacgagaaaccagaaagaaaaaaaagaaatgaaaattccttattacaaaaaccaaaagatttagagagagagagagatagagcattgatgaagaccactttttatatattgcacgcatccatataacagctacagagaaagaaaaaagaaagaaagtgattttagagaaagaagaaaaaattaaagaaagttggggcgccaattacaagttttgagctttgcatgtgtttctttcttccgtacattaaccactctgagacataacctctctctctctctcttcttttgttgtctttctgttctgttcttgagatctctctctctctctctctagggttatttttttctgggttttttgtttttacagttactctgtgttgttgaggaggcgatgcccttatcctttgaaaggtttcaaggggagggggtgtttggtttatcttcttcttctttctattcagattctcagaaaatctggtccaatcaagacaaaaccgaagcaaaacaagaagatcttggttatgttgtcggtggttttttaccggagccgacgtctgttctcgacgctctaagaagtcctagtcctctcgcttcttattcttctaccaccaccacgctgtcttcctctcacggcggcggtggtaccaccgtcaccaacaccaccgtaaccgccggtgatgataacaataacaataaatgtagtcagatgggtttggatgatcttgacggtgttctctctgcttcttctcctggtcaagagcagagtatcttgagacttatcatggacccgggttctgccttcggtgttttcgacccgggtttcggattcgggtctggttccgggcctgtgtctgctccggtgagtgataattcgaatcttctgtgtaacttcccgtttcaagagattacgaatccagcagaagctttgatcaatccttcaaatcattgcctgttctataatcctccgttatctccaccggctaaacggtttaattccggatctcttcatcaacccgttttccctttatcggatccggatccgggtcacgacccggttcgtcgtcaacatcagtttcagtttccgttttatcacaacaaccagcaacaacaattcccgtcgtcttcttcttccacggcggtggctatggttccggttccgtcgccgggaatggccggcgatgaccagtcagtcatcatcgagcagctgttcaacgcggcggagctaatcggaaccaccggaaacaacaacggcgaccacaccgttctcgcgcaagggatattggcgcggctcaatcaccatctcaacactagtagtaaccacaagtctccgtttcaaagagcagcttctcacatcgctgaagctctcctctcactcatccacaacgaatcatcattatcgttaatcacgccggagaatctgattctccgaatcgcagcttacagagctttctcagaaacgtcaccgtttcttcaattcgtcaacttcacagcaaaccaaacgattctcgagtcctgcaacgaatcagggtttgatcggatccacattgtcgatttcgatatcggttacggaggtcaatgggcgtctctgattcaagagctcgccgggagttggaggaaacagatcttcatcccctccgtcgctaaagattaacagtctttcgcttctcctccaactgtctccgacgaaatcgagctccgattcactgaagaaaatctcagaagcttcgccggagaaacaggtgtctcgtttgaaatcgagctcttgaacatggagcttcttctaaacccaacttattggccactctctctacgttcatcggagaaagaagcaatcgctgtgaatctcccaatcagctccatggtctccggttatctcccattgatacttcgtttcctcaagcaaatctcaccaaacgtcgtcgtttgctcagacagaagctgcgaccgtaacaacgacgcgcctttccctaacggtgtgattaacgcgcttcagtactacacatctctgctcgagtctctcgactctgggaatctgaataatgcggaagctgctacgagtattgagaggttttgtgtgcaaccgtcgatacagaaactgttgacgaatcgttaccgttggatggagagatcaccgccgtggagaagcttatttgggcaatgtgggttttctcctgtgacgctgagtcagacggcggagacacaagcggagtatttgttgcagaggaatccaatgagagggtttcacgttgagaagagacagtcttcacttgtcttgtgttggcaaaggaaagaacttgttactgtctcagcttggaaatgttaagacgaagaagaaaccacaaatctctctctcgcttagctaatttctctgtttttctttgtcagattttaaaatgttgttatgttgttcaatgatgttcttagtttcgagactgttgtgttttaacattttaaggaagtcagaatatataatcaaaatctccttttgttagattttattttgctctttttgagtttatgcataaatctcttgtccaaaaacagaaattgttaaagagatatggtttttaggatcttcagagtctacttaggactaaaatagacttgtggaaaattctggtaaagatcctgttacattgttagggttaactggttaaggtcatacattattacatatacattgaaaaaggttagtttatcaattttgaaagaaaaaaacaattttatctagtcattagaatgtaattaggaactagtgaatgaatagtcacggtacatgcaaaataacacatttctatgaaatagttgtatatagtattaaaatttacaaccaaaaagtgaaagctaattgaatttatcattaggtttttggagcttccaaggttgaatgtttgtttaatcgtctcgggtccctaacggattttttggccatgaaaaagtttggttttccgtcataaaaaaggttaggactttaatttcgttcaatgtttattttagatgtaggggttaaatgtatttctaagcttttagctttaaatatacatatccattattgtaatacgacttttgttcgtgaaatcacatgctcctaaagtcattggtgcatgatattataatcttaggtttgattatagaacttttttatatgttaactatattgggcggtcttaatttgtgaccaacctcatcatttaagtattatcgatatagttttatgacgtcggtgtagaaactaaacattgtttaatcatggccatagcccgtagtagctaaaaaacgtgtaacttttatagattggctggatggaaaaaaacagataatgtatacatatctgttaatatcaattattgtcgtctttatttactaagatctatatctaatccactagcatcttacctaactattaataaaacactagattaagctttgttttgggtgcggttaatttgataacaaaagacaatgttaagttttgttcttgtagtaatctacttgaataaggtttgttattggaggaataaaattttacgggaaaaaattgaaatgatgaaagacctttccaaagtcatgttttaaattatttataataaaaaagcaaacagaaacgaaggaatttttttaataatatgaaaaagtttggttgtgacacctctagtagcggatcgaggtttgcatgttactttgtatgaaatgtttttgttttggttgcctaatttcgaaattatcagcttttgacaatataaaaagcatgcatcagctgtaacttaataactttaaaactaaaaaaaaaagacgtcatcaataagatatgagaatctgaactagagatataataacgttaattaaacatggagccaaaccgacaacagacacttgtgttgtctccatgactgccaaagaaaccttcataattttactctagacattaattgagaatacaccgatttatgcacacacctagtcacctacgtgcttacaaatattacacctattatgtttttctttattaaatggatagaaataacaatc

SEQ ID NO: 33125 - DNA, 9201 bp, Arabidopsis thaliana landsberg
tgtgtttatttccctgttatgcagagctaccgactcatggagtagcggccggtttaggagctattgaaggagtagtgatggagattgtgggacctttgctctggtctacacagtctacgccacagcggctgatccaaagaaaggttcactcgggaccattgctccaattgctatcggtttcatcgttggtgccaacatcctcgcagcgggtccctttagcggtggttccatgaacccggccaggtcatttggaccagctgttgtcagtggtgacttctctcagatatggatctactgggtgggtccactagtcggtggtgcacttgccggactcatctacggagacgtcttcatcggatcctacgctccagctcccaccacagaaagctacccttgatcaatcctatagcgttttaatttgcttggcttgctttttgttgtgtgaaaatgtttggtcctcgtttcttccaaaaatgaatgattgaatgtggagaaaaagatcaaagttgtactttgtgttggttataaataagaattgtatattttcaaattttatatctctgccttgtactttcttgcatgtgttaatggctaaaaataaccggttttaactgtccaattaaacacttccaaccttttgatattaaaatcacatcacacatgtatgttttggggaatctttcaaatatatgcttgaaaggttgacaaaaaaatccatagattcaagatatcccaaattgctcaattttttgttttgtggaaaggccaatatttccttatccaaggcctaatactgaaaagggcccattagaatccaattaaaattcataaactcaagctaatacacaaattggtcttattggctggagacactactattgtttaaacaaccgtttaagagtactcaacttaagtgatacaaatagtaatgctagaaagacattttaaaaattcgttatcccgtgaaaccaaaccaaacgatgaaacgacagagtacattaatagaaaaacgaaatggtctctttacgtatggtttattatttgaaggaagctggtcggttgtgggggaatgaatcgtgtgagagccgtccgctcaaaagacaaaatgctcttaaaccaatgcctttgtcgcttctttgtggtttcacaaaccgtcccaccagattaagatattacctgaattcatggacaatgttcttaaccataacattatcctctctttctccacacctatataaagaacatggagacgagttcttaaaatctgcaagactcttacggtaaattaaacacttatccagatttttattgtaatctatattattgattagtctgcacgtacttttgggacttgtggtttgaataattctcttttctcatagaaaaagaagaaaaaagattctcttattgtataagttaggtttatgctcttcctcttctcttccacctgagtcaacatcatccttttcatcttcaaaagctttttccttttaaaatcattttctttatatttttctttttctcagttttacagttcatttttttcaagttttaattctgaaactcagagctggttctctgttttgatcacatggttttgttcagaacataactcttgttccaccaggacaataaataccatcttctgatcacacgtcatctttccatattcaagaaaacttcattttccatcggaagattcgtttaggagagaaaatggaaagtggcttttattcagattggaaagatacttcttcttcttcgttctttggatcagagaatatggaggaagagttggaagatggagttcttagagctgaagagcttttctcatcgattcctcaacctcagacacctaaagagccaatggagtttctgtctagatcctggagtctctctacttctgaaatctccaaagcacttgctctcaaacatagacaacaacaagatcagttttgtgttggccagaacagtcctcctgttttgttccctgatgctgctgcagatccactcgtggtacgatccttttatcccttttccaaattccaatgaaaccctttttccaactatttcttagaattatgatgagccttaaaagtcagagacttttcaattgtatatgattgccattgcaccagttcctaacatagttcttgggaattggaatggataataatagtggactcttttcatattttacaactttgggattttgattctaggctgggaagatcatgaactctgttggcacacgtagagcagggacattgtctaaatggtttcaccacaacaaggaacacagcaccagcagtactactaccaatctcaagaagaaagataaagtgcgtgtggagaacgcccacgtgcattctgccgtctctatagcggctctggctgcaggtttagcctctgtgacatctgctagcaattgcaaagggtcaggctccaagatggcactggctttagcctcagccactgaactgttggcctcacactgtgttgagatggctgagcgagccggtgctgaccatgcacgtgttacttccacggttagatcttctgtggatatccacagccccggtgatctcatgactctaacagccgctgctgcaactggtaaggctttgttgcagcttcacaaggctttttcagtttcgttgatatgcatttgatctgactttgtttaaactgacactagctttgagaggagaagcggctctgaaggcgaggcagccaaaggaagcaaggaaaaatgcagctattaccccttttgagagaagtttctctgattctcattggcatgcaaattttcagtatagattggaagaaccaaatcttccatttgaaggcgaactgatgcaatgtgcacgaaatggtaattgtcttctgtcaccgagtctgatcactttaagagttcactggatctgagataagacagagagcttaactcttcttccttgtgctttaacttgcaggagtgcagcgaactaagcgtgtctgtgtctatatcaacaagaagtctcaggtatagcagatttgattagtatctatatataacacataacacaactcagttcacttttgattcaatgcttattatgctacttatgattttgcaggtaatgatcaaactcaaaagcaaacatgttggaggggcattctctaagaaaatcaaatgtaagcatttactaatctttcagtttggataaattacctgaaagacgacactctgaacttgttcttcctttctgaaggcgttgtctatggagtctgcgatgagaaatcagcttggccttacaggaaagagagggaaaattcagaagaagtctacttcggtctgaaaaccggacaaggtcttttggagttcaagtgcaagagcaagattcacaagcagagatgggttgatggggttcagtctcttctccgccaagtaaattgctttgaggctgccaaatgctcgctgggatctctgagtctcactggtcacacgtgatgcaggatcctgtatatatttgattatattcatatatataatatccaaatttttgctgttgtgaggtatttgcaaaacctggcaatgtaacctcagaagacttttggataaaacaaagcaggttgttcaaatgatcacaacaagtgttaggaacattgctatgtacagaaagacatcagaagaatgatgaatctcaattgaactttttatttccaatgattcagtttctatgaagagtcaaaaaattgtagagaagtggtatgtatatttttgtttgagtgagaagttcatatgaagaatcacgtgagagacatgtcagagatattcatatagaccgtattagaatacgacagtcctttgtgtcccataaggcaatactcgcagttcgcagtaagattttatagctttcatgagacactttttctcaaggtcctctgatttctggacaaagctcctcaaattgtctcggtgggaaactctctcaacctgtaaaaactcaaattgagacgcttctgaagaacaatgcaacactcaaaacaaataaactagttgggagatgaatcaccatttgctcaatgataggacctgaatcaagttcctctgtaacaaagtgagttgttgcaccaattagtttcacacctgcatcaaatgcctaccaatacaatctagtaaagtaagagacagggacgaaaacttgagacataaggacgagctaaatataaacctgtatcacgggatttcttcctttgaatgatggcaagaggccatgatggatgttgattacatcttttccataacctttcaagaagttaccggatagtagctgtcaaaggaaacttttccagtaaacatcatccgtcaatataataactaatgctaagaaatatcttttgttaataaagctgttcctgcaaagaagcataaacacaaagcaagaacagtctgaagagaagatttgattcattttggcgcaaacaaagtgtaatgagactattcaagacaaagaaaacgagcctaggatggaacttaaaagctgatatacctgcatgtatctagcgagaactagaaaatcggtacccttaaccaattccaaaatctcctcttctattttattctgatcagttgttggtaaataatgataagagatgccatgcctctggagaaacctcataacatgggtgtttggagctctttcatgattactggatacacaaaatattccggaatcactagtcataactaatatatccatttagttcgttggaagagatatatgcaaaccttatcacacatgttatatcaacgggaagttttccatcctgccatttatgtaacatttcaaccagacaatgatcctacaatacaaaagaatcacacaactccaggaaaaagaaggcacagaataaaaaggatcttctttatgacataaaatttacctgtttcgacagtagaagagctatcttgtatttggggtctaaagagggcactcgtactactgagctcaaagcactaaacttttgtgcaatagtttgaaaatcttcatccatctgcctcctcggccattttactggatcaaatataaactcactgcccaaagaaattaccttttcatcacaactaaacccaaaaatagaaacttttaactgctccaagcttttagtattcactttaaagacattgattcagaaagaatctattgaagtaacatcaaaggtaagatttttcaaatgggaaaattggaagctttaccttctagagtagaagacgttcttgttctcaggaacaaaaacatcataaccaagaatgttacctcctttagcagcaatacaatctgaaagtttcgctacaatcccaacgacatcctaaacttcaaaaagaaaaactggattcagttagattaggaccaaaagaaattatggggagacatcaatgattattggattcatatacgtaccggacaatggaagacgtggaagccgggaatgagaagaggtgagacagaggaatcgagggactcgccgtgaaattgagaagatttaaaggaccatttggtaaatgatctaaaagctgtggcggagagacatgaggtggtggagactcttcgtatcattgccgctatttcttgtcgcactcttttgaatccgactcatccgtcgttataaacattctcacctttttatcgttagattatgtgtttgttattcacatatcattctgaaattttagagcataaactcaaaactctacaaaatagagtgacttcactgtttacttcgtcgtattaaaaaaagtttattatattttccaaattgagcaggaattgtttttgataaaattctcatttttatacatataataacaaactttctaatgaaattattttatcttcatactctttttccactcctttcaacaaaaatagttaaagatgtatttcattatattatcaaatgggaattgcttaagtaatgttcatttcctaaattatacaccattttatggtcatttacccaaattgcaaaaaaatatctttgagcagccagccatatcctccgaaagcttccaagtttaatttgtacaccacaaaaagataaaagaaccaaaaaagtaacatcttcttttccagatatggtctgtagtctgtgctattttgtaaatatgactccatactagatttgtgtccctcaccaaatcggtctcatcctagaaacataccatttgcacacaaattattcatacagatataaccgtacaatatttgagataggccccatcgacgtcgtttagctcaaagcaagaagggagagagagagtcagagagcttcgttaatggcggatgttaaggactcagtgattaccaagtacggaatcgtagggattggtatgatgggaagagaacatctcatcaatcttcaccatctccgtgaccaaggcctcgccgtcgtttgcatcgccgatcctcaccctccttcacagctcctggccattgaactcgctcaatcttttggatgggagcttaaggtattttgaatttaccagaacaatcaaccttaggagttaggacttacttagagcggacccttttgctgtgttttctatataatgttctggtgcataattgtttgattcctagtctttgtacttgataaaaaaatttcataccttgattgtggaagagcttaggatttgagatttttttttactttgttgtggttaaggttttctcaggacacgaggagttgctcaagagtgagctgtgtgacgttattgttgtctcttctccaaatatgactcatcatcagattcttatggacattatcaattattcaaaaccgcatcatgttcttgttgagaagcctttatgcaccacagttgcagattgcaaacaggtcttttttctcttcttttctgtttggtaccaaattgatcaattcatccaactttgtctggaatcaggttttggaggctgcaaagaaaaggtcagatatggtggtgcaagttgggttggagtacagatacatgccgccagttgctaagctaatagaacaagtaaaaggcagagactttggtaatgtcaagatggtagcaatccgagaacatagattccctttcttggttaaggtaggcttaaacaagatgggactatgtgtagtgtttacgcttcacatttttatatgattgctgagagaacacatcactaggtgaacaactggaatagattcaatgtgaacactggagggaccttagtggagaaatgctgccacttctttgatctaatgaggctctttgccggtgcaaatcctgtctgtgtgatggcttctggaggcatggatgtgaaccacaaggatgaagtttatggtggaaaggtacatttttatcccaagttacactcaatcaacgtattgcgagtttcatactagatgtttctctgttatataggtgcctgatataattgataacgcatatgttattattgagtttgacaatggatgtcgtgggatgctcgatctttgcatgtttgctgaaggaagcaaaaacgagcaagaaatttctgttactggtgacattggaaaggtgagttcctttgaaatattatgggccatttttgtgtgtgtgtgtgcttatttatgcgcttagtgtgataggattttaggtttgatatgaaaaaaacagagctgggtgttctttcttttttattgacttctctgaaccattcgacgttattcccaagagtacataatttccatttattcccaaatcacatggcatatctacatgctcttgcatatagatggaagatgagcataaagtgttctcaagactatttctttggagttgttcatatgatccatgagttttgagttttgtcaatatgtccttttgctttcttttcaactgacgtggcaagcatgttgcagggggaggcacttgttccagagggtatagttcgatctggcagtcgtattggaggaagagaacacgttcaaacaataaaagcagaagatgaaagaataaagtaagctatatttatctacatatcgtcttacactcttaacaatgtattatagtctcacatcgcatcacacgatgttggtttattcagatatgaagggttgcatcacgggtcaagttacttggaacacctcaccttcttatcagcaatcagaggtgaaggaatagcagctgttgatttggaagacggattgatggctgttgccatgggagttgctgcacagctctccattcaggagcgccgctatgtaaccattgacgaggtcttgtgatttgtgactgtcagataggtaaataaactaaaatagaacctttgtattattaccgttcaaatgtttgccatacaacactgtttattgtaagaagagagtgatcatcaactgttgttataagataagccaataaattgaaatagcaacttatttgtactgcttggcaatggaactggatcaaacagcccctcaatttctctacaatccggataatagaaacagattcaaactctgttgaaccaaaataaccgaaccaaaccaaattttaatttggtaattctctaaattttttgcttttaatgttctttggacaaatataaaatataaaaatgtcgattgaaaattgaattaaataaatcggaaaccaagaattaatccaacaaatgtatatgtttgattttggctggatttacaaaccaagtaaattgaaccggaaaccctcagcacagtttggtcattgaagccggtttacgaaattaaaatcggcgtggtggagtgcaaaccgattgatagaattcacagtggcgcgcttttgccttcattttcggaactcgtgtacctttcactcaattttcaaattctgatctgtggagcgaaaatggaagacgacggaggagagagatcgagtttcgtcgccggcctaattgagaacagagccaaagaggtaagtacggcttctccattgctcggatttggcaggattatgatatgatttgtgttctctttgggtatcgattttgcgacggcgatttctgggatcgatatcgtagcttcaaaatcttgtttctcgcttgatatttcgattgtgatgttggattcgattttggatttctctgttcaggttggaatggctgcttttgacctaagatcggcttcactgcatctatctcagtatatagagacaagcagctcataccaaaacac

SEQ ID NO: 33126 - DNA, 542 bp, Arabidopsis thaliana landsberg
gaattcaacattgacatgatcccatcctaatcaaaacaaaggaggttcaatgaaaacaacgaaaatgtgtttcaaagttaagtaggagtgagaaaaatggatgcctcgttgatttgattacaaagatagccataggaacttaccatactcgtgacaaaaccaactataccaaaactaaccaaacccctaaaccgtttcttcttcatggtctgggttcttctgatcgccaactactgttctaatgaatacgcatcttgatattctgcatgtaacgattcaaccaacgagcgaaccaaagtgggatcatctacaccaccaccactttccaaactctgcaagtccagttggttgattggaccggtcttttccttcaaagcctttttaagttcggttaaccttttagccatgaaacgaagtgtgaacatctcttcttcgtcttcatcggccttaaccgacgatatctacgcacataaaaggggttgcgtgaaaacaaaccgggtgccgaagtcccggtgtgcgttaagatcaccattggcagaacc

SEQ ID NO: 33127 - DNA, 5833 bp, Arabidopsis thaliana landsberg
tcttgggtccaggagctccgttgggagcttcttcacctgccacccatcccaagtgccctcctcttggtgtcacaatcaacacgcagtttgggtttgcctgacacttctagttcttagatagactcaaaatcatatgattttcgtgtaaatgaatgatcattcatctcttaccttgatgtcatcgcgagggatacctctctcaggagcaatgggatcatttgctgcctgcatatcatataaacaaatgaacatgagaaaaaacagattctaagcttatgggttcatcactcattgttcaggaattcacctgaatgcaaagcaagggtatgcggacatgttttatagctttggagctgctcgacttggaatagtactcatctactgatttgaaaccgaacgagactgttacatgaaataaagaaacaaatgatttgtagctgtatgcccttgtcttctcaaagtatcaaggagaagatataagtagatgttgacaaagctaacctcgggttaagccatcatcgaaatccctaaccgtctcagcatttgcagccaaaggaatgttaaattcacctcctatgtcttcaaaaagaagagaatgtctgcataaagatgaattagtgatgtgacaataactaaatggcaagaagataagacggatgtggacaacgaacaattacttgctaaatattctacgaagagatttcgacaaggccttgtcataaacattgttaaaacccttatggaaatcttcatctgctataaccaaatcaaaaggattgcacaaagaaacagcagcagtgagaggacagttatgagattcctgcaacaaactaaaaaagataagaacttggtaatatctcctacataaatttccaaactcatgggttaagaaaataactaacctgacccaaatagttaacaagaatgttgcctccaagagaccatccagcagcatacaaattggcttttgggaatttatcaacaacatgatcaatcacttcaccaatgtctcctaaaaacgaagccgagtagaactgcattagcagtatcataatacttcagtaacaaaatgaagctaattggcactattcatctatcatcaccagaccatgaaacagtacaaaaaggaagctactttatgaatctaagatgaaccaagaaagagcagagaaagatcaaaacctgaggagtggtcacaggactatctccacaaccacggctattaaacacaacacaacgccattttttactttgagctcttaacaacatatgtctaacatacgaatcttgacttcctcctgttaaacctggctacacatttttttaaagttctgatttttaaactcaatacaaaatcaaaatcgaatttttgaaatgttgagtgttaccaacaaaatgaggattggtgaatcaggaggaaagtgcctatcttcgccggcgacccaatccaaagcaacagagccgttgtctttagttcggagacattcacggcggagtctaacgaaaggaacagaacgaaagaaagatgcgtagattgtctccacgtggcggttaaatccgattagaggaaacgcattgtacggtttagcgagtgagtcctttaacgccggtaagaaacgatcacttcctccgccgataacttcgagagagctgtggtgagagggacgagacatttctggattcgcggcggcgaaaactgagaaatgacggcggagagtacgaactgatgagattaacggcggcgatgatgtggcaaaggcgactctcgccatttgcttcaccacgtcgtcgttttggtaaccacaacgaatttgcctaaccgaaaaaacaaagcaacatttatgtggtcgggaaatctaaactaatttgcaatcaaagcccttgaaatatattattataacaaaatcatccttacttacagcgactacatttttcaaccctatgcggctatgcccgtaggaacaatgggccttgggcttttatccccactttttgcaactgtacactgtgtctttcatgtaaccattacgcggtgttgaccaagaaaagccagagaggatttgatatttttaccactaaatgactaaatgcaatttattagtagcttttgaacacttcatccacgtgaaagtctcccaatttggtcatttctatgtattagttgtattaaataacgaaatcaactttatattttttatggtaaaaattatgtaaaagtcaaattttctaattacaatttacaaaatttacacattgactaaccaatttaacccctctactcagctattgaactcaactccgccgtgaactttctcctccctttaccaccaccaccacaacctcttccgccgcaaccgtttcttttaactcttctaactctacactcaccaacatcttcatcgttgtaactcaaacctcctccaccgcttttcgcaagcgcagagcttgctttaaccgctaaagccgccatttcatctgctctcaatggatgattaagccatgttaatggtaaaacgaagtacaattctcctggtcgaagatcctcgcttccagggacagctaaaacggcgtcgtcgaaatccatatcgtcggagttacaaacaaagcttgtaggattcttttgaagaatctgccacactttcaccggcgttgaaaactcttgtaatgttccgtctggtaatatcagcttcgccgtctctgttctccgagattcacgtgaagcgcaagctcccattgttttagtacttctttgtacgtaactcgttgagttgactcgtgacttttagaaagtttgtagatagagaaagatagagagaagatctcgtctgtgtgtttgaaagagatacaaactactcgtggggctttatatatatatagaagaaagaagaagaagaatgagtgagcctcgtgattcggaaacttcaagtaacgttaggtttttgtcgtctagtgttcataatcagacaggacacagctcacgcaatattatttgtcttactgaaactacaaatataccctcatcatgcaatttagaaggagtaatttagattggttaatgtaaggggtagatttggaaattggagatgaaatcgtggcgaagaaggagagaagaaaggaagaaagtgtccacgtgcaaacattagagacttgggacaaaatcagaaagcagacaagcttaggtggccggaggtttaatttccggcggatggggtgcatgaagcttgggttatggagcctcacgtgaaggccaataagactaagcatgggtagggaccaaaccggtctaatggtcccatttagattcattcggttgcatgggtcaccggtcacctaacgagagattcgggtctttaagtctatatacgtgctttattctttagttttaggttaatttaatttgggtatgaacgtgtgcatcaataatgtgaattcaactcgaaattattgtgtgtcgatatggtattacggtccatcaacgctgtgtcgaatttttttttgttacattttaaatattttaagtaggattgatttgttgaagaatatcgctttccgttgaagtttttttttttagaattgttttgtagtatctaaagtcggatacttgtgtaacaaccaaaccaatatatcaaatcataagcttcaattatatgaaggtatgaacctctattatttcctaccactttatacttttttttcttaaaagaaacctattttagttaaactaacattaatgtaacgattaaagtagatatagtatattctctgcttttcatatatgtttgggattaggaacacccacgtttcggccaaactttattttttagtttgtgcgtatgataaatgaagacaataacactgattttgtccgatttctgctgtcctttatatatgatcatcagaaagaactagtcccaattgatgaatacagtacaataatgtgtgttcatactattatattttatggaacagaatttgactagccactaattaattactaatatggcgtaaattatttaacctaccatgacacttttattatataaaaaacaattattgacgtttataaatatagaccacgtacgatggttcgatctctggagagttaactgttggaactcaattttacacaagtggctctcgccatctttccggcaacttttccggtgatggccgtcaccggaatgaccggatcatggagtttttggattccttataatgagcactataagatagtgtatttacatgtaaaaattgaagttactattgaatgagtaattgaggtccaaagtggttagtttgaaagcttataataataaataataacatttgtcccacattggaagtttgaagatctctccttttagtatatggttcagtactacttattgggagaagacactatggtgtaggagatgcaagtcattatgcaaacaaatcacatgcgcgaccgcaccgccatgccgagccgaactgggtcaggccaggcttgggtttgggctctttgggaatgtgggcctcgacccataaaagatgttatttttgaataaaatatttatgaggcctttgttacttttatgtaacatttgctacataaattattgcccaataagaaatcagtttgcataatgaaaagagattattcgaatatttcttattcaaatttaaaacgagaaacggaaagtcataatggctcataaaatctcgcacacgttttgacttgcgctttactccgagttaatagcggatcacgcgatcttcgcccttaattgcggatcgcatttgctcctctcttggctataaaagcaacgtctcctcctctcattttattcactcgtttctcgcaaaaagttgaacgaacactctctcccatctgtccctttcttctcaaagtaagtctcaagaatatatcgtagttttcaagttcgtagattctgttatcgagtgttgcgataccggtcttatagtggttgtatcctgcgatctgctactcataaaaccgccacactgcggaagatagtttggattacggtaagagaatttagatctcgatttcactagttttcgaaaatcgtatttcctaatcgtatttatagagttctacctctttgtttcaaatcgagatttcgcggtcctacatgaacaagagatgcaatggcccgagacttttttgtttagaatttttttcatataaaaaagcctaaatatttttaaaaattgttaataatccaagtattataactcaaaaagcccaaattctgaaatactaaatatatgaaaagatccaaatattttttaactatatcattcttttataattagaaaccacaaatctttttacaataataggccaacaagtttttttccctaagacttatattttctttgagcctgggctgcatgtataaaattcaaaaaaaattattagttaaatatattctaacacaacgatgtataaatttaatacaatacaattatgagatatgaaaaagtcgatattcctatatcctaagagaaaacaatagtccatttgaaaggttcttattatattgacatgaaaccactataattaatgtgattgtgatacatgttaattaaccgattgattttatacaagtaaatatttaaattttattattaattaagatgttatccacaagagaagattttttagaataaaaatatctatccgatgagattgactcagacatgggtgaatataaaaaatggcatttggatttattacggttcggtcaagaaagcgatcatagagttgttaagaagaaacaagctacatattgattagttgactaaagtttttttttgttagttgact

SEQ ID NO: 33128 - DNA, 1222 bp, Arabidopsis thaliana landsberg
ttctacagggagctttacagtaacaacataactggcccgattcctagtaatcttggaaatctgacatacttagtgagtttggatctttacttaaacagcttctccggtcctattccggaatcattgggaaagctttcaaagctgagatttctgtgagtatacatatgctttaccggctcagttacagtctttgtttaatcttaggttttgttccaatttttgactctttgctgaaaattttacatgcaagaatagccggcttaacaacaacagtctcactgggtcaattcctatgtcactgaccaatattactacccttcaagtgttgggagtcctctcattaactttcatttatgtctacttcattctccctcagttgatttgttgagttaatgcacttaaccttgatggatgcaacacagagatctatcaaataacagactctctggttcagttcctgacaatggctccttctcactcttcacacccatcaggttctatgatttatcctcttcagttatttcagttgttgtgtcagtgtctgaacttattctgaaactttcatttccttgtgcagttttgctaataacttagacctatgtggacctgttacaagtcacccatgtcctggatctcccccgttttctcctccaccaccttttattcaacctcccccagtttccaccccgagtcagcctcctctttttagtttacattataggaaccagaagatgaaatctttgcttctctgtcaatcctttttctcatataactcatcttgccaataaggcaataaccaaatgatctaatttgatttcaggtgggtatggtataactggagcaatagctggtggagttgctgcaggtgctgctttgctctttgctgctcctgcaatagcctttgcttggtggcgacgaagaaagccactagatattttcttcgatgtgcctggtgagtttattattcgcattagtttctgttcttagccagcaattttgttttgcagaaaagtattggaacaactgttaatgaaaatcaatacataagtcattgttttttaagttacaaactcttttgagtaaaatctcgattgcaaaatctctatgcagccgaagaagatccagaagttcatctgggacagctcaaaaggttttctttgcgggagctacaagtggcgagtgatgggtttagtacaagaacattttagcagagggggtttgg

SEQ ID NO: 33129 - DNA, 951 bp, Arabidopsis thaliana landsberg
tttgcttacactaaattggtttgtgtctagtttaattttgatttatttgacataaacaaagtaaaatcatttgttttattaaaaaaattgattttttttctctctttgaatcccatttgcttcaggttgtatgtccttgataacaagatgtttgtatctcgctagaaatcaagatgcttgggttcttagaatcaaaattgtggcttgaagtctaggactaaatggcccattacgagcctatttccaaccttaagtttacaacttacaagagagtgctctcactcaaaatcccctgcatctgcatttcgttcattgatatcatctatcaggtttatgtcttcaccaacagcttttttgtgcgatccacgcatcttcacgagttttctcgggttcctgcaacctttcaacacatcagacatggcttctgctctatgcaaaatagacttccttctatctttatcaggcggtgcatctactgcttctctgtatgtatgtggcagcttcttcgagtgaggaagagacgacattaggctggatagtctcttcgccatatcgcttttccttttcgatctcaacccgttatcgatcatgttaagtgtgatgtactgtggaataatccctcgtctcactgcgttgtcaaactcttcaaaggcttcttctaacatctcgagtctgcagagcaaatgtataagcattgtggctgttaataagtcaggatcgattcctctgtttttcatctccttgttcacttgcatcgccaagctcagcttcccatcctcacacagcattttcaagatcaaatgattcgttaaccggtctggactgtgtccagcttcaatcaacttgaaatataagttcatgccctcttccggtttgttatgctttgagaaatacttgaagaaatggttgtatgtagtcgtggtaggatcaacaccttgtgtcatcatcctc

SEQ ID NO: 33130 - DNA, 605 bp, Arabidopsis thaliana landsberg
  unsure (1)..(605): unsure at all n locations
ttgtctggagttgtagcatatttttataatcttaaaacaatctcatataactttgtggtggtgagtgggtcatttttccccaaattttttttttttcttttggcatttaagggtataaaccaattacaaaaaaatagcatggagtgaattatcccactcaccacagtttagctctacatgtgattatatactacccgagttacccatatttcatatgcatgtcgacattcacatcaacatgtatacgaaaaatcggctactcataaatcactagtaaagtacacgctggtataatcatatctacttaatagagaaaatgacacattcatggaagaaagtatcgatttgatgcggattcatgcttggtatgctacttgtaacacacttcaaatataattctggtatttttaccgtacgataatcaataaaagtctttgattttgatttgtaatttgtctttatctaaatttaatnaatctttgcacaaatttgcaagcaacaatctttcgagatggtctctgtcctagtagtccaatcccaacagtatagtatatatcgacttaggtggttaactaatgacagattccatttcttagctaaatttt

SEQ ID NO: 33131 - DNA, 1326 bp, Arabidopsis thaliana landsberg
  unsure (1)..(1326): unsure at all n locations
tgtgtgtattgatttcacatatagaatctacagaaagcaagattgagggtgcggaaatgaaaatatattcagaattgagggagcattttgttacatttcctctctccagtctatgtatatatctcgcaagaggaaagctgaagaaaagcaaaaccctagaaaataaataatattccgtggcgcctgcggcagagatcaatgacgataccggatctctgtaacgatttggtcgatgagatactctgtcgcgttccggcgaggaatctgaaacggttacgatctaccagcaaacgatggaaccgtttattcaaagatgataggagattcgcaagagagcacatgcataaagccccaaaggagtatctacctctcatgttgacaagcgagtacaggatctgtccggtgagcatcaatctccaaggagatgttccttctgtagtgttaaagagagagcttagcctaccagatccggattattcacatcaattcgatataggtcgagtctttcactgcgacggcttattggtatgcaaccacgtaggcaagaatccccgatacggatctaaaatcgtggtttggaacccgctgactggtcaaaccaggtggatcgaagccggctatcgttggaaggaatacgaagtcagatttgttctcggatactgctaccagcaagacgagaacaattcctgcagtaaaaaaatctacaaaattttgtgtttttatcctaatggccaagatacagaaatctacgagcttaactactctgataggtggacaaggacgattcctgatggtgatctcactccagggtgggccttgatatactcagagcagaccgtgtctatgaatggaaatctttacttgtttgcttcggagaaatcaaaaccccatcttggcgtgtccttgctcagatttgatttctcaacagagaaatcatctctatgtgtgactcttccctatcagcgtccaaggtatgaaattttgagtatttccgccgttagaggaggagagaatctttctctgttgttgcagctcgattttgaatctaagactgagatatgggtgacgaannnnnnnnnnnnnnnnnncaccaaaggagcagcagtctcttggaccaaggtcctagcatttgatttaagccctgatcttcaattattttcggaggaggtaaattttttgcttgacgaggataagaaagtcgctgtgtgttgtgagagatggttggaaccgcaagagcccccccggtaccagtgcaggagagagtacaaaatcaaaaacaagatatacattctcggggaggataataaagtcgatgaagtgggtttt

SEQ ID NO: 33132 - DNA, 4314 bp, Arabidopsis thaliana landsberg
  unsure (1)..(4314): unsure at all n locations
tccctttatgtctcgcactatttctggcctaagtcaaccgcaaaagctgaactctctttttattatctttttagtgctttttcgtctttaattgtaatatacacttaaattttgttggcaacctctttgcattacatgtgagaatcatttcaaaatattgcgtaatttgttgctgattactactactatacgcaaagctctacgtttctccagctctcccaaatccggagagttaggaagttaggattacatagcagttatcatcaagatagtatatacaacttcgaagtttcgaatacatttgcactaaaataaaagtgtgcagggaaatttgaaaatttctattgaccttggcatgacactgattgtaacccaacagttgtttttgatatttatgcatatgcaatgtgaatagcaccactgaccaaacaattagtgtttttacatgcagctgcaatattaaaagacctttattccaatggttgataacttctacactagttatcaggttttcctgaagaaattggaagttttactatacaagagtagttatcctcaaggttttatacattgcatgtgtttcaggtagttaaatctgcgaagttgtaaaccaaaccccaacattttgtaatgggagctttggtgagtaggcaatttatgatatgcctaaactgataccgaacaaataaaaatgtctctcttcattcacgtttttccacccattctatgtttacttcagaagggactgtcaacaaatttcaaaatccgtacaatatttttagtttcatgtaagattctctaaattcacgttaaagggtaaatcaaaaagttctcagcttcgggttggcatctaacggggctttgtataactgtttcctgcaaaattaacctctctttactttacaacaaagtatactctcccgccatcactgcgcttgatcccacaacccccagacctcattgaacatctagcttctcttcccagatacagctgcatttcagcaagtggtgaccagagaaaataagtttctacctcttgtctcacttcacgattaaagtctacaaattctttaatgctttcttaccttttgattgcgctatagatgtcactattctttgccaaaagctgttccctgaagaggcatgtccacctgcgattctctcggccgcaggactcatgtcatgaacatacttcacggattcagataatcggtggagaagattcatcagcgcaatcacttcgttcctttgcaattcgagctgaaacaaaacaacaaagattgctacatcactaaaatgccgttcccaatagacgcttaaagaaaatacacggtgcaaatggacaatgcgtctccaggtgtgttagaaacgcacattatgacgcaaattgtcttcaccattgacagtgaatagaattttcaatgcagtaccgagaccgagaatctgaagctttccccatagacggcatttctcacagcctacacagtccattattgcactgcaatgcaagacgattcaagtaataaaaaagaatttaacttagctagtcagtggaaattttatcattgctcaagaaaattagttaaaggactcaagaaggaccttatgtttctgaattgtttttctaattgttgcttcagttctggtccacgttggcctttccagagctttgcttcatcaaatggtactggacaagctgctttagttttggggtcactaactacttgcttcaccagagatttggtcttcaagtcctcaatcacattaccagtctcatattcagcctctcccaagtaatcttctgcctacaaatcatgcaaaaaaaactaattgtgactattctagaccactgggacccttttcctaggatccagacagaaaagtaaagtggtaagtaactgacctttgttactgctctaagaacgaacaaaaatgtgaagtataggttctgaacgcggtctgggtatcttaacacacgatcatacaacaacgtcaggttttgaccccactgaaatacaaaaaaaagtagtctttgagtcattctatatctgcttaagaaatacatatcacagataagtcagattcgtacggcagatcttaccaagtttgtagcttcatcaagtaaataatctgaagcgatatgaactgaaatggatgagtgaagaccagaaaccaatttgtacaagatcttctcttcttggcaagatccttcagatgtatctatagaagccagtataattgcaggagttaagacagccatatgaattaatcagccacttggagaataagagtataaagaaacaaatagagaaaacaagaaacactttaatatggtgaagcttacgtttgggacagttctcagagtatatagcttcccatatccttctagctgatgggccaatatagccagtgtaccgttcaggattaagccgaagattaacatatgtcatttcatctgcgatcatatatacagtcatcaaaaactgcatctaacacatagcaattcgatgctaaaacccctacttgttacatatcatctcatgagccagttatatatgaagtagcgatagagtttcgacatgtaagaatcaaaaatgaagtagactgtaaagaaaagttaccattgtcagtttcatcatcactggtccagggattgtctgtgactgtccaacccctaaaagctctagtatccaaggtacgatcaacagtagcttgcggtttcccctcttgacaaacaggattgtattgacttaatggcttcttaaatacttcagggaactcgctttcaggacattcacaaacactgcagtctcttaaccggcacatgccatcatcaggccaaaacgggcaatcacaccacagtttaacctattaaacgcattcaaacctatcacaacacacctccaaatcctctagatactttcatgatcaaagaagaaatatgaaccaaccttgaaatatctgtaaaatggtgtcttaacaaggtcctgaagcaatggattcaacacttccgtgtttagccgattcacagtttcataatcacaacaacaatcttcaactatcccaatgtacttctgctgctcagcctaacaacaaaatcaaaacgattgagaagtctagtatacaaatcaaaatcaaagtaatcgctgagattcaaagctaatcacgagctcaagtatccaattcagaaacttacaaagagcttttagaaatacctaacctgacggcaattgcatatttttccggtaaattcagaaatcgacgaattctgagtattcaaaaacacagcgaccacgacggctaacagaacggcagctatagctccgatcagcaaaatccagcgctttcccgatcctttctccttccccttcacacttccgacgtccgtctccgccattcgcactatcgcaaatagaactaaatctgacacagacgactacgacgagtaatctccggcactgaattttgaattttcagagaaattgtgggccatttttacaaaaccgcagctctcaaaaaaagaaagtcaaaactaatctcaatctcataaagtcatcaaatccaacggctctgtattttcgtcaaatattttccttctactttagttagagtcaacgtaaataaatattactgaaccaaaaaaatgtttttgtctattagccaaaacaaacaaaacacatatcaagttgcttcatatttcgcctaccaaaaaaaaaagttgcttcatatatcgatttaagaagaagacaaaagtgtttttatcgtcttgcattttgtgactaaactacaatctccttcattattcatcactgcttctgtttttttggcgcgttggcctcagaggaatcgttatcgcatggcctgtttgatttcttagaacaagattctaaagtctcctttgcatcattgtttccatctttaacattcagtatatcagccaaagatctcgccttcactcttgtctggtccttagttccagctgcgacatctttcctcgtgatattacagggtgtaacctcatctgtttccttgcctttgtcttcttcgggttttgaacttgtggtnnnnnnnnnnnnnnnnnnnttttgatctatgcctgcccatctgaacatagagctgagctttttaccttccagggcttcaacgagaagattcaactcatccatagtgtacctatagagaaaactctttctgtcacacggacatgcacagagcttcctcatgtggttcacacacgagccacgatcagcagagcatgaacagataaaccaaaaaagatacaaatccccaagacatacacagcattccgttttg

SEQ ID NO: 33133 - DNA, 4099 bp, Arabidopsis thaliana landsberg
ttttgtttttgtgttaattgacagggtttattaggaatctggggggtaaaatttgaagatgatttcatttatattgagtggtatttttcaataaaaacatttgtaaaattatatccctttgtgatgttacatgtaatcaaaaatacattgtattaagattcgtagttagaatttttctatggtaaatttttgtattaagttatattttactgagtttattaagctagaaacaaattattatattaaccggaaaactgtatagtagaaaaatggaaaaggttgttcaggtcggttaacggctcaaaccgggattaattcgttttccaattttgccttaatcgaaaaaatggaaattacagcgatataaacctaaagtaaattgatttcgtaagtcgaattcactgtttctcctcaaacacacacacacgtttgcgaatctccgacgtccgtttctcctcgccgtagaatcgccgttcattctttcgccgccttcagtcttccctccattgactctttttttggtaattcgtcttctttttgctctctcgttctctctttttcgatttctgggtacagaaatcgatggctctcgtttttctttctctgttgctgttctattactttctcttatatatatatgattgttactctagtgatgaattttgatacattggttgtttgaaattgatctctgttgtgcttttataattccggggtcaagattggctgtttaaatctagtaaagtttgcatttttcttttctgtttgcagagattaacttgattatacttttgtttttaagaagaagaagagcaattacaagcgcaagtgtgtataatgacttaaagagagctcctgttactccgagtgatagatagtctacaattatatcttactctgagtgaaagcaatggcgtacggtggtccgtccatgaatccaccggctttgagtggagctgttcccgggtctgctaatctgaagcaagtgaaattggagagagaaagcgagctcaggatcgaagtctctgaagagcctctcagactccgtgtggttaacgggaccgctgagatttttggctctgaactgcctcctgaaatatggcgtaccttccctcctcgcatgaaatttgcggtatgtgttttcttaatccttggtttttagagcgatcgtaagcattatgctttatggcttatagataaaatgtagcttgttggtaacatatttggtgttgggtttgttggtagaaaataactagccattcttgatttagtttcttttagtggttatctttcttaaagtgggttcttgagttactattgaattcaccctctggccttttggggttggaaaggtacatcctttgccagtgaagtttgagggtttttgggtttgagttggatgaaagacttatgatttaggttgtaaatgaagattatgctgtctaggtaagaattgttaagtgggttgtataaaaagattgatgatagatgtgattttcccccccaatttctttcttttctatttttccttctgctaatgatttatgtaaagttcataatcggagctctgaaacaccgtgcttaccatcttgtgccttttgattattgtcaggttttcacttggtatggagcgacaattgagatggatggtgtcacggaaactgactatacagcagatgaggttggattacttgtttcattcctacgcttgctttaaatatgtagagcaaattttgtttactaactacatctctgtttccagacgccgatggtcagctacattaatgtgcatgccatactagatgcaaggagacgttttgccaaagcttccacatctaatgacccagaatcttctcaggtacttttcttcgatattcaatattattgtattgcaatatcagcatagttaaaacacttggttcttaagaattcacttaatgcagggacctcgggttattgtagtagggcctacggattccgggaagagcacattgacaaagatgctccttagttgggcagctaaacagggatggagacctacatttgtagaccttgatgttggccaaggctcgattacaataccaggatctattgctgctgcccctattgaaatgccactggatccagttgaagggtttcctcttgatatggcccttgtttactactacggccacgcatcaccaaagtaagtgattctcaaatttctcctacccatcatacgttattcccctcgatgaggaatttaaatatgtctactttggctctctcagtatgaacgttgcactgtacaaagctctggtgaaagagcttgctcaagttctgaagaaacagtttgtcggaaaccctgaatcgcgagctgctggaatggtgatcaacacaatgggatggatcgaggggattggttatgaggtaaaagttagatcctttttagcgtattttttggtatagttagctccttcttagtggatttcattatgcaaatgcctgataaagaactgtatctgcttcgtcttgcagctgcttctccacgcaatagacacattcaatgcctcggttgtacttgtattgggtcaggaaaaactcttcagcaggcttaaagatgtgctgagaagtaagagtaatgtcgacgtcgtgaagcttcacaagtctggtggagttgtagccagggtcaaagaggtccgtaaaagatcaaggaactttaagattcaggtaaaattttcaatctcaaatcttttaatatcccttttttcatgcctttggaggtgtaactcagaactcaaaaactgaattttccaggaatatttttacggtttatcgaaagaactctctccgtatgccaatacatcgagtttcagtgatctgcaagtgttccgaattggtggtggaccacaagcgccaaaatcggctcttccagccgggtctacctcggtttcaaatccgttgcgggtgacgcctgtaaatatcgatgatcgggatctgctgcattctgttcttgctgtctcatacgcagaagaaccagaccagatcatctcaaggtaatctctaaaagttcttgctgtttccagaatcaaaggctttcgtgtatgttttcttcgtgattttgatatttctttctctctgttttttctttgatacagcaatgtttctgggtttgtgtatgtgacggaagttaatgtgcagaagaagaagataacgtatttagcaccatcgcctgggacattacctagcaagttgttggtcgctggatcattggcatggcttgagtcagtatgacttacttagagaagagaggagccatgttttttgcttgagagaatgatgcagcagctcgattatgtaacgttaattacaaatagcctttttcttctttatcaaatgcacaagtttttgagtttaaaagatcattattgcggaatagatggttggttgtaatttgatgttatgaagtgggcaaaaaataatgttgatttactagtgcgttagttctgtttgtttggttcagcatattcaagtgatgtgtgtagcatttttaaatttgataggtcgaacatatcttatgttattggatgatttcgaaatagtatatgataatgttcaaagtcacacatgtattattattggttattaattcaactaaattactatcacattttaagtcacttcaattgtattgttgtataagctctgtatttagaatcggatccgaagaatattagatggtctgtctaaccaagtcgcattaatcttatatgattctcctagaatagaaaagaatattttattcttatgctaattcaattgaaagataattaaagcggatatgttttgagttcaacatgttaaaatggtcattcctttgcgatagacaaaacatatttagagaattctaaatttacatgctacaagatgttctatatgctttaatagcctcagtttttttttttatccctgcacattaaatgcagaagatttcaatcatttgcctgatgattagagatttatagatataagaagaaagtttcacttatcattgtgaatatgataaagcaagaataataccaatatcgcacaattaacaacaagaacatcagacacaaaa

SEQ ID NO: 33134 - DNA, 1860 bp, Arabidopsis thaliana landsberg
gagatgtgccacgtcagattcagatttttatcattatttaatgttcatggaaatttcgagaaggttgacactgagagagagatatcttgtggctcagaacaaagctaacactcactctcgctagtgtacaccacgcgctgtgtcttcttcaaagaatctgatctgtttctctaatccgtacagaaaaagattctgtggataaaaaatgtgaaacgttagcaaattatgaagaagatatttttttgtgattatttggaagatatcctttttttgtgtgtttccgatccgtctctgacttccacttgctttcgtgatattactctttgccggtttgcccccaaaaaggccaaaactagtctcattgttcagttttgtaagttgtaaccttcgatttttgtaaagggaaaaatacattattcttgagttaaaaaaatcacttgattaattagatgatttgatacttgagtaattgatatgtattatgtagtaattcgatttcaaaatatctctttagtcttataaaactgtatgaaagaaaagttcatgacaaaagattataaaatggttgggataatgggcaaatcaagtcgcatcacatggtgtcggatgtgacaactatatttcttaatcacacaaactattagagccacaattttgatacggacagatcaccccattcctctctttattattatctttttgtttcatttttgatatatacattatatgttttaaattaaaatgatcgctttctgaccccaaactatgaaaaaagaacaagattttttcctcaatttaattatatgataatgaggtccttaagtccttctatgttacgcaattcatattctatctcacatttgtctatctacaataaattaaggttcaagcactcatgattcaatacttttggcaattttgtaaaagaaaagatatctctctgattcattatatcaaaaccaaattcaacaattgttctcactctactaagtcctagtcctagtatataactgcacaatctccccgtaaggttggggaaaggggtagaagtacatcacagcattacacaaatctcaggcatccgatggttgcaaacgactggtttgttgcgaggactcaggtttcaaaatggtcaatttggcagttgctaggcattgttggagttctgtatctgcctctggtgtgaaccaagtcattggaggaaccaagtcttcatcggattcgtctgttttctaaatgcatcttatcacacccctctgtggtctgtcagattcaagcaacagatttttcagaaaactaaacaataaacgattgctgatatctccagtagaccaaagtggaaacttacagtgaatctatatgtgctattccatgcttgatactcaatctttggtaggttcttcatcattcttcttgcaaaataaagcaatcatagcagtcttaataatacaataccaagataaaaagcaaaagaagcactcacatattatattagatcagcagttttgtcataaatgtgagtggtgcagcgaaagggcaaacctccaacacagatttagcttcggaatcaaaagttttgcaaagtatctcatacttcaccgagagagtctgcaaacacaaaaaattgtagaagttcttttagtgaatgccttatacaaaataatgaaaaataagactactgattctgtaccggaagattagcttttgagggagaaatgcttgatattctgtatctgtataaaaaacgaatgggaattcagatgtttggacgagccaatatcagtaaagagtcgagaaatagaaatgactgactacagcaagaaacagaaatattaggaacccatgaacacttgcaaaaaa

SEQ ID NO: 33135 - DNA, 1656 bp, Arabidopsis thaliana landsberg
gtttgaaataaaacaacttaaatatgagtgtgcataaaaaaaaattgaactgagccaaaataaacgaattcgaatcataattgatcaatctaaaccgaatataaaccgaataaaacgaactgtttatgcgctctagtgaccaagaccaatgatgaaatggatgggtggtggatgttgcatccacgagtctgtgaaacattgcaactccaaaaatggctaacgagctcttctctccaccaccaatccatggcttctttcaaccactcttggctctcttctccactcaccgaaactcccactttcttttttcctccatctccacacccaaaatccttgaaactctcacttttccgaactcggagcaactcgtcctcaccggaccgctcgtcagaggttgagctcgatgtggatccggtgaagctcgcattgaagaaagccgaagcttataagaaatcgaaatcagagcaaaaagaaccagagaaaaacgccggcgacgaggaattgccgctctctgttaaggctgctatgcaaaaagccaatgcttataagaaaaggaaaggacttggaactgatgcagtcgcaaaagctaaacccagttcagtaaaaaaatcatcttttgcacaaaattcttgtaactgtctttgcttgagtttgtagatcaatgcacttttccaatagtctttagtacacatcattcatgtgtctttcgtggcctgcctgttccttgaaaagattgttttttgattagattaggagtaaagcctttgaattttagctgtattaatggagaattgttctgatgggtttcaggtaatacagagcaaagttttgttagattaacaaataaggttgttgaagataatgatgttaagaagaaagaattgaaagtctccagcattgatttcatggggcttggctttgctgataagaagagcacaagggggcttccagcgggacttgttcctgttgttgactatcttcctgaaggagacttacctgaggtggagtttattgttggtgataaaacaagatttgcggagaaagtaaaggaggttgagcaagaaggagatggaaactctgatgtgtataaacccaaagtttctacatggggagttttcccaagacctagcaacatctctaagacggtatgtgactggcccatctaaagatatgtgttatgcaactggattagtttttttcataaaccccccagagggaagaagttgcatgtccaatgttgttaagttagggtatatagagccacttactccagattattagaggtaggagtgccagaaaggtttcatgggtttattatttagttcgcgtaccatttagtctactgtgaaatatgatgcatcaaaaatgatttgttggttgtattttccacattttggattgttggctataaccatcagctcttaacttcgatggttttggagtgtatattttcctgctggcatctatggtctcaagtaatgaggattgagatatatacttttcttgtttaagtttgggggtggaaggacactccgaccgggggattcagttgagaccgctgaagagaggattgtgagagaacaaaagacaaaaaaattgctcatagcctacaaggaatcactcggactgaacattgatcccaaactcaaacttgag

SEQ ID NO: 33136 - DNA, 796 bp, Arabidopsis thaliana landsberg
gccaagttggattatcgtctacgacaagaacccttagaccgacgggagagaagccgcttttctccatgatcgccggcgaaaacaagaaagagagagagaaagaaaaagagcagagaaagtggcgagagttctttttttggaaaggagaaagtgggagtgggtttttgtttgcgttatattatgaaacgacgacacttcgaatattttggcgtagtttagataacagacaccatggcggatgttaggttttatctcccgtcgtactggcatttccaaattctcttctgtttttaatttgaaaacgagggctataaaatattaatctatttgtggattacttttgaagaaggaatttagttcggtctaagttcactgccaaaaaaaagttgttgaaactcttttctctctcaatttgtaagttgacgtctctcactgctccataatcccatattcttccaataatttagcttttcaaattgttcttaagatattgacatgataatattgtggattatatcacctttttatagttattctataaaactaaaataattatcttctacactctttggtattttatacgtaaatatggtgatcgtatttagatttaaacttctatatttatgggatcgtattcagagtgcatcatcattttatcatgtaaaaatattgacaaaacacacacaagcaactctatatataatgcagtgtcttgcttagatgtgtgcagggctaggacaagtttataaaatgtggctatcatcatagtttttaaaatatcatatctgaatcggaa

SEQ ID NO: 33137 - DNA, 614 bp, Arabidopsis thaliana landsberg
  unsure (1)..(614): unsure at all n locations
caattaacctttattacattttgataagttatcaaccaaatctgcattggatgtaaaaattgtgattttagtcatttagattgctcaaatctggattaaaaaaaagaagaagatgaaagtaatagatcttctgattgtatttttgcaagatcataagtgaaagtagaaatttgtgaatctctaagaacttacaaattgagattacttcttccatctaccatttttgttgtttcaaaataaaaatattaaagaatgaacaaatgctcgtgttcaaaataaaaatgaaaaaaaataaaaaagaaaactccacttgattctaaaccctaaaccctaaaccctaaaccctccgaaaatagaaaattattgatttctaatcttttttagactgaaaatagtttttataaatttaaattgcgagaaagttgagaaaaaataacttaatcatgagaatatcgtatattttaaatatgataattttttacattttagatatatactagaaaaatattntaaaagggaatcttaactttaataanctataaattaatgtctaagtttacgaaatcgaactctaagtttggctcgtatcattcttcccaaaatgtctcatgaat

SEQ ID NO: 33138 - DNA, 16135 bp, Arabidopsis thaliana landsberg
  unsure (1)..(16135): unsure at all n locations
tgatactacttaaagaaatggaaacattgatgctaagggctaatgttcatgaagagtgtgaagcatcaatgtttagattcatgggaggcctcaatagagacattatagaccgtttggaggtgatacactatgagaaccttgaagaattgtttcacaaggcagtcatgtttaagaaacagattaagagaaggagtgctaagcctagctacaattcaagaaaacctatctaccaaagagaagagaaatctggttttcaaaaggagtacaagccgtttgtgaagcctaaggttgaagaaataagttcaaaatggaaagaaaaagaagttacgagaactagagatctcaactgtttcaaatgtcacagatttgggcattatgctagtgagtattccaacaaaagaattatggtaattagggacagtggagaggttgagtccgaggatgagaaaccagaagaatctgaatgttgaagaagcacctaagggagtgctacttgtgaatatgagggtcttaagtgtgctaaacaaagcagaagagcaagcgcaaagagagaatttgttccatacaaggtgtttgattaagggaaagttgtgtagtttgattatagatggtggaagctgtaccaatgttgcaagtgagactatggtccagaaacttggtttagaggagtttccgcatcctagaccttataaactgcaatggctaaaagagagtggagaaatggctgttaccagacaatttcaagtgccgttagccattgggaagtatgaggatgagatcttatgtgatattctgcccttagaagccagtcacgttttgttaggaagaccttggcaatctgatcggaaagtgatacatgatgggtttaccaatagacatagctttgaatttagaggaagaaaaactgttttggcacctatggcacctcatgaagtctacttggatcagcttagcatgaaaaagaaaggatctcaagctgttcaatccaaaactttcgagagtaaaccaaaggggagtactaaacctaatcttttgtttgtctttaaagaaaacttattgaatataacagccttggaaccggctttgccgagtagtattaagtttcttttgcaggactatcaagatgtttttcccgaggaaaatccagaaggtttaccacccattagaggcattgagcaccaaattgactttgttccaggagcttctttgccaaacagaccagcttataggaccaatcccgtggagaccaagtaactagaaaatcaagtgaatgagctgatggagagaggccatattcgtgaaagtatgagtccatgtgctgttccggtgttgcttgtacctaagaggatggaagttagcgtatgtgtgttgattgtagagcaatcaacaatatcattgtgaagtatcaacaccctatacctagattagatgacatgttaaacgaattgcatggttctagcatcttttctaaggttgatataaaaagtggatatcatcaaattaggatgaaagaaggtgatgaatggaaaactgcatttaaaactaaacaaggattatatgaatggttagtgatgccattcgggctgacaaatgcacctagtacattcatgagactgatgaatcatgttcttagagcttttataggacgttttgttgttgtttattttgatgacatcctagtttacagcaagagtctagaagagcatgttgaacatttgaaaatggttttagaagtacttaggaaggaaaagctttatgccaatcttaagaaatgtacttttggaacagataaccttgtcttcttaggttttgttgtgagtacagatggagttaaagttgacgaagagaaggtgaaggcaattcgagaatggccaagtcctaaatctgtaggggaagtgaggagcttccatggacttgctggtttctataggaggtttgtgaaggactttagcactctagcagctccactcaccgaagttattaagaaaaatgttggattcaagtgggaacaagctcaagaagatgctttccaggccctaaaagagaagcttactcatgcccctgttttatcacttcctgattttcttaaaacttttgaaattgaatgtgatgcctccggggtaggaattggtgctgtcttaatgcaggataagaagccaatagcttatttcagtgaaaagcttggaggagctactctcaactatcctacctatgacaaagagctttatgctttagtaagggcattacaaacgtggcaacattacctctggcctaaggagtttgtcattcacacagaccatgagtccttgaagcatcttaaaggacaacagaaactcaacaagaggcatgcaaggtgggttgaattcattgagacatttccttatgtcatcaaatataagaaaggtaaggacaatgtagttgctgatgcattgtcaaggaggtatgttcttctctcatctcttgatgctaagttactcggttttgagcatataaaatctctttatgcaaatgattctgattttgaaaagatatattcatcttgtgaaaagtttgcatttggaaaatattatagacatgacgggttcttgttttatgataaccgtttgtgtattcctaattcgtctttgagagagctgtttataagggaagcacatggtggaggcttaatgggacactttggagtctcaaaaactcttaaagtaatgcaagatcactttcactggccgcatatgaaaagagacgtggagagaatatgtgaaaggtgtccaacatgtaaacaagctaaggctaagtcacaaccccacggtttgtatactcctcttcctattccttcgcatccttggaatgatatttctatggactttgtagtaggtttgccaaggaccaggacaggtaaggactcgatttttgtggttgttgatagattttctaaaatggcacatttcatcccttgtcataaaactgatgatgccatacatatagccaatctgttctttagggaagttgttcgtttgcatggcatgcctaagaccatagtatcagatagagacactaagtttcttagttatttttggaaaactctttggtctaagctaggaactaagttgttgttttctactacttgtcatccgcaaactgatgggcaaactgaggtcgttaataggacattgtctacactcttgcgtgcattgattaaaaagaatctaaagacttgggaggactgtctacctcatgttgaatttgcatataatcactctatgcattctgcctctaaattttcgccttttcaaatcgtttatgggttcaatcctactactcctttggatttaatgcctttgcctttgagtgaaagagtcagtctagatggaaagaagaaggcagaattggtgcaacagattcatgagcaggccaagaagaacattgaagagaaaacaaaacagtatgctaagcacgccaacaagagtagaaaggaagtcatcttcaacgagggagacttggtttggattcatctccgaaaagaacgttttcctaaagagagaaagtccaaacttatgtcaaggatagacggaccctttaaagtgctcaagaggatcaacaacaatgcctactctttggatttgcaaggtaagtataatgtgagtaatagttttaatgttgctgaccttattccttttattgcagacaacacagatttgaggtcaaatccttttcaactgggagaggatgatgtgataatgacaagcttggatcatggagctgatgagataatgacaagcttggatcatggagctgatgagataatgacaagcttggatcatggagctaaggagcagtttgaaggagggaaagttatcaaccactcgatcaagcatgctgttgaagacttgagggagcttgaatctaatgactcgatggactactcgacccaacatgaagatgaactgcttggagctacaaaaaaggaagcaatgcatgttcttaatggtccaatgacaagatcgaagactagactactaaatcaagatatcactacacttctacaacacattgagggcagtcttaaacaagatgcttgtcaaaccacgttggttgtgattcaagcggtttaagcgacaacaatggaggtgtgtgacttgcactctttttccctcctcttggttttgtcccattgggttttccaagagaggtttttaacgaggcaagcccacacactcgaccacatcagcccattgttgtctcgcagcccattgccaaggagaagcccattttatttgaatttagtctttgtgtgtttatttcgtttttctttccctatgacgactttacatcttccctagactcttcttcttctttataatctcttcttctccttgtaatcaaatcatcaaactttttttcttatcaaatctctttctgaattcgtttgatcttgagtttgtgtgtgtaatatcacgatctcatcttgtgaatgcttttggtgtgtcatatccaagcacgatcaagctcggaagttcaaaggtctttcacatcctttggaagttctactcgatccccattccatcaccatactcgatctcatctccatatcatcacttcaccaaaaccactctatcgcagcatcataccatcagttcaccaaaaccactctatcgcagcatcataccatcagttcaccaaaatcactctatcgcagcatcatatcatcagttcatcaaaatcactctatcgcagcatcatatcatcacttcatcaaaatcactctatcgcagcatcatatcatcacttcaccaaaatcactctatcgcagcatcatatcaacaaatctactcgatcgcgtcatcatcatcactgtcaccaaatctactagatcgcaccatcaggatctgatactcgatcgccatcaccatcaccatcatacagtcaatccgcagactgttcctgaacaatctcatcatcttacaatcaaccacacgaagtgtattcaagggactgtgattctaaccaggatcatattaagtggtatcagagccacttcgtgtcaggttgtatccatttcgacttttcatattctgtattgcttctagagttgaatcttatcgtttttggtattaaaaacttgttagaacaaatagatccgcttgaaaacgattggaacttgtgtaattgtttttggactcatcaacttctatactcgatctacttgtttccaaagatccttttacttgttgttgtcgtttttgtcattgtagtgtcatggcagacgaggaagaaggagaaaacagcaacaaactaatgcttgatgctctcactgcaacaatgactaagttactcgatgctaggctggaagctttcaggcaagagcatatcaattctgacccagatagagatcgaactagaagagagcctagagattctgtagacgctagagacacaatgagttactatagtcaatcctctagacagaccaaccatagaaggaggaggcatgacagagaagaaagagttctacctagagatgatcttgccggcttgaagatacgtattccttctttcaaaggaaccaacgaccctgctgagtatctagaatgggaaaagaagattgagctcgtgttcaattgccaacaatatactgaagaaagcaaagtgaaagtggcaccaaccgaatttcagaattacgccttgagttggtgggatcaattggttaccacaaggagacgtgctggagactatccaattgagtcctggactcaaatgaagaccataatgaggaagagattcgtgccaagtcactactacagagagctacacaacagattgagaaatcttgtccaaggaaacaaatccgtagaggagtactacaaagagatggaaaccttgatgttaagagctgatattcaggaggataatgaagccataatgtctaggttcatgggaggtctaaacagagatatcatagacagattggaggttcagcactatgtggagttagaggagctactgcacaaagcaatcatgtttgaaaaacagctgaagagaaggagctctaagcctagttttggttcaggaaagcctagctaccacaaggatgaacgatcaggatttcagaaagattataagcctttcatcaaaccaaaagttgaggatcaagatcagaaaggaaagggcaaagctgttatgacaagaactagagacatcaagtgctttaagtgtcagggacatggtcattatgctagtgagtgttcaaacaagaggatcatgataatcaaagacactggtgagatagagtcagaggatgagcaactagaagagagttcatcaacagaagactatgaagcaccatcaaaaggagagctattggttacaatgaaagctttgagtgtgatagccaaaacggatgaacaagagcagcgagagaacctgtttcattcaagatgtatggtcaatgacaaggtctgtagcttgatcatagatggcggaagttgcaccaacgttgctagtgaaaccatggtggagaagcttggtctaaaggttatgaagcatccaaggccatacaagttgcaatggttgaatgaggatggagagatgagcgtggacagacaagtgaaggtaccattatctattggcaagtatgaggacgaaattttgtgtgacatactgcctatggaagctagtcacatactacttggaagaccatggcaatcggaccgtaaggtaacacatgatggcttcaccaatcgccaaatctttgagttcaagggcagaaaaaccatattggttccaatgacgcctcatgaggtgtacctagaccagttgagcatgaagatgagaaagaaacaaactgttaaaccatctaacctcatgatcaacgagagtaagcaaaagggaagtggttttcaatcatctaagttattgtttgtctttaaagagactcttatgagtctaactaatcctgagcaggctattcctagcaaaattaagtttctattgcaggattatactgatgtgtttccagaggagaatccagtaggcttaccacccattataggcattgagcaccaaattgactttgttccaggagcttctttgccaaacagaccggcttataggaccaatcccgtggaaactaaggagctagaaaagcaagtgactgagctgatggagagaggccatattcgtgagagtatgagtccctgtgcagtacctgtgttgcttgtacctaagaaggatggaagctggaggatgtgtgttgattgtagagccatcaacaatataacagtgaagtatcgccatcctatacctagattagatgatatgttagacgaattgcatggttctagcatcttttctaaggttgatttaaaaagtgggtatcatcaaattaggatgaaagaaggcgatgaatggaaaactgcatttaaaactagacaaggtttatatgaatggttagtgatgccattcgggctgacaaatgcacctagtacattcatgagactgatgaatcatgttcttagagcttttataggacgttttgttgttgtttattttgatgacatcctagtttacagcaagagtctagaagagcatgttgagcatctaaaaccggttttagaagtgcttagaaaggaaaagctttatgccaatcttaagaaatgtacttttggaacggataaccttgtctttttaggttttgttgtgagtacacatggagttaaggttgatgaagagaaaatgaaagcaattcgggaatggccaagtccaaaatctataggagaagtaaggagttttcatggacttgccggcttctataggaggttcgtgagagattttagcactctagcagccccactcaccgaagttatcaagaaaaacgtgggattcaagtgggaacaagctcaagaagatgcattccaagccttaaaagagaagcttactcatgcccctgttttatctcttcctgattttcttaaaacttttgaaatcgaatgtgatgcctccggggtaggaattggtgctgtcttaatgcaagataagaagccaatagcttatttcagtgaaaagctaggaggagctactctcaactatcctacatatgacaaagagttttatgctttggtgagagctttacaaacgtggcaacactatctttggcctaaggagttcgtcattcacaccgatcatgagtccctaaagcatctcaaaggacagcaaaagcttaacaaaagacatgctaggtgggtcgaattcattgagacgtttccctatgtcatcaaatacaagaaaggtaatgacaatgtagttgccgatgcattgttaaggaggtatgttcttctctcatctcttgatgctaagttacttggatttgagcatataaatctttatgcaaatgattgtgattttaataagatatactcatcatgtgaaaagtttgcatttggaaagtattatagacatgaaggattcttgttttatgattaaccgtttgtgtattcctaattcttctttgagagagttgtttataagggaagcacatggtggaggcttaatgggacactttggagtctcaaaaactcttaaggttatgcaagatcactttcattggccgcatatgaagacagatgtggagagaatgtgtgaaaggtgcacgacctgtaaacaagctaaggctaagtcacaaccccacggtttgtatactccctctttctattcctttgcgttcttggaatgatatttctatggactttgtagtaggtttgccaaggactaggacaggtaaagattccatctttgtggttgtggatagattttctaaaatggcacacttcattccatgtcataaaactgatgatgccatgcatatagccaatctgttctttatggaagttgttcgcttacatggaatgcctaaaaccacagtatcagatagagacactaagttccttagttacttttggaaaacgttttggtctaagttaggaactaagttgttattctctactacttgtcacccgcaaactgatggacaaactgaggtagttaataggactttgtctacactcctgcgtgcattgataaaaaaagaatttaaagacttgaaaggactgtttacctcatgttgagtttgcatataatcattctgtgcattatgctactaaattttcaccttttcaaattgtttatgggttcaatcccattactcctttggatttgatgcctttacctttgagtgtaagagttagcatggatggaaaggagaaagcagatttagtgcagcagatttatgagcaggcgcgaaagaacattgaagagaagaccaaataatatgctaagcatgccaataaacacagataaggagcttatcttcaacgaaggagacttggtttggcttcatctccgaaaagaacgttttcatgaggagagaaagtctaaacttatgccaaggatgaacggaccttttaaagttctcaagaggatcaacgacaatgcctactctttggatttgcaaggtaagtataatgtgagtaatagttttaatgttactgatcttgttccttttattgcagatgaaacagatttgaggtcaaatccttttcaagtggaagaggatgatgtgataatgggaagcttggatcatggagctaaagagcagcttgaacccgaggagtttggagaaagaaagcagcttgaggatggagagcttggagctaaaaaagatgaagcattgcatgttcttgaaggtccaataacaagatcaaagacgaagctactaaatcaagctatcaccacacttttacaaaagattgagggcagccttaaactagaagcttgtccaaccacgttggttgtgattcaagccgtttaagcaacaacaatggaggtgtgtgacttgcactctttttccctcctcttggttttgtcccattgggttttccaagagaggtttttaatgaggcaatcccacacactcttttcatggcccattgttgtttttgaagcccattagcaaaagagacatccaaatttcgtttttgtgtttttatttctctagaatgactcttcctcttctctagggctcctcttcttctctatataatctattctcttctcctttgtaagacttatcaaactttttattatcaaaacctctttctaattgtttgatctgaagggtgtgtaatatctcttcaacttgtgattgctttggtgtgtaatatcctagcaagatcgagcccgaaagttcaagagtctttccgcaactcttagaagttttacttcatccattttcagtttgttttcagttcatcatcatcccatcttcaacccttcaacttcccacagatccattcattcaccatatcaccatcacttcatcacaatccatacaaagagacttcaagggactggatcttgtcacccaagatcatatcacgtggtatcagagcaactttgtatcaggttgtgtttttctaaactcttggtattctctgttcgtcaaaattgtttcgtcgttgtaggcttgaatacttatcggaatcgttcgaaacttgttaaatcgtttagatcacgttctgaactataggaaactgtactagatcgtgcgatttgaataagctaaacgtttcgtattctagggtttatgattatgtgtttttggtactgatttggtttgttttaagaggaatttgatagtgtgtgtcttctagttgcagaatcatgtcagataaagataaggaagagcatagcaatgcacaaaacaacaagttgttgatggaagctataacagctactcttaccgcaactctcactgctaatatggctaagatgatggatgagagatttgtggctgcaaggtctaaccaagaaagggagaacagaactatgaggaataattctgatcgggaggcaacgcttagctactacagccaatcctctactcgcactagtcataggaggcaaagacgtgggcaagaagaaagacaccctccaagagataacttagctaatcttaagcttcgcatccctccattccatgatactaataatcctgatgattatttggagtgggagaagaagattaagttggtgtttgtttgtcaagagtatactgaagcaaacaaggttaaagtggcagccactgaattctatgattatgcactaagctggtgggatcaagttgttactactaaaaggcgtcttggagatgatccgattaaaacttggaatcagctaaagaatatcatgaagagaaggtttgtgcctagtcgttaccatagagagctgcaccaaaggttgaggaatttggttcaaggaaatagaacggttgaggagtacttcaaagaaatggaaacattgatgctaagggctgatgttcaagaagagtgtgaagcaacaatgtctagattgattcatgggaggcctcaatagagacattatagaccgtttggaggtgatacattatgagaaccttgaagaattgttttacaaggcagtcatgtttgagaaacagattaagagaaggagtgctaagcctagctacaattctagcaaacctagctaccaaagagaagagaaatctggttttcaaaaagagtacaagccgtttgtgaagcctaaggttgaagaaatcagttcaaaggggaaagaaaaagaagttacgcgaactagagatctcaagtatttcaaatgccacggacttgggcattatgctagtgagtgttccaacaaaaaaattatgataattagggacagtggagaggttgagtccgaggatgagaaaccagaagaatctgaatgttgaagaagcacctaagggagtgctacttgtgaatatgagggtcttaagtgtgctaaacaaagcagaagagcaagcgcaaagagagaatttgttccatacaaggtgtttgattaaaagaaaagtgtgtagtttgattatagatggtggaagctgtacaaatgttgcaagtgagattatggtctagaaacttggtttagaggagtttctgcatcctacaccttataaactgcaatggctaaatgagagtggagaaatggctgttaccagacaatttcaagtgccgttatgccattgggaagtatgaggatgagatcttatgtgatattctgcccttagaagccagtcacgttttgttaggaagaccttggcaatctgatcggaaagtgatgcatgatgggttgaccaatagacatagctttgaatttagaggaagaagatctgttttggcacctatggcacgtcataaagtctacttggatcagcttagcatgaaaaagaaaggatctcaagctgttcaatccaaaactttcgagagtaaaccaaaggggagtactaaacctaatcttttgtttgtctttaaagaaaacttattgaatataacagccttggaaccggctttgccgagtagtattaagtttcttttgcaggactatcaagatgtttttcccgaggaaaatccagaaggtttaccacccattagaggcattgagcaccaaattgacttcgttccaggagcttctttgccaaacagaccagcttatagaaccaatcccgtggagaccaaggaactagaaaagcaagtgaatgagctaatggagagaggccatattggtgaaagtatgagtccatgtgatgttccagtgttgcttgtacctaagaaggatgagagttggcgtatgtgtgttgattgtagagcaatcaacaatatcacggtgaagtatcgacaccctatacctagattagatgacatgttagacgaattgcatggttctaacatcttttctaaggttgatctaaaaagtggatatcatcaaattaggataaaagaaggtgatgaatggaaaactgcatttaaaactaaacaaggattatatgaatggttagtgatgccattcgggctgacaaatgacctagtacattcatgagactaatgaatcatgttcttagagcttatataggacattttgttgttgtttactttgatgacatcttagtttatagcaagagtctagaagagcatgttgagcatctaaaaccggttttagaagtgcttagaaaggaaaagctttatgccaatcttaagaaatgtacttttggaacggataaccttgtctttttaggttatgttatgagtacacatggagttaaggttgatgaagagaaaatgaaagcaattcgggaatggccaagtccaaaatctgtaggagaagtaaggagtttccatggactatctggcttctataggagattcgtgaaggattttagtactctagcagccccactaaccgaagttatcaagaaaaacgtgggatttaagtgggaacaagctcaagaggatgctttccaaggcttaaaagagaagcttactcagcccgngttttatctcttcctgattttcttaaaacttttgaaattgaatgtgatgcctcaggtataggtattggagatgttttgatgcaggagaagaagctcagagcctactttagtgagaaactcggtggtgccacattaaattatcccgccttacaaacatggcagcatgacttatggcagaaggagtttgttatacacaccgatcacgagtctcttaagcatcttaaagctcaacataaacttaacaagaggcacgcgaggtgggtaaagttcattgagacattttcgtatgtcataaagtataagaaatgtaaggataatgtcgtggtcgacgggttatctcggaggtatacatatataaggcttttgccaagtttgcttcaggtcgctactatatgcaacacgggttcctctcttatgggaatcgcttgtgtgttcctaattgttctcttcgagatttcttcgttagggaagcacatggaggagcacttatgggacactttggagtcgtcaaaactcttgaggtaaagagggatcaataccattggcctcacatggtaagggacgttgaacgtatatgtggaaggtgtgtcacatgtaaaaaggctaagtccaaagtccagtcgaacggtctgtatacgcctttgcctatttcttctcctctttggacttacatttcaatggatttcgtgcttggtttgcctagtactaaaaccggaaaggattcaatctttgtgatagttgataggttctctaagatggctcatttcattgcatgtcataaaaccgattatgcatctcttgttgctaatttgttctttagggaaattgtgcgtttgcatggcatgcctagaaccattgtttcggatagggacaccgagtttcttagttatttttggaaaacattatggtctaaacttggaactaagctcttattctctactacttgtcacccccaaactgatggacaaacggaagtggttaatagcaccttaggcactcttttgcgcaccttgattaaaaagaaccttaggacttgggaagaatgtttgccgcatattgaatttgcatacaatcatgccgtgcattcctcttctaatttttcaccatttcaaattgtttatgggttcaaccccatctcgcctttggatctaatccctttgcctttgagtaaaagagtaagtattgatggtaaaaagaaggttgagctagtgcaacagatccatgagaatgcgaggagaaacatagaagaaaagaccaagctctatgctaagcaagctaataaagggaagcgtgaacaaatcttcgaagttggagatatggtgtggattcacttaagaaaggagaggtttccagcctaaaggaagtccaaactcatgccaagaatagacggtccattcaagataatcaaacggatcaacgacaatgcctaccaactcgatctccaaggtaagtataatgtgagttctagcttcaatgtttctgacttggtaccttttattgcagatgaaccggatttgaggtcaaatccttttcaagagggaggggatgatatgatcatggatagcattaacgatatggagcatgaaccggagcttgaacgtgagcttgtagccgaggaaggagctaagcttgtagctgaggatgagcttgtagctgaggagaagcttgtagcggaggatattcttgtcacatcggccgtcccaatgacttgttctagagctaagctattcgaccaagccattgccgggatgcttaaccacatttgggaccgaccaaatgacttgagccaagtcactacctctttggttttgattcaagctcaaggacctcatcaagatggataagtgattcatgagtgctctttttccctgcctttggttttgtcccactgggttttccaaaggaaggtttttaatgaggcttatgttttcacttcatataatccattttgatgattcaaggcccaaacccactgaattaaagagacaatttcgtggccttagtagttgaagagtttattttgattttcaaaaattgtttttaatttctgttgttttctaggcagccttggagcatgttccaagacttgcctcttcatcttctcttctccttctctttatatactcttgtattctcttttgagaacttatcattcttttaatcaaaaaccttttctaagaagatcatcttgttggtgtgtatatccagcaaaacccttagtcttttttggtgtgtatatccaaaggatctaagtttcggtatcttgaaacccttccgcaagcttctgtgatatccatcgattcatacaaatctatccatcatcacggtttcacagccacctctatccattgctcaacttaagagtgccgagtccttgggaggatctcatcacttcgtccaccattctgaccatggaaaagtctggcatagactccgagcatcgaaggttaaactccatagcagcaaaaggaaaagaaagttgtgatgaaaaataagggaaatttggagtaatttatagggactttgtgtcccttgaggatcgcaattccatttgagaccggagtgattcgcggaaaaaggagtcgtaatttatagggactttgtatcccttgaggatcgcaattccatttgagaccagagtgtttcacagaaagagttaaagccttctagtcaaccaaacatttaaaacatatgtccaaaacgaatatttcgagattaaggaaagtagcaaagtttccatagaataat

SEQ ID NO: 33139 - DNA, 1351 bp, Arabidopsis thaliana landsberg
tggtcatcacttggctcttgaaaatttgttatagcatgcattccatcctactcgtagaagtggattaagggtgggcttggtgactagaattagctggaatgaccagcatagaacatatcaggcgtgttgtagtcatcaggttgaataacacgtccatctgcaacagctgcagttctgcattcgccttggtgtgagcgacacccaggtggtgttgattgtcaccctcggcaaaatcaggtatcaggttttcctgctcatcgattttctgaccatcctcattgtatccctgaccagctctgtcccttaatactcctacaacatcaggtacgacaatcaacatcttggtgttgcaagtgaattcctgaagctcctcaaacacaagaaaaagaaaaagaagaaaagaaaaactgaattagtaatgaaagaaaagaaaagtctagacttaagtcgacacctagtctaatggtgaaagaaagaaaacttcggtaacggcgccaaatttgatatagctcaaatattcttaatcttactccctcaaataagagatcgttgttagcaaataagggtcgaattccactgagctctcgatgtggacacaatagacttatggtgattaatattatgccaaaaaaagtaggtaaaagtaaaagataataaaacagtaaattgagttgtagattcaggagattaaagtggtaggtctagggatggtttcaggaaatagataaattgtagatctagctatgaaaaggattgttattgaaccgttattgaactcaaactctaatatcaaaataaacggtggcattccgtgaaactcactatgcctagagataagattcccggtgccgtgaaacctattcctaaacttgcaatgtaaacaagtttgattagttcacctaagtagatagatcgattcttattacacacctataaaccaggctcatctataatagatccaactacagatacctattgcgggcatatctattgtctggattcaagttctaggtgatcaatctagatctagcattaagaacaattaaagatgaagaattctacagataacctagcagggggcgatctattaaaccatatgaatccctaatgagaaaccctaaacctaacaagtggattactcagacataatcaaagaaacacaaataagagtctgaataagaaatcaataatagcaagagaaagagtaaagaggatcttctccaaagggagtctccacatggtttttctcccaaagtacaaaagagatgaagagaatagcctgtccaaacttaggtctaaacaatgaccttacaaactatatatatgacctaaaacacgtgatgaaccttct

SEQ ID NO: 33140 - DNA, 136 bp, Arabidopsis thaliana landsberg
acccccccgaaaaggaacatcacaacggaaacagatagcacacccagaagagccccaagaagacaggaccccaagcagagacaagacacgccccccccccccccggcccaacacaagggaaacgaaaaccaagagc

SEQ ID NO: 33141 - DNA, 3539 bp, Arabidopsis thaliana landsberg
  unsure (1)..(3539): unsure at all n locations
tgcatcagatttgggtctcaggcattgtcagtttgcacaaaaagcgaaggtgtatggttctatgcatttagtgtacggttctaactctctatcaatgatatatctatcattcctattatacttaatttgagagcaaatttacacagttctcaaagtttaaggctttcttatcataaacaagccctcattgtacattacgactagctctggtcatatgcttaaacagtgactcagtaagtaataccaaaagacataagaacattgtttggtgtactgagtaaccatattcttcagtttatcaaattcatgaacttcaacataattgaaaatcagcatatacaaaaaccatttttttaagaaacttgaaactttaaagatagagattggagaaagatgataaaagaattgagaattaccagcaaaacagagctagaatttatcaatctcaacgccatctcttaaaacctcataagcatctcggcttctgcttttcttcatccctgctgtgaaatgtacctttgaagaatctgcagaaatacttgtgactttaacccatatcattacttttgtcttcatcccttcaacatcagctagctttcccttctcgagaaatccggtaactgtagtggtgaatctcaagactgatgtatctttgtaaccaacttcgcagattgatggaataaagacagttaacttcctcgtctgttcattgaacnnnnnnnnnnnnnnnnnncgtggaaagatccccacaggcaaaccaaactcctttaataactcgggcaatggcttctgcatttttcctggtaacgagattagaaaccaacaatctgttgaggaaagatgcggctccttaactgtcgaatgaaacggcaagaatgagtacaaaaagtaaccaacctttgattttgttcaccaaccattttgttcctccttcgatgctcgaagacagagactggaacaaagaatgtttacagataatagaagatcacaacattgcatcattgagctaaatcatgctttgaagaaacccaaaggaacactactagcaaaaaaatatctactcttaagatcttgttccttctacgccaaaattcgtctaatatcatcacaaatggtttaaaaactgaagaattgcagtaaactcttgtacaatcctatgaacatatgacagatttgttagaaatttgcagaaatcaagcgcaattgcgctactaagtgaagaatcaacgagctacaccaccatttaccagactctaagatcaaaagaaccctagatcgatgacgacgcactaaaaggatgcatcaaatttctcaaaagcatcggatcgataacagaaactcaaaacaaaaactgaagcatctgattccgcaagtagtagtgaaagagtagagagagattcgtacgttgatatcgtcaccgacggaatcgagctgcttgttcgccttcttacctaaccagtacgagcctaccttgttcaagatctgatccattctctctcacagatcgtttctctttctctcgccgagatcggaggtgttttttttttggttctatcaccgattcatttaatttcgttactttgtattaacactataagagccaatagatttttgacacgtaccaatttgaaagaacgatgtggattgtagaacaaacaatttaactttaataaagtgtatatagggccaatagaagagaatcagacaaagtttattactgacagtgaaaataggataagcttttatctgacgtggacggaatctcctcgttgacgccatcccattggatggccatgaggctacctagaccccaacacgtgggtctaatccaacggccactacactcgattccctcctatattacaaaaccctttcttcttcatcagttcatcatccaaatcgcatgctgattaaagacatagcttcaagggaatttcttcatttaccactaaacccatcatggcaccacttctcctgctggttcactgagattcccacaacagaggaaactggcaaggagatcactggtggtcgcagcagaaacagctggctcgatgagcggagtcatattcgagccgttcgaggaggtaaagagagcttatctagccataccaatcaccgctcttgtctccgtcgctcgccaaagatacgcacaagcttgtgaggcagctgttaacgagcaaatcaagtaagcatcatccaacttattagctatcaagacaaaataaaaaacaacacttctacatacaagttatcatagttagcaaagaaaaagatagttgaatctagtaataattttgtattttgtaagttgtaactagaaaatactcatgtttcactaatttgatggcactaagtcacaccattgttattttcttaatcttacctccaaatattgccatctacctaattcaccttcgattttgtaacatgttggttgtgcagtggttgagtacaatgtctcgtacgtgtaccatgccatgtatgcgtatttcgacagagaagacataactcttaagggtttagccaagtatttatcgttaaaatttcataatcattctaagaaacagaaagttatatatcttctcactaatcctaattgcctttataattgcagatatgtcaaagaatcaagcgacgaagaaagagcgcacacagagaagttcattgagtatcaggtttcataatcttgtttcacagtttccacaatgatttttgtttctcactgttcccttttaatcaatagatatctaattttccaatgtggtccctaaaaagaagaactaagaacccaaatctatctaaagccaataagccattagtgaaaccagaagttgcagaaggtacccgttttgttaagagtccattaagctgctagaatcgtatgtggtctttgcttcctcagagattcgaagatgtgaagatcatatctgaaactgagatacacgtacgagatcactattaaagccaatattatagagacaagtcacagatactatctgatgacatgtacttcgattcttacctaaaatgtaatgccatgttactttgtttctacaagattgacaattcctaagcacagaagctatgaaaagttcatgatcttttcataaagattctctttctttgtgactgatctattatagaaggttcataaactacaaactactaagcctcatgtaccagtgaagatccgacatgaaattcctgtaaagacttcataaataccatctgttgatcatttctctaaatacttccggaaaacagttaccaaacttgcatgaaattggaaacattaaaatcagaaattgaaagggggaaaggggaactgaccatcttcgtgaggcaggcggtgactatagtcatcaataatccaaagactctggctatgaggatttgtatctctgtgagactgtgactgttttcaagagacagggacaacaaaattataacttcatagtgtgcactgtgtacactctcactaaattggatcgagttctctggcctgtaaaatctaccccacataagacagaaaaatg

SEQ ID NO: 33142 - DNA, 994 bp, Arabidopsis thaliana landsberg
acgtgctcacctaacccgccaagactcgctactccgtggccaaagttgcgacagaatattcattcctcgcaaactcgtcgcaatttgcgagggaggctggttacccgtaaatccctcgcaaatttgcgacgagtttgcgaggaatgacgctttccacgcagattcctcgcaaacgtctcgcatatttgcgagggatttgttcgtcgcaaattttgcgagggattagcgaggttgtcttcttctctcgcaatacactcgcaaatccgtagcaaattgcgagggagattttccaccgcaaatttccctcgcaaatcgcctgttttcttgtagtgtttgtagttaaatatgacttgaggctaggtttatcatttagtctaagacctagaaacgcaagaagacccaggaagttaaagtaggatttagggtttaaggtttaaggttagggttatgcgtttagtgtttaggttttgaggttttgggtgcacggtttatggtttaaagttagggtttaaggtaaaaccaaaaaactcagaagaacttcagcttcaccatcaaacctttgggaatcaagaagaagctttgttagcggatttgtaattaaatatgcctagatgctttgtgtatcaatgagcataagaactagaaccgcaaccagattccagaagcctaaagtaggattaaggttttaaagtttggcacctatggtttagggtttagggtttaggtttaacggtttagggtttagggtttacggttttgggtttaagatttaggattcaggggttagggtttaggggtttgattttaggttttggaattgaaggtgtagggtttaggtttagtatttaggatcatatatcctatgatactttaagaagcaagaagaatcttagttagtttttcagagtgaaatatgactaaatgtcatgtgtacgattgaatataaaactagaacctcaacaagatatcgaaaagtaaagtagtgcttccttgt

SEQ ID NO: 33143 - DNA, 2265 bp, Arabidopsis thaliana landsberg
ggattttgttctccgatattgaagctaatctttggttttgtacacaatgtgtcattcgcctatataattgattcaatttcgttgcttaggttgaaatgtgatctattatcgtatttggttatgtttcttagtgtggttttgattgatgttaggtttcgttatgttgctgatgtttgtttgttgttgttttcctgaagcaaacaatgcaaatcattcaaggagagggctaatgaggtgaaggaaggtctagaggaagctgttcctggcatcattgtcactgtgaatcctgataaggtagtgaatcttttgctgcagatgtatatatttgtcattgatgcttgttgtttatgattgtttgtaccaatgtgtgcattaataagctaattctttcctttttgatctgctttaacagccaaggcgtggttgctttgagattcgagaggaaggcggcgagacattcatcagtcttttggtaagtttttcactctcatacttgaatgtagtatgccagttagtcgcactaatgtgagtgaccagttccagatggattgatgtttctagtcgtgtctgcttcatatacgccaaacatagattactttgatggtatactttacaaagtgaaaatcaactttatttgctcaagctcacacgaaatcgaagctatttttgctgagtcaactgatcaccaatgaggttttgttagagttgtcatttaatggcttttggttgtttgctttttaactgaatcaagttgagtgctaagttgtttgaaataagaacaaactagcagatctgattgttagtgactaggtgtacaataagaaaatgtttgctttcatgttctttattctcagatgtatatagaagatgatgtgattttcttatgtaggctatgaagcgcccatttacaccgatgaaggaacttaacatggaagaggtcattgcggacatcgtagagaagattaagtaacacagctagtaggttctaccaatgccgagtctttcgtttcctccttggccctcggctaataggcttcaatatctgactatctagagcaactgcaggatttttttaggcttaattttgatatattggtgaaaaccatttgagcacggtttcgtcgtttggtagtgcttgatcggctttgtgcagtttctttatgctaaaacttcctgatatatatgggattaagtctgtcttcgtaatgctagtttgaagcaattcgtttcgtttcatttattgttggactgtggatggcgttcaattacgttacggattagaggagcgaagaccaaacatttagttacaatgtggtgatacaagcttcacaggacagaacatcacactttcatagtctaatgacatatcgttgtggtacaatactgtgagtagaaatcgttagtgtctttgatccacttcgtatcaccattgcctcggtctatgatcgaatctcaactatcaggtgagttgaacctcgactcgctgtcgtaaatcatcttagagcccaacaaagctagccactgacccgagaagcatgacagcactggagctcaaagcggtgttagaagcagcagaaggtggttcagcctcatcagctgctgccatcttcttcttgccagacttatctggagccggagctggagaatcactttctgatggtgcagatgcaggtgcggtttctggagctaaaccaggaggagcattttaatatataaaaaaaaaggaaaaaacgcattgtttaaaacgtggtcatgacgaaaacgtttgatttcgatcgatgatatttaaataaaggaacactagacagacacattcattgaaacccaagtctaggtctttgatttagcgtttgttcctcccaaggtaggtctcgaatttttctatctccattttgaaagtatgtttgtttttatagatttgtcatgagacctttgtttgtttgtagggtcatagaaaccaatgtttcaccacttcgcctctcttttatcactgtcatcgtacgcctttgttgaggagttgacctaatttcaagtgttactgctgcgaattttgcttagtttccttttccctaaggcttaagagtcgaaagtattggactttgtctgtgtatcaaggtagctgctgaaagtaactcatatcttcttcttctactaagtggattctcatttgggcattctttttcgttcacagtctcaaaatctttttgctttgggtggtttccctatttgggaaattggtggataggtttaaatttctttcctttt

SEQ ID NO: 33144 - DNA, 3399 bp, Arabidopsis thaliana landsberg
cgcagttaagactttggatgataactcttcttttattggctcagacatcaaagtcttaaaagcatactcaaggaaagtatagtgtccgcccaagttacgtcactttttgtggcaaattttagcaagatgtgtaccagtaacagataatctacgaaaacgcggtataaactgtgagatatgatgtagcagaagtggtgctctagaagaaaccattaacctcacgcttttcttatgccatcatgcacgtcagatttgggcactttcacagatacctacggtcccatgaaaatttccttatgcatctatttatgcaaatttagatcattttttcggcacataccttcggaattcgaatcatcttcatttccatggataatttggtatatttggaaagcaaggaatgaaaaaatctttggaaatgtggataaaaatcctgtacaaatctgacatttggtggaaaaagagtcagactcgtggaagtccgctgaacttgagcttcacaatgaaactcatggttctttcaatggaaaatcataatcgagtgcgacattttccattagacaacaattattcaggatatcgttgttttgtgaatggatcttagaaagataacgacaagttttccggcttaggatggtattgtagatcatcaaatggagagacaccaaccatgggagttgccaatttcagaagaagtctatctccattacatgcagaggtggaagctctcctctggacgatgaagtgtatgattgttgtcgacaaccaagatgtagcattttttacagactgttcagacctggtgaagatggtgtcttttccaaccaaatgaccagcattttcaacttatttggaggaattccacaccgacaatgaagaattcacaagtttttcctaattttttatttctcatactacaaatgatatgggcgtacaaattggcacaaaaatttgtattgaaccgcttcatattacttttgtaaacatttttcctcagaattggctcttctaatttctaaataaaatctgatgaaaaaaaaagagtatatggttgaaaagttcaatcaagcgttcaacatgaatataacttatgttttcttcaaaaacaagcttgatgaattcaaattatgttacaagagatggaagtttcttacatataaaactggcatcactgttgatcctgagacatcaatgatatttgcatctgacgtatggtggagagaacaagagtttgtaaatacatctaacttttttactcagaaaaatatcttttaaaattttggtataagaatctaattgattctataattttagggatgtgaattaacaaaaagtttctaccgaaagtcgcctgagttttaggacgtgatgaaacgatgtctcgtgttagatgatgttcagtcccaaccgcaacattcatctcggcaaagaagagaacaattaatcaacgagcaagcaattgatgaagaaagcgatgatgacttagactctgatagtggtaacgtgccagcaacacaagttcccgagacacaagaagatgaagaagcgtatcgtgttgccgttgatgatgatgaaaccttcaaaaattctgctcctagaaaccaacaacgaattaggcctaatttgtagtcaacatgttgaagtggaattagttcacaaagatctgggtgaagcgcacaagtttatgttggttcacgaggaaatcttagacgagattattgctagttatagagatttccaacgacaaagttttcaaaaacttcgttcaagagactaccgcaatggatatgcgatggcatgctgaacatatgtctcccgaaggagaaatgcacaacccgtccgatggagcagcatggaaaaatttcaatgaggtatatccaaattttgctgctgaaagtcgcaatatttatctaggcttatcaactgatggatttaatcttgttagtatgaatggtgaggcacactcggtttgacatgtgatagtaactccttataatttaccctcgggcatgtgcataaagagagaatttttctttctatcagtcctagttcctggaccgaagcatcccaaaaaaagtttagatatttatcttcagccattgatcgaggagttggtgagtctgtggattgacggggaagaagcgtatgacaaatcaaagaaaaaaaaattcacgatgcgagttgctttgacgtgggcaataagtgacttctcgacgtatggcatgttgtctgtttggatgacgcatggtcttttgtcgtgtccatattgtctagataataccatatcattttggttaccaaatgaaagaaagcatagttggtttgattgccacggaatgtttttacctctaggtcatatgtacatgcaaaatgttcaatcatttcgccgagggaaggaagaaatagatgatcctccaccatggttgaatggagaggaaattcttcacgaaagaataaacaatattcatgggttgtttagtacagtcgattgtggaggaaatggacacgagaggcctgctcaaactatcaatggatacggggttgatcataattgggtgaaaaagagtatattttgggagttaccatattgggaaaatcttcttcttcgacataaccttgacttcatgcatattgagaagattttttttgataatcttatcaacacggttttgaatgttcctggaaaaacaaaagataacattaaatcaagattggatcttccagcgttatgtagcaggagtagcttgcatctcactcgtgatgaaacaatgccggtgccaatttttagattatcgattgacaaaaaaaaagtatttcttcgttagatgaaaaatgatatacggtttcctgatggatatgcgtccaagtttagtcgttgtgttgacgaaaaccattggaagttatctgggctgaaaagccatgattgccacgtcatcatgcaacgactactcccttttgcgtttgcagaacttcttccaaaaaatgttcacacagccatttcaggtaatttattcattctctactttgtttatattttttattttcttatttgtatcaataaattaatttaattatatatttgtgtagatatttcactcttctttcgggatatctcagccaagatgttacacaaagatgatgttgctttgttgaaagcaaatattgccgtcaaactttgcaatttggagaagatatttccgccgtcattctttgatgttatggaacgtcttcctgttcatctaccagatgaagccttgctaggaggtccagtgcaatattggtggatgtatccgttcgagaaatatatgtgccacttgaagaggaaagttaagaaaaaagaacatattgcgggttcgagtgttgcacaatgtattaatgaggagagagcgtatatttctg

SEQ ID NO: 33145 - DNA, 2113 bp, Arabidopsis thaliana landsberg
tggggaatttgctttcagcgattgtctgtgcgatctcggagcctctgttagcttgatgccactctctgtggcaagaaggttagagttcattcaatataaaccttgtgagctgactttgatccttgcagataggtcttctagaaaaccgttcggcatgctgaaagacctaccagtcatgattaatggcgtagaagtgcctacagacttcgtggtgctggatatggaagtagagcataaggatcccttaatactgggaagaccctttttagcgtcagtgggagcagtgatagatgtcagggaagggaaaataagtctcaaccttggaaagcatatcaagttgcagtttggcatcaacaaaactccacaagggtcaaccgaagatggaagaacctctagaaatgatagagcgatctcatgagaaggatatgagactgaaagagtgaaagaacttagaaagaggtctgataagcaggatgaaactatagagaagctagcccacaccattgaggaacttaggagtaagctgaatcggatgcagaaggaagctcaacctaaaggcgggattaacactatcccgagaaaagaattcacttcaagatggtctcaagatacagattatcctccagaagagaaggaagcctattttgaagaaagggggattgagtattctgctgcagacctctccagggaggacgctgaatatgatgatggtatcagagaggattatgctgaccctctctacagttcattttcttcttgataagtgtgaggagtcaagctagagacttaaaacaagctcacttgggaggaagtcccatgactatccttgtaaataatttttactttcttgttatttttgatttgttttggttatgtttgtggttctcaggaagaaaggagtaacgtgaaggtaaagtaaaaattcaaaacttttactcaactgatggcctagagatcgagtatagtggtcgagtatgagtgatgtttaaaaacctaaaaaattttaatcatcattttactcgaccaacagaagctacaaagtcttccagggagtctttcaagtttacagaggattgcaggatttcctagagtttttctagtgaacagagaatacagagaagagacaagaagacgacaagggacccgccgctgacgcccatgtcttccatgcaagagaccaagagacatggaatctcttcactcccactcgatcaccacgcaaccccaccttcactcgatatcacctccatcactcgaccttgttttctcctccataaccaaataaactcgaccccatccttcttaaatcaacgctccctttttcttcttctactcgacttcgacgccatcaccatccccacacctattaaactcgaccccattccccttattcatcacaaccaacaaacccatcctcatcaaagccacgcactcgaccgcttctcactcgcctcttcaccaccgtctcaagatcactcgaccgcggtgctggccgcagcagaaggagagaggtcgagtttcctcagagcggtgctggccgccacagagctgatgaggtcgagtacccacctgctggagctgatacagaacaaggaggttcgtctatggcctgggagcaatcgcaggcagccattgacgagcaactacgttcattcttcgactgaggtaagcgcctcactttaccattgtattataccgtatgttatgatttgtttcttcattttttgtttctgtgattggatttgtcctgagtactctcttccaagtttattcacacagtggactgtgtgatttaagtttgggggagggctcaggaagtgtgtgttgcattgtgtataattttgagtctgcattcatctaaggcatagaaaaaaaccaacaaatttgaaaaatttcagaaaatgatttcataaaaaaaaagagtgttcatgtagttgcatcacatttaggatcgagtctagagtgtttcatttaggattgttgcatatgcataggggatgatgatgagatagccttgtaagcattttgattcaccggataaactcagtgccctcgttgctagttgtctgttgcatagtcaatgaatttgaaataaaactgaaccatgcgtaga

SEQ ID NO: 33146 - DNA, 659 bp, Arabidopsis thaliana landsberg
aatatgaatattctctcagcattgaaaaaagtgggacaaatcttagatctggttttaattccactctaaatataacatttccaggtaatcttattccctgaaataatatatcctccaggaacaattttatttactactagatacacataaaaattgggaaccttcttcttaagatgtttcccacaccttgtagtctctgccttcaacggctacagaccagttttgcgatccgtttggtggttcataatgccctggtccgatcttcattgcaaccttttcatctattatagccgcatacacatctctctcactcttgtctatattcacctttataattcacaaaagcaaggaagacaaaggaggctggttttaagacccgtcgaaattttgtataaagattgtaagttcttgattactactttacctcactccgacagtggagtttctgtctgttcctgagagagagaagtgcagcaatctcggaatgataatccgagaagatatggtcgaagaagaccgctggtgttcctggatgagttaggctgtaagcatatccttgcatttccttcccctccggaaatctccaatgaccctttaagaaaagcggaagaaattgttaagaccggttattcatagagaacagaaacttgaggcaccca

SEQ ID NO: 33147 - DNA, 1822 bp, Arabidopsis thaliana landsberg
tcccatcgccacaacacactctctctctctctctctcagctagttttttgaaaaatttcctttttcaaaacttgtttgctttcataaagataattttttcaccaccgaaagaaaaagaaaaacaaccttcagagttcagatttcagagcgtttcttgaccgaggtgaggtttctgtgttttgcacaattattagaaaatacaaccaaaaataaaacaaggggaggcccggcccacatatctcgaccatgagcctaaactaaatcaaaagcacagataacgcagacaagttcgtgtttccttcgttttctgctcagcacccagagaaaggcctttctaactttgtgcaatcaatcatcattccttacaaattaggtaaaccaagcactatcagattctacccaccaccaggggttttcctccaactgtattaactaacgtaccagttgcaagttccggggattcaatgcaatacaaaccctcctccttttcaaggtgatgacgctgatgagctcattctttcaccgcccccttctcttgtgaaaccgaaatcaccaaatattccctgcatttttttaatcaaaaaaacattccagaatctaaaaagtacaatgacttgtagagactcatgtacgtaccattgcatcattgacagcatatgtgacacagtaatgttcctgttgaatataaacggttaaataatgctcaactacctacacactagaacaagatctgacgcatgcatcatcaaaaatatataatggataccgttgatattcaacaccaatcatcttttggtctttttatgctttcccatacatacatagaggtgcaacatctagttaatgaggtatagacagacttgcctgcatcatgtgccactcttcaaattcgtcaaacaactccaatcgctcgatcctagaaacacgacattctcatttaagatatattccaagagaagtaggctttctaatgaaagctcatgaattgaagaaacaagagagccaaaacaggatagtgagagagagagtgagagagaagaaaaaacaaaaaacaggatatatatagtaagactgtaagaggttcatctaaaaaacattggaaagctcaaaagtcacgggcaacagcattttacagatatttcttgacagagttcagccagatactaggtatgaaggcatagcgcccttacacagttttaacaaaacgtacagtactgacctgcgtttttcttgagtatcaacaaaactaccatacacttttagcatgtcccaggcaacagctctctgaaacaccagaataaagaagagggtaaagaaatgagagtgcttatatcagaaattatacatgaaagttagccctgctttaatcataatattctaactgcaaaacgaacctgccatccattatcaagaaacaatctctcctttgcaagtaaagttggtgatgcatcaatgcttaagagtgcacatccccgactctgaagaacagaaacaccgttaagctttcagaacaagtttaaatgaaggtaattgatcagtacaacatgaacccatgtggcaatactagaatattttagtgtcatactagtatccatattttgacaaaaatctcaaaaaagctttactaatgaagatgtcgctgtaactagagtagtagagtacacgttcttacctccaaatttctaatcatttgatgcccaaatgcatcatctggatgggatctgcaaacagaaacccaacgggttagacacataagcaataagattcgtatctgcaatattatgcagacaaggagaatcacagttgagctaacctgctcata

SEQ ID NO: 33148 - DNA, 720 bp, Arabidopsis thaliana landsberg
  unsure (1)..(720): unsure at all n locations
cttgcaccttcggcacaacattctccatctcctttttctccattctggattaacactgtttttaataacgtaatttctacggggagtcaagtggatcctatttcggttcaccggaagtttggtattgcactttcgattccggtagattaaatcagtaatctacgttttagcaaagatgagctgtttttgctgtcttgacttatgggccttaatgggcttattgggtttagtttttatttatatttttataacttggcctcatttttctgatagtgaaatgtaggattgaaaagcataaaaacattataaacaaaatagctcaaaacttttttttgttaaataattgtgatataataagaaaaacgttttgtagtttttttaattttgaattattttttccacatgcatcaaatataacatacacatgaaaatcaaatataaatgtatgataaatattgtgaatggtaaaaataatagaatcacgttatgaaaaatggtatattatacatcatcgattggtgtctgataagtttggaggaaactttagcaataatataggttttctctatttattcattagctaataggattatttattaaaaaatcataacttgattagcaagttctttacatttatgataatattaaattttctatctaacaataagaaaatatacacanatattaattttttattaatgataaaaaaatatatttatc

SEQ ID NO: 33149 - DNA, 2090 bp, Arabidopsis thaliana landsberg
ctccatcacaacattctctgccatttgccaataatatcccattaaacattttattttccttaattaacgaatcgactgtttctgaccaaaaaataaaaacactaattaaattgttaccgtcagagtcgcaacttcaattttgtacgccgtcgcagttttgtagatgaccaacgattccgaaccaccaacctacgccggaaaattaaagaaattcaccaaaatcagacgaatcaaacgcacaagtaatcgaattttaattcgaatttagaacaaaatatttggaaaagagagagagaaagaagatgcccaccataagggaactctttggttcgtcgccattggatctcgaaatggtcaccaggtcgaagtccgtgcaaacaatctgacacgtgcagatcacgtgactttgtgtcgtcttgagacggtctcagcctctgccacgtcaccttttcctccgccgctcgccggccatgtgccgagtatcttgaaaaaaaacagagtaattcaaattttaatgaaaaatcctcagaaaaatatcacattttccgggaagaatttctttacctagcttgaaatgtatcagtcttgaaatcgtatctgatcttagcatcgtaacaagacatcatgaatccaacatgtccgttctgcaaatttagaaatcaaaagaagcaatttttctccaattcagtcaaatgggtaacaccaaaaccacacacaaaaaaaagacgaaatctttgttcatgattcgatcataagcatgattacctcgcgattgtagacttgagcagggaaccaaaacttgccattttcaagattcgagtaccaatacatcacagaatctataggtgccaaatatgatgatgatcctctgttttcacaaccatggtttgaacttaaccatgcaaagggtttcaaattcgcaacaaacctcgaactccagtttggtttactctttctactactactactactacttgtgagacatctcattatcgtagcaacgtgagatttccactcttgaatcgctgcatcacccatcaatcttccccattttgtctccatatgcttctcccatagatgatcgcttacacacttatctcttagctcggagcaaacactagtcattgcacagagctctgatggtgagagcttctctaatatgcagtctaaggttaagtccggcaaatccaggagagacattttgttttcatcttcttgattctttttcttcctcttcgtttcctttctccatgttaatgttctaatcccattacggattatgcttcttgccagccaagaaactatgaggaacccacaaatggtgatggagaaacaaaaagaaatgaaagtgaggtactgtttctccattgaaagcaagaaacgagggagagaaaacagagtgagattagtggctaaagagagagagagagagagagagagagattgattgatttacggctcaagaaaagaaaatttgtttttgcctttttagtcatttacacacgcaattcaagaggagctgtctcatgtagtcacgctttgtgtatgtgtctgtgtatatatatatatatatatttacaagtattaagcaagtaagcttgaagttgaagacattataaacacaaacattttaataagaaaacactaaaagagacatcgaactgtgaacaataatgaggtttagggttttaaaagattcgttgtgaggctatttaatagaaggtgcaacattaagttgggtgagcaataaatacagttaggagtaggtggaaacagatgcaaaaccactaatgacattggttgggtcataagaagacttcaagtgacaatcccatgagaggcttctagttacagagaaagtgaccttatagaggttatgtcgtgcgtaacagctggcgctcgttgcaccgatttttaggttgatccatttcaatcttaaaactactcaaatcaacaaaatcaaatctcacttgaggcaaagaatgtattgaaatcgtaattacctccccaactactctctctttttgtccgtagcctaattcaaccaaactttccaactactttgtacaaaaatactttaaagattatag

SEQ ID NO: 33150 - DNA, 615 bp, Arabidopsis thaliana landsberg
atcagtttggaactgagggagtattaaagattaattacctgtagaactccattgaagcaaaaaatttaaggtttaagtaacgagccatgagcttatagaggtgaccaagttacacactgttcctgctgctcctttcacgtctacagggtaaatctaataaaaataatagtaacgttataatgatttaacatttagttagtgggttagttttttaaaattgattaatcaacctctgatgctatgatccatggtattggtcccatgcctaatccgtatgatccaaaatacacctaatatgataaataatccaaaatcaaaatacagttgatacgggaaaattatgaaaattcaatactaaattagaaaattaaaatcagaaaattattttatattttcaaatttaaatagtgtaaaactttatatctaaaaaacattgtaaattctaaatcctaaaacccttattaattaccatagcactaaagagagccaagacaggagttcctgttatcccagcaatgattctcctggagaacgaaaataaccggtaatttttaaagtccggtgtaacaaaccaaaattaatttcccggtttagtagaggcgatggaatagtaac

SEQ ID NO: 33151 - DNA, 566 bp, Arabidopsis thaliana landsberg
  unsure (1)..(566): unsure at all n locations
agaaaaacacatttactaatataagatccaggttattagaaactagaaattatgacaaaaatacaaactttagtcgatttcctacttgggagtgaaactgaatcttgaatgagaaaacccttagcttagtctccactcgaggaactttcagtagttctaaaaagaactatcaccagaaaagtaaaaaaatagctgtcagtacataatcaagagatgaaactcgaaagattatttaaatatgaaagtggagcacccgactaacctgctcacaccgccccaaagtttctttatttccagtgaagccctaccgaagcaagaatacgaagacatgagatgtagcacaagtttaatcacaaaagaagatattgccggatgataataacttcaaaattttcgtgaagcagaaaaattttagataagaaccagaaataaatgtaccttgagcaattctgcttcttcttttgttggacaaaactttattagattgtcaacttgatcaacatctatcactgactcatccaagcangaacagaactctgtaaccaaagatatttagttaagaaaat

SEQ ID NO: 33152 - DNA, 731 bp, Arabidopsis thaliana landsberg
taatattaaactttagttctcaccattatcctctacgtttactcctctaatttgttaatattactttcttataccacacattatactaatatactaaataactaatttcaactttctatcatgcggctaaaactaaagaaggagaaagctaacctaacattgttttctttttaaattaaagacaaattaggattagaaatttgaagaacagtaaagttgcatggtgtgtgatgaaccatgcaactatataatgattttggttcaccaacggtttcaacatttcaatttgtaatatcgttcacatacatttatttagttaccatttcctatttaaaagaaatcatattctttttttcttggaataacagagaaatcgaatgatatacaaaatgtaatgaatagtataatatatagatatgtagctgatatcagtaatataattataataatatctagaaattccaaaaccctttactctattcacaaagtggatttcctctagatttccacttacattatgcttggtcctaattgtactgaaatttacttaagatatatatttttttttttctttttttttttgcgttccttgagaaggaggaagggtcaagtggtacgttgcgaatccttctaagaaatttggttagtgcatttagttagttaaagctaaccattctataatcttcttttctgacaataaaaaatacaaaataaaacaccaataaccccat

SEQ ID NO: 33153 - DNA, 9477 bp, Arabidopsis thaliana landsberg
ggttcaggaaatactagagaaggcaggaatcacaacccttgtcgtcactgtggtgataggtggtttctgggtcaccgctgcaagcagcaaaggttgaaaaactctcgaagttactgaagaagaagaagagagcccattaatagaggaattagctgaacctttgttggggtcggattccacctaataaaccgagtcgaccatgtttaacgccttggcgaccttgtcaaagaaccatcccgagccaagcccaaaaaacctcagggattatgtcgaggaaatgtcccgaggcgaccccaaaaacgcctcggaacatcaccacaaaggattccccgacctgatcttgaagcgcctcggacagcaatctggagaattaccccgaggcggaccttaagatgcctcaggagcgcatcattcgattaacgaagtccgagccactcaaccacaacctgagagccaactcaacccggctcggaggaacatcggatcgggacagaaccttcaagaaatgacttaaccaatatgagatcaaacataccatttgcgaaaaacacggaagagattagaaaatctccgaggatatcaccaaatatagggatttccagaatcttcggaagataaagataaatctcctttgccagctctgagataaggagaaatcttccgagaatatcgcgagaagcgatctattaaaaccctatataaagaacttctgagaaaaggagagaggctctcaacttaaggctatcaaaaacgctctgactttgaaagcaaaaacacttattttcatattcaaaaacacttgtacgatcaaattcttactatttcaataatacaaccaaaaacaccgtctgcggtaatcaacaattctgttgttctttgagaatctcacaaagactcgttctttgaagaaacccttaaaacaatttctattgtgcgagttttgactctcacaacctttggatgatgaagaagctgaagcagaggaaggcttgcagatactctcactaggcactatgtcagaaaactcgaggggtaaatccatgaagatgcgtggatacattaggagcacaagcgtggtaatactgatagattttggggccacgagttgcttcattcacgaaggtatagtgaaacacaaaggttggcgagtcacagaaaccagaggctttagagtaaaggttggtggaggtagggtaataagaggaagcggtaaatgtgcagacatagcactggaagttcagagggaaactcaatccctctaaaccagacagacgttcctgaagacgttgctcccgcgaccctagcggaactaagaagtatgatggctcaacttcaacagaaggtgaacaatcaagaacaggcaaatcgatccttggtgcagcaactcgaagcagctacctcccaaggacagatcaggactactcgtttcagcgcgaggcatcttcaggatcgacgggcagcagcagatctcaatcccacacggctcgtattccacacacctggcaatacgacaaggcccgtccgcagaaccgcaccggaaatcggaagagaccgaaccgagccggcaattttgggaaatcgggaaacaaatcgaaacgaaccgcaactccctcctccccgagcagaggttaccgaggccgatcatatcgacgcctcggacaatgaagactccgaggagaatattaggtgggctgaagagtacgccagagaacaggtaataagcgccatcaagctatccctagccaaggcagagaacgagatgaagctcgtgagatcccaaatgcataacgcagtctcctcggcaccaaacatcgatcgcattctggaagaatcccataacacaccgttcacacacaagatcttcaacgcgataatctcagatacaggaaaattaagaatcgagtacttcaacgggtcttccgacccgaaagggcatttaaagtcgttcatcatcttcgtggcccaagccaaattcagaccagaagatagagacgctggtctctgtcacctgttcgttaagcacttgaaagggccagccctggattggttctcgagactcgagggaaattatgtggacagttttcaggagctatcgacgctcttcctgaagcaatattcggtgctaatcgatcccggcacatcagattccgatctatggtcactatctcagcagcctaatgagccacttcgagacttcctcgcgaaattccgatccagcctagccaaagtagaaggaatcaacgacgtggcggctctctcggctctgaagaaagcactgtggtacaaatccgaattttaaaaggaactaaatttgttcaaaccactgacaatccgagacgccttgcaccgagcctcggattacgtatccaatgaagaagagatggaactactagctaaaagacacgaaccgaccaagcaaacgcctcgcaccaataaacctcaacccggcgctccgaaccacaagaaaagcgcccaaggcgggacattcgttcaccatgaaggacgaaatttctgcggagcccataattaccaggccgatacaccccgaggcgaagccgcccgaggccgaggccgaggccgcggacgaggacgcagtcgagaatcctacacatggacgaaggatcaacccgcaggaaatgagcaagaatattgcgagttgcataagagttacgaccatcatacttccagatgtcgtagccttggagcaagattggctgcaaaattcctggccggagaaattggtggagggttgactatcgaggatttagaggcagaaaaaggtaaaaccgagcagaccgcccccgcggcgaaccccgaaggacctaaaagaggccagggtaatcgcgaaacagacgacgatgaaccagaagctgctcggggaaggatcttcacaattttaggggattcagctttatgtcaagatacggcagcatcaatcaaggcatatcaaaggcagcatcaattcaaatgttcggcaacgaagattccacgaaggagatcgggtcctccgaaaagttttccagaacactgccgaaccgaacgctggaaaactcgggacgaactgggaaggaccatacttaatttctaaagtcatccgacccggggtgtatgagctcgctgacttaaacggtaaagccgttccaagatcatggaacgcaatgcacctaaggaaatactacaactaaatccaaggtgactaaatttgaactacgaggtggcttgatccctgaaaagggtacgtaggcagctcgtcttcggacaagttcagctaccccccccattaaaaaaggggggagtgggtccgtatattcatactcccattttattattttataggtttccgaaccgaaacaaataaaaatttcaactttttactcatctaatacaatgagcgacggctcggagtatccattacaccgcttcggttacagcgcactatataaatattcaagataagaatctgttcgaatgtttttccgagcaggctatgaattctatcttctgaaacccggttatacttaacaccggtgccccagctcgtttctaaacgctggtcaaggagtgaatacgatcgggtcgcaaccgtgggtattcaaatctactgaaatccagttactctaaacacactggtaccgagtcaaccgcctcggaaactaaaacccagttatcataaacactggtgccgagctttgcttcggctaaatacagtttcttatctgctttggtctcaatgcttagaaatccagttatcccgaacaacctggtaccgagacgatcagctcggaacgaagtatactgaacccagctttgactcaggcaatttgtacccgagccaaccaccacagtccgtctgcagtttttctgactcgtagttcgcccagctaacagctcgtcggcagccttcctagcttgctattgcccgcctaacagctcgtcaacagcttggagttcttcaacaagtctcctagcagctttcctagctcacaacttgtcaacagctaacattttgagttcgagatagcaacacccgtcaagaacagaatctcgtagcaccaagaaaaaacaagccttactctcaaaagatacggatcagtcagtttagatgcggaagcagctggctcggtcacaccattcatgaagctcgtcgcattaactcttaaccaacgagctggggggctaactgttggggtcggattcccccacaagcaagaccgagccaaacagtctaagaataacaatcacctcatgattaaacatatgattggcccctagctaagaacaaagcacctcgggaccttattcgatcgaccgtcccgaagagagtttgcaaaatggctcgggtgttaatcatatgaacacagcccgagccaatcatgagaacgctgcgggaaacatctatgtcggctcgggagacagccaactgagcttaacggagtcatcaagcgcgccccgagccggtacataccgtttgccccgaagccacctctcaaacgaccaccgagccgtgaagaacacgcgaggcaaagacttgtaaaaaccgttcattctccaaggatcatttccggtaaaataggatcttttatgggactttcggaaatgataaaggagaatctttgaagataatgtcgaaatcaggaaatctccccaaaacctccgaagaataaggagaatatccttaggacgattatcctctagaaccgacctaaggataaataagaatcttccgaagaatatcgctagagaggcgggttaacgaccctatataaagtgtactagggacttcaccaaaggggatctttggatactcagaacaacacatagctttatacctagtgagaactacgaatggcttgatcccttcattgggtacgtaggcagtcctcaaggatgcagctataatacttaaataaaattaaagtttgcattctcaatacggagttcgctttaagatctatgtcaaactctcggcgccctggccaggtgttcgatgcgcgtctcacatggatgcagtggtgaaataatccacgccctattagaaaatttttctaatagggaaagccgagaccagttttctcgcacttaagctcatgttcggacagaaatataagccgaaccctgtattttccgatctgccgaacagatgctatacggggagtaagcctagcccagcatctcgctccccaactaatatgctgagtccgccttattttttatacagagcccagaactccctctttaaattatacataggcctactgggcataagccgagagacgtctcgcgcccagtacacgccgaatacttttatttataaagccgagctcagtctcgcacttaacatctaacccgaacttagacacaaaaaatcggctgtgacgtcaggtgaaaaccagtccgcccgaaagccgagctcaaagcttgcagatggcttataatttagtcgatctaaaaacctaatttcaagtttgggaatccgatatggttaatacgtaatcaaccgacggaggttcacaaaaaaaaaaaaaacatgaacttgttcttaaggacaaacattttattcaaatataaaagtctgaaagataagagtggtcgacataagtcaaccgaccttcctagctcccagttcgtctgtagctttcctagctcccagctcgtatgcacttcgcctagctaactgctcgtctgcagatgcgatctggaaattctcattttccttttccgagaaacactaatatttgcattttctccaaaactgggaaaatgggaatttacttgattacgggttgacttcccacaatttccttttccaaaaaaatgacaaagctcataaatggaaaacatagagaaaatactattctgcctcggaaacaggcaagatggaaaatcatcgaaaatagaagttaaaattaaaacaccgccccgaaagtgggtccacggttaaatgagttttgagaacgccccgaaagttgggtccacgatcgatgtaccaaaataaattacaaagacgacctattcagatcgtctggctcgcctcttcaacgcttacgtgtcgaatatcacttccgcaaacaaggtcgacattcgagccgtgctggtccgccactggagcaacttgagaggtttgcctcgaaaaaccaagctgatctggagacatgttcaggtcttcatccccaagctcgatgacgttcaaagcattgacttcgtcggacgcccttttggttaactccttaaggctgctgagttcggatgccgcaatcttcgcgcctctctgcatcagaatacctactatctcctcagcacctttggcctgattctcagcatccacctttggcccgacgaggtcctcttgctccttgagataagcctttactctatcaagacgagcttgggctttctttgtagtacgggcgaccttagcagctcgatcattccgcagtctgttgcactcccgctccccgtgctccttcgcagcaaccaacgcgacttgaagatcgctgatctctttctgaagatcagcttctcgaccattgagcctcttgacctcgtcgttcaactgagctcatctccgccttatgaatctcggcagcatctttcaatatagccatttccttcatgtctttggcgtagattgatttggcctggtctgccgcatttcttcaggttatcgaaagcctctctgtcggcgagcttcagcttcaacttgcgatcgtatgtcgcgatcagatcattggccagggcggcggtctggaaaaagagttacggttaaagccaaaatacaaagatattaagccacaggaagacatgtaactagcacgtacctcaagtgatgatctggcaaacttttgatatccctctttcagaaccaggtcatcgggattagggaaatccttcgtcccaaggagcatcaagttacgccaaagatgactggcggcctcctgatctctcacaaggaatttctcaccagaatacttaaacgaaaactggtcagaattaagagtttcacctcgcgacaggcgaaacgtcttcggagcagcaacttcatctaaaccggcttcagaggccgacctcttcttggattggttagccactcctttccctttctcttcacgggacctcctggaagtcccgagctccgcaacggtttcatccttgtcttgatcaacgataactaggcccgtgttgacctcttcgcctgctggcgcggcggcataaacggcgatggagcggtcgctggtaacattttgaatttcaggctcgacgacctgaacggattgactttgatcgcactcggcgatctcttgagctggaacgacgttggccccttcaagacgcgtcctatcttgagaatctggattgaccgtctcatgggagacctgatcaacaccggaagggccagcactaacgggaagattcaacgcagctgcctctccgtccagaggatgagtctcctcttcgatgggagctgggggaggtggcatattcaaaagcccggcagcaaagctaataaaggacttcctgaccttccccattatcctgttgacgcgcgacctcgtgatgtctttccatgcacgacgttgagctcggaagattgcctctaaaactccttcgaactctatgggaaactccgggctaggcctgtaccgatctgcaacaaaagaaaaggctatgagaatctaatcgggatcgacatgtctttaccctatctatttaaaagaagtctaccaggaaactccgtccacatcctcttcctccacgagaacggacgctcatacgactcgaggtcgaccctgacgtagaagtaatattctttccagttcttgaaattactgactttgggacagggaagaaagttatactttgggcggttattcaccacccaatagccagacgaccttatagctttcaacgttgtcatttcctcgaaacaacgaacgtttaccagataaacttcttcagcgcgaaggtcagagcaacaacgaaattgcatatcgccgccggagaacgccatacgacggcgatttagaaaggagatgatcagagacggaatgggaaaccaaagatgacaatgtctgaagtagtcttcatacatacagacatatcctcgagggggattccaaggacgctcatcttctccgggaatcatgtaagtgagtgggcgatctccggagccgcacaaggtaaatacttccgcgactgactcggttgttgaaagggtctttttcgcggtgatctcggtgttccaatgaacaactgggtcgaggtcaaattcgacataatcctcatgaagtaatctcgcattaacctcagcctctgtatactgcggctgcgtgttataagcatcctctaggtcgatgagtgggtcgaactgagataagaaatccaccggatcttcaggagcagcgagatgtccaccggaaccttcccgatctggctcatcaagcaacgtcggaatctcgatccggttcgatcgactagactgagcttcgtcgttcggattcccggttagccgagaagttcggcgaactaatggcatttcgctctcagaggaagaagacggagaaacaagaacaaccttacccattgccggaaaaatcgattaagaatcgagagtacaaaataagtcgcaaaggagagaacgagagctacctttgattcttcttgcaagcggcggaaaatgacttcccgagggtttagtcgaatataaataaaggcgaatgggcggcaaacctacgaggtcatcattaaacctacgggacgcttcgtttcccgagcttcacgcgcgcgtacagacgcggtgatttgacacgtgtcagatacgttcgaaatacgaatcgattcggaaatctaatgatcaattcacgctttccaagatttaaatcgaatattcaatttctaagttcggaaatttcgaattaagcaactcggattcgccgaactggggggggactaattgttggtgcaggaattagcacctccgacaataccggtttaaaccgaggaataacgtgaataaaatcgagaattcgattgaaccgggaaatcccggctggcctgttaatgggcctgagtcatgagctcgccacatgttctaacctgatcaaacactgatagagaaataattcaacaaatgaaggaaattatgggagatggaaattagactgatcatgtgatatctacttgctcaactttatagatttgcaacattactttattattagatagcattttccgagtgctagaatacccgtttttatgtagtgtctagttgtatgagatggagtctttggatgattgcgaaatgtgttctaatatatatagtccaagataggtgtagccaaactattggactatctttctccactcaaaattaaaggtcttcaaatatgtgtgttggtgccgcaatatgtggttctttttttgtatgaaataatggttaaaatgcccggaaagaagctcacaacccttgaggtaataagg

SEQ ID NO: 33154 - DNA, 1005 bp, Arabidopsis thaliana landsberg
  unsure (1)..(1005): unsure at all n locations
cgtaaggtcctaaccgctttttaattacgttactatgctatctaattaaagctagtactttttttttctatttatattaatcaaacaagctaagcatagtcctgtataattttttttttataagaatgtaaatattcattctcctgtttaggcatagtcctgattaattgaatgccgagaaattctaattttttaagctatggtccgaaataaaatccgggatgattattaaggtacaacttgtaaacgaacaaaataatactttttaaaaatgaggtaatgaacaaaggaaatgattcgcactagcagtacgaaggtaaattggctccaatcctatattcaaatcctagtataaacgatcatatggtaaaatatgtttaacaaaatacggcgattaatctaagtgataatataacaatgacattcacacaaatcacttattttcatatactagtcaataaactatatgaaaaaacagaaattaagagaatagtattaaatgatacaatcacatccacgacgatacaacaattaacaggtgcgcattaattcatgtctctttctcattagatcagacatataccgaattgggttctgttccttaattaacacatcaactatgcgtagttgcgtactcatcttcgcgacctgattttttatgtcgtgcatagggactttactttacaacgaacctatacggtggttttagttcgaatactaaacattgcagcacacagttaannnnnnnnnnnnnnnnnnctaagtttttatccacctgtccacatgtgtttcgccttgtatgatcgtatccaccctaaaaccggcaccagaaaactgatttcgtagggaatttgaaaaaattggtcgtttgcgcgctcctttgtttccttacctttgcaacaactaaccatattgtccattaatcttagacaatcattataggttttaactaatgccacattggttattataattatactaaatcttgatttataatcattaaat

SEQ ID NO: 33155 - DNA, 579 bp, Arabidopsis thaliana landsberg
gtggctctccttgcgtcttcaggtacactaatacatcgttgcttacattttgtagaacatttttcattcaccttttgagaattggtaacaatgtttagtttcatgtgtctgcaataaatatggaaatctcgaaaaatcgctgataagttgagtaaaatggtgcagttgttaggatcaatgattgtcttatttgtcgctgtaatggctgtcctcggctccggggggaactttccaatcagttttggtacacctggactggtaagaaactgcagttttcataaatatataggaaagtgaaaagcatactatttataatttggatcacaggtgggattagcgctctcatatgcagctccattggtttctctgttaggaagcttgttaacaagttttactgaaacagaaaaagaaatggtttctgttgaaagggttctccaggtaatgattctgattcttttttttgtttgtcaaccgaaattaattgcagctcaaaagagccattcctgaggaatgtagtttacatatgtgatatgatgtggttcggtacaaattcgtcgtgccaaattatccacttctaca

SEQ ID NO: 33156 - DNA, 2013 bp, Arabidopsis thaliana landsberg
  unsure (1)..(2013): unsure at all n locations
aatctttgttttaccttaaccttagacagcaatattttaattcatgatgtcattctcaaaagatgaagtcacaatctttatacaaaacagcgtcctagcatattgagatggtatttaagcccagaaaaagctgattgagaaccaaaaaaagaaaaacaattacgcaggccctattaagtaatgggcttggttttttggtaaagataatatatttagattatttcttttatttctattggtcttcgtaccttcacgcggatcagtgttagaaaagaatgaaatctgtccgtagaattgtattaatctacggttgctgtgatttcacgcggatcgtgatagaaacctcttatatccgttgattaaaaaccaatgaacgatccagatctaatcccgctgaaaaagaaaagcgaaatattttccctcccacttcttgtaatttccagacgataaatatccccttcctcaatcgaaacaaactatccagatctcaactttctctcatcttcaaattaaaatcaaacagtttcttaataacattttacttcatggctcgtaccaagcagacggctaggaaatcaaccggaggaaaggctccaaggaagcagctggcgacaaaagcggcgaggaaatctgctccggccaccggaggagtgaagaagccacacagattcagacccggaactgttgctttaagagaaatcaggaagtatcagaagagcactgagcttctgatccgtaagcttcctttccagcgtctggttcgtgagatagctcaggatttcaagacggatctgaggtttcagagcagtgctgttgctgctttacaagaggctgctgaggcttaccttgttggtttgtttgaagacactaacctttgcgccattcacgctaagagggtcaccatcatgcctaaggatatccagctcgcgaggagaatcagaggagaaagagcttaagtgaacgaagatgatgaagattaagaagactagtcgtttagttatggattagcttgtttggtttcaatggatatgtaaagctgtctcttttcgttttcgagtgttattagttttttacttaaatgtgtcttccagatgttcgatgaaatgcctaaaggaaattttaatctactgttgtctaatctttggattggttctgtcgatctacatatttctgccacgcttaagaatcgtttatcaacggaagagttaattttttgtttgatgaaattgtccaaattgatttgcaatagtagctgcttagggattctcagccttcttctccatgaacaaaacattctacaaattcttatttagaactaaatcattcactaaacgtaagaatagtatctttttctttacaaaatcaaagtgagagttcgcagattgttctattcctggttataccatcacagtaagaaatcctccaaattattttacttaatgcgtagatttgctgaataagagtaatgtaatttctcgaaatttgtaacttcaggctaaatttgttatgtgaattttgaaataatttcatccttattttgctacgattgaatttttttgagacccttgatagccaaaattttcgatttggcgcctaaaattaaaagatggggaagtagcgcaaaagcctacgtggactgaaaaggatgatataaattggttgatagtaaatgacacggatggccggaattttagattattttaattcggtgataaggtctcacacggatttatacctgannnnnnnnnnnnnnnnnnnnnnnnnttaatccaacggacaagaatacaactttcccttcaaaaacaaaactccctcccatgtttttttcacctcaccgccaaatttctctccccataaaagcagtccctcttctgcgttgatcttcactacaaaatttctcattcgcatccttcacaagaagaaaattcgatcggtcgattagtctttgtttgatttcgaaatggctcgtactaagcaaaccgggaggaaattcacaggaggcaaagcaccaag

SEQ ID NO: 33157 - DNA, 1382 bp, Arabidopsis thaliana landsberg
ccgaaattgccgcgcaacagctaccgagaccgtattatcattagcataagcatgaatcgacacctccgcatcacaaccatatttcttcacatcctttacgattctccgccggatcgaacgaggatggagaccagctgggattgggtaatcctccacatcccaaaacacacatgtcttaccatctacccaacggacaatgattaaacaattattgcgattaaatatatcgagatccgattacagatcttacccttgcgaaaaatcagcggaaactcgttggagggctgcggagcacacatggttattgagagactttgtgaaattagggtggttactacaattgtgccctatctttgatataggatcttaatgggctggacctggcacttagtaggcttgggcccaaaaacctgcgaaagacgcttggcccatggacagcccgccaaattgacagacagaccctaaattcacaaagtccctcatcagccagccaccgctataataaaatccctaaattcacaaagtccctcatcagccaccggtacaataaaatcccagaacgaaatctctacgtcgaaaccatgtccagtttcttccctttgccgccagccatcgggaaatccagtaagatgatttctcgaaattaattgtttgtttatgatatcatctttctgtgaagttggtagtatatttatatgtctatgatcgatcttgattagatctaacttgatatctttttcgtaacattagctggatgtggagtgcgtgatgaatcacaatcattagttgtatgggccattgaggactactcaatccctgaaagtatcgatcctgatatgatcaacttgaaaatcgaaacagctattgtcaaaaaatttaatttaaggtcgtcggcggtagtgacaacctggattttcggttctgctgagaatgcatggttggctgaatccaaagttaaactttgggaatccgagtttagagtctctctccacaaaggtccttttctaactcatatatcaacactctatctctttatatgaatttatcggtaagtaactgtaatctattgatgatactaattgcagggggggataaacgtgccagattaaacatgatgttagcagacgtcatttattatgtatggaactggaaggctccaacaaatttggcggtactcacagaaaacaaggagtagatggaacaagaccccaaatttttcagatttcgtcaagctttagaaaataaaggtttctttgttgccgtagaacaccatgagacactcatcaaccaagaaactgccgttgaagacccagccagatgactccccaataccttactacccaagtgacaaccctcaagagctagcgttttggtacaaaaaa

SEQ ID NO: 33158 - DNA, 204 bp, Arabidopsis thaliana landsberg
ttaaagcgttttacgggatgtagttggattgaagttagagaccaaattcgtgtctttgtgaatgctgacaagaacaacgaactttaggatgatgtctataggatgcccgcacttgtttctcaacatcttgaagaaaatgaatgttggaaagacttgtgaatacaacacatcatgttttctcccgtgttctgttctaaaaaggaa

SEQ ID NO: 33159 - DNA, 6026 bp, Arabidopsis thaliana landsberg
caaaatagctgccacatcagtgaaactcctgaaccagtagtcattccgcccaaggtccctttgtccacgaacaccgaaacggtgaccatagaggatgacgatgattcagaaccaagggtctccaccgaacaacctattgctgattagacaatcgagccggagccgactgccatcaacctgactgatcttgagcctgtccacattgaggccgaggtggctgaagattaattagtggcttgtatccacttaatggggttgtccgaaaactttgaatttattttttgaattagtttactattgcccatagggggcttttcttttcgtacaagtatttgcctgaggaggcttctaaacctttaagattatgatcccgagggggtttttgctataataaagcatgtatttgcaaagtccatctttaaatagctttttgttggccatgtggctaagtttcaagatttctaggttgatcagacctttctcttaaaaagcgagaactgagctcattgttttgttttacaaaatgcgaattcccaaactcgggtttagtcaattcgactcatttactgggcttgggccttaattactcttctttatatttaatgaaccttttgtctttaatgcgatggttgccatatcttttctcgagaaaaaggaaaagcttcacgcctttgaggcaataattgccttttttcgatttctaaaaatggtttaaaccattcggacacgccacaattattaattttatggtttcaagaaaaaacctatctctctataaataagagcataatctgccaccgctatctcaaacatgatctcagagatttacgtgataaatacttcaaggatggaaaacgaaagagcttccaccgtttgtcctctcgaccccggcagcccactgttcctgttcggcgacggcttcgagccagccgacgttctcttttcctcacgcctgcttccacgtcccctcgaaagacaaaaaggaggcgtatgactttatggataaggtaaatcctctttccttctctttttcgggacgaactttactcgcttttaactagttcatattctaggtcgtcgacaagcatcaccgcttatgcgatgaaaggcaacgtttgggccttaagaggcaaacactcgaggcccgaattgcccgtatcgagaggaaggtaagggcaatggagagctaccctttttaatgggagtagaggaactttgacagtgtggcgaagatcctgcacatgctctggatgtatctccgtgctcgaggccaagtccctggtcctgtaaacgctccggtccaagtgatcccgtctgccagtgaagacgttgacgacgaagaggaggacagcaacccttggaagcgcgtgaagaatgaaccacacgtggatgttaaaaacgaggcgtccacttcgaaccccgaaccggcgatgaaggagcatgttcctgagccccttccctaaatgttttctgagactcaaaactctctttttttattttcgcatggacctacctaattttccttgattcatcaaatattcgttttggagatactctttgaatgcagggcgaccaaagcgacgtgaatgcttccgcgaatcactccggctttaaatggagtcgcatctctgaaagctaagagacctccctataaatttcctctctagggttcttttcattccttactaacaataccgctcttttctttcgcagttatggccttcaacctccgatgctcggaatccatgccagacttttcgaggatcgggatgatcgatgaggacatcccgaacgtaccagacagaggacgctccccactttgcaactttaaatcccagatccgagctccgtgtgtgttaattaaggacctttcgagcagagatcaagacatcgcgatgtccttcatcaaagttctcgcggctcaacacaaaaaacgctccgcggaaaaaaagaaaattcgaaagaagatcaaccaaatgctgcgaagagtcactgtgatatcaagggagttacacaccctcaactctctccccgaagattggatcgaactcggaatcgcagaatttgctcgcatcccggattgtatgatgcccattcttgacatcgccagtcaaggggtcgaggtgttctgcaagatgaggaggatttcctagttcaaagtgtgtttaggacttcgacacattttttcttgttttccgttttgaataaatttagctttgcttcctgctttgtacgttcgcatagtcgaattccttgttttcactcgttcgtataatcgaactctttttcaacatgaataaaacaaatttaattaatagctgaactcgtttccgagctgcctacgtacccatttcgggatcaagcctcaccgtagttcttgtacaaaaaatgcgtgtcttttttttcctttttgtttcaaacataaaatttcttcaagttcaccacattccaaggacgttggactggtctgtcctctaaatctttcaatctgtaaacaccatttcggaccacctcggtaacaatataaggaccttcccaattaatgccaagtttgccagctccttcctccttcttgttatcgaacacacgtttcaaatcataatcgcccacaaagaaaggtctgcttttgactttcgaattgtaataccgagctgctgcgtgttgataattttgaattcggattaaggcttgatctcgcctctcgttgatggtatccaacgaatcgtcaagcattgcagaattctttttttcattcaaaggagcttccgttcgatgaagtccttgcacattgagctcagctggtacaactgcctccatcccgtaaaccaatgaaaacggggtttctccggacttgctccccatgaagtggaccatcaagcccggtagttattaggtcatgcatatgagcttcattttacttcttgccttatctgaccaattatattttccacttcgcagcttttattgcacctacccttcctactgctgagttcggcgcattcttcaagatcgtcatcgaaggggaaaccctttggaactccttcactcttaaccggttcatagaagctaatcacaagcttaggttgagcccccctgttcatctcctccagctgcctctgccccctcctttacctaaagggacttctgctcgagccatcgcagctcgtcgcaagacaatgtccaagtcgattgtggaggcttgcgagatgaacaaatcattcctccaatccacagtcgacaagaaggaatacagcagaaccctgttagtcgacgatggcagtgtcgaaggggtaaggtctgccggtgcttacagacccactcctcaccatgaaggtcatagcagccgatcatcccacaaggagcgatcaccttgccgcgactcacctcgacccacttcccgatctggactcagcagcgagccaattgccgacctgattcggaagaagagagatagaccatcccacaacagctcctcccccaaaagagacaaggcgagggcccgaactgaccgctctcctcgaccgtcgtcgccaccccgatctatgggtcctcctcctcccgtcaccatatctccctcgtccggatcaggaggggaaaaggcggagcaaagtactatcccttggcgggatgaaactgaggtccaagatgtcggagctaaagctattttggttcctcagtccaagtcgctcacgggttagaaatttcttcccatttttttttgttatcacattttttgccatttcggcttattgactcagcgtccttcgaccggtctgacccctttttttttaaaacagcgatggaaacggagaggaacgtctttcgatgtttgagaatccgaaaagacaccatccttccaaccttcgatagatggcgtcctgcaatccgcgagcgattcctactccatgcccatcactcatctcgggttagttcctttttaccgtaataaaccttttaatctttgcttctttaccctgtcgctaaccccttcttgttattatctgatccaggcgaacagtgaactcaacgacatgattgagtactatgaaaggctactgcttgacagggaaaaagatgttatggcgtggagagataagtcttcatcccttgagtccgatctccactcttcaaatgatgctaggctgaaattggaggatcagttggataacctctccatcgaactcatgaagtccaacggcaagctgcaggagcagtaccaaacgtacgacaaggtccaagaagaactctcaacttcccgggacaaactttcaaaatccgaatctagtgcctaagagttgtccaaccagctctccgaattgcagcttaagtacatagggtggccaactatcgggatgctgagttggcgaagtcgacgtcaaaggccaggaaagaggtgaaaggtcgcgggatggaattgatccaaggggcaattgtcttcatccaaaccgagaaggctggagcggagctggaatctgacgttagggagtacgagagtaatctcctcctttttgaccaaactcatgaatatgatttttctgaagaacgagagagggacgagttgaaagccgttctggaagagaagcaaaatcgtttagctgccttacctttctcgtcgttcaacccccagcagttcgaggagttcttcactgaatcgcctcctttgagtgaatccggtttagactgggctggtaaatcccaactcttctccctttttctttaaaaagtcgatccacagtgaactactcttatattaatccgagataattgcctcaggtgtcagcggttccgtggaacccaaagtgcctattgccccggcatcagttccgcggcgataatcacgttgcctgaaattcctccatccacgaactcggagatagtggttatcgaggatgatgatggttcagactccgtgattcctggcgagcagcccgctactgacgagccgagtgagattgagacaactgccgtagatcctgagttagttcaaaccgaacccgagatacccgagaactcgtagtggctgtgtccacttctcggcttgtcccttaaactcgaaatttactattgtttttttttaaattactttacttgcctaagtaggctttaaacaaatactttgcctgaggaggcttttaaacctttcctttaagactacgatcccaagagggttttctttgtgctaatcttgagtatggatttgcaaagtccatttctttaaatagagtttttgtttaaccatgtggtcaagttacgggacttgtaggttgatcagacctatccctaaaaatgcggactttaatccgcgaactccccaactcgggtttagtcagttcgattatttttgcgggctttgagcctttactatttactctgcatttaatggcccagttatcttaaatgtgacagttgcctttttggccttggaaatctggaaaattgtcacgcttctaaggcaataattgccttttcctcgatttccaaaaatggataaactcattcggacacgccacaattattaactttgtggtttcgagtaaaaccctaaatcactataaataagagcataaactttcttaactctcgaaagacatgatcgcagaaatttacttgaacaacacatgtagaatggaacgcgaaggagcatccaccgtctgccccctcgaccccaggagtcctttgttcttgtccggcgatggcttcgagcccgccggcgtcctctttccacacgcttgtttccactttccttcgaaggaaaagaaggaggcgtacgactttatgaacaaggtaaagactctcttgttctctttttcggaacgagttctacttgttttctaaccagttcgtactttaggtcgtcgacaagcatcgccgcctgtgcgatgaaaggcagcgtttaggccttaagaggcaaacgctcaaggcccgaattgctcgcatcgagagtaaaataagtgccatggagagcgaaccttttcagtgggagtggaggaacttcgactgcgtggcgaagatcccgcacatgctcc

SEQ ID NO: 33160 - DNA, 3255 bp, Arabidopsis thaliana landsberg
tatatgctgagatcttggattctcttagtcgtgtcttgtttcttcctccttcctatttacatctttgccacgccggttctgaggctactcggtcaagccgaagagatcgcggttccagctggacagttcactcttctaaccataccacagctcttctcactggctttcaatttccctacctctaagttccttcaagcacagagcaaagtggttgctattgcttggattggatttgtggctctttcccttcacgttattatgctctggctgtttattatcgagtttggttggggaacaaatggtgctgctttggcgtttaatattacaaactggggaacagcaattgctcaaattgtttatgtgattggttggtgtaatgaaggctggactggtttatcttggttggcttttaaagagatttgggctttcgttagactctccattgcatctgctgttatgctttgtcttgagatctggtatatgatgagtatcattgttcttactggccgtcttgacaatgcagttatcgctgttgattccctttctatatggttagttttctgcaacattttacatcaataagcttgagaaacttgtatctgactctttaacgttttcactctttggtttttaacatttcagcatgaatatcaacggcttggaggctatgttattcatcggaataaatgcagctataaggtatcatcattatctgaccttttttcctgttattcaggtaattagtaaactcatgtgtatatttgtgtactattagtgtccgtgtatccaatgagcttggcctaggccgtccacgagcagctaagtactctgtctatgtcacggtcttccagtctctcctcattggtcttgtctttatggtggctatcatcatagccagagaccattttgctatcatcttcacaagcagtaaagtacttcagcgtgcagtgtctaagctagcttatcttcttggtataaccatggttctcaacagcgtgcagcctgttgtttcgggtacaaaaatctaaacctgatatctctataaaccgaactgaatgtctcatcagattgtaaccgtccggatttgttcatcttattaggtgtggctgttggaggcgggtggcaaggcttagtggcttatataaacttgggttgttactacatttttggccttccctttggatatcttcttggttacatagcaaactttggagtgatggtaagagaatttagaaaatggcatgagttaagtcagttaatgctgaagctaaaacttatgtataatgttttcagggactttggtctggaatgatagccgggacagcgcttcaaacgttgttactgttgattgttctgtataagacaaactggaataaagaggtaagaaccagatatacaacaccatgttatatacactttttcattccttgaattgaatcgatctcaactgtgatgaacaggtggaagagacgatggaacgtatgaagaaatggggagggagtgagacgacatccaaggatatacttgcgtgattgatgttttttttttgttaagcttagtagtgactttttgtttgtctttcattggtttgggcaccaaattgttctatttagagttttagactgtaggaaactgttccatcagttatgttttgttacttacttccaaaaggaaaaattgcattacaaatgttagttacttttcctcatgtaacccaaatgtatcaaaaaaatttgtaacccaaataaaattccagatgcttgagaataagccattctagttttttcatcgttttatatatgttgtcaatgatattaataaagaacgtcaggatggccgagtggtctaaggcgccagactcaagttctggtcctcgtaagagggcgtgggttcaaaccccacttctgacataagttttgttatcttggataaagcgtcctcaccaaggtcaggaatatattcatgggcttttctaagataaagtgtcttcaccaaggtcaggaatatatttatgggcttttctaaatattagttaaatttggattattggcccatctgttctccactaatataatctttgatgtattagttctggagttaataattcatttgctattttgtttacttatctattttaattgtagttaacacttaattacaattacttacttaacaataataataataaaaatttgttatctttaaagtataaatcaaaatgatttttaaaacaccaaaaatattatttatcaaattaactaaatcaaattaatatactcgaggtaaattgttataactaacaaactatgtatgataaacgtgctggtattgacctagtttgaattaagacttgccaagatagcctggcgttcaacctcgtggtggcatataaattcaaatactttggtctacaattgcaaaaggaatgaaagcacgagaggcacatgtgaaaatcaataaaatcgattcgggtatccatatcctttctctagccggagtagatccgagtataattttatcccatctgttctttttttttcgggaaaaaagccagaaaaatgcttatttatttttaatttggccgtttaataccaatacttttaaaattggaagaaaaatacataagttaattttgattgtctactaaaactctggtcttttacattgtggtagtttcgaacctaccacttaacaggcgttgatggccataacgcaatcatttaacagggttaaattttaaccgtacgtgttgtgatatttataagcaatgaattttcagaaaattatgtgtgtgttgtattggtctggtggtaacaataatgtaagataatcctcagttcgcggattcgaacgccgcctctttcccatttagttatttttttttcgttttttcttttgtttttcacttcatcttcttcaccatccctgcaattgatttttcctttgaggaatgtgacacgtttaggcacttttagagaattttattccttttgagacacttgtcagggatgaggcacttttccaactttttcattaaacttttgaccaatttacccctgaaaattaagaaattataattaaaaaaagagtttcatctctccacgttgcctttttttccttattcttcgtcgcttcttcttgtcactctctttctctctcttctcattattacttttattctttccttgcaaaatcaaacatttgagagtttgtcaagatcgtgtagcttcccagacaaatatcagattttaaata

SEQ ID NO: 33161 - DNA, 1029 bp, Arabidopsis thaliana landsberg
catcccatctaatgaaaaaaaaaaaactctctaaaacatcatatgtctttagctctttggtatctattataattgatttgtgaactaacttttttatttttttgcagcaatttgtgaactaacttagaaagttcatatttgttgaatcttgaatcttgattaatccatagaaacctctttttctgttttaacttacgatgtacttcactatcctctcggcaacaaatctttctcaatttttgtatatatgctttatatttgttgacagaaaaagagtaataattcttgtaaccaaattagaaacgctgtcaagtatttagaaaatcagtaaaacgtcatccttgacgaaatagagggcgaaaagtgttctaatgtatatctaaatgcttctatttcagatgattttgtattttatttgcattggatataattttaatccgaagtggcaagaggattatgaagttgatgattcattctaccatataaattgaatccacttctggattcacaaagttaaatagaaccctgaaatgatgacaaatggtgaaatgtttacagcatggtcggattatttactgtcgtactaatataaattaatgtaagttgccacccattgatactaaccaaaagccaggaatctggtattaatttgttatactttataatttaatccttcaagggttaattattaatgaatcaattggattccaactttttgtagtggaagaaagatcactgtgctaacatttactttctctttgcactaaaacaaagtaaacttctgaaaacgaatatctaatctatttcatcgtaattatgtgagtgattttcctctttccaatctagaagcaacatgtagacgagtctcaccaaaattactctatgatcaagacgttgaaatttatcgaccgctcgaaaggaccaatacattgttagtcccgcccattggatccgcattatagtgtctcttaggggcaaaactcaaagtcatttcatagacaattcttttttttttttttcgaatactaa

SEQ ID NO: 33162 - DNA, 223 bp, Arabidopsis thaliana landsberg
  unsure (1)..(223): unsure at all n locations
cccggaacccggaaacagcgcgcagagaacacaaacccaaggggaagagacaggagcgaaacaagcaaccgagggagacggcaagacccaaaagacncggccgacggaacaaggcagggcccaacggaacccagagggaaaggaagaagcccgggcaaagagagaggggagcccgcgaccananngcgagcgccaaaacgagaaagaagggccgggacaacaa

SEQ ID NO: 33163 - DNA, 2450 bp, Arabidopsis thaliana landsberg
gcctcctccccattacaaatcttgagaaaatgactgtcatgcttataccttactttttatggcaaggtagcacaatggaaacataaaatataatcgcattccaagcaatttaaatttaaatcaacgtattcgtatgtgcacatctgacatcttccccatttatttggttctgaaggtaggaataatggatgttcatggccttgatattgaaagggttcgaaaatagaggcacaatgtatgtctagcatgaagatgttttcttgatcagtatgatgctcatagaagaagccagtacctttacgatgacatgcgtcacattgaaatgtaccttcctcattaccaggtcccctggtggcaacaactagtgtaagtggatgtggatgtaagggatgtcgcttcatgcatggagcatttgcacaatgttcatggaggatgaagtcgcattccatgcatgaatagaactgaccttcatagatcggaagcgcacaccctcgacaatacgtattttcgtcataagctctaaagatctcaagttgcagatggtgactatgaaaagggtggagtattattccatcagctatcctcttgaacggctcaccatcatctatcttatcattttcttctggtactccttcgagttcttttccatcccacacctttggatctattgcacattttgaatgaacaaaataaccatcacatttattgcaagcatacgcaccataattgttgtcaacttgttctctgcagactccgcatgaaaaggttccagatagaagagaagaggtaaaagatatacggtggtggtggcgagatatcctgatgacatgcgggaaaccccgacaatctttatggattgcgaagacacattggatacaaatatatgtgggatcaaacttcttaatcgaggcacaaaaatgggaaactaaagaagcttgtgcagggtaaaaggtgagagggtgggaatggctttttgggtggtctacagcaaagggtattgacctcatcgcacagatcggatgcataatgagcttgcatgtagaacagtgataaaaaatgtcgttgaaataatggtgacaacaaatgcagttttgactctgtggagaactggtaagtcgaagagagtgaaaagggtgggaaggatgtatgatctcgaatggagactctacgcattctttgtggaacattttttcacatataaggcatgcataataggttgcactgagcgttggacgcccgcatgcaccacaccgaaaatcttctggatcaggttgttcagtgttgcaccaaaagagaaggactacaggaagcttacagatataagggttatcccaatcaaggaaagattcgccttcttgatcagtactggttcttttgctggggaagtgaggggaacaattgaatggataaaactcttgagtctcatgaccatcaatgtgattgcgcttatgaaaattgatacgtgaactaggttatgaaaaaagaggttgaagagggagtttatggccaccagaatccatggccagtgattcattggaggagtttgggttgtctgtttgtgttaatgtgtataccaaaaatggttttccatcaatttcctcctttcaaaatactcccacggaactcatggtttcgataatggggatttggaaattttttgtgatatctttcttctccttctccctcttgcatatatagccaatagccctggaacaaatatccgggatccgcgggtatccgtatctggaaccgggatccgatccgaaaaaccggatatccgtgtgaaacggttccggatacggatagtaatattttatatccgcggatacggatccggataatcataaaaaatatgaccggatatccggatccggtaatattcaatgttttatgtttatgggttttattgggccatactaaaaattaaaattatgatattttccagcccatatcttggcccattttccaaaaaatctaatcctttcatcttcctcactcattcctctcgacaccagcctccaccaaatgaccatctctaccaccatggcaccaaatcgtcatcctcctccaccaaatcatcctcatcctcaacctccaccgaaacaaccgctgcctctatctcttcttcttccccttggcgttggattcattctttcgttgcagatttggagctgttttttctgggaagaatcttggcggtgaagttcggttacttgtgttcgggaggagagaagatgataaaaaaaaccggatcagatccggatatccgcggatactcgtactttttcacggacttcaggatcccgaatatccggggttggcggatacggatccggagactgaaatgacggatccgcctgttacggatacggatccggatacctcaaaaatcccggatatccggatccgtaacaggcctaatagccaaccatttaatataagaacatgtc

SEQ ID NO: 33164 - DNA, 770 bp, Arabidopsis thaliana landsberg
aaaaaaccgaagacatataattaagtaaacattttattctagtttagtgtaaaaatgtctagttttgttttgttggacattctatatggagatagttaagcttagatggacacactgaatttttggcactcttaggtggacacttcattaggaagataatatctctttatctttggacagtaatcaaacaaaaagacaaaattagaaaagacagataaaatggtcaatctttatcttttctgagctacgataaaatggtcaaatctccctcaaaactttccgacaatcagctctttgttccatactttacaattacatataaacaaattcccctattcctctgatctactttatagccctgagactctctttctgtactctaatcatttatctagctctctcattctcttattctggatcagccaagtttctccatttctcaatcaagaaaatcttgaaatactcaaatcttttcaagattcactttcaaagatatcttgataatagcctcaaactctggtttcaaagatgggaaacgacgagaccgtacgattcttgattcacttcttcaatggaagatggttcatggtgtttgcttcgtttctcatcatggcttgcgctggagccacctacctttttggtacttactctaaagatatcaaatctacacttggttacgatcagaccacgttgaacctcttaggtttctttaaagatcttggagcaaacgttggtgtcttgtccggtctaatagctgaggtcacaccgac

SEQ ID NO: 33165 - DNA, 3245 bp, Arabidopsis thaliana landsberg
taatactgtggtaagggtttataaaaaactttctttggcatttttgcatatctgatgactatctgaatctgtttttacaaatattttgcatatgatggatacgttgttcttgatttctctgatgcataatggttgactaatattttatgttacaaacttacaattgactatatatatttatttttcttgtgttctcgggtttagaacaatgtttttgttttggtaatgattgagttatattttatgttacaattgagtaatttttgttctgctaattgtgttccaggatttagaacagtgtttttgttttggcaatgatttgagttatattttatgctacaatcactacaagaaaacagtcgttttgcgagggaagaattactcgttaatccctcgcaaacagctatacgcaagggatttgcgaggaaaacgagttcctcgcaaatcgcttctcgcaaatggttatatgtcgcaattccctcgcaattgttgcgaggaactattttcctcgcaaatcacacgcaattgttgcctagtacttccctcgcaataactacgacggatttacgattctgttttaccgcatagcacatctctagcagaatttgcgatggatttgcaagcgttctgcaaggttttttctgatatattaagacttgattagtgtctgattagtctctaattacctagttaattagttgttaattatagatgattttgtatgcaattcaaagctgaaatttcattaacttgttctaaatagataaatacacaattgaagtttaaattcaaaaacaatattagattgtttgaaactctaagaacttgttctaaagagatataacaaggaaaaagcaagacaatgttttcaaaatacagttgatggaggagaggatcctgttgcaaggttagctagggcagcagctgctgtctcctcattggccacctccggttctggagcagtagacacaggtggttcatttgggttggcctgtcctgtctgtgtcgaggaaccacgtcgaagaaatttcagccaaagcaggatctttttcagcaagatagtgaaacaggatgtcgaagctattgatcttctcagcctgagattgaatgcatgcttcaacggcagccagcttctgagaaagtatgaccggatcatcactaggaagcattggaccactatgggctgaggatgcttcaaacagcagagatccaaccccataaatccttcctttctttcgcggagcaacctgcaaagatcacaaacactcacaaggacacaacaaaaaaaccatgagaaaccaagttcaaaagaattcagcacaacacaagtactttatatcaaacactagagacacaacacaaacatttcagacaagtacacaacacaaacacttcagacaagtacactaaagaattcaaacaagtacacaagtacacaacataacagaattcagctgccaagtacacaacataattctgacaagtacacaacagaattcagacaagtacacaacacaacaagctgccaagtacacttcagacaagtacacaacagaattcagtcaagtacacaacacaacaagctgccaagtacacaacataattcagacaagcacacaacagaattcagacaagtacagaacacaacaagctgccaagtacacaacataattcagacaagtacacaacagaattcagataagtacacaacacaacaagctgccaagaaaaagcacagaagatttacctcagtaaaaatcttgttcttggaatgaacagacaatccacctgatccagtgctctccggattgtccattgagcacatatgaaacttttcctcttctatcctagatgtcacttttcttgtaaatctcctctgacttcccatcgatgaaagttccatccgcttttctgtgtgtctcatctagcagctcaaggaaatcaggagttgtttctccagtcttctcacactgaaacacaaagagataaacaagttgtcaatataacattgtagattaagtaatggtaaggagagaagaatacttatctaacccgttttcttgcacgagctttgtatgaggtctggcctgaacagtgtttatatatgcccttgccatccgaatcatgatatctaccatttctgctgttggcactctttatttatgacttaagatcttgccaaaactgtactagacctttccacacctcaggatcaatccattttggcttggcttcatcacccttctccttccaatttcccttccaccgtgacacttgatcagacatcctagagtttagctttgcttcaaactcaacccttactcttttgttaattgaacagtcccagttatatacttgctacaaaacagacaaagcacacatcagaaatgaaaccaaacaacaaaacaagcataaacataaaaaaaaaagcacagaacttaccgcaaacgtttcataccatcgatcgattgtagcctttgatgtctgtgaccaattggcatgaggttctttgaaatctctttcaaatatgctgcggactgttgctgcaactgtagagtcatcgtcaaacctacagcaagagcaaccagcccacacataaggatctttatgtctttaaacttctaagacactacaatgctaagtacaaccaagctgttttacgtgtttaaacttctaaggcagaaccaacctaattccattttacaaggctgttctacacggactatgaatttaaccttaccagagagttgccggaggtcgctttgggtctagtcttgtcaagccagcacgaccgggactatcaaggagctcatccagtgtcagattgttgagacgctcagcttgagcatcagaatgattgacagaaggctgagtggttggcgttggaggcgatggtggatggcgtgaacctgaaccttgaacccctgagatattcccagcactaacaggagaattgacatgcaacgggtcacgctgttgttgcctaaaccgtacataagtattatccgacggcatcttgcacaaaaaacaaacccaaagttagaaccgtaaactacaaaaggttagatctggaaaaaagaagtaagatcggagaagaagaagaagttagatttgagagaagacttaaatcggagaagcagacgttacccttagaggcaaaacagtttgagtcagagaagaagagacgcggtggtgtttgatacagatcggaggagaagagaggcgcgaagagaggcggcgacgta

SEQ ID NO: 33166 - DNA, 338 bp, Arabidopsis thaliana landsberg
tctatttgctcgtccctcgcgtacaacaccagcataaagcaaatctgggctttcgtttcttttgtgatgggccgggaagaggaggaacatgtcaggtatctgcttgggatcatgtcttcttaggactattctggatgtccaagcctattccggaattatttttccattaaggtggaaaatgcaagtaggggtttggggtaatcaaaccgatcaagggggtgtgaactcttttcgctgggggaaatcttgcacaggattccatccctatctggggctggttccgggattttttatggacacaagcatctcggttagttgaaacatagggatatcccata

SEQ ID NO: 33167 - DNA, 2176 bp, Arabidopsis thaliana landsberg
cgaatctaaaataggaattggatggagaattggagataatgacataaaaatgaagataatgacatgaaaatcaataggaatcatgtgggagagagagagtactaacttggagaaggcaacagaggattcttcttcagccaattgtggatgtgcttgattttacgccttaagacgatgacagattgtttcacgtcatttttgtaatcagaaacttgactaatgaagtgatcccagagagcaaggattcatagtaatttttcaataaagagagagagcaaaatctgaatctcagatttcaacaaaaccctagaaattcaaatataacaaaattaaggaacgaactgataagttgactgatgatgggaagagagggagatagagagatgaaaatcatggtaaaaactttttattttctccgcttgattgtgtagacttgaaaaatgagagaaaaaaaaggagagagagaagagaaggagagagacaaataaaatgtaacgaaagagatgtgtaaagggtaaataagtcaaataacctatcaaaagtgtctattctttttaaagtgcctaattaggcattaactttctaaaaagtgcctaattacgtaatattctcttaaaaatatcatcaaagatattaatgctcaaaaaaaatttaccatcaaatagttaaagacagaaacaaatttttttaaaacaacgaagacattatctttttttaaacaatgaagaaattatggaaaaaaaatataaaaagtcatcaattacactttctaacaattttttagtcatttgtaaattttaaatactttttttctcttcttttagttgatataacaaaactccaacatatgacaaaactaggaaaaaaaacatgcatgagatgaaagcgaataaaagaaaaacaatgacagagactaactatccagtttgatgtttggtggtatgttagaagatgttaaaattgttgattcaacttgagagaacttgttccagatttcattttcttacctcctcttttgaacatatgaatattttcttcgtcatattgcaaaactcactgcatgaatgaaaccctcaacatcaacatttttttcaattccttaacatatttttaataaatagcaaactaaaggaaacataaagtcatgtatcatcccaacaagaattatatctcattcattgtctttaaaggtcatttcccattgattgtggattcgtaacttgcttttaagatcaaaaagtttctctagttccactttcaattgatcatatccatgtaaagcatttaaatctacaatttttcctatggctacacatcatatctgaagatgtttaataacaccacataaagatcatgtgagccgagttgagtcatcaaagctgtacacatatttctttctaatatatttttgatgtcttaatatattgaggtacaacaaatgtttgttcaaatacactagtttcacataattacaaaaagagatgttgtagatatatagtacgaaaatgatgattttatgcttaccttagtacgacctactgtagaattgaatagtgtgatttggaccttctttagcgatgcatgggttttgaatatggtcaatcattttatttcgagagagtttagaaaatttagatttttgatttgatccaattagacccatggggtctttgatgtttaagggtgtggcgagagatcaactttaaacaatatgtaaattagtcttttcttcattcgttaaactatttagtcgttgttattgtttctttcgatatggctatgattgagctactcattatccaaccataaggcaacttgaaatctttaactacatcacaatcactaaacgaaggaacactaaagagagaatcaagttcagttgtctaatttcttgccatgtctgaaaattcgatgatattgaatataaatataggaaatagcaggaatgagaaatgcattcacaaaaacattttagcttatcgaaaaaatgataataaaaatgttacattttacttatatcattaagatgacgagaacattttttattgaggaaagttgactgagaaataattgatgaaagcattaaatgctcgatattccatgttgaaaccttatcaggtaaaaatgaaaaacctgacaaagtttcaccatgggacatcgagcatttgatcccgtc

SEQ ID NO: 33168 - DNA, 571 bp, Arabidopsis thaliana landsberg
ggattttagttagattacaattctttttgtcttttttcatcacacttacacatttagtagtttatttttatctagaaaggaatactcgtaaaggaataaaaaagactaatattcataatcataacagaaatcttgtcgttgggtttggaatggtcacaagtccacaagacaccaaagatttaagattcgcgccgaacacccccatgtagcctttgcattcattaaacgcagtattagttcttctggtttttaggtcaaacaaaaggactgaatcattgtcaaagatagaaccatcatttgaagcaaggaacacaatgcaattctcctttgcacctgggagcttatgtaccgagcagcagagtttcgtccgagctccaagaaagatcactcggtcgttcaagtaattaacttgaacccactttctcttccctgcttcttcatcaagtctaaacactttgaaccatgtatatatatattcatcataacgccgccctgcgggtatgaagcgtacgactagcgacaactttccgactgtatgaaccaaactttatttaaaacaagagtgtcatcc

SEQ ID NO: 33169 - DNA, 2175 bp, Arabidopsis thaliana landsberg
tcagaagctagccgtcaaggtcttgtccaccgtccaccacagccactctcctcgtcatacctctccctccccgtctccggtccatcaggagttgtcttcgccggggccttctccaggagtggaaccatcatctgattcaaactctcgtgttccagctccaggaccggctacagctcccaattcggccggtttggttggtccggggatggtggttcttgtgattatgataagttctctgttttgaggggtttatatattgtcgctagtcattaaatttgtgagggtattaattactctaccattgagtttcatatttatgtgcctttttatttgtatgtttgaagcatcttgtaacccatttttaatgtttccgctgtctcgtttttgttcttactaaagaaaatatttaagatatttttttgtattgattagatgcgaatgtttttattttgtgttttaattatgatcacactaatatgaatatatacgacgaatatgtagagttcacatagctcatgcaataaaacttctccacacaaactaaaatcttgttgaaacatataaatagatcttatacactttttgtacatataagaatggtttgaacaatttaactttaatcaatatattaaaccggtacaccgaaatccaatagagagaatatgtcaaggagttaacaaaaaaaatatactaccgccgtctgtggggatcgaacccacggccacgtggttaaaagccacgcgctctaccactgagctaagacggctatatgacaaaaaaattaaattatgttaattattgtatgtttttgcagatcaaattaccaatgaaatagttggtatttaggttgttaactcaatcataaagccgattgactcttttttgttgaagagcttgcctcttgttgtggatgtggctgttgtaagactaataccagcccttgggtcgaaagttgaaagtttgattctggatctctaatgtctctagtatggacgctcctgtttggaagtcttttgtttggagtatgatatagattcataaaaatgcgggtatctactaccatttgctattgaccatcaaaaaacaacaaagtctcttaactatctttttattttgcaaaattttattaggagattttcaggcgactaaaacaagattttcaagcagtggatgataagacaaaactgataggccaacaacttgatgaaatgggcaatattgtgaaataatacacaagtatagcttccacctccaaccacctaaggacctctaataaatttacccaccaaaggtggtgggactccgtcacctcttatatttgctgcaatggcacagagaagagaaattagttgctggtgttgatccctaatatgtgctagttcatcatctacatgtccaaatctaaatctcatcccttctcctatcgcacggacctgcaagtgtagaaagcaaaaacatcaacatattctaataataattacaaaacacattaggttcttaaacttatcaaaactaattacttcaaaaaatatctttctaaaagttaatataccggaatttaatgcatttaaactagaattttttttctataaattaaatgtataataaaatccataaaataaattttaataagctcttactaattaaacataagataaaacaatattattaatttctcaacaatcaaatgtggatagaaaccaaaaagataaaataaactcggatgtcataggcccataatccagccttttctcaaagcttaaacgtaacgggctcggcccaaatttggtgtgttcatcatcttccccacaaaacctaattttgtttcttcagtagtactgtagcttcagatgcaactcctcgaaaacccgtagaaccggcattgagccaatcgtttacattctctgattcatatccttagcgttttcagaaacaaaatggtgggttggaagaggaatttgcagactgttattcgtcaagttggtagaagagtgaagaacagtcacatttctacagcaaattactcttcttctactcggaatttagaatcccctttctcacaaggttgactttttgatcatttccgaaatctagtgtgtttcttagtgggtctttcaaagagcataagttatctggtcttcgtgtttgtgaattgtgtgtttgagttgaggtttt

SEQ ID NO: 33170 - DNA, 1018 bp, Arabidopsis thaliana landsberg
  unsure (1)..(1018): unsure at all n locations
tctttctctcattctcccgttcagcagctcaagtagatactgacagatcttgcttggtggagtcgagtgttcttgtgggtagttctgagttggtaaacttccttggtttatgtcaaccttttcagtgtcagccatcggtttttagactggtttctctgaagctggtccgtccgggtctaacactaaaaagaacaaaacaaggaagagaccctcgaagaacacaaggaaattcaagcccctaactcccttgccagatggggtagatatagggttaaaagttggtctggaagtcggaaaaaaagaaaaaaggaaagcagtaaatgaaggaacaagctctgctaaaataaaaaagcttaatccatcagaggtgatcccaaaggggggattgcccaacgcccaatgagcatcatcagctggaattgccaaggactggtacggtctcaagatttggtgattcctcgtctcaaagaaaatgcgtcaaaacatttcccacagatgttgttcttgatggagtctatgaatagtaggaatgtattagttgatatgcaagtttggttaggctatgagcgggtttttacagtagagccgttgggnaagagtggcggtcttgccctgtttattaaaagcggtgtaacggtggatcttaagtattttgataaaaacttaatggatatgcatgtttagtttggtgctgtttccttttttggcccttgtatatatggggatccagtttttaaattaagaaaagataatttggaaaggctgagtagaatcggcattggcagaaaagagagttggtgtatggttggagatttcaatgacatattgcataatggagaaaagcttggagggcctttgagaagtgataatgtgttcttgccttttgctgagatgttacaggcttgtgatatggttgagatggcttcccatgggaacccgttcccttggctggcagaagatatgatatatgggaaacaaagtaggcttgatagagccttcggaaacaaagattggttct

SEQ ID NO: 33171 - DNA, 1919 bp, Arabidopsis thaliana landsberg
gagagataagaagaagccatggaagataacataggagctgcttcatcttcgagatctccgcctcaacaaacaccaaattcaaacggatcaccaataaatttaaggagcaagtagatggaatcggatcattcaaaagagatgattgatgattggatttgaaatcttcctctttgtatgtgctcgatgattgtagattcgtagttggagtgttttcccgagagaatcgagagatggtttgtttaacgtcttagattggagtggaagactatagacgacgcttgttcaaagtcaaacagatatcgacgacgaaactcattataaaattctattgagacaatgtaaaagcaaataaataaatatataaaaaggatttgtgacaacaaatacataaagtatactgtataatgtaattgtgtgtttataactattttctaaatctctattataatagaaaaaaaaaataagagtaatttgttttatggatttttacttttatatattgagaatatatataaattaaagtcttttattaaaaaaatatattatatgcattgtatatattaattaaatgggttataagttatgttacttgtcaagcttttcttagcatttagatttgggaatttttcacatgtcaaatctttttttatttgaagtaattagtgtaaattcatttaatttgtccatatattttgatttagaataaagttttcctcctaaaatatcaaataaatagaaaactgaggagtgttagatttagtaaatcgtgctatgttttgtttaattttctttttatggtatcttgaattgaagtttgtaattgaaattattcttatgattatcttactaaaagacatttctcacatctatatagactttatagacaaaactcaaacatgactagacttagaattaataagtcttagagcacgttcaatggaagtcccttagagtaaccttaatgataggctcttaattttgaatcttaactattttatgaattgttttattgaaaaaattgtaactaagaacttttgtaatggtttgaagctcttagagcttcattaatggtagtttcttaggttagttcttagaatttttttttgtcattgattactaagaacatctcattttgactcttatataagagacattttgtcatttgtctcttatataagagttaaaatgagatgttcttatcctaagaactaatcaaagagacaaccaataatgatgctgccagaatgctaagaataagattctaagcttaggttagccttaaactcccgggaaccaccacgggcagtggaagtcaatggagatgaccccggcactgaccggaaaattggggagatctccacccatgaggaagccttccggtggccattctgacctaagatgagaaaagatgggcatgggtgatgacttgatcctaaccaaaagtcaactcggtatacctaccaagtcaaagtcaacaatcttaactttccttaaacctggttggtttaggataaatgcctcctcggtgtgtaagatttatacgaaattaaataaaaaccggcccagttctgatttcattttggtttaacttggattgagattttaaacccggtttactttaattaaaaccaaagattcttttcatatcaaaattcttgaaaattggattaagccgctgtgtcagaccgaggctcttgactcgtcacgtcatgacgtcactcagcgcattttagtcaaatccccaattttttaaaattctcaacaaaagcgcttatcaaacttctctggcaaaccaaagatcaaacctttacaagaaatttctctcttttttgtgtaacgaatgtaagcaatacatcaaggaatttgatagattgaaacttcttgaagtgggtagtgaatcactactagtgatggttgac

SEQ ID NO: 33172 - DNA, 1007 bp, Arabidopsis thaliana landsberg
tatccttgaaaataaacgacttttttgaaatgttcactttatttaaaaatactaaacttgtgaaaaataaatttaaaagatggagatttggagaaacaaacatgtgcaaaggctacagcgagccaaccaaagatgcagaaaacatccgcgatccacattgtctgcgatcaaagagatgaacaaatcataacgtgtatattacgtcatcttagaaggtcctacaatatcaaaaacaaaaaaaaaaaaacagtggcataataacatttgaatacgaaacataatttaattacctgtcgacgaccaacgagagcagagattttaccgctgaacacggagggaatcattcctggtaatgtcattaccgaagtgaaaaacgaatactggccaacatagaagtagaccattcaaaccgggttactggtctggtttattgaaccggtttgagagtcttaaaagaaaaaaatgattttgatctatatgatgaacattgaacacaggtgggcttacatctgcaacggaaagtcccagttcttccatgattttggactgagcaggcgacgaatatgacatctacaaagtatgttatagttatgaaaattatgcacgaagaaattaggattctaaaactgtaatatccaaaatcagtggatagcaaattgagagagaaaggaagagatctcacggcgcagccataacagaaggatccagcgacaacgacggatgtgctgagaagaagaccagaagtgaaggaagaagcttcttcttcttgcttattcagaagatgtgattcgagtctttcagattccatcttctttctttgattcttatccttaactttgaatagtctcttcaagcttttatttggccatgcctcattggtcgttgtcacatttgactaatcttttattaatttgctcattcagtattttgtaatgcgatttagaaaattgagttgcacgatccaattagtagtaaccaagttttaagtggggtgtgaatttttttac

SEQ ID NO: 33173 - DNA, 458 bp, Arabidopsis thaliana landsberg
aattcctagaatgacaattaaaatataattatacaattaaatactaccacgggtgaaatcctaaaattgacgggcttgattcgatattaatatgagatggtatactacgggtgaaatccgagaaacaacaatcaaaatacaattatacaatattaaacatttaacaaaataaacaaatacaacttaaaactttaaaatttgagttataaaatttattctcgcggtgaattatacattcaaatcaaacaatagcttaaatttattaaatcatcctaaaaaatattcaattattttttatttaataaaaatataggcccgcggtataccgcgggttaatatctagttatctcttttataagaacactcaagcatatgcattttttatgcatcattaatacaagccaacgttacataaatcggaacatttgtataagaatactactactactgaaaaaaat

SEQ ID NO: 33174 - DNA, 564 bp, Arabidopsis thaliana landsberg
gagtatatctgcaccgaatgtaagcacgcaatgatcttctgttaacactctcaaatccacccttaaactgagtgtatgcaaaatgatctatgtagtgggaagaggtgtttttgacttcttaccagttagagagattgagctatcatcttgatagtcacagtcctcttcactgagagagatttggcgaagagccgcatttcctctatcgatgaccagcaacgagcaggtaggccgaacatatacgacatcaaaatcatttgagaactttgcatcctcacttggcccatctctatacccagctatatttgattttcccccagctatcgtagtaacacctgtaacaaaaatgtttcagactcttaagaacacaattcttctcagtttaattatatttttcaacaacaagcaaccatttcagtttttgagtgctgatgtaagtaaaacctatagaaaacttgtatacctgaatcaccaatctttcggatggcaagattcaaagtatcagcgacataaacgttccctttgtcatccattgtaacgcctctcggatggttaaaacgagcc

SEQ ID NO: 33175 - DNA, 1128 bp, Arabidopsis thaliana landsberg
aatgatctataaaagtgagaccccaaatctgcaaactttaattagaaacattgtcaactaacagtgacatggctaacatgaagctgactttggtctatcgcgtattaagcatcatacatacctaaccagcaagtcgggaaagggaatggtactattctagacgcttatcgatatgaatcctgatttgatttatagtcaacgtctcacacgatcttgattggcttcttacctgttctgtagcctcaatggatggcaccagaagttcttcgaaatgagtctgctgatgagaagtatattctcgtgttctgtttgattaagttcctttgagtacttgttttctagcctcagttgctaagtagctcttctcattccttgaaacaggtctgacatttacagctttggagtagtactatgggagcttgccacagagaagatcccatgggaaaatctcaactcgatgcaggtatcgtttttgagtgatagaatgatgagaagaatgtgtcttccaaatgacagttgaaatattagcaggtgatcggagctgtggggttcatgaaccagaggctggaaattccaaaggacattgatcctgattggatctcactaatagagagctgttggcacaggtacattaacgttctgaacattgcacaatcattgaatataaccttttattgtaatggttctccttgctttaggtgttctacatgtttcacagctgatgctgacattaatttttgtttctattttggtttgtctcacctgcagggatgcaaagctgagacccacattccaagaactgatggagagactaagagacctgcaaagaaagtatacaatacagttccaagcgactcgtgctgcgttatctgacaagtgacaactctcttctcaaggacaactaaaccaaacaaaagttgacccttttcacttatggcttcttgttcctcaacgccgcatcgcttcaagatccaactattgttcacagaaacaaagaaagagagaaagagagaaagagagagttggtctttttgaacaacaacaattggtggaacatgctgtgctggtgtgcaatgtcttcaccccatgacaagggtatggcatgaaatacatgaaggtggttgctat

SEQ ID NO: 33176 - DNA, 1005 bp, Arabidopsis thaliana landsberg
tgctgatttgtctttgtcccgaaatgatcaattttcagtttcccgaatttacgtatatcgataaaatattaattgccgcaacgtacaaggaacccaaaccttaatggcatcccattttactcgttgcaaaggttttcaatacaatgtcaacgatttcaatgtatttgtgtcattctcgataatagtacgaaaagattaagggtacgttagtccatatgtaatgaaatgtcaaatgttaaaaacagagcattgaaaatatcttggtccaattcggtttggtttggttagtttcaatacgattgattgtctctcatttttgattgttcggttaaagttcggtttagctttaataccgttttataaattcggttgagtttaagattagttcaattgaaagaactaaaccgagtcaaactacattaattggattcagttggtcaacgtaaccaattttgtttataataattgaaagaaaaaaagtgtgatacaatttttctagtctgtaacttttttaacacactgtaataactgaatttttttaaaaatttgactttagaaatttatttaaattcaaaatttaatgacaaaaaaaaacgattacattaaatttccataaaaaatatattttaaatcgaaaaaaagagaagaatcttttgtgacttaagaagacgaagaagatacaaagcgtgacggctctaactcaaattcctcctaccaaatttcctaaattaccctctcttaatttctaataccctaaaataaaataagttcttgattccaaagagagtccgttgggtttctcgtaaaccagagatactcattaggaagaaaatcagacaaaggagaaactcttttttgtcatctcttgtttggtggtttattttttggttgtgagtcctgtgttgacctataagccgatcaatttcgacatgcctcttttgatctttgtttgacttctgatcaacttctcgactttgtaagcttttctctgattctctctatctc

SEQ ID NO: 33177 - DNA, 9215 bp, Arabidopsis thaliana landsberg
aactccacttcagcaacaacccactcgaacaacgccttctttgctacattagacaagcggaatttcgaaactggtaatttcccatctcgtgtaacatgcaactcaggtctgctgcatatttccgccaagtccaatcttgatttcaaactatcttttgttttgccctgcacattcaaaagcgtattcatgaaattatcgaaaaagtttttctcgatgtgcatcacgtcaaggttatgccgtaagaggagatccttccaatatgggagttgccaaaagatactttgtttgtgccaattgtgagtgcttcaatattcgtcaggcatattcgccggagtgtgccagttacccccacgcttgcaggtttcctgagcaccataataatcaatattttcaaacaaatcaattccaaaaacataaactggtgggggaagacgaaccattttattcttcctaaaaagttttttgttccttcgatacggaggatgcagggtaagaaaccgacagtgacaatcaaaccaacatggctttctgcctttatttaattgaaacgcatttgtacgacccatacagtagggacaagataatttttcatgcgttgtccaccccgataacattccatatgccgggaagtcactaatcgtccacattagcattgctcgcatattgaaattttgtttgctcgagtaatcaaacgtatgaacaccttcataccacaacttcttgagttcatgaatcagtggttgcaagaagacatcaagtgctcgtttcggatgctttggcccaggcactaaaatacttaagaacagaaattcgctttgcatacacatatctggaggaagattgtatggggtcaagataacaggccaaagagaatattgtcgcccagacaaaccgaatggactaaatccatctgtgcataagccaagatacacattcctacactcgctagcaaagttaggatataccgtttgaaagtgtttccacgcctttgcatctgatgggtgcgttatttctccgtctgtagttgtatgttgagcatgccatctcatttttgccgcagttctttctgattgatataaacgtttcaatctatcagttattggcaagtaccacatccgtttatatggcactcgcgtccttccgccagtagtctggtatctcggttcccgcaaaaccgacattcctgcagatttacatcatctccccaaaaaatcatgcaatagtcaatgcatacatcaatcatttctgatggtaatccaagactcgaaaccaacttctgtatttcataataattctcagccgatatattatccggtggcaaatattctttaattaattctgctcatgaatccatgcaattttcacttaagttattatctgctttaatagtcatcatcctagatgcaaaagataacttagaatgtccttctctacatccctcgtagattggttgatttgcagcatctaacatatcataaaagtattgtgcatctacattgggttctttaataatattttcaagaaatgtagcaatagtttcatgaaatgcatcattaataaaattagtaggttggtgcactatctctacagtccatgacgtaactatacatagtagtttggcataaatacactattataaagacgcttcttcaatacattaaatattccaaatatttctcattgagacacttacgacatggacagaatatggtaccgttctcacgagcaaatggtttgtttgtcgcttgatacatgaaaccgcgtaatccgtcataatactctctcgtcacctcactggtcgcttgatctctatgattgtacatccaacttcgtaatgtgtaaatctcatgttctccacccccaagacattattatctttgtaagaagttttttttttttgaaaagattttttttgtttgtaagtaaatgttatgatttgagttatgatttcttagacgttacgtaggctatttatagatttcccaaaaaatattgcaagatttgctaggaaaaaagttttttgcaaggaatttgcgagggaatcctacctaccaaccagttcggtaagataatttaaaacgtggtcacctaacccgcgaagactcgcaaatccgtcgcaaaatttgctacagaatagttgtgcgtcgcaagtgcgtcgcaatctgcaagggatttctgttactcgcaactccctcgcaaatttgcgacgtctttgcgaggaatcatggttttcacgcaatttcctcgcaaacgtctcgcaattttgcgagagaaatgttcgttgcaaattttgcgacggagtaacgacgttgttctctttcatcgcaaacttcttgcaattctgtagcaaatttgcgagggacattttcaatcgcaaatgttcctcgtaaatcgcttgttttcttgtagtaaaaagctttttaaaagaattttaaagcgttgaaaaattattataatgttaacactttaactgttagtaattgggcatagggcctcttatttttgaaaaagcaaaccgttttagtaaaaattcactaaaggcaaaattcacatcaaaccaaaacaaaaaagaaaaagaaactttgaaagtaacaaaaagaaaataaaaattagagaaactgtcgtctctctcattgtgtcttctccttagaacaatttgaagaaattccgtttctcagcaaaggaatcaattgaatgtaacaagtttatgatactaaattttgatatttgggttcgttcgattttatttctttttgtcgaatctcttctctattatagcaatatctagggtttttggtttgcaaattcctcgcaagtacctcgtaatattgcgagagatatatttgcaggttcaagtgaaaccaatagttggtgttaattctcatgaatatgaccacttagtttcacaaaagaatcctaaagacaaggatctgttacatgtttttgatcttgtgatcaaagggtacaaaatgagcaagaaggattggagtcaaggatggattgaagtggaacaagtacatgaaggtagaattgtttgtgtaatgaaacctgcagttgaaacacttgtgtatcgcagaagaaaaaaaaaatcagtgtcctttggtgagaaaataagacttgtttatgaaaactgtgaagttcttaggtacaaagttggaaggatggaggaatatttagggatcgaacgagttccttccagttctgctagagaagaagaaaaagaagaggaagaaaaaaaaattgcgagggatatattcctcacaaattttgcgacgatttagcgacgttctcatatctgctcccaaagtccttacattgtccttgctattttgcgagggatatatttgaaggttgaagtgaaacccatagttggtgttaattctcatgaatatgaccacttggtttcaaaaaagaatcttaaagacaagaatctgttacatgtttttgatcttgtcattaaagggtatataatgagcaacaaggattggagacatggatggattcaagtggaacaagtacatgaaggtagaattgattatgtaatgaaacctgcaattgaaacacttatgtatcgcagcagaaaaaggaaattaatgtcctttggtgagaaaataagacttgtctatgaaaaatgtgaagttcttaggtacaaagttggaaggatagaggaatatttagggatcgaacgagttccttccgattctactagagaagaagaaaaagaagaggaagaaaaaaaatttgcgagggatgtattcctcacaaatttacgacgatttagcaaggttctcctatctgctcccaaagtccttacattgtcctcgctattttgcgagggatatatttgcaggttgaagtgaaaccaattgttggtgtcaattctcgcgaatatgaccacttggtttcaaaaaagaattttaaagacaagaatttgttacatgtttttgatcttgtgattaaagggtatttaatgagcaagaaggattggagacatggatgaattgaagtggaacaagtacatgaaggtagaattgattatgtaatttaaacctgcaattgaaacacttgtgtatcgcagcagaaaaaggaaatcaatgtcctttggtgagaaaataagacttgtctatgaaaactatgaagttcttagatacaaaattggaatgatagaggactatttatggatcgaaagagttgatgccagttctactagagaagaagaaaaaaaaaaggaagaagaaaatgttgcgagggataaattcctcacaaattttgcgacgatttagcgacgttctcttatctgctcccaaagtcctcacattgtccctgctattttacaagggatatatttgcaggttgaagtgaaaccaatagttggtgttaattctcatgaatatgaccacttggtttcaaaaaagaatcttaaaggcaagaatctgttacatgtttttgatcttgtgattaaagggtatataatgagcaagaatgactagagacagggatggattgaagtggaacaagtacatgaaggtagaattgattatgtatgaaacctgtagttgaaacacttgtgtatcaccagcagaaaaaagaattcaatgtcctttggtgagaaaataggactggtctatgaaaattgtgaagttcttaggtacaaaattggaaggatggaagagtatttagggatcgaaagagtttctgctagttcttctagggaagaagaaaaataagaggaagaagaaaattttgtgagagatatattcctcgcaaattttatgacgaattagcaacgttctcctatctgctcgcaaagtcctcgccattttgtagcaaatttgcgggggaccttttccatcgcaaatgtttctcgcaaatcgcttgttttcttgtagaataaaagtttctaaaaaacatttaaagcgttgaataagttactgtaacgttaagactttaactatttaattgggcctagacctcttattttcgaaaaagcaaatcgttttagtataaattcactaaagcccaaaattcactaaaaaccaaaacaaaaaaagaaaacgaaaccgtgaaagtaacaaaaagtaaaaaaaaaaaaaaatttagagaaattgtcgtttctttcatcataacaatttgaagaatttttgtttctcgagcaaaggaatcaattgaaggtaacaaatttatgacactaaagtttggtatttcggtttgttcgatgatatttcttttcgttgaatctcttctctattatagcaatatctagggttttcggttcgcaaattcttcgcaagtacctcgcaatttttcgagggctatatttgcaggttgaagtgaaaccaatagttggtgttaattctcatgaatatgaccacttagtttcacaaaagaatcctaaagacaaggatctgttacatgtttttgatcttgtgatcaaagggtataaaatgagcaagaaggattggagtcaaggatggattgaagtggaacaagtacatgaaggtagaattgattgtgtaatgaaacctgcatgttgaaacacttgtgtatcgcagcagaaaaaagaaatcaatgtcctttggtgagaaaataagacttgtttatgaaaactgtgaagttcttaggtacaaagttggaaggatggaggaatatttagggatcgaacgagttccttccagttctactagagaagaagaaaaagaagaggaagaaaaaaattttgcgagggatatattcctcgcatattttgcgacgatttagcgacgttctcctatctattcgcaaagtccttacattgtcctagatattttgcgagggatatatttgcaggttgaagtgaaaccaattgttggtgtcaattctcacgaatatgaccacttggtttcaaaaaagaattttaaagacaagaatttgttacatgtttttgatcttgtgattaaagggtatataatgagcaaaaatgactggagacatggatgaattgaagtggaacgagtacataaaagtagaattaatgtaatcaaccctgctattgaaacacttgtgtatcgcaaaaaaaaaaggaaatcaatgtcctttagtgagaaataggacttgtctatgaaaactgtgaagatcttaggtacaaagttggaaagatggatgactatttagggatcaaaagagttcttgtcagttctactagagaagaagaaaaaaaaagaggaagaagataattttgcgagggatatattcctcgcaaattttacgacgaattagcgaggttgtcttatctgcttgcaaagtcctcgcaattttgtatcaaattttcgagggaccatttccatcgcaaaggttccacgcaaatcgcttgttttcttgttgtaaaaaggtttctaaaagaattttaacgtgttgaaaaagttactataatgttaacactctaactgtttgtatttgggcctagaccacttattttcgaaaaagtaaaccgttttagtataaattcactaaacccaaaattcactaaaaaccaaaacaaaaaggaaaaagaaaccgtgaaagaaacaaaaaattaaaataataaattagaaaaattgtcgtctctctcactgtgtcttcttccttagaacaatttgaaaattttttgattctccaacaaaggaatcaattgaaggtaacaaatttatgaaactaaattttgattgggtttgttcgattttatttctttttgtcgaatattttctctggtattaaaatatctagggttttcgtttcgcaatgtcctcgcaagttcctcgcaattttgggagggatatatttgcaggttgaaatgaaacctatagttggtgttaattctcttgaatatgaccacttgctttcacaaaaaaactctaaagacaaggatctgttacatgtttttgatcttgtgattaaagggtataaaataagcaagaaggattggagtcaaggatggattgaagtggaacaagtacatgaaggtagaattgtttgtgtaatgaaacctgcagttgaaacacttgtgtatcgcagaagaaaaaaaaaatcagtgtcctttggtgagaaaataagacttgtttatgaaaactgtgaagttcttaggtacaaagttggaaggatggaggaatatttagggatcgaacgagttccttccagttctgctagagaagaagaaaaagaagaggaagaaaaaaaaattgcgagggatatattcctcacaaattttgcgacgatttagcgacgttctcatatctgctcccaaagtccttacattgtccttgctattttgcgagggatatatttgaaggttgaagtgaaacccatagttggtgttaattctcatgaatatgaccacttggtttcaaaaaagaatcttaaagacaagaatctgttacatgtttttgatcttgtcattaaagggtatataatgagcaaaaatgactggagacagggatggattgaagtggaacaattacatgaaggtagaattgattatgtaatgaaacatgcaattgaaacacttgtgtatcgcagcagaaaaaggaaatcaatgtcctttagtgagaaaataggacttgtctatgaaaactgtgaagatcttaggtacaaagttggaaggatgaaggactatttagggatcgaatgagttccttccagttctactagagaagaagaaaaagaagaggaagaagaaaattttgcgagggatatatttgtcgcaaattttgggacgaattagcgatgttctcctatctgctcccaaagttctcacattgtcctcactattttgcgagggatatatttgcaggtttaagtgaaaccaatagttggtgttaattctcatgaatatgaccacttggttttacaaaaaaatcttaaatacaaggatttgttacatgtttttgaacttgtgatcatagggtatataatgagcaaggaggattggagacatgattgaattgaagtggaacaagtacatgaaggtagaattgattatgtaattaaaacctgcaattgaaacacttgtgtatcgcagcagaaaaaggaaatcagtgtccttaggtgagaaaataaaacttgtctatgaaaactattaagttcttagataaaaaattggaatgatggaggactatttagggatcgaaagagttcatgccaattctactagagaagaagaaaaaaaagaagaagaagaaaatgttgcgagggatatattcctcacaaatttggggacgacttagcgaagttctcctatctgctcgcaaagtcctcgccattctgtagcaaatttgcgagggaccttttccatcgcaaatgtttctcgcagatcgcttgttttcttgtagtaaaaaggtttctaaaaaaattttaaagcgctgaaaaagttattgtaatgttaacactttaactgtttgtaatttggcctagacctcttattttcggaaaagcaaaccgttttagtataaattcactgaagcccaaaattcactaaaaaccaaaaaaaaacaaaaaaggaaaccttaaaagtaacaaaaagtaaaaaaaacattttagagaaactgtcgtctccctcactgtgtcttcttccttagaacaatttgaagaaattttgtatctccatcaaaggaatcaattgaaggtaacaaatttatgacactaaagtttgatatttgggtttgttcgattttatttcttgttgtcgaatgtcttctctgttataacaatatctagggttttcggttcgcaaattccttgcaagtacctcgtaattttgcgagagatatatttgcaggttaaattggaaccaatagttgttgttaattctcaagaatatgaccacttgatttttcaaaaaagaatcctaaagacaaggatctgttacatgtttttgatcttgtgatcatagggtatataatgagcaagaaggattggtgtcaaggatggattgaagtggaacaagaacatgaaggtagaattgatcatgtaatgaaatctacaaatgaaacagttgtgtatcagtagcacaaaaaggaaatcaatgtcctttgctgagaaaataggagttgtatatgaaaattgtgaagttcttaggtacaaaattggagggatggaggagtatttatggatccctcgaattactgctacctgatctagggatgatgatgtatattaggtagtagaaaagtctgcgagggatattttccttccccaattttggg

SEQ ID NO: 33178 - DNA, 651 bp, Arabidopsis thaliana landsberg
aagccgattctcaggacacttcgctgataccatcaggccaccaatgctgacctggttctgagatatacacatcaagaaagcaggagccattaatgcctttggttagaaccagcgcaacgctatcatatcctcaacgttgaatctgaccaactacgtctacaactccatggctatgcatgctcagttccggaaagagcagccattaacagtgggagagaagattgccacttaaccggggatctttttggtggtagttgttttgcttttgattggcattgcttcttcttatatgagagattctgtgtgtgtgtgtgtggcatttgatgtctcatgttgttaagagagtttttgtttggttatgttcttttgttggtctatatgtaaatcacaaaaagaaacagatacatagttacaacttgtacaagtaagcaacagaaacaacataattttggtattgaatgagtttttcttttgcaagtattaacacacaacagcagaaacagaagatgattgttcttttgtctctttgatcagagatgatggtacaattctgttgagagacaccatttttactggtctgtaagcaatttggaacctggataagaaaacaacctcacagaattcacataacttaactccgcaagctcttcc

SEQ ID NO: 33179 - DNA, 2926 bp, Arabidopsis thaliana landsberg
atctagtacaagtatacaacacattgttattgttttgatggagcgtcgaattaattaatacaatgttgaggaaccattttaccgcttacagaaccgtcaacattctcgcaaaccaaagtggaaaaactatctacatgtccattattcgttatgttaatgtcaattagctcaatattcttgcacgaaaatcttttgctacattaaagatttactgcaactttgttctttgacgttccatatatattctttaacttaaggttttggatttgaacgtgagactctccctgaagaaaataaacaaaagttttcttttatgttgttgggtgataaaataaaagagagtgaagcttggtttttgaatagaaatttaaaccttttgctcatgttcacaaggtgggtgaggacaatacttctgatcgatgttgattggttttccaacatcaatcatctgaatattctcgtacaagaagttcgaaacaaggatcttcgaagctgaagattcccaagttttgattcgaataccatcgcttgtaccgttgaaaataacatctcttattgttaagtctttcacgtctttctcgtctttgttcttccctaagcttccgacactaatcccatgtccaggaccacaattgacattagagatatcgaggttagtagttccagagagtatggcgatacaatcgtctccggtaccaatgtttgtgttggagatgtgaatgttactacatgaacccatcttgataccgtcagtgttggggctattgccgggagctgttatagtgacgccggtaatgttaaagtgatggacggagaagaagttgaagtgtcccattttactgttgagtgatgttatgtctttgatatttgagttgtttacgaatgcaaatcccatagtctattaaaaaaaatcaagtttatgataatagtttttagtttctcaaatgaaaaaaaaaagactagaaaatttcatataagtttttgtataaaaataacatgtgcattttgaaatacgttttaaataaataataatcattttttcaaaatgaagcaataagtgaaaaagttgaagaaatgttaccatagctaatttaggacaattgggatttttatggcagtcattgagtggccaagactgtttcccttgcccatcaagtgtaccggaaccagagatagaaagattgttgatgtacctaaagttgatccacgtgtcttgcttaatgtcgttaggatttgcaggcgctaataatgttccatcgataatgaattcaataggatttttgcatggacccacgaactctacaccacctaggtaaaatgttccttttggtacatagattttactacttccacttatccttttgcatgcacggctccatatagttgtgaatgcctaatttcatatccattaagaatgacataggttatttactaaacaaaataaaccagaaaatattagaaaaactatatttatctttcatgtatgtatattggtgatcatatatgttggtgtgtgaataatactcaaagatcttcatcgaaaaactaattggtggtaaaaataaaaataagaaaatattcgtttacatacattggtgttatcagtctttccgtccggtttagaaccatggcgttgaacgttgaaaacttttggtctgatggtagagcgacttgcaacaacaattaacaagagagacaagcacaaagccttcaacacaaaagcaatgcatgtcatcttattcttttgtttaaggtatatatagaaataagaaaacttgttgtttatcaatacttgttctaagagataatgaaagtgttggcctacttaatctgcttatatagagttagcttggcacgatgacctgtcaggaaattttttgattattgttactaattaacaactgaaatagagttgtttttggtaatgattgtgattggttagtatgctatataggtttttgattgtatatggttatttttttgttttctcctttaaaacagaaatttcaatttggtgaatgtgacaatcacattctgtcatataccaagtaattgttttaatttaaattgtataaaaccaaactgttttcctaatgcactgttttctatctgttccaatttaaatggatattaaattttagtatttcagttgttctgttacaactagcgtgttcgtttagtggccgcatgtcattgcggcagcggcagacgcaagaggtgttgttcgtttgatggacgcacgtcgttgcggccaaacgctgcggcaaacgcaagtcgttgcggctaaaaattattaacgccaattaaaatcagcgttaagttgcgattgacgtgaaaatgacaataatacccttaatatttttgagaaattacaaaagtctaaacctaaaaatggttgcggcagacgcagcttggtcatcgacaaattttttcatccacaaatttgttaatcaacaaatttttctcggcgatttgcagcttgatcccgacgagcttcctctgctcatcaccttcctctgttcgtcgagcttcctctgttcatcaagctcctctgttcatcaagctcaaacattgacgaaatcaggtttgttcttgtgagattgataattttcgaaatgggttctcttctcttgattcttctcttctcttttgatcttatgtttatgggtttttgttgaagttctctgcttagctcaaatctaaacggttctgagaatttgatttactttgtgctcttcttttttaattttgatttgaggtctctatagctatttcctccaagttggtttcaaatttgtagtgtttgttgaacttatagggacatatcatgagacgtgttgaagaatgatgatcgatattggcctttttttagagattgtgttagagcacttgatggaactcatgtcccggttcgccctccaagtca

SEQ ID NO: 33180 - DNA, 2997 bp, Arabidopsis thaliana landsberg
  unsure (1)..(2997): unsure at all n locations
ggcatagataatttcaataacctaaacagtagctaaaaccaagctcaaaactactagttttctaatgaagcataccgaatccaagatggaatcaaaatgcctccggacagttatatcagaaacagcctgaaaatgtaaggggttgatctcaataagtagaggcagaaagaaagaaaggtctaactagaaatccacatcaatcttgtattggaatgtttgaaatttcttatagattaccctcatctcggtctgtgtaagataaggctgaccatcaggatcccttgagaggtgaaccttctggcctttagtctctccaacatcaatccattcagcactgaccgcaggatccatccacatttcttctaaatcctctggctcaacacaatcattccagaacgtgaaactgttggccattcttgcattgctatacgacctttccattgaaatctatcagaaacaaacgaaaaacaagaggaaacagaagcttatttagaacacatcgttaacaacatccataagtaacatgtttgccaaatgtaaagaagaaaatcgaaatatcagacctagccgaaggcttaagcgggaaggaagagaatatcgacgagagaagcagaggaagaaggtttctcggcgaatccagagagaagaagatgatgaagattcaaattaatctctgggaaattcaagagatacagagaattcgacggttcgccatttttgacgggagagccaaaaaagcaaattaatcacacagaggggactgtgagacgagccaactgcagaaacagcacgattctttcgaagaaaatgccacctggcatatcggagctggctcagcctcgtcgtcgtttaagttttaacagtacagaagccatttttagagggagagccagctggacttgacacgtgtcaaactaaatcaggcccattttattttcgcgtggcaaaactcaataaacaacaaaagatacgtcaacgttgttcaaatatgaccagaggcccaccaaatcatgggccttgacgccgatccggtacacgcggctttgtagttttcctccgtgaaatctcaacccttagacctcatcgcaaaagtagttacgatgggccgcgacgcatcagaacacagtcatcgtctttgcagaatcgtaagcatattttacatgagaaattgcaattgcaatttgcatttgtctcatttttttactcaaacgaacattttcgtggctccagagctacactcaaaagccattcagcggaaggggttaggatttttggcggcgagatctctctggttctggtagcttagcaatggccttatcttctctcctcagatctgccgccacttccgccgcagctcctcgtgtcgagctttatccatcgtcatcgtacaatcattctcaggtattaaacgttttcgtttctcactcttgcgtttgtgttccatttaatatgttttagctcgcttggagttttggtagatactagatagtaggaggtgatgttttgtctttggttctggtttcaatttctcagtgtaaagtcaacttggtgtttctatagtatcgctatcttctctacttgagtcctcacatgtagttgaaatattgaattcctagtcgtttggcctgagttaactgatgagcatctgaatcgatgataggcagcattaaagtttcagtgagtttattatatgttttgtctcaaatgatcaggtcacgtcaagtcttggattcagtcatagcctgacctcgtctagattttctggtgctgcagtttcaaccgggtaatcttcaactttacagttatgtgacaaactctgtagtacatgtaaatcttttacgatgctttcttttggttctcaacaatgttttaatgttcaaatgtacagaaaatacaatgcgaagagggttcaacccatcaaggccacagctacggaagcacctcctgctgttcatagtaagaagacaaatttaattgatgttcttacttgtgtttgttgctgcattctgacagtaacttcgatttgattgacttgtatagggtcacggagcagtggaaagacaaaggttgggatcaacggtatgtgcttttattgattgatgccatttgtttgaagtcccagatcatcatttactttcttaagaattttcttttaggcccccaactttttccttttcttatggaagctcatttatttttgctgtgagtgctgcaggttttggtcggattggaaggttggtcctccgcattgcaacatcaagggatgatattgaggttgtagcagtgaatgacccattcattgatgccaagtacatggtaaggatgccttacaatctgagtcatgttcttgcttgcttgaacctggtatagtttgagaaaacattgaaaatgcatcatatgttagtcctctttttcactgaacaaatgtctggttttctatccccctattccacaggcttacatgttgaagtatgattctactcatggaaatttcaagggaagcatcaatgtcattgatgattctactttggagatcaatgggaagaaggtcaatgttgtcagcaagaggtatcacctaaaagtggcatgttatcttctatcgctctgagaacaggtgttttcactttagaacttaatcctcttaattcttcctcagagatccatctgagatcccatgggctgatcttggagctgattatgttgttgagtcttnnnnnnnnnnnnnnnnnnttggacaagcttcatcacatttgaaggtatgcactttcatttgaacacgcttgttgatctactagtttcattgatgctaacatttaataccaagccttatattattaataattccaaacattcaactcctaaaatggtctatgattttcttgaccttccattgtctgtgcaaggtggcgctcagaaggtcatcattattgcaccctcagcggacgcgcccatgtttgctgtggaagtaatgaaaagacatacctgcctaacatggat

SEQ ID NO: 33181 - DNA, 892 bp, Arabidopsis thaliana landsberg
ccatatatacttcccctaaacttgcgtctagagaatctacattatttttccatgtgggaaatgaatagtgaaatattggggaaaagacagcaggtacgtacttaacctatggttttcttcaacttttttttaaactcacccttataagaaactagtgtcgctaggttgaattttgtaaacaatgtgaaaatattaaacatggtacacttagaggatttaaattgataatgtatctcttttcttaacggttgtgtctttgattggaaagtatcgaatttaaaagctaacactttgcaaatgagaaagtatagtacgttccgaaaaagttctacaatagtacgtttaatctacagttcaagttcatttataaaagtagtattagagagtgaatttttttttttacatctctaaattgtttatttggtttagccgcttaaacccttactggcgatgttgtctcccactttgacgagcttgcaactccagaacatcccaaatttggtggagcttccttcctcatttcagaatctcattcaactggaggttttggacatcacaaactgtagaaatctggagactctgcccaccggaatcaacctccaatctctcgatagccttagtttcaagggatgctcacggttgaggagctttcctgaaatctcaaccaacatctcaagtctcaatctagatgaaacagggattgaagaagttccttggtggatcgataaattctctaacctcggtttgctaagtatggatcgttgcagcaggctaaaatgtgtatccctacacatttctaaactgaaacgtcttggaaaagttgactttaaagattgtggggcgttgactatagttgatttgtgtggctgtccaagtgggatggagatggaag

SEQ ID NO: 33182 - DNA, 1979 bp, Arabidopsis thaliana landsberg
tgcttgcctgagtaatggtatctgtggctgagtttgttttatgttatagatgagttattgtatgcttactactgatttatggtttatcagatgtttgaagaccaagcaagggattaccctccaagactttacccaaggaggattctaatctggaggctaaagccattaatcacaacataaagttgggagatttccctagaattagagaatcaataggacaagatatatgggatgaactgaaagagacaccgcttggattaattgctaagcttgttgatagtcattttgtatgggctggtaagaccgtacattatctactatgcagacagttgagaatactgaagatttagctttggtgtctcgtggctggtcaacccatccggtttggattgaacgaattttgccatatcacgggtttaaacacagatccactgcctacagaaaagatgagcctgaagcggactacaaagcgtttttcagggaattgggtgtgccaaccagtgaaggtcctaagttagaagaacttaggcaaagcttagtaatgtgcagagcatggcctcctaaaaagcgtagatggtttgggttattgactcttctagccattggactttatggcttgcatcctaactctaggataccatttgagagtgccaaaagagtctttgatgatgaagccatgaagacttatccatggggtcggacagcatttgaagcccttgttgtttctataaagttgctgagacctattggcaagacgtacaccatcagtggtatgacttttgtgttgcaggcttgggcatatgattcaatcatcaccaataccgagcaatttgggaacgtagtcaaagaggatgagattccgttgcttagatggggtggcaaccgtacccgtgcaacaatagaatcgaccatcgcttgagatatcaaaacgcatggtggtgaggtaaggttttggctctgttatgatagttattgactgagttatgttctgttatggctgagttatgttctgttttttatcaaatatttatgttacgactgagttatgctctcttatgactgagttaatgttctgttttttgtcaaatatgttatgtgacgtctgagttatgttttgtgatggctgagttatgttctgttttttgtcaaatatgttttgtaacggctgagttatgttctgtgatggctgagttctgttttattttttgtcaaatgttatgtgacggtagagttatgttctgtgatggctgagttctgttctgtaatggctgagttatgtgtctgtttttgtcaaatatgttatgtgatggctgagttatgttctgtgacgactgagttatagtacgactgagttaaacatactgatgggttttattatctcttgtgttgtagttgcgtgtgcataaaatggttatgaaggatgatgtaagcgagctgtttcatacttggccagatgaagtagaagacctagcactcgatcacttgatcgaaggcatacacggggataagcttgttaaaggttattgggatgtgaagacgagtaagaagaagaagaaactcgtaaaagataaagatgcggatgtgtctgaatctcccgcaaagaagcagaaagtctctcaaagtgagggtgttcattctcgtgagaaagatgcccaaaagaagaagaagaataagaagaaggaagtagccgtcgaatctgatgaggacgaggatgagcaggatgttcggggagaacaacagtcgctcgtggatgtggtgtccaacttgatctctcccttaagctcaaggtttgacaccattgataataccatcaaagaaatgtcctcctgtctgcaagtgattggagttcaagtagaatggaggattgatgcaaagtttgaaagaaggtttgcatctattgagaactaggtcaaacagatgaaagagcatctgaagggcatagctgactcagaattaaactctagcttaattagagatat

SEQ ID NO: 33183 - DNA, 2831 bp, Arabidopsis thaliana landsberg
tcagtgtaacagagaaaaatacagaaacaaagtgtaacctgatgtagaagacaacctgaaaccataacacggaactgttcgcttccactttataaaacctggttatccaattattgcatttagtataagcacaacacaaatgaagtaagacgaacattttaacttaacaccatccagtacaaatcacaataccaaatgcaacattttacataataatttcataagatgtacaaaatttgaaattgaaagcgaaactcaagcatataagaaatggaatctgggacaaaaggaaaagcgaaagtacccatcttcgctgagcacaccgtgaggataattccgaatcgaagatgctaggttgaaatgaaagaccttgttgcgtccagtgaaactgaattcacattgagagtaaactcgtgagctaataaacagtagagtaatgagaataaatctcgggatccaaagtttccccgacatttctccttagctcctagcttatcgatttccaatttcaattttttgaagattctctcttacgatctcatgaccatgtccgaggatctccacggagatggcgagcgagactgagagagaagaagagatgagtgctcggcacggctgcagtcgtcgctgctgttgatttcacatccgccgttggttcaatctaaatttcaattgtacccttaatcttagtaattcttacgaataagccgcataatttgttttttgtatatcatttgcaatttgaagcctgaatgttatcaactatgggccttctcgactctcaaacggcccattttaaaaccgaaccagagtatggttcaatctagtttcttcagatgaaccggatttattgaatttattcagagatttatgtagaaattcttcgtccaattgtttaatcatgtgtttctattcgattttcagaaaatgcaatttcttgtagattatggatgttaatttttattttatctgaaacattatatacatatttatgttttgatttgaaatttcggttaaaaaaaaaaacattatcctatacatcaaataatttgccttattcataaatgaaagtatcatatacaacacatcattattattttgatggaccgtcgaatcaatttatacaatgttgaggaaccattttaccactcacagaatcatcaacattttcgcaaactgcaatggaagaactatcttcaagtccattattttttatgttaatgtcaattagctcaacattcttgcacggaaagcttttgctacattgaagattcattgctacattgttctttgatgttccatatatgttcttactctccctggaaaaaaaaaacacaacttgtctttagtttttgttcttgtgataaaataaaataatatggagcttgtttttgcataggaagttaacctttctttcatgttcacaaggtgggtgaggacaatacttctgatcgatgttgattggtttcccaacgtcgatcatctgaatattctcgtacacgaagtttgaaacaaggatcttcgaagctgatgattcccaagttttgatccgaataccatcgcttgtaccattgaaaatgacgtctcttacgaataagtccttcacgtctttctcatctttgtttttccctaagcttccaacactaatcccatgtccaggaccacaattgatgttagagatattgagtttagtggttccagagagatttacgatacaatcgtctccggtaccgatgtttgtgttggagatttgaatgttactacatgaacccatcttgataccgtcggtgttgggactatcgctgggagctgttatagtgacgccggtaatgttaaagtgatggacaaagaaaaagttgaagtgtcccattttgctgttgagagatgttatgtctttgatatttgagttgttcacgaatgcaaatcctatagtctataaaatatttcaagtttattaaaagacttgttactttaataaaatgtgtatagtaaataatgattgaatagtacttttttattattgtataagtatcatatcacacattttgtaatacgctttaaatgtaaataataatataagtgaaaaaagtttaagcaatgttactatagctagcttaggacagttggggtttttgtggcagacattgagtggccaaaactgttttccttgaccgtctagtgtgccggaaccagagatagaacgattgttgatgtacctaaagttgatccacgtgtcttgcttaatgtcgttaggattagcaggcgctaataatgttgcatcgataatgaattcaatacgatttttgcatggacccacgaactctacaccaccgaggtagaatgttcttttcggtacgtagattttactacttccacttatccttgtgcatgcacgtttccatatacttgtgaatgcctaattttgtatatgttaagaataagataggttaattattaaacaaaaaaatccatagaagttgataaaagatttagttaaatttaattggttaatataataccaatccataaattgttatgtagaaagtcaagaagatttatatatactatcgtatcaaaatgttttttcaacatatattattagactatttaaatgtattttgatattgagttgagcttatttcaatgtatttggaagccaatataaattgggaatcaacaaaactaaataaataactattaacattgattagaaaagttattgtgtacatacattggcattatcagtttttccgtcaggtctaaaaccatagcgtcggacgttgaaaacctttggtctgatagtcggccgacttgcaacagtaatgaacgag

SEQ ID NO: 33184 - DNA, 759 bp, Arabidopsis thaliana landsberg
atttgttatatcataatttcctatctttgttttttttacttgctctccacaatattctgaaataaccttaaccataaacatagattaaatatcaatctttacaagacttttagagactcatcaagcaaatatttatctggtgggctttgcaaacttccgcccaataaggtgttcaaagcccagttacaaaagttttgacccaagccttattcagcaaatattcaggtcaggcctaaactcttccctacccaattttagacaatcgttgtattgtttcatgaaaccaattgaacaaatacatcaattgggacataatgcactatgtttcttgttgggtataagaattttttgagaaccatgccattagttacaactagggatatgattcatgatgccgaaagtttgaccaaactaaattacatacgatttctatatgaagatgcagagtgaatcaatcagctgatggtgatcagatcgttgatggatttcaggacgctgcatcaggtttcatcagacgcttgatgtgcagacatggatgcgagagcaaacgtggcaagctaaggcgaatgatgtgaagagccaaggatggaagttaacttggagaggtgtcaaagacaaggttcatcgagaaaatatagaagatattatatcgaagaataaggaaaggaataggcttggaaacaaggaagattccatatcaagagattctcggagatcctaaggttagggttctggggaattggtataaatattctagag

SEQ ID NO: 33185 - DNA, 1005 bp, Arabidopsis thaliana landsberg
  unsure (1)..(1005): unsure at all n locations
agtcaatgtgtacgagatttttcatatgtatttgttgtgaacttctttagcatgttagacttaggaattaattataactgaaccagaactttgagtctaattatacccctgccgctttatacaactttgaatattgattccagtggctaatttaaataagttaaatgaaacaaaaactgcatgtaagtgaaaaatacacaattgtaagtaaatgttagatatttaatttatttatagctaaatcatgaacaagttcgtataagatctagatatatgtaccatataccttttctatgcccactatatttacttactacacataatatatataccaaccaaaatatttgaatagttaatagctatgatacacgtttaggacaagttaaattaaaaaataggagatcccatttctcgcccttgtaggcttacgctatataattggactgtcccttctcatttcataaccaaagtaaagaacagtttctatatttctctctgtatctctctcactcagtcactttctctctaaaaaatggattctaaaagttttgtgctactactactactcttctgcttcttgttccttcatgatgcttctggtctcactctctctttcactcctctatatgtctataacccatgtaaatggattcttataagtctcaacataacttttttttgttatttactatttcaccagatctcactcaagctcatgctcacgttcaaggactttccaaccgcaaggttatcttcaacttgtactcattaaggcctctcaacattcatgtgttatgttcatgtagatgtccggtccagttcaacaactgtttcattgctttagttgtcacgagaaatatttgtatatattattatggngtgcaaaacatagtaaaatgttgttcaattggcagatgatgatgatgaaaatggaaagtgaatgggttggagcaaatggagaagcagagaagcaaagacgaagggtttaggactacatgaagagtt

SEQ ID NO: 33186 - DNA, 693 bp, Arabidopsis thaliana landsberg
cgtttcggcttgccaataggcttttgagaactttgagggaatgtcctcaaaacgagtttgatcacatagacttcgtactatcaataattcaatacccggtttctgtaaagtaacactagagtttaaagtgaagatatataaacatttttttacagtatcaaagtatcaatttagtaagtaggattaacgcccactttctatgaaaactaattattcattaatagtttttttcttttcgaactaaggaaaaaaatgaaatgttaagctcctatatctttgctaaaaccacaatcattggccgctagagcattaattagaattttcaaacagtattaccctgtttgcaaaataggtttagcccatttaacactcgctacactcctaataaatccaatctagtatacaataagtttaaccagagaccaaattagtttctttataaactgtatagactatacgaattatgttagatttgtctacatcaccatttatgttaatgctatgtactttctcattgtggtggttggtgtaaattaaatatatgtatatacctaatattatcttcttcatggccgatcaagaagtcagtaaccctccttttacatccaggagttagtatcttcgaaccaaacattccatgaacaaattataggttttaaaggcttggtcaaattcaaggtcgagaggtcaaga

SEQ ID NO: 33187 - DNA, 839 bp, Arabidopsis thaliana landsberg
  unsure (1)..(839): unsure at all n locations
ttgctaaatgcgtgtcataagacgggccgttttaataatcgtttttgttgttttaacgcaaacgcatgttgtaacgcttttatatagacaaaaacgctttgaatgacacgcattttagataccgtgctctcagtgatctgggccttatatgggccaaaagttttccgttgttgaaaggagcccatttacattagaagtgtcaatgatggataccaagtgaggttctgataacaaatattgtaaattactctgaagatttttaccgcaaagttggtataactacatttaatttggtgtatttgagaataaggattttctatttcaacaagaatgaaatctcttattaatgacccaatttgaaacatgaatgagagtgactcatgcttcattcattttcttattttattcttcttcttgacctacanaaaaggaaaaaacangagtttaataaacggtatgaaatctgtaaagggggtgtcttgaggagatctagttggggcccgtagtagattagatttgtggccagtggccaacttgcctcacccctcaatcttttgtggcccaatctttgaccagttcgttgtgcacgatatttgggcttattagacccgctcttattactcatctatgctatttaatgtacttctaattcagtttgaatccagttactcgaaatttcaactgaaaaaatatcaagattgcaataaacctgtatctgtatcagatcataatcattttagtcatattaaattagttaaacatattaaagctgagttttattttatttttttaattagctaagtttggtctttcatttttatattagacatgttgcttta

SEQ ID NO: 33188 - DNA, 962 bp, Arabidopsis thaliana landsberg
tagttgtatgacacgtggtaagtgccgacgcagattttattcggtaataaggaagtgccttttagctttctttaggtccaaaaggagagggacaggtagaccacgtgagttgatcaattcatggccttgcttacatatgtaataataaaacctttcttttttgttcatggcaaaatgtttttatttgaatataaaattacttttacgcaccttttatttgatataatatcttcagtaaaatcttaagaattacacaaactagcctgaagaagaagagaattttgttagttccttagtcaactgtcatgccatatagtgaatttggaatgaagaatatttgtagaagattgacataattgggacgattagaagttatagaactcatccctaaggattgaagtatcaactgataaataaaactgaaatgaggtgataaatcttaacagtgatacaaggaagaaaacaaaatctgtatagataaaaaccaaaacaagagttaaaccaaaagatagatgctgattttctcaagtacttgatcgatgcaagaacatcgagctgggatccaagtatctcctctgcaaccttctcggcctatgccctgagcttggtgagttgcttcttacgctcatacaaagcttgtgacctctcctttctcttcacctcaagctcctgtaaaatcattaacccaacagtaaattcccagtttcttccacagattaagtgagataattttctcctgactaaactaagtacaatgatatgatcttaaggttataaattaaaacaatcagcaaaagacccagaacaatgacaaagatgtgtcagtagatgctattcaaatcaactcataggaaacttacaaatacaattttagtaaatgaagcaccttttggtccaataataaggcagacgaaaaggacaaaagggacataccttgatggtatcgtaatggttccagccaa

SEQ ID NO: 33189 - DNA, 863 bp, Arabidopsis thaliana landsberg
gcgacagagagatttagacattgttgggttctacagttgttactacttttttactgctttgttttttacttttttggtttgattctctgtgtgaatatagacatttcatgtcttcacaattcttatcacttctctccctctcttaatcttttttttttcagtagtcttgctttagtaacttcatattaatattacaaaataattttcagtttttacttcccatcttcacatgtctaatataaattgttgacgtcaaatttcatttgtagttttgtttttgttttaaagtgtttttttttttctttctgagtaatagtttaaagtgtcgttctctatgcttttcctgtaagcatctcttagaagttagatgcatatcgaaatttctcctactagtataatgtatcattgttctaaaagccaaaaaagaagatcaatttagagactacattgtggtagcaattagatttaaatcttatgttgacacagatatcatcgttgtttgtctgcatacgtagaggtgtaccttaaaacttttattgacgagagaaagtaaactaccaaagtcttcgtactttgataataatataatataaagataatataaatatagcaataattaaaataatggaatctgatggtaagcttgataatcgtattaaccatgatttgtattggactttaaatctttttttgtaggtcaaaaaggtcgaatttgcacactgttcatatccaatgcgtaagtcttatagtgtagtgttgattttttttgtgttacacaatttagagacatcatgatcttaaatcgtatcagatagagatcctcaaattttgtttgaggtttaccatgtcacagaacgtatgat

SEQ ID NO: 33190 - DNA, 3735 bp, Arabidopsis thaliana landsberg
gcgatgatggtctcgactatatctttgggcacttatcgataaaggataagaaagatcagattgagattacgcggaacagcctcgaattgctctctagcatgttgaatactgaagggaagccgaatcacacagaggtagttgctgcgttttctgttcatttaacttttgacaatttctttaacaaatgtctgagtatggaatatggattgagttatgagtatctcctggtttacattattgtttccttggatatatgtgcttaaagtgaaattgacaggacagtgataagtaataggtttatatatattatggttacaggacgatctaacggttagcctgatggagaaatgcaagcaatcgcagccattgattcaaatgatcatagagagtacaacagacgacgagggagtcctgttagaggctctgcatctgaatgatgagctccaaccagttttatctacttacaacaagcctgatgaaaccgaaaagaaagaagcctccattgcggaacaagaatcatcaggaagcaaagatactggtccgaaaccaacagaacaagaagaacaagagcctgtaaagaaagcgggtgctgatgatgacaaaaaacattcagaagcatcaggatcctccaacaaaaccgtcaaagaagaaaagcaggccgtgaaaatagaactggggctttcgagtgatgaagatgaaaaataagcagtctgtgtttgttgtcttcttccgacatggatatcagaatgttgcgaagaattgttcttgatggtttacttttaaattataacaatgtacttccattataagtgtggaacctttttagcttcgtttctcactttctgttttaaagtggtttcttagacattgttaaaccgtaggtgaatcttcacccgaaacatttatacgaggtgttttggtttgcacttagcctattgcttatgtgttgagaggtgagtatctacttctcctctggattatataaatggcttgataaaattcacctcactctccgataaactcgctcgaaatgataaaacgaagtctaacctttaatgtgtttaatgtgttagtcttctaaattcaaataataatcggagttttggtctcttggacgatgcttcacagtgatattcaaaagtttacccttatcacccaccaactagagaagccaaattaggtcttttaccaactgtagggtaaagaactgtcttcatgtaatcattataaccaccaccatcttgttatgctttgtttcttcttcaaattccagctttcaatatacaacccggtttacgttctggtttacactttagacgtttcaaatttacaaaattgggccgattgacagatattggacctggcccatcaatctaaaaatgcgctattttgaatcaaagacctatttaaatcttccgacgacgactccgttcacatagcagaaacagtggcgacaaaccctatcacggagccaacccgcattttcctctagctttcgcaccgcctctcgctctctctccccaccggttcgtctctgacattttgtgcttgatttggccgttacaaaattctgattgctagttcatgagattcctttttgacaggtgacataaagatggatggtagcttatatgatgagtttggtaactatattggacctgatattgattctgacatagatagtgctgatgaagtagaagatgaaaatctccaagataagcatcttgaagaaaatggattacacgctcgaggtgaagagaattcaatcccatgactaagttctttggagtctcttatgcaacggcctgttctagtgcctccacatggtagctatccggttcctaatcaagaacatcaaatgcgagaaatagtagaataacatcatttgatgtttttgtctaaggttggagaaggctcgatgcaactttacaagtcgagaagaggccctttttatttgatttggttgaatacgggcccaagcctaataaaaaatttcatcgtttgatattgatacacttttttttggtcgaatacactcttttatttcaaccaaaacaaaatcactggtttgttagtaatcttatgatatatatatgtgtctagttgtaacctatatagctgctagatgagtcgttttccaatctataattggttacaaaatttgggaaccatttgccagaaaagaaaaaacattcaatcaaaatacagcatagatttataaacatggaaaaggatagggagggagacaaatacaaagtggtatcaagacataaacataagttgaccatactgtttgttaacttggtatccaatgcaggtgggattttttgttttcatttttttttggtcgagattgcttggatatgacctacccatttgtcatataacaccaacttgtatctatgtacaacatcctttattttggatttaagtctcttccatgatattaagcctttcaattcttcatttcttgtgtaaccgtgaaattctccaaccgaaacataaacttattatttcttatgcatatagaaaaccacattttactactcatcagtccaatatatcagtggtactcatatatttattgtacaatctcattcagacatatcagccggaatgaaagttcaaccatctaataggctaacacactagcattgcttcaaatttcttaaacacgctaacattgtaacaacataataataatgacacaaaaatatacatttgaggttttgagagagtgctaaaatgggacctacgttttcatttcttggaacatgaatagtgggaattaagaaaaacaaaaaaaatcgaaaaagagaaagatcacgatggttgtcacaaaatgttgttgatgatgtagggaattggtagggtcttataacctatacttttcacatgcattcttaaaccctatttctactgcatctccatgtgcctcccctcacgtctctaccttctctctctatctgtttttttttttcaatcaataacaaaagaaatattacatcattttccctttcatcatatctttaaccagctaaaacaagtttgaagcgaattttgcatatatacagtcccaacttcgtcaattatattgaagttcggtatcctttttttttttttttttttttttttttttttttttttgtatgtgtatgtgtgtgtgtgtgaaatatcgcgattaatagtttaagaaaattcttcatcagaataatagattataatattttcaaagatttacttgttttttgattattttgattttattaaaatcatattgttgagacaatggtattatggtcatgaagaacctcaagtgttttatgtatcaattggcaaatttcagcacaagtgaatttttttcttgattattttctactgtctatacatataaaatagagaatataatataacaactttgagctataattagaatctgttggaaaaaaatgaaaaaatataacaaatatattctatcttgatttttcaaagtatagaatctaaaaaaagctatatgatattaattatccaattatatgattgcatttatgagttgatatgatatcttttggttgtttcataaaacagaatcaagaataagatgatcaataccgaaatttatggcttcatcatcaaatattatttcacatgtgattctccaatgtatcattattaaagagttgttatacgaggacccattttttttgcagcaatcaaaacaattgagctttttat

SEQ ID NO: 33191 - DNA, 5517 bp, Arabidopsis thaliana landsberg
  unsure (1)..(5517): unsure at all n locations
gagatattggagcatccttttcacatcggacaagggggttaagcttctcacaccgagaggcacctgatctcaccaatccaaaatgttcatttatgcggtaaatacaccaaacgtcttgtttatcattgctttgtttgtaaactcaatctggatatcgattgcgcaattgatgcttcgtccaaagctcatcttaatatgccgtggcaccaccatcctcttctcatgggttcttttagtttttctatgaggtgcgacttttgttatgagggtggcaaacatggctatttctgcccttgttgtgtgaatgcttaatgtattgaatattattagagtaggaatgtacatatatatactaaggcacagccctatgattagggattaactaattacaattatgtcctttaagacttcatgtgtaatatactctatacgctccctcaagatggagggagttgacgaactccaatcttggaacgggctgaaaggaaatgtgcacgagagagagacttggtgagtgcatcagcgagttgatcatttgtggaaacgtgtgagattcggagagctcgtgattgaatcatgccgcgaacaaagtgataatccagagctatgtgtttcatgcgtgagtgaaagactggattggcacataggtaggtgactccaatgttgtcacaaaaaatggttggaccgtgtggtaatcgaatgtgtaattctgtgaggagagagcaaagccatcggatttcagaggcagcgttggccaccgctcgatactccgactccgtagatgaacgcgagacaccacgctgcttcttagaggaccaggagatggggtttctccctaaatagatgacatacgcattggccgagacatagtcatcagagtcaccggcccaatctgcatcggagaaagcatgaagatgtattggagacgatgaattgaggaagataccatgtgtggtggttcccgcaaggtagcgtagaactcgttttgctgcttgccaatgatcagatgtaggctggtgcataaattgagatagacggttgaccgcgaaggcaatgtctggacgtgtgaaagctaaatattgcaagctgcctacaacagatcgatattcagacgcatcgttaagcttagtacctccatgaagagtcagctttggggaggtcggaagaggagtcgcaaccggtttagcgtcaagcatgttgtgttttgcaagaagatcggttatatacttccgttgcatcaagtgaaggccagtgttcgttcttgtagcttctatgccaaggaaataatgaagatcggtgggatctttaatcgagaaccgctccgcaagagatgacagaaccgcagaaactgatttatggtcgctccctgtgacaataatgtcatcaacatatacaagcaagtagagtaatgtagtaccatgcgagtagatgaacaatgatgtgtcagctagagaattgacgaaaccaatgttcaaaagatgttgcttcagctccatataccatgcacgtggcgcttgtttgagtccgtagattgctttacgaagacgacacacatgcgaaggacgatctttgtctacaaagcccggcggttgagccatgtacacttcttcggttagagtaccttggagaaaggcgttgtttacatctagctgctttaggggccaatttttcttgaccgcaacatcaagaacaactcggattgttgtcgctttaataaccggactaaacgtctccgcgtaatccacaccatactgctgattgaaacccttagcaactaatcgcgctttatacttgtcaatgagtccattgggtagatacttgagtttaaaaacccatcgacatccaacaaggtgttgcgttggatttggaggaactaaatcccaagtgtggttgcgttgttgtgcatcaaattcatcggacattgcaaaacgccatttcttatcctttagagcttgagtcacagtatttggttcggagagatgtggtttggtgagagcaacggtgagactggttttggtttttggttttgtgatgttgtttttggatcgtgttttcatttggtgattactttttggtggttgagatcgtgaattagaggtggcagcaatggtagtttgatttggtggcaaggcagtggtagttgatttatcaaccggtcgttgttctatcgaagaagatgagttggtttcagggtttggattgggcagtgggcctatgaatggtgagtttgggttggactgggcctcaggttcaggcccattttcaggtggagcagtgggctcagaattagaaacagagggagaaggagatagagttgaatcgcgtacctgagagtgatgtgaccgcgtcggactaccggtttgacgaggagacaccggcgaatcgttctgttgctgcggaggagacggcgtttccggcgaactcgcgggtggtgattgcaggcgaagaaccgaacacggaaacccggaatttgcaggagaagacgaggaggatgactcaggtggagtgacaagagaagactggctctgttcacgggttgatgcagcaaaaggatatgttgattcatcaaacatgacatgcctagaggtataaagccggttgttgtcaacatcaagacaaagatacgccgtttgtgtgagagagtagccgagaaacacacatctcttagaccgttcttcaagtttgttacgcgtatagggtcttagccatggaaagcagagacaaccaaacacacgaagacgctgatagtttggtgacgaaccaaacaatttttgaaacggagactgaagagagaggaccggtgtgggcattctgttgattaagtaaaccgcagtggcaaacgcataggtccagtattctcttggaactgaggcttgagtaagtagtgtaagtcccgtctcgacaatgtggcggtgtttacgttcggagaggccattgtgttcgggcgtatgcggaggagacgttagatgagagattccattggacaccaagaaatctcgaagtgcgatgaactctccgccattgtccgaatagagtgtacgtatcttggcttgaaaacggttctccacaagagctttaaaggcaatgaacgttgctttgacttgagatttttgctgcagaggataaagccaagtatatcgagtgtagtgatcaacaagcactagataatacttatagttatcatgagagattataggagaagtccagacatcagtgaaaatgtattcaagtggtgaagaagagtgtattgaagaggttgcaaaagggagtttatgacttttattaataaggcaatcagaacaagaagttttatttgaagaagcaacagaaactggaagagaaaatttagatagtaaagtgtttaaaatggaggcagatggatggcctaaacgtgaatgccatgaagagagagtggtctttggactaggacttgtgaacagagccgtcgctggaggattagtcactggccactcatagaggtcatctttagttctcccttggagcaatagggtccccgtgttgaggtccttcacctgaaacgaagcaggaaagaattccaccgagacttgattagtattacataggcgatatactgaaattaagtttttccgtatatcgggtacatataacactttatgtaaagttaagtcacgattttgagaaggcaagaaggtggaaccagtttgcttaattgtgagacctgtaccatcggcaatcataacgtcttcaccaccattgtagggctgatgaagagagagtgcgttcaagtcggaggtgatatggtgtgttgcgccactgtcaagaagccatggattagctgcataaggagacccgatagctaggttggctctgggctgccaaggagtgaatggcgagtgggctgaggagcttgttggaagttgcattgcttgaagttgaggacaccggcgtgcactatggccttgaacactgcaaatctgacatttgcctaagtaaggcttgaaagtacgttgcccggacttgttgtatgttgacggctgcgagttggtgttgttgttgttgttgtgtgtgttgccttggtagcggttcttgtgctggttttgattgcggttgttgttgaagttacgttgctgaactgcattggctgacataggaaaagaggatgaaggaggtacctcagcagagagtaacttggattcatgattaatgagtcgttcatgaatctcggtgatagtcggtgtgttatcctttccttcaatttgatcaacaacagttttgtattcttcagggagacccttgaggatgtgtnnnnnnnnnnnnnnnnnnnnnnnnnnnnnnnnnnnnnnnnnnnnnnnatccaagcgagtggtgtgactttgcacatattcgtcaatggttttggttcccttcgtgagacgctggatttgttgccggagctgcttgatgtggccgtaacttggcttggcataggtgttgttgagagtggaccagatctgagacgagttagtggctcgtgacaccaaagattgcacggcaggagagatggctccgatcaaagcactgaagatcaacttgtcttgtcgtttcctgagagtaaacgccggattggcagagacaacactgttgatggtggttgtttctggtgggatgacaacagagttatcaagataacctgctagatcataaccatcaagcaaggcatggatctgaatactccacatcaaatagttggtcgatgtgagcttagtgacattcgacgtattgacgttaaagagtgtctgaggggtgagaacgatagcttcgtctctagtggcggggaggccgttgacttgagacatgattgacggctaggttttgaaaagaagaaaatgaaaagaaaagtaggttttaggatatcgaagctctgataccaagtaaatgctgaatgtattgaatattattagagtaggaatgtacatatatatactaaggcacagccctatgattagggattaactaattacaattatgtcctttaagacttcatgtgtaatatactctatacgctccctcaagatggagggagttgacgaactccaatcttggaacgggctgaaaggaaatgtgcacgagagagagacttggtgagtgcatcagcgagttgatcatttgtggaaacgtgtgagattcgaagagctcgtgattgaatcatgccgcgaacaaagtgataatccagagctatgtgtttcatgcatgagtgaaagactggattggcacataagtaggtggctccaatgttgtcacaaaaaatggttggaccgtgtggtaatcgaatgtgtaattctgtgaggagagagcaaagccatcggatttcagaggcagcgttggccaccgctcgatactccgactccgtagatgaacgcgagacaccacgctgcttcttagaggaccaggagatggggtttctccctaaatagatgacatacgcattggccgagacatagtcatcagagtcaccggccccctctgccccggagaaagcatgaagatgtattgaag

SEQ ID NO: 33192 - DNA, 1017 bp, Arabidopsis thaliana landsberg
accatttcgtttataattgttttcaaaaatgttaatgcgttaaaaaaaaatttttttgataaagaaatgcgttcattattgataaatgttttcaataataatatgaaacacagggctatacattcactaaaatgtggtttgtttcataaaattatttattataaactttgatttcaaagttttcgtagacatttcatcaaaaatcatagattgttacgaaaagaataatgaagatggttattacaaattgtctttttcagcaacgttcacatagtactctcacctaacagcatacaacttgataatcttttcattttttgtcatgtgaccaaaattttcatacgtttaattaacggcaaagctctcggctgtttgttttttctctttttttaaatttctcaatacatttttctagatccatgttaaccttttaatatttttatatatcttccccatctgccatttgatcttgtagatttttaagaaaatttagaatatgtttccgaattatcgacctctggtaatttcttaaatgttttcattacatactgagtactcttattttgttctacattataaatcatatttttcgagcctacattatgattaaataaagacactataatacaaaacattaaactataaacttcactttgtaactctaaatttgcataccttttgtaaacgggataaaaaaaattgttgcagaccaaaatttcatggatggcggagaaaaaagctagtgtaaataaatttatattaatgtctttaaatatctgttttccaaaaggaaaaacataatcttcataaaaatttctatctttttaatggataatgtacggagattttacgagtatccactaaatccattctatagtctgaagaaatgttattttagtagtttaacatttcacgtccatttcctttgggttatgagctactcatctacataattcgccaatatgttattcgtgacgccaaagggatgatggaggactacagatttagaatgagaag

SEQ ID NO: 33193 - DNA, 3822 bp, Arabidopsis thaliana landsberg
aaaaaccattagtattcatctaatgaccgttttgtattctctttttcacacatcattgttaatgctacattaaaagatctaattgtaggttatgttaaagcgacttgatttgatattctagaaagagtgtcaaggcttaaatgttaaacccaagtaacaagaaagtatcttcctttatctattacaaatgtacaataaaggacagaggcatgatgatcaggatccctaaaccgtacaacatgccaaacagatactactcatagagaatcaaaacataatggtgcatgaattttacacaacagaattggaaaatttctaactaactttctaagttacttcgaaactagctcagtccgatttgatactgccaagactctcagacactaatctcatcctcggacgaacctctggatccatttccgtgcagttcaaggcaacatgaatggctgcaataacatgttattcgcaaaatcctgtttcagaagctttgggtctaagatctcagccaaagatctctcttccttgtgccacttcctcaaaacattcacgagttcttcttctccttcgttttcagaggaaccataaggtaatcgaccagtcaacagctccaatagaatcacaccaaaagaataaacatcgcatttgtgagataatttgcaatcagaagaagctcgggcttcgggtgcaaggtaagcagctgcaggagctgagactgagagtcttgtggcaaatccttggtctatactttgcgtcatggatgatagtgaatggtcagtgactttgggatagccggaaaccagtcgtgtgagaccaaatcctgagacgtgaggatgcagctcattatctaacaggattttgcttgattttaggttgccgtgaacatactttctcgaactgtattcatgtatatacatcaaaccccgagcagtcccttgagctatacataacctctcagcccaagagagtgtaggccgagtattcgaaggtccacctacagaaaaaaattcaaatgccgtctcagaaaccagtgatacatgatactcaaagcacagcatatctcaggaaaatggaaaaatctcaacgagtactaacttcccaaggcagatcaagcagaggttaactatgaaaaacacacatctatcggatcataaactaatctctgtctaagaaccaaaaagaaatattctttctgtcacattaaacactctctagactaccattaactcattctcgacttaagttttcccatgaaaataacaggaccacatactataatgctacacagaagcaaatctgtatgcttgtcatcgagttctactgtttcaagtttcaacacatgtaaacacagtaaagctttgaacaataaaacaatgagaagaagcgaacatgttagtcaatacaacacaatcagacaaagacaaaaaaaaagctctccactttatagtcagagcaagtacacataaaaaccttataactagtggtagatttatgcagaattagcaccaaaataggaaaaagattagtaaattaccatgtaaggcagagtacaagctgccattgcgtatgaaatcagtgatcaagagcttctcgtcctcagcatagtagtaagctcttagccgtacgatatttggatgattgatcctacttatagcctccacttcattttcgaaatccttccgccgccacgtggcatctccgtcgcttagccttctcacagcaacgacggtggatgacgtaaacgtagccgccactgtacctgatcccattccggccactactctgtacacaatcccacttctgctctttccgacgacgtaagccgatgctctcagcaaatcctcgagctcgagctcgaatccttcgtccatcaccacgaatttaccttccttctcctcctcatccgccgcatcatccaatggcgccgccgtgttgtttttttccggtgtactcacagtggagcttaattttcttcgaatcagccatacggagatagaaactgctccgattacgattgagactccggagatgagagaaaccgttacggatccggtgatcggtttattctttcttccgtccttgtcgatgaagctagggtttggtttcttcgggaggatttgcgagccttctggttttggagcgacgagcttagggttcgtaccttcatctttacacagcttctgtaatgggaaaccacagagctcagagtttccggcgaacgctgttggtccttggtttaagagagagccaatctgaggtatttttccggtgagattattgtggccgagatctaagctgacaaagactggaaaacggccatacgacggcggaatttcgccggagaaactgttgtaagagagattgagtgtgccgactaagcttccgagttgagtgagtgactgagggagtgaaccgttgagtagattggaggagaaatcaatgtgagtgagattcttgagggattggatttgggccggaattgggccggagattgagttgtgagagagatcaatgtaacggagattaacggcgttgaagagacgagtcggcactggttttgagaaattgttacgagcaaggtcgagttttatgagtgagtcgagtagaccgagtttagagggtatgtaacctgagagtcttcttccggagagaacgagtgaggtgactcggccatgtgtgcagatgattccaggccagtgacatggagtcgggtcggactcagaccaggaagtcattacacgtgtcgggtctcgtaagattgcggatttgagagcaagtagagacaacccatctggattcagtgaggaggagaagttgatgaagaagaagaagtaggaagaaacaagaagtgtaagaagtcgaagaaactgcatatttgtctagagaatcagaatcttgcaaaagactttgtttaatatctacagattatgtttcaatgtaaagtgatgcaacgaggagttgcggagagagagagacgagggaagaagaagacgaaagagaggaattagggtgatggggttccaaagtagcaacgtggttgtaatgtagacataggaaagttttttgaattcttgtgggagcttaaaaagtgttggaagatgtatttggtaatggatataaatttgaaatactaataaaataatgtgttgttgctctgtgacagtttagttattttgattgataaatccaaagtttttagttattgactgatgcaggtgtgttgctctgtgctttttaattgtttgtttaaaaaattctaaattttgttggtgttaagatggtgatgtagatgattattggttttggtttttgttggaaaatgagcacgagttaggctttttattacttggaaaccgagtctgacgacaagattttgaatttgcatttgtagtaggagacatgaacctaaacaacactaattactaaacttagctggtgaacattacttggcttgatcagcaaacagaacatctttgaagtattgtttttagtttttttcatttttcagttaaaaaaaaaaatcatttcatttcaagcacagtggcctgaccaacaacactacttatatcacactgaccatatcttttgagtgcccacaaatattatgaactttgtagtttgtattatcacgattttgacaatgtgtggcacacaagctatgattttgaaacgaccaaattatttgaaattttattcaaattaaagggtatatggtacttgaaaggtaacattttataagacatactatagattgtggtggctgtgtcagaaacataaaaaaaaaaaaaatatatcaccacctgacaaaaagtcaccaattacaaa

SEQ ID NO: 33194 - DNA, 910 bp, Arabidopsis thaliana landsberg
  unsure (1)..(910): unsure at all n locations
ttttttgtataaacaaaaatagttgaaatgtccatctatttttaacgagaattcattgctttaggggaaagttttttacaaaaaaaaaacacaaaacataacaataaaacacaaagaagaaagaaagaacaaacactaacataatcttcattcttgtctttccttaaatccaccaactttccatttattatttttatggaaagacacaaaaaataatcatggcttgtaattttacaaccaaaccttgaacttcttaaagaaaggaaatctcatcttcaccaatttcttcttcttcttcttctccttaggtttcttcaccttgcataaatgctgttgaagcagaagataattctctgattcctccatctcaccttcataagctttcccatccggtattgttttgccaatgctactgtctgagctcattctttttagcaagtttgtcatcantaccgaaatctctttaaactccggacgcgcatccgggtcttgtgcccaacatgattcaacgattgggacaaacacgtcgggagtcttcgtaagtattggtctccgaccctgtaataaaaagatatccaacattttaaaaccttattccttttaagttaaaaaggatgatgtgtttttatcaaaaaaaagttgatgtttgactttacttggctaacaagatagggaacaaagaggctattaggcacgtcagggaatggttcttcgttcgtaaccagctgccataatactatggcaaagctgtaaatatcagccttatggtcatattccttcttctccccaactctcagcggctcaaggctatacacctgtggttacgaaacagaaaatatttagtttatatgtttcgaaatagaaaactaagctcaaaatgatcactaccttaggagccatccatttagag

SEQ ID NO: 33195 - DNA, 1845 bp, Arabidopsis thaliana landsberg
taaaacttttaattacaatgctctggaaaactaaaaagctttagaaaatagagttcaaactctggaattttcaaccagggagtgcagtcgtcggggaaaaaaatctgtaatcaaattcataagattttgttttgggatcatgtgttatcaattgatcccccgtatttagtgtttacaaaacaacaacttgtctttgtcaaaaactcctagtggtctgagtgcgaatccattactcccaaacaaagaagaagttatattgagatctatggaatatatttccttccatgtcttgtgatctgaatccaacgaccatatcacttggttgggccacattttttctgatacgcacaaacgatcatcaaggttgcacatgatcaactctctactagagtagtcgtggtggtggagaaagggagctttagacacgacttggaaagtttcggcatgaagatcgaaagacaaaacattggtggtttcaccctcagtgagccaatgaagtgacccatctacatatacaggatcttggtaaggaagtatccggtagggggacgccgggacaacaaacctccaagccttggtggtaaaatcaaaaacttcacaaaaagtactagtgttgttgttgccttgacaaatcatactaatgttgtttttgtcttcgtcgtcgtagtcctcgtcgtcatcgttaaggccgcctaattcagcagaattatataaccaaactggcttgtatgtgccattgattttgtctttaccgaatccaggagtagggcatgcgactttaaagcactcgtgtctctcacccttgtcggcagcgactagttgatagttgcatttagggaaagttcgatgccatcgagtggtgggattgacgacaatactcggcagttcatagaaactgaagaggcatatcagaccatcacagctagtattgcaaacgaagtacaacttgtcctcccaaggagtagggatctgaacagaagctgcagatgactccaccaaaaacgttctcagagcttcaaagctgcttatgcttggatcttgttgacgagcacaaggatcatataaggacaccaaaagcacatgtggatctcctgatgattggctaagatggtggatcaactgtctttcttggaaactaggggattggattgtagacatccattgcttcgatacagacttgaacttgaggagggttttcacatcaagcctcaccattatatgatactctatcacatcgtgtggtaacaattcttccatacttgtctctgaatttctcaatgttatagattgaagacaagagcctccgtatgctttatttataaaccaaacctatcaccctagtcagagtccgagaaaaataaaagggtagatcagtaaatctagaaactgttttctttttttttttgattttatgaatttgagaaatcttaaaattttaaacggatttcatcaaatcagtatgataaaagtaaaattttcaaaaggaaaaagaaaaataaatctaattctactaaacattcgattcaaacttatcttgatctaattatattattcatttaatttgaacttgttcctatcttatttaattactcattcgatttaaacttatcttcgatctaatctattattcattccatctgaatttgttcccatctaattctattacaattatggcttctaacatcgtacgcttaaatttctgtttttcatatttgtattctctttccctattttttcttattttataacaattgcaagtgcaattaataccactagtaattatttatgtttattttaatctcatttgacgttccaacattaaatagtactaccatccttttcggt

SEQ ID NO: 33196 - DNA, 5613 bp, Arabidopsis thaliana landsberg
agagataaagatcgacaaagaggcaagcacctagcggttctgcatgtagtcgaagctcaagggttgttgaacgaactgtgcctggagaaacaagttacaactgctttcagacaatcattggaaacaatgcaccaaaccaactcaattgcttttttcatttgtttgtggaagagttttaatagaatccatttctcttaacgagttctcagctatgcataagtatatattaaacatgtgggtgaaaaaatttcaatatatggtccttatatttggacaaaagtttttattccatgatcgctcaaagagagtaaaaaggatcaatgttatttacctgaagagagccattcctgaactgctcatacggatgagcatacatcatagctgcattaggccaatgcatatacattgcatccattgtggtgccatagggactcatgattgagctaggatgtggtccgaagccaagaggagcaggaggacttggaatttggttatatccagtgaatcccatttcgtagtatggtgtcggtatttgctgaatgttgaagggtggtagattgaagttctgattcaccggaaggctcctaatgtacctgcattgacacacacaattatcatcaaccatcatgtatgaaactttttcgctagtatagtaatggtttagccagtaaactaacagctgagttactcacctttggtgtctgcggtcataatcagggtcaaaccgatctttctctctgtctctaaatattgcaacacgagatgttggaccactttccctgatgcttaagttcttcttgacctcaacgtaagcattcttagatacttgcttgtcatctctgctaagacttgcattcctctcatacacctgagtttcagatgaagagtcatcacaactaagaccagtaagaccactgaatatgcgttctcgagccttgtcatactcttctttcctctcttcaacacttctaagaggaccacgattcttttccagatcaccagcgccatatccagatcctttagaaggtcgagtcttgatggaaactttcctgctctcaaacttaccattttctgattgtttagccaccgggatttcagacaaccgaacagcaggaaatttgctctctgtagttttcgtcacaaggattctgttttcatttccatcagcaccactctcttggacagctgtagctagcccataatggttagcaacacgatgggctgcaagacgaagatacgaagtaggaaaatgctggaactcaaactgctgctgttcagggttctgcaacaacctttgaacatcaagttccatccgcaaaactaacacaacaagagaaacaaaacaaaaggcttagttacagtagcaagaaacacaaaagccaggacacaccacaggcagttccacacaaccacacaaaagctaagctactaccagataaaggagatatatgtaccacaagcagttccacataaaccacacaaaaggtaagcaactataaatgttgaacaccatggacagaataaaagtttacatctttgataacattaaccatggataatacagtgcagagaagagagctaaattcagcatgggcatcaacataatcgcttatttaagaagagagccagttcctgagaaacccaaaatccccaaattgcggttaaattaacctaactatacccagctaaattcagataagaccaccaatcaaaatttcaaatttgttaatccagatgacaaaaatcagctctaatttcaggaaataaggttaaacgacacgaatcagagaacaaaaaaaagaagagaaacggagcatactcgtgagacgatggcgagagttgtgcaacgcctcaacgagaaaaggatccacattaaatccataatctccgataaccgaaccaccggttaccacggcagtttccggcaacactacgtccatgagaaaaaggaatggatgtttcagagagttctggatagcttcctcgccgcgtctcttgcttaaaacccttgggttccttaatctctccgcagcaaagagaagaagacaaaatcaagaggaagaggagaatagaaatcgaagcatattgagagcggcgagagagaagaggaatgcaaaaccaaatcttatctttctctctcgggaaggcaaagccaacgaacgagagggaaagcaaccgttatactttttccatcgttatatgttagttttgtcctcatcaagacaataaattatcatacctttctcattttgtcaagataggttttttcttaggtttgaacccaccataacatgtgtaggtatactatatagagattatattataaacaagcatttcatgaactgttttttcaccaacagatgctctccccaatgtccgtgctgattgtcttggtaagaaggcaagagcacgaggtcctattttttcccatgtaagcttttctactccggactggttttctctcgaagaaaaccgcccgtttttagcttaaatggatgaccttattttgccgtaaaaaaaaaaaaaaaaaaaaagaactatatccctacatttacattctcttgggttggtcataatgattggtgtgattaatcatgaaaattacgacaatgattatagcttttacattttgaaaatttatatggggatcgtaataattcatagaaaacatgggaaaaagtgtcttagatctcagttttcttctattctcataatgtgaaataatggtgtcttgcaaatattgttatgtatcattatggttcataattggagaatccatttgaaacgaaatttctcatagccacacacttatcaataactggttcagttcaattcacatgatttctagtttaaaactaacaaatatgaataagttatttgataattttatccttactagctaatagtatattttcgtgtgtgtttatgctagagaataaatgcgtacagaaatttgaacttggtgctgaatagtgaatacatatgtagagtgaaggaatcccaataaagagactgtgaaatattgtctgtaagcatagctgtgcctaagattagtgagatcatcggcggtgtttagaaaaaatctcaactcatataataaccatcatcatcatcctcccaaaacagtaaagaaaaagagctaaaaaccaaaatatcaatcttagttctttctttatcacagtgacacagtgggtgcaatccacgatggttgttcctataaaatggtgtaaaacctttggttcaacccaaatcagtttgttttttccgatggaatttttggcacggttttggctcggttgaaattgggtttactcgaattacatgttagaccaacaacaaacgacacagtttttagaaacaaaagtacttgaaactttcaaacgacgagtttaacattgcacaaattcaaactagactactcttactcctgcccaaagccatcacggttctcttgtggccacccaaaactttgaccgtctctaccccggttaacctgctgggtcgtgtgaggcggtgccattccgggattccatgatggaggaggatacgatccttggaaattcagattcgtcattggtgaaggcgggggatacccgagcaatgaactttgttctgatccgccgctctctgttcttgtcatctcgtactgagcaccgttaaagaattgttgagatgatccactctctgttgttggatacgaaggaaaaccaaactgctgtggtaaacccgggttttgattcattggaacgggcaagctgggcggttgcataagattcataggctgggggtagtctgggaaccggattcctggtttaggactagcggtttcgaatccaggagggcgagagttatcgctatctggagggtaattctggacttgactaaatccagactgtgactttgcaaatgacgccgacctgtttagttcacgggattgttgcagctgggatcttaaaggagctcgcaaggtggattctgaagctgaagactgctgcattgtgctctgaacatctgactggttaccatcttctttctctgcatcggcttgtaataggcttccatggaggtcatggacatgggcttcaaagtcaagtttcttcaggaaagacctaagacaatgaggagctgcacagatgaagatcccttccatcatcttgattgtttgaatcttctgaatccgctcatcacatctgtgcagtaatcacacacgcaagaaacaacaaaatttcagtatgataatcgctacgcctagtaaatcttaaaatgtctctgtagattactaaacaatctagaatatctctatcaaagcttctaatgaaattcgaagcctagttcaaactatgataatcctgcgtctctgtagattaccaaacaatctaaagtatctctatcaaagcttctaatgaaattcgatgagagttaaagatggttacagatagcagatggaatcactgcgagcacattcaaggcaaaaggcatgatcacaaggaatctgcaaaaccaaaacaaaacaaaaaaagtttcaatcacatatagaagaagagcccccttaaaaactctttaaggcaaatcaatatagccataaaccaatgaaggaagcgaagtttaccagacgaccatatattgcaatcggaaaatcgcaacgaacgcagaagtgaactctctcgcctagctgacggcgagaacgacgaccgacgggcttgattacggtggtgggagtcacggaaccgattcctttcgcaacaggaagatcggcgaggacgagatggtcgggacaggctacagtaaccgtctccgtcggagaaggcctcgcaccatttccagtttccgtcggggaatccctccgaagacgaatttgaagcattgtcgctgtaaaagttacatgaacggaaccctaagaaatacaaatcaaaagaaagaacaggaatcaaaagcttctctagttaccaagttaaatcggagattgagatttcagatctctctctctacttcagttcttctcaagaatcacgccggagccgaaaacggcgaagcaaattttgtttttgtgggcaacggaggagaatagaagccttcaagtcttctggctgagaaagagggtttctattaatttacttcaagtcttatttttttctgatcaacactttttttttttttttttgttaaaatttctgatcaacacttgatgtcttcaacattcccaattactatataccaactggatcttattataaacttttgtatatggatgcattttttttggtaatggttgtatatttcagtcttatcgtactaggaaattccagattttaggcttgttgcctttataaactcaaaaagatgtgcaagtttttgcctgcatttagaaaaccctattaagatgaatttccataaaacaataatttgattagtcttacaaagaaagataaggcttggaagaaaacatgaggaatgtaacgtagattttgcagaattctaaaaacataatcaacaatcgacttagagttcattctcactagctttctatttcttcaagtctcttccttcactttctttgaaaccctgtcccataaatcagtctcctccttcagtttcttaacaatcaaatatcat

SEQ ID NO: 33197 - DNA, 434 bp, Arabidopsis thaliana landsberg
tgcccgtgaatggggtcacggtctattattccctaacggtcccccgacacaccatcgaaaccaaaatatttttaatctctaataattaatcgaccaacctttgattccataagctcttacttccaagattaatattagtagtctcaaaataatatactttggttttctctttgtgtagatttttttttttttttttgtgcagcccttttcttaattactaggacatgtcttgtcgtttgtgttacgccgctatgatatttatatacgaaaaaaaagatggcaaaagtttagacatcattaatcacacagtttatgattaatcatcaaatgtatatatgatttttttttgcaatcttccactcggcttattgaatgaaagactcgtaataccctatgagaatttcgatctagcgatgttttattgacatatctta

SEQ ID NO: 33198 - DNA, 3176 bp, Arabidopsis thaliana landsberg
ttggtgtttttataatgaaaatataataaaataacagattaattacaaccaatcttgtcaaaagggaagacaataaataaataccaaaaaatgatggaatccactcttcttcaagctacaatagatatgaatgttggcactgtttcaaggcacccaaaagtaaaagttaaaattcagccagagaaaatggttaaaagaaaagtaagcatacacatattagacttaaacaaatagaaaaaagggaaacaaatgtaacatagaagcatgctaaagtaaaaagtgggggggggggggatcaataaactgtcaaagtaaaattaaaggccattactttcacataaatgtttaattaatttttttcaacctttttggagattgtaaaaagtgccgcgaaaatctaagaaataaaaaaaatggcagttgataacgttagaagaggattaatttaagcctttaaagggaaataaataaactaagcaaattactactttccacaaaaactaacaagaggacaaaaataaaaaaggcaaagataaataaaaaaaacctgaattaaaaaaaagataccacaaacaaacacatatagtaataaaattttaattttgcattattagaagtacgcatgacttctctctgaaaaacagattggtaataaaaaagaaaaagaaaaacaataaacgaaaactgagagagagattgaaagagagatcgagcggaggaagattcttcctccaattaccatctctctatttttacgggaagattcgtaaaattagtgccatcaacccaaaaaaaaaaacgaaccggatcgatgaaacttacagtgcaaaaacaccatttccgagaagaagaagaagacgaagaacaagaccttcgttgagaaactttatttgaaaaaaaaaagaaacgatttttattggttaaagggacagacctccttttggtggattggctccgtgatccaatcctcggaattgtttttaaggtgacggaacaaatttgtaaatcttgtttttgttattgaccccagatctttggataaatttgaaatttttattggttgtttttgatttgaagatgcagcataatctcttcacaacaatgcgaagtttgaagcttgctgaaggttgtaaaggtacacaagtttacgctcttaacccatcagctcctactccgcctcctcctcctggtaatagcagcagcggtggtggtggtggtggtggtagcggcggtggcaccggaggtgttggggataagcttttacaacatctttcagatcatcttcgtgttaattctgtccgatctaaatcaagccggacttatcctcctcctactcaaccaaacgctgtcgtttctcccgagtttcttctcccttgtggacttcctgttacggatctgcttgaacctcaaatcgatccttgcttgaaattcgttgatttggttgagaagatggctcaagtttatcgtaggattgagaattgttctcagtttgagaaatctggggcttatttagagcaatgcgctatcttccggggcatttctgatccgaaactgttccggcggagtctccggtcgtctaggcaacatgcggtggatgttcacgcgaaagtcgtgttagcctcgtggcttaggttcgagaggagggaggatgagttgattggaacgacttctatggattgttgtggcaggaatttggaatgtccaaaggctactcttgtttctggttatgatcctgaatctgtttatgatccatgtgtttgctctggagcttctagatcagagatgatgaatgaagatgaatgttctacttctcaagaagtagactatgatatgtcattttgtattggtgatgaagaggttcgttgtgtgaggtacaaaatcgcgtctttgtccagacctttcaaggcgatgttatacggtgggtttagagaaatgaaacgagccacgatcaattttacgcagaatggaatctctgttgaagggatgagagctgcagagattttcagcaggaccaacaggttagataacttccctcctaatgttgtcttggagcttcttaagcttgcaaatcggttctgctgcgatgaattgaaatccgcttgtgattcgcatttggcacatcttgttaattctctggatgaggcaatgttgttgattgagtacggattagaagaggctgcgtatcttctggtggcagcttgtcttcaggtttttctcagggaattgcctagctctatgcataatccgaatgttataaagattttctgcagcgccgagggacgggaaagactggcgtctcttggccatgcttcttttacattgtacttcttcttgagccagattgcgatggaagatgatatgaaatctaacacaactgtgatgctcttagaacgtctggttgaatgtgcggtggatagttgggagaaacagcttgcgtatcaccaattaggagtggtgatgctagagagaaaagaatataaggatgctcagagatggtttaacgcagcggttgaggctggccatctttactctctcgtgggtgttgccaggactaagtttaagcgtgaccacaggtactcggcttataagatcatcaattccttgatttcggatcacaaggctactgggtggatgcaccaggaaaggtccttgtattgcagtggtaaagaaaagctgcttgatttggatacagctaccgagtttgaccctactttgacattcccctacaagttcagggcagtggctttggtggaagaaaaccagttggagctgcaatcgcagaactgaacaagattcttggattcaaggcctctcctgactgtctagagatgagggcatggatttctataggtatggaggattacgagggtgctttgaaagatattcgggcgcttttgacattggagccaaattttatgatgtttaactggaaaatccatggtgatcatatggtggagttgctccgtccgctagcccagcagtggagccaggctgattgctggatgcagctgtatgatcgttggtcttctgtggatgatattggatctctagcagttgttcatcatatgcttgcaaatgatccagggaagagtcttttacggttcagacagtctcttcttctcctacggtataatctatcctctctttccgcttctcaatgaattttttttcgggtg

SEQ ID NO: 33199 - DNA, 5566 bp, Arabidopsis thaliana landsberg
  unsure (1)..(5566): unsure at all n locations
tcagacatttcatcaaacaccttttgggcgcggaaatgtctgggctcaaattcaagttgatcagaaagcaataggcattaagaacaactaatctagaagggatctatcaaccaatactcaatcacctagcatactgagaattctacactactctaacccatcctcagaaacctattcactactcagacatcataacagaaagcataaacgttgaacaagttgaaaacatgataacaacagtgtaacagcaggatgacaacagaatgaacaacagtaaacgaaatcaagaacaaaagctgaatactgaatgctgaatagataaagggaaatacggatttcaaaagtctagaacacaaggtctgcggaaataaaactagataaaaaacttctttgcgaaaatgtgaagtacatgctacttatagcaaaacattccgaaaccctaatacttaaaacgacgcagtattgggacgaattaagaactgtactcgactcaagtgataaagtgggaggtcgagtgaatagctggagtcttcttttcttccttgtgctccagtgtatggttgagtgcggaatgaagaagactctgaagctcgcagtcgagtgtgtagtcgagtggtagtgatggtgatactcgacttcaaggtagagtggtgagatcgagcggttgtctggtaatggaggtgaagacacttgaccccgaggtcgagtggtaaggtgaagtggtgatgtcctctactcgaccagggggtcgagtgaggtggtcgatcgacaccagtttcggcccaacaaaaatcctagacgctttgaagtttatagaagatcaagtttgccccagaagatttccttatttgcattattaggccctggacgtttttagggtctatatatattgtttttagacctaggtttcttatatcaagtcttttatcaagcttttgcaaaaccctattgtgagagacataagctattcatcgatttgttttcagagtttcattcagatttatatacagtgaagagatcccttctttccccttctctatttactgtgtttaagctttcacactcaaatatgttgtttgcttcatccaatatgtctgagtaatatgcctgttaggaatagggtttctcattagggattcatatggtttagtagattaccccatttgctaggttatctatagaattcttcatctttaattgtgcttaatgctagatttagagtaattaactagatcttgaatccataggtatctgtagttggatttattatttgatgagtctgggtgtgtaataagaatcggcctatttaataggtgtgtaataagaatcggcctatttactaagatgaacaattgaactcgttaagaatgcatatttaggttgatagtttctttgcttctctggttattattagctagagatatagggagttttgcgacacacccaccagtgattccataattagagtttgagtttaagaatggttcgataacaacctagctttcattagatctactaaccaatagtttcctgagaataccctgttcctagctctttattaaatcgtttaccacaaaatcaatctgttgttttcttgctttgtttactttactatttcactcataccctgttagcttaatctcgacatgtaactcactgtgtgaacaaaagaactctgtgaattcgatcctaaaatactgcaattgatcttttatttgagagagcagttctaagtaattggaaccatatcaaatttggcgccgttgccgaagttcttgggaatcatcattgagttttgtttagaaatttcgtttagtttttacttctattttgttactcacgcgtttcttgttttcttcttttctgtatttcaggtgtatgcctaggcaaacaaggagcacaaaacagaaggagcttatcaacttgtcttttcaggacttgggaaaacttgaacgcagcaaccgaaaaactcagaaattagcaatggctgacagagtcattagagctgatgcagaaggagttttaagagatgaagattggcaagcctacaatgaggctggtcagagattggatgatcatggactcatcctacctgaggacgctaatgaggatcaggcgcgcctcaatgcgcaaatagctgccagagacgcagcagggctcgctgtcgatcgacacaggagaggtgtcgatcaacaccatcgggagcagcacgacgatgcgattggtgtcgaccgacacaacagaggtgtcgaccgacaccaacaccagatttttgcagctattcctccagctgcggaaccacgtcgtactcttggggatttcaaccaggcctgacctgttctatgctaatctaacagcgattgtacccccaccattccagggtaacgactatgagctgaagcctgtctactatgctttagttggccagcatcctttccatggcttatctcatgagcagccaatggatcatatctagcgatttgaggaccttgttatgagcatcatggctaatggagtctcagaggactacctactgtgcaagctcttctcttattcacttgttggggaagcagcttcttggctaaaacaatttaaagcaggttccctcaagacttggagaagcatcaagatagccttcttgaacaatttttacgatgatgctaagtctaaggagttgagaaacaagctgtctaccttcacacaagttccagctgaagctttcaaggctgcttgggttcgtttcaaggactaccaacgagattgtccaaatcatggttttagtgaggtacaacttctaggtaccttcttcagaggggttgattggagatactagatggctctagatgcagcgagcaatgataacttcaacacacgttaaccagctgatgctatagccctgattgagaacctcgcttgtagcaacagtaccaaaaatgctaattttgagaggaagaagattgctggagctatttcaggaaaagagatggcagaggtgaatgctaagctggattgagtttataacttgctcacaaggaagaagcatgtccacttagcagctgaagaagagactattgagcctgagcctgagttagaggcaggagtcttctacatagacgattagggatacaggaagtttgggcagccacagggcaacttcagtggcaagaggtttacagggaaccagggttcctccaactacactccaaaacctgctttccagaagacctttcctcaaagcagctttcacaggccctatggtaattcagcttaccaagccccccnttcccctccaccctcagcagagacaagaatggaatcgatgcttgagcaaattctggagagccaaacaaagcttgttgtggagtttaatggcaagttggatgctgtctacacagatcttaatgggaagatcgacaatatgagctctcacttgaagaagctagatgtacaggtagctcaaactgcataatctatcaagagacaagagggttttcttcctgttaatcctgatgccaacccaaggaagagctgcaatgccatcttgatcagagaaggagatgatgtgtgggaggaattggacactgaagacgagttggagctcgcagttgcagagatggtgtcgaccgacaccctcctgtgtcgatcgacaccatacaggactcttttctcagagacgactcaatacgacggtgtcgatcgatacccatccagtgtgatcgacactggatccggactacaccttgtgaggtgcaagtacctatgcagcccgagcccgtttacactcttcatgtcccctatccgaggaggcgtcgttctaagcaggagattcacgctgctaagtgcacagccataatggagaagatcctctatactcttcctaaggatgctttagagacatcttccgcctcactcaacaggtatgtcaagcgacttgttgacaatggaattagcttagatgaagctaagctgcttaccagagacatcagtgcaatcatgctgcctaaggccaagaaggagaaggcacatagagtagacatagctgagtacatccgcaccattactcctggtcaaaccactaagaagcttccggatccaggtagctttgttcttgattgctttatctccacaagcagattcagccgctctttatgtgatctgggatcaagtatcaaccacatgcctaagtctgttgctgagagactagacatgactaactacaggccttcgcggatccacactagagatttgtatttaaaattatgagaaaggagggctagatcttcactgaaacctttagagttatattgctaagaacgaatggactttaattatgacagagcttttataatgtgaaatgagattacaagtgtaaagtgtgtgtgtgccaatgtgaactagattgaatgtgtcttacaagtcgtccttactcccttatatagatctacgcacgtggtagctccatccgggatctgcggagatcctcctggatattcggcaggtcagttccgagatatcaggtccgctccgcgaatatctcctcatcagttcctaggtcattattcgcttatctccctgcatcaggtgactgggcttatctggcccaaatacccattcgcgtatgtgggctcgtcagctgcgtaggtcctctacttggtgggcttggtgggcttttgtgggctggcttggtattttcgcaggtggattccaggaggggaatacagctccaacatttgccccccagcccattgagtgagtaggcgaactcgatgagcggacatataggttaggtaagattgcgaaaatattctagatgagatgatagatatgatgagatcagtcggttttgaggataaaatcaataaaaacgatttaattttaggttcatgaaccgaaagatattgaggagatacgcaagataagtcgctgctgtcgtggacgactgagatggagcgtctcttcagcgcaccgcatatgacagtccagatcaggcacgggggaaagatctcttcaatctcgaaactcgtggtgataatgatttacataacttcccacctctccacttgacgtcacgtcaactcacatgactctcaaggtaacttctctccatcctaactatttactatgtttatttttcgtttttagggataggaaaatttcatctttcttctgctatctccatcgtttctctgctactcccttctttctcgatctgccacttcgcttttcccttcatctctcttatctttctccatcgaaatcaaaagatgagcgacctcgaggattccttcaacaagagcaaccacagttacggcgacgacgagagttcgtcacagacgaggtcggcggcgtcaccgccgcaagtacaaaggcgcgtcataaccctaggcggaatgggtccaatccgtccgctgtcgaccagagccgacaagccaaagaagaagaaaaaggctcccaagcaaaagggaggcacgccgatgacgaacaacgatcaggtcgacctccagaggagatgctaggtcccggtgggggtgactatgatactcccaacgccgccgctgcatcctga

SEQ ID NO: 33200 - DNA, 407 bp, Arabidopsis thaliana landsberg
ttttatttttgctgagcccattattaccaattctaaccgaaatggcaaaactccggtctctttctttctctctctctgccagagttactgcgtgtctttgatttcccagaagaaggcgttgaatcctttcgttttccgattccatttttgggatctcttgtttcgttttcttctctttggatccattccattcccatgttccccaatttctttaatcggtgttgcttccacaaggtaattttgttttcctctgcacttcccgagaataaagagaaggtttttctcaattttccccttatgattatccctgtaaatgcgagttttttgtcctgttttgtcaaatgggtcttcataattcgtgatcatcaacgtattctctgtcttgtgtgtgtatgtatgtgtgtgat

SEQ ID NO: 33201 - DNA, 566 bp, Arabidopsis thaliana landsberg
ccatcctaatagcaacactaatcttattgaatttaaggtattgattgacaaatcccagcaaattcttctatttacatgccgatgctctgtttgatcatcgctcaagatgaacgatggcgacacacaaagaagatgatccgtttaagatatatacataggtttgtaaagttttttggacatccatggacaacatattgatgtttcatatattaaatttatcgtgtttaaatgaaaaaacgtataaggttatttttggcaaaaagagggactaatattttttctgttttagaatgaaatattgaaaaactaattagactcagatgtattgtttcccagccaattctcataataactcaaaattctcaatataaaatcgatttttacaagaagaaatgatactgttgataatttcaatactgccttttgttagatcgtgttatatgcacataatccgtctattagggagtactttttcaaactttgtaccactgccttctctttctgaacccttatgttgtcaattagagaattttgtaccatagtctattaccgatgattgataactt

SEQ ID NO: 33202 - DNA, 4760 bp, Arabidopsis thaliana landsberg
atgcccaaattaacatcccttatacatatgttatgattattaaaattaacctgagaaacgtagaagatcttgtagaatccaggcttaagttttaaaggtttttttgcgttcacttccactcctaataaagaaaattttggcagaaaaacaacaagtgctttatcaaataggtcacatgtcataaatcaaaataaaataatgattttgaaaacaaaataaacaagataagaaacaaaaatatgattttagaattgaacgtatactcttaccccagaaatctagttttggtagtacaagtttaaattgcaaaatcatgaaattaaatcgcagattttggatgaaaaacattggactttaacctagctcgcccctgagctcgaatcagtttctagttagtccgtgatattaccccgtttttactgattttatctatgttttaggtttaagattttgaggctttatgttatttcccgagtcttttagtatcttttcaggtattctatgcagtcggaaaacaatggagatgaggagacattttggagaaagagctaaggaaaaggaagctaagtacgatttcagttctagattcagagagagtatcaatcaacacactactggtgtcgattgacactagttttggtccaagaaagtccaagacgctttcaagtgtacagaagtggaaatttgccccaaaagactatcctatttgcattattagtccctacacgatttatagggcttatatatagttttagaggtcattgtttagacctaagactattttatcaagttttttgccattcctattttcagagacataagctattcatccattgttctttagagattccttcagttcttaatacagtgaagagatcccttcttactctaatcttatttactgtatatatgctttcttactcaattatgttgtttgtttcattcaatatgtttgagtagtttgcttgttaggaacagggtttctcaatagggattcatatggtttagtatatcaccccttgttaggttatctgtagaattcttcatctttgattatacataatgctagatctgaagtaattaactagatcttgaatccaaataatagaaatgcccaccataggtatctgtagttggatctattatttgatgagcctggtttataggtatgtaataagaatcggcctgtctactaagatgaacaattgaactcgtttagaatgcatgtttaggttaaagatttctcggcttctccggttattcttagctataggcatagggagtttcgcggaacgcacccggttattccataattagagtttgagtttgagaatggttcgataacaacctagctttcattagatctactaaccaatagtttcctgagaattctctattcctagctctttctttcatcgtttacaaccaatcaatctgctgtctttttactctgttctcttttattttcagtcattccctgctagtttaattttgacatttaattcattgtgtgaaaaaaagaactttgtggaaatcgatccttaaatactgcaattgatctcttatttgagagagtagttcttagggtaatttgaaccttatcaggtgtcgatccagtaagcgagttcccttttgtttactatctaaaaagaataaatttggggaaagaaagaacaccaaagaaaaaatatgtataaagagaatggtcgatttatcatggtatagtacaagaatgggtctataaggatcttgaatgttagcttgtttgatgagacccagcgatgaaagcctggtggatatagttgtggaacttaggtaaggaatctataatattttgtaagcttgcggagaagtacatgtgggttaggatcttaacgtttctaatgatctcaaatatagcaaacaaacaccaaactagcaacgacaccaaatttataataagatttttaggtcaattaatccttaaagcactatcatgtcgttgtagtactcaagggtgtcaatccaaatgggtgtgttctaacaatcaagttgtgatcagaagtcactaagtcaagccaagcaataacaggttttggtgtgttctagcagtcctaagtgaacatgcagaaaacagaaaatcaaacagaaatagtgaaacactcgaccaacacagctctttgcagagcactgggtgaggtcgcgtgacaggtcgagtaacagacagaaaataaaactcagatactcgactgcacagtctgttgccaaacaactgggtggtcgagtatgaggtcgagtaacaagaaagaattgcagaaattaaacaacagatgacaagatgcagtaaacaacagtagagtaaacaaagaattcaatcagatagagaattctcgaggatggggtaattgagtagtttcgtttcctcagtttacaagtgattgacatgctcaataaattaaccctagacaataagttcattaaccaaatctaagtgccaccgcaacagagaccctcaagttaacctagtcccagactcaatcaccattgacgagagctaacctaacaggcattacgaatcaacaagtaaagccaaaacgctccctgcaaccaataccttggtacagggtcacgaatctctggaattagtggtttagacatttcatcgaacaccttttgggtgcgaaaatgtctaggctcaaattccagttgatcagaaagcaataggcattaagaacaactaatccagaagggatctatcaaccaatactcaatcacatagcatactgagaattctacactactctaacccatcctcagaaacctattcactactcagacatcataacagaaagcataaaggttgaacaaattgaaaacatgataacaacaatgtaacagcaggatgataacagaatgaacaacagtaaacgaaatcaagaacagaaactgaatactgaatactgaatagataaagagaaatccggattacaaaaagtctagaacacaaggtctacggaaataaaactagataaaaacttcttgtcgaaaatgtgaagtacatgctacttatagccaaatatcctgaaaccctaatactcaaaacgacaaagtattgggacgggttaagaacagtactcgacccatgtggtcgagtgagaggtcgagtgagtagctggagtcttcttttcttccttttgctcgagtgtctggttgagtgcggaatgaagaaggctctgaagcttgtcatcgagtatgcagtcgagtgattgtgatggtgatactcgacatccaggtagaatgatgaggtcgagtgatgatcaagtaatgggagtgaagacacttgacctgggggtcgagtgatgtgatccgagtggtgtcagaagatactcgacttccaggttgagtgacgaggtcgagtggtggtctgatgatggaggtgaaggcactcgacctcgtggtcgagtggtgaagtgaagtggtgatgtctctgctcgacctgggggtcagtggtctcttgagatcttgaagctcctactcgacctctgggtcgagtggtttgtcatgatcaggtccgcttcttccagatagctcgtcaacagctccaaatcacctgaaatcaacgcaaatatgcaacatgcatgcaaaactatcctaaacatgtaaagtgatgacaaatgatgtgaaatggtataaaacagtgatgatatgatgctaaaatgatgacaaatggatgctcaaaacatgcaaaatacacacttatcaaataccttggtacagggccacgaatctctggaattagtggttcaaacatttcatcgaacaccttttgggcgcggaaatgtctaggctcaaattcatgttgatcagaaagcaataggcattaagagcaactaatccagaagggatctaccaatcaaactcaaccacctagcatactgagaattctatactactctaacccatcctcagaaacctattcactactcagacatcattgcagaaaacataaacgttgaacataatgaaatcatgataacaacagtgtagtagcaagatgataacaggatgaacaacagtaaaccaaaatcaagaacaaatactgaatactgaatagataaagagaaatccggattacaaaaggtcaagaacacagtgtctgcggaataaaacttagataaaaacttgttctcgaaaatgtaaagtacatgctacttatagcaaaatattctgaaaccctaatacacaaaacgacgcagtattgggacggattaaaaactgtactcgacccaggtggtcgagtgagaggtcgagtgataagctggaatcttcttttcttccttgtgctcgagtgtctggttgaccccggaatggaccccactctaaagctcgacatcgagtatgtagtcgagtggtggtgatggagatactcgacttccaggtaaagtgatgtgatcgagtggcggtgaggtggtggaggtgaagacactcgtcctcggggtcgagtgatgaggtgaaatggtgaaggcctctactcgaacagggggtcgagtgttctgttgaggtcatgaagcgtctactcgacctgggggtcgagtggtttgacatgatcaggtccgcttcttccaattagcttgtcaacagctctgaatcacctaaaaacaacacaataatgcaacatgcatgcaaaactatcctgaacatgcaaagtgatgtcaaatgatcagaaatggtataaaacacgtgatgctttctagatccggttgcagttcgaattcttatac

SEQ ID NO: 33203 - DNA, 684 bp, Arabidopsis thaliana landsberg
  unsure (1)..(684): unsure at all n locations
aaacaacttatcaccagattcttctcacaaaaactataatctccagctctctattgtagattgattaacctctccaacgaaatttcttcactaagattatcatttgacaacaccaaaatccccaatttcgttccaatcaaaccatacacacaaaaaccagatccggtacaatacgaaccctaataagctataacacaaccaaaaaggctctgatctcttacccgttcaccgaaaaatgcgccggcgatgatgaaagtgacgtagacggaattacggcgcatgataagtttgtaaaagccttcgaaagcgcctttctgatttctccgagcagcgtactccatgattgattggttgttttcaggtatctgatctctctacgtattttagggttagagaaagcgatctacgacaatggcgagacgaagaagagagacgatgagatttttcgcaactaatcagaaatgattctcttttgactagttcgtatctaganaggccatttgggcctcaatagttcggcctcgtagcccatttattttaacggacccagtacggccttaaatgttaagccattttgacacccctacattagcagacaatctgagttttggttgtccaaatcccaaagaaatcaggccaaaataattatcgaatagtagtttgatgggattgatatttttgaag

SEQ ID NO: 33204 - DNA, 2185 bp, Arabidopsis thaliana landsberg
gtgtgaaccatagcaagctgtcggctattgtatctttgtttagacttaagacaaaaaacgggtggtctgacaagagcttcaatgatcttctagagatattgccagatatgttgccaaaggataatgtgttgcacacatcactgtatgaggtgaagaagtttttgaaatcttttgatatgggttaccagaagatccatgcatgtgtcaatgattgctgcctattcagaaagaattacaagaagcttgacagttgtcctaaatgcaacgcttcaagatggaagactaacttgcacactggtgaaataaagaaaggtgtcccacagaaagtattaaggtactttccgataatcccacgccttaagagaatgtttaggtctgaagaaatggctaaggatttaaggtggcactttagcaacaaaagcagcgatagaaaacttcgtcaccctgtagattcagtaacatgggatgagatgaatgccaaatacccgtcatttgcagctgaggaaaggaacctgaggcttgggctttctacagatggatttaatccattcaacatgaagaacactagatatagttgctggcctgttctgttagttaactacaatctgcctcctgatttatgcatgaagaaggagaacatcatgttgactttgctaattcctggtccacaacagcctggtaataacattgacgtctacttagaacctcttatagaggatctatgccacatgtgggacaatggagaattgacatatgacgcttacagtaaatcaacatttaatttgaaggcaatgttgctgtggacgattagtgatttccctgcttacgggaatcttgctggctgcaaagtaaagggaaaaatgggatgtcctctatgtgggaaaaataatgatagcatgtggttgaagttcaccagaaaacatgtctacatgtaccacagaaagggtctgccatcaacacatcatttcagaatgaagaagtcttggtttgatgggaaagctaaaaatggcaggaagaggggaatattgagtagtcagaaaatttaccaaaacctgaaaaagtttaagaataactttgggactttgaaacaatttgcaagtaaaaggaaaaggacggtgaatattaaagcagactctgatagtgatgatcaatctagtgaatcagaggaggatgaagaggaccaagtagatgaggaggaattatctagatggaagaaaaagtcaatttttttcaagttaccttattggcgggtgtgttaaacattcctgttatttaaatttcagatttcatcactaatcgttgattaaaacttccttagtattatctcagatttcatcactaatcattggttaaatttttttgttttctttcgtgtgttgtataggaacttcctgtgagacacaacttggatgtcatgcatgtggagaggaatgtggctgcaagtattatatcgacattgttgcattgtgggaaatccaaggatggactaaatgctagaaaagatttggaggtgcttgggattagaaaggatttgcatcctaaaaccaaaggcaaaagaacatatcttcctgcagcactttggtctccatcgaagacatagaagaagatcttttgtaagcggctgtatgacttcaaaggtccagatgggtactgctcagacatatcaagaggcgtctcatcagatgagtgtaaggtcacgggcttaagtcacacgattatcacgtgttaatgcaacagcttctccctattgctcttagagggttgctacctaaaggtccaagggttgcaatcatgcgcttatgtactttctttaaccacttgtgtcaacgagtaattgatatggagcagcgtttggaactagaaactgagatcgttgaaaccctttgcctgtttgaaaggtttttcccaccaagcttctttgatataatggtgcatttgacagtacatttaggcagagaagctcggttaggtggaccagttcatttcagatggatgtatccgtttaaaagatatatgaaagttctgaaggattttgtgagaaacactgcaagaccggaagggtgtatagcggagtgtaatctagctaaagaatgcatacagttttgtagtgaatttttgaagaagacaacaaatgttcaggaaagtgttgatagaaacactgagtatgagagcaactctatacttg

SEQ ID NO: 33205 - DNA, 845 bp, Arabidopsis thaliana landsberg
cctcatggatgcgcttggaaggtgtttagctctttacacaaatttctgacctaagaaaagtttggaggctttaggtcaaattttacctgattttctttgtttttcaacatctcaggattctgctgttattaaccaagcagctaataatgatcaggcaatgaacatgcttggtgtgatacatgtaacattaacatatgacttttgtgaaggacaattgtaaaaaagttcttaatcctgcatttagtttactcttcaaatatacttgttgattattgcagtcacagaaaaccgcagagcttctacttgatctaagggttagttcaatagtttgcagccctaaaacagcctccattgagtcttctggagtaatatcccgggtaagttatataactctctatatactagcttcatttttcttaaaaaactgaagactttaagaaatctatttcttcggaatcttgatcatttttctctggacagcttagagacttgcttggtgcaacaagctgcgggttgcttaggtgtaaataatgtgcctcactacgtgagatctaaccaaatgaatgagctcgatgtcgagagcgttctccgcgtatccgttaaggccggctaacttatcccgatgcaatcaatagtaaagtggacactgtgttgatttttttggtccatcaattgtgcatgcacaatgatgtgattgctagtcacttatacgaggaagcgttttcagctcgtgggaacacatccgtgaaagcatggggatcactctcagacgaactataggatgagaagtcataccctggagaaatcatggtggtggatggacctgcaatgactcacatatcact

SEQ ID NO: 33206 - DNA, 667 bp, Arabidopsis thaliana landsberg
aatccttattttctggaatctgcttatgtgattactctttcttttcttatgacagcatgtcaacctctagacctgtcgtctcctactttggcttcttcggcttttctccttacaagcagaatattcacggatatctgcaaatacgtatcagagctcgggactatgaaagacaagctgacatgaaaaacgagttgaatttcaaacacctgttttggagtggtaaagcacttcttcatcaaacatttttaaggagcatctatataattggtcgatggaaatgcaagtaaaggaatataagactgtatgtgttccatgatgatgtatatatatatgtctaatcaatgtcactgttagttacctttggatacataagatatttaaagcggtataatgcttattaacggttgatggatgttacctttctttttgacatcacggtagatgttacctttcataggtgttgaatagacagattggggacgttaattagtaatgatgtaattagttagagctaaatagtactaataaatatatgtaagaaattgttcggaaagtaactaaaaaaagttcaattcatgcaagtagacgcttccaatgccataaatgtataagtatgatgttaagcatgtgaaccttgagagtcgattagggcacgtgaacaagattg

SEQ ID NO: 33207 - DNA, 1013 bp, Arabidopsis thaliana landsberg
  unsure (1)..(1013): unsure at all n locations
gaaaatgtcaaagcaaagtttaggatttttatgggacattttttgttgatgcttaattcgaaccaaatttggaggttcacgattttgacgacggtttgttttacttatgcaagataatttctacttacaacgccattaatgattactgaagtggacattatatacggtatgaactagtgtaaaattaacagagggggtattactgtagattgtttgtttatggcaagacaattattgtttaacacatatgtgcaagaagctgaccaaaaagttaagatatttaagaggataacatgaccaaactttttatgccaaggccagtttatactagttgatgggtgatatcgatcattttcgactgccaaagcaactagttcgaacggttatttagaaaaaacaaaaagaagaaaatgtgtaaaacttgtctactgcttgtttaaatatgataattaaataaaaaatgtaaaagcttctctatcaatttcattatttatatctactaatattataaagttttatcgatcctccatacctagaccataacaaatttacttattaactttaatagaaaatgcagatcaagcggataaagcagataaagcggatcatgtagaacaagtgtggatctagaagatatgagagtttaaatgatttgttgaatggtgaatgcgtatcaaatatttctataacaaaaaacaaatattttacataatatttcatttgtatttatgcaattttaaaattattaaatatttaaaattattaaatatttcaacatacttattaaaacattaaacagatatttacttcaaatactcaataaataatcatctttgctaggagtcattttgaacagttttgggtctgaaatgttttttaaaattcaatatatttttcaattaaactctaactatgtaaaanttagaaaaactctaactattctaaatccttgttttttattacacattttaattttacaaactcaatcttattgatatttttaaattatatta

SEQ ID NO: 33208 - DNA, 4125 bp, Arabidopsis thaliana landsberg
acggtttgtttgcgaggcagcagagaaagctttaacagcatttttcaaatatgtttccccaaccttgctgttaccaaagctgcaaccttgtctcaaaaacaggaatcctcggatccgtgccaaagcatcattatgcttttctcgaagtgttcctcgactggtaatacaagttcaacttcatatatatctctcacaaaggcatcgcatgtcatgtaaaaatttcaacaataccttgcgttataatacatattccagggcgttgaagggattaaagaatatggaatcgacaaattagttcaagcagccgcatctcagcttagcgatcagctccctgaatcccgtgaggctgcacggactgtcctactagaacttcagagcgtatatgaaaaagctcatcctctcatcaaccctgagacatcatcaccagaagaacagcaaatcccggaggtagagccaattacttgggaaactttctgcaagtcaaaactgtcggctcttagcgcacaagccgtgcttcgtgtcaccaatgttgtcactgttactgctcgggagggtttggttactacaggttcatcatcttcatcccagttataaacattttctactacaaattttttaaaaaccgtttgctacgagtcatacggtttacatggtattctccggcatggcggcatgatctaccaaattggcaaattatggaccgataaaaagagtgaacgttcgtgtatgaaaaatcttggcttctttctgggttattttctttttgtggattctcatctgtcttcactaccagtacttgtttctttttcttatgtgtatatattctataccaagatttggtaagatagtcatgagtcttttggttatatgcaaaattggtcggattctttgaagattcagtgatcattaaatagatagccagtctatgcttcttcctcgttgaagtttctctagattaagctttgactcatagtaaaagattctttaatttagtcgattttttttagaatcagaatcacgtccgaggcttggcttattggtcagatattgaacccaaaactgaaagtgatttttattagattaagaattatagaaaagtatctgagttctgtctgaactaatacatcatagtctagataaataatcttcacctctaccatcgaagacaagtgggataaaactctcgcctaaaaacaagcaatgccataaggcccataacccttattttgattaatctgtgaggtgaaacaatagcagcaactacatatgtatcatttagctctgtgagagctcgcggcttcgtttagctgcagcaacaactgcattcataagtgttgcccggaaagagcctttctctagttcatgaactccggctattgtagtgccgccaggtgaggtaacatcatctttcaacacacctggatgcttcccagttttgctaaccatcgttgcagctccaagaacctgtaataggaaacaaaaaacctcaaagcttagggttctctttctagtttcggtattcaataccataataaagcagattaaagaagcgatgtagatgttcactgacggtctgtgaagctaaactcaatgcaagctctcggggtaaaccagcagctactcctccatcggctaaagcttcaattgctaaaaatatgtatgctggtccacttccactgtaaaaggtttgaaattttcttgattagtgacttgaacaactcaagcatttcagcagctacagtgttttcctgtacctgagaccagtgacagcatcaaacattttctcatcagctttcaatatcttccccaccgcgccaaacaacatagcaacaattgctccatcctcttccgttgctcctgtgccaaggctcataactatatacacacaacataattggcaaatgtaagcatttgacagcttcagagagaaacagaaatcacaaacaaaattcagaaatatcacaaatgcgaacactctgataaactatacctgaagctgcctcaccaacagcggcaggtgtattaggcatcacccttatgaatcgatcttgaccagaccattcctaaaaacaaaaaggagagacctttatgttttttaaccaaattgagctctagaaactcacaatgcaacaccatggatagtgacaacttaaatggcaaatgtataggagtataaatgatgcaaaacctgtaaatcattcaacttgattccagctgcaacagaaaccagaatcttattctttgaaagcttcgactttaattctgtgacagccttcttaactacatcatatgaaaggtacaactttaagtcaacacaaaattacattgatgaatcaatcatataatcaatggataggtaagaaatatatataccaacttgaggtttcacagagaatatgacaacatcgctttctttaacaacctgtcatttttttgaagatcgtcaatctcaatttagttcatcaccacaacaacaacaacaagacattgaaaaagaacttacttcttcgctagtggagaagacattgacgccaaaggattcgaagacatcacggcgattgagatttgagtgaacggcggtgcatatacgattaggaggaagcacaccggaagcaaccacacctctagctatactctccgccattttaccagctccgatgaatcctaccttgaaactctccgccggaatcggaagaatctccatcgggaaaatttaacgggccggctggcgagatacttcggacgggtgagctgacgagctgcttgagacgggcgagctgatgagctacttgagacggaccggctgacgagatgcttcagacgggtgagctgacgagctgcttgagacgggccggctggcgagatacttcagacgggtgagctgacgagctgctctttgtctctaagtgtcctcgcggcctccccctttgacaagacatgctattccgtatttatagccttctgcgcgtgtagggcattcatcgagggatttgacgaaactacccttcgccttaatactccttggtttggaacttattttgggcttttgacttgggtttgggcattgggccaagtaggcccaatccgacccctaacaggaggagctgtactgggaaaggaaaacactgaagaaacgaggtaacacaccacttgaagccatggaggacgtaggaactgtgagagaaagaaatagagaagaggaattaggaaaaaaacatgaaagcgacagagtttaagagacgttgagaacaaagaagagagattcttaccaagaagggagctgttctggtcccaaagggttctcttaggaagaccaaagtcaagagtttgaattcttaacaggaataaagtgagagagtgcaatgtaagcagaacacaatcaatgtgtgtttcttacatacgaacctgtcttctctgtcctttctattcgtataccaaatgagaaagaagcattgctttttgtcttttatttttcttagaaagcccaagagttttggactattggtagctttggagttaaagtcacatgtaaaaacagagtctcaagctcattttattgagtaactctaaattttcaatcttactagttaatattctcttgcttgcaaatatcaatttgaattgatgaccgattagtaagtagcttcattgattgttcaacataaccatgtgaatgtcactattaggggaagcagttaaactagagtgagtgagccaaagacttgagagagatggtgttgttttgtttcatccttagtttattcaccatttaatttccaaaacaaccccacaatttgtactatagtacactcaatgatagcaaagaatgagaagatgagtcaatgacaccaaaatatgctttctttagacattgtgtggcaaaaacattgaaagctatatccagttctgtactcaatctctctgcactgttttgtcctatcactttcttttatatcgaattgagaaaatatctgtttaatccagattaaataaaaccgatgctatgcaattagtaagttaactaatcattgagtttgtttttaattatgatcagtgaggtcgttagttcaggttcatttaacagttttttgttttaacgattctgtttatctaaatacttatggg

SEQ ID NO: 33209 - DNA, 1350 bp, Arabidopsis thaliana landsberg
gatcaattagcattaacggtatattattattgatatattttaactatttaagcattattaatatttatctttataaaaaatattaaaatatcataagacgagttatatagcggaacggttttagattgatataacacggattaaatctttatttattattttatcatcaccaaatttttttacaatattatataaaattatataattttaatactaaatttcaaaccgtaaaatttaatattattatatatataaataaaatatttaccccgtgatatatcacgggttaaatcctagtaaataattaaaacctctataaattgataatgttgggaccgactactcaagctcttcatcatcatttatgcatctcaacttcctgaatcacttcttgtactacttcgacgactagtacagaacaacgaaataattgcatcttcaatctccccttttttgattatgtatgtgaactcaacaactctagcttcaatgacttcatcaccagtaacacatcaaccaagcaacgccaaattccccttaattgagtcacattatggtcaaaaactaattcaagtatcgcctccatcgaacccccattgcatcatctctacaatgattaagtctcctagaccaagtattcctgaattgtattaatccataacacacgattcttagttccgttttacttcctgaatgatctcatgattgatctcctaatcaattttttgaacctcacaatgatctacccgaaacaatactaaatctctatcgagaacctgacacggaatttgttaacgaggttcgatttttcctactccccgggaccacgtccagatttcgatttcactaaagcaagaaagcaaattacaaccaattcgcaaacacgtaaaacaagcacacccctcttgatttaccgctcccttctataaacgtgaaaccttaaggataatctctacccttaactaaactcctctgagtctagatttaatcaggataacctaaccctgagctaaactccttctgagcctagacttcaattctccaagtctctggaacaaccttcacacaccaccaaacaagcttgatcacacaagcaccaaacctgcgaaactatgtcgcataaaaccgcgaaactatgtcgcacacacccttagaaagctctcaatgatttgtctttatgcctcagctctcctgcttctccaagacgtcctagcacctctttatatagtcaaaacgattgcctaatcaccataggagaagatttccttttcctgtaagaaaaagtaaatttcctttttaatcttatcctttttctcatcaaactccactttcatcaagtcttccaagtct

SEQ ID NO: 33210 - DNA, 1541 bp, Arabidopsis thaliana landsberg
gggttgaaagttatatcataaagatatacttaaacattcttttgttataaaacacgtttcatatgtgttggtgagagtatcttttatggtacacgcatggggctttcctgttgcgaagtgatatgatataacaattctttctcgccactctaatctcatgtaatgatgttttgattttttccaacatgtttcagccatggtggtgtctttagccccttgaagatggttcagatagaccttcacctcttaagttcagcctctacataataatagcatggcatacatgtagaaagcttctttttggcgtacatcaactgatttaccaatatagtggagaccaacgtcagaatgatcaaggacaaaatagcgtattatacattttttgtagtgagaatttgggttgttgttgtcaagatatttcttcatagtaagaaggtatttgcatgccgagaacgattaatccaccaacggagcaagattaagagttttgagcacgcatttatcatttgctgatgcacctagttctttgcatacaagaatgcaattgtgaaaatcttcataacgatcatattttgcaaaaaatgtaacccattaattgtattgttgtaataaaaataatcaaaaactcgttaaacgtattgcgcggtggggttagcatggagccgacatttcaccattagatcagtgtagttcccgacagcaagcaacgacttccttagaagcttatgttgtttcaaatttttaaaaacttagacatcatcagctgagtttacgagttccttgcaagtgagtaggcaatttctaacatcggcacaagatttttggcctacgttccccattatttttgaaaaaaacatctcaagggagtgcatcaagcggtgttgaagtttttgggccaacaagtttggatgatattgagttacggtggatgctcttagtctcctatacattttgttatatttctgcattacgaaaaataatagatattagagtttagaatataaatatgaatgaaaactttggtaggtgtataattcatataaaaagatgatggatggaattaaataatgatgagaatgacgtgcttgctctgttactcgtatgtagaagctctgagtgtggaaatgttggattcccgttataatatacatatgagggcatcaaattgtaattatgtctaacatgtaatggttaatcttagggaaaccaccataatgggtgaataataaaatactatctatcaggtgatagaaaatatatgaatgtcaatattttatttgatcccaaatatgtataaacgataatatatttttagaaaatatgtgccaaagatattgaatttggtcaccctgttaaatggctatgcatataataccatataaatggatggttttacatatcggatcggaaataagatactcaatcacaccaactatgaaagaatacatgtccacatatgcaaagtttagaaatcgacaaccaactacaggaacttgatgtattgcatgctgacatctaccaactatatgatgatgacatgt

SEQ ID NO: 33211 - DNA, 1665 bp, Arabidopsis thaliana landsberg
gtcaccttcatgtcaatgttagtgcagtagatagttcatgcacacatctcacgctcattttcagtctaagacaaaagacaggactaaaatcaaacctcttgagtctaaaaaaccataactttgcagtcagaatgtgatgaaacacaagaaacaaccttacccttggcaagaaggttgggttaaccggtgcaatagctgtcttagacggcataaccttcacaggatagaatccaagcatcgtcccagacaaattcagagcagtccttgcacccactacaagtcccaaaatgacaaaccataaaccaagcacttacaggcattatccaataaacagattacatagagaaactaatgataccttcatcagtgaactcgatgaaagcaaacctaagtactgagttgggatcaccacatatacgacagtcaacaacctaaacaaccaaatacagtcaacaccataacacaacacaaacaaagatgaactaaagaagttgcttaaacctgtccaaagccgagaaacaaaccagcaagctgctcctcagtgaccttaaccccaagaataagattactattaagtgattatacactaaaggctgagaatgaacaattgaagaaaggtggaaactttttaaaacctgttggtcaatatcagacacatagacagttcttcttatgatctcttcacgctgagccaaacttgtcctaggattcattctccgtttcccttgttgtccgaacgacttcttctgtttcaaatcaaatcattttgacacataaaggtgagatttttaaaactcacaaacacacacaagaagaaacagagaaaccaaaatgaagaatcatcaaaaaccctaaagaacaatttgattcaaaaccccaaaatcacagagaagagagaagagagatgttcttacccgacgaaagctaccgtcttcgttgacggggaaatttccggcagcaacaaagccattattaacggcgaagaaaccgccgttaaaaccattaacaactggcttagtaagtgaaggaggaacaaactctttagccataggattaagcttagacaagagctcgtgaagctctctcatatcacgcttaaaactctcaccaccgtcggatctcgccacgtggactccgatctcatcatggattccatttccaccgtgatcgttgttagaagaagctcctgattcttgactggtgacggaagacggcggcgacggcgagatcaaaccaccagcttccacagtagtattagctccgacgctctcaatgaccgccatgatcacaaaatcgaacaaaacccagaaataaaaatctgatttttgagagaaccaacgatcaagtaaagagatttgaggaatacaatgaaaaagggaacagtggctataagaagagagccaccaagaaagagaagagagaagagagaagaagaagaggacaaaagagtaatcaaccaaaggatttatggtgattaaattttgattaaatgagaaatattagcgaggttcgttgcgaaaatggttagagatctgattttaattttgtttttaccgtggtgaaaaagttaaaacgattggataaagtaaaacaaatcggtcgtactacagagagaagatcacgctctgcaattttcggacagagctagatcatagtgaaccggat

SEQ ID NO: 33212 - DNA, 891 bp, Arabidopsis thaliana landsberg
tgcatgctcatgcatgtggccttgaagacaagatagctaatccacaagcaactgaacactcgcttcaaacttgagaagctggcagcgtagcatgatttgcgggcgtttagacaacgacgacaacaaatatcgaatagcttcatttagaatatgtgtgcaatgttagacacggcgctccccttaccgtattatggttgcttatcattgtcgagtccactggcgtagatagggactacagcaatagaggtcttcaacttgcagctataagccttagtgcactgccgcttgccttgatgttttgcaagcatatgtgctttacatataataggtttttatcactcaaaatggctttgcgtggagcgtcatcaaaatattttttaatataagttatcttttaagcgactatgcgaaggatgatgcatgacgggaaaaacatgtgcagaatctgagtgtgtgttcgtgtgtgtgtgagtgcgtctgtgtgcatgtgtgtgagtgtccgtgtgagtgtgtgtacccctaaccaaaccgagttagtatttaaaacaggaagggaggcagtgcttattgctaaagagcccaagtcatccgcgcccatcagcgatgacatcacatctctaagtggcacacgcctactaattgacaggagcacccgcattgtatgggccccctccccccccaccagtggtgcagagtaccccacctaaagcccaacgctccttgaactgggcggctgtcaaccgcaacccgtcatccactgccgtgaccaaccggccagtctcctggggcgtcaactgcgtgcggcgccaatccacgcgtctggacgcacacaaacggtggccaaaccaaaaataattccgagtgcatggtgtgctcgacccggatcagtgc

SEQ ID NO: 33213 - DNA, 441 bp, Arabidopsis thaliana landsberg
taattttaggttgctatgttcaacattatctttttagtatctgctattaattcagttaaaacttagaatctaaaaacattccaagcattttgttatacatgtccaaggcaccatgttctatctttgaggacactaaacaatgtatgtaaaactgtgcctaagtagattatttattggaatcagggaactaaagcttcttattcttcatctttgtgaaaaaactgttctcttatccattgaggttaaaagaacaagagatggcaactttaggttgtaactccctgctctctagtgacagctcatcacctgaaagtaaaagttacttgtaacttatctgtgcttgtggtttggaagcaacactaaacagttttaaacattttttcaatacaaaaaacaatttcttatgttgaatagaactttatcatctgattcctttagttt

SEQ ID NO: 33214 - DNA, 437 bp, Arabidopsis thaliana landsberg
ggggccggcatcgccgcccttggcgcccaggtgatctatggctgtggttgcatgggcctgatgggtgtcgtcaccgcgggggcacaggccgcgggcgcgccggtgcgcggcatcattccggccttcctgcaggcgctggagcccgaggccaatgccgagcaggccctgatcgtcacggcgcatttgcaggaacgcaagcagctgatgctgcaaatggccgacgtcttcctggtgctgccgggcgggcttggcaccttcgatgaatttttcgaagtggcgaccgaggcccagcttggggtccatgccaagccgatcctggtggtcaatgtgaacggctatttcgacgcactggatacgatgctgcgcgccacggtcgaagcaggcttcgccaagccggccatcctcaggctctatcatctggcggacgggcccgaggc

SEQ ID NO: 33215 - DNA, 1336 bp, Arabidopsis thaliana landsberg
aaccattatccttctcctccatttttctctttttatgtctatttttatattaacgcttatggagataataagtagccgcttctaatctcatacaaactaccgaaaaagatttaggaaatgatgatgattaatatccattcaaattgtgtcatatcttccaatgatttcgaaagatatcctaagaacaacaagaagtgagcaaaatagtaagaacaacatgtgagcagcacgtgattttgattaatttacgtcaaaaattaagaaaaggaaattagaccatctttatcaatcgactcttacatagaattataaacaattttgatatatacaaaataatgtttaaatattaaaaaggctagagagaatgtatctaaaaacttttagctaagagccatttttcatctcttaagtatacttttttttaatttttttattcttattttgtttaatataatattttaatagttcttatgatattgttaacaacctatggataaggatgctctaatgaaataaagaaactatgtagaattagatattgcactaacttgattttattgattcacaaagtataatatttatacaagagagacatcgtatgaaatatactctagtccctaaaatataggacctgactctatcacaaaatatatagtgataatgagattatactctatccccaatagaaaacaagaactttaaaatagaagttttctggtaacatagatgaattaggtatgttcatgcaaatgtgtatagagatacgtaggtctacattaacattacatatactaaagtgtatagagatatgtatacttattagggttttgacagatttaagatttccaacatatatctatcaagaaaccgtataaaagtgagtttagctgcaaattattatgcatcattgtttccttaattaggataactaattgaaatcttactgtgataattaattcacaaaactaagggtaaattatacaacgcttttattaaagcagccaataggttctctttgttgttcttttctgatgacacgtagaccccatcttcacttattattgtgaaataacaacaaaaagatgtcacactatagctagtaaacaccacaaaacttgcatagcaatttcttaaagtagacactagacaacgaatacagtccgtataggatatactgtgtgttattactttaaaaaggaaagaaaaagaaacagttgatatacctttttctttacatttgccaatataccaactaatattgtatacaactcaatttcgaaaggtttaacgtacgaatcaactaattattaattagggttgtaaattaagttctaac

SEQ ID NO: 33216 - DNA, 2199 bp, Arabidopsis thaliana landsberg
  unsure (1)..(2199): unsure at all n locations
caaaatccattatcgggcagagaaaatccgcaaattctcgtgcttctgcttctggaagcttgtattatcaatcagaaacggtcgagtggcagtatttaatctccggatcctcttcaagtcgccgtgtctgtcaaagtaatcctttgatctcgcacctccaatggcaatctagttaaatcacaagtatcaacgagactataaccgatcaatcaagagatagacagaaaccaagtatttttccgggtacctttcgaggcatttttcctaagagttccatcataagagcaaggtggtcctgaagacagtaaagaagaatgtgttaaacagctgataaagagaaaataactctttggtacaaaacgatatgaggtttcttaaaaaccatctttacctcgtcttctccgtaaccatttccctcttttggagcgaaaagcatatcgcctgtagcaagctcaaaagcagtacaagcgaaagaccacatatcaacagagtaagagtaacctgactgaagtattacttcaggagctctgtactgtcttgtttgtatttcttctgcaaatttgttatcagcccaacacccgttcccgaagtcgacaactttgcatctcatatcaatcccatccaagtttctcttgttctttttcggtgtttcacttaaacctactatcgaaactcttcttcctgatattttagcagccgctttttttgctctcctcttcaacttcttctcaatcagattcattgttgatgtaccgttttggttcccctcgggcttttctagtatcggtgttagtccggatctgataggatccttggcagggtcaatggtggaacaaagaagaatgttttcgggttttaagtcggagtgaatcataccgagttcacggtgcaaataatctagaccagtcagtatacatttgcatatctcccgcactttacttaactccatccctttataacggttatatttaatcaaacgcagcaagctatcgccaagaaactcgagcaccatgcataaatgctgcccgttgggacctgcgtgcttgaagtcatcaataagacgaataacacacttggtattttcaggatccccatcagcagcagcttgaagaagttcgatttcatgaagtgcagcttgagcaaattgtaaggcgctcttctgaatcttcaaagcaacataattctacaacagacaaaaacacatggtttattataactaatgagaataaagccaagagggaggttacatgtgacaaggagcttgtagaatttaatttcnattcgtaacttttagaaaaacttcagcggaattccttaatataaagtcatgggcatcttacattctaagagcaaacatcagaatctaggcgttagaagtgtttccctgcttcagacaaggtaaaagcactccacagatagagctcattagagagcgcatcattaaattaagcctatagttaatgagacacccatagagtaacgttggcatttaaggaacagcgccatttaatagaacattcatttcccttactaagctatttaaacaaactgcaatggttggtcaactacagagtgcagtgccaaatcagacccacaaaattcagaactttgcttatctaaaagattaattcacacgaagccaagatcttgtaccaaaacagatcaaagcccagatgaaaggaattagagaagactaacgggaacatgcttaaaacaaatttacgaaatcaaattctgcatttaagatcttgttggcatagtaaagcaagatataaggagagagatgcgtacagaagtgcgagtatcataggcaagccaaacggtggagaattggccccaaccaagctttctctgagcaatgtaacggccaccggcaaactggtctccgattctaacggcgtgatatccacctttacggtaagcatcgaaaccctcatcgtcttcctctgatccagatgaggatgaacacgacatatctctgtctgaatttgaaagcttgatccgtgttctatgttggattttgaattgtcaaagtttggatctttgaataaaagagcccccttttctttagttttctcgagaaagagagataaaagagagagagaggaatagcacgaaacgtaagactctctcctctttttgctcctcttgtcctttttttattgatgggtgtgcttcaaacattttcccattttgacg

SEQ ID NO: 33217 - DNA, 896 bp, Arabidopsis thaliana landsberg
agatgatacaataccctaatgcatgcaaaaaaaaaactagaatgatatcatatgtttcaaaacgatattagataaagactagtaaccaaatattctatgtgtcctaacaaaatccactaccttttttgaattgtgtatataaatacaaccaactccttcacattgttcataagctctctctctcttttcattattaatcttcccgtctataattcattaattctcgttagcagcttcttcttcgttggattcgtaaaatggatggatttggagctaactacgagtgtttgttctttggtaaataatacacatataaaataaagttgtatatgataaagttgtaatttttcttggatttcaaaagttgaacaacgtcgaggaagtctcgtgaggtgtctccaacgattaggaacaaagttgacggttcaggatgttcagctgaccaggaaacgatgtcttcaagcatcttggtctgtctcgcgtatctctctcctgaaaacaaacacacaaaaatatagaggatatatctgatcatcatgatacacaaaatcagtaagattacacattacacattacctgcggggaagtgattgagcttaatgccctcagaaggaaagtcaagaccggtcgtatcaccataagcccttactgagaccgtaccatgatgaccatcactcgaaagggccgatttaatgttcttcaaagcatcaccagcattgagatcatcagggatcttgcaatcttctatgtcccagaagatgcctgtctcagccgctgccatcaaaaggaaaaaaaaaaaaacttaaatgaattaccaaatggagaagaaaacgagacagagagagattttacctgcgaagtcgccggggaaaagatcagacattgttttaccggat

SEQ ID NO: 33218 - DNA, 1088 bp, Arabidopsis thaliana landsberg
tttcttgtatttggagcttcgattgagcaaaatcttatggatcaatcaagtttcttccttttctgatttaaccatatctcattgtttggtgatttggaaaatctgataggttgaaatctctgtttgggatcctttctctctgtttatgcagcctccggtgaaaaacaccaaaaattgatgcttctacaactttcagcgtcgattaagtttaccggtatcggagttttcgtcggcaaaggatgacaggaaaaatcgtttcttttgcaataggtttacacaacgtgtcttgtctttgttattgacacgttagatgcaagagttgtcgttcttttctttgatgtaatcgttttgggccttgggctttaactttaagcttgtaagcttgtttggatcaataataaagataatattctagtgaaaaaaaaaaaagaataaatctgccaatattttcttttagcaatttaaaaaattgaagtttttttctcgcaaattttaaatagttgtgatttattttggaattttaccttatttttaatatccaaaaggagaagtgacgtggcgatatcgaagcggtttaatgaagtgatgggccccatcttaaagaaatcaatgacccttatcgttccacttctatcggagtcggagttttgttttgtttttgttgtattccgtacgtcggtcgttgtcgggagaattggcgcgtgaaatccttggctccgtcgaatacgtctgcctccgacggctgtgagtcgcatgattgagtcgtgggtaagtatccttgtgacttcaaatttgtatttccgttctttataatcccctgactcttgagaaaatcgaggagaaaaaaccatccttgcttggtatttcatttgaagagtgttttagttataaaatcgtaatgtttgacggtatgtgatattctgtgagcatgattattcagaaagcttttgtctttttagtaaatattgtctctttcttagtcttaggtaatgtaacctcaagaactctatgcgagaacattacacattatctttggaattggatattatattgtcaaagtttaatcattgatgaaagttgcaaagagt

SEQ ID NO: 33219 - DNA, 320 bp, Arabidopsis thaliana landsberg
gaaaaaaaattagcatttgggttttttttttttttcttctcaaaatcgtaacaatgcgccagggttttaactaagtatcgtttatttctgaacagaaactaaaaaaataattaaattttttaatttacccttgtttaatgtgtttttttattgattaagatattaaaactatgaaaataaaatttggaatttttaccaaacatttacattgaaaataaaaaacaacaactattagaaaacaaaactttagcactaaaatgacaactaaattaaaacgtaggagtatatcgcgagtaagcagaccttttgacaaaccgcat

SEQ ID NO: 33220 - DNA, 1182 bp, Arabidopsis thaliana landsberg
ctaagacaaaactatcactcacaattcgtcataaaccagttattgcttacacaaaagtgtgctgatttcccattagcttaggaaacgtgataaaagtaaagagcccaaagaaaaagaaagtataacacttcactgacaaaacaataagaatttaaagattgcgtgcctaaaagatatctgagactaccctccaacagtgtatatacctttgttccctcgcctattcagataattctggaaaaaaaactacctcatatgcttcttataaagtcaagcaataagaaaaatattggaaaggaaactaaaaatcaactcatgatctctccttcgattcattacgcatcagctttgaataccaatatattaaaaagtcacagctagatcgttgccttacctaatttcacagcgaatatgctgaatatcactatatttcttagcataggcttggatgctgcttatgtctactccaaaatatctggaaggattggtcaaggcattctgcactgcagatcattcttcctcactcaatgcgaaggaaagtgaaaacaaaatcataatcatgaacagaaaaagagggctttggaaggatactccaggtctggatcttgttgcaagcaaaatatggttttaactccaattttacgaagcttgtcaacatcttcaggggtctagcaataaaggagagcatacagtaagaacacgaggaaagtaccacatatccaaaacaaaatcatcatttgagagaaggatataaaagtgaacctgtaagcaggatccaacaattagatctggacgaataaagttgtagttcattcctaactcgtgcctgtaagttagaactgaaatgaaagacacatgagaatgaatcagtgactgaaatacataattaaggagaacaagaagataagtttgtcaataaacaagcaaaagatataagattccttggtagacagatgaacaaaactaatcaagatgaaagatgaaaaacaagagtagaatacaatccaatgagctaaatcaatatttccaatatgagacaaaaaatggtggacatcattagagtttccaatctaaggacatgtataggtatgatgaaaacaatttaccagcacccatagcatgagtcatgtcttggctatattcatcagatttctcttcatcctttgcaacaccactcatctc

SEQ ID NO: 33221 - DNA, 577 bp, Arabidopsis thaliana landsberg
gaaccattaccagctgaaagtcgctgttacacaatgacagtgttcagtaatgcttaagtcggtttcacattacgagcacctataccgaggtatgtatggtcacatacacaaccacaacccaaaagagcgctaaagccagagcgatgttctcttagatcaaccaaaatggatgtaaacaacttcaacctaccaatttcccaaaacacctataaggggaacactgaacaagaaaagcatatttccaaactttgggggacaattgacaaaggaccccaaaaaatctatgttcttctgttttagtggcttaataatattaagtttgacagagcatggaaaggaatcaataaaatcgaccaaagagatttgatagaataagtaaaccagccctatctaaccttagccagaggagtgaaatgctcaaccaagtcactctccctcatctgagcaccaattctacaaagcgaaaccacagccccctccctcacgcaagattcctcaacaggggaaagaggccccaaaggtggaagcagaacaaaatgcataccaaacccctcctacagacagaataaaacccccc

SEQ ID NO: 33222 - DNA, 732 bp, Arabidopsis thaliana landsberg
ccaaacaaataaccaagcgtcttcttgcgtcttaaagctttgatggtgtagcggaagtccttataagtctttggctttgtatcttctaacaaggaaacactacgtagacttttaagatccgtttgtgtttctaggttttattctcaatcatacacatgacatctagtcatatttgactccaaaacactaatcaagcttcttcttgcgtcttaaagcttttagctatgatttaggtagaggttttagagtctatttgttacttgtagagttttttctagtctttttcaggtctttacatgttttagatgcatttgaagattatggagcattttggagcaaaacatacaatttaagctgcagaagcaatccagagacgaaaatgcacgtaggtgtcgaacgacaccacccctggtgtcgagcgacaccaatacctgacggcaattgaaagacgcaacttattgttgttttgaagattttttgaattcggcccaaaactttctcctatgtttaatgaaggcccaacacgttcttaagacatatttatatagctttgaggttaatgtttagaccctaagctttgggaggctattccctttttcaattctgtactttgggagcaaaaccctatggagactccctgagagaagatccttctaaaccttattctcctcttgctttattcattgatgtcttattcaatcatgttttgttcttctatgaacatttttgagt

SEQ ID NO: 33223 - DNA, 9480 bp, Arabidopsis thaliana landsberg
  unsure (1)..(9480): unsure at all n locations
ctctagacagcttcctccgccgccaccacggccgcagacgcctcctactttcgtgccagaagaaactcagccacagactcctccgccgccaaatcaacatcaaactcgttccatcttcacacctacccctcaagtaatttcctttctactttgcatttctgtcggaaagttttcatttttaccaaggaaattgatagacttttaggcctaaaatttgtactctttattgaaaatttttggtgggtttgtttgaaattagttaggatctctaagttggtaagttaaagtttccaaatttatgtttggctgcagcaaacgttggcatcattgaattcaacaaagtacacaaacaagttctttctgctgctcttcatctttcacaaggttgtggctattgggtttgtaggcttccttgtcttcagaggtgtccaaggtctaattggatccaacggtagcgtcaaacggaaagagcaaaagatcctcagattcttacttccacaagtcgaagctgcatcgctcttgagcatcattcttgcattcctttggcaaatggcattcaggatttggcctgatttcatgattcacttcatactttggagtacgtttttgatgtctttatcctcaggaatcctcttactgtgtttccagatgccagccactgatgctgttggggtttgcctcattgccttctcaattggcaatggtttatatgcttgctgggtcactcgtagaatcaagttctgttctaagattttggtcaagtcgttagaacctgtttccaagttctcggatttgaatttgcccacctactacatgctagctgctggtttcctctggatgtctatgtggattttcggtgtcatcggtgccttgaacttctattttccgccacttgtgattattggtttggtgttaagtctggcttggacgacagaagtgatgaggaatattgttaatctaactgtgagccgggtcattgctttgtactatcttaggggaatgcagtctagtaccaggtttagtttccaaagggccttgtctcgtaacctcgggagcgcgtgtttaggatctttgtttgttccaacaatagaagccttaagaatcttggcaagaggattaaatttgctaaagggtgaagatgagttcatgttttgctgcgctaattgctgtctcagactcatggacttcatatttgaacatggcaatggctgggcctttgtacaggtactataaactaattctttaaaccatgccactcccactctcttttcttaattctttaaacctgctgcagtcattttgtttctataataatacttcttacagagaatcagtctagtaatagtattaaaatcaagttgattgtggtgggtcttattttttatatcatttctgatatgagaatcttgcatcatcttgacaagtcgaggcacaaccacatgctctttttgcatttatagtcattattttgaattagaaaaatagtcatattgaatcaatagtattgagctttgagtggtaacaacagacggaacaaacttagactagatcactttttcaccattcgaaagtgttttgtaccattggatgtttacttgtttaaaccgtattgttgttacagatagcggcttatgggaaaggatttgtgagggcatctcatgacacatggaaactgtttgaggatgaagatatggttgaaatagtacatgcagacataacacgctccatatgtttccttacaggcatctgcagcggctgcgtttgtttaattgtcgcagccgcttggactcacggggggtacaaaccttttacagccaccatctctttacttgccttcttcattggatacctcatggtaaattacactttgaacttttcaactctaaaatgtttgattcaaatagtattctcatcatattttttggattgttggtaacagaccaggatctctatggcattgcctcacgcctgcgtaggttgctactacacgtgctatgccgaaaatccggaaagcagattcttcgaagacaaagtgataaaaactaggcaagatatgatcaaaagtggccgtgttgccgttaccagtaccacccctagagttcgccgtgctctagcttagcctgatcatctttttttccttggtgctaaattttcagaatgaaataactagtttttttttttaaatgtatttaaatttgaaaatgtaatttaattacagaaagagtgaagagccaaccaatatcagtaggggtggggaagaaattgtggatagagataagctcgtgacatggacacaatccaactaatgacccaaaagccaagttggttgagagctttttaactttttattttttcctttgttgttgttgagacccctcaattactttctgtacataatttattcttttgttccttcctgtatatgggtatattcctttcttggttttggaaagtagtgtagttttgaactttaatgaactattagtaatagtggtacatcttgttaaagtacttcaagctttagctagctttctgtatatgggtatatatttctttctcttacttagcttcattgagttcagcaacagtgatctctttctacttataaaactttttagtcttaaaggcccatcttgaaagaatttgaaacttttacaagaatcctatcagttttataacatcttactacaaacaatcataggcccatcagtttttcagttatcaaagcagagaggcccattttacaattatactaaacgtcatatgatctccattcttcagagaaacaagtccaatcttatcatttacatgaaatctaaaacccgccacgtgattcgtcgattacacagaacccatatacctgaagaaaaaagaaaaaaagaaaaaaaaaagcgaaattgttgtttgaacgtgtggtcgaattttatcgtggcgctgaattagcatccacaagtgaagaaaacagagagagaaagacagagagatctctctctccttcacacacacagatacacatggccatcgcgagcgggtcatgggtagccactgtgaaccaccatgctaatccccacagcttcacttctccgaccaaacccattttctttctttctcaaaagcctcacaatttccatgtctgctcgtctcgatgctctatggttcttgaggaagatgaaaagaagtcaccgagtcctaaagaagacaagtggccattttttgaacctggtccgaatgaccttaaccgggtcttatccaggtttctccgagacccggaaactcggaaactttcttctgaattctacgagaaagctaaggagaactctgagttgagaacgaccaagcatctgataagttacttggtgagttccaagagttgggacttgcttgtttctgtttgtgaggatctcagggaacataaagcattgcctgatgggcaaacgtgttcgaatctgatcaggagttgcatcagagataggaaattccgaatcacacattgcttgcttagcgtgtttagatcagacaaatcattggcggtatctgcatctgatgcagcgatgaaaggctttaacaaactccagatgtatagtagcaccattcaagtatttgataggttgaaacaatctgtgggagttgagccaagcccgggttgttattgcaggataatggaggctcatgagaagattggtgaaaatcacaaggtggttgagttgttccaagagtttaagagtcagaggttgagtttcttggccaaggaatcaggctctatctacacgattgtatgctcgtcccttgcaaaatcaggacgtgcattcgaagctctagaggttttggaggagatgaaagataaaggaattccggagagtagtgaattgtactctatgctgatccgtgcatttgcggaagcgcgggaggttgtaataaccgagaagctattcaaagaagcaggagggaagaaactgttaaaggatcctgaaatgtgtttgaaggttgtactcatgtatgtccgagaaggaaatatggagacaactctagaggttgtggcggcgatgagaaaggctgagttaaaggtcactgattgcatactctgtgcgattgtgaatggattcagtaagcaaagaggctttgctgaagcagttaaggtttatgaatgggctatgaaggaagaatgtgaggctgggcaagtgacttatgcaatagccatcaatgcatactgtcggcttgagaagtacaataaggctgagatgttgtttgatgagatggtgaagaaggggtttgataagtgtgttgttgcatactcaaacataatggatatgtatgggaaaacacggagactaagcgatgcagtgagactcatggctaagatgaaacaaagagggtgtaaacccaacatttggatttacaattccttgattgatatgcatggaagggctatggacttaaggagggctgaaaagatatggaaagagatgaagagggcgaaggtgttgccggacaaggtgagttacactagtatgatcagtgcatataacagatcaaaagagttggagagatgtgtggagctttaccaggagtttaggatgaacagaggaaaaattgatagggccatggcaggaatcatggtcggtgtattctccaaaaccagtaggattgatgagctaatgaggctgttgcaggacatgaaagttgaaggaaccaggcttgatgctaggctttattcctcagctttgaatgctctgcgtgatgctggtctcaattcccagatcagatggctacaggaaagctttgacgctgcacaaactagtacttcaaaatattcgaatacaaagaacacaggaactttaagttgaaagggaaaactgtacaagccaagattatttttcttgtaattaaatgtactatattgccaatagagatctgctatcttgcaaatagaagatttccagcttaagttgtaaagccttaatgaaagcttggaatttccaaaatgatacatcaaaaaaaggaacggctaaattttcaatacaaccaaagaaagacaaaggagtaacacagagtggtcaccaaatgtatttgtcactcggaatcatatgaatggaaatagtgagaagtactagagcgagccagtgaacccacctcaatatactcataattatctgctttcgaatctcatttggaaactgctttaccatctacggcttgagctgtttctacaacttttgcatcaccagaacaacatcctcctccatggtgatgatgatgaccgtgggcgtggtgatggttctgcttccccttgagattcttccgcatgtcataagcatcctccccatcggcgtagtactttgcttctacatcattaatcttgtagcctaatgtctcagtgtatagattgaatgctgctcggttacttctcctcacatgcaacgaaacatactcagcctcgtaaacctgccacaaaaccccgaccgagaatgaatttaaaaagtccaagttcgagagtgaaaacaactatcaacctttgaggtctgctattattagtttcacaggcaatcagaaactactcgtctccgtcagtcaaaagcataacacgatcggagacaaaacttaatctctttatacaatctacagagcttaagttgcttcaaattccaatgacaattgcaacaatcactttgacacacaaagtttctaactttcaataaaatcctttaacttacaccattatatcaatcttcaacataaactcaaaccacacaaattcttctatatcatccaattattcaacacgaaactctatatcaattcaatgaatctgcttaattgaatgcaaagatatacgaaatttgaagattagaggagtaacctgttccatggcagcttgagcggcggtcatgagcttagtggcgagaccgagcttgcgatgggtacgaagaacggcgagagaagtgatgtggccgtggcactcgttgctctcttcctccatcttagccaagacatagccaacgatgcgaccattgtagtcctcggcgacgtagagaagctgaggccatgagaggatatggtagaggtagtacttcatctggtagttctcaggaagacacatgagattgcaggcttgcatcgccagcagatcatccaccgtcgctcgcctgatgcaaaccatggctgctcaattgctctcgcgcggataaagaggggttagggttttcggtctaatgcctttgggctttattaatctggggacgaattgtaattatagagaaatatgaggtctttattgaaacttttgcttatattttaggggcatttaatgaaattcattataaactttttcagtttaggatttgaggtccaattgggccttgattgtaatggagtaggaagattccgataaccttcactttctataagcttatttctccgcaaattttcttactatacgagatgtcaaataactctgtgccttgtaaagattatggatttcaaactctcagctaggcatatcttttttataggagagacagtcgagaaataatcaaaagaagaaggacaaagagagttggtgcagagattagataactgaatcttctcttctttttgcaagtatccctctaaaattacttttaaaacaatcggatacttgctaaagaggaaacattagtagccttctcccatacttttctaggactaaacagagaacctttgtcttttggcttcaggtggagaatttgctaaactagactgatcccctctttctgcagtttcgctgctcgtgtttgttgtcactgaatcgcttgacgggctctctctttctccttcattcgtccttctatcatgtgcctctcccggcaaccttggagaaaacacaagtagtaagaattttgtaactccagttagtgagtgttaaggcatatgcataactaacagaggaggaaaaagacttatatttatcttaaatcagctttccaataatgcaaccaatgacagcaaatagacttaaaagagcaataccctaattgcaaagttgtgtctgaatcggtgttctggaggctgcatttactgtcgtggtttatgagagcgttctttggatctatagcaaagcatttgatgtaggatggaacatagtgggtgaacgacgggagaaagctcctcagttcttgaacctgtttcaacaagtaattacaagtcagaggaagaagcgttcattaggagatgattcaacaaaaataataagaacctgtctacgcaaggtctcgttttccaactctgctcgttgttcctgcaaagtatatatatggctaatcaagaaacgaattatacttttgcactctgtacctagttatataggagtcttaagacaaataaactgcacactagctagttagagcatgagcttgtcaaaggatagccactggttttaacaaggttcagaatcatgtgattacacataagcttacatttggaagctagagaggaaaagctagtgtttaccttgaggcgtgattcttcaagttggttagtcagcaatcgttcctgaaatcagataaccataatcaggacaatgcaaagagaaatgatgatggaagagtgatattactagttacctttcgctctctgacagtaatcaatgcatgatatagttgctgctcaaggctttgcagctctttaaaggtcagaggattcaagcccttgccctgcagttgtctacaacagaacagaacacacaaagccaaacaatataaacgaacacaaagtagagaagaataaagtaatgaacaagcatagtgagatttatttagtttccatacaaatgtttctcttgaagctttgaaagttgatcctttaaaatatccacctctgcacaatcctcctggaggttctaaacagcaatcagattttcaaaaaaacaatttcaagatatatgagacaagaatgaatgattctcacctctgctttagaagctgaagaactctggtgattaccgtatctggaaagtgtttgcttcattctaaaatcaaatgagaattcaaaattaggactctcttcagctcaatcagaaaacttttaatcttaacaaacatgcaaaaacaaaaatcaattacagttcccgaaatcgattctaatcacaacaagacaagacatgcaaaaacaaaattgaatcaaaaagaaataagtgttacccagtactggagtactcgaagagcttgccagacttagagaagacgatgacagcaacttcagcatcacaaagaacagagagctcacgagctttcttaagtaacccagaacgcctcttggaaaaagtgacttgtctgctattcgcattctcgatcctctttatctcgatttttcctcgacccattttcccccaaatttgatcagagagaagaaggtagaaggaagaagaagaagaggaaaggttcaatgtattccaaaatgggtttagaagtgctttttgggaatctattaatgggaacacaaaagattgctaaatttggatggaatatttttgtttttatagaaaaaagaaagaaaggtaaaaactcggtaatgaatgttgtgtgttgcatggccactgttttgcgtgctctcttttttcaattttagggttttttgcatgatacctttttgccacatttggaggattttgtcagttcttctgggtcctactttcccttttcttcctaaagttgtttttttctttcctcttttttccttccctttaaaattagatttattagtactagtgtattttctctttaatgttgttgtaagacataaatcagaccaacaatgttgaccgacataaaaataaaaaaaagttcagagcaacaattagaaacaatttcaaagtacccccaagaataaaattgcaacaactagcattgtttgatggttaccattatgttatcaactagtgagagataaaaaaacatactgagaagtaatttcttacaactagtgtagaacgacactttagtagcagctttgtaacaccggttttttttttttgacactcaaatcaataaatagataacgagattttatcagagactaagaaacaaattaagaaaagaagcagaccaaatctcatgttggatatatagcctgtgtaagtaagtttctcaaaagtggtttggatagccttctaattcagtcccttatttgttgaccgtggaactgacaaaaatgagattcaagctaagggaagaatatggtcaaggatacgactttgcctcgagaaaagtaaccaatgatacgtcttttcaaacaccatacatgttcaataaaannnnnnnnnnnnnnnnnnnnttaacaattcaaatacactcactttcttcttttggaatcagagtaatttcaagctctcttccaatttttaagacaactcatatggcctgcaatgtcgccttcctatattaatctgaacctgtggattatatacaacaatgcangagaggagttctttcgatttaggtgactaac

SEQ ID NO: 33224 - DNA, 2716 bp, Arabidopsis thaliana landsberg
tttatgttagtttttaacttaaccttattcttttgattcttatattattgctttaatggaaattttcatatacatgaatttgctccttcaccaataagacttggaaaaatatatttgagaccacatatattgagtgtaggtgttaaaggttttgtattataaaaacccgaagtattttttaaatgtgggacatgtttgttacataattaacaattgcataattaaagcaattctagcatcaaagcaaatttagaagaaaaatgaacacaatgtaaaaaggcatcacatagacttattcattttcatgaaaacaatttaagattagtaacaagttcttggagatatgacacgagtaataattcgatcatgaatcttcaaccaatctaaaaggaaaagttcaaacttgcataatgcaagaaaacatattaagactataagcattatcatcatccaaatgtcaatgcaaccaaattaacacaaaaatacagaaaaaggtgcttaggatcagtgattgtactccatttccaacaacaaggagggtctccctacacgcactcctgaggcccaaatgaaggacaatgtcttggtctactagaacccatccatgtccactcagagtgtcatctaaatgccaagatgcatcgaattgacaaacattccgatccaaggggagatgaacagggtccgacaaagggggaggatactcagaaaccaattcttttgagcatgcttgatgatgcgtgtaacgcccccctcgctctatggccggacaagccaagggcaacccgaaaacgctacaatgatagctcatacagacaacccaacttaggttccaaacaaatttagacccttagccggattaccgacatgaaccatccctcacgaacgcggtttaggcttttcagcccttgccatgatcgtgagtgttgtcggcccggacaaggctaatattgaatgaaacacactcttcgaatggaaataatattttataacatataatttctcgtagaaccaagtaaccaaaacgttttaacaatggcgcctcgagcatatacgctcaaatccaatcaagaaccaaaaactattaagttttgcaaatagcaacaaaactctatatcggctatcctacgtcccgagcatccctctaatggttcccactaaggtttcctgcaaagcaaaatggagtcataagtaatctaagattacttagtgagcctggtctacctgaaacagatattaactccccatcccaaaacacgcatcagagaatggcaacgaaagtagcttgccgaagcaattacagaaatatgcaatgcactaagactccagttttattaagttttttaaagggcccgatatgctgcctttaaacccaacaccaaacacacacactctcgtgatctcccgcgttgcaaccacaaaggtatgcaaccggagcatcactaccaaacgctacaccatcgtgtagacgctcggccagggtagctagccccgtctctctgagttcttcgcacctcatggcgataatgtaacatcgttacaagaccccatgatagcacggttcactacgaaggccagacatatcatgatcttggcacgcttatggtctttgtctcctaccacaagcaccaagtaccaagaccccaaagtttaagatattatgaaacatacagttaaatcaacacatagaatcatcaatatctcatcacaacctctcaaccataagcaatagcataagaatctaaagatcacatatgcaatctaatataaccattcacacaattgatataactcatgaaatcaatcaagaatgcatgagaatatgattctgaaacttaaacaattttctagaactcactcagtaaccaacaggatgcgtgcaacgattcggaaagagtttttggctacaggaccttaacttgaatcggacgaacggtctttaactcggcagcctctcactttcgttcactttctcttcacaaatcattttgggtcgagttgggcttgaataggcaaagcaagggtgtgtcagcatgtacacatgtcaaacgcatgggcgagtcagcaatccacgtgtcatccgcccgtgatgacacgctcaccgctttagaggatgagtgacatgtggccacccaaacttcggctccacgcaactcaaattcggctccacgcaactttcttaggccccaagttagctgagccacgtgtccatggtgcggttaaatgccccaagtatttgatcatggaactaaacaatcaatcaatcacccaaataaacacccaaacctatcatgtgccatatcacacgcttcaagactcacatagattcggttgaaggtttaaggtgagcttcaacaattctcggacattccatggcttcctaatcttgatcccatcgcaatgtaactctcctcagcttgagctaacacctcttgatagaagcaaccttgattcatgaagctttactccgaataaagatttatgggacgggttcctcggtaggttctcgatcagacaggataactgaatagatttcttgctcatgggcaggaattctcgatcacggacaggaattcttcagtgacggtcaagaatatcgacggtaaggccttcttcaagttttctcggtcggatgggcagttaataacgcgacaacattgtaggtctctctcgctatttcctctgaaaatgcttaaggccggatggaggttattta

SEQ ID NO: 33225 - DNA, 546 bp, Arabidopsis thaliana landsberg
aatgccattttcatacatctagagaccgaataatttatgttttattttgtggattttcttttaaaacgtcggtaatgggtagacatataatataatatacatatgaatgtttacacatatttcattttctttgtaagcaatattaggcaacgttcaaacaaaaatttgcttatgatgaaagaaaatagcaagtaacaacacataagatgaatttgaatatttgagtgacgacccatcaacatttttttattttttttggtttaatgacccatccacattcatgagcagtacgtaacaatcgctaacacatctcagcccaactggctttatatctcagaaatgcttataaaaaacaatgacaaataaaatataagaataagatcggtggataaaaacactaattatgataataacaaacatgaaatctggaaagggaccagagcttaaagtaaaaggagaatttgctataatgttaaccccatgcgaaaacttaagaggattcaacaagcagcaactcaacactcttctgttctcttctttctcaac

SEQ ID NO: 33226 - DNA, 3626 bp, Arabidopsis thaliana landsberg
  unsure (1)..(3626): unsure at all n locations
agtaaattctttgagtggcaatacttacgtttttggtctgtgcatcgatgttataggggagtccaacccaagccgagtatttcatggtctcttccacagttatcttaggggaatgaatatcaaactgttcacagtaacttgatactcgtgcaaatgtgtcttgaaccttaggatacccgcctactctgatctctcctttgatgataccgcgggttttccttccagaaaggacatcaacaagagtcgttttccctgctccactgccacccatcagagatgtgagaacaccgggcttcaacgcgcctgtaatatcagagagaagttgccgtgtcttcccctaagaggaaagtgagtcgcatataaacctgcgttctgtttgagaatttattatctcgaaatattcatactgatcttaaacaatgtttacctgaggagtctcaatataatactggacgttttgaaatgtgacagtgagtggcttaaaaggcaagataacttttcctgtgaaaagatatatttttagaagggatacggtcaccactcaccacacctgctcaaaaataaaaggatgatgaagagagatacctgttttagctcgcgatgtgatttcaggacagggtttaaaatcttcttctgagcactgagagttcttcccatgcgagacaatagcacgggatctttgtgaatcttaacttaaaaagataatcttgtcaataatttaggtggatagcacttcataaagtcatttcaatagtgaacttactattccgatatgtcagggccaacgtgtagagggcattgaagaacaagacaaacccaactaaagcaccaaaagctgtccagtaagagtgcctaccaaaattcaatccacggacatctaacacttgttccccggctgtaatgttgccagaggttaactatagcaaaattaaaagcagatgagcaaactagagttccgagacttgtgtgaaagtcatctgaagaattattacctttctccaccgtggagagaaaaattcatttgcggttaaaccaatctcagcatatgacaagggagaaagccagaatccccaacccagccaagtaggcatggatgctgaaaatgagcattgtcataaatagtctgtaaacaaatcctatatactacatgcctaaatatcctcacaagtgcatggttttaatcaacactaaaacttgctaacatgcatggtggatgtatgataataatattgcatatagatgtaaataatatttcaaatttgtagaagcataacttgataaaaacatagttacagcaaacttacattttggaatcacaaagcctccaaacaatgcgagaagcaataccgaaatagctccagtaattgagcaagcaacaaatgtgcgacagattgacgctatagcgcgaaacattgatatacatgaaaggtggaatgtaagtaagataatgaagtgccggaagaacctgaaggaaagtaacacttaccattaagtaattagctctattaaatttgaattcatagttgaagttatctgtaaaagttgtttaccttccgacttcgggactgtaaccaatgacataatatgtcagtactgtccaaataaatgaatcaagaaccgaaagaggtatccttaagataatcgaaggaattgcatatgcccaagcaggatagaagtataaatctttctgtttgcagaacactcccaatctggagatagtcaaagtgagttctggaagcccatcggcaagaagtctaaacagagcagtgaacatagaacccataagataattcccatgacgagcatccctcgtagctccagcttgtagaaaaacggtcattgtgactaacgcattgaacactaactgcataaagaaaaaggttagcatacattggtacatgataaggaaaccttgccagtgtaacagaacgtaccagtccagatttgaacaagtaaatgaaagaattccgtttcatcaaaagaatttctctccttgagcaagctttaagcatctcccatttactgagtgagtattttctaaaacatagactatccttgcgagtctgggatttattaaacggctttgacagttcttcctttagcagcaacccaagatttgattctttaaacttattaatgaaggaatcaacagatatataactgtagggcttgtctctgtggcaccaatattgttcttggtcctttttcgacataatctgtagcagaagcatgtgatgattacaaatagatagggaaaatgatcaaatttacagccatacctcttggagaaagtcagcaacgccttttctctctggacacttaaatccaaactcttcaaagaatctgcagatatcagcgcgtggagcatggtaaattatctttccttcccccataagaatcacatcgtcaaaaagctcaaacgtttctggtgcaggctgaagaagtgaaatcagtatggtggcttcagctatatgtgccaactgttggagacatgacactatttggaacgtagttgagctgtctaaaccattggatatttcatccataaagagggtggtagctggacccacaacgagttcccctacagtagtcaacatagatatttaaaaactctgatcagaaaactatgaggagctgtaagaaagtgaaagtacctgttgtcaacctcctcttctcgccaccagatattccaggtctcgtggcatctccaactcttgtatctgcacagatatcgagtcccaggatctggaaatggattcataaaattatgtcaaatgcagcataaagaggaaaacagaaccctgaaagcaaattatgtccaaacctttaggatatagtcagtttgcaaattgtttttcaaaccttcaacagatgttgcctgtgatagcaaaggtagagggaaaactgagattgcctacgttttaacagtgtttaaagaacaaatttaatatttcattacttaccttcatgtaagcatctacagcaggatctggaatgatttcttggagtttttccattctactgatctctttcataatttctgtttaataaaccattgcttgttaatgtgaactgagttcaaaacacaaaagtatccttcagttcaaactttcagaaatctgatcctcacccatacggctttcgatgccctgacaacacgcagagaagtcaagtgtctctcttacactcagctcaggaatatgcagatcgttttgacttatataactcgacgttttctccggaataaactctgagagtgagcaaccattgtaacatacttctcctccaacctgtaaagtgaagacaaccttaatgatctccaatatattattttatattagttcaacaggcttatgtttttactctgttagtcaaacctttacagaatcggaaagttttccagaaagtgcttgtaannnnnnnnnnnnnnnnnnnnnnnnnnnnnnnnnnnnnnnnnnnnttctgcaagaaaaccaacacctcttttgaactctgtaatgaaaacctataaaaaaacactacatgcacaaaataaccagtcacccttcatttcttcttcagtgcaactaaaaggactagagaataacctcttgaatactttaccttccaggccttcgaatcctcac

SEQ ID NO: 33227 - DNA, 431 bp, Arabidopsis thaliana landsberg
gtgcgcggagctacgatacgccccacccaccagccagctatctccctcgcccgtccttcttcctcacctcgcttccggtccgtttctacccgcccgccgccgccaccgcattcagggatggagatgaaaaacatcgcctgcgccgtcctcgtcgccgcctcagcggccaccgtggcgctcgccgcggaggctccagctccgggccccaccagctgctcctccgccgtcgcgcccgccgtcggcgccgccctcggggccgccgtcgcctccttcttcgcctactacattcagtgagccggccgctgccggtcgcccggaggccgatgaaaatactaagcgggagagagagtgacatggctgccctcattccgatgcgtgagcatgtttttgatttcacacaccttttgtgctctttttctttgttccctctt

SEQ ID NO: 33228 - DNA, 895 bp, Arabidopsis thaliana landsberg
  unsure (1)..(895): unsure at all n locations
cgatccgatcctacgccgcacgcaaacgcacgacatgcgcgaaccccacgctgtccaatgccgcacgcaaacgcacgggcatccaatccaaccagaaatttcgctgtgctttgtgcgtatccaaacggaatggacgggaaccccgaaccccaaattgatccgatccactcaccttttttccccttctaatttcactttcacctcctccgccaccagttcggggaaaaggaatttttggagaaaattcccattggcccagcccagaatactcagccgcgcgccgcgaccttcgctcccgtctccggtctccgcctgccccccgtccccaacctatcgggagcgctcccgattcgcgggagagnnagaaatagagtgccccccgctctccgctctccgccgcggatcagcgccgtcgccgatcggaggccctcgcttccgccggcgggcgcgctgacgctngagatggacggcggcgcgggtgccggtcggaggagcgtcccctcctcctccggattcaggaggagggtcccgcccgccgagaacgggcacggccatgacgccccgccgccctccaggcggtcctccgcctccctctcccgcggccactccacgccgctgactggcgagaggaccgtgaaaaggctgaggttgtccaaggcactgacgataccggatcacacgaccgtgcacgaggcttgtcggaggatggcatcacgcacggtagatgccgcgttactgaccgactgcgatgctttgctctgtgggatccttaccgacaaggacataaccacaagagtgattgctcgtgagttgaaaatggaagagacactgttctccaaggtcatgactagaaaccctgtatttgttctcgcggacacgcttgccgttgaagcgt

SEQ ID NO: 33229 - DNA, 349 bp, Arabidopsis thaliana landsberg
ctccaacggagcggccgcgcgctgcccagggccggcgccggcctcgctgtcttctagcaggaagcagcagcagcagcccgacgacgccggctgcggcagcagcgacgaccactaccagcacgacgtgatcatgctgaggcggacgaggagcgggcgggcgttcccgccgccgatctccgcgatcggcaagggcgggcggccgtggctctgcctgcgggcgcaccgcgagggtggacgccccctgctgcggcagatgcgcctgccgtcgcacgagctgctgcagccctgcaaggaggacggcaggaccaaactcctcatgcacccggaggcccgaacgcggccatccggg

SEQ ID NO: 33230 - DNA, 312 bp, Arabidopsis thaliana landsberg
tggagggctcccacaccatgcagaacgactacgactcgctgaagctccacatcggccagtgcctgtcgttcctcgtcaccgccgacctgaagcccggcgactacctgctggcgcgtccacccggttcatcaaggaggtgaacagcatcacggccgtgatccgctacaagggctccaacgccccccgcggccaaggtcccggagagccccagcgggtgggcgtggtccatcaaccagtgcaggtccttccgctggaactgacggcgatgcgcgcgcggccctacaccagcaggcgtgctctagcgtcgacctg

SEQ ID NO: 33231 - DNA, 560 bp, Arabidopsis thaliana landsberg
  unsure (1)..(560): unsure at all n locations
caaacgccggcgcaaactctccaccaacctttacaatttcaattccccattccgcccacccgtcgacgttcacgtttatctcggtctcttcccaaggcctcgcgcgcggttgtttgagaggagaggaggaagatgagggagtgcatctccgtccacatcgggcaggccggcatccaagtcggcaacgcgtgctgggaactttactgcctcgagcacggcatccagcctgatggccaagtgcctggagatannnnnnnnnnnnnnnnnnnnnnnnnnnnnnnnnncttcttcagccagactggtgctgggaagcacgttccccgtgcaatcttcgttgatctagaacccactgtgatcgatgaggtgcgcactggcacgtaccgccagctcttccaccctgagcagctcatcagtggcaaggaggatgcagctaacaatttcccccgtggccattacacaattggcaaggagattgttgatctgtgccttgaccgtatccgcaagcttgctgacaactgcaccggcctcaaggctttctggtcttcaatgccgttggtggt

SEQ ID NO: 33232 - DNA, 3483 bp, Arabidopsis thaliana landsberg
atggtaataattttttttaaaaaaatgtgttcttttttgaaaattttaattttaatataatattttattttgaattaatataggtatgtcaactgccacggtaaaatcttattcagaagagaaaactcattctttcgatttaacagcgaaccctccaattgatttaaatatagtagatgaacttccacgcgatgaacatcttggagtttcacatgcagataatgtaattggtttctgtcaagaatgtgctcatcattgtttgcaaaggaaacgggttcttggtgaatgtcgatggtttacatgtcactgctctagaataactattggtgtgggattgtaatttgttctgaaatacttacatataaaataaaataacaatatttttttcttagcccaaggttaatcaaattaaaccggttgtactaataacttttaattaagtaaacccgctatgaatcgtaccaactcagtctcctccaaccactgtcaccatctcactaactcgtttagttacagcggcaatgattaatcctcttcttcacgcttaatttctctactactctatcattacttcttcttcaatgtagtttcatgtccctagaaattttcgttttcttctctttgaatcatctatcgttttctaagaaattgagttcactcttcggcgatggagcgaaactcgtcggacgacgaagaagaccaccagcatttgattccccaaaacgacactcgaatccgtcaccgggaggattcagtttcctccaacgccaccacaatcggtgggaatcagagatcggcgtttcagatcgacgacattttacatcgagttcaacaccgtgggaagatctcgctcaacaagcgttacgttattgtcttcgtttctctaattatctcaatcggtcttctcttcttactcactgatcctcgtgaactatttgcggcgaatttctcgagttttaagctggatccattgtcgaatcgtgtcaaagaatctgagcttcgtgctttgtatcttctgagacaacaacagctcgcgcttctatctctttggaatggtacgttggtgaatccttctcttaatcaatctgagaacgctttgggatcgtctgttttgtttgaggatgtgaaatctgctgtttcgaagcagatttcattgaataaggagatccaagaggtgcttctatcaccacaccggagtagcaattactccggtggcaccgatgttgattcggtgaatttctcatataatagatgtagaaaagtggatcagaagttgtcagatcggaaaactgtagagtggaagcctagatctgataagtttctattcgctatttgtctctcaggtcaaatgagtaaccatttgatatgtttagagaaacatatgttctttgctgcattgctggatcgagttttggtgatacctagctctaagtttgattaccagtatgatagagtgatagatatagagcggattaacacttgcttgggaagaaatgttgttgttgcttttgatcagtttaaggaaaaggcgaaaaagaatcattttcggattgatcggttcatatgttactttcatcaccacagctttgttatgtggatgaggaacatattaaaaagctgaaaggtttggggatttccattgatgggaagcttgaggctccttggagtgaagacataaagaagccgagcaagagaactgtgcaagacgtccagatgaagtttaagtctgatgatgatgtgattgcaatcggggatgtcttctatgctgatatggagcaagattgggtgatgcaacctggtggacctattaaccacaagtgtaagacactaatcgaacctagtaagctgattttgttgaccgcacagagattcatccagaccttcttgggaaagaatttcatctcgcttcatctccgcagacatgggttccttaagttctggtgagttttttttgttgccatcactccctttttaggctacagaaccttgccattgttgccattatgtatcttgatagtgtagctcacactcaattgattgggataccagaacacctttccacctggtttgttaattagtacatatctccatccagaagtttgtcatttgctttacttaggcacttctgtgtaacaattgaatactgtgctgattgatatagggactaggattggattttgacaaactgtgtctcatttatagctggctctgtctaatgaaatgatttctggccagcaatgcaaaatcgccaagttgtttttatcccataccacaagctgcagactgcatcagtcggatggtggaaagggccaatgctccagtcatctacctttcaacagatgctgcagaaagcgaaaccggtcttcttcagtcactagtagtcgttgatggaaaagtcgttccccttgtcaaacgtccacctcaaaactctgcagaaaagtgggactcgttgttgtatagacatggtatagaagatgactctcaggtaacgcacttattgctttgtttatgggccaaagatcttgttctctacttgaaccgtatctctaatgtggtattgaacagaaatcaattctaatggctatgatctagtaacattctttggtctgagaaaaattcgtagatattctttgacgagacattcacttgcttatgctttggtttttggaatggttaggtgtatgctatgttggataagactatatgtgcaatgtccagtgtattcatcggagcatcgggttctacttttacagaggatatcttgcggctaagaaaagactggggaacttcatctatgtgcgatgagtatctctgtcgaggcgaagaaccaaacttcatagctgaaaatgaataaacaagtaaacacattcgttaattttcctctgtttccatggttcttcttctttacctgtattatagtaggtggtttaatgtcaaattcgtttgattcttttccgacggttttgtgaattttgtcggtgaaatatagtttatttgcttgagaattttgtgttctataagaacagcttgattgcttttgaaacaagtaattataaaccaagatttattcaacacggaatgtggactaaattagtaataattgaaaacaagagagtaaatattcgattacacaggaaataaaagtggtgatttttcaatttaaccaaagtgatgaacaatgatcacaggttcagtgaaacaccgacatatatggcctacaattgatctcagcagagcatatcaggtgaaatttctgctgtcaccggaaaacaagactacattacagactacagatcatatgaatgctctaaatattgttttgacttctctgaggaacacaagattgttcgattcctctttatgtaaattttgagatagggaaaaactaagagagtgttttagacagtatgagctgcacggatcatcctttggtcaatatgtttgagtgagctcacagattctagaatgcttgacactgaatga

SEQ ID NO: 33233 - DNA, 714 bp, Arabidopsis thaliana landsberg
tgctgcatcaaccaatgaagtctcagctttgatttcttggcttcacagctcgaactcgacaccaccgtcagtcttctacggctggaatccttctgattctgacccatgtcaatggccttacattacttgttcctcctcagacaacaaactcgttacagagatcaatgtcttctctgttcagatagctgtacctttccctcctaacattgcttcgtttacttcacttcagaaactcgttatctccaacactaatctcaccggagctatatcttctgagatcggagattgttcggagcttataggtatcgatttaagctcaaatagtcttgttggtgaaataccttcgagtctagggaagctcaagaatcttcaagaactttgtttaaactccaatggcctcacaggaaagatcccaccggaactcggcaactgcgttagcctcaagaatcttgagattttcgataactacttatccgagaatctcccgttggagctcggaaagatctcgactcttgagagcataagagccggaggaaactcagagctttcagggaagatcccggaggagatcggaaactgtaggaatctcaacgtcttatgcttagccgcaccaaacatatccgattctttacccgtttccttgggtcaactatacaagctccagcttctatctgtctattctacaacgctctcaggggagatccctatatagct

SEQ ID NO: 33234 - DNA, 235 bp, Arabidopsis thaliana landsberg
cttgccctctggccaatgaggcttccaatcggaaggacattgaacttaagctgccgtgtagataacagcagatatggagagggcgcacggggggcgcttatacatgcgggctcgaacaatggacaagccaatcagcacgatgtggcgaccaatgatgctttgccagcgctcgctcgctccggcagctggagccagacaccagctccaattccatgtggcccgaatgaagactggt

SEQ ID NO: 33235 - DNA, 783 bp, Arabidopsis thaliana landsberg
  unsure (1)..(783): unsure at all n locations
gacgcggtctggatttaatctttgtttatgatgatgaatctcataatataaacaggatgagtctaacacgcggacgggtgaggatgctgatcatgagagtgaccatcatgagtcaatgggaagggatgaggaggaacatgctggaatgactaaggataaatcagagacggggaggcagaacgtcaagctatacgcagcggaaagcatgttgaatacaaagaaacagacagcatacaataagaataggaataaagcaaagaaagccggacctgatgaggaggatctgatggacggaaattatgatttcaaactggattatatgaagaacaaagatggtgaagacgacaaattccagatggatgctaaaaatcccaaaggctggacttttgcctgaagaatgagtgattggaaaccccaacgtttattataattttattatttgtatttggcgtttatgagtcggtcggttaaactttctgatatatgtgcttcatgaactagtagtaatactgaagcgattttgatttctttaattnnnnnnnnnnnnnnnnnnnnnnnnnnnnnnnnnnnnnnnatcttaagaacattcaaaaatcattgaggtaagtgtacttcttcgcccttcagaagaaagtaataatcttttaccctttcagtttcaggtaacgaatgacgaaaacaacacccgagttcagtacatcagatttctaagtctctctcttggaacttccaaactcgaccatatccgtcaaattgaattccaagttgcaaatgatgaaagca

SEQ ID NO: 33236 - DNA, 928 bp, Arabidopsis thaliana landsberg
ctaactcaaacttatggggttgttttagataactacgcgcggttataccatcgctacattgtttgctacttaggttgaaagtgttgctctcaaaactcaaaagcatgtgagaggctacgttcgattcaaaatctttacgttcagttttgctcaaagtaagtatcttgagaacattcgcgaaaagacattaaccgaagtgagtactagtgacatagagcttctccgactaaattcacagcctttccggcgagttacaccatgctcactcacagtcgaccttcaggcaaactctttcacaccaaaggtctttttcccatctagttgttatcaatggctctatttaaactttgtctaacattttcttttaatcaacactatttcaatattaacatgaaaacggtatatttttttcaaaaacagatttatatcacatttaatgtaatcaacgtttatttctttgttaacttatgttgtttggaataattcacattcttgcttacattattccacaattttaacgtttgttagctaaacatgaaacttattcttttccaaatctcaatctcaatttgatattcagcaaatcttatattatccgaaccccatattatctcaaattcgataaatttataaatcattttatatatacaccgtcttattacattcttataaataagagacaataactaacgtaactaactgaatatctcttacgaaattacgcaaaaatctcttacgaaacttaatcccatattatctcaaattttataaatcattttatatacaccgtcttattacattcttataaataagagacaattactaactaactgaatatctcttacgaaacttactccttgttttttgtcaaagctccaaagttacttgatgatgatgcctgaaagaacaagcgcaaagaaagatcctg

SEQ ID NO: 33237 - DNA, 524 bp, Arabidopsis thaliana landsberg
tcgtttttgattctgtaatccatgagatggaaatacaattgcggaaagaaaaataagtgcttatactaattaatacacatcataataatgcggataaatctagacggcaaaaaaataaataaagctacaggtgaataatattttaattcttattgatatgattcaaccgcatcctacaatataacccgtcccatttttttatttatatattcagatatttggaatatataatatttttatttgtttaaatatatcaataataatatttataaaaaataaaatttaaaattaactatataaggtaaaattaaacggtttaattaaaaaccaaaatcaaaccgtatacaaaattttaaatttaatgcttgttaagttaaccttggtgctcattcatattttgatttattttgtttttctttataatatgactcttaatctttgcttaaacattttagccggtgtggaaagttaaatacacactttttcttgtagccagagaggattcaaagaaaattttagaacaa

SEQ ID NO: 33238 - DNA, 1409 bp, Arabidopsis thaliana landsberg
gtccagaactgaatactcgaaaggctaagatttcttggttggaggtatgtaagcctaaacgggaaaggggtctgggtctcaagtctcttagagaattaaatgaagttagcactctacaatttatttggcgaatagtctcggcaaaaaactctctatgggttcaatggatatataagaatttgattcataagggaacactttggtctgtaaaggataacacgagttgcattgtcatagcataacaatcatatcagagcattacattgcgcattacaatcgatgttcaatgttaaagtttaatttagctgcattgtcatagcattacaaaacacaaaacatgcattgttatagcattacaaaacgcaccaaagaaacacaaagagatcaacaaagaaacaagaaagcacattttcttccaaagcatcaacacttacactcttccctacatccatacaatttagcaaagaattacagaggcaacacctactgtcttcaaagctgacttagccattacattacccagctccttcacttcactatctatcttcttacccatcgcatcctccatcttctttaactttttgttttggagtttcatagtagccatcacctacatcctcatatcagtgacatcatcgacaactttctttctcttctcctcgaccatcctaatttcatctaatagagcttcatcaacccatttgaacaagttctcttcgttttccctctacacatataaatttcgatgaatgaatacgccgttctctattcaatcaacattgtaggtaccaagtaaaacaatgcacctgaattgcaatctcgcatcgatagagtcgccggaatggattttcctttgtcttcgaagtgtaagtgatgatttccgttccacaccagcatgaagatgggactcctggaggagaataacgacggcccgaatttgaagcagttgagtggtagctcatcgagctcattgtgctcatcgtttcttaaccttcaaaattttctctcaagaaccctaactctaaaatccccaaatcgactcgattgagttaggtgagaagaagaagaatggaacgacgtcgtatggcgtttgggctgttttggttatggcccaaattgattttaaattggttaagcccaaatcgattttaaattggatacgacgtcgttttggttacagattaaatcaggcaacccaaattaaatagtgcatctaagttatggattcatgttttacactaagtgttgaaaaatgagacaaagaggaaagactctacttgcaggagagacttctatctgattaatctaattatactaattcaacagtcaattgtccaataactgaaacattctatgattgacacctcagcatactactctttttcttactctttctttatttttacgga

SEQ ID NO: 33239 - DNA, 787 bp, Arabidopsis thaliana landsberg
aaagaacttaacaaatgcatatgcccccaacttttttctagttggttttacttatatccctcttaggtgtatcagctggggcagctccaaaggacaaaataatactaaatactcctagataaatatgacaaatgaaatgaacatggtacatggaagcgtacctgtacagcagccaacggtgtatctcttgctgtcccagcatacaaacacaactccaccagattgatgacaacagaaaccttcattgaaatccaagcatcagttttctctgtctgagcagcattagtatcctcagaagtaagagtttcatgtaagtttcttgaagatgtcacaacattttttctcaatggtggcacagcatgtggaagctcagaaatattagactgtgcacactctgtcaagatctggtattccctatttgagagggctgctcttagttcgtctatctgaaaaagcagatatttcgaaaaagcatgagtaagtaagtattaagttacagactggatataaaacattatcctttacctcaatagaaacctcaatgctcggtatctgatgtaacaagtctcgcagagatcggttaatggttacagaaacccccttcacatcttgaattatgctttcacctatttcagctccagaaccaacattaaggttgatatccatgacctaagttaatgttttttcgggtcaaagaacaaaaacatttaggagagggtcataaaatataaaaaactgcacaaaaaagttgtaaagattaaagcgatatcaaccagaataaattatg

SEQ ID NO: 33240 - DNA, 7449 bp, Arabidopsis thaliana landsberg
gtcttgttttcctttcctgtttcccactgtttcctttgtctctttctcctgagataacgtcttgacgagtcgtgacttagacatctgtctttgtctgctgttacaaatatttgttatcttttatttgcaggtcaagcaagcggatgaacttgaaaacatactaaccaaaaaatttcttagattcttgtccatgagggcagaagcttttcaagtactgaggaggaagccagtgcaggtagaccttcttattgattcaacacttaggtacttgtgagtgctactaggttatatctagaagttgtaatgcattccctcttttgtcgaacttctattttttttaatggtaaatgcatcacgaattgattaaacataacgcacacagtattcacaaattttcctaattttagctttctgtgcagacataggcttaggatgatagatagtctgtatgtaccacacctttcctgtcttttcccttgtatgaatcatgaatcatctcactgtgcggaaatgcatgccttggctttagatgttttactgtttattcccctgcagcgtgtgaacgattcattccctgattcccttcaattggtttctttgttggtcttttgaacagggctatgacataagctttcttataacaaactaccactgcgaagagatgcagaaacagaagctaattgatttcattattcagtttatggaggcaagtctctctcgaaacctaatctttttattctatgaccttggttgctcccattagtagcatcctaacaatcaatatatgtcttggttgcatcaaacctaatgttagtgatgcatccttacgtcgttgtgtttctcacggaaataacttgagaagtagtattctgaatagttgccttaacaaaggtcattatatccgtctttgaatttgaattgtttctacaagagtcaaaagagattagttactctgattatgtcctccaacatgctaatctccgcttaaaatagatttgaaacttgaagtgtgactattttttaaccatggaaattgcaggatatagagaaagaaataagggacttgaaggagtcagtgaatacaagaggaagactcgttgctacggagttcttgaaacagttcatgtaaagcagctcttgaagtagtataatgtaacccttcattgtatcaatcactcgttatttggttaaaatccatctactcttcattttgctactttctctgttattctaacacaaccgaagtaccgagccatcggcttggtaattgtagtgtatgtaatgcgatacttatcaaatgtggtatgttgatcgtagatgttcgaacgtaccaatcccagaaaccaaaaagttgttttatcttaccaccaaagaccaacaaattgttcatctctgacagaacaaagatccacaacaaaggaaaaaacgtcgtcgtttcttttacacggtaacccaaaatatgagttactgggctgggcccattattgaaactaataatatggaaatttattaatttgtttgattatttcctaaaagaacgaacgacgccgtatacaccgagaagctcaacgttcgtcatcactcttctcgcttctcggcgtctccatcgccgtctctatctaatttcgtcctgcgtcgacctggtgagctacttcagattccggccatcacgcagctccaggttagttttgatttatgtcaaacaacgaatcggtgcgttgtgcctagaatggaattgatttctgggtttagattgagaatttctacggtttaggaaacgttatttaggtcatacgaatctgttgtttgtagaagatgcgacgaaataaatccagtcacatgaaagagaactagtcttgaactttatttctgctctattatcaaattgattgagtcgatctgaaattcacagattaccatatcagcacacaatgttttgtgactaatttcagaagacaatgttattagagattagaaatggattcctcaatctttgttctgcaaagacagtttctcatactgcaacaaatggcatgattcaatctcttatcttcttttggaaccacgagactggagtagttccatactacatacaagacacaagaaacatgagttcatgttattttatttaatgtaaatgtatagatactttcttctagtggtgtaattattaaacaatacctctttgtttatcttggattctccgttttctactggtggaagatcgccaattgtgtctctcaccgtgattgaacggaaaggtgcaccaaatttagtattacgaacagcatcatagcgtaaacctcgaggtaatgagattttactgccgggattatcaaagacatgcattggctcaggccattctggaagaacttcttctggtgaagctgcccaaattataactcttttacgaggttgggaaactccatatgtacctgcctccaagattccaaatcttacctgggaaacatcatagaaacatcatatttaagagatttaagtcaatttttgtacttcgcaaaccattcttcacagagcatgccaacttctactaaagagaaatcaatttaacaaaagcgttaggactttacctggtaacccatttcgagaagggaagccaaagtaagctgaaatgtctgccctttattgaatgacacaaaggtcctcacgttctccagaagaaaataccttggccggaaatagtcagcaaaggacaagaatgctaatatcatttcacactgaactttactccaagagctttggttgaacctgttcataccagaaaatccctgccaaattgcacaggttaagggcttttcacttattcaacgaaaaatttacacaagtatagccacaatctgaaatatatacctgacatggaggtccaccattgatgaagtccacttgaccaggcagtggcagagtactcttctgctcctcagttagtttagctgctaattcatttgcctctgtagtagagacacaatcatcttgatctccacctttctccattatagccctgcaattaatcacaacaactgatcacaatgcaaaaaatagccacactaaaagagtaagcgataacttgttggctatttacctaagaatcacattgcagttgtcaacaaaaactgttgactcaggatggttttgtttaaaagcctgcccagctggctcttcatactcaatcgcccactttgcatcagatacaccttttacatatagcatgaatattaatacaacttattcaagcattttggaagattaagagttgactggatataatacatacccgcctttttcagtccatgagacaggccaccacaaccagcaaaaatatctagagtagccagacgaatctctttaggtggctcaacaggcttgacaatctcagactcaatttcactctctactccctttccctttttctttcttaaaagtgtgtcgtccttaatagtagagaactttggcttcatattggcgggcagctgttacaagacagtatagagaaaaagttcaactttgtatcagaacaacaataatcataacatataaatcctagacacaactatatgaattccttaagaaactaggtacacaaataattgacaaatacgaagtgaagagaggtatatacctgcttgagagaaccttatgcaggtgtcaaagaaaagatcacagaagaaaatatggtctgatattggatattcacgggataagggcatatcacttttctttcttacttcacattttccctctagagcacctggagggagaacaactgtgtcctggctgaaatacaacttaagaaattgcaaaaagaaagaaaaaagattgtcagataaacttatgaagaaacctcaccactgaacacattaccagatataaaaaatagttcttacttcttggatgtctgaagcataggccttctctgcagaaacatcctcaggcctataaaaccttctcactttaacatcaaaggaacccaaatcagcctttctagattcctttggaacaatttccagcaattggcaaacaacatacgctcttaacccaatgtttcgcccagacttaaaagaagttttactaccctccttcaacccaccaatagagtcagggttgacatagacaaaatcctcaacagaatactcaatcccattgatgaaaaagcctgtctttgaaacatttagtttaattgtagacctcttctcttcatcctcccttatcttacatgaagtgcagaacccagaaccaagaccaatatcattccttggaagactaaagaatccacctctctcaggtgagtacaagcttttgcagtagtattctgttggcaaaccattagcttttctttcttctgctcttgcccggtcaagcttatccacaacgaggttctctttcctatactgatgcccccacggccttgatcgaatatcgagacttactgttccttttatgtccttaagctggacagtaagacattcattagtcaagaacagttccctctcgttagcagccgttcctagaacagtctcagatcctctttgtaagagtttcccatgtagcatcttgcactgatctgaactctcgaacatgaactccacaaaatagatcgccggagtatcatcttgatcatcaacttctaatatgacagcactacctaccaccaccacatcccctccaacaaaggctcttccatagagaggctcaccagcagaagttttgccaagaatctcactatcccattttatttccatatcttcagaaatacctttaattttcttaggagtaggagaattttgaatctcaacagctgctagttcattctcctctggatcatcttcctcattctcgtcctcctcttctacctcttcaagctcctcttcctccacattttcagcattaatggcctccgatggaacctcaggagagtaaatggagtaaaactctccccaaattctattaacgaggcgagttgttgttgcttgcataggtttcattctggataccacaggagcaatccccgccctcggattcaaattctttcccttttgcagaattttcttcttcttcttgatgatccattttgcgtggtgtatatcctgcattttacttgcaagaccagtaacaaatggacaccttttgatatctttgtcaggatactctacgaaaagctgcaagataatttgtccatggacgaccacatatctctcaacatccaagagcttataagaaatgtaagctttatcgttctcctctaactcacaaagtctttttatgacatttgcatatgaaagcttagcaaccctactttccctcatgagcatattgaaaatgcttatggctacccttactgttttcataacagttccaaaccaaggagcatattgctttgacggtttcccaagtcggtacctgcatagagacaattgaaaaaaaaaactttagttcatataagacaattaaaaataaataattataataacaatcatcgtcccaaaaagtaaataaagaactagtaaaaaaaaaaaaatgttaaaccctttactaaaaaaaaaaaaaatcaaattaataaatacatcatttatgttgcataatttttacaaaatcactacccaatttttcaaagtcaattaaaccaattcttttcatataaatatagcgaagttggtcaatatctccgcatacttgaacaaatataaaactctatcaacaatttgaataatttgagaatttgatgcaaccaaaactcgattttaacaataggcaatagcctgatccgcaagcaacatgagtaacaaataagggaaaaacatgcaatgaaatatagaaagcttaccaggccatatctatttggattgtgaaaaagaccatttctgcctcaaacttaaccacacattctttatctgagtaaggaaaatgttcatcccatcatgatcatttgactgcgtagaggtctccgaatcatcgagacaaaacccgcttccatcatcttcggccaccacacctgacccaaagacagtgacatcgatctcagcacacggcctcatgggaagaacctctaaagatatcatccgtgaatcagagttgtaaagagtccaattatgcagtgttctgcaaggtaggtctcttgtatcaacctcatagccagcttcaaagagaacaagctcatctgtttcttctttggtgttcttatagtaagatgggagaggataatcatgggcaatctcatcttcatttatcttaatgtagaacttatttggagcagaagttgttgaacttctcttatttctcgaccgatccatagatttcctatgttcttcctcttgcagtagtttagcatattttaggtcctcgtcctcaccaccatccattagttgatcagatgtcacgaccttgctctcatcaatcctcagagccacattagacaaagccttgtgaattttacgactctcatctcttagagaaacaagaacacgattctcaacaaatttggtttcatgattcttggatgtttcatccaaaccagcgagttggttatatatgaattctccttgggatataacaaactcttggatgactccaccgctagaaaagatctttcttccattcatcgacctaacaaccgcagcaagaagctctttaagacttgtatcaggattcgtggacaagttcttacatacctccacacaagcacaagctttttcaaagaaataatcatataatttcttgtatttcttagaaggtttacggcaatcataatccgctatcacagttgagatccatatcaccggggaaccatcttcataaccagatatagtccagttctctacccgaccaaaagattgaaacctcacacctttttcttccttttcgtcatcacctaaaggtaagacaacaccttcaataaatatgtcaccaagttccagcatctccacaggctgtggaactccatttgaatcatataaaataaaatcagtcagcctccggtttggccgaggttgatcatcattgctctccaaagaagaagttaactgtatggccacgatcctccccgccaagatctgctctttcttagcttcaacagtttcagatttgtcagagatacggagagatttctccttgaagtttgtgcaagctgctgctcgctttggtctcctttccttagagacatcatcatccgagtcaacacttctcttcttttgctttccagcttttgtctccatttccatgaaaagacctaattttgaaacaaaattatctaaatcattagcatgcactttaaataagtaatttgcaatatatgtaattaaacccctccaaatgagtgtttctacatcacatagattatatcgacgtaacaattaaatatcataagactttcaattgaaatccttcaaatctagttatgaaattgacaataaaatttagataaatgatacaagaaaa

SEQ ID NO: 33241 - DNA, 661 bp, Arabidopsis thaliana landsberg
aaataattagcggtaagccaaaaataatttttatgtgtttattaaaatatgtagtttggtgcataacaaataatttgatatgttggagaagttaggtgtgtaaaagttataacttaaaatagtatggaatttaataaagagaattgtaaattaaatatttggtaatgcaacataatatattctttataaattaatatttggatattgaaaacatggttttgcaaataaatgttattcaccggcccattagtgttggtgactgaattgttttgggccaaattagaggttaataatgacgcaaatatacattatccttaacccatttatatttctgtttcattgaatattaacaaagtatatattttttattttttggacattcttttcattgtataaccatagttggcttatcttaaaaaaacatacaccgaacaaatataagagcatcgctcgactccagtataattggataatctcatgtaaatctactataccgcgtccgtatataaaaaggtaaccttgctcatgaaatcccaatatgtgattacatttcttttgaaaataggattaaaaaccacgatcttctctatgggtaatcattgtcaaaggaatggggatgagataactcccactttgcactggctttgacctttgcatgctt

SEQ ID NO: 33242 - DNA, 441 bp, Arabidopsis thaliana landsberg
tccgcgttcttttctgaaatattttatcttcatttacagcgacagcttgaatgaaatgctctaccctatctagtaaaacctatcaatggagaaaaaaagaagttgtcaatgggttaacgattaaaagaaatgaagcccacggatataatgcagttccgattttcattagtaatcatatagccagactaaatagaagcgagaaaatagtttccacaagataactgaccatttctacagctcatacaaaatagggtattgagcaatgtcaagcgagaatgaaatgtgggagaagattaaaaaaagaagcaataacttacctcaccagaatctgttagatagcctcccatacctgtaaattcacatttcaccaaacacgcatcagcaagtttatagccccctgaaataaaaaagaaagttggtttaaagcaacagactaattcc

SEQ ID NO: 33243 - DNA, 1538 bp, Arabidopsis thaliana landsberg
atcttcgagtactaggaagaggtaatctttgaaatcagtgttggaaagcttttacccgcatgtgtcaattagctgtttgggtcactaaactagttcaggatataaaatgttcaatgttgctctgaatgtgtttgaaatttaatcacgtgtttgattgagaattctcttggcaaagaagcacttatgtgtttgttaagtgtttcagaatattaaaacagtttgggcccaagcctgtttcaagcccacggtttttcaaggaggaatgctcgagcattggagggaaaaagaggagttagggtttgaggcatcaaatcaatttcttatttggaagtcgagaaggcaatcctctgtgctcaacgcaatttcgagtgagatcgagcatgaaattacttctctccggtctgcaacgcctggttcaacagaaagccgagtccgaatcttctgcagacatgtacggtgcacaatccagtgattcgctgccagagatttcacatccgactgcagcagaatgtcaagaggtaaaatccgatgaagtgcttactgaacccaatcttgattgggctctcgttctcgtcaaagatccatcgcccccactcatcatcgaggttgaagttgagactctgccttcaatcgacagggttcaaaaccctaaaccgaaggatcctgaggctgctccttcgtaaccctctgttgcatcacgattgcgcaagaggaagtcatctgcagcggatccacgcaacaaaaggatgaagcaggacaagggaaagggagttgccggttcatcttccttcgatggaattcgatttgtctctgcagaggttgaaaaaggtatgctcaattctctcaacgcaatttcattgaggaagtagaaatgtctaggaagacaaatgaggcggctagggaatttatagagcaggcaggtctgattcgaacggttactaagttccaaccgttcactgagaatctagtgtttgatttctgggctaatctgcccactatgaaggtagacacgtataaggtcagagtcttggtgcgcaatcgggagtatgagctctcacctgggaagatcaacgagatgtatggtctcccttctgttgatgctagacagcagcggatggatatcgctggtctggttgatgaacaagtggctgagtttctcactggtgggaaagtcagtgttctgagcaagcttcaggtgagtgcctttacacctccgagtctggaactatttaaactctgctgctcaaattggtctcccacatcccacgctggatatgctcagcctgatcgagccaaactagtgtatatggtaatgcacaaaataccattcgagtttggacgaatggtcttcgatcacattctgcagctagtattgaaaccagacatgaaactcttcctgccatttcctcacctgattgatcagctgattcagacgcaacggcctgttcagattccactccatcctcctgcatccgccacatcgaccatttgggtaccttttcagaggagatatcagatgactctcgatgtagcgagca

SEQ ID NO: 33244 - DNA, 12322 bp, Arabidopsis thaliana landsberg
  unsure (1)..(12322): unsure at all n locations
agaaaaacaggtctatgcttgaggtgaaagacaaatttaagaaacccatacaattttatatggaatcatttcgtagaatatctaaatgttaagaaaatgttggttttgtgatcgagtgtttctgtatagtgctataaaaatgtttgatgattttggtattattatgagttatatagtaagagatcaatcgtttgtactaaacacgttatgtttgatcgtttataataatttcggcatatattaaacttgttaaagtatgtttaatctctgtaatttatgtttcttttggtgaaattatctttcccttgcgcgggtaaaaaactcatagctgtattaaataaaacaaactctagttgtattaaataaagcgactaggtgacgtgtcgaggcctgcgcgactgcgtttgccacgtctccgccgcctcctccgattcttttttaccgtagctaaaatgccgatgttgtcattcatcaccgaagaatggccgccgaaactagcatcaggaagctcccatctctctccggcctccgtcaccgacgtaatccactggaagataatccctacttccacccctccaatggcttctacatcactccttctgacgtcatcctcgcccaggtcgcctacgacctctccgcccaatcccaatcacgcgtggcctaccacagggctgggcctcgccgtgagatcatgtacgagccatcggctgtgaaggcggcgatcgtaacgtgcggtgggctgtgccctggcatgaacacagtcataagagaactcgtggtgggtctttgggagctgtacggtgtgagagagatatatgggataccagctggttacagaggcttttattccatggaagccgtcaagttagatcccaaggcggttcatgattggcacaagaagggtggcactgtcctcgccacttctcgaggtggcttccatctccaaaagatcgtcgatgccatccatctcaacggttataaccaggtctcttcctgattcattttttacttgttctgtaacattatcatagggaagttcaaagttgatgtttcctcttttgccctcgtcaggtgtatataataggaggagacggcacaatgcgtggggctgttgagatcttcaaggaaatcagcctcaggaaactggaggtgggaatcacggttattcccaaaaccgtggacaacgatgtcggcatcattgatagatcatttggctttcaaacggctgtagagatggctcaggaggctatatctgctgctcacgtggaggccgagagcgcagtcaatggcattggacttgtgaagcttatgggcagaagtactggtcacattgctctacatgccactcttagcagccgtgatgtggactgttgtttgatccctgagatggacttctaccttgaaggcaaaggtgggctctttgagtttctcgagaagagactgaaagaacgtgggcatgctgttcttgttgtggctgaaggggcaggtcaagagatgatcccaagaaatgaatcacagaaacaagagagggatgaatctggcaacgcagttttcttggatgtgggagtctggtttaagtcagtcctcaaggcctggtgggagcgagagcatccagatgaactgttcactgtcaagtatatcgatccgacttacatgataagagctgtacctgcaaatgctacggataacttgtattgtacactcttggcccactcggctatccatggagtcatggctggttacacagggttcgtccctggcccgatcaatgggaactatgcttatatccccttagaggaggtggcacagactaagaaccaagtaaacacgagtgaccacaagtgggcctgggtgcgctcagtcacaaaccagcctgattttgaaacgaacgttaagtgttaatcaccctgagaacgagcgtaagcgaaaatcttgtaagcaagtaataatctttttatgtatacaatgaaacgatcaaggcaatcttatgtccttatctaaataacagtaattgtcaacaagggaacaatgcttgatttctaggaaaaaaaaggttgaaacaaaagatgtgatccttgaacctatttatcctaataagcacattactacatattattccatggctcatgcttattgcagaaccgttttcttaagcacataagagagagagtggttgagaaggagcttgagctctgcactgtattaatacaggtcgtgccactaggtttacattaaccatctacaatcatcatcaattctttttagaaagaaaaataaaagaaccagaaatctggcgagtgcaaacaagaaactgaatctctgtggcctaagacgtatagtctaccactacctgtctctacttacatgatgcttatgttctgaccctgttcctttccacactatcttcttaggatctgtactggatctgattttctcttctcctcttttgcatccctcttcaagcacgttcttagctttccctgtagaagctggacctaggtgaagcttgagcatcatgctatgtttatcagtgggagtctctttacctcttgtgaagagttcttggttctctgatcgacttgattctcccttggaactgctctcttggtcaaagaagagtgcttggacgaccgttcttaatggcatcctctcatttttcacagcgtgtgcacgtacttgtgcagacaatttctggcagtcaagacttctgcatagtcgttttttctcttctttgcttatctcgggatgcacctgccatgttacaaatgttttatcagtttcaagtactgtatgcaaaatgtatgatttctgaaagtaggctggtgagactctcaaccatagctagttgcccttgagcaggccagagcatctgataccttgagaaatatgttgatcgctttgtaaagtctgtcatggctctgacgtgcaatgtcgggcactgcctcagaaagagacacaaatttggaaactggcatatggacatcttgtgcgactgcctgaagataggagtcaataagctttgccaccttcctgattgaatgcagcaattgagtgttgttactagaaagatgcgcagaagactgtcttctccaaagcattaaaaaactctcaagaactgtagcaaccaagtcggtatcatagcgatggagatgagaggatgagtgtgaaggcaacaagaggtcttcaagagttgcctcctcgagttgcagaccagattttctaatcaactcagtctttgttgtgagagatgctctcacataactcgctatgctaacaagtctcagcagaaaaccctctgaaaccgaccctttatctgcaggaatcatattcacaactgtgttaacaagacgccgatgcctttccagtgctgcttcattttcgttaactgagaaacctgaatggctgtttgatatgaagtatggtaaccaacggcaagtgtagacatgcaaagcttcaccaatgagctgaggtggcaacgtgaaggttgacctggctgctgtgatcacacagcggaataagtccaagtcgaggtctgatatgtcttccgtccaccagtctcttggaacagagtggtgctgtctcttcgcgtagcctggtctggtgtatgtatgagaccaggagacctctgaagttggagtgaggatcttctccacaattgaatctatacactttctgacgattccaagattttcacaccattctggcaatttggtagtggactgcaaagtgacaatggagtccttccagccttggagaatgcatgagtggaaaaaagcttcaagctttggtaacagatttcccttgtcaacagaatcagacatccgaagaaacttggaggcacagagagcattcacaaggttatgagcactgaggttgattgtgatatcatagcagaacttagcacacaactcaaaagcatcggctccaccaggtatgtcattcagctctatggtaacagtatcagactcctctgaatcagtgcaaagccttcgcaacagcccacattttggaacaagacaagactgcagacaaagatggaaaccactattaacatacatatatatatatgtgtgtgctgctatgataattgataagagaggcaatcgagatatatactctgtggagatgataagtggtggtgttgattcgaataacgagatcgttaggtgtgtctgttatcaaaatcctgcagtgtaaatattttgtcagagaaatgggatatgggaaatttagaggcaaagagatcaaggaacaaccttgaagcctcttgagtgtagaaagtgtcaggctttgttccgattttcatgaacttcatcctagacttctctgcgttcaagaggaatatatatatacatatgatgagaaagtgatcaaatctttaggtaaaagtgggaaagacacaggaagataattacatattgatgaagctgaaattttattatatgtattcctaaatgatacaatcacacctgtagtctgtttatgatacaattctgaaaaccaaaagagagagaaaaaaaaaccgaaaaagataaagcaaaaggatgattgattttaccatgaaaactggtgtgctcaaaggttgatatgagggaggaagaagaagaagaagaagagagagagatgtgaaagtggtaatgatcaaattgacataaagtgttagtgaaattatatcccaagaaagagagagttgaatggcaacaagggtcccggcctcgtcacttgttgctccccgcatggactcaagtctccaaatggtgtctgatatgtatttccttcatacttgtttggtttgaaactgaaagccagaaaagttggctcactaacatatttgtcataggtgccaaggtagtgtttaagagagttacgcagcatagctagtagctataagttggagtcagtgactcctctatggtctcgttgggaagtaaggtgaaaattaagagaagagaaaagatgaatggaggtagattgtgtggtattaaagggttgaggtcgtaaagtatatcatgaaagtatccacaaccaaaataaataaaaagccagacacaagtgtccttcatgcattccatcttttgcataaggaaaacaacttctcaccaaacagaaagaaagtgagaaacaaaagtgggtcttccacctttccctactataatttattacaagcgagtttactcttatgataaatacaatggaccacactaggaagagtaggagttggatataggcttaactcaaaagagagttttaatttggttgcagcacattcagcttctctcttctttatactaactgtcacaaagcaaatcccaaagcaaagatgcattgatccccaaatcatatcttaaagcatcagaggcagattaccatttttacaagtgttttacttgttgtccatttccccccatggaatctctgtttttgtgggggagagggaagtcaacccacatcattagtgtgctgttttaataatgcaaaaaggcaaaagtgaaaaagaatgagaggagaggtatttgagtacaaatgtcctcttctgatggaattggtctgccttgaggagagaatctgtaagtcagtagtggtctaatcaaatgcactccatttgcattggccctactctctactctccacactaatttgtaatgactatctatgtgatgtatctcctgttaagacccacaactagaatgaccactgaccaggctcaggctcatatcaaatttcagggttcttacttataacacaagacaatgggcctgggcttagagctgctctcttttcttgctgcagccattggatagacaaagaggaaacaacacacccatgccttggaatggaatgtaggcactagagaagaagaagagttacttaaaggaatctcagtgttcaaaatcagctagtcaccaaacagatcgtcgttatcatcttcttcaccaacccctccgcattcagtttcagctgctggttgactcacagaagcccatgacgtaccaacagccttggcaagtgagtcaccaccgtaaaggtcatcgtaaatccctgtttttggaccccgtttcaacatattcatagcttcctggagtcgatctgtcacacctcctcttgttcctcctgtaaaggctttctcttccttcactttgcctttgggtatgagtgtcacttgcaccagtgattcatatttcccaacgaggcttccttctttgacatttataggaccaggctctgtttccacgtctgctccatctgacatgccaacaatctcagccagctctcctcctagttgatccctgaagctcactctcactttcttcatcctcttagccactcccgcttctgatccggtcttctctttccttttccctaacataccaccagattctccattgcttaaaccatatcgattcagcaaggtattgtaagcaacaacagcttcctcatcagaagcatcaggaggtggaggaagcttaatctcagctggaggtggagggcgagaaaagagagcctcactgttctttctcagaaggtagattcttgtggaggcagcaaatcgtaaggattgacccacttcaagctctacaggagtatctttagtcaacctctcatttgcaacaaacgtaccatgagctgatcccaagtcaatcacaaagatgctacaaaaaataaaaaagactcatgtcaacagtggccaaagctgtgatgagagaattgagtagcgatgacaaacctgccattcttgtgaggaacaacggcggcatgctggcgggaaacagactgatgatcaagcacaaaatcacaagtctgatgttgtctcccgaagatgtgccttcgtctatctagatgaatccgatcaaggatctggccgtctttcacaacttccagagagtagacaccggcacgaggctcaatcgcccaatcagggggatgccagtttgattgcccagctccaatctgagttttttgccccgacaatgcctccggagacagatgttgttgtaccaccggaggaggatttgctgatacagagaagggttccgaagtttgggacttcttaaacctgtcaagaccagatcttccatacattctcgaatctaaatctaaaaagcagcaatctttctttctttaccagtcgacgtattcacatgatccccctcaagtaaccagactcagtctagggtttctcctttcttcagttctgtccaaagatcggacatctactgagaacataaatttgcagcttcagtccctatactttatgtattcttctaaacgtacccctattttttttttatggatcagtgaatttcatatcctaacaaatcaactaggtcaagatagtaaggcttttcacggaaatgctttgagaatcctgtggatgtgattacgaagtagaatcccatcgttgatggcaaccataccaacctgtaacattgtgttagagtactactctagtggactgcagcgtgagaaaattatgaaaaacttacctgaggaactcttaagcagcaaggttgaacacggcgggtgacagagttaaactgaatatacaataaactacacaagtcaaaacggattgtcagagtcattcgaaatcacattcacgtaattccggttcgactctcttttcgtcttcactgggctaatagtcatgctactctggttcgataatcggcttgactttgggctggatatctatttatgttgtattgctctttggcaaatttgattaaagtctaaagtctcctatagacctatgtcaactgtcacttgctttacataaacagcgacaaaaaggaatacgaaaagtagttgtttcattgtttcgttgtcattcctcttgttgatatatatgttgcaataataacatcggtcgtgcctattggaactttttttaccgtgacatatacaatatcatgtaatgatcatctcgtcagattataaacgtataatattgccctcacaacagactctaattctaaggattgatgttgcattctctgagataaacgtgctcatagtctacatgctttgaccagaagcctctgtatcttggaatcccaatctctagccatggtttgaggttgccattatagtgtatcacggctgccctctcaatatccctttggttcacactcgggttgtatccaaggcctagtatgtgccatttccggtctagcggatatgttcgtctccaaaatgtgatgagaccaggcggcaacgtccctagcttccacaattctcggtcttgattctgcagtttaaaatcgttcgtgtatatgattagcaaacattcttgaaatcaaaacagatgcgacctagcccacactaacaggcgactcaaacataagtaagatatatattttctgcataccagatcctgccatcgatgataaacttctgtgatgttttgcctcttccattcatccagatcaaagacattcataccatatgcccaaccacaagctcgagggtcaaagttcttggaaatgagtggatttgagaagttcagataacggtcaaagcgatgaaagctttccccacaagtctctacagcaccgttaacattacctttcagatcaactgaccaaagaccagaaaggtccttctgcacaactatatcatcatccaagaagagcactttgctgagcttgggaaagatctcaggcaagtaaaaacgaagatgattaaggatcgataagtattttggattccggaacttcaagttggtgtctgaatttgtatggtgggctctgaagtaataatctatcatcgatctagaactaagctgtttgagaacgggactgtagcttgaattcagccatgtaaattcttcaacattctgaacctggatggtggctttgccaggtggattgtccaggaaccacatcctcattgccgcataattgagtctgtctgtgacgatgtggaagacatgctttgagggatgctgccaataaaccatgaagaccgtaagtttaacagaaagaaacacagttacatgttcaaacaaaagaagaaagttaattcttacctttgcattggttatggtagagttaacaacaactgacgtagccaaaacattatcagagaaaagggcatagtgatacagctgagtatcttctagtttctcctgatttggaaattgttgttcagatgaatttaaagcataatagtctgtagtgaggcgcagaggaaggcagtgaagtcctttaggaatggtcttagcagtcaattgagtcaaaaacatggtttgcttcttatggacccgtagctgctcatctgcggagtggagcatagcacgtagcttcttgaccactgtagaacagtcatcttggatctgcttgcctttggccagtgtttgctccattgcttttagcttttctatagcactggggttcaaaaaaatggcagagaaatatcagttaaagaggaagaaacatatatttcaagaggtgagaaacacttacgtctttggcagatccgaatccttggaggcatctgcaagtgcccgttgaacttctttaatacggagtcgaagctctctcacaaaatgagcattggcctttgcagatggaagggaaagataaacctttgccctaataagctgatctttaaggtgcctcacttgagcatcaggcatcaacacgtttccagtatctttcttagctccaaaagcattaggctctggttgctcatcaactttttcagaggtttgttgggtcaattgaacatgcatattttcctacaaggatccaaatatatactattaccaagcatcaaattcaaatctggagccaatcaacttagggaatatccaatctgattctccggaaaacacgtaccctattaatatgcgagtctgaggctgcatcatgagtgacttgtttgatggaaatgtcagtatgagagtgagtatcatcgtcggtggcggaaagaactcgagcagacaattggtctgagaatgttaaaaaaaataataatctagtcaagtaaggaagacatcagagagaggcgagagagaattgaagttacctagccgccgtgaattcttatcggaatagacagcaccgacgagtcctcctctgagcacagcgggagtttcctaaagatggatgtgaagaagaaagtgaagaaacgagctaagatcagagtgaggcgaatcaacaagtaactggaaaaagaaaaggtacccgaggaagaagattcaaacgattcccatcggaattgaaagtctgaaaaggaaacacacaatgtgacgcaatggaagggaagatcaaaagagagagatagagagaagaagaaaatacggaccaaggcggttacgtcctcgaggaaatcgcgtttagctacagaacgaaacaaagaagatgataagaagcaaatttcaaatcggagaattgagaaagagagagagaactactgacaaaagggggtcttgaaggaggcagcgggatcggtgtagagaaggataggagcaacgacggtgaggagcatgaagaaaagaacaagattgcgaagcttcaccatcatcgtcgtcgtcagatcaagagagagaccgagccattaaatctttctttttcttgtttctagtgtgtgagtgaaaaaccaattgctgctagctggatgatgatggtggtcgttgaggataagacgcttttacccttcacagccattatttataaataaactctagttgttgtattaaattaagcgagtgacgtgtcgaggcctgcccttaaagctctactttcttgctgcaaccaacataccaatgcctttggaatggaatgtagtcggcattagagaagaagaagagtggcttaaatctcagtgttcaaaatcaatgtatgtatcgagtatcttcttctgttggtcaatattatgtatgtagtcacaggcatcaaccaacaagaatctcaaattcatataactgatgaaagaagaagatcatagtcatgaaacaaatacaattgtaacacaagaatcagagtgaggcaggtttattattccccctgaaaatcagagcacttaacagaattacacaaatcaccaaccaagaatcaaagacataacaggaaatttttgagggctgagacttatgtttgtctgtctctactacttctgcctcttgtagatcttagccaagaaggattttagcactgcttggattgctttactttggtgtccctcaatcgctccagtcagcttctcgtagcttttgctctcatactccatgaacactccctatcatgttcagatcatcaaaccatgtccaattagcaaaaatgttagttgtgtattacaacatcatatctctgaggttcgctacaaacctcaagatccagctctttgtagagatccttcactttagcaacgttcgatgggtcggttttaccatagttctcctagtaaatcagaacaaaacatattttcaggttccaaacaggatacaaacctttttgataannnnnnnnnnnnnnnnnnnnnnnnnnnnnnnnnnnnnnnttcgctgcagcgttctaatgccttaaccaccaaccaagagcatttgaaatcttctatatctgttcctatctgcattataaaaaaacaatatgctgaaccaagtgaatacattcacatcagcctgagaaaccaagtgttagcacgagtgaaaccttgccaagcgtctcgggatcagcaaaacaatccagataatcatcctacacaaaagaacggatatcaacgtcccagcattaccctatcatatagctctcatgaatacttaacagcaaactacctgcacttggaagtagattcccatgtcaacaagaacatttttcacgtcaatatggttttccaaattttcgcccgccataagcaacgcacaagcaacctgaatagaaaaagaacaacttatcacgggatctacaattgcaatgaaggagataaaaggaatagcatgactgttccatcccaaatatgactagggaggaagtgaatccatactcacagggagataaaatgagtaataagccgttttgtactggacaatacgacggtggctgcaagttgaaaaccattgcatcaggtcagaattttgcctttatctcatcaaccatcagaagaaaccatttctaaagtttagacaatgcccactgttgactcacattgacaatgagtacttggacaaatccttttcgccttcaaaggtggtgatcaaatctatcatctggccacaagctgtttgcaactcaacctagacagcaaaagtaataatagactgaggataatgtttcgaatgtgaaagagaatagtagatctgccaaacagatacctcataaac

SEQ ID NO: 33245 - DNA, 2710 bp, Arabidopsis thaliana landsberg
  unsure (1)..(2710): unsure at all n locations
tggcatttcttatgataatgtagtggattagcttgtttaattttttgtatgctgatacaagttgtttttgtatgctttttgttttcagatgtgtgttctcatattcgttgggaacaatggcgagacctacttcaatactggagcattagtctctggtgttcaaaactttcccatgagcagaggtccagtggtgggtattctcaagggttttgctgggctaggtggtgcgatcatctctcagatatatacaatgatccactcatctaacccggcttctctcattctcatggtagctgttacgcctgcagttgtcgttgtttgcctcatgttcttcaacagacctgttggtggtcacaagcagatccgtcccactgatggagccagctttactttcatatacggtgtctgtcttctacttgctgcctatctcatgtccgttatgcttattcaagatctggtcgttgttagccacaacgtaatcactgtgttcaccattgtgttgtttgtcattcttgttgtcccaatcttggttccaatcatgacaagtttcttcacggagacaaacgagcctgatgacacaatagaagaacctcttgtcccaaaacgagaagaccaagaaccaggactgcaaacacctgatctaatcttgagtgaagtggaagatgagaagccaaaagatgtagatttgcttcctgcctcagagagacataagagaattgcgcatttgcaagcacagctaatgcaggcagctgcagaaggggcggttcgggtgaatagacggagagggccgcatagaggggaagatttcactctaacgcaggcactggtgaaagccgacttctggctcattttcttctccttgctgcttggttctggttcgggtttgacagtaattgacaatcttggtcagatgagtcagtctcttggttatgataacactcacgtgcttgtgtctatgattagcatttggaactttcttggacggatcggtggcggttatttctccgagctcgttgtcaggtttgatatctcagaaagccaaaaatcctctgttttgtgctctgttctgatcttgatttgaatgatgtgcagggactacgcgtatccaagaccagtagcaatggctgtggctcagctaataatgtctgtgggacacatattctttgcgtacggatggcccggagcgatgtacattggcacactgttgattggactcggatacggtgcacactgggctattgtcccagctactgcctctgagctctttggtctaaagaagtttggagcgttatacaatttcctgacattggcaaacccggctggatccctcgtgttctcgggtatgatcgcgagtagcatatacgaccgggaagcagaaaggcaagctcacggctccgtgtttgatccagatgacgcccttagatgcaatggttctatctgtttcttcttgacatcactcataatgtctggattctgcatcatcgcttgcatgttgagtatgattcttgtgcgtcgtaccaagtctgtctacactcatctctatggcaagacccgcacctaagatctctgttcccttttatatatgatcgtgctcagcttcttattctttggtttttgtcttcaattctacgatccagatgttttcgtctctgtatcgatttttttgtttgtttctgtatcgattttgttgttgttgtcaattttgtaattgatttgtatgttttttgtattcatatccacggcaacatctaccatgagtagacttacacaaagatctttagacagtcgcatatatgaaataaatttctgcttgttttcaaataatgttttggaatctgaataatcctgaaaaataggtcaaccactacaatttgagaagttccattgtggattatgacattttagtatagcaaaagcttaaatcaaaagcttcataatttatatgttttaggttatagacatttgttcaataaagctagttaaaagcagagcagtcccttcgaatctcgccttgattcccaaccttaaccccaacacggccaagattcctcatagcagagctaaaagcgctgtagaattcttcagcgttgttagcaaacctgaccaccgtagcctgagacgagagatcgttaaacagagcttgatcggaggtgaaaagtcctttccgagccacgaggttctggtagtagctattgtcgaaggtatctctggacgttaggtcaatgtnnnnnnnnnnnnnnnnnnnnnnnnnnnnnnnggcttgtatcagctgctgagcgtagaccgggtccatcgtagggtccactggcatgaacgtcgagaaattgtggagacggttggcgaaacggttgcagtgagaggatccaattgtatgtgcgcctgaaagagcgatcatgtcggtcaatgaaagcccgttactagcgaagatctggactagacctctcacgtcaagccctggttcaggtaacttgccggtcactctagacgctttcgacacgagcccgtctcgtctccctagctccaccttaaactctggccctccaacctgttatcatcacaaagtaaatgatttatacttggagaaatcaaatgaaacgtcggtgacctcagaaagtggacttacgagcacgacgacgtctctagcggcgagacgtagtatatggtgacatgacacaactccgggacattgagactcttcaacggctttagc

SEQ ID NO: 33246 - DNA, 2598 bp, Arabidopsis thaliana landsberg
tgtgaaagaattgaagataaacacagaaacaaaaacttttgcttgtatttacaaagggttttggtgttttacctcagtagaatgacctagagatgtagccatccatattcgcttgagtgtactctgcaggcatggccggttcttgatgtggctccgccatctcctcgtcattaagctcgatcgcaaccccagcaggttgtagagcatgacactcatgtgttctccagcccgacattatccggcctttgcttgatgaatgtacagttctaccactcttcctcctcttgttttccattggctcatgagacggggaacttgcggaacggtggggtccctatgtttataggtgaattgccttggcggagcaatgtcatggtggctggatgacatgtcttcaggcgggttgtcattgaagtcatgtcgggcgttttcacttctccttgcgattgagtggtttgggcaattccactaggagaccacttgatcacaccattgccatgttgcgatcgagtggtatgacattgtcgttgagaatgatgttgtcccaaaaccactagatcgcactctcgagcttttactctcgtcttgcgatagactaattcatcaaaaatttgaatttttttatttgaacactcagttgcatccctgttgttgctccagctgtttttcatttcctgagaatcaaaaacaaaaccaaaacaaatcaaaagtaacaaaaataaaaactatatacaaggataggcatgggacttcctcccaagtgagcttgttttaagtctctagcttgactcctcacactcattaggctcaaggagggtgatagagtagaactgacgtctcctctccttccttcgtagatacaacatcaaattcagcatgctctcgtgacaagtctgtaattgagtactcaatgaccctttcttggtaagctcctttttcatcaactggatagtggtcttttctagactgttttaatgtgaattcacatccttcttttctaaccataggaataacttcatcatttgggacgtccttgatgtcgagtggagcttggttggctttcccatggagctccttgacttgatccttcagctctttcacagtgtgtgttagctctcttatagctctgtcgtgccatttagacctctccttgagttctaaccaatcatttgatgccctcatgcttgactttagctgtttggttgagcattctagtcgagtatcagttgagccttcctcgttcaatgtaacatcctctgtttctgacgcaatgacacctttaaagatctttgatcctggtacttcgttgtgtgagtctattgacatctcatagctcaaggtctcacaagagagaaatccagcttcattacttttggtcaaagcagtttcaaggttatctttgtcagtaagctcctctagcagttcattagctagctgacccatttcttcaactaagaagctttgtccttctattgttggcttcttcatagtgtccctgatttcaaacttcattttgaaatcctccccaagattaagattaatgtttccttgcttaacatctatgactgctccagctgaagccaagaaaggtcttcctaagattagaggatccttagattcttcatccatctcaagcacaacaaaatcagtagggacctctactccattaatcattacttgcacatcctctaacaggccaaaaggtctccttgaagtcctatcagcaagaatcaaggttaggtcacaaggcttgcactgaacgaatcccagcttccttgccacagagagtggcattatgctgactgaggctcctagatcacatagacaattgctgaaagtcaattgcctaatggagcatggtagagtaaaagatcttggatcttctaacttttctggaacaattttcttctgagtgatagcactgcactcatgacttaataccaccattccttggacttctttgatcctttctgtaatcaggtctttcacgtacttgtgctcgtcaggtattagcgcaagatagtccactaaaggcatatcctttatgtgtttttccaggagggctctgtattttgcaaccagaactttcttgaaacgaccagggaatggaagcagaggtttgtaaggcagtggcacgaagactgtgtctttggtctttgtagcttccagtttttcaacaaagggagtagctaggggagcttgtggtcgagtgggttgactggtgagtatgggctcttcgattaggttgtcagccaacacatcatcttgataaaaatcctccccctctagaattacactttcctcagtgtttgatgtagggacatatcgagttggcagctcgcgatcatgtgtgatagtgatggcatgggcagtggcatactcctttggattctggattgctttccttggaagctggcatgggttgttgttaacagatggtgaagcgaggatgccttccacatatctcatcctagtgctcattgatttgaaattgctgttaagtttgatgccttatcggtcgactttgttgtttacttcagacagcttcttagcgatttccattgctcctgtggcttgtccttgaatgagctgatagag

SEQ ID NO: 33247 - DNA, 2329 bp, Arabidopsis thaliana landsberg
ttgacatcaaaataaatatttaataggtgtgagttggggttatgagcactatatagcatgtacgtattttgtgacacaaattttatttgtgatgtttacaggttggtagtatttttttttcacatatacagacgggttatgagacgaaaaatttatgatacatacatcacaggttttccattctaaaaaatataaatcaaatatacgtttttattttctaaactaatcaaaatattataactgttataacagtaatcaaaacattataactgttataacagtaatcaaaacattataacagtttgattactagtgtaaaataggatataaatttggttttagtttgggttatttatctgtgtgaattcggatcttaaaatataattatacaccaacacaattgaatttcgattattactcttaattttataatatttatactattacaaagtttaattataacaaaatattatatatttttaaaaaattatattttatatgtatatgaaatttcagacatctaatacattgtattataatatatatcacaaaataaaaaaataatttacattgaattaaaaaatataaattcgcacgtacgtaaaagttaggatctagtaatttgtataaaaaagaaagaagaagatagttatccatttcataggtcggctgctaatttttggcggatttctaataattatatacaatccaattaaaaaaatgaaatatgtcgtggaaagtggaaactatataaaggatagagataagtacgacttcgacaaatggagatatattatcattattattattataatcattatctttcgctattcctgaccaatacccaaatgatctccgctactctttccacgtgtcaaaagcactgaattgaacggatgagatcttaagtcactaaccaaaacaacacttgattttttttataacaaatcacagttccacccaatgaaatccattttgtttcaaaataaacccgtatctttataatgaaactgaaagtttcaaggatgtttttgataaattaaaaactatatagggcttcattcataagatttaagacaacagggtttatgaatttgtctctgcttcacgatctctctactatggtgtactgtatctttcaatctatagttcagttacaaagatcatcacagccaattttagaaaacttctgacggaaaataaaaagagaggatttatttttatctttctgtgttaccggagaataaagacggtaccttttcactgttgacttaacggagaagatggcgactgtgccggagataaagataatgagaagcgagagcttaggtcatcggagtgacgtgtcgagcccggaagctaagctagggatgcgtgtggaagatctctgggatgagcagaaaccacagctcagtcctaacgagaagctcaacgcttgctttgagagcatccctgtctctgctttccctctctcttctgattcacaaggtatgaggattttgatgatgtgggtgtttgaccatgagctgatctataattggaactggtaattgtgttgaatttgaatcatgttctatggagattgattttgatttttgtgatgcaattattgatgggttctgtgatctcttggtatgtgtttgttgatgacttgtagtaggaatatgtgctgtgtgttgaaattcaagttattgaaagttttataagtcagaatttggaattcaatccagcttgttggatactcgaatcagttcgatttagggaatcagaattagttcttgatggtttttgtttcttagtctccttgtagaatcagagtacttattgattcagttctgctgtctcacatctttgtggtttccctatatagatattgagataagatcagacacaagtttggctgaagctgttcagacactatcgaaattcaaggtcttgagcgcgcctgttgtagatgttgatgcgcctgaagatgccagttggattgatcgctacatcggtattgtggaatttccaggcattgttgtctggcttttgcatcaggtaattgttctccaaaaaatacgagaggcgacttgtttttgtcatgatcaaattggattgtggtacctagtgaactatacttcatgtctgtactctacttgtctcctttaaaaaacagttggagccaccatctccaaggagccctgctgttgcagcttcaaatggattttctcatgatttcaccaccgatgttctggataacggagattcagcagtaacttctggaaacttctttgaggtccttacttcttcagagctatacaagaacaccaaggtgaggggatgt

SEQ ID NO: 33248 - DNA, 6085 bp, Arabidopsis thaliana landsberg
caaacgaccagaagagagaaagagctagctactggaaaatgaaagtagctacagagaagggaaaaagcaaatccctagaaacagagaaaatgaagcgggaatacgaaaggacaacatattcatgatcaagttaataattgaatctttgtttagtgttaaattgaacttaatccaaatttttgttctcttcccattcatgtcctcaaacaagtaaaatcatttactttagtttagcttagattaaaaagataattcgatattcaaataaaataccaccgtatctaaaaatcataattacattgacagtgtatcttataattggatttgaagtgacaaggaggatacgacaaaaaggaatcaaaccttcggtgagacaaaactgtattacaagtagttacaacaacaacccaaaagacaaaacctaaagactattgtctttctctctcactcactatcgttacaagcaaacgctaagatgactagtttccttttgatttcatcatccgactttctttgtattctcaccctaaaatccgaggcgatttcattcatcgattccataatcttcaccaaagtatttatccacaagactgttcgccatgactctcagctcttcgttctcatgaaactgaaaccgttccattgcatcgataccgtcttctccttccacaagctttggcccttccccgtttggcattcctcttaaaacctatccaccaaagaaatcaaaaccaattaggatcattcctgttccaaatatgactatgcgacatcaacatataagcaaaactcgtgtctcattgagcttttaagagccattaaattagttgcttaccagctcaatgaactgaagaccaagcctagcagcttcgatatcaggagatctgaccagctcaatgaaaccccggaggcaaccgccactgacaatagagactaaatgctcttgaattatccctggttttctgtctccttctgcagattctacacagagatttcccaagacataggcaacttctttccttatatcaaagggggatgtggaaagaatccgtagcaacaatggcattacttcagtagaatgtatcattctcttgtgttcaatagatcccgccgctatattagatagcacccaaacagcttcctacagaatcgagtatagtgatgaaagcttcatataattgtaaaaaattaaaaccacaacgggaatgtgatactgaccttctttaaaacacggtgctcgcttcttaagcactttgcaagcacaccaatgatgctttctgaaatttagtttgcaatataagtatcttgaatatataggattaaggtgatgatgtttaacccggaaaagataatagatactagccttcagtgttctgttcacggataagaattgttaatactgctttgggatcaacagcgacaaaattgcctaaacttcggagaacctggattcacatttttgttttagagataatcaagaatgcaacatttgaaaattaaggaccacgtagtgagtattctgattctaatcattcatgctaatatgagtataaatgacatcgatgggacttggaactggaagcaattgaatagcataatctgaggtaatattttaactagaatcctgtttcttttggacgataaggtctatctgaaagttaccgggatgagaagttgtaggctacttgaggttgctaatctgtcaataagtagttgaagaatgcctcccttcaagagcatacttgtagcgatatctgagagggcagataggtaaacaatgatccatgcaatttccgtggcagtttcctcatccctgaatccaacaatcaataatattttgatcaaattattcaccaaaattgaacaatagaatatcaatggcataaaacagacccctataaatctaaagaatcactaaaaagcaagacaccacaacacgctaagaaattgttgaaattcagagagatgtaactttgctcacgttttcttcaagtgtcgaagaattgcatccagtatcccatcaattttaacaagttgtgctgctgcctttgactcaggtccctgtattaaggtataatgaaaatagtttgtaacaaaggcttgtaaattataaccaaggtgataatatccgtgccaggtttttccccaccttaatcagatttgacaatgcccatgcagctgttctcactgttgaacccttgtcgggaaaaatcatacgtgctagaggtggcaaagccccttgagacaaaagaacatttctcaaatcttctccttcaccggcaacattaccaattgcccatgcgcactgctcagccaccggtgcggagctcttttctgaatataaacttggaatcatatgaaatctaatccaacaaaaacaatagagtaataacagacttggttggccagtacaacaaacctccaaggtgagcaatgagtaacggcaatgcaggtaatagagcttttgtttcttcaggttttccagcagcaatgttggtaagacaccaagctgactcaagtaactgcagttagacagaactgtgatcaaaagattacaactctccttaatatatcttctttcaatgcatgagttacttgtcaaaatctacagtaaagtgccggacgaatatataagcaaataaatgcaagaacaaaggtatagtattaaagcatatataaggcaaatgtaacctgttcgtcgggggagccaaatgaaagacactgcacacgtaaaggtattgcaccagcacggagcgcagcttcaacaggagggaactcagattttgataataaacgcctgagttcccgaagagcagtcaccctcttctgcattgcaccttttccccttgaaattgagataagaagtagatatcagaaaaaaatcacgaacaatacctgaaacagtgaagaaaacgaaaagaatgacaaacaaaaattgacagattcacttactggtattgaacagcggacttgagctcttccacagatttactggcttgagcctccaatataggctgctcttcatcaaccatcatctcattctcaacaagagcatcctcaacatcgccattagtacccaccctacaaagccgctttgccctaaccagtaattcccttctttccttcgccactgtaacagcttgttgccgtcttctttgtcccgcaacatttccaactacacaccaccatttccagaattacaatcaaatccatgccaccaattgtaaatttatatggttctgaactaatcaatatacatgaaaaaccaatactaaaaggaatgaagaatctaaatttgttcctaccctaatcaccaactaacctaattatctcgagaagcaaacaaaaacactacactaacactactcaggtgccaaaatcaagttgagggtttacagtaaaagtcagaaggaaaatcacctgaagactttattgggtcccttcgattagaggcggagccatcatccgccattgaagaagcttgagcacagcaagtttcttcgagagtagggtttttgattcggtaatttcaccggagtaagaataggatttcgccgaaaacgaattggttaatttggatccgttccctcgcgcccgcccagcaaaaaaaagaaacacgaaaattttgccgactcatatttgcatataatttcatattagtccctagtatttccaagtatacaataaatagcccatttaactttattaccaatttccgaatggatcaacgatcgtggtttcacgaagtctttgacattcgcctatgttgcaaactaaaataatgacatggcgactcatcattggttctttacgtacaccgtaatctaatgtgacgcatgtggtaataactcttgtgtcataatacacgtgtcacgcatccacatgatcctcttccctgaacatgatgagttcacaccggctggctttttctcacccacttttccgtcactttctcggttcattttctcgagaaaataaagaagacgaagacgaaacctgaaaccaaagccaaattctctcgattaacagaaattcctttggatctatcgtcaatggacctaatacctcagcagctcaaggccgtaactcttacacacgtccggtaccgtcccggagatcagctcggacatttcctcgcctggatctctctcgtcccagtcttcattagcctcggtggattcgtctctcatttccttttccggcgtgagcttcaagggatcttcttcggtataggtctcgtgatctcacaattcatcaacgagtttatcaaaacatctgtagagcaagcgcgtcccgagacatgtacgttgctcgaagcttgcgattcacatggatggccatcaagccactcgcaattcatgttcttcttcgctacgtatttcagtttgatgggatgtaaaggaattggattctggtttggtttaagaagcagatggattatgaatcttcttcattggtctttagctgttgttaccatgtattctagggtttatttaggttaccacacggtggcgcaggtttttgctggtgcggctcttgggggtattgttggtgcgagttggttctgggtggtgaattctgtgttgtatccattttttccggtgattgaggagagtgtattggggagatggctatatgttaaggatacttcgcatattcctgatgtgttgaagtttgaatatgacaatgccagagctgctaggaaggatatggattctgctaaatctgcttaatttggctaatttgatttggtaagtcgaaattttcttcactgtttcattgattttgatctgattaggtcttagaataagcatttttgggaatcagctttagcttttgatacttgtaggtcaagaatgtttgttttgctatatgagtaggtagtcacatttgtgtataatgtaccactgtagcattagaaaatacaggaagaacaatgtttgtgtaaaagcagtttaagtcattcttcttggagtccattagttgttctgctcatccctcatgacattgaatctgttttctcattgcttaatgccgacaacaaatcagttctgtttgagttttttcttgtcttcttctttgttccgcaagcacatctcatttgcttcatccatctgcaggtcgagaactcgggtattagcggtcttgttatcctttttctttgttacattatatcaggaatggcaaggagatgggagattccatttatgctaccgttctatgattagctgctcacctgaacatttcacaaaatgaaacttcttcacacttatgttatgaagtgatctttgtatcttttttccttttctttctttgcatattcacttatctattgaaagaaacagtttcgtaaattaaagaaagttatagaggtctgtggttttggcatctaaattgatgttctagtttgttaaattactgttacttattaactcgttgcaaaaaaatagtcttactaggaacaagcttcaatgcaatgcaagtttcgagttctaaatgatacacttaattatgtgatgagattcttatttatttaccctatgtcaatattctaagatgagaatcgagaagattggaataatgcatttttgtttaaatcatgttgacaaaattagtaaataaaaactatgtaaactatagttaaaaaccatttaaaatgtaaacattttgtataatcaaatataaagtttttaaaagtagtttttacatgaataaatatatttttttaaaccataaaaattaatctaagtattaaatacattcgcgtgaaaagcggttgaactaataacatctcttacagacccgtcagatgggaaaagtgcttaatccagtttattttcaatgcattgaaattcaacacttagattttttgaaaacaaaaatattttctataataaaaaaaacttagttaattctaccaaaaaaaacttagttaaacgaaaaaaatattttcataatcaaaaaatagtttacataataaacacatctcaaaaaacagtaaaaattaatctaaacataacttacatgataagagattgaactaataacatctcttacagacccatcggatgaaactaatacacct

SEQ ID NO: 33249 - DNA, 564 bp, Arabidopsis thaliana landsberg
  unsure (1)..(564): unsure at all n locations
ccttaatgtatattgttgaattttgaccaaaatatatgcaataatgttaatgaatctacagctaagaggtaacaaagtttctctctaccccatctagtagtaagaaattgtgtgacttaaatttaattacatcaaaggtaaaacaatgaacctaaaatcattccatggatacaatcccagtaatttagtacagttttttcctaaaccctactccaatggaagttctcaaaacacctgacctttgagcttatctcttcttctatgtgtttgatttagtgggcaaaataatcgaaccaaaagtaccaaattggaaccaaaaagtaaattataaacttcataaccgaaagaacccactagaaccaatcctaactattttggatactcaaaaatacccgaaatacaattatatataccggaaatacctgaaaaatatccaaatggatcataaactcgtgagccgaagcaccggacccaaacctgaaccaaccaagtttntttgtgtaccttactagatcataaattctaaaaaaatgaaagaaccaaaacgaaatataaccgatttcg

SEQ ID NO: 33250 - DNA, 6333 bp, Arabidopsis thaliana landsberg
aaacctagatgattcttttgcagggtgatgtttttaacacaaggacaaacacagaactgcttgggtggtgaaaaggggaaagaatgtttagagcccgtcaaatagatttttcacaatccatcaaaactgtttcattaagatcaattgtctcctttctttatacataagttactgttttaaagcataaagaaagagtaaatacaggggtttaccttattgaacaacattttgctgatatagttttcaacaaaaaggtcagaggtgaatgaacgccagagattgtctactctattctatttcaatggcgctgtatccagcttcttttctccctttattcaactcattatctaatgatttttgtgggttccctgcaacagcgtgtgtcccagctagaagaattgcatctgccggatgtgtctcacccatttcagccaatctcatcatcacactttcccccaaatctgcattcccgtatactctacaagcagctagcagagcacgccaagccgttgaatcacttgtgatcggtaagttccttattaactcatacgcttcctctaactgccccgctcgacctaaaagatcaaccacacaaccataatgttcaactttgggcgtgaagctgtaagcctcaaccatcctcttaaagcatctgattccttccattaccaaccctccatggctacaagcattcagcacaaccaagaaggtaatctcattgggtctcactttgcagttctcttcctccatcttattgaatagtgttactgcttctcttgctagtccatgagctccataacccgagatcatcgcggtccaggactttacatccttatccttcattctattgaaaatctcaacagctttttcaagcaatcctacttttgcatacatatcaacgagtgcagttccaagtattgcatccaaagctattctttcctcttccaatagatcagcaacagtacgtcctacgaatgctgcttcactgtacgcacaggaagacaacagcccaacaaatgtagatgaattcggtttcattttttcatacttcatctgcctcagtagccatacacactcttcaaggagacccgttttggcatattggtctatcatacagttccatgtaacaacatcctttcgaatggcgcaatcaaagatcctgcgtgctgaactgatacccccagttttgccgtacatccctatcaaagctgtgattaaatgcaagtctaaatcaaggccaatcttgatgcataacacatgagcagattctgctccagacaaatctcctagatcattaatagccgaaagaaagctaagcaacgtactgacattaacgaccacctcactttttctcataatcctaaacaaatccaaagccaacgctttcttagaaacctgaagatacccattcatcaaagtactaaacgtaacagcatcaacactctgcggcatttcgtcgaacactttccgagtatcactaatctttccacaaacacagtaaaaatgtataagagcattcctcaaatcagtaaaaaccataaacccatatctcaaagcaatcccatgcaatccctcaccaattgaaacacacaattcacgagaacatgatttaagagtcgtgataaacgagaatcggtccaaggtcaaacctttagctctcaattggttgaaaacagaaaatgctcgctccggctcatcgctaatcgagtaacctctgatcatagtgttgaacataaagagattagtgttggagacatgctcgaagatcgacgaagcgtatcgaatgtcaagtacagaggaaaaagcaagaagcttgctcactgcgaaatcgtccttgtcgagtcccgttttcaccatgtaaccatgaattcgagaaacttcgacggtgtctctgcaagaccttagatcgttgataagtttctgacattgtggagacaacaacgattcaagattcctacgacggaacacgaaattgcgcctgagccgtgacgtaatcgccgatgtcatcagaaagaaaaaaacgccgccggaataaacacggatttgttttttaagcttaaaatatcaaattgggctttagttccttaatgggccttattttggtccaaatccagttacgtggcaaagagaattagggctctttgttcttcttatttaaaaaagttacgcctttcttcttcttattcttcttcttcttcttcttcatttctaggattcgaaacaacaatcaacgcgatgggacgaagtaagcagattgctaaataatctatttctctgaatgtaatcgatcttctatggatagatatattcgttctctgcatatcgtatttgctagggtctctgtttttcgatctcattggagacgagttttgtcgccggaatcgtaaattagacttgcttaagctcggaatttacatgtggattaggttcgttttgttagggtcagtgtcaaaaatggatttttctaatcactcaagtcgcattattagatttgcttaagctcggaattttacatttggattagtcttttgtttgaattgcgtatcaaaaaggattcaacttgttattgaaaatgtataaatgtattcaaatgtgtatgacctgcgaggtgttaccgtcagatcaagggtaagccatacccaaagtctcgctactgtcgtggtgtgccagatccaaaaatcaggatctacgatgttggtatgaagaggaagggtgttgatgagtttccattctgtgtccatttggtgtcatgggagaaggagaatgtgtcaagtgaagcacttgaagctgcccgtattgcttgcaacaagtacatggtgaagtctgctggaaaagatgcttttcatttgaggattagggttcatcctttccatgttctcaggattaacaagatgctttcgtgtgctggagctgataggcttcagactggtatgagaggtgcttttggtaaagctttgggtacttgtgctcgtgttgctattggacaggttcttttgtctgttcgttgcaaggatgcccatggtcaccatgctcaagaggctcttcgtcgtgctaagttcaagttccctggtcgtcaaaagattattgtcagcaggaaatggtatgttcaaagattgatccttgaatcattttgttgtttgattgttatatggatacaagtaagctaactcatcaagtctttgacttttttttcaggggcttcacgaagtttaacagagctgacttcaccaagttgaggcaagagaagcgtgttgtcccggatggtgtcaacgctaaggtattattggctttacatcagaattgtcactctttgatcctatagcagtgatagttatcattggaaatatcatttgttgttgaattgaacaatgttttcgtttttttttcagttcctctcatgccatggacctttggctaaccgtcagccgggaagtgcctttttgccagcccactactgaagagtatcagaactgaagtatccttctcattccggtgaagaagaattataatcagcctgaatctttttacttatcgttatctctggtgttgttttaagtttttagttggacacaatcagtattctgaatctttttgtgactcttttgtttaagctctgaaatgattttgttccttcgttcttggccatatatctttcatttgcaagttttatcatggctttagctttaaatattttaattgaagatttgcttgaaaatcgttgaagttttagatagagatgggtgattgccttgttggatcatttactatgcataaaagatttgaaattagcatagcaagcccatcttaggtattgtcatgcaaggctgagagttcaaagagaaaatgacagagacctacctacacgtcaaaatcagatgcaaactgccattttcctgattaagtctatctttgttttttttacttttcaaagaattaattgccataatttctgaagaaggaagcaaaaatcccaaaacagagaaccaagagaaaggagaaaaattgaaaagtttatggtattacttgcaagcaaaagatcaagttatcttgcaaacaacaactataagattaaaagctctttttcttctcttatcagagaattgaaagaagaacacacaaaacacataatatagtctctttgcgaaaaaatgaatgaaacgaatataaacaaaaattttaacaaatagtatagcagaactgaaaaactctagattctgaactttctccaccaaacttattacaagacctgtttctgttctttccaagaatctaacaataccaccaagatgattgtatccaattgaattcaaataaatttcttttataaccaaaattaataagaaaaaaaagactgcaactttcgacatctccaacggcagggagaatcataaaaatcatctgaaagttattgttgaaacccttttatcagcaacccatcaccgcgcaattgtaaacaaaattcgatgaatgtttcctaccgagcaatgtccatagaggcggacttcgatcactagatggtatccatgaattcagttcaatgtaccctccacctgaactcctaggaccaccaatcacaatcaacctctcaccgcaagctctaaacgctaatccccaaccgttaaccgagtcagctctttcgggcaatctccctaaagtaaaccatttcttactctccttatcatacttcctcacttccatatcagcatgatcagcagcatacaattcgttattcacaaccgcaacaagaggcggcgcctctgctgctgccggcatttcccggctccttggaggcgacatttccggtatctcagtccatttcttcgtctctaaatcaaactcctcaccacaagtaagcactttcgaatcatttccaccaattcctccaatcacatagaacttcccatccatgaaaacacctgaacacatcttccttggtttattcatcttcggaagtgtagtccaagtctgaagctcggagttatacatctcagcggaatcactgattttgccaaaagaatcaaaaccaccagcaaagatcgcaatctctcctagacgcgcggatccaaacaaacacctcggagagttcatcctcataccggaagaccaagagttagtcaaaagactatatctatatataacatgagaagagtaatcatctttgcctaacacaagcaaatccgtaccaacagctaaagattctttatcggcacacatgaatgtaacacctgaaggcattgtaggcaaattcatccatcttctttcaaaaggattgaaagcaacccattccaaaagctgacaagagaagtaaacccaatgttcaacaatctggttttgcctcctgagtctataaatctctccggtcttcaccaaagaccgaaaactccggtttaaagaagcaatcgaaccgtaaccagacctcgagcaacgaatcaaacagcttatagaattgtctctgccaatatcattgataagtgaatcgccatcgctattaccattgttgttagaatcagattggtcttgttcttgttcatcttcttcaatggcttcattcccatgaattgaaaatcccatcaatctgggagacttgctctgtctgagctcatcaacatcattctccaatgctcttttgccattgatgagattagattcagaggaatcttctggttgtggatacatgtatggccactttgattctgaaagacgagaacttgagaaaatccttgacatcaaatatgtccgatcttccaccatcttctccgtacagattccgatgttagagaaatcagatcgagacgagaccaaacacgaaatgcaaaatggctaaaagagagagagagattctgagaaatcaaaagacgattagatgatccaaatctcgattgataaaaatggattcagaaggaaaaacaaaaatttgtctctttattgaaacatcaatcgccaaaacaaatttggtagcttcaaaagtcagatctttagattccaaatttgactcggaaaacaaaaaatgaaaacccagaaaaacgaatcactgatctgaatatgattcctttagcggagaagaagaaggagagaacaatggagaatctttaacaaggaagagattatataataataataataataataagaagaagaagaaagtacttacggatttggattaacgaaagagaaagaacaaaaaaaaagaagattaagaatatttattcaattgtggtctgttggaaactctctgcgaatcggaagtgaagcgtaatgagtttcctcaggtctgaaagttaaactctttggatgtcgaattcaacttctctctctctctttcctctgttttat

SEQ ID NO: 33251 - DNA, 2705 bp, Arabidopsis thaliana landsberg
tcatgtgtgatgcatcagattatgcagtaggagctttttttttccagaaaacagacaagaagcttggtgtcggatattacgccaggcgaacgttggatgacgctcagggaagatatgcaacaactgagaaggagcttctagctgttgtattcgcatttgagaagtttagaagctatttggttggatcaaaggtaactgtctatacagatcatgcagctttgaggcatctgtatgccaagaaggatactaaaccaagactgttaagatggatacttttattgcaagagtttgacatggagatagtagataagaaaggcattgaaaatggtgcagcggaccatctgtcaaggatgagaattgaagaaccccttccgatagacgattcaatgccagaagaacagctcatggttgtagagttcttcggaaagagctacagtgggaaagagttccaccaactgaatgctgttgaaggagaatctccatggtatgctgatcacgtcaattacttggcatgcggagtagagcctcccaacctgacaagttatgaaaggaagaagtttttcagagacatacaccattactactgggatgagccttatctttacactctctgtaaagataagatctacaggagatgtgtctcagaagatgaagtggaaggtatcctgctgcattgccatggctcagcatatggtggtcacttcgcgacgttcaagacagtgtccaagattcttcaagcaggcttttggtggccaacaatgtttaaggacactcaggagtttgtttcaaagtgtgattcatgccagagaaaaggcaacatcagcagaagaaatgagatgcctcagaatccaatcttggaagttgagatctttgatgtatgggggattgattttatgggtccattcccatcttcatacggtaacaagtatatactggtcgctgtagactacatatcaaagtgggtcgaagctattgctagtcctaccaacgatgcaaaagttgcgctgaagttgttcaaaaccataatcttcccaagatttggagttcccagggtagtaatcagtgatggcggaaagcatttcatcaacaaggtttttgagaactttttgaagaagcatggggtaaagcacaaggtcgccactccttatcatccacagacaagcgggcaggttgagatctccaatagggagataaaaacaattctggaaaagactgttgggattacaaggaaagactggtctgcaaagctagatgatgcattatgggcttacaggacagccttcaagacccccataggtacaactcctttcaatcttctctatggaaaatcatgtcatctacccgttgagctcgagtacaaagcaatgtgggcggtaaaacttctgaactttgacaataaaaactgctgaggagaagcgattgatccaactcagtgacctcgatgagatccgtctagaagcttatgaaagttctaaaatctacaaggagagaaccaagcttttccatgacaagaagatcatcactaaggatttccaggttggtgatcaggtgctgctattcaactctcgcttgaaactctttccaggaaaacttaaatccagatggtctggccccttctgcatcactgaggtccgtccttatggagcagtcactctagctggtaagagtggagattttacagtaaatggtcaaaggctcaagaaatacttagcagaccaaatccttccagaggtgacatcggttcatctgcaggagcttcttgatgattaaaggagtaaaggagtcaagctaatgactttaaacaagctcacttgggaggaagtcccatgactatccttgtaaataatttttactttcttgttatttttgatttgttttagttgtgtttgtggttttcagagacaagagaacaacgtggagatagagtaaaaattcaaaacttttactctacagaagacttggagatcgagtgtacagcccgttggagtacaaaattttgaaaatcttctgttgcacctggagaccttgcactcgagtacattggtcgagtatgtgtgatgttttaaaacccaaaaacttttaaatcatcattttacacgaccaacagaagctacagagacttgcagggatttcctacagtttacagtagattttctgcaaaaatttctcagtcaacagagtgtggaccacgcgttgatataagctcgagggagaatctaaaactcaacctcaaccactcttttcgaaacttcactcgacttcaccgattccactcaacctacctctcttcatctcaccaccgacactccaatttctctacaccacgaatcaccgtccaaagagctactcgatccagaccacttcactcgacctccaggaatcactcgacctccgcgccgccgtcaccaattcatttcctccgtcactcgatccagaccacttcactcgattcctttgctatactcgaccaattcatctacatcaaccgccgtctctttcaaaagaagttactcgacttcgattcccagtctcgtagctcaatcgacctccgcgtgacagaatatctcagccgcctcagccaatatcacttgaccgcttaccactacacctcaccaagatttaatcgaccaatcagtttactagacctccaaaaattactcgacctctgcgccgccagaatcgagtagcagagctcgaccatcgac

SEQ ID NO: 33252 - DNA, 835 bp, Arabidopsis thaliana landsberg
gattattcattggactaatccgttgattaattaatattttgaagttttatttttgtcggcaaatactatttaagttttatctgtaagaaagttagtgacgatgaatatcctttaccccactacttgtgatttgttgtgttcttcacacttctattttagttatatcactatcaaatatcaattactattttgatttagtcactaattcgatgataatatatttctaaggatattttaaaggtttatcggccgtttttttcactttttttacagccactgtaaaactgtaactagaaaaaaatcgactgttgaagttgtcggtggtggtggtggttgttgcttggttggattatgatttgcgacaaatatattaatattttaaaaatctggaagagtgacgagtagaggagacaaatagcttgctctttgcatcttcttagccatcccaagattctcctcttcgtcttccttataaactatctctctgtagagaagaaagcttggatccagattgagagagattcagagagtcacatcaccacactccatcttcagatctcatggtaaagcttttaactcttcttacactcatgatccattctcagatttgacttcctttactcggatctcctcagatctaatcgtagtttctgtttttgataattccgatcagatttgaactattccgacgtttcggtgttggaagcaactaagtgacgaatggaatccgaaggagaaaccgcggtatgcttttttgactcttgcttcatcattatacttacctttatcgaaatcaggaattatatgtactgaaattgattgatttgggtgttga

SEQ ID NO: 33253 - DNA, 557 bp, Arabidopsis thaliana landsberg
taaagatttaagggctttaataagttaaatgccgcggtgcaatatttgttaatttgcaccgcagcatcgctgctcggggggccttgtggttgcccatgcgctcaagcgccgctaccagcgccgaatggtccttgccgcctggaacattgccgatgcaggagttgagaagctcctgcgccgtggccgtgttgggcagggaaatacccattttccgggcgtttgcgagtggccagattgaggtccttgctgtgcaggacgatacggaagccgggatcgaaggtgcgcttgaccatccggtcgccatgtacttcaagcacgcgtgaagaggcgaacccgcccatcagggcctggcgcacccgcgcaggatcggcgcctgcctttgctgcgaatagcagggcctcgccgaccgcctcgatgttcagcgcgacaatgatctggctggccaccttggtgatctggccggcgccggtgtcgcccaccagcgtgatgttcttgcccatcagctcgaacagcggcttgacctggtcgaacacctgctgcctgccgcccaccatgat

SEQ ID NO: 33254 - DNA, 1777 bp, Arabidopsis thaliana landsberg
aaactacaggtcctgaaatggaggtaatgtcagaaatcacaaagaccacagagacgagaagtaaaattgacgatcatgatcaaaatccactctatttcacttggacaaagaaatgtcttgtaattttcctgaattatatattgcgtattctgtagttataggaacctgatagacgcgtattgatgtagtctcctacatagtatagaattcatcaattcggattatggttagtcaattcaaggctctccttacaaagaatcctcgaccggtctaacatatacgtcagacgttggtttcgtccagagcgggaaaattggtaaaatcaccaaggaactcgagtcattatacaataaaccggagcggacgctaagatactttcctgatggggtaagaaattgtttcagtctgaatgtcacacagggaacaaagtatcttatcaagccttcctttgtctatggaaactatgatggtcgtaatgtcatcccggaatttgatctttacatcggcccaaatatgtggatcacggtgaagactgatgacactatcaaggagatcctccacgtatcgaaatcaaactctttgcaagtgtgtcttgttaagacaggtacaagtataccttatataaatacattggaactacgaccattggccgacgatatatacaccaccgaaagtggctccctcagctatctttttcgggtttattatagcaatttaaagggctatatagagtaagaaacaatcacttgatcatgataaaattttctataaactagcaaaacatactatgtttagtaatgttttaacgtaagtctatgccaggtaccccgatgatgtctacgatcgcatatggaaccaaatctcacctgaccaggattggcagattttaactacgaatctccaaataaacgcttcaaatgattatgatctacctcaacgtgtaatcaaaacagctgtaacacccattaaagctagcacaacgacgatggaatttccctggaccttaaagtctccaacttcacagttatacttattccttcacttcgcagagctacaaagtctacaagccaacgagacgagggaattcagtgtggtgttcaacggaaatgttacacttgaatcttatagtccaaagtttctacaaatgcaaactgtatacagcaaagcaccaaagcaatgcgatggaggggaatgcttgttgcagttagtgaaaacgtcaaggtccactttgccgcctctaattaatgctatggaggctttcactgtgcttgatttcccacagatagaaacaaatgtagatgaaggtatgtgtgttttttatatacttatattcttttcgggttttaatgttaagctttaaatatataccgaacttgaatagaaactagactaaccatatatatagtagctcaagaaagaaagatagaaacatggaacctttgaagacagttacaaaatatgaatattgatatcaactaactttatacataattactagtgattgctatcaagaatatacaatctacttatggattgagtagaataacctggcaaggagatccatgtgtccccaaaaagttcttgtgggatggtttaaactgcaacaactcggatgattctacgccaccgattatcacttccttgtaaggacatgatttcatcgttttcctacttttcttttgtacacttatcatactcattatttttttcatcactagaaacttgtcttcaagtggattgactgggattatcgcgctgaccatgtcaggatctcgcc

SEQ ID NO: 33255 - DNA, 1101 bp, Arabidopsis thaliana landsberg
atgtggaacgaaaaagtagtcgcataaaaaaaagtgggcataaagttaagtatcttctaagttaagtatatccataattgggaatccatataatataaactagtccacgtggattatggtgaaggttacttgtgcgacaatgggtggaactcattctatcatagcaagactctcttttcctacttcactcagagcagcaattgaagcacttatattcttgcacactgaatgaaccaatgtgtcaacattttctgctaaggacaagtcttgaatcttaatctccttgttaagatagaagaggtataacattagcgtatgagtaacatccattataagaaacttaaagtaatagtaaaatcctttagggagaaaaacctcggatacatcaatagaagatggttttgttgcggtatcgtaaacagcaggaggttgaggagaaggcatatgctatagtaatttgaaaatgtagttaggtatataatagttaaatatttttggctagtaacagatattcaaaaaatctacctcgtctctagttttcgactcagtgtcatagatgggttgatgagaggtagggacctctgtgctattagcagatataaacttgggtataaacattgatggagtttcattctgaaaaaagtaaaatatgagaatatataatcaatgttttggaaacaatatgtgaaagaacttaattaacaattaccagatagttttgtggggaatcaactgaatccttgttggtctccctggatatctcatcatgtggggtatagagaagttaaaataaattattgactaatatctaccaatctataaaattaacataaatcaagtgcggcagaccttatgtgtttttaactcacgccatgacagatcatcaacaatcttatcagaatctcctgaaactgcaaagtctccatcatgcactgaatcagataaaacattgtctccctcgtgcaatgaagttaatggttctgaaggggagttgtgatgtttggagaatatacaacagggttgacaggagattcaacgatgtgggtggttaagtgctaggcgtactttcttaaatggaggactagttgactgtctggactg

SEQ ID NO: 33256 - DNA, 1863 bp, Arabidopsis thaliana landsberg
atcccgtttggctgcagcataaattgagccaaaagatgaatgcagttcgcctaatccggtcatgtgttttagatcctaggaaggctgtgtcggagataatatccaaagcatatttcctttgacagagatacatacccgtagagttccgagccacttcaatacccaaaaaatatttcaaaagtcctatatcactcatatggaagcacgacgaaagataggacttgaagtcatccatgaccgtcggagaactagcactggttatcaaatcgtcaacatacaccaatacacgaatatgcgatcatttttgtcgagagtaaacagtgaataatccaacgccatactcttgtaagcttgttgacagtttcgcaaaccagcatcttggactctgttttaacccatacattgacttgcaaagtctacataccttaaaagaatcagaagcttgaaatccgggtggcagtctcatatatatttcttcctctaaatcaccgtgtagaaacgcattgtagacgtctatttggtgaacatcccttctatttttcacagttgtatccaaaaccaaccgtacagttcccatcttggcaactggtgcgaaagtttcaccgtagtctacaccttcaatttgtttgttaccgagagcaactaacctcgctttatgtcgttccaatgtaccgtctaatttgtatttgagcttgtaaacccatttactgcctattgcttgctttccttgtggcaaatcttctatcgtccatgagtggtttcgttcttgagcatcaatttctgaagacatagcacttttccatttctcatctttcattgcttgtttaaatgactttggttatacgcccgaagttattgcagccaaatatgcttgatgttgagtagagaaacgctcacaagaaatgaaatttgcaattggatgactcgatgtagaatcagacgttgaagccgtcttcgatttcagaattcccgtgtttaccacaaattctttcaacttcactgactgagttttctgcctttttccgcgacccaattgttcttcttggacctacagattcgtcgtcgatgacatgattggaacaatcgccggagttggcgtcggaatcatagtggagcgattttgattttcagttctttgacttccctcgatgatgacgttttgaagtgaaggagcgtgttcagaaattgggttttcaataacccagttgggcttggtgtaggcccaatagtcgattgtggtgttaatgggccatcctcacgaattgagcttgtacgtccattttcttcttcattttcgacaaacagagactgtaaatttagaacttcaagttcttcttctgcaatttcttcttctacctcaaacttgaatggaaattcattttcataaaataccacatcccttgaaacaaagaattgatatttttccaagtcatataacctccaccccttttttccataagggtatccgatgaaaacgcatcgacgactccgaaaagcaaacttatctcctttatgaaattgatcatgagcatagcagagagtcccaaacaccttcatatgattgtatttcggtttctcattatatatcctctcatatggtgtcattcctttcaacaccatacttggagttcgatttattaagtaagccgcagtgagaacacattcgccccaaaacgctatcggtaaattggcttcaaaccaagcgctctagcaacattgctggtgttttctctccactcttccgttctgttgaggagtgccaacaaaagacgtttcatgaactatgccttgttgtttaaagaattcacttagacaaagaaattctgatccgttatcgcttcttatacacgaaaaaaagacccg

SEQ ID NO: 33257 - DNA, 798 bp, Arabidopsis thaliana landsberg
ctgtgtgtatttctgtcatggccattttacaattcactagcttttttgtatatgtctgaaccagacaatataggggcccggttttttatggctatagactccagatggagacctccggaagaagattgagaaacttgcttcttctctaaagttacctttgaagaagcggtttgtcgtcgatggatctacaatgtcacgccatagcaatgtgagaagctcgagatctcttcctacctactttactctaggataccattagaagcttacgtatattgttacataacacaggcttacatgtatggaccctttaataacaaaaggattgttctatatcatacgttgattcagcaggtactgtgactcttgatgcttcaaacgagctatactcacatttctgtttctggttctgaaacataacataatcttctattgtgcagtgcaagaatgaggatgaaattgtggcggttattgcacacgagcttggacattggaaactgaatcacactacatactcgttcattgcagttcaagtgaggctcaaccgacagttcaaaaacttactcacatctacatttcacttaagaaatcatgtcttatgaccctctctcaatgttttgcttgcagatccttgccttcttacaatttggaggatacactcttgtcagaaactccactgatctcttcaggagtttcggatttgatacacaacctgttctcattggtttgatcatatttcaggtttgttatttttgccttttgacactatctaatgaatcagggatgattaagaaaaaaaac

SEQ ID NO: 33258 - DNA, 602 bp, Arabidopsis thaliana landsberg
ggctttttatatgggcctttcacatctcatttatgctcatgatccaattatcttaagatcttttacttgaaagtagaaaagagacagttaaaaaaaccattacggctcatccatctaaactttagattgacgataaagtgaagcggaatcaatcaggagcaacacgagctaagtcacatacttgaccttctagtacattgctagctcatagctcacgaacacatcaagctttagatcgatttatatgatagtgatttaaatcaaagtcaaaccacttcgagttcaaaatttgcaatttttgtctccaaaatttaacgtataacataggctaatagctagcttattaagaaagacgaattaattacaattcgaataaagcttttaccaaagaattaaaaaaattcgcaatagatttttttagtattaaggaaatagatttttttccgtgcgtgtctcggtctcactttctgcctttgggtccatcagcgagcgagagggcttttccctcctagtcactctctttttcctttctcgagaaaatagcagaagaaaaatgacggaaaacgaaggaaacgacaagaaaatcgaaggatctagtccta

SEQ ID NO: 33259 - DNA, 1354 bp, Arabidopsis thaliana landsberg
tatcggtcaacgggctagtttaatcttttgtttttacctttttggggtcacttcatatcaatttttagatttttgatggatcttgggtataatttataatcgataattttgaaaaaaaatgtataatctattcaaatgtttataaatatgtatttatacatatatcttttgtaaaattagtattggcctatttataaatatttattgtgttgaatgttgatgacttttttaaaagtttttttttattatagaattaaaatacttttgcctaacatataccatttttgtttgaagattagtgttctagaatttgaatttggattctatctgtatagtgtccaagcctccaagatttatacatgcgttattaacagtctaaaggatcttccaaaacataaaatagagtgtgtcttctcgagtactctctgacgctcaagccaatagaacaacatgattatacaaaaagctagttctcgagggactagttatgcctcagctctgagtgttcttcgaaagtggttcaagactcaatttgaaccgaatatttgaaccgaatcgatccaaaaaatattcgaactgaactcaaaccgatttaaaaaaatacttgaatagtactagaacctttgtacctgaagaacccaagatccgaagatagccgaaaatatccgaaatacaagtatatatctaaaaaagattagttgtacttatacatataataaacctagtaaaaacgaatccgaagattatacttcatcttctataggattgatcttcatctaaaattttacttcaatctggttgaattatgccagtttgatcacaatccctaatcgatttatcttggcaacactaatattgttgaatcgatagacctattttagatgggcattatatcattaccgaagaaagttttcggtaaagtgttttgtaaacatatcaaacacacataatagtataatacttgtataaaattctactaacaaaagacagtttagttgttaggaatttcattgcatatatacttatgacatacgaaagtaggatacatttacaattgtgtttagagattgacaaaaaaaaaatcctaaaataacttatgcttgaataacacgctccaataagaaattgttacacgaattgagcacacacgggtagtataaaaaggaggaagaagcaaagaaaaaacagtgaagagaaaatggagatatggttacttatcttgggctctctctccctctctgtccttgtcaatatcctcttctttcgcctccgtgactcctcgtctcttccgttaccacatgccctaacttcttcccttccttggacccttcaatggctcggcaaggttaggtgg

SEQ ID NO: 33260 - DNA, 722 bp, Arabidopsis thaliana landsberg
aggccaggtctctaccgagaagggcatctttgtcatgtggtgcgacgagagtcacccgggcgccgggcgtggacagcagcagtacgttggaccgggcgacgcggatgtgcaggatgtccccgacaatcgtgacccgcagcccgtccaggccggagccgcgctggtctccgccgttcaggctgacaccgtcccgccccgggccgaccaggcgctcccggatggtgaacgcgtcgagcaacgcctgcgtggggtgctcgtgtgtgccgtcaccggcgttgatcacgttgccggtcacccactctggcatccagtggagaagcgctgaggcctggtgccggatgacgatggcgtcgctgcccatcgactacagggtcagggcagtgtccttgaggctctcccccttggcgacgctcgatcccttggccgagaagttgatcacgtcggcggacaggcgcttggcggccgcctcgaacgacgtccgggtccgggtggagtcctcgtagaagaggttgaccaccgtccggccgcgcagcgtcgggagtttccggatcggccggcccgccacgctggcgagctccgccgtggtgtccaggatctggatcgcgtcctcgcgggtcaggtcgcccgcggaaatcaggtgccgcttcaccggccgcccccgctctcgttcccgacatgaacagcgttcccggcctccggggcgttcccggcatgagccacgg

SEQ ID NO: 33261 - DNA, 1852 bp, Arabidopsis thaliana landsberg
cttcagattgggtcaaagctcttagtttatggccttcatgtaaatgttttttccgctgtcaattttgtcaactaaagtatttaatatcactacttatttggttttcatgcacggtattttattaccttccttaagctttacgcaaaaaaaaaaaaaaaactactttccaatgacctttgtctggtcaatgcttcattcgccaatgcaccattccaacatacttattttgaaaacttaaaaaccatcaatccgaaaaattcgtcttggtgttagtattcaatgtcttgatctccagattgcacgtatatgaatcaatattaatacaccaaaaagtttttaaaattgagattgaaaaagtcatcattacacctttttaagctaaagaaagaaagaaaaaaaacctactttataaaactcctcgtggtccattaactttgtcggccttaaaggaaacgtcgatcaccagtaaccttcctaccaatcacaagttcacttcccaaaaaaactacgaaaaagaaaagtaaagaagatgctatactgattcttttttgaacaaactcatatttcccatctaggatcataattcatacatttagacagttgagcccaaaatattgaatgttatgggcctaagcctgtattaacggtctactatatacttcttaaatattgataattatgggcctaagattgtattaacggcccatttagttatcattctatgtttcaacgccatcttgcgagtcactttgcttagtttttctcatcatcatcttctctatgattcttcagaaaacgatgcaatcaccatttcttcatctctgtaaaagcttcacttcttcttctccactttcatgtcacaaccacaatatatgctttggatttcataatgctctgttatctccttcaatctgcaatttccagcgacgaaacaatgtcaacgggagaaaaatcgttgcgcagggatcaagactaaacgacggaaatagccgtccggcgggaaacaaagggaaagtaactctgaaaggtaacaaagagaatatatggagcgttgacaacgaaatggcggagaaggataagcgtaaggtgaagccaaaaggaagaaaaagcgggaagagattaggcggtggaagaaagggtaaattcggtagagttttggtttcagggacgatgttgatcgaatccgagactgttcttcaaactcaggtatcgattttcagatttcaattttcacaaaaatacgtctgatagctaattactgattgaaatagattttgataggagcctgtgataaaaccagtatggagaacatttgcgagtagtgtaagtgggatttggaaaggtgtaggagctgtgttctcgccgattactggagagatggaaccgattgaaattgggaagaagaatgagagtctttatgattgttatactctttctaagattgaagcgttaccatctccttctagtggagctaatacagagtctgagatacagaggaagatcaattgggttactttaaatcctcatggagagtgttctgagagtaaagatgaggtttttgttgatcagagtggagtagatagtcagttgcctaagtgtgagtcttttaacttgaaagcaagtgatgtcatggaagaggattccatggtagatgcacccggcctcgtttacttcgaggtactattatcttgtacatttcatgggagctactagcttagctgtgattctccatttggctgagataatgaagttgttatggactttgatgtggctgatatgcaagatggatcgcattcagaggaccaggcaccatccctgtgtggagatgagtgaatccaactattacctcaca

SEQ ID NO: 33262 - DNA, 1234 bp, Arabidopsis thaliana landsberg
catagattttttccttggcggtgacgagaagcgtgtagatatggtctctattatacagaaatgtttccctttttgcatactttttggaggagatggaagttatatgttaccctatagtctccatagtgatacactgttaacaaatcttcttggccaggtaagctctctttgtctgcgtgttttttataccaaaatctccactctgaaatctcctaaacgctctccaaatgactattccagcacatcccgccgagtgtttggcaccggtttgttgctggtttaaatgctcagcttaggactgtgaggcacggatcaattcggtcagcattacttcctgtcattaggtggataaacagccatggaaatcctcaactcgaattccatggagtaagaattgaacttggatggtttcaagctacagcttctggatattaccaacttggtatcttggtttttgttggcgattttcctctgaacactgtaaacagatcactgtcgttcagcagaagtgacgacgagtcccctgggtgagccatgatagattgtgcttctctttgatctaaccttgctgttgtctctttcttagaaattaaaggcattcaacctgcttaatcataaatctatttctaggaacaactctgcatgtccaagcaaatctcttatcgagttgcagcaaaacttgatccaaccaggacatggattatctcggaagaggatcaatgggggaatcaatggaggcctcatcaatgagatttcactagaatctttggagtatcgaagggatttactttttccattttctctcttattgaacaacactcgacctgttgggcgtcaggttacattttaatctctcctaaataattcgtcttatgatttgtttttactattgtgttaacataagcaaaaacaattcttgtggtttatgcaggatactcttctccgttttatttccatccttctccttgctgatctttcagttacgctacttgcattacttcagttctattggcttgcccttgcagcctttcttgctatcctcctgattctccctctctcccttctttgcccattccctgccggccttaacgctttattaagtaaagaaatgagaagagcctcacttactcgtatctacggcctgtggaatgctacatctctaacaaacgtcgtaagtcaatacaaacggaattcaaaacaagtgaccttgttttttcactattgtatcttaact

SEQ ID NO: 33263 - DNA, 3343 bp, Arabidopsis thaliana landsberg
cacaaatatatgcctgattcatttcttgctacttcaatgcccaaaaagaactgcaaaggacccaagtctttcatatggaagcaagacgacagatagtctttgaaattttttgtagccttgacggaacttcctgcgattatcaagtcatcaacatatatgagaatatggagtcgtgttgtacctttgtcatatgtaaacagagagtaatcttccaaggactgctcaaacccatatgcaatcaaagcagatgacaattatgcaaaccaacatcttggagcttgtttcaagccataaagagattttcttaaacgacaaactttgttcttgtcagacgactgaaatccgggaggcattctcatgtatacttcttcttccaagtcgccgtgtaagaacgcattatggacgtccatttgatgaacgatccaaccacgttttgcagcaatatctagaaacaatcgcaccgtacccatctttgcaaccggagcgaacgtttctccgtagtcttctccttcaatctgcttgttacccatcagcttgagccttcttagattgtggaggtatgacataatctttcaatttaacggactgcgtcttttgccgtttacctttgcccaaagaaggttctacaatttgagttgcagcttgtgtagaggtagaagacgtatcacgacttcgtagtgtttgtgtcatgggctgaactgcaacttcattctgttgagccgaattaataggcctagtttgttgacttgtagatccaatttctcttgttgacctttcagtgactggacccaaatttatttgcctttgtaaaacaggcccagttaggcccaaatcttcttctaaaataattccttctgaaataggagcccacaagacttgtccctcttcttcttcgtcaattagaggcaacgtggtttcaggagagaaaggaaattttgtttctgaaaacacaacatctcgtgacacaaaaaattcaagtttctcaagatcataaactctccaccctttctttccatgtgggtacccaacgaaaacacatctacggctccttgatgcaaatttatctccaccacgtgtttgattgtgtgcataacacaagctcccaaatacctttagatgatcgtatgacggagctttgttatacagtttctcatacggtgttgtgttgccaagaacagaacttggtgtcctgttaatcaaatacccagccgttagaacgcactctccccaaaattcgatcggcaaattcgcttggaacctgagagctcttgcgacattgagaatgtgtctgtgtttccgttccacccttccgttctgctgcggtgttccgacacaggacgtctcgtgaacaactccattcttttgaaagaaattagttaagcaaacaaactccgaaccattatcactgcgaatggttttaacttttgtgttgaattgacgttcggtgagagcaaagaaatttcttaactgctcaggtgcttcagttttgtcattcaatagatacaaccaaactcctcttgagtaatcatctactatagttaaaaaatatcttgctccagaatgtgaaggaacccgatacggaccccatagatcaacgtgaatcaactcaaaaatcatcgaagttttattcatactaatcggaaaacaatctcgtgtttgcttagcgcgaagacagacatcgcatgctttattcaaattatcaaaagaaacagaacttgaaacagaaggaagcaatcctacaacttttgcagaaggatgacccatcctattatgccacagctcaaacgacttatcgtccctcgttgtgactgctgctgcgatctccgtactgcgcaagtgaaaggttcctcctattctcttaccagctccagtcaccatcttcgaaactcggtcctgaaccacaagaaaactatcagccatctgaaccacacaactgttctcatccatcaactgtcccacagaaatcaaatcagatttgaaaccttccacaaagtaaaccgacttcataaccagattagaaccaagacgtattgatccttctttaaacgaaacttgttctcttccatcagctaaaataatcaagacaggtgacatatttctaacatttgacagagcatccattctgcccgttaaatggtgagaagcacctgtgtccataatccaagagggaaacgataacttaccagtgagtttctcggtggtgttctccttgccagcattgagaatggacttaattgtgcgccattgttgctcactcagaccgcttactgcatcacgatcttgatcagtatgaacatggttcacttgttcttggttttgattctcaatgcttggaacattcacccgattagcataagtcatttgtcctttgcctcttcctccactcgagctcgctccaccgcgacctctgccttgtagtgttctaccttttggtctatcaccccaccactcgggatagccaatcacagcatagcaccgctctgcagtgtgaccagaccgattacacagtttgcagaagaaacttttctccttttcgtcagttggaagacgtggttttgattgcaccgcaaaggctgtcattgacggtgactcttctacgggaacacgcaagtcctcttcctgacgaatgatgttgtacacctcttcaagtggttgaatgggagtccgagccaccagagttgatcggaccgcccgaaactgctcatcaagaccattgagaaattcatgagtcttgtcttcctcccgatctgcctcttgagcagcaccaagattgcaggtacacttaccacaacgacaaacacgcaacggatgatgtgtggcgaggttatcccaaatcctagtcaacttgccaaagtaagattcaatagccaaacctctctgtttgcagcaagctagctcagatttcaattattgtagtcgtgacccattcatgacagagaacctctttttcagatgttcccacagatcttgagccacatctctatgagaaatggtggatcgaagagttggttcaattgtcatttggatccatgacacaagaagagcttgaatcgtcgtccagtcttcaaaatcaggggaagtctcttctggtttggaaattgaaccatcgagaaatccatactttttccgtgatatcaacgcggttcgaaaaccacaagcccactcttcatagttgcttcccttcaagagaggatgagagattacagctccaggattatcagcagaagtcaggtcataaggagagattgttctccttacttcagtcgcagcggaggtgttgctttcagttgacattgtcgagaaaaaaaaaatcaagagttttgctttcaggctctgatccatc

SEQ ID NO: 33264 - DNA, 982 bp, Arabidopsis thaliana landsberg
aggcattttctctgcaactgaatagtatcttgagaagcaacatcaatagtaccattgaggaaaccagtgtaccaagaagcagagagctttggagacctcttgcgaccaggatcactgaaattcacatagtacattccatagctggtcatatatctacctattaactcatacaaatcaatcatcgaccatacaaagtaacctctcgtgtccgatccattcctgatcagtcaaaatatttgtcaggaataaagtcgatcaatgctagtatgatgaacttgaagatgaagaaggagagttcttttacgtgatggcgttgtgcacagcaccaatgtaagcttgaatgaattcagctcttggtgtgtcttgtagcgttgaaccatgtttcatcggtttacctgtttttttttttgtgtgtttttttggtgtgaattgaagaatcttaagatcaaaaacagagcaagtagacaaaagagaatgaagtttgtaccattttcaagaatgtagattggaggattgttatagctctgctttatatgctgaagaataccttccagaccccatggaacagcatcaacttcaagaaagcaaaaaggatcaaaccagagcttttggcctgaatatatgtattgtgtgttctgcggatttattggtccttacctcgaataatgaagcattcccagcggctgtccaatgaagaagagttatatatcagctaaaagagttcgatcgaatgaaaagaaactaggcttaccgatcagatatgcgccaatgtctgcaaagaagagtttgttaatgctggtaacgagagaaggtgcgggtcggtttgtgacatagaatgtgttgtagtgtacaactcctacaaagtcagatgatcctttcacttgttttgactcttcttatgagccaaccgccaatctcgaccccaaggttctcttcaaaatataaagataatccccaactaccaaaggctttaacatcctgg

SEQ ID NO: 33265 - DNA, 580 bp, Arabidopsis thaliana landsberg
aaacttctccgatttgatctcaccggaatctcaccagagtttgttcatcctctcattcttcttcttctattgaacttctacacgtttttcatttcgtctcctttgcgattcagtctctttggttagctgtttcgattctccatgggtaaacgaaatggaaaaagtgttcgtcggagtagttcaccggatcttcctgtcattgcttcaccgaagattcatgagcagtcttctggttcatcagcgagagctccaggatcctcgattcctgctgcgattcatcaacaagctcaatacagctcatcgcgtcactttgaggtatcagattctcctgataatagtcacagtccttatcatcttgttagctccgatcatcctggtttagtcctagctccagaactgttagatggaaacaactatggaacctggattatagctatgactactagcattgaagctaagaataagcttggatttgtggatggatctattccaaaacctgatgatgatgatccttattgcaaaatctggcgtcgcctgaacagtatggctaagtcctggcttctgaatagtgtatcaaagg

SEQ ID NO: 33266 - DNA, 4851 bp, Arabidopsis thaliana landsberg
taggcgcatccgtaagcttgatgcccctctcagtggccaagagacttggtttcagtaaatacaaggcttgcaacatttctttgattctagcagatagatccatcacaatacctcatggtttgctagaaaacttactagccaagataggcacaatggaggttcctacagatattgtggtgctagaaatggatgaagaacccagggatccttagatcctaggaagacccttcttagctacagctggagccatcatcgatgtcaagaaaggaaagatcaatcttaacattggcaaagaactaaagatgaacttcgacaacactaacaccatgaagaagcttacaatagaaggaaaggtcttctggattgaagagacggatatgttggctgacgactgctagaagagctagcagaagaggaccatctacagaatgctcgaacaaaggatgggaaagaaaaagatttacacttggaaactttggggtaccggaagctgttagatatgcataaagaagtttagaatccagaggagtatgaggatttgtttggaaacgcaaaggagtagaatatactcgatcacgtcattcaacagactgtccacccaatccactcgaccaagcactcgatcacaaccttccctgtgaagccgatctaacatccggcgactggtatgaactcaaggcaccaaaggtggaagtgaaaccgctgccaaaagggttaaggtacattttccttcgacagaactctacttaacctattatcattagtgatgagctaaacaccgatcaagttaatctgctatttacagaactgaaaaaatataggagagctataggatattcactagatgatatcaaggggatctcaccgattctatgcacccatagaattcatttagaaaacgaatcatattctagcattgaacctcagaggagattaaatccatacttgaaagaagttgtaaaaaaagatacttaaactattagatgcaggtgtaatctaccctatatctgatagcacttgggtatctccagttcattgtgttcctataaaaggaggtatgacagttattaaatattcaaaagatgaactactacccacaaggaccataacaggacataggatgtgtattgactataggaagcttaatgcagccactaggaaagatcatttccccttacctttcattgaccaaatgctagaaagattagccaatcacccctattactgttttctagatggctatagcggattttttcaaatccctatccacccaaatgaccaagaaaaaactacattcacgtatccctatgggacttttgcttacaaacgaatgccttttgggctttgtaatgcacccgccacttttcagcgctgcatgacttctattttctccgatttgatagaggagatggtcgaggtattcatggatgatttttctgtgtatggctcttctttctcctcctgtttgctcaatttgtgcagggtactcaagagatgcgaagagacaaacctggtactgaactgggaaacatgtcacttcatggtcagagaaggaatcgtcttggggcacaaaatataagaaaaagggatagaagttgatagggcaaaagttgatgtcatggtgcaattgcaaccaccaaaaactgtgaaagatatcaaaagttttctcggacatgcttggttctacatgagattcatcaaggatttctctaagttttctaggccactcaccaggctgctatgcaaagggggtgagttcacgtttgatgaagaatgtctggttgctttcaaatcgatcaaagaagcactgatctttgccccaatagtccaagcacctaattgcgatcacccttttgaaatcatgtgtgatgcttcggattacgctgtgggagcggttctaggacaaaagattgataagaagttgcacctcatctactacgctagcagaacgatggatgatgcacaagtaaggtatgccactacggagaaagaactattggccgtggtatttgcattcgaaaaatttaggagctacctggtaggctctaaagtgatagtttacactgatcatgttgctctaaggcaaatctatgcaaagaaagataccaagccaaggttgctgagatggattttgctgctccaagaattcgatatggagatagtggataaaaaggggattgaaaatggtgtagctgatcacttatcgcgaatgagaatttaagatgcagtccccattgacgacaccatgcctgagaaacagcttatggccatccgggaagtgaacaaaaaattcaaaagcagccagttttgggatgagatgcttgcagtagaggagaaacttctgtggtacgctgattatgtcaactacttggcatgtggtgaagagcctccgaatctgtcagggtacgaaagaaagaaattcttcaaagacataaatcgcttctactgggatgagccgtacctctacactctcttcaaagataaaatctataggaggtgtgtctcagaagatgaaataaacggtatcttgcagcactgtcatggttctagctatggcggccattttgcaacgttcaagacagtatctaaaatcctacaagcaggattttggtggccaaccatgttcaaagacgctcaagagttcatttcaaagtgtgattcgtgttacagaaggggaaacatcagcagaagaaatgagatgccccagaacccgattttggaggttgagattttcgacgtatggggaattgatttcatgggtccatttccgttctcgtatgggaataagtatatattggttgcagtagactatgtgtcaaaatgggtggaagcaatagccagtcctacgaacgatgctagagtcgtcctgaagttattcaagagcatcatcttcccaagatttggagttcctagaatagtcattagtgatggaggcacgcactttgtcaacaaagttttcgagagtctactgagaaagaatggggttaaccacaaagtagcgactccttaccatccacagacaagtggccaggtggaaatctctaacagggagataaaatcaattctagagaaaactgtcgggatcaccaggagagattggtctgtaaagctcgacgatgcgttatgggcatacagaacagctttcaagactcccattggtacaaccccgtttaatcttctttatgggaaatcctgtcacttacctgttgaactggagtacaaggctatgtgggcagtgaaacttttaaatttcgacatcaagactgctgaagagaaaagattgatacagctcaacgaccttgatgagctccgcctagaagcatatgagagctctaaaatttacaaggaaaggaccaagtcgtttcatgacaagaaaataagttcgaaaaatttcaagttggtgatcaagtcttgctgttcaattctcgcttgaagctttttcctggaaaactcaagtctaggtggtctggccccttcagtgtcactgcagtaagaccatatggagctatcacgttgtctggaaaaggtgacgacttcacggttaacggccaaagactaaagaaatatatggcagaccaaacaattccagaaggaacttttgttccactggaagagccgcccaacgcccaataagcgtgaggagtcaagctagagactctaaacaacctcacttgggaggaaatcccatgactatctttgtatataattttaactttcctattgctttctaacttactttggtggtgttttaatctcaggaaagtaagcgacaaaaatcaaccacagggtgaatagtgatttacagtgtgaatagtgatttacagggtgaatagtggagttactcgatcacgaagtcaagacggtttttcaaactttgcgatcaagtggtttatttcccgggaagcaatagttcgaaaattttgataacggagctgaacgaaggaacgaaaacgtgcagtgacccgtttaaatccaacgcgtgatcgagtacatggtttgggttaaatcaggccatcacttcccaatgacaaaaccggtgaagcccaccttgtcccccatgacaaaaatgtcaacaaaccaatagttctcaccacccacctctcatcacgtttttgccaagggaagagctctcctcaccaacctaagggtgcaactacctcctcctctccctataaataccaagctcctcatccaatgttaatcacacctcacaacaacatctccttctctctcatactcgatcgcaagcttctctctctttaagagttgccttcactcgatcacaagtctctccacccttggaagcctacttcactagaccgcaagctcccgacgcctcgtctttcactcgatctcaagccatcctcatcaagtccactcgatcgcaagctcccgagaaacggctcttgcctctttcactcgatcgcaagctcccgagacgtctccacgtttgtttctctccctcacttactcgatcataaccactccgagttcctgtcaacctcttttactcgatcgcagtattgctgaagttcaagacgtcactactctcacttctaccccttagatttgataactaacatactaaagtttagctgtgagttttgatcaatcccaacaacaatgacctcatacagttactattcatcaatggatgcagattttaacattgactaggcggaatcatggtcaacatgaccagagagagaagcatacgaataccaacgcttccgagaaaaaacatatcgagcagtcgccaatgacaggagatgataatagatagccagagggaagaggtcaatgacggaaaagtatgagctacattgatgaatagatggaagatgatgcgga

SEQ ID NO: 33267 - DNA, 1811 bp, Arabidopsis thaliana landsberg
ctcttctctgtcatacttgggcttagttcccattccactggggaaaccaaacaatccttccaagcgcttgattgataacctatactcatgacgatacacagagaatctcaagaatcccaatccttcacaattcaactcatcagaggtcatactttggtagagctccacttgcagcgtggagaggaattgaattgtctcatcttcatatgctatatacggataagccatcagagtgtccagatggcaactctggtacaggtgttgaacatcctccaacagtccgagttgtgcaagtgtggtcgagcaaggatacctcgtgctacataactcattcagcttgaagagcctaatatattcctcagcaggcaatacatcgggcttgtgcagaagtatggtgcctctgcgattatgctcaggcatgtactcgtaaaccagatcctcatctataagctcatacctctttttcatttttctcttccctcgggctgtctcaacttttcttctaaaactatcatattctctctgttctctctctagccttgaagacgacgactttgtctcatccatgttatactcatgattctcctacagaagatttagaactcaaaactcaaatgttaacaggtcagtctcaaagataacaatgaaaccaaaatcgtaatcaacaagcaatgaaatggaacaatttggtcaagtacagtattgtaatcaagtaaactaaagtgctcccgagttactctatcaagaattggatcgagtagagtagagaccggtggtcgagttaagttttgaagttgagtggctatgttgattgctagcaccagaggtcgagtacttcttcgatgagccggaattggttgggacaaaaccacaagttgacggtcgagtcctgtggttgtaatcgactagttcctgagacttcgacggtgaaggaggtggggaactcgactgtggcggcgcagagaaggtcgagtgtggtgagaacaaagtgacggcgaacggaaaagtgaaatggtggagtatagcgacgaactcaagtgaagttgagtcgagtaactctttggtgaaagatggcgattcatggttgactagagaaattggattgtcggtggtgagatgaagagagatgggtcgagtaggttttacttttggggaatgtgtggtcgagttcaaaaggtatggtggagattgattctgtgattctctctccatcttatcttcaggaacaaaacgcgtggtccacactttgttgacttgtctttggactttgttccctgtttactgggaaaacctcaggaaatcctctataaacatgttgaactccctgtaagtctctgtatcttctgtatcttttgttgggcgagtaaaatgatgatttaaatttttttgggttttaaacatcaatcattcttcgaccaatacactcgagtgcaaggtctccagatgcaacaaaaagttttaaaatttttgcactccactgtactgtgtattcgatctctaggccatctatagagtaaaagttttgaattttcactttaccttcacgttattcctctatgtctaagaaccacatacacatcttaaaaaaatcaaaactaacaggaaaagaaaaacttattcacagagatagtcatgggacttcctgccaagtgagctcgtttaaagtctgtagcttgactcctcacacttatcaagaataaaatgaatgataaatatgtgtctgcatagtcctctctggtatcatcatcatactcaacgtgctccctggagaggtgcgcagcagaatactcaaataccctctcttcaaaata

SEQ ID NO: 33268 - DNA, 1678 bp, Arabidopsis thaliana landsberg
tactatgtcttctttctaaaacttacaaattaaatccaactctttggatttatatttgttctctttgttctcgtaaatgtcttctagtgaattttttttttcatgtcgtcaatctctatggcttcttcctgttcttctaattccccgctttcgttttcttctgaatcatatttgatttttatcttctctctcattttttaaaattattttttctttatggatctttgtagctttagcaaaaaccgaccagctgagaagatgtcttcatcgtacaacacaattgctttgtcctccactccgaccttcctcctctcaagtgccgctgccggacccggaccaaacaactttaaccgtcaagaggctgcgatgaccatggttcaacaacaacccacttcctccgttgctccaccacccaagaagcgaaggaaccaacccggaaacccaagcaagtacctcttacttaatttttttatgaataataagtgaagaattttccattttagccgaaaataatataagaaccctaatcatttccgataaggaaaaatttttgtttagattatataccttttattcgatcaatttaatcaaagaagattagtatttgatgtgcttgcatacaattctctcttgattaatgggttcttgattttttttttttttttaattgagcagatccagatgcagaagtgatcgcattatcaccaaagacacttcttgcaacaaacagattcgtttgtgagatatgcaacaaagggtttcaaagagatcagaatctacagcttcacaggagaggccacaatcttccatggaagctgaaacagaagaacaccaaagaacaacaaaagaagaaagtctacgtgtgcccagagacaaactgtgctcaccaccatccatctagagctcttggggatctcacagggatcaagaaacacttttgcaggaaacatggagagaagaaatggaaatgtgaaaagtgttcaaagttctatgctgttcaatctgattggaaagctcataccaagatctgtggtactagagattatagatgtgactgcggcactcttttctcgaggtaacccttttttaatttttcatttttttgttctttatgtcaagttctttctttgttttttgcctttcttgaaaattttactgatgtttctgtgacaaatctaaattattgtctatctatatagagataggagtcaatagtttttcttggagtagtttgatatatatagatgaatttaatgctttcgtgtgactgatttcaattgtcttcttttggttatgttctttgacaaatctgcttgtgactgtccatggaatatagcttgagtgcaattaaatgcagtggcaaaattcatggattaagacattatatttacatgttggccattattgcgtgtatatataattttttttttttttacataaatcacttcacacttttttagagctaatatgtatgtatttgtgtaatataaattaatttgtgcccaacaaaaatgattttttaataacattatatgtaaaatctggtgtggatttaatgaggagataaaaagaagcctgcaggtgaatcttctccttcatcatcataatggtgaaaaagaatctggatttgattttgtaattttttttttgaaaaagaattggatatctatgatttgat

SEQ ID NO: 33269 - DNA, 569 bp, Arabidopsis thaliana landsberg
ttgttaggttcggggatcaaacaaaagttataaaggaattagggaaggatattgtaatttaagattgtaagaaagataagaggtggaaaagggaagaggagagataaggagataaaagggagagagccacacaacctgttttcgcaacaaagaccacacgaccaaacgccgaatcctcggggcacttcttcactatctctcgctctcttgttttatgtttaggattattattgcactagacgacacataattcaaactatatttaggtgaatatctattgaatgtatagaatatggagactttgtaaaatacaaactatatttggccatacgattaggatgtttgaatttcttttgcataaaaaaattggttagaaaaacaagttagaatacaactctttattactcaacattggagatatttaaatgcaaataaaagtatatggaatcattttgttttagtgtttccacactgagataaaatcaacctagcacagtagcaataaggtgtctaaaacaaacatgatcaatgaaagtcataaccctcaacctatgaccatgactatgcat

SEQ ID NO: 33270 - DNA, 6123 bp, Arabidopsis thaliana landsberg
tgaaccaacatttataaaaaaaaggtgagactaataagatatataccgatattttctatttttatttatctaagatacatataatttcctttaattatccacacaagaagagattcgatcaaactttccctttgaatcaggtcagctcccggtacgctatcttggcttaccattgatgactaaagcaatgacggcacatgattacttaccattgatcgaaaaaataaggaaacgaatcagctcctggacaggtcgattcctttcttacggtggtagactgcagctcatcaagtcagtgctaatgagtatcacgaatttttggtcctcagcgtttagactgccgggaaattgtatgaaggaaatagaacgtctctgctcggcattcttatggagtggtcctgatttaaagactcataatgcaaagattgcttggtcaaaggtttgtctccctttgtgtgaaggcggtttaggtctccggccacttaaggagataaacacagtctgcggacttaagttaatatggcggatacttgcctcacgaacctctctttgggggcaatgggttcagacctatcttattcggcgaaacaatttctgggcgataaaaagcctcttctttccaaggttcttggagctggcgtaagtaacttacactcagggacgttgcacgaagttttcataagaaggaaattcacaatggtagaaacacttctttctggtatgatcattggtcttccatggggactcttgttgatgttttgggtgctcgaggatgcattgatctgggaattacaacaactacgaatatggaaaaggtgttcacgacccgacgtagtaggaaacaccgtggggacttactggtcagaattgaagctgagatagaagctgcaaaaacacgtcatcaacctgatattgaggatattgatctttggaagccaagcacaggatacaagaaaactttctcaacccgtgagacttggaaactcattcgaatggcagaaccagtttgcgaatgggctaaaggtgtatggttccccaagccacaccaaaatttgctttcattacttggttgggtatgcacaatcgtctttcaacaggggaccgaatgcaaaagtggaacggccaagctgactctacttgcgttttctgccaagaccctctggaaacaagagatcacctattcttccactgccactacgccaatcaaatttgggaaattatagcgaaaggcttcatgggcgtgcagtacacatcaaactgggaccaacttgcctcgctcattgcgggaacatcactcgagcccttcctctgtttcttttgcggtatgctcttcaaaccaccatttacacaatctagagagagcgaaacaatcgtcggcatggagaaaattcaagaacagtcaaccaattggagaaaaccatcgacaaaacaatacgaaacagaatcacccttctccgcaactcgggaaatcaaaaatatgagaacctcctctgtttttggttctccactagaagctaatcttagtcttacatagaacttcttattcctctttttgaaatgttgcacttgatgtatcgaacggtttttttgtgaatataatttaacatgtatcaaaaaaaaaagaaaaaaaaagaaatttaaacaaaaccccaacatgtagcttcgactacatgaacctagaaccaaaaccaaaatgtagctttgaccaaatgaaactagagccaggccctggaaagtagtttcgataacatgaaactagagtcaaaccctttggtaacatgaaactagaactagactccaaaaagtaggtttgacaacatgaaatcattaaattaaatccaaagaaaacaatcaatccctactaaaaccctaaattaacagtaaatcaattcaaagtagaaccagaacctaaacagtaactgctcatctaaagaaatcgtattaatattatcgattgctttcttgaactagggttttgaaatgatcggagaaatggaaatgaaggactgtgtggagacaggttttatgagctcatttatagactcttgtggtttattaattatttcaactccgatattgtttttcatttatctatatatacatttttgcagccattttgtgaaataaatcctgtagttgagacttatttacaatgactgccactggattttaatgtttgtttttgataattaaaaataaaatcttcgaattaaatatttgacatttaacaattttcccaaaatctctccacattaactacacgattatttactaaaataatacttccaaaatatttcatatcatttaattactacaaaattatcatttttgatattgattttctccataactataacaattcgattataatcatcaaagcgcagagatataatctgatagcatttaattactacaaaattacaaaatatttagacaatgattcataagcatatcataaataagatcaacattaataaaataaatggttttttttttacaggacgggtttagcagaacgttactcaataacatttgtaaactataaaataaaattattttatagatagatacaatttgtaaacttttatatatactaactttaaaaaataaattgttcacacggtgtaccacgggttaaaatctagtaattagattataggagttacaattataattatagtgtgtttaaatgacagtgaatagagaaaaaaatagtcaatttagaaatatgcaattttcaggtaaagtgtggatttaaagtatggcttaatgtggtgacccgccgttgacccgccgtcgtaatagcactgtgggcggaagttattatgtgattatgtgttatattttaagtttaattgaaaaaactattttaaaaaataaattgttaaggataaagtaaaacctttttttttatatgtaagactaggtgagtaccaggcgtagcgtgggttgttgttttgaaaattgtttaaaaataattatgtttaactatttttattggtaatttatgctattttcgtgtatgttattatgtagttaataaagttatattcattttatgtaattatatttgtatagttagattcatttttgattcaaatatcaatgaatttttttttcatgtataaatcttcttatctatataccaaagattctaatctttttaactatcatgaaatatttacattaacaatatatgatacaatggtatggaattatgttacttatttggtttaaaagttgtctaacttgattctaagcaaacaatttcttgttccatgtattctctcttattctagtattccaatcacatcatgatagactcatggctaaatattggattgacataatttgaataacaaatatataaactacttatttgctttaaaagttttcacatgaaagagaaaaaagaaagcataaattaaatagtcttttgagtcaacacttttaggtttctctctttgcatttgcatatattcatattagagaaagcgtcgtatattgaactttttggtatatctaacgtctcaaaagatcactacttaaaaaatatgcatgtcattattaatgttatcaatttatcataaacacacaaaaaaaccatattatgtaaaccaaaaaatgtaataaaaagaaaagactaagttaaaattacgaaattaagaaagattaagtagcaaacagctaagttgtaatacacgaaaatttctagtcattatcaagtaatgactattataaaaatagcaaaataagaaaagtaaaatgaaagtagtgtttgatacattatcatgattttttgtattttttcttataaataaagatattttgttaagagtgagattaatggatgatttaatgcaatgtgaaacttttcaatttttatcactaagttttattattttttaatgatattaatttagaatgacatgtgacactcactggtgtgatgatgtgtcactcatatggagagagtttgccaactttcatatatatgattttctattttctttattttgcaccttatatagaaacacatctaaataaatgtatacactgtcaacaataaattatgtagtttatttatttctataaacaaaattatgtattttacatttaataccaaattataagatgaaaaaccaattaaaaattgtttagcgaattttttctttaactttttgtcaatgaattaatgtttttggaaaggtttacctttttctccaattcaatacagttttcaaattgaaataaaagattatctttttgtctaatccaatttttttccagtaaattaatattatatcatttaatttcattggagaatttagacttagatagattacattgttgtaacaaatgattccttgctataaactataaaaaaaaattaaaagctatatcaaattaaggaaaaatgattacattgttataaattataatattaatttagtatatagaattagatgactacccacatatgctacttggtttctttaaaattttgattgtaaattgtttgattatttctatgtaagaatctctctaattttattttcgattactttttgctatgttccaactaaaaaaatgaaaaacaataccaagttccattcctagaaaaggtaaatcacattctttgtcaaaactataatcccatattttagtgtaggcttataatgtatttgtaataagagattttgtttacgattatgttaatacgttatagtttttctagaattacacaaaatataaattttgttaataataatattgtttttaagaaaaaaagtaagtaaaatataagcaaaacaaaaaatgaattacaagtaaaacataggtaaatttcttttgttcttcatccaatctctatgcattttcatatattcttatgttgtactccttatgtttcatattatatgatgttttgaagaaacagttcaagtttctatgcaaaacatcatattaaacggcttttgaaccctaattatttttaatagatattaatttgtatttttaatttataaaactcaaaattaattactttcttaaactttatgcttttatctaaaatatttaatattatgaaacgtagggaatattgtttgttagtatgaccatgttcttttcttcgccgctcaatgagtgacatcgacaaaaaaatacatacagaataagtcggtggtattgttaaaataagtcgttgttagtgttaattgagatgccgcagctgtcgcttgaaattccagtgactcttctctctttgtgcaacacctctctctctccaacgacacctctgtcgtcatcgttttgtctctactgtcgtcgtttagctttattgatggctgacttaccgtcgtttagatctgtcgctgagacaatcgctggcgactctcttttgaacacggcctatgtttgatcctgctttacaattttttaaataaatattgaatataaaactaaaggagttagttgaacactttaattttagtttttaatgcaacttattattttgatgatgttttaaatgagagaatacttgctcattgtagatttgattttttttgtttagtgaattactgctccatttagtcttagtctatccattaaaatttaaatactttggaccagggtccttaatctgtatgttcatgaaatttagcaaacatatatatagtgataaaacttgtttttttaatagtactatgtaaaaagcttatatcagccagaaaaaatcatatagttattctaaaacgtttttggttgaaattaaaaaaatatgaatgaatcccactaaattgaattaagtctgtctatgtcaaaacaaaacttgaacggtatgtataaccgactccgtacaaaaacgaagaggaaggacgtagaaaatcaataaatttctataatccaaaacagtatggctcagatctatcatctatatcgtccataaccctcttcatgcctagcttatattcatatctccacaaactccaaaaaaaaaagtgtatcattgtgacattagtttgatacggaaaaaaatagtaacaaatactcttgttgtgacaaattatgtacatagtttacttcagtttttttctatctaaatttttagagtgaatttatata

SEQ ID NO: 33271 - DNA, 1262 bp, Arabidopsis thaliana landsberg
atgtggatttgtcatctgtaacatattttcttctttgcattaatgtggatttgtcatctgtaacatattttcttctctaacaggttgaaaagcaatcggctcacttttattcggttacgttaacagaggaagaagctcaggatggattgatatgtaaggtgcattcatctgctaaaaacaaattcaaggttcattttcccaaactcttaccttgcgtgctcaagaatctcgtagctgtttttcctgttctgtattttacctctgattccttttgctttccagttgctttactttgaccaagtagagaatggaggactgagcttggccctacaggtatgaagttttatactattagtttgttgagtaactaatttgttgtcacatctccggattacatcatagagtggtttgatcagaatttgtttatactttgctattctcattaacctgtaacgtggcatccggtcgaatcatcatggctttgaaagctttttcggtttctaaatagtattttattttcctgcattctggaaaaggaagacagcaggaaaacaggaaagctctcgactgcagggttgtattttttcggcttccctgtttatcgtttcgatcacagggttaattcagttaattattttctctaccctcttaagctaaacacgtttattttcttcttctgattaccatgtacttaatttttcactcttctgcacgcagagggctctctcaagggatccagagaccggatttttcaaaaggcttgatgcattccaaccgtttgagatcactgaacttaaagctggttctcatgtctttgctgtttatggtaatgtttgttttatttgcttacagtattcaaggaatttgtagtctactctattagaagtaaagtaacctcacttggtgtcatatttctctaggtgacaattttttcaaaagtgtgagctacactctagaaatattctcatctgctccattcggtaacgagaaagagagtcttcggtccactgaagcgcagatagtctcaaaaagaacagagctattgaagtttgaagctgaatatcacgaggtctttgcacaattcacagaaatggctagcaaatgcacaggggaagtacaagaggtgagagacagcttacaatatcaccccgttttctcctgttttcttgattacataataaacaagtaacttacatttgttttgtttgcagattgatgagcttctaaagaggaggaatgagatatgtgcggcttacacaatc

SEQ ID NO: 33272 - DNA, 1527 bp, Arabidopsis thaliana landsberg
atgaatgatacaactcatatatacaagattatagtaaaaagaagggatgcatataaagaaacatagacatcatcgccatccatcctcagatcagttccgtagtttactggatcacgacacacacacatatacacgtgtacatataagccattcttatcaaaatgaccaccttcctcctgaattctctttcattatataggcgtatatttcggaattctaagttttgttgctacgatcgagccagcgttctgtttctgtacgtctctctgggtaagaaagaaaaaatgaaggacgaaacgggaaaccctctgcatatcaagtctttgaatcacatctctcttctctgtcgatccgtcgaggaatccattagcttttaccaaaacgttttagggttcctccctattcgcagacctgactcttttgatttcgatggcgcgtggtacatatatacatacttacctacatggagatattatatatatatttctctttaagaattgttaaatttcgtaattatatacttattttgtgtgattataggttgcttggacatggaattgggattcatcttcttcaatctcctgaacctgagaaattactcaagaaaacagagattaatcccaaggataatcacatttctttccaggtacctttttttttttactttatcattttgaccccacacctttttaaatgcctcctcgctaacccctttgtttaaattggagctcaataaactccttttaattgtgatttgtgagaccaaatgatggaagttttagcttttcagagggtattaggcagccaaatgtgttgtttattagtagtacagaaatatatttgatagaagaatgtgtgtgttgaatgcagtgtgagagtatgggagtagtggagaagaagctggaggaaatggggatagattatgtaagggcattagtagaagaaggagggatccaagtggaccagctcttcttccatgaccctgatggcttcatgatcgagatttgcaactgcgatagcctccccgtagtccccctcgtaggagaaatggctcggtcctgctcaagagtcaaactccaccagatggtgcagccacaaccgcagactcagatccaccaagtggtctacccttaattataaacagctcacttcttctttatattgtgtgtgtttgtgtattggtgtgcttggttttgggtgtaatatacaataagagaccgatgtgaatcagcgaatgtgattcccttcgaggaaatgaccattctctttgctccacaagcttatataatataatcaagggtaatcatgttttacatatatgtatattggttaatgtatttggttcgatttaactcttttgtgcaatgcaactaaaaagactagactattcactctctcaagaaatgcattctagaccctcgaagttatcgtatatgttacgaatctcatataaacattgatcggtctaacaacaaaaaggcgtgtaaagagattccaagctagttcgtagaggcatccaatacatgt

SEQ ID NO: 33273 - DNA, 3396 bp, Arabidopsis thaliana landsberg
tatatcggttctcatggacatacgggcatctgagtttatcctttcaaatgttactccattcacgataagatgggggaaagcggtacaaagttccttcagcgttaaagcaatagaatcgatctctccgatagacaaggttgctttgcatgtaaaacaatctcagaaaagtagggaagtcgttagtaatccatttagttgctccaggattgcaagtactgacagtgacacgattaacctcacccggaacaaactttatcgctagtaacacacaatcatctgatgtaggaggacaagagaacgcaatctgctgaaaatcaagctcacacattggcaaacttatgatatccctagaaaacggattgaagaagaacacgtcgtttgatgaagctttacgcataagtaaccaaccgaatcttgagtaacaaacagttgattcagctaactctgggagatccaacgtgtgtaacttccagtgtaaagggtcgcggaactcgaacaagttgccacgtttaggaaaacacataagccaaggatgcttatcgactacacgaacagagacaccagcttcataccatgacttacaagctgctgatgctcgtatgttatcttttaagacaagaagtaacattatctcctctatgaggcttgatggtaggtcagcgaaactcgggttcatgatctttttactggaatcttgaaatctgcaaaacaatcaactttaaattcttctcaaagtgaaagttctaatatttcaacaactgatccaaccaaaaaaaaaaaaaaaagagaaacgttataagaacaaagtttgttttcaattatataagatctattgattttcatggaaatgttaaactagattcatttctgattcaaaccaattttccccactatcaaacttctcaaattcgatacaattgaatatcacaatttgaagaaaatggttgagagtaaccaaccgtttacgtgaggctgtggctggagacggcggatgtgacgccatattcagagacggcggaggtgacgccatatgcacagacggcgagggtagcatattttaagaccttagtagggtttttgtcgttgacgaaaaaaacaaaagtagggtttgtcgttttagatactttccagttttcacttttcactgatcatattcagaatcagacacctttaatttctgaaatacaaaaatagcccatttgttataaagattaggcccatttaatatttgcgcttatacaatgcatgattaatgactaaaacccttaaaagtggttaagtgcaaaatcaactttagatttttttatacaaaatcaacttagattttttaataactctaatcccgtatttttttttttggcagttattcaattttgtacgttacgtatacgtatacgtataatacgtatgagatctaaagatatatattagttatttcgagatggataaaatgtgaaaggcctgcaattgtttcattttatcgtcagccatggatactctctcagcatccgtttcatccttgaacctcccttctcttcctccaccaccgcagccaccgttgagatccatctccagccgctttaaatccaccgtaaacgccaccacttctgcttcatctaccaatctttcaaaaccaacatcgtcttcaccttcttcagcatcatactcacagaacagaaaccctaatttcctcaaagcaatctcgtttcagcttccgcaaacaaaaccctctagagttactcctcctccggtgcatgataaagcggcctcagggtttgctgcggcgcttgttagcgtttgtcaatcgaagaactgtcttggtcggactcaagaagatgtcagaagattgatggagtttcttgtgggagaagaaaagaagaggaacaaggtcttagtcaatgatgttgttgagagaggtaaatttggtaaacacttgaagggcttggtcaagatgttgattacaagaggtaaatctgggattctggttgatgttttaatggaatttgagagaatctgtaatgaattggtctcaacaaaacttgtctgggtttcttgatgatacaaaagattatatctaatccaaagtttgcttctttaagaaatgttacactacttgtctaagtctttggttgatgttttaatggaatctgagagaatctgtaataaatcatttgtatgtgtttcttgatgaaacaaaagattgtaaaagagattatatcaaatccaaagtttgatttagcttccacaaagaattaaaacgcaatagctggttacaactgtcttgtagaggtttattaatgaatcagaagattggaagaaaaagagtttctgtcttttgtcttttgtggtgatcaaaattttacgttgtgttgatcttattctggattcttgtccttctgcatctccctatgaacttgagagcttcatcgattagaatcacagggaaggaaacaagaataaccacaaaccattccctgaaactcaaaggcacaatcccaaaacacattagctaagaaaggaacatagaggatgacacagtgtagcgcaaaggagacagtcatggccactagtagccaagggtttctccaaggtggcatcgttaagagactgttgtcctcggacaaagcgttcagcgagttgaacatttcgatagccacaagaacagagagtgataatgtcattggcttaactttccctagagtgaagtaatcgcaaggattgttctcaaacgcgatggtcctaagaccacctgcgactgtgtaaggagtcgccgtgaagttcgttccccacgaagaacactctgaccagttctgaagctgagtgaagctaaccaatgtgtgtccatctgagattaggctaatcccaaggaatgaagcttgtgtgtaccacaagacaaagattccaacagttgcaactccaacataagaaccaatcactagatatcgaataagaacccatgaatcaatgagacaatcatcacttttgcggggtggtttcttcatgatatcaatatcagctggattgaagcctaacgcagtagcaggaggaccatctgttacaagattaacccaaagaagctgaaccggtatcatacattccggtatccccaatgccgcggttaagaagatggagattacttctccaacgtttgatgatatcatataccttgtaacagaatcatttaaaaccaaaagattagtccaatttacagaggaaaaatgttacaagatgtcatatagtgtaaaggctttttgttacctgataaaagctttcatattgttgtaaatggaccgaccttctgctacacctcagacaatagtactgaaattatcatctgcaaaaaccatatccgaagcttcttttgcaacctgaaaatgtacatcagcagatagtaag

SEQ ID NO: 33274 - DNA, 3639 bp, Arabidopsis thaliana landsberg
  unsure (1)..(3639): unsure at all n locations
caccacgacccgagaccctttcaaatacgcactacacggagcgccgcctcccaatgatcaacacgtggttttgataaacgttgacaagatatggacagaataacacagctccggccgagtggtaagaagatagatgagacgaccaaccaacctcctatattcttcaggtcggggaagaaactcactctcattcatctccaacttgtgattttgttccatcggagttgcagcgggcttacaaccaagaagtccagcttcagtaacaagatgaagagaatattttctttgagaaagatatataccttctgaatttcgggcaatctcaatgccaagaaagtactttgctttacccaagtctttcatgtgaaaacattttcccaagtactctttaaaactctgaagcatacgtggatgattaccacaaatcaacaagtcatcaacataaataagaactcgaagctccacaccagcccgtgagagaataaataaagagtagtctgaataagattgaacaaatccaaactttagcaacgccgaagagagcttagagaaccaacaccgcgaggcttgtttaagcccatatagagacttatggagacgacaaaccttcttcggatctgaatgacgaaaaccaaccggtaatttcatgtatacttcttcttctaaatcaccatggagaaaggcattgtgaacatccatttggtgaacttcccatttctcggctgccacaatacgtaacaaactacggaccgtcttcatcataaccacatgagcaaacgtttcattatagtcctcaccttcaacttgacgattgccacatgcgactaatcgannnnnnnnnnnnnnnnnnnnnnnnnnnnnnnnnnnnnnnnntttgtacacccacttattgttaatcgcttcttttccaggaggtaaatcaacaatactccatgtaccattctcttcaagagcaccaacttctgttcccatagcatttgtccatcgaggatcaagcatagcttgtttatatgatgttggttcagcaccatcaataagagctgctaagaaagctttatgctgtggggaaaacatatcatcagagatgtaacttgtaagaggataagaagtggtaccttggaccgcataagaggaaactggatcaaagacgggtgagacgtgatggggttcatcaccttttagaagaacggaggtaaatttttgacgttttcctttacccaattcatcactttcttcttctggatcatgagaattttccaacaacacggtcggattctgcgtttgtgtagcctcaaccgttgaaaccggtatatccttttcatgtgacacatccggtggtggaagagaaaccgggttttcagtgacactagattcttctggggaatcactcccccttacatcaagctaactgcagagtttaaagcatatatgagtgaatgctttcacatgaaagatttaggtcctctaaaattctttcttgggatcgaagtctctagaggaaagcaggggatttatatttcgcaacgcaaatatactttggatatcatctctgaatgcggacttcttggagctaaacccgttgacactcctattgaaaagaatcatactctagccaaagaagacggtgaagtctatcatgaaccaacaaaatactgcaggttagttggccggttgatttatctttctatcacccgaccagacctttgctatctagttcatcttctagcgcaatttctcggacaaccacgtacacgtcattgggatgcagcaattcgcctagtacgatatcttaaagggacttgcggacaaggcttattactaagcaacgatgatgatcttcatctagatgcctattgtgattcagattttcaaacatgtccaaaaacgcgtcgttcactgtctggttatgttgtcttactcggcaaatcccctatatgttggaaaacaaagaagcaagaacgggtatcactctcttccactgaagctgaatacagagctatggcttatacttatcaagaactcctatggctcaaggagttgcttctcatttttcaagttcctcatccagaatcaataagtcttcattgtgataataaagctgcactacacattgcagctaatccggtgtttcacgagcgtacgaaacacattgagaaagattgtcatttcgtttgagatgggataaaagacggaattgtgtctactcgacacgttcgtacgactgagcaattagccgattttcttaccaaggctcttgggcaaaatcagttacaatatttacttggcaagatgagtgttcgagatctccactgtccatcttgaaggggagtattagagatgggcttcgatgaatgggcttatatgaagtccaaagaacatattgatttgtaaggagagataaaaaaacaacaaacgaacaagagaagaaaacgttggannnnnnnnnnnnnnnnnnnnnnnngtagaaactagaagcggctaggtttagatgaacgttttctcttattgatttcatacgattacaccttgatatatttacaagagaatatttaggttaactacacgtggagaggaagctatacaatttcctaatctccacaaagatattttcctattttatagctaagatatatggagatctcccaatattgacaattgctaccattagtttattgtgaaccttgatggatcgacgattcgacttgcgatcatcatacatattccggtggttttgggtttcattggagtcgacaaacatcttcaacgacgaccaacgattacccagatcttcctccttccacgtgtcttcatcaaaggatctgctcgtgacacgtgatctttcctccaatgcaagacctcttttttcttcctgttgtggttttctcttgttgggtttctagttggacttttcattttaaaaagttttggattttgtttagttgtaatttggctttgtttgaatgttgttgatcttggcttgttgttggatataataaaatcaacactcttgtgacaaaaaaaagagaggtagtcatttcaaagatagtataactataaatatggtggtaattttagttatgttcaagcagtacatatgcagttagacgcttcaagagatatgatcttgatacgttatccgataatagtgtacaacattgtgaataacacttgaggtgatgtacacggctagatgttgatatgctgttttggatatttttttttgttttcgaagctttctataattaaaccactatcgcaatttgaatagtaatgttgtatttatcttctgtagattgttttatttagttccttgtaatctctgtaattctgtaaaaaatctaaaatggtataaaacttaacattttaccggaaaaaaaccactatcctaaacttcgatatgattgcatgcactcacagaaaaatataacaataagaatcacacttttttctcttccaacgaagttcagtcatcttgcggacttgacattctgttcacacaaatcctaaattttaacaaaaatgttatctattttcagtcctactcggaaacaaaatatttgttagcggtgctaaaactaatttcagtattcaaaccaagtttttcgattcaatttgttttgaatttttttaataatagta

SEQ ID NO: 33275 - DNA, 4265 bp, Arabidopsis thaliana landsberg
ccctggctcgcatgaataccttggtgtatgcaactttattcggtgactcttctaggtaatttcctgtagatatatcaattgcctgttctactctcaattcctttccctctccgggtctctccctcaccctttctagctctttttctttctaaaacggtctcttacattcgttttgagtgattttgatatatttcttacatttgcagttcgtctgacgcagagttagcatacttgaagctcattcaacatttggcactatataagggatacaaaggttagaatctgttgctcaaggtcatgcgcaccttgttatacaagtcacaaattaacctatacaaagtaccttgatgatccttcgcaataaaaagttatagctgaatattatgtttctgtagaatgaataagaaggccatgtcagtgtacaaaagtcagaactttcttctattttttctgatcatgttcatatgttgctgcttctactgcatgcagggtatttatttagatcttgctccatgttttttcttttcctatgttgacctattttctgaaccaatgtttttctagatgcctttgctgctcttaaagtcgcagaggaaaagttcttaaccgtatcgaaatcaaaagtattgttgctcaagttgcaactactacatgagcgtgccttgcattggtaaggttccctacctcctatgttgaacatgcactcaagttgcaaccaacaaagttgatccattatctgctctctgtgatcacttactatattgtttaagggttatataaattcaaaacagaggcttcctattgttctggaattgttatatcttaagttggctgttctaactttgttaaatccattagtgggaatttaaaactagctcaacgaatatgtaatgagctaggaggcttggcatcaacagccatgggtgtagacatggagctaaaagtagaagcaagtcttcgtgaagctcggactttgcttgcagcaaaacagtatagccaggtttgtaaaaaagtcttattggccatctgttttttaagcccatgtgatatatttatttcaggccatgtgctatggcaatgttagtgtgtcttcattttgctttggtactacgttctctacaggcagcaaatgtggcacactccctcttctgcacatgtcacaaattcaatttgcaaatcgaaaaggcgtctgttcttcttctgctcgcagagatccataaggtaagacatggctacaagaaattactagcttgagagcacattgattggaatctgatattccattgaaaatatgttccgccttatcaaattgcaatcaaaacttttttttttttctggaaatttgttccgttccatgcatacatagctaacatccatctatatgttctgaatgtgctctttctttgctgattgctcttagactacatagaaaagtgttgtactatggtattatttctaatcttttattggttttctgaccggcggccttcacctttcgctttcccctttttgggttctcagaagtcaggaaatgctgtcctgggtcttccatatgcgctggcaagcatctcgttttgccagtcattcaacttggatcttctcaaagcatcagctactctcactctggccgagctttggcttggtcttggatcaaatcataccaaacgagcattagaccttttgcatggggctttccctatgattcttggccatggaggtttggagttgcgtgctcgagcttacatctttgaagcaaactgctatctatctgatccaagttcttcaggtagcttttgtgtcttgtactgctttgacgaggatgttcagaacataattgaatagagcctgactgttatggataaaggttgatcttgttagttgcgagtttctaatttgtttactgttgttaccagtttccacagattctgacactgtcttggattctctaaggcaagcttcagatgagcttcaagctttggaggtataacttatgtcaataagagtgctatatagctttttgttcaaaaacaaacctgagcactatattatcgccacatcattgcataagagatgaacaaacaaacctgagcactatataatcgccacaacattgcataagagatgctatgttgcttttgattcgaaaataacaccaaactcttataactaggttcagcttcgtttagctcatcataactctcctagtaccgtgatttactgttggttcacttagtagttgtgtttattgtgcagtaccatgaactggcagcggaagcctcgtacttaatggcgatggtatatgacaagctgggacggcttgatgagagggaagaagctgcgtctttgtttaagaaacatatcatagctctcgagaaccctcaagatgtggaacaaaacatggcatgagatgttgtgaaccttatttaataagcttattgtgcaaagcttgtaacttaaagttgtaatcatggtccttaccagtactcgttctagtgtccgaatcttgtcgagattgtgtaacttgtaaccttgtataactctaaaatgtaggagactgaggaagtcatcaagataattgagaagatttcacaattgacatttgacatagtctctttctttgtgaaacaagattgtgaatacaatcatgattgatattagtttccattacttgttatcgatcgagcaacattatcaagtcgtttagtgtcacgataaagacaattgagcatgtgaaacaacagacaaagataattactctactaatgacaatcaaggaaacccatttgccaaaaacgtcgtcgttttggaatgaaacagcagctcaaaccccaaaaccgtgttgggacggtaaacagaccccgccctgctcgccggagcactactcggcgacttcagatcttctttcagggttcttccaggaattagattgtcaacgaatccaatcttctgaaacaaaaatcttcggatgcgaagatcgattgtgattgtgattgcgttaacggcgaaggggtttcttcatcggcatcttctggagaaaggtaatcttgtaactgctctctcattacgcatttgcaattcccgagctttttctggtaggagtgattaccgagagagattgagaagtgggcttcactctattaagtttaacgatgcacttactttgttctgtgacatggctgagtctcatcccctcccttccattgttgatttcagtagattactgattgccattgctaagctgaataagtatgaagctgtgatctctctctttcggcatttggagatgttgggaatttcacatgatctctatagcttcactactttaatagattgtttctgccgatgcgctcgactctctcttgctctgtcatgtctaggaaagatgatgaagcttggttttgagcccagcatagttacctttggatctctggtcaatggattctgtcacgtaaatagattttatgaagccatgtctctggttgatcaaatcgtgggattgggatatgaacctaatgttgtaatctacaacactatcattgatagtctctgcgaaaagggacaagtgaatactgcgctggatgttttgaaacatatggagaaaatgggaattagaccggatgtagttacctacaactctctcattactcgcctttttcattctggtacatggggcgtctctgctcgaatactgagtgatatgatgaggatgggaatcagcccggatgtaatcactttcaatgctatgatcgatgcgtttgtgaaagaaggaaagtttttggatgctgaagaattgtacaatgagatgattcgtatgtctatagctcctaatattttcacctatacttcattgatcaatgggttttgcatggaaggttgtgtagatgaggccagacaaatgttttatttgatggaaaccaagggttgttttccagatgtagtggcttatacttctctcataaacgggttttgcaagtgtaagaaggtagatgatgcgatgaaaatcttctacgagatgtcccaaaaaggattgactgggaacactatcacttacactactcttatccaaggttttggtcaagtgggcaaacctaatgtcgcccaagaagtttttagtcatatggtttctcgtggcgtgcctcccaatattaggacctataatgttttgttacattgtctatgttataacgggaaggtaaagaaagcgttgatgatatttgaggatatgcaaaagagagaaatggatggtgtggctcccaatattggac

SEQ ID NO: 33276 - DNA, 3481 bp, Arabidopsis thaliana landsberg
  unsure (1)..(3481): unsure at all n locations
aaaacctcggtctaggttgctttcgacctatttatgaaaaagtcacagctcaaaagcgagcgagtgaaagaaagaaaaatcaattcttttattctgagtgtaaaggaagaagacacaaatcgagaaatcaattttttagaatatctcctttagcattcctttcttcctcgtagagcaatcgcataaccctaaagcccactccacgaatctaagctcctgttcccgcttcactttcctctgcacacatgtatatatccacaaaaagggggaagaagaagatgggttttatcgattcttcggaatttgaaattgatcagctattatggcgagtactagtagtggtggaagaggcgaagatgggcggccgccgcaaatgcagccagttcggtctatgtctcggaagatgacacgagctggtacgatgatgattgagcatcctaatgaagatgaaagaccaattgacagcgagcttgttccttcttctctcgcttccattgctcctattcttcgagttgctaatgatattgaccaagataacgcaagggttgcttacctttgtatgatatctctcaaaccttttcgattttgtgatgtggagtgtggctgtgaatgagtatatcaagattctcacttcacttttgttaggtcgcttccatgcatttgagaaggctcatcgaatggatccaacatcaagcggacgaggcgttcgtcaatttaagacttatctattgcacaagctagaggaggttaattgattacatgatttcgcatactttttttttttctctctctttgatgaattggagtacgcagataaacaaggtttacatttggatgtatcttgagatagtagttcttgaatttttgttttttctctttaggaggaagagattacagaacatatgttggcgaagagtgacccaagagaaattcagctctactatcagacgttctatgagaataatatacaagatggagaagggaaaaagacaccgtgagatctcttcttaatattttgtaatcgttacatgataaagatttaaatgatggtctcctaactcttttgcttctgtcgattttgtcattacagggaggagatggccaagctttaccagatagcgacagtcttgtatgatgttttaaagacagtggttcctcaagcaagaattgacgacaaggttgattagtgttcccttacaatctgatcataaattttcctgaagagggtaattgtgtcacttgacatcttgctggtgtttgaatgtagacccttaggtatgccaaagaagttgaaagaaagaaagaacagtatgaacactacaacattcttccgctgtacgctttaggggctaaaactgcagtaatggaactccctgaggttgcatgtgcaaattttgcctactttacttgttcatcattttgaattctcactgacatttttgcccaatgtaatttagattaaggcggcaattcttgctgtctgcaatgtggacaatcttcctcgaccaagattccattcagcctcagctaacctggatgaagtggatagagaaagaggcagatcttttaatgatattctcgagtggcttgctttggttttcggttttcaggtaactttcaagtttgtttctttgctactttttctttaaaagtttctattccataaaatatgtcttgattagtcttcctattttcatggtgaaagcgaggaaatgtagctaatcagagggagcatcttatactgctacttgccaacatcgatgtgaggaagagggatctcgagaattatgtcgaggtaaatttgtgtacttcgtgggcttccttctcttgaggatattacaactatttactaacttcaaggaaaaatatagataaagcctagcaccgtgcggaaattgatggaaaaatacttcaagaattacaattcatggtgcaagtatttgcggtgtgactcatatttgaggtatcacttctcttcgatatatcaagttattaacttctgagtaattatagaaaaaaaaagcttccctcgcatttcttctactctaatatgtatgtatgttaatggatggttttcctattggcaggtttcctgcnnnnnnnnnnnnnnnnnnnnnnnnnnnnnnnnnnnnnnnnctttatcttctcatatggggagaagcatcaaatgtccgcttcatgcctgaatgcctttgctacattttccacaatgtaggttttccaagttcaacgttcttcatttcctcttatttgtttccacacacaaataacaacgcacacactaatttatgtgtacttatgtttttgaggaacctccttatagtataaatacataagtaacaatgttgttttcttaaattttcctgtgaagatggccaatgaagtccatggaattctgtttggcaatgtgtaccctgtaactggggacacatatgaggcaggtgcaccggacgaagaagcattcttaaggaatgttataacaccaatctaccaggtcttacgcaaggtacgtaactttctgaagcagttttgtttttttcccttgctttttgattctttctgctaagaaaaccgcttcgtttgtgagaaaaggaagtcaggagaaacaaaaatggaaaggcaagccattcaaaatggagaaactatgatgatctgaatgagtacttttggtgagttttctttgatttgccattatatgtatcagtcagtcaagtgttactatctgagcacattcattttactttttcagggataagaggtgttttaggctgaaatggccaatgaactttaaggcagattttttcatccacactgatgagatctcgcaagttccgaatcaggtctttatctttatctttaatgtagactttttcattaccttggaaatatttgatggaaagaatattcttttcttttaaaatacatacttgcgtccattatcatctttgaatggaaccccgtatatttttgtttcatcctttatgagggttaccaatgcattttattaactgcagagacatgaccaagtgtctcatggaaaaaggaaacctaaaactaattttgttgaagctcgcacgttttggaacctctatcgaagtttcgaccgaatgtggatgttccttgtattgtctctacaggtaggattctgaattagaattctcactcaacttctgttctgttacataataaaacgtatgtaataattctatgatttttcagactatgataatagttgcatggcacccgtcaggatctattcttgccatttttactgaggatgtctttagaaacgtgttgaccattttcataacttcagcttttctcaatcttctacaaggtaacttctagtccgcttcagtttgacattacccatgtataaacatattggcataatcctttgatcttttatgaattgcagcgacactggatttacgtcttagttttggtgcttggaagagcctaaagtcttcccaacatatgc

SEQ ID NO: 33277 - DNA, 840 bp, Arabidopsis thaliana landsberg
tgctgtactgtattcaatcagtgaatatgagaatttgaaaggaatgagtcaaagtgtaatgaaaatataaggatcttatgaagtaagaagataatccgtagattgttaagtaattattataattaatttagtgcattggtattagatttgatcctaaaatcagctagctgccacgtggggcggcaacagtggaagtcgcgtatgtgccacgtgggttatgcattgatcgagcttctggagaatgtcacgcgcaagttggagcgtgaatgccaccacgttaatactttaaattcacatgggaagcgggagattgctgaacgacagcgtttcaaagtcaaatctcaatttcttagtgaaaaaaaaatcgacattgagattgacccatggacaagattgaacagatcaaagaaggaatcgaagaggaaataggcattccttctgatgatttaacgccgaacattataaccgactacgtggtagtgttattcatcgtttttgataatcgatcgaggtttggttctattgttttggttttctaatttttttctttctttcttttcttctgttgtatttgcttatgttaatcactgcttttggttctatgaaaattctaacttttagacctagttttagaggagtttttgttttgtttgtatgttttatgttgaatttatgtaggatttaattgataagaagcaaattagtctgacaaatccgaaaattttggtattctcgtcaattaatgttactaggtgggttgccattctccaaaaatatgaaccttttagaacaataaacctgaaaataaccttatctggtaaattagaatgtcacaccaaa

SEQ ID NO: 33278 - DNA, 492 bp, Arabidopsis thaliana landsberg
tacatcatttatatgctgagcatccaagtgatgttgaatttttctggactatttggactttgttttatcgcagtgtaatacatcaggcatcagtgaggcgagcaaaatgttttctatggcagcttgattctttctttagatacccctttttcttctttcatttccatcctaatgctgtgaaacaatgcggttcgacagaagtgagcatggaactggaactatgatttgtttttttttcaaagggaaacagatttgccgactattgagttttcccagtttagtctactttgcaaataattgtgtaatttgtttttcaggtcaatattcgttgacaaatttttgctatggaaagtgtttcctatacgttgtcttcgatggatcttacaattttcagttcttgagtgcccaccggttactaatacacttgctaaaggtgatgtcacacaaggacttcttgaaacaacgcaatgactagcctcagtttggtcaaaa

SEQ ID NO: 33279 - DNA, 360 bp, Arabidopsis thaliana landsberg
acatcgaagtcaatggttgtttttggtctgggtctataatcacttgtaagcacatcgtcatcgatttcaaagtcaagaccaatctctctttatataattgttaaaaaccatttccttatcaaaaaaaagaaagagtaaaagccaagtaacaccattttaaaaggcttcgttttcaattcagaaagaagagaatagagagcttcttcttgctgtaatggcgaagatcactttcttctcttcgtcatctcctaaatatcatccttgttagccttcttcattgacttgttggccggctgctactataatccagacctatactcaggctatgatggaggaaaccgtggagacagcggactccgt

SEQ ID NO: 33280 - DNA, 882 bp, Arabidopsis thaliana landsberg
tcgtttcaataaaccttgattcagaatgagttgatagttggctgaccataagatgggtgtagtcatctccctggtcagcgtccatgtcaagagttggatcaacccgtctcatctacaaacatgacatttaaaataaatggttattggttagaccacaatcattatccttttaagcaaatgacatggaaataattaattataaaaaagaaatgaccttttgacgagcttcctgagccaatatctcgtcaggcttcagaaagacagcgagttcctcatcctcagcagcttctgctgcagctactgctgtattttttgtgctgtaaagatattctgctctaaaatattttgtccaaaagtccttttctgtcatctggcgtagaaaaataactacgaaaggcagttatgaatcattgtatttgatgattaaaccaataaacaaagatggtcagagtgctgaagtctttgttacctttttcggaacataattgatgaatgcctgccgaacagctggcttctcagcaaaaatctgaaagcgtaatgaagaaaacataagtaagaaaaggactgtagcagttacgaaagtaacatttaagttacttgcaatggatttactggctaagcaagcacaagatagaatgtgggtgaaagactgttaaaaaagtttatattcctcatttgtagtttcagattggactataagttcaagcacatgatgcaacctgaacacctaacaatggatttctgacccaatatatcactagctgcaacttcaaccccataacatataaaaaacttatgatggcgaccttaaaggacctcatctactgatagagcagttacactaatgaaaaaaatagtgaaccaaagagcccacccgaaaaa

SEQ ID NO: 33281 - DNA, 2204 bp, Arabidopsis thaliana landsberg
taaaggattttgaattatttttttttttttttatcaaaaaggattttgaatgtaaaatttgatcggctagcaacatacagagatggacatttttgtctccaccaaaatcacaactgtaatcatcttctcaaaaccaaaaataaaaaagtaaagtgttgcatgtatctatctttatctgttgatacattaggattgttattttcagttgcaagttaaaacaatcgtagaagctttttacatggttttgatgaaatgacaattgatttcggttcggttttgaaattacatgtgatttttgtttggtttagatggttttgaaatgaaaattaattttggttcggtttgcattagaattaatacggttttgagaaaaaaaaaaaaaaagtcactcgagactgttttggaagcaaaacgagtcgatgtaaaaccgtcatgattttgtgggtttatccctacagaaattgatgacacgcgctcaacgcgaagttggtgcgaatgggtatagaattgagcgtgtgacgtgaagtaggtgcgagtgggcgtacaaaggagcgctgtgattggctgaaaaaatgaaaatagtagtgatgctcctcctctataatttatgtttcgttattcttcttctgaaagttgtgtgattttagaagtcaccaaaaaaaaactattttgagatactatgaatatttcgttttgcattttgttgtggagccatttattacataggttaaagcttataactgaaaactggattcaaagaatagcagccgaagtgagttgaatattttctgaacatttgaaaattgggacaagtttgttctcattttgctagtttccttgatgtttttatgttttcttgactttaggagatgacatatggaggtgaattatacaaaggttgctgcaacgataacattccccttaattcagtttttgtgtcagaaacaagcaccaacaaggtacattgcaactcggttacaagcactcagtggacttttggccaagactaatttttttttttttttctctctctctaaaatgttatggatacgaatcctttgttgaataaaggaaaaagttaaacatttgattacacataagactttacataatccaactctttttttatatgaagctacaaagaagatttaaaaaatcaaagattccacctaaacttcattcatcttcaatcttcaacatccttcaatgactagtatgtatgtacataagtaaaattgttgataagaaaacaaaacaatgatgggctaaaacagcccataaaaggcccattaaacttgggtttagactttagattcaacgacgccagattagtgagtcacataaccctcttggaaagagtctcaacacttgcagagaaaaagaacaaggaagatcccggaaaatggcaacggcgattgtacgttcagctctttcccgagcagcgactcgcgcagctccgaagacatccgtcgctcctaagcgaaacttttcctcttctttcggttatgacgatgcttgtaatttctctggtgtctgtttttaccattttccattgacgacgatctaggttttctgatttgattttggagaacgcctcgatgagtttatagattcgtagattggttttgagattcagtataatttcacccggattccaatttttgaaccgatacctaattttgaattgatttggtagatcgattggtcaaatttgaaattgatttttctccataatatctgaagcgtcttattggatcaaatctacaacatttctctgttgaaaggatcgattttttttttcttggaacatgataacttttgattattcatcaaagttttgttctttttaatatttcacagatgaagctgcgaagtgggagaagataacttatctgggtattgctagttgcactgctctagctgtctatgttttatccaagggccatcatcacggcgaagaccctcctgtaagcttctcttacaactcctccattggtttagtattataacttctgatttggaatctcacctagtgtgagacaatgttaatatcaccagtgaaaacggatagaagtatgcagatgatgagaatgttacgaaagctacattttttgcctttactgatttcgtttatctcattcattctgctttttaagtttaagcatacattgcctgaaactgtcatgaaccattattgtctactt

SEQ ID NO: 33282 - DNA, 818 bp, Arabidopsis thaliana landsberg
acacgattgtcatacagtatctcttggcgcgcttgcatctgctggtacttctcctgtcagtctattgatgaaagatcgctgcccggaaaataaaaagcatcatagtcaaaatatttgatggtggttttttgcattatgaagagcgatataaacatatatacatgaaacttacagagtcatgagattgggaagatcccaaagactggttgggattggccctgccaagttcatgtttcttagaaccctggaaagttaacagaatcaatcttgagtcttaaacacttatgtaaaacgtaggatcttgtctctggtccagacacataattatatgtatggacatacaaaaatttcaggctcttgctagttataagaggaacttgtcccaatcctgcagctgtgtcgctgattctcctgcgtttaaagaaatggctacagtttagattcaagaagagcaacatgcttctgtaacttacaatgtattgagaaatggattagttacaggtcaatcagattctctagacgaaatatggagtatggaatagggtcttttaagccactcgcgtaaagttctctgatcaaagataggcacaagtcagaaaacattgtaatgcttcaagctattaaaactgtaatgcagaatttcttggcttacaatctttgaagttttgataagttccctataaactcagggatggatccgttaaggcgattatcgctgaatcgtctgcaaacaatagaatgaatgaagtgttatacataacaacacatataaaaaactggccatattgtaatgaaaagaaagaggagcatacagatta

SEQ ID NO: 33283 - DNA, 999 bp, Arabidopsis thaliana landsberg
ggacgcaaagttgcattgttacgacaacaaatattccagtttttatgttttatagccagaagagtttcatagtggtggatgggcagttcttgagcttggatggtactttgatactatagattatcgtgtattaagacccaaatgttgaaagaatgtgtcagatgcatcacaatatggcgggtattgtttcgagacgatttgcgtttgctcgtacggctacttctctggattcagctataggagttgctattgtaactccatgggttacgcagggaatccattccttccaggtggatgtgtaggtaagagatgcgtgtttttctttctgtatccattaatgaattcaatcaagtcttctatcactgattatgaatcaaattcgtgtagacatagatgaatgtaaactagaaataggacgcaaaaggtgcaaagaccaaagttgtgtgaataagcccggttggtttacgtgtgagccaaagaaaccagggcagatcaagccagtgttccaaggtaaaagtcaatttgattttatcttgaatgttgtgttgaagatattattgttttgttctgtaatgtacatattgtttcttttggtggtgcaggtgttcttataggttcggcactgttgcttttcgcctttggaattttcgggttgtacaagttcatcaagaagcagaggaggagcagtcgaatgagagtgttcttcaggcgtaatggagggatgctgttaaaacaacagttagctagaaaagaaggcaatgtagagatgtcaaagatatttagctcgaacgagttggagaaagctactgataactttaacacgaatagggttcttgggcaaggaggtcaaggtactgtttacaaaggtatgctcgttgatggtagaatcgtcgcagtgaaaaggtcgaaagccatggatgaagacaaggtagaagagtttatcaatgaagttgttgttctagcgcagatcaaccatagaaacattgttaaactcttggg

SEQ ID NO: 33284 - DNA, 3323 bp, Arabidopsis thaliana landsberg
tctctatgggacaaaaatcatcatgtgctgaaaatcacttcgattcttgtttgtattaaaacattatcaagtttcatttttgttgttgtatttagaaatagtgctacgttacttttgattcattatattgtcccttagtttgtgtatgtgtgtttggattttgatggatgcgtctgtgtttgttaattcaagagatatctactcgtgtattataagggaaagtctcccaagtcaataacaattctaaagtttacattgtgagttgggaaacatggttcattgacgtaagtttgcaaattccagcaactacatatgaacaatgcaatcaatattgaactgtgaactccatgattgtttggtggatttggacattcacatctatactaaagtgaaacattcatgacggtaaacttctcttggagctgtatcttgcatattaagaatcaaagaatatcagtgaattatgatcttcattgtcagctttgtcttttcaagagttctgatcttcagctttgagtaatttccgttttcaattccaataaaatatgttttatgaaaaaatcaatgttattcatcgaccaaaacgacgtaggatagagaaagaaaaatgggaacaacatccgagtagcctccgagaccacaaacatcctccaataagccaaaagaagacgagagaaggagaagagtcgaaatcgccattgaaatggctctcaaagcttcacctgttaccggattattccctcctctccgtcctactgcttcttcttccccttcgacttcttctaatcgcccttgttccctcaggattctccctctcagaacatctttcttcggtaactcaagtgcgtctccttcttctctacttcgctttagggtttggctttatcttcatttcactagcttgcgccttgtttggattgcttggaggaaaatagtgcagctatttgctcaaattgggtaacgtgattagtcagagagagaattgaagtaaaattgggtattgattgtgctttttagtgtatgatttgtcgattttgtgtttcttgatttagtataaatgaggttactcttagtcagtgtctataacttcagtatgctttgactgtttcacatgtctaacatttagttctcttgctttttagttatgttgttggtttgatgtttccatgaacttattgttagactcaataaagattattgtttatttttacaaggtggagcgctgagagtgaatgtgttgagattagcttgtgataatagactcaggtgcaatggtcatggtgctactatgaatctttttgaacgattttctagagtggtcaaggtacttataccctttctcattctgtatttgactgtcattatgcattggagttcattaatcagttctcttgtttatttttcattttaataagcgaagtcatatgcaaatgcgctcataagctcttttgaagacccggagaaaatcctggagcaaactgtcattgaaatgaatagtgatttgacaaagatgcgtcaagccactgcacaggtgcacttcttactcttgaacaaactttatacattttcctgtacgatatttttcttcttcatttttttactacagcatggttggcccctatttatgagattagctaacttgtgtattatcaacgtgtctgaaggttttagcatcacaaaagcagttacagaacaaatataaagctgcacagcagtcttctgatgattggtatgtgtgcttttgcctggaccttgcttccatacctaaattcttctctgagctgattattcttacatgttacacgtttaaataggtacaaaagagcacaacttgctcttgcaaaaggagatgaggatcttgcacgtgaggcccttaaacgacgaaagtcttttgctgtaggttatatctatccattcttttgtccaccagttttctgtttcttaagtttgcttactccaacaaatgaaagaccctaatcgtttagcgcatcgagcgatttgaggctgatctcttggttttctgcaaggtttagttaggtggtggtgaaagtaaaatggaaaaatttagatatctaagtattctgtaattctcctcaggacttgcccccttttccaatcattttttgatgcaatagagcttggcagtgtttatagtactcttttgaaatatattgtttgttgagtttgttaaggtgattgcagtgacaaaagatattttggatatatataacactacagatgcagccaaaaacgacccttctgtgtttctacatattaggatgttgactattgtctttcagtatcagaaaaaaaaatcaaaatcaaattttggttctatgtagagtttcggaaacagccaaacacgattcttcagtgttttttacatatcagtatcttggctatcatctttgatgtgcttttgtttgagcaacagaccgtatggctctttttcagttttgttgatttatgtatttgtgtaacctttgcaaatggctaacgaattataggcaggtaaattttcactatcttttacctgctgataccttatcgactactgaagtctcttgaatacatccattctctaactttataaagttaccttaaaaaaaaactagaactttaggttttgaagttattaccttttttcttaacaggacaacgctactgctttgaaaactcaactagatcagcaaaaaggtgttgtcgacaatcttgtttcaaatacaagggttagttttcaccatatttatctatatattttgtattttgatttactatacactgttggaatctttagagctatgattaaatgaatttatcgtcatgcatttactcaataaaacaaagaatcatgtatacataattttcgtcatgccaccatacaatttgaatggtttagagatagtaccatagttaaatacctccgtcataagattcatatgccaagtatctctcttcacgttttgtactaaggagctattgtatctctatggacataatgtagaagatattttagattagtatctgtattttcagagttcttccatttccatagcatatgattcttatattttctgaaattgcttagggcgaagtttggttcttagaaaatgagttctgtaatttttttgttgtttccccttttatttgcagctcttggagagtaagatacaagaggcaaaagcaaagaaagatacgctccttgcacgtgctcgcactgctaagtttgcatcatttccctaatactcttctttatatcatttatggaagctcgtcctacagaagtgttcttgtcgatttatatattgtcccaactatatttg

SEQ ID NO: 33285 - DNA, 1545 bp, Arabidopsis thaliana landsberg
  unsure (1)..(1545): unsure at all n locations
gttgaggtttacttactgtgttgattccctttgtccaggctagcatcaaaggagtaagacttcctgtatttggtcttgaatgagactgagcaaaagggaagacagtttcatcaaagatgacatggcgactgatgtaaacccttccagttgaaggtaagaagcacctgtaccccttgtatttatcattataacctagaaacacacacttgagtgatctaggatcaaacttgttagacgcataatctctcaaggtgggatagcaggcacaaccaaagactctgagtgctgagtattctggaggcttaccatgcagcttctcataaggactgtacttctcatctagagttgttgtaggaaggagattgattaagaaactcgcagtgtagaaggcttctaccgaaaacttctgaggacaggtactctgaaacatcatggagagaccaagttcaataatgtgtctatgttttctttcagctaacccattctgttgtgaagtgtagggacaagagataagctgtctgatcccgcattgttgtaggtgatcagttagctttctgcttgtgaactctccccctccatcacactggaaagatccaatcttggtttgatattgattttcaaccatagcttggaacacagtaaaggtatgagtaaagtctgatttgagctttaatgggtagaaccagcaaaatcttgagtagttatcaatgaacactgcataataactnnnnnnnnnnnnnnnnnnnnnnnnncaaggaccccagagatcacagtgtattctctctagaggtctagtagctacaaaagttgaagcagaaaaagggagtctaacatttttcccaagctggcaagactcacacaccatcttggtacttttatttccaacactgatagatttgtttgcagatagcacttgaaggacttgagagtgaggatgccccagtcgttgatgccatatatcttcactcgctccttgctgtcttgaagagtagagtgcttgaactggtgagtccttcaacacataaagtcccttactgtgctttccctttgtcaacagtttccttgttgccttatcatagattcgaacatcatcacagtcaaattgaaatacgcagggatagtcattggtgagcttggaaactgaaaacaagggctctagagatatcaggacacacaagaacatcattaaaaggtaagttacatgaagtagaaggaagactgcctgatcatgtgtgagttatgggaaggaaattgccatttccaaccatcactgagtcacttccttcatacaactatgtctgtgtgagcttgtgaggagcattggtgatgtgagcagtggagccagagtcaccaacccattcactgccagattgatctgtgacatcagttatcctcaatgctgcaagagctgctggcagatcttcatcctggtacctgttattgaacatgtgccagcacctcagagcctcatgaccaggtttaccacaaatcaaacaaacaattctttctccattagagttctgagatatttgctgaggaaatcct

SEQ ID NO: 33286 - DNA, 7276 bp, Arabidopsis thaliana landsberg
  unsure (1)..(7276): unsure at all n locations
atcaaaatgcttacaaggctatctcatcatcatcccctatgcatatgcaacaatcctaataaaacactttagactcgatcctaaatgtaatgcaactacaagaacactncttttttttgtgaaatcattttctgaaatttttcaaatttttttggtttttctatgccttagatgaatgcagactcaagaatatatacaatgcaacacacacttcctgagccctcccccaaacttaaatcacacagtccactgtgcgaataaacttggaagagagtactcaagacaaatccaatcacagaaacaaaatgaaataaaaacaaatcacaacagatgatataatacaatggtgaagtgaggcgcttacctcagtcgaagaatgaacgtagttgctcgtcaatggctgcctgtgattgctcccaggccatagacaaaccaccttgttctgtatcagctccagcaggtgggtactcaacctcattagctctacggcgaccagcaccgctctgaggatactcgacctctcttcttctgctgcggccagcaccgcggtcgcgtaagctacgggactggagaaattgtgtactcctgctgccagaccgagcaagtgcagccttcttttttctcccgagctcccgaggcttgaatgatgaatgccttgcagggactggtgggactactcggtcactaggctcaggcctgtggtaacttggctcaggcctgtgatgacttggccctggcgcgtcatatctcctcgaaggcatgtcctgaggacgctctccctgtggaatagctgtggtagaagagaagcaggttatcttgtccgtcagaaacgtgatggccttgaagcacttgataagtagcctatcttgtttcttgcaccacctctgcaacttactgttgtttctgtgagcttcactcaagctcttgctctcccgcgctggaggtacgtgctcactgaaatgatacatgctcgtatcatactcctccttcttatcctcatccgtctcagcaatatcatcctctgtagcttccgtcgtagggacattgtcatcagtcggtggagcgctctcaaagtagaggtaatcacgcgcaggtctgaagtcaatgttttctccctgaagtatggttatggcctcgatgcagggaagcagaatgttggttgttcgggtcaaggagtgctcgaatttgtagcgatagaaattggcaaccatgtcatgctccagaaactcacaacgacgcaagtgatctaaatccatcatcctcggatcgaaccctggagacatgagaggtacaccacatgcaatcagaatcggtgtcacaacaccacctacacaaagggctcctcgcgccctcttcttcccgttggtgtgcgcccacttcctgtatccacacaggtggatcaatagaagcataaccgttggtgcatcattgaggtcgcccttcaggaccttcttcccctttgttctgcggagaatgcccttgagtgcagaatcaatcatctccatgtctgtgttagacacggtgcctgtagattccctagagtacagaacatttgctaaagagcgctgatagtagcggatcacagggctttgaatctggttgctcttagacctcgcagagttgagcgctatatcattcccaatggttaaccacaaatccttcaactcttctctctcgaacttgggtttagttccctttccactggggaaaccaaacaatcctttcatgctcttgatagatagctggtaacgctgctcgttcactgaaaaagtcaagaaccccaacccttcactctccagctcatctgctgtaagtccttgatacatctccacttgcaaagtagagagaaactctattgtttccttcttgtaagcaacatatgggtaagacatcagcgtctccagatgacaattctcgaataagtgttgtacgtcctccagtagccccaactgggccaaagtctgataacaggggtacctcgttccccagaagtcgttcagctcgaaaagtctgatgtactcctccactgtaacttcatcaggcctattcaacagcttcgtctctctgtgccatgactcaggctcatactcgacgtcaatatcttcgtcgatcaactcatatatgctggtcatgggtctctggcctctagcaatctcagctctcctttcattgcgtcgagctactgagcgttgggtctcagctctgaagctctcataagcctgtcgctctctctctggtccagttgaccaagattcagcttcatcgacgttgtaatccgcatccatggaggattcgccactgtagttactcatattgattccctgaaaaagaatgtaactcaaaaccaaatatcaatatgttagttcaaataaacacaaatactaaaccagtcaagtacgcggtcgagtgaagcggtcgagtatagtgagatagtggcttcgggtatagcggtcgagtgtacacgaatgagagacgtaacagcgtggtcgagtaaatgtcgaatttagagaagacggtggcggtttgaggagcggtcgagtaaagagacgaatggaggcgcagtgaatggcgaggtcgagtgaacggcgagaagctccggcgaagtcgagttggctcgcgagaacgagagagagaaactctggccgtttgtcgaaaatcgaatgaagagcttctttgtccaaattgcgatgtggtcgagtgaatggtggaagcggagatgaggtcgagtagcggttgagtgagaaggagacgacgatgagacggtgaagcttccggcgaagtaaagggcggagtggtcgagtgaacggcgagtggtgagaagggagagaacggcgagggcggagtgctatcgtcgagtgaaggagagtgaagagaaggcggaggcgtgagcggtgagagctgagacggcgaggtcgagtaagtgagtgacaaagcagcgagggatggtgaagccggaggggagagatcgagtgaacggtgaggtcgagtgtgatggtgcggtcaagtgtttggagaggaagagagatggtgaggtttggtcgagtgagaaacgtgaggtagagtgaattttcttggtcgagtgtttggagagggagagagattatgtcggtgggagaggataaggtgagatcgagtggtggggaaggaaggaagagattttgttatctcttaaaacgcgtgggggaacaaaggtgagaggtggtgggccacgttctgtctatttgtcctgaagcactgttttcagttgactagaaccttctgtaatcatctgtaaacttgttaaactccctgtaagtctctgtagcttctgttggtcgagcatagatatgatttcaaaattttggtttttagaatcatcactaatactcgaccagtttactcgacctcatggcttctgagtgcaacagaggttttttcaaattcttgaatttctggaatactcgatccgctgttgctctgtagagtaaaatttttaaatttttactctacctccatgttgtttctctgttcctgagaatcacaaacacaaccaaaaacaaatcaaaaataacgagaaaataaaagttttatttacagaaacagtcttgagaattcctcccaagtgagcttgtttaaagtctctagcttgactcctcacactcattaagaagaaaatgggtgatagagagggtctgcatagtcctctctgatctcatcatcatattcagcatcctctcttgagagatgaggagccgaatactcaattcttctttcctcgaaataggcctcttactcttctggtggatgatctatctcctcagaccatcttgaagtaatcttttttctcgggatagtgttattctcgcatttggattgagctatctcttgcatctgatccagtttactcttaagctcctcaactgtctgagctagcttgtctatggtctcttcttgctcatcagatttctttttgagatctcgcaagtcggatgtagaggctgagcttggtctggcgattgaatacgcatgctgatgttgagcctttatactttcatattctgttgacccttgtggaattttgttgatgtcaaactgcaacttgatgtgctttcccaggttgagacttattttcccttccctgacatctatcactactcccactgaagctaagaagggtcttcccaggattaagagatccttatgctctacttccatatccaacaccacgaagtctgtaggcacttctactccattaatcatgactggtagatttttcagcttgccgaaggattttctcgaagacctatccgcaatgatcaaagtcaggtcacaaggtttatactgaataaactctaaccttcttgccacagagagtggcattaagctgacagaggctccgagatcgcacagacaatcgctgaaagctaattccccaatggaacatggtagagtgaaagatccaggatcttctaacttttcttaaacaatcctctggtcagcagctcgagatggagtggcatctctttcaacatctgaatcgtgacacatcttgatccttttaatatcagacctctcacatctttgtgaggatcaggaatcaggttgagaacttccatcagtggcatcactgctttaatctcgtctagctgtttcgctgcaacagacttgtatctctccatccacgctttcctgaatttccatggcagagcacgtgagggtaatggagtaggtttgaatcgttttaccattctctcgattatggttgctttctcttccgaggtggattgaatgagatggcgagaacaaccagaatggttgaatttaacaacaaagaccttaatttgagtaaaaggctccccttcttgaacatcactgtccccagtgattaagtcaggaacactaggaaggaacattgacttcaagcctgcgcttgaagaatcaatgttccttccctcgagaatcctagtagcatcaatgcaggggagaagaatgttggcgattctaatcgatgaatgctcgaacctgtagcggtggaagtcgccaaccatgtcatactccaagaactcacatcagcgcaaatgatataagtccatcattctcggtgctaaccctggttccttgagcagtactccacaagcttccagaattggtgtcacaacgccacctacgcatagtgctcctctcacttttttcttgccgtttgtcaatgcccacttcctgtatccacacaggtggatcaacagaggaattactggtggcaggcgtcgttgagatcgcctctcagaacattctttccctttgtacgaccgagaatccctgtaatggcgaaatctatcatctccatgtccgtgttagacacggtgcctgtagactccctggagtaaaaaacattggcaaccgagcgctgaaagtagcgaatcacaggactccggatttggttgctcttggaccgcgtagagtttagcggtacattgttcccaatagtagcccacaaatccttaagctcttccctgtcaaacctggttttgattccctttccactagggaaaccaaacagttcttccaacttcttgatcgacatctgataccgctgttcatccactatgaacgtcaagaaccctaatcccatggtatacagctcaaagtctgtgagaccctgatacatctccccttgcagtgtggaaagaaactcgattgtctcctccttataggcagcgtaagggtaagacatgagtgtctccagatgatacttctcgaacagatgctgcacgtcctccagtaagcccagctgggctaaagtcttatagtagggatacctcgttccccagaagtcattcatctcaaagaatctgatatactcctccactgtaacctcgtcgggtttgttcagcagcttcgtctccttgcgccatgactctggctcatactcagttttgatgtcctcatcaatcatctcatatctactcgacatcgctctctttcctctggcgatttcagctcttctctgattacgtcgagctgcggtgcgttcgaattctcctctaaagctctcgtaaacgtgttcttctctctctggtctagtggaccaagactcagcttcatctacattataatcaggatccataaaggattttccattgttgttactcatgatgaaacctgaaaacaaatgaaactcaaagataaacgttaatacgttagttccaataaaaccaaaaacacaatacagcagagtaaaccgttaaagtgaacctatcggttttgaagatttttttcttttttctttttcggtctgtggattgtgatcgagtgattttgtaaggtcgagtgaaactagtttcgtggttagagtgaagcggttgttgatggtggcgtcttccttcttcttctcgtttgatttgggaacgagttgatttgagaatgagatgatgtcgagtgaactaatggagcttgagcggtggaaagcagtggagaagtcgagtgaatgattcggtgagaagagaaagtggtggtagcttggtcgagtgaatgtggcaaagcggtggaaacgatgaggctatgtaggagtcgcggtcgagtgttgttggtggcatgataaggtgagaagtggcgatggagaggcggaggtgctcttgtcgagaggtcgagtgaatgagagtatgattgagaagacgtaaagtggcggtcgagtgaatcaaatggtgaggtcgagttgtttccttggagagagggagcaggcggtgatgatggagaggcgatgagagttgtggtcgagtaaaacggagacgaatgagaggtggtggtggcgaagagtggtcgagtggttatgagcgagaagtggttaaggcgaattggtgattgagatcgagtgtttggtgagcttgagagtgagggttgatgagagaagtgagagtcgagtgttgttgggatgaaggtgaaagggagaagtcgagtgtttatgatggaaggagaaggcggagaggtcgagtgatggggggggggggggtaaggttacgatgaggtcgactggtggagagggggtgtgaagagattccttgtctcttggtcttttgcatggaagacatgggcatcagcgggggttcctcaatgtcttcttgcctttattttgtactctcttttactttctcagtctcatatccttctcctgggatcactccatcatctccagaggttttttcatcttcttttgactcttgtggagttttgttgatgtcgaactgcaacttgatgtgctttccaaggttgagacttattttctcttccctgacatctatcg

SEQ ID NO: 33287 - DNA, 503 bp, Arabidopsis thaliana landsberg
aatattgatgatgccgccagggtccaagggaaacatatagtaatttcctccattttggaatcttggttgtggctgatggctacttcactgtctgcagctttattactttgattgttaacaggaaaatatccttccacgccttcttggaccccagaagtagcaggattctcacgcgagatttcaagcgatgccaacatcgaaactcttgatggatctcttgcctctctctctaactgtagaaattttcctgcaggaacctgttccccaccagatatgactgtaactttagacatctgctgatatatctggatagaccttaatgggaaaacttatgtgtagttcatacaagtatagacatctgataacatatctggatacttgttgcatatttcatacagaaaagaaaaggatacgaaagcatagctcctgtttaaaccgaaaaccaattcgtcaccagagtgtagctcatggctgacattcttgatgacaaatgctttatttat

SEQ ID NO: 33288 - DNA, 497 bp, Arabidopsis thaliana landsberg
gcatgcatataattttatgctacggttttgtttattagaaggctgggggatattcactgatatatatgtagctgtgggatctattcacatatagtgaaattttttcgcatctggcggtccgtagaacatgttacattaattttcccgtatgtacaataagatgtgtcttgtatagccaacaaactgttttcttacaacaaagaaagtttaaaaatgaggtaaaagttttaaaaaagattaatatttttaaacttgaaaaaataatttgaagaagtttctttgcttcaaattggggtgattatatgaccccatcatcagtatgtttcaaagtactttcctaacatatgtttatgtgtatggacattgacttataactaactaaggctcattgtttgcattttccaaatttagatatgtttcagaaatagatgagaaaacaagtgtgaatgcccaaacatcactattggaaagctaataaagaattatagtggagtccc

SEQ ID NO: 33289 - DNA, 1383 bp, Arabidopsis thaliana landsberg
accttttttaaaaacaaaaacctatctttcagaaaaatttcttttatgaagaatatcgcttttaaattatagtattattttattcgtagacattataagaaaatgtaaacgataccaaaattcttaaaaaaaagtataagggtatgttttattttgtctcataaaaaaagacaagaacaccctttattagctcgtctacttcatttcttcttccatgtgagcttattcagaaatccgacatgtacgagtttaattattaacaatgcaattatcctttatatttacttaaatttttttatggttgcaggtgactttaaagtatacctctttttaatcttagaagacatacataggatagaaatgcgaaagcacaacggaagtaagttcttacttcattggcataattgcattatacatttgctattcaaagaaagtagtagaaaacttttgttcccattaagataaagattttgagatacaaaacataaagggtattttcgtctttctaatgtcaaatccccggaggagcgttatccaatggagaaccaatatggctttgccacgctgaaaccgtcgatagcgaagtcttcactcgttctcttctagctaaagtaagtttgtttgaattggaaacgctgacgctagaattcacgaacgctttatctgaaaacgctcttttttttttttttttcgttgggcgttttgctcttaaagagtgcttcgcttcagacagtggtttgtttcccgtttcttggaggagtccttgagattggcacgaccgaacatgtaagcctatatttccttttttttttccaacactatcaaaacattcttaaaagtacccaaaacttatcttttgttcttttagattaaagaggacatgaacgtgatacaaagtgttaagacgttgttccttgaagctcctccatatactacaatatcgacaagatcagactatcaagaaatttttgatcccttaagtgacgataaatacactccggtgtttataaccgaagcttttccaacaacttctactagcgggtttgagcaagaacctgaggatcatgattcgttcatcaacgatggtggtgcgtctcaggtacaaagctggcagtttgtgggtgaagaaatcagtaactgcattcaccaatcgttaaattcaagcgattgcgtttcccaaacgtttgttggaacaaccgggagacttgcttgcgatccaaggaagagtaggattcaacggttaggtcagattcaagaacagagtaaccatgtaaatatggacgacgatgttcattaccaaggcgtgatatcgacgattttcaaaacaacgcatcagctaatactcggaccgcagtttcagaacttcgataagcggtctagctt

SEQ ID NO: 33290 - DNA, 5466 bp, Arabidopsis thaliana landsberg
aacgcgtatctttaacaagtatgcattttagctcccaaaatgcttgtattttcgaaagaggtcacacggttcatttgtcgtatgatttccgtgtcatgatcttcaagattgttttcttatgactaagattgttctagtcttgtttttactatcatgtgcgagtgggagatgttggtttagaaccggtttcgcccatgattaagaaataattatgactcggtttagttaaccgacagttacgcatgttacttcttttgaacgaacaaatgcgtctctcttctttgtgtctttcagacatgtctcatgtgttctatatatatgagacattatagacaaagagatggatgttcttgacttcgtaagaattcaagagaaaaacagacacaaaagagaacacaaaacagaggctataagaaaacagagaggaagactcggagaggcacttgaacggtgataagtggttgatatacgcttgtgatatcttccctgacttcttccaattctagattacgtccaagtcgtaaaggtatgtcttcggtttaaacgcttccgcatcgtcaaactctaatatgcgagacatagaaaatcggtttctactcgcctctgtcttctctgactaatactccgctgaccgcagtgtctaatacggcaacatacaaatatagtagttctccgattacgggtttggcaaggatgggtggagttgctaggtacttcctgagttcctgaaaagcttcttcgcatcgggtcgtccatttgaactttttgtttccccgaagcacatcgtaaaaggctaagcatttgtatgttgatcgagagatgaaacggttaagggccgcaactcttccggttaggcgctgcacttctcgcttgttctgaggcgatcgatgtgtggtaatgggaagctgtcttttaggcaagctttgttaaggtctgtgaaatctacgcagactctccatttgccgtttttcttttttactacgactgggtttgcgatccaattgggatatttcgcctcagtgatggaaccaattctcaataatttttctacctcggcttttacggcttcagctcgctcccgacccaattttctcctcttttgcttgatgggtttgaaagttggatcgatgttgagctcgtgtgatacgacgttaacacttactccgggcaaatcttcaggggaccaggcgaaagtattgacgttttctttgaggaaggtagtgagttcagctgttagttcttctcccagatctccgccgatttctacgcatcgctcaggctttgcgtcgtcaaggcaaattgagatgaccggatcgggagttggtgtcgtagattcccgagcttcttcgatctttagctgctataactgctcggagattgacctttcttcagctcggccaagcttggccttcttatgattcgcgtcggccgtcgactcagtgacggggttcctgagcttgtgtgatgccatgaagcagatgcgagcatttttctggtttccccagattgttttcacgccgtcgcttgtgggaaattttaggcatagatgatacgtcgaggcgacagctcagaactgatttagccatggggtgccgataatcgcgttgtacacggtcggctagtcggtaacagagaaatcgacgatttttgttattcctttggctcggactggcagtttgatggttctgagagtcatactggtttcccctgagaacccgagcacaggtcgtggagttggcacgatttgcgtcatgtcgatcttcatttctcgcagagttgtaaggaaaatgatgtccagtgtgcttcccgtgtcgattaggactcgttcgacgttgaaatcaccgatggtcagtgtaatgactaagggatcgttgtgtggacggtctaaaccgttggtatcgctttcgtgaaaggttacttcgtcatttgatccattaaatggccgcgtccaattgcgatttgcgtcggctttcctttggtatgccttgattgatgctaccgtgtcttgacagaaagccgaatcccctaaaattgtgaagatccttccccgagcagcttctgtttcatcgtcgtctgtttcgcgattaccccggcttcttttaggtccttcggggttcgccgcgggggcggtctgctcgggattggccacagcgttgacctgctcggttttacctttttctgcctctaaatccttgatggttaagcctccaccaatttctccggccaggaattttgctgccaatctcgctctgaggctacgacatctggacgtgtgatggccgtaactcttgtgtaattcgcaatattcttgctcgttccctgagggttgatccttcgtccatgtgtaggattctcgaccgcgtcctcgtccgcggcctcgccctcggcctcgggtggcttcgcctcggggtgtatcggcctggtaattatgggctccggagaaatttcgtccttcatggtgaacaaacgtaccgccttggacgcctttcttgtggttcggagcgccggtttgaggtttatcgatgcgaggcgtttgcttggttggttcgtgtcttctagctagtagttccatctcttcttcatgggatacgtaatccgaggctcggtgcagggcgtctcggattgtcagtggtttggacaagtttagttcctttcgaaattcggatttgtaccacagtgctttcttcagagccgagagagccgccacgtcgttgattccttctattttggctagggtggatcggaattttgcgaggaaatctcgaagtggctcattaggctgctgagatagtgaccattgatcggcgtctgatgtaccgggatcgattagcaccgaatattgctttaggaaaagtgttgatagctcttgaaagctatccacagaattcccttcgagtctcgagaaccagtccagggctggccctttcaagtgctcgacgaacaggtgatagagaccagcgtctctttcttctggtctgaatttggctcgggccacggagatgataaacgactttaaatgcccttttggatcggaagacccgttgaaatactcgattcttagttttcctggatccgagattatcgcattggagattttgtgtgtgaacggcgtgttgtgggattcttccagaatgcggtcgatgttcggtgctgaggagattgcgctatgcatttgggatcttacgagcttcatctcgttttctgccttggctagggataatttgatggcgcttatttcctgctctctggcgtattcttcagcccatctaatgttctccttggagccttcattgtccgaagcgtcgatacgatcggcttcggtaaactgcgctcggagaggagggagattcggatcaatgaacaatgactatagacgtgcttccacgtccgtttgccatggttgtgcctccaacaccattaacaaatcttaacacaattctgctctgctgctttggtgtcaattctcaaatacaataatgatttatgtaatgtatgcaagtcctattcaacacaagtgttgttacatttattttcttttttctttcccacagacgtaaacaatagtgctccatcaccttctccacttcacagctttgcgatccctaaagcaggcaagttattccttggcggaagctttagatcatcctcccgttccactctctcgaagtactgctccaccatgctatccttcatgtcctccagtcgccttggctcccactataatttcagatattgttatcaacaatgtcacatattaccaaccacaaataacaaatggagagacttgttaaacctttgggttcttatctttgtctaccaatatggctctgcacccctgcataagtaaagacacgctgttgtaactacggtctacaacaaagacggtttcagatggaaaaagcttgcaaaacctccacaaaatctttgctgatttctcccttcatcacatgacacaccattctatactcgcggataagacactgccccaccccctgcaatcgcccttcccttatctgaaatatatattcacagtcagctctttgtcaacattgcctgtgatgcacattctgggaactaaccgatctaagagagattttaaggcttgctggtgaaccttcttcgatgcttgaatggtagctgagatccaaccatctgcttcttgagtggcctctctctcctaagcaacacatatgatggtagagtgcgttgtcaaaggtaaatcagtcaactcaggatcgcaagtcaacatctctatatataaatgaaaagcttacaagtgcagatataatttcttcgactgttctccttgagaaacacctatcaataacatctaacctgcgcaacaaacggggagataagaaataactgtcctctgcacttttataaattttcaattaaagatcagatgagaaatgagttctgtaaagagcgattgaaaacctgacagcaatacgaaattgaaattatagaaaaaatgtgttataatcatggtcaataaccgagaaaatgtaatcaggtaaaaccatactagtagaaagagtaaaagagataaaaatcatatagacttgcctgcggtaagcactctgctgtttcaggcgcggatgctgggtgtatgcatcgagaattgttgaggcaaaagttggatcatttgaattaattctgaaagatctgcttctaatgcagtcaacctctgtggaaaggagtaaacctaactaagtagcaatccttggtgaagcagatagtgcttgacactagtagctatacaatatctgatgtgtaaagtcaattcagaatgtcttacgaaatagacgcacgcaaaggaagttcataccgttgaaggcacaaaatgagttgcaaggccacaagcaagcatttcagcaccatctaatctagctcctgtgaggccaacatactcccctgaacaaaaaagacaagaaagcattttcaaactttggtggctttaagaagatgcaaaaaaaggaaatatagcttctgttaccaaaaaaaccagggagccttgacaagaagtaggaggcgcctacatctggaaagagccccagagctgtctcaggcatggcaaaaaccttggagaaagtcgaaagatatgagcatattttggagcgacctatttgtcatccatggacatgtttaaggaaagattaccgtgttctcagttgcaatacgaaatcgaccatggacggatacaccagctccgcctcccatgacgataccattcaagattgaaacctatacgaattgatgagtttatccactcgggagtgattttacaaaaacaaaacgaaattatagcgagacctgagctttgctatatgtggccataacatagttgagcatgtattcagatgagaagtaattggcaccgagtctccagttacctagtcaacgaacgaagatagagaaagagtgtataaaagctgaaagtaagaaacagaaaagaatgggtgg

SEQ ID NO: 33291 - DNA, 2317 bp, Arabidopsis thaliana landsberg
  unsure (1)..(2317): unsure at all n locations
ttttatactactcctcttctctttcacgcttctttgttagcgatgttggactctatgtatgagtgaacaagactaaacaaaagaaaccctctttcgcttttagcgggttttgacacacggcatgattgatgatagtcttaaatcggttaacatactttgatcttttcccacttcttttaaccttttctggggaaaaaatataaacccagagaaaaaaagagctgagtcaaataaaaatccagagaaaacggctcaagatacgttactctaatcactctcctttcttctatttaacaaaaagaaaaaaagaaaaaactgagagaacaaaaaagaaaactttttaagaacaatgtagccacaagctatccttaccttagtaagtaagccaaacactcgaagaagaaagacaattatttaaataaattatactcttcacaaatctcctttttttatccaaagaatcccacaaaagaagtcaataaacaaggaacatgattttcgatcatcaacttgttcaacatgacaaaatcaagaataaccggagctctgtctcagcttcttttaacggctgtgatctctccgattttggcggttgcaagtttatcagacggtggagatcatgagaggtttaagagacgcgatcctctcaacagctttagatattacgacggaggtttcaatgttcgaaacaaacattattgggcagttagtctctcttcttctttcattttgtgatattataacgttaatgtggtaactaagtgttaacggaatctcaggctactgcatttacgggaatccacggttacgccgtcgccggagtgttgattattgtcggtatatgtttgggactttacgtagcattctccgacaaaagaagacgtgtttcttccactcgccgacgatatctcgaccgttattatcttcctctgttcttacttctcctccttttcatgtttctctctgtgtaagcttatgaagttttaaacactctctcttaaacataatccacgtagattttttatatgcgtctatcaaatacagggtaacgacagggatagtgatagcagcgaaccagaggtcgaagaacagaacagaggagatgaaagaaacgatagacaaagcaggagaagatgttaatcaaaacattcgtacagtgatagtgtcgttaacgaagatacagtacttgttgcttccatacgatcagaacacgactcatcttctcaacgtcaccactcatcgactcggcaaaggttctcgccttatccaaagcttccttcatcataagggtcgttccattgatctcgccatcaaaatctcgtacgatctaacaacaactcatctttttgtttttcctttgaaatcgtctttgattgttctgctctgttttttgtctcaggtatgtatctcatcttatgattgcatcgaccaacttgttccttctgcttctagccttttgtgagattatttaacattcactaaaactttcaaaatgttatgatcttagcctaattgtaatggtcttttttgcccttgtctttgtctcagtacctctattgcttcactggcaccctggattcatcatgtaagcaatgcacaatcacttcaaacattgttcttgttcaattttgttttttaaacttgaaagattaaaaattcttcgtccttcttcttacaaagggtgatattcttgtgttggatcataacaactctttgttgggttctaactggattcgatttctttatacacacgtaagtaaagcaagtcctaaaattaaattcatctacatgtttccaaaccctaaactcctcaattttccactcacgcagcttcgcagaagacctttgttcagctttcaatggtttcgtacaaaacccacgaaatagcacactgactaatcttttcccttgtatggatcctcttcattctgataaaaccctaatcgagataagcctgatgattcataactttattacccaggtattttgattaatccatacaattctttcattcaaatagaagttcaagaactctggtaaactctaacatcctctgcttcttgttctcagttaaactcaaaagtagcagagtcaatgcgttctaatgcgttgactgatcggagcaatactgtctcgtggnnnnnnnnnnnnnnnnncatatgcgatccgtttgtcggacaacagattaacagctacacaccacaaagctgctccaatggcgccattccaatcggcgaattcccaaatgtaagtcttttacattatagtactcggtatttattagcactcaacccaagttataaccattaagtgatca

SEQ ID NO: 33292 - DNA, 575 bp, Arabidopsis thaliana landsberg
  unsure (1)..(575): unsure at all n locations
aagtgtttgatcactcagtttcgatcccatgatgtatatgttatagaattgtgggaaactcttgcaganagagtatgttcacgtctaggactagttggatgattcggttctctttttggtgtaatgagtatgttcatgactgtcgatacaatgtgaaaatctaaccgttgagcttgggagttttacgtctatatgaaaattccggttgtcgtctacattacggtagtaaacaggaccacagtgattccaaatgtcccaaggaatttactgaaaaccccaactaggactgtgaaaggcttgtggatgacatttaacagttgagattttcatgtgtttgagattcttgtaacacattttgctgtataggtgaaagcttagccacacaaaaggagaaacagaggatatggataaaataaattatccaacaaaaaccaatctaaaagccacatcagcatccacaaccaatcagaggacagaatcatatttcacatttccaatccagaccaatcaaaatcctgaacgaatcatactctccaccttataggagcagtttcgtctcttcctcgttctttgac

SEQ ID NO: 33293 - DNA, 1322 bp, Arabidopsis thaliana landsberg
aaaggggacaacccttttttaaatttccccggaaggctttaatttagtaattattccttgcccaaattttcgttgttttgactttattctcaaaactccccacgatctcccaagactccaaccattctatttttaattattttcttaaaactcttaccattctatcgtaaatagattagatcttattccgctagagaatcttagtgttacttatatctaagataaccttgttttcaccagctagctttaacataaacaatgcttaaataaagattgaatcttaaagaaaattattagtctaaagattcagatgcattataggtaaacacgcggaactaattacaacatgcacgaaccctaatccgagacagttttcaattaatcttctcgaatctattaaacaaatattaaatcaattgtccttcaaacaattatcgagctagctagtgcgacacacaaccttcgtgaatattcaactactaactctttttaataacaataactatcgtttacagcgatgcttgttggtatataaatacatcaaaaacaacaaggagaatcttctggtgagatttatttatatcaaagatgaatttccctagctcttgattgattctagtacatggctcgtgttaatcacaggcgcgtgacaaatatgttgtaaaattgttcacgtacattgtaattcatttcatatgtctacatctacaacatgttgacaaaaagtataaatgtatcatatgcatcataatattttatatgttgttgatttgtttatatgtgtttaaaaatggtagatatgaaggcttacgtaagatgaagttgacccatttatctcctcacacgtcctttacatctttgacaagcactccatcctttaaaaaaagggttaactatctatgctcaaacttttttttctcaacatgctcaaatgtagtttactacgacaacttcggctacagtaattcgttagtaagcttgttcagagatcaatcgaagagcggtttgtgaaagaaaaaaaaaaatcattgctaagagaactgcacactcacaaaattagtcaaagactacaacagccagaatcctgatggatactaaaagttttacagaaattaaataataacaaaagttcataaattatatatatatatatatatatatattattttcaacgaatatatccatatttttgtaggaatatcttcaataaaaaaattatgattggaaatctaattcaatactctcaattctttcagaaaacaagtagtgataataaaatccaaaaacattaatttaatggatgacgtcgtaagaaaatgtca

SEQ ID NO: 33294 - DNA, 3053 bp, Arabidopsis thaliana landsberg
taaaaaccatggagaagaaagatgaaggtgaaagctggaaagaaatggtgagaaagatgcttcctcctggagctcctttacctgaagatccatcggaatttgattactccatagctttagagtacactggtcctcctcctgttcatgatatccctagagtttcacctgttgatgttaatcctcgagtgaacaatccgattccattaccggtctctcgtatagccggaggagtcacaagctcttcgggtggttcgccagctagctctgagtctgtggtctctgtattgcataataaccctgaatcatcatctggctcagcttctgtatcaccagtttctggtcatagacaaaatgggaatcagattcgtagaccggttgtgaaattcaaacctgtcgatgatcatgatcggattgaaggtagagaagctgcagaggaggaggataacaatgtggaggcagagacagagagggagaggaaggttcatgagtgtaccgcaagtacgaagagacggaagaagaagaagaaaagtgagtgttatcgatgcggaaaagcgaagtgggaaaataaggagacttgcattgtgtgtgatgaaaagtattgtggaaactgtgtgcttacagcaatgggttcgatgcctgaaggaagaaagtgtgtgagttgcatcggtcaagctattgatgaatcgaaacggtctaaattagggaagcattcgcgggtattgtcgcggttgcttagtccattggaagttaaacagataatgaaggcggaaaaggagtgtactgctaatcagctgagacctgagcagctgattgtgaatgggtacccattaaagcctgaggaaatggctgacttgcttaactgtcttttaccgcctcagaagttgaaacccggtagatattggtatgacaaagaatctggtctatggggcaaggtaatatactattactatgtaacggttttggtacttgtttcaggttgaagttgttttgtttgttgtttattggctaatgttgttgtgaacaggaaggagagaaacctgacagagtcattagctcaaacttgaacttcacggggaagctgtccccggacgcgagcaatgggaacacggaagtttatattaacggtagggagatcacaaagcttgagttaaggattttaaaggtaacgtttgatattgtcttgttttaagtatcacatgtcaagaaacaatcgaatataaaccttgcttgtgtgtatatatctcagctagcaaatgtacagtgtccacgtgatactcatttttgggtatatgacgatgggcgttatgaggaagaagggcagaataatatccgaggaaacatttgggagaaggtaaaatataataattcttcatcagatccttatcaagtgttgctgttttaataaatatcacgagtttttttcggtttggtttaaccaggcatcgacgaggttcatgtgtgcgctgttttctttacctgttcctcaaggacaacctcgcggaacggtgcaaccaccgagtaattatgctactgttccgaattatatagagcataagaagattcagaagcttctactgcttggtatagaagggtctggaactagcactatcttcaaacaggtaatgtttgatggatgtaatgtggaaaaaataatgtgagaatctgtggattaaatggttgcttatgtcatgtttactacaacaggccaagtttttgtatggaaacaagttttcagtggaagagcttcaagatattaagctgatggtacagagcaatatgtatagatatctcagtatcctactcgatggaagagaacgatttgaagaggaagctttatcgcatacgagaggtttaaacgccgttgaaggagattcatgaggtaccatttatccattacaaaacgattaaagctggctttcatatatgagtttcttgatttcttgacatgtttcttgcaggggaagaagcaaacgacgatggaactgtcactacaccacaatgtgtctataccttgaacccgaggttgaagcatttttcggattggcttctagatatcatagcaactggtgatctcgatgcgtttttcccagctgcaacacgtgaatatgctccattggttgaagaagtttggaaagatccggctatacaagcaacatatagacgaaaagatgagctgcatttccttcctgatgtcgcggaatacttcttaagccgggtatgaacggaacttaggtttatgttctggtgttatcttttccataatgattcaagtgttaacttaggcttcatttgcaggccatggaagtatcgagcaacgagtatgagccttcggagcgagatattgtatacgcagaaggtgttacacaaggaaatggattagctttcatggaattttctctcagtgatcacagtccaatgtctgaatcttaccccgaaaaccccgacgccttatcatctcctcagccaaagtcggttaacactcacttattcgcaatcttgaaccgcaagctttggtacttattattgtcaatcctttccgttgcaggtaccagcttatccgcgtaaacgcaaagggaatgaacgatagctgcaaatgggtagaaatgtttgaagatgtacgagcagtcatcttctgcatcagcttaagcgattatgatcagatcagcatcacacccgaaagtagtggaacagtccagtatcagaataagatgatccaaagcaaagaacttttcgaatcaatggttaagcacccctgtttcaaagacacaccttttatcttgatcctaaacaagtatgatcagttcgaagaaaagctaaaccgtgcaccgttaacatcttgcgactggttcagcgatttctgccccgtgagaacgaacaacaacgtacagtcactagcttaccaagcttacttctacgtagcaatgaagttcaagcttctttactcgtctatgacgggtcagaaactgtttgtgtggcaagctcgggctagggcccgcgcgaatgtggatgaagggcttaagtatgtgagagagggtttgaaatgggatgaagag

SEQ ID NO: 33295 - DNA, 1681 bp, Arabidopsis thaliana landsberg
aatattcattcataaacacaatagacgatagtaaagttatattataattagttaactacgtacaatacttgggagttaaattacataacgttaagcgagaaatagcaaattagacaagaggaagaatatttaggagttgtgaattgatctgactgcaataacatgaagaggaatctgactgcaatcgtaatgcgggtaaagatggttgaaagtgatcagagctcctttctaatttatttagggtgtaatttatgaaaatgattattattggagtgtatatcaagttttcactaaactcaggggtgtttattgtaattagttgtcaggttcaagttcattgaaggcgtgtctgatttggacagtgattgggcctgagccataagtttaacgtgggacgagttcattggctgttgctttttaaattttcttacagcctgtgactttagctaatcgatgtgtaaaaataataaatccaataaaattcgtaagagccactcgattgcttccttcgctttctatcaagagacttccttttttttttcctgttcttcattttttttttgttattaatattttgtcatttttcttacatttttctcgaacaccgaaaacactttcgaaccctaaaagacagaacactgtgtcaattttcattacctgggaacaaaaagcaaaatcaaagacaataattttttccccgagagagaaaatgcagaggttgaagcagcagcagcagcagcagcagcagcagcaacaagttatgatgcagcaagctcttatgcagcaacagtctctctaccatcctggtctccttgccccgccacaggtttgctctattcttcttccatttccatgctcgatttgggtttctaggctctttttcccaagctcgatttcactggtttttctctcttttttgttgtataaggtccaagattaggaactcgagatttttggtttcattttctatgattgaagatgcttgtttctcttgttttttgtttcatttttgattggtcaaacgagaaaaagttttgaaatttatggggattaccactaatagacttgcttcttgtgtattcgttacatttcttttaaagtgtttgtcttattatgtgatatttggttcaacaactccatgaaaatctttgaggtgagactgattcgttatcgtagcttagttgctgagactttaggaagtaaagttttttcctttatttctttctttttcattttctttggcttcctatttttttcctttttgcagatagaaccaatcccaagtggaaatctcccccctggttttgatccaagtacttgccgcagtgtgtgagtgttaggtttcgttttttcttttggtatttttgttcactttttatgtatgttttggtgttttggctttaaaagtttcagtagtgaactcaagttttcagtttgtcactctcaaagctagtccagggaaacacttctgcattgtagttatgtactatattatatagttcatacttgtacagttgaatttgacaacgtttctctaaagacttgtttctattttctagaaaaggtgattctttgttatgatgccctcataggtgattcttcttgatgttgagggacttgtagccctgctaatttttaagaatttgtttcattgttctgtttcttgtttagatttttagtc

SEQ ID NO: 33296 - DNA, 531 bp, Arabidopsis thaliana landsberg
aacctgcattaatacctgggggagtccgggcacacccggcatatagatgccgtttgaccaggaaaatcacctcaggatgcgacgctttttctgatccaagggactctttatcatcattcgcacccgtttatgacataaggatcgttccacttcccgtctttcgaggataaggattgtttggtttacgcttaggccgtggaggaggaataggtgggtctagcgcttgacccatagctacacctttagcttcagcctctttctctacctgagagagatgagagtagttttgttaccctctaaacaaacgtaaacaaacaaaaatctaatgacactaacaagtttaaatgacagaactggaaaatcaaaaatggtttacctctatggcttatcacaaggaacattcaaaaatttctagcactcagcccacttttgccactacctcagaatcggtaagaagacacaagtttatctgaagaatctaaagaaactaacattcttctgaagaatctatgtacatgtttggtggataac

SEQ ID NO: 33297 - DNA, 3679 bp, Arabidopsis thaliana landsberg
attgtcgcgcactgcacatgtagcttgaaaagatattcatctttatctctgtttttcacactcatagaagaaaccggctttgcacttggaaggacaagctgaacatggatcaacactctgttccacaagacaccgagatcctactttgagagtgagcatatgtggatgtatcggatgatgcattttgcgagagagatttgcacatttttcgtggagaatataatcacattgcatacatgaatagaagttaccggaatagattggcatgatgcatgcttgacacaacttattcacgtcgtaatctctacccgtgttctcatcaagtctcaaatgatgatgttgatgactaaaatgctcgatgattcgatcacttatcctcacaaacggcggttcaactttttcatcttcttctagtattccctcaagttctttaccgtcccacacgttcttttgtgtggcacattttgaatgagccacatatgaacaaccttccttgatgcaagaataaccaccgtaatcattgtcgatctttctacgacaaacacaacaagaccaatctccttgaccaaaagaatggttaaaagagatacgatgaggatggcgagatatccttatgacacgcggtaagctgatacacctttgatgagccacaaagtcacaagggggacatatatagaaaggacagcttgtatgtgtcaacgaacataggctgcaagcaaagggagtctgtcttggaaacagagcaagagtatgctcatgccatttggaatggtctatagaatagaccggaggtttctccacacaagctatgttcatagcatagtcgcaagctgagcaataataaaatatctcttgaagacttacatcacaacaatagcactgcctcgtttcattagactttcgcaacaaagcaagccgaagagaatgtcttggatgaagagggtgtttgatctcaactggagccttgttgttttcgttatggttcttgccgttgcaacctcggcagaaaaaatgggtagcatcttgttctggtgacctgaacttcagccagaataaagggaaacaacaccacttgtcattggtttcccacacgaattcttcatccacgtgtaatataccattttccaatcttacggctacttgaggacataaggaaataagtttcttccactttggatccatagagatgacgagggagactattttacggatgagtgatataagctctggctctggctcaagacttaatgttttaccaaagagtggcaagacctccaaatcctgctccaacaagggatcaacatagtagtcgagatctgcttttttagcgataaatgatatgagcttccttagcggctccggctgggaatccaaatccatagagttgtagaaagatatggtttgagtaataagtaacatgagctccgactccgccttctgctgcaaatccaaatccattgagctgaccagagaagattatatatctactgagtgacaagaccttcagagggtaattccaatcccgtctttgagacaaattatcgtccagaaagattagttgattaatgaatgatttgagtttcagctccggagaattgtcgacgagggatattattttctgaatgagtgatatgagctccggctgcggcttgatactccatgtatccctgattagtggcatgagcatagaatccggaaccggctcatcccagtcccaatctgaagagttgacgaatggcgttccagaaaggagtgatatgagcatccttagcggcatcggctgggactccaaatccatctccttgaaacaaacgattgtttcagagatgagtgacatcagctccgtctccgtctccgtctccgtcatctttgacttaaccagagagattgtttgagtaatcagtgagatgaccctttctgtatccgcattcatatcgcttttgaaaccattgaatgaaacgataagtagtatgaacttcacctccggatccatcgcgaattgccgagaaaaaattgtgagagtaatcactaatatgagaatgagagaattttcactatgaatgtaatttaatggttgctctctgtgtttgtgaatgctaattgtgtaatattttgcaaatatttataaagagacaatctcaatcttacaggctgtccgagacgagccgacccactaacttgtctccttttcaacagagtaagtaaattcattcatgtactatgatggtatcagtgaattcagatccgtaacaaatcagtatcgtttgatgtttatgaactcaatacctcatagattttccaaaaaaaaaaacaatggataatcttaaattctataaaagtaatttttcttaatcaacatagtttgcaagttttcaacataatgcctcttagtggtaagtgtgcttatatatttcactatcgcggggctatattttttaagaacaaatcaaaatataatatgcttacttgattaacattattatataacctattattttgtattttttgaatatacaaaccttatataatttagtgtacaattactctattttagaatttaatatgtggtacgatgggtaaaaggtttttattagtatagacaataatgttagattttctgatttttttttttagtattaaagttaataattttatataagtgatgttaaaaaaaaactgatgctgttaaaatattaaaatgagtaaactgattattactttgggttgatgatattataaatttgtagtagtatcgatccaaacccattccaccatataactctcgtgaaatattatttttataagtttatatatttataatgtttataaagtttaaatatttcaataatatatttctaaaactaataatttttttgccttttacgtaatgaaatttttgtaattcttagtaaaacaaactaactctacaaaatttagttcaattttttttaatatagataatgttataaataaatattttgtttaatcaaaatttgtgattgatattacttgggtttttggacttcatttaatagcataaattgggtagttttgttcacattatttgaaacaataacatcaatttaatctatatatacatttttagtaaggattttgagttgaaaaatcatttatcaatttcctaattaaatgtttagttcctacaaattcaatcaaacaagatattttctttaggacaatgaccaaattgtttatgaacaattaagatattgcactaattacttgcttaaaaatggatattgctaagtactacttaaatatattgcatattgactcccttaaaactctacgaaattcgttaatcattatttattacttaccaaaatttgatacacaatcttaactaaccatatctataattacttgattccaaaatcattatagctataatgaaatcttaccaaactttaatctactcttatcaattttctagaaaacatatcggttattaaagttgctttaattccgtttacctcaaacaaacacttaatatatcatatgatcttacatttggtatagtaaatatattttgagatatacttcattcatactcaaaattcttcctaatatcggtattgtgttatcaatctttaccaagtactatattctccatctaatttaaaatgtaaagtaatcttgcattccaaagatattttcc

SEQ ID NO: 33298 - DNA, 1036 bp, Arabidopsis thaliana landsberg
tatgtaatttcatctctctctctcacttaagaattttctatctctgagaagggttcctcaatttatagacacatcgtttgtgtttgggattcaaagtttccttttttcttaacggctctttgttgtttcctttttctttgttatttccttttctaaaacaaattttggattgtttcctttttccacttaaaaagcttagagcaatgagagtctcgcacgtgccctcattagccaagattcgcaagaaaacaatggatgatatatttggcattagctttgaaacgtgtagcgactgattgtagccaaaccatagagcagcttgtgtgattgcagaaacagagctcgaggctacaaatcacagagctcgaggctacaaggtttagagtttgagcaatgaaaggagaagaagcgaggaaagacgctgaattgctcaagaattataggtgaataaatcactttctgctttgaatgggaaagaagctggagcatttggtcgcaccataactgcggttgcagtgattgacacggcggagaaaggttacgagatcggagagaaaatggtcccaagtgtcttgaagatcggaagctcggggtctactgcttctgtgaagaaacttgacacagccggagctagacttatcgaaagtatgtaatcgaaagtttacggatttgttctatggattctgcacatggtaaatggtaataaagagattcgtaactgaaagtttgaaacttttttttctccccacatgaagaagactaaacagagagagatgattattactgcacaaagtaaaaagacaacaacaaatccacatgaatattacacaaactttttatctcaacaagtctttcagtttctcactcgctcttagcagcttcagcttgtctagctccaacagaaaataactctgtgatgacttcaagtggcatgcctttagtttccgggactctaatgaacacaaagacccatgatatgcaacatacgattgcgtacattacaaacacaccagctagtccaatgcatttgagcagc

SEQ ID NO: 33299 - DNA, 2304 bp, Arabidopsis thaliana landsberg
gccatttcggaaacaaacatagataacacatttcgtagtttttattttgtttttggtgtcagcagagtttgagtttatagggaaattgggcaacccctacatatactgtatctttcttatgacttatgagatcaaattacagaagaaaacgtcaattgctcacacattgttttatgtttgctgccttttgttttcatgcaacgcaaaagaagatgtgatcacatctgagcaaccagttcctctcctccctgagcagcaacagtcacagtagcatcttcgataagtgaattctccatccatcgcttcagcattttcaatgcagctttaggctggtccattggaaccatgtgtcctgcatctctcacctgtgtttttatgtttaaatcatcaaaccctttgttgttgttacatactataagaaaaccagtagaaccaaagaacgactgttgttattatgcaagaaaggccgaccttgaggaaactgagttgttcataagtctttaacaagcctgcttctttgccatccacaataaacggaacttctttagccgccccaaagtttgttttccctgaccactccattgcattcacccacctcgagttacctgctccaattttgtttccctcaacagttcaaatcaatctatttcattattttcatgtctggatttgattatctatgttttggaacttaccgagccagttgcagataagatcatattctccagcatacacaaggaggctgattccatcttccaagagcgtgggaattccaacctcgagattcctcatccaatctacaagcattgcctgatagactgaagtactgcaggagacaaagtctatgtccccaacaccaagtgacttcctcacagattgcagattcaaaaatttctccatgtttgagaaatcgtagcacaaacttcccacgcacttcttcctgatgtcgtaatactacacaaagatatgtgaactccctcattagccttgtttccttacttcaaatgcagaaatatgaaacacaatttctttctacaagtaaggatagaaatggtttgccagaacgaattatatctagaaatccaacgagcaataaaaattgagcagttcttttgggcttacgtttactccaccagcatgactcattacaccactgaacaaagagttgcagacaagatatgatgccaaacaagaagttgtgccatcagttcctggtaaaacaaaaacacggattcaggattcatcaaacacagagcaattttaaagataaattgataaggaataaaggagtaagtaccacaaagcttgattgatagttcgcacagtgggacaatcttttctaagcgatcatgctctttttgcgtgattagacccatttccaaagcgtagtcaggataggctgggtattggagtgcaggatctgtaagcccatttccaatagcgaatccctgcaaggatatacttgtgagtactacagacttccattaacaccttaagagagaaacaagaaatagtcacatgcctttaggttaatatgaactccctcattagccttgtttcctttatggactcgggaagcaaaagctgggatatagtgcccagcatatgactctccagtaatataaaagtcgttttttgccaacttagggtgctccgcaaagaaagcctgaggtaacatcagcaaacttcatcaagatcttgttacacagctaagcaaacaaaggcagattcccattttttcgaagactcaagaaaaccaaaacagtctaacagagttgttgtttatccaattcatagctttaaagcagaaaagtgcagtatagaaaggaattcaagagaagatccagtgacctaacctgcagaaaatcataaagatcattgctaactccagtttcgtcatgacggatatcacttttatctgtcgtgtagctgaaaccagttccaacaggctgatcaacatacagaagattggaaacctgcaagacaaactctctatcaactctcatgtgcaataatctggaatattaaggcggtttgggattataatagaaagtaataatacctgatcccatccatactcattccaagcaagagacatgttactagtgatcttgaaaggaccattctcatagaacacagccaactcactactacatccaggccctccgcgtcaacaaatcacaacaggagcatccttcttgttccgtgactcgaagaagaagtagaacatgctaacacacaccaagcaaacaaatcgaacaacaaagcaaacaaacatttataatctattccgactactttgag

SEQ ID NO: 33300 - DNA, 723 bp, Arabidopsis thaliana landsberg
aacacacatcagctagttcacaatataaagctaacttttattttcgataactataaacacattgctcaagggagggtcttttactcattctatgaaacacctttaatgcatactaaaaaacctaacttataaaacaggacgatccctcccacattagcattatcatcatttacatcattgaacccactaaatatgaattccaaataccaattattccattaatccattgaatttcctaattagaaccctaacacctaactggtggattactcacacattgcaataaaaatgaaacaaagagatattaaagaaaacatgattgaaattgaataaatgagaatagggtttagaaatcttctccaaattgtcaagaaggaatgaatccctaatcccaaaggtgcttacaaaagggttctcaaaaatgttgcagaaaaagaagcgtcaaagaaaacgtaggtttttcgggtttttatacccaaatacaataaaagaaaagataaacccggttaaggaaaaccggtttggtcatcgagaaggatggttcgatcgatcccgagctggcgggtctaaatgtccattcgtttttgacttgcatcgatcgatcccctcttgggatcgatcgatcccatcctggcgggtctgaaccttcatttggctgacgacctggatcgatcggtcctctcctgggattgacgatcccatcctagcggtctgaaccttcat

SEQ ID NO: 33301 - DNA, 4577 bp, Arabidopsis thaliana landsberg
ttataatttggcaggtggggtagcagctctagcattcggggaaggagggcacaacaatcaccatgcttttgagttctcagctcgacacggcttagaatggtggcaacttgatatgacttggtacgtcgttaagttccttcaagccatcggtttagcaactgatgtcaagctcccatcggaagctcagaaacaaagaatggcattcaccagcgactgatcttaaaaaactacatggttatgcctaaagtcaaaactgtcggttcgattgaagctatgaaggttttaaaaaaggattttgttctgcttttttgtgtttacttaaaggtatatatctgtgcaagagattgtatgtgacaaactgattatgaataatatctataattacattcaatacaaaaggaagcaaaaaaaagatgacaaaaaatttacgttctgtttggccaaggtgtccacggcaattctagatactcaactggtttgagtttaggaaacacggttttgaaatcccactcaaggcctctaaacacaattcctttcggggttgcctcgtgagcacacgacgatctagggcacatctcagcgtccagataggtgttttggatcacgagtgtagccgttcctaacacggaccggatttggcagatgtgaatcgctggtattttggtttcgccttttatgaggatgattgggaatgaaaattggactcctggctttggagatcgatgccaaccatagtctttgcgtttagattggcatcgatacacgatttccgggcggattaatcccgtcattgagttacggattgttatgttcatgtttacgtagtctggttccttaagagccacggtgttggacgagatcatgaaagcttgtaaaagaagacaccatcgagctagggttttgacgatgttgttgctcttgttgttgtttagatccatctttttttttgtgtgtgttctcgctcgttcgtgtttttccctttctcataaatatatgttaagtatatcatagcttacttgaaacagaaactgttaaaactttcttatattttctcaaatgaaagcaaactaactaacggtattttaatttgccacaaacaaacaaatggttacatatgctaaaaatgcaagatttaatttttgctaactttaactgaaatgccaatgtttaagctgtcacacatataggtagggtttattagtcggttcaaaaaaaatgcttctgggcctgtttatttgagcagtctcggcccaaactcagctcatgagtctcaccatctcacatgctcatcacgtgatgcgctctctgccaacatgaatcgcgcgcgcacgtcagctatagtaattcttatgcgtcatatcattccgtatattggtaacgtatgatccctcaagaaatgttaaaccctcaagaaatgtccaccgtgagtagtagtagccaggctatagcgcgctagaccatttgttgagcaagtatttatttggtaaaactttgttttcagactagagttttcaatttttcaaaaatgtcatttgtggtttcgcagattctgagtggatagttggaatctttatcgattaccagctctctctcctcatgttttgccaaatacggaactactggtacttaacgcttgtgttgtgtcgatctataattggtacgtacgcatttgtttattatttgggccgtaagaaaacacgtggtagtgggtgcgacgtgcaaaaacttaaaagtacttaccaaccattattactacgtacgtgagtgagacgctgtgctatcagtaaccacaccgatcccgtttatattctaagttttactgcaaatggtaatcaaacaaattatttgttctttcatgagaagtggcggtaaattctattatattcattctagaggaatgagtaaacttaagcaaaatacccatgcattaatgcatatcgaatgttcaggggttttttgcacaatatatatacttagtcctgctgcaatttctttaatcatttatataaatctatcatttttcgcatcttgttttttaatttaccggccatggataagtttttagtcatgtatatatagtagcacattgaatatgcatgtaaaggcataaacttttagaacattaagccatgatgtctctatctacaactctcaaaccgctttctcatttttcaccttttgttaaaagacataaccccaaaactaacaataccttgttcacacttgacacacataactttacaaactctttttggtccaaacgaggaggatctgtgtctcacaggaaacacacggtcgtggctgtttatgaggcaccggatcatgtcgagagctcatggagaagactcttgtcggaggttgtggtggtgagaacgaagaggtcattttgggaaaggagttggacttcttgggacgtgagcaagttagtaatattcgtcgggactcatttgttgagcctcttggctccattttacttcagttgggaggctttttgggttttcccttggctcgttttcatcaatggaatctgcattaccttgtcttatcataggaacctttctcaccgaagttttgatctgccgaaatggctcgaatatctatttgcttacggtggcgttctggcttttcaggtttacatatatatatatatatattctcactgtttgatatgaacattagattaagaatatatatattatgtatctttaatcgcaacttctaaattgtgtgtgcgcgcagggagacccaatagagtgggtgagcaaccatcggtaccatcataagcattgtgagacacaacgtgacccacacagccctacacaagggttttggtttagtcacatggcatggatatttgatacaagttctatccttgagaatgtaataaaaattatcaatttgtaaaaccaaattaatttcttgatggccatgttaagatgatcaagttttttcgatgctaagaataccctttttcctatccggggaagagacctaaccctgactaaaccgttgggtgcatgctcgcagtgtggtggagaggagaatgtagatgaccttgtgaggcagcccttctataggttccttcagcgaacggtcctattgcatatgatggcttattccttcctcttctatttttgtggaggcatgcctttactcgtctggggaattgtaaggatacataccattccttgtcttaatctcaatatactattatccatgtaaaataatatgagagaaacggcaatggcagggtatcacaattgcggttcgacttcacctgacttttctggtgaactcagtttgtcatatatggggaacacgagcatggaacacatctgacttctccaaaaacaattggtaatgtgcatacacacacatacacttatacatatatctaatctaactaaatagtgatattagcaattactatattggtgatgaatatatcaggtgggtagcaattttaacacttggcgagggatggcataacaatcatcatgcgttcgagttctcggccaggcatggactcgaatggtggcagctcgacattacttggtgtctcattagatttcttgaagctattggtttggccactaacgttaagttacctactgaaactcaaatgaagggaaaggctttggtttgatctctgctcctcctgcttccatctccaactacgaatcactatttcttcagtagttagagctgtgatttgttgtgtctaaagaacaccaagactttataaacaatctttttatctacataccttgaaatctagataaacgttaactgttgcgagggggaaactctataatggtactaataagggaatctcaaatgaaaccatttagtaaaacactagaattaatggaagaaactgctgcttcacctttcacctactatgaattgagtaagacaatataataacctacaatctcagagctatcctctcaaagtgtataataataacttgggaggctgcatggtgcgagcttggtgaacagaccagacctcacctcggttgttgatctgacccgggagctgaggagacgcttggccctgctccgttttctggtggtgcggatattccccacttcccttctggacctggtggttcgatcacgtggaccccaccatcggttagtccaactgcaaactggtttggttcagacggatgtgctgcgactgtggctggatatactctcgagctatattcaataaaaagccagatgttacttatgttgttgtgtttgtcttaactctgccaaaagttgaaatatagcagagggttcttacctcgggtttgaaggcaaatatgaattgggaccaatgcggcacttcagttgcaatgttgttgccgtcaagatactcacacttccatcatcaaaggctgcatagattgactggctatcacatgaatatactgcatctgtgactgaaccacttgactctttcggtatccactgaaagaagaaagaaagaaacagatcaggtcttacaggacattaatcgatcaggtatttaaggacattgacaaaacatttaatgtaatgctgctctatgagacattttggcag

SEQ ID NO: 33302 - DNA, 544 bp, Arabidopsis thaliana landsberg
tcagcgaccatgatatgtaatctatcaatgagttctctctgaatcttctcgcctgtaaccagttttccagagcataagcataagccgtagaacgaaacaaacatctactatcccctgaactactaatgatagagtaatcagcttaaactcttttcctattgtagaattaccattagacaaattattatgcatgttgttagcatctctactcttgaagaatattcgtaagctgattggaaaatcaaagaacaaactaactaactaacaatcactactctataagcaaatcttgaataccaatagagattctttatgttggattctatctttgagcatttcattaggatcgacggttggtcgattaatcaatactaacccaaacagtcctttaacatgcacactagaagatctatgaaagtcttgataccttgtggatgcttctgggtagcatgaaaacaataattggtgttattttgatatgcgaaattgaaaatattgttgtgcatcagctaagtataattgaaagtttaagaattaataatta

SEQ ID NO: 33303 - DNA, 5431 bp, Arabidopsis thaliana landsberg
acccgtgatgagctcctagaactttgaatcctcgggttgaatccttccctctctgctctatttttattttaactcatcatcataatccagatcctgagcgaaattgggctcaggcttactgaagttcttgggtttaaacccatgagaagcaaaattccgatcaccaaacgacttcaatggaaaaccaccaccactgccatggctaaaatcaccagaggaaggcttgccatgagtcctaagcctagttgccttggggactaacacaatctcatcatcagaatcagcatcgaaatcagcactaacctttggattcccattgtatttccttttcaatccaaatccacttcctgaatcgtgatctgaatcaaactcagacttgaaaccaccatacattttcatgttattccttgccctagatctaaccccatatccatctcctacttctcgaggtgaatcagagtaaccaccgctaaacttcccagacctcttcgatctaaccctaaatccatccaaaccgttactctcatcatcatgatccacatcgggatcgtaagtttctacggctgccggagtcaccggagcgaatcccatagcatccaagatagggaacaaatcccaagaggaagagaacttgcctggtcgattaagagctcgttgtttttcaccgcgataacgtttccgaagcttctcgatcttgtgtcgacattggattgctgatttcggcggacctccaacggtggacgaggacgaaacagccgcggcgacgtcatcccaatcagccgcacggaggttcccacggcggagggcgaaccatttatccttgtaggcattgacaagcgcagcggtttcctcgtcggtccagcacggaggaggaactcttcgagtggtggtggtggcgacggttacggcggtggaagaatcgatggccatggcgacgggagatccatcatcgggtattgtcattgcggcggcgaagaataaattagtgaaagtagaaagagcggtgggtaagggataataaagaggcggaggagaggagaggcgcacgttagaaagaaaagttaggttaatgatggattgggccgagaaggaggtggccggttgagaattgtgctaaagtgcgccgcggagtggtgggtgacgtgtgcgcacccgacgcaaccttctccaccgccgctgaatacgcgcggtcgttttagtgacctctctttcaaccagatagtcaatttactggttaagagtaaaccaatgaattcggttcaatttggagtcacggtattcagtttcggttttaggtcttgttcgattttaaactaaaaattttgggatatggtaaccaataatttttcattgaaatggccagaagaccaagaaaatttcagttttctatctatgaacaaagagaaattgtaaaattccaaaaaagaaacaataactattctgaactcatttctagcttgttcttcatgaaccggtttcttcttgttcttggcccgtcttcattctccgtacggttaaggaaaccggtttctccagcacagagacattgacgctgttccagacatcggctcttgttggtaaaccggctattgtctccacgacatccatgtcttctggtagaactgagccgaatacagtgtaagattgtttccattcatggtggtttgctaaactgatgaagaattctggacccgagccgacccacgccaccgagccacggcttatagttgggcagtgctcggttgggatcggtgtgaaaatgtttccctcggcctggagtattccttgaatcatagcgtatggtggaccaaagggagcctgcagggacacggataaaatgtgagacttttaataacaagtcaaatatgtttgtatagaggaagaaaggcctgcattaaggtatgaacaagctaaaagggaatttgacccgatataaaccacgaaaagcttactccatacagtactaaagcattcatcatacgactcatcttcgatatcaagatgtgttactaaaactaaaggtgtgcaaccagatgaatcaaaaggctaaaggttccatcaaattgacagaaatcagtgcataacacatgtcacaatgtctactatgctatcagaccagttaaggttcatgcctaaagtacaatcaggtgtgcctcacattttatgcgagatatgaacaaacattcaaggaaatttaatcgatagaaagggtctgagtataatcgatacagtctcaaaccagatacaggattgtacaacaatgtgggtttagccagaggcagtcagttgccattgatcacacccgtgatgtttaacatcaatgacggatattcttttggaaaaatgtaaaagcaaacggctaaaagtttatcacacctttgaacttcaatatcaaagacagataaataaaaatgtataatagatgaatcaaatggctaagagtctatcaatttgacagagatcctaagacatggattcgtcctatgagatcagatcatagctgctatgatctatactggaaagtgattatgcaaaatctacgaattaaaaagcaaaatttgtgtaaggtctcttacattctttacatgattgccttcggtgtcccaatatgatccccggttctctgctcgatgaaactggcagcctgcacagtggcgtagagttaacaaactcaaaatgtagtatactgagtgaggagcgcattcagggtgaagctgcaataaaagaaagcatcggtgtcaaatctggaaattataaacaaaaactggaactttctctcgaagtacaaaagatacattatagtaaagacacttactttgacatgaattacgccgtgttccgtttcaaaaccaacaatgccctaaaagaagcaaaatagctaatcagtaaataggacatcatcgagaacactatttgttttcaagagaagaaggaaagcagagcagttatatcagagagacataagatttggttacactccaccaaattaaaatcaccaacacagtaaattctcagattaaaaagtagaaaactgaggacacagtgaaagtatgatcttgtgaaatttgataaaacagagcagctactatcatctgatcagacagacaaatcaataccaaaggctgagtaattttcatggaatagtaaatgtttggaggaaaatgagaacacaattaaattataattaataatatctcattgaaacctactatttccagcgtttggaaaaaatgcattaactttgaactttggtcgatcaatggagttaattttcaagacgtattaaatagatcactacctggccttgtccgaagataagtccagatgtccacattactttctcgccacctccttgtcgatcaggcaccaagacatctttttgcttcttcaaccaacactgcgcagagaaaaaaactacctcagtctctggaacttgcactgtggcaagtgtcatcaaagtcagcatttctcaattactaatcacacacagagtaaaaaaaaatcacgaggtttctttaaatttagtaactttcgactaaatctctagatatttgacgatacaaggctcaattaagcattttgtcgaacagttggcggactatattggtaaatcatgcacaatgcgattcgcatgacaaggatcagacttttacctctccaaacttcgagccacaatcctctttgttcccacaaaacacccatgaatcgcacaagcaaggtccatcgttgccactacacataactttacaagctttacaacatccatcagacgaattaaacttaaaatccgtgccccacttcaccgccggaccccaaagctccagattatcaattccacggcaacacccaccttcaccgtcttcagttgcatcgtgatctcgcggctcctctttgaatcgaaccgcggaatcaacgagtgtaggatcttgggatggacggaggacagaagagaaaacagcgtagacgataacacaagagattaaaccgattaaaagaagagcggtggcggtaaaacggccaggctcgccgtcgtttaatcgacggggcatcgccggagagtccgaggattcgttgacgaagaagaagatgcgaaagcaaaaggaagagagaagtgcgatgtcatgtgaaattgaaaaatttggaatctttttcaataataatgaagagagagaaagagaagagagagtgttgttggtgagtcaattcgtggctgcggcttccgctctggaacctttgaactttcatggcagatgattgtgatctcttcttttgtctgttgtactttctttggaattctttttccttctaagttataacattcaagtaattgaaacgctgtcgttttagcaaacctaaaccttttaaatggtatgcttacgaaatatgaaatatgaatcacatatgattatattttttttgcaatgaatcatctttagattcaatatgcatttgaaagaaagtttggaaataaaggaatggggtgtgtatcaattatcatatgtaactacgatggtattcgagttttttagagttgaggcaatcatgcaaatgtccgagtttcgcggttcggaattggtgttttttcctcggacttacgatgggtgctaatctcttatgcttagattgtcgaagttttttttttgttacagattcggtcattttggcttttttgtttcttctgtattcgttgttgcaattcaaaaattttcgaaaattttggcaggtcatgctcaatctaaaaccacgttggaaattgagttccatagtgatggcaatgcaatgtttggttgtgaagctactaaatggttttatttgaaggagattgcaatttacgtgtgggctttatgatcaataagagggcaatggactttggttttcactgctggataattagtgaagactttgaagttggatgatgaaaaatgtgatttgcgaatgtcaaattcacgtggatctctcgagattcaaaccaagcggcaaacatgcatgaaagaaaattctgaatttctgaacatgcgaacgtctcaacgcatttcgattgtggtttgttttagtttatttatttttaattcaacttttttttctttgttgtaaaaacatgcacatcaatttcatcaaccaactacaattttattaaaattccttttttatttttttcaatcactcagtgttaaaacacttcatcgaatctaatttctttttattttgggaaactacattgaatgatgatctttataattagccacaaatcattgtcaccgatcaccatgacaccatatatagctttaattttgtttgttctgtaccgcttgtttctgttttgtatactaaattactaaccacaatatatttccaaatccactattttatttgtttctgaaagcaaacacttagtaatatgattggctaaaacgctcctataattgtcaag

SEQ ID NO: 33304 - DNA, 5155 bp, Arabidopsis thaliana landsberg
gagaggaaatagaagtcttcatctttagtggttgaatttttagtgcttgaatcatactctgcattctctcttgagatatggtaggatgagtactcatttgtgttttcttcaaaataaacctctttttgatcatgtgagtaatcttgttcttctgaaccaggctcctttgaccaatcctcaatttcaaagttggggtagtctttgaccatttcttgaagttccagaatggtgctgtttaactcttccatcttgtgagttaactttccaattgtatcctcttgagctttatatccaatctagagctccaggagttcttcagcaacagaatcaagaatcaagtgttcttcttcagtagatgggttggtggttggtttaggtactcatggagaataagtcggaatagggatttcctcttcactcaacaactttctctctaggcttctttcctctaagtgaactcctttctgatcttctgatgcaaaccattatgttgtgaaatcttcgtcctccttgatagctagtgcagttttcatcttctctaggtcaataccatttgaaaatttattaactcttttttcaaacatccatagttgatcattcagcttcatcacccttgaagataatccctctatgactctgctttgccatctaaatttttttctcatctcataccagtcatcttctgtaggatcttcagtctgagctaaaccttttaaggttttcttctgatggccaaaagttctcttcagcttgcggagttgagaagtatagttaaatattggtggggttcgcctttgtttgccctcaagcaaaacaaaagattgaatctgtgaaagaggtttgaaaaatgtagaaacttccaatctctctagcttattaccctgagcatacaaaccaaatccatgcactaaagagttctagtcaaatcctgaccaccatgtaattttccactagcccacactacatcctagattccataccaaagcactcagctatatccactaggctatcatcgctgggtctcatcaatcaagttaatgcttaagaaccttttagactcattcctgtattataccatgatagatctaccattctttaaataattatttctttggtgttctttctctcccccaaacttattcatttcagagagtaaacaaaggggaactcgcatactggatcgacaccctcggcatttttccaacctttgtaatttatcgttccaaataattttataataatggggtcataagaaacatttctacccctatacactatctgaaagtcttctcaatctctcattatttattttattattattattattttttattttttgggagaggaacattttctttttaacacattagtcgacttatcaggtacgaacaaggagtcaaatcctatgaacactaaccgttttgaagaggtaaaaggaagagtagtgagattagctccagcctttgtggattatgttgggaatggatgtccttaattttgttgattggctttctggattttccattagtcggattgatttgaacttgcagtacttaagcaatccatgcaataaactcgagagatagatcataatttaaaacaaaaaatttgactcaataaaacaactatctaagttagaatgacataagtgactcataagaaaagaaaagatgaagttagtaactgactcccccagacttaaataacactgcccccaaagttataaagctagaggaatcgaaagagaaatagtcaaaagttataagttagagaaacgggagttgccacctgagagtggtgtcgatcgatatcagggtggtgtcgatcgacactctggtcgtttttgcatagctttgtgaactcagctcattgttgtagagcttgggttagtgttttcacatgaatccttcagtaagactgttaaatcactaaaacacacatctatagttccaacaaagcataagaaaataagtgcaacaagttccaaaaaaattaacaaatagtctgaaataaagcaaaaacaaagttagaaaacaaagcaagatagggaggttggctaatcctcatgctctgagccggaggtgggtgcgggagagcgatgacggcgacgagtgggagcaacacaaccgcagcgagagagtgtagctatggcgttccagacactcttaaagatgtcgatgacgttctgctgaaagacctgtggctccatcgggataggaggaggagaaggcagatgatatgggagagctgaagaggaagagccaactcgaggacccccagcagggtcgataaacttatcctcagtctgagttggtgcggatcctgaagctgaacctctctatctcctagagcgtggcgcgaaatgcaaaaaggaaggatcgagatgaaaactaatctcctcatgctctcctataatctctgaaagcgcaaggcgaggtaactgaatcatgtgctgccatgtatcatctttgaagcaccacagtaagttgcctttaagccagtgagagttcttcaggtaagtctcatccatagtgacacgcgtggtgttgacttcttcgccctcaaagctgatgcgaaaatgctcgaatatgggagtgagaagactgccaactctctcagatttctgtcctctacctgtaaagagcttggtcttgagtgacaccaagtgatgagcgaacacagcaccaaagttgacattacggtcaacctgctcaaatccaaggttttctggaaagaagtcatgaagagcgtgatagagcaagaacaactcagaaagtctcatcttgccaggctcaatcttgcacaacagtgtgctactaatcaacctaaccaaatattgcagaacaaggtgacggatctctgagtgtacttcgtccttggaatcatagattccattaccaaacctgctccagaaaatctgagaatccttaaactgaccaggcagggaaactctagtgagatcattgtcaaaccccatagatgtcacacaaatctctcagtggtagactgtatctgacaccgcaaacgaagaagataagagctccttcctgagcgttgtgtttcctgtcattcacataagaaaccctaacagaagccatgaattgtcaaaccagctcaggatacaaatcgtactgcctacaatagatgattcccaaacctatgtcatctagcagtcctaaaacagatttctctatctgcaaacgctgcatcaaaccgaaattcgcaaaccgagtaggcaaaatttctacactcatctaggcattatagaacagagtatcataatcatcctaatctggagaaaaatggcgattgatatagccacctttagtgaattccctgttgacatctttctcccaaaccctttgagaaggaattctctcttttggaagctttggccatggaaatcgataaacaggaggttgaggagctgcaacttgggatatcggttgggatgggcggagaccgacagcagtggataagcgcaggcggggtgaggggcgacggaggaggaggaaggtccaacgctcttcctcgccttctttttctgccctgtcatcttgcagatcgatggagttgacacttggggaagatagaggatgagattctagtgagtttagagcctgaaatcactagaaacagtgaagaatcgaagaatctagagagaaaagagtgatttcggcgattttgaaaaaaaactgaaatgaagaagatgaagtttaggttaaatcgacttacctagaaaatgagggtgtcgatcgacactatcgcgtttttggtcaacacacgtttttttttctttctgaatagtcctataaaataaaaaatcttaatgttaagaatcaaatgaatgaaatgaataaaacggagaagtacttaccagtgggttgcctcccactaagcgcttgtttatagtctatagcttgactctgcagttgcttaatcaacaggtgggtcctgaagatccaaaggcttttctactagaatctcggcttcagcccagtagtgtttgactatctgtccattcatagcaaatggttttccattgttgttttttagaatgactgttccatatggcctaaccgagtggactgtgtagggacctgtccaacgagaagacaattttccaggaaatattgtcaatctaaaatcataaagaagtacctggtcattaggcctaaaggtccgatgatgatctttttgtcatggtaagctttagtgcgttccttgtagagcttcgagttgtcataggcgtgaattcatatttcatcaagctccttcaactgaataagtctcctttctagctgatttgatgtcaaaattcatcatgttgactatctaggctgctttgtgctctaattctactggaagatgacaagctttaccatatagaagatcaaaaggtgtggtcccaagcaaagttttgaaagctgtcctgtaggcccacagtgcatcatctaacttgtaggaccacttctttttcgctttacccactattttctcaagaatttctttgatttgcatgttggaaacttcaacttggccgctcgtttgtggatggtagggagtagcaacccgatgctaaactccatattgtaaaagcaatttcgcaagaatcttgttaatgaaatgcttacctccgtcactaatgactatgcgtggcactccaaaacgagggaagatgatatacttgaagagtttcatgacaaccgctgaatcgttcttcagactagctatagcttctaaccatttggagacataatccacaactactaggatgtagagattcttgttggaaggtgggaagggtcccatgaaatctttaccccaacaatcgaagacttcgacttcgaggataaatttttgaggcatctcattacgcttgctgatctttccctttctctgacaagggtaacattgcgatatgaacttctgagcatctcgaaacattgtaagccaccaaaagtctgctcgaagaactttggatactgtcttgaagataacaaaatgaccaccatagctagagctctgacaatgcgatagtatatcaggaacctctgttgcagcaatgcatctcctataaactccatctgagcaatgataaaaataaggtcatcccaataagcgcctaatctctcttaggaatctcttcttgttg

SEQ ID NO: 33305 - DNA, 1343 bp, Arabidopsis thaliana landsberg
  unsure (1)..(1343): unsure at all n locations
cacgtttgaaaagagaaaggaggaggaggtcacgtttattaacaaaaaccatagtgatatcccaaaattaatttctctgcgagataaatatggtaactaattttagtaaatctgtcatagcaagctaaaaggtaacaaaaaactgtcataacagttagtattattcaattacataaaatcatgaaaaagctgttaatcggtcaccataagaatttcaaattataaatctgtcataacataaaatatcggtaaggtcatttcagcaatttattttcttctttattaaacctgctatcaaacaatagatttatggtaatatacatttatctgtcacaacataagaacaatctgtcataacacaaaacattatattttagaaaacaaatatgtcatcaaacgacagatattttgtaaaattacaagaatctgttataacataaaacaagtctgtcataacattaaaaaaattggttatcgttagacgtcattctagtaattaattttttgacaacaaatctgttacaatgtgacatatttttttaacaaaattataaatctgccatcatttaacgtaaaaaaacatccacaaaaaaaataagtctgtcaaattatatgaaagtctgtggttgaataaactaaaaatctgtcaatcaaattaaatctgctataatttataaatctgttatcactatcttctaagaagtctgtcaagcaaaaaagtctgccataaaaaatctatcacagttaaaaaagtctggggaataagaataaatctgtcataactaaacgatagacttttttaaaattgctggaagtttttttaaagggtatttttgtatttattttatttttaacacatgggaaaagggtattttagacaagaaaagaactaatttaaccccaatattttataagacattctaataattaatctcattatttgagttaatctagttttttcccatatcaataaggtaccaaaatccagatagaatcaatgtaaattattcaaagagtaatcgtttaatagttacattcttcttaataaaaacgaaacaaaaatacaagaaagagagttatttcgaatccgcttatagcggttaggtggtggaggatccggatctcaggacataaagcagtagataatccgccctaaatttcaaagagaatcctggttttggaacataaaaaaaaaaaaagaagagcacattggataaagagaaaaatagtaagatattgtgtaaacctctgaggtctgaggtctgaggtgctgtgtgtaactgatatgatattngaccatcaaagtaactatttagtgatttgttttacacattgggaaagat

SEQ ID NO: 33306 - DNA, 399 bp, Arabidopsis thaliana landsberg
tacacaagaactaggagtttccatttttttatagaatcttaaaattttacaagtaaaaaacacaaaccatgtaggagcggggtggtctgggcatcatatatctccggttggaaaactcagcttcaacttcttgtacaatctcattcactactaggttattgaacacttgaaacactctctgttcatttcaactcttacctatcaagtccacaaaacaccatcaaattcatgggtttcaaatgcgatctagcacgtgacatatagaaaccaaaaaaccttccttgccgcactgtacattaaaactcagtgtcatctcatagaaaggagcttgccacactcctccaagctgaataaaggagacttaatcgtctcaacacttgttcaacaaactagaatcat

SEQ ID NO: 33307 - DNA, 458 bp, Arabidopsis thaliana landsberg
ttatatcggatgagtctttgtgtcaaatttaaacaatggaggaaaatagctcgtccatccattgcttaaatcaatggtgaaagctacttttaccaatcctccattaaagcatcttaagtctctttttgtgagagtttatgtggtcgggtcggcaaaattttcaggtaaaaagggtatacagaagattttctgatcaacccgacccgtagaagcttctttgttggccgcgtaaattggtgtcgcacgcggccatcagatgaagaacatacatttagaccctgaagcaaagccaaagctttgatattctcataaagaatagaggtcaagaaaatcatcaacgaaaagccctaatttgcactacaccggatttcccaactattgactgaaaacctcttccttgcattacaagccacctttacaaagtgatacaaaatggtgaggagaagagaaggtcttac

SEQ ID NO: 33308 - DNA, 1792 bp, Arabidopsis thaliana landsberg
caacgaaaggcgggcaaactttcgcccgtgcacgcccgttcttgcccaatcttgcccaaacttgcccatttgtgcccattcttgcctaaacttgccctttggtattctatgttgttttgggctcctaaggtcaattggccatgcatttaggcaactttcgaaaattcggactcttgcccgtggccgatgtccttaagcgggtcactacattctcctcctaaggattagatggtccggcttcatcctctgtaatttcctggttcgaaaaactgtggatattttgttcggaacttttcctcatctttccaggtagtaactttacgattttgccttcccagaacacttgaatttgcggaatccttctattctttagtcccgcattcgtctttcaccaatgccaagagggacttcgggataggtgagattcgttctttactcttgtatcggctcgagtatgataacaataggatccggaacatgcttccttaattgcgacacatggaaaactttatgtaattgcatttcttccggcatatataaacggtatgctacttccccgattctcttctcaattttgtatggaccaataaatcttacctcgagctgtctaacttttcaaaagcgatttttcccttttaacgcagttaccttaagataaaccatgtcgtcttcttggaattccacttcacacctctttcggtcagcatactttttctatcgatcttgagctttcttcatatagtctcggatgaactgaattttctctgtagtctcatcgatcaaccgattattagaactcgtcctctctcctactttcgtccaacaaagaggagttcgacatggcctttcatacattgcatcaaatggcgacataccgatgctcgagtgatagatgatattgtaagaaaactcaaccaaaggcatgcgtcttcccaatcaccagcccactctagtgcacaaagttgaatcatatcttctatggttcggatggtcctttcagtttgcccgttagtctccggatggaatgccgcgctcatatgaacatcgctccctaaacaacgttggaggtcttgccaaaatatagatgagaacttaggatctcgagcggatactatattagcaggtaccccatggagtcataagatttcatcgatatacttttctgccaagataggtgactgatccgtacttttcattgataccaaataagccatcttggtcaagcgatctactactacccatgtagcatcattgctacgtcctggtcttgttggtaatccagtgataaaatccatcgagattgacacccatttccatgcaggaattggtaggttcgcaataaacctgccgacacttgatgttccttcttaactctttggcatgaatacattggcttacccatttcgccactgatctcttcatcccaggccaatgttaatatttccttatatccttgtacatttttgtacttcccggatgaatgctcaataaaaaagtatttgccggctttaaaatgtcttgcccaaatcccttacgatcaggcactataattctcccattgagtaataaggtgccatcatcagctagatggtagccactagcatttggtctatctaatgtttttaactcttccacgattttctgcaacttttcatcttgtgcttgttcttctcggattcggtgaagcaggcatgctcgagtcacagattgttaacccaagggctcactagattcaccatctagagatagcaaacgcactatcttttactcattaggaatcgactctggatcc

SEQ ID NO: 33309 - DNA, 4130 bp, Arabidopsis thaliana landsberg
gatgagatcactatctcagttacaatctccgttggtcctaattcgtgtctcagaaaacgtgtctctcgttactgcgaataactcaacgaatttaaatccaaaagtattttttgtaaaatggagaataaagataaaagacttgaaaatagctctaccaaattttgttacctttgacaatgatttgatatgacgaaactatttcctcccaaaccctaacgattctggtccttctccttccctccgttttcctcctttacaaaacaaaaagtggctaactaaaaccctaatttcgagtttccttcttttatatgcacactccagggttttcattaacccaaccgattaaaccgagcgatttaaatacaaaccctaaccgttggccacgacctctcacacgaccacgaccacgaccacgacctcgcaaaagtctgggtccttgccaattatcatcaccggatgtagcaatattcacttctaaaattggagctgatccaggtgggagagataaatgattcatcatcacgagctcattattttgctcagcaaccgaaaggacttgcatcaactcagaataacgagtataccctttggcctggtattgctgttgaaggattacatttccaggatgaaaagtggagagcgttttttcaatcatatcataatcgctcactttttgaccacataatatcatcttggaggtgattctgaacatggcggaattataatcaccaacactttcgtaatccaaaacccggagatttagccattcatgtctggtttttggcaaaatcacatatttttgattatcgaaacaatctttaagtgattaccatagatccacaggatcttctctcgtgatgtattcatttttcaaattgtcgtggagatggtggcgtagaaataccatggctttagctttgctctcatctgatgtcgtttcagatgcatttatggtgctaagaaacccatttgatctaagatgcatcttaatatctgatgcccatgacatataatttttaccagatacatcaagggcaacgacatcgagcttagctagatttgacatgattatctatagaaataaataatcattcaattaatgagccatttatggcatttcgaagaggcatagcttaccattcgattaaggaggaggtataacctcatactccgaaaatataaagcatataattttttataaatgaattaagatgaatttaagataatttaaatgttacctcaaaagatgcttgatcaaatagacgatcagttggttagataactcccggagagacgatcgtgctgataacgtgttataaaagatcaaagttagaaagaagaatgaatactagagagaataaaactcgaaacaagagttttcttattgctttctctttctcttttctttctctctggtttctctgtaacttacaaatgaatgaaatgagctatatatagtagagcttacttagttaggaagtaaattacttacagaagaagtaatagataaacatcatccatatcttagggatgaagtaatggataaacataatccatatcttagggaggaagtaatggataaacataatccatatcttatggacagagatgagagatggataatcacatccatacttatccggtttataacactcccccttgagtatccatcacttttgatgagttacgtactgcctcgttaaaaatattgtcatggaaaaacccattgggataaaaaccatgacaagggaaaaagagtacagtgacgtgaactccccctcgaagagacttcacaggtctcgtatatgacgcattccaatgctttgaacatgctttctaaatgtagaagttggaagcgcctttatgaataaatctgctgcattgtcacttgaacgaacgtattgcacttctacttccttgttcttctcgagttcttgagtgtaggagaagaatcgtggagggatatgcttcgttctgtcgctcttgatataaccttctttgatttgagcaacacatgcatcattatcttcatatattcttgttggctctcttttgatgactaatccacttgcttcttgaatatgattaatcatggatctaagccaaacacattctctagatgcttcatgaagagcaattatttatgcgtagtttgatgaagtggcgactatagtctgcttttgagaacgccacgagattgcagttcctccaatggtaaaaacatatccgttttgtgatctagacttatgagggtctgatagataccctgcatctgcaaaaccaactagaccaaactcggggtttctaggataatataatccaaaatcaatagtaccttgaagataacgaaagatgtgttttatcccattccaatgccttcgtgtaggggatgaattgtaccttgcaagcaaattagtagcaaaagcaatatctggttttgtacaatttgcaatatacataagtccaccgacatcactcatgtaaggtactttgggaccaagtatatctttgttatcctcacaaggtctaaatggatcatttcaacatttaaagatctatttaccataggagtaattaaaagattcgctttatccatattaaagcggtttaaaatattttttatataattggattgatgcacaaatataccttcaaatgctcaatttgaagttcaagacaaattttgtctttccaagatctttcattttgaattcttctttcatatgagttcgtgcatcatcaatctctcttggtattccaattatatttatgtcatcaacataaacaacaataatcacaaatcttgaagaagatttcttaatgattttaagtcgatgagtctaatgcctcgggaacttttaatccttccgagattttcatatatatatcattatcaagagatccatataaataagctgtcactacatctataaggtacatatctaaattattagatgccgaaacgctcattatatacttgaatgtaattgcatttatgaccggagaatatgtttcttcataatcaactcctggtctttgagagaaactttgtgcaacaagtcgggttttatatcgtgtgatctcatctttctcaaagaaatttcgcacgaatacccggcccacttgtgcccaacattctttacattcttagatgcagtgacaataggtccaaagacatttcttttgttaagggagtgcaactcaacttgcatggcatatttccatttctcccaatctggtcttttctggcattcagataatgtctttagatctgaatcattattctcatgatcaatctctttagataaagaaaacgagaattttcattttcatcatcaatatcatctctttcccatattatatcatcatgggtataattaatggaaatctcatacttttctctactgtcccaaggacttggtttttcttgaataactttttcattttcttttcccatttctttttttcttcggggatttttatcttgtgcgccaataggcctctcacgcttaaattgaaccttaaattcattatatttgttcccatctaattctagctctctaggaatttgaactcttgatggggcatttgcagcgggaatatatgattttgtcaccctttttgtatcggggaacgaatttggtaattgattttccatattttgtagatgtacactcttttctacttccagctcacgttgcttcgtggggggatcaagatattttaatgatggtgcgcaccattctatatctttatgcatatgcatttgatgaattcctccccctaaaggtgggaattcatcttcattaaaatggcaatcggcaaaacgtgccgtaaacaaatcatcagtttgtggttcaagataccttattatactcggtgatacataaccgacatatatctccaatctcctttggggccccatttttgttctctgtggcggtgctaaaggcacatataccgcacatccaaaaatacggagatgggataagtttggtacttgaccataagtcatttgtaaaggggaatattcattatctgcgtttggtctaatctgaacaaaagccgaagcatgcaatatagcatgaccctatatagaaattgggagttttgttctcaatattaacggt

SEQ ID NO: 33310 - DNA, 4634 bp, Arabidopsis thaliana landsberg
  unsure (1)..(4634): unsure at all n locations
aacattctgggctgaggcgaccaacactgctgtgaccttgatcaataagacaccatcttctgcaataaacttcgaagcgcctgacaagaaatggacaggtaagtctcatgtctatagttatcttcgaagatttggctgtgttgtgtttattcatgcagatgaaggaaaactggtgccaagagcaaagaaaggtgtatttctcggctatctgaatggagttaaaggatacaaggtgtggatcctagaagagaaaaaatgcagtatcagccgaaacgtgttgtttcaggaaaatgcagtctacaaagatgtgatgcagagaaacaaagagcatgattcaagtcaacatgatacatcaagcggctccctggatattgatctcggtgactcaggagatttgagcttaggtggagaagtctcagaagaatctgaaaccttagaataccagtcaccagttacagaaaatcaaaaatctgaagaagatgagatcactgaagaaatggagacaaactcaccctcaagttaccatttggccagagacagagtaaggagagaagtaagagctccaagaaggtttgatgttgagggttacttcagtgaaagcactgagtatgaagatgattatgatgcagaagctctagtcattacagttgacgcagaagcacttgtcactacagttaatggtgatgctcgggaaccagaaagttatcatgaagctcggagagatgctgattgggtactttggaaggaaggaatggatgaagagatggactctctacttaagaatcacacttggactgcggtcacgaagcctaaaggacaaagagtaataggctgcaaatggatattcaagcgtaagcttggaattcctggaattgagaaaccaaggtttaaggcgagactagtggcaaagggctactctcaaagagaaggtatcgactatactgacatcttcgctcctgtggtcaaacacgtctctataaggattctgttagccattgttgcacaagaagactatgagcttgaacagctcgatgtaaaaactgcatttctccatggagaattagatgagaagatctatatggaggttccagaaggttatgaaagtcagtttgagtcagatcaaatctgcctgttgaacaagtcattgtatggtctgaaacagtcaccacgcaagtggaaccagaagtttgacagtttcatgatcgaaattggttttgtaagaagtaatcgggacagctgtgtttacaccaagtctcttgatgatggctccatgatttacctgctcatctacgtcgatgacatgcttgtttccgcaaaagacattaaggtaatctcagacttgaagctaaagctcagtgagaagtttgaaatgaaggacttaggtgcagccaagaagattcttggtatggaaatcatcagggacagagaaagaggaactctacagctatcccaagaagattatttggaaaaggtgctggaagtttacaacatggaacaggctaagcatgtagagactcctcttggagctcacttgaagtttcaggcagctacagaacaacagttgctcgcagaagaagaatacatgaagtctgtcccatatttaaacgctgttgggagtatcatgtattccatgattggcactagaccagatttagctcatcctgttggcgtcattagtcgatacatgagtaagccaacaaaagagcattggctcgcggtgaagtgggtgttgcgttacgtaaaaggaacgcttaaaaggaagctgtgttacagcagagggtctgagttcattctgaatggttactgtgactcagactatggtggagatttagacagaaggaggtctacaagtggaatggtattcactctcggaggaagtgccatcagttggagatcctgtttacagaaggtagtagctatctccaccactgaagccgagtatatgtctcttacagaagcagtgaatgaggcattatggctgaagggactggtgaaagattttggctatgaacagaacacagtagaaatcttctgtgactctcaaagtgccatagctctttcaaagaataatgtgcaccatgaaaggacaaagcacattgacattaagttccacaaaatccgggacacaatagcggatggagaggtggaggtaacgaagatatcaaccttgagcaatccggttgatattttcaccaagaccgtgccagttagcaagcttcaagcagcattgaacttgctaaatgtcacttctgagtagtaaagctcaggtccgggaccggaatccagaaactcatctctcagctcaggtatcacgtttttatttcacatgttttgttcttgtttccctaggtagagtttgttgggaaattagtgaaacaaagaagcaatgtgaataaggaagcagcgagaagagcaagtattgccagctcatatcgatgactcattttaggaccacaagatacaaggtgcaagatagccgttggttttgctgtaagctgttaaagcaaaagcaaaaggagctttgtctggttatgcaacaagaaggacgagctcagtgaaggtgataacgccaaagaagaggcaacatcgcaagcggctgcacaaggggtactaggtctaatcttgagcttctatataaaggcattgattgagagagttgaggagaagcagaaaacatagagagcaaaaacctagagtaaacttgtgtattttgttcttggggaaacacagagagaaagtgagattgaatccgagagaagctttgtaacaagggcttagggggtgagagatcttattgtgaaactctgtgattagtggattccgggagacaggtcccggcccagacgtagcatctttgatgtgaactgggttaacaaagctttcgtgtgctctgttttaagtttggtgttctgttctcatttcacaaaagttcttggttattcggttttcattcgaatccttgtttgtgtgttggtctgaagcttacataagttcttttaagctttgagattcaccacaaagtggtatcagagcctaggttctttgagttttggttcagtaaggtccttaaagcgaagaaccatgtcggcggcgaggattgaggtggaaaagttcgatggtcgtggggattacacgttgtggaaagaaaaacttatggcccatatggagattttgggcctgaccgaagccttaaaggaagcccacatctcagatccagaagaaacggatggagatgataaggagaaggaagttctcatggaggagaagaggcgaaaggctagaagcaccatggttttgagtgtttcagatcaagtgctaaggaaaatcaagaaagagaagactgcagcttccatgatggttgctttagacaagttatacatgtctaaagctcttccaaaccgcatttatccgaagcaaaagctttacagctacaagatgcaagagagtctgtctgtggaaggaaatatcgatgagtttctacatctcatagcagacttggagaacacgaacgtgctcgtgtctgatgaagatcaggcgattctattgctgatgtctctgccgaaacagtttgaccaactgagagacactctcaagtatagctcgggaagaactacaatgacactcgatgaggttgttgcagcaatatactcaaaggaacttgagttgggctctaacaagaagagcataaggggtcaagcagagggtttgtatgtcaaggagaaagaagagacaagaggcagatctgagcagagagagaaggggaacaaaaacaacagatccagatcgaagtcaaaaagcaaaaagggatgttggatctgtggtgaagagggtcacttcaagggttcttgtccgaacaaaaacaagttccaaaacaagaaaaaggaccaagcaagcagcagcaaaggtgaagcagcgatggtagaaggaaatcacactgatgctgcaggctactatgtatcagaagcccttcattcaatgggtataaaccttgaagatgaatggataatggatactggatgcagctaccatatgactcacaaaagagagtggtttgaggagctaagtgaggatgctggaggctctgtaaggatgggaaacaagacgatttccaaggtcagagggattggaagcatcagaatcagaaacgatgatggctccccagtattactcactcaagtaaggtacattcctgacatggatagaaacttgctttcgatgggaaccttagaggaacagggatgtagctttgagtctaagaagggagttttgctagttaaggtggatacaagaactattatggtaggtaaaaggcatgaaaaactctacttgcttcagggaaaaccagaatgtggacattctttggttactgaaaagaaaagtgatgaaacaatcttgtggcataggagattaggtcatatgagtcagaagaatatgactatcttggttaagaagggttttctggacagaaagaaggtctcagaatttgaactatgtgaagattgtgtttacgggaaagcaagaaggattagctntgttttagccacacatggcacagagaacaagctagactatgttcattcggatttatggngagctccaacggtcccattatctctgagcaaatgtcaatactt

SEQ ID NO: 33311 - DNA, 8062 bp, Arabidopsis thaliana landsberg
atgtttccatacgacatcttcaagaagaagataatagagttcaacacaaatacttttatttaataagcaaaagagatatgtaattcagtcttacatatatattcttaacatctctaagcgccacatatgtgctagggaatagggatagctctactgaacttactacaagtaaatatgggtagatcctacaaaagtttttaaagctgttatagacatcaaatattttttttgaaaatattttttgggaaggagaattctgaaaaggggtaaggtgaaaggagcatttctcaaataaatctcaaaaaatattatatgctagagtctaaacaatactaattgatatccttttttgtaattagatagaatgttgtttcaattggatagttaagagtaaatttaatcactttgagatgttatcactaaaatcaacacataaatcattttgagggcaatgatggatttatcacacaaggaaaaacacgaggaagctgtttttacacggattttctaagttaattttgacagttaaatgatacgttatatagaaatatgaaattaatttttacgtcctactactactaatgtgataatatatgattttagagttaactatatacttttctaattattaattaatctaaaattttggagaaataattgttgcaaaaacataaattttcaatgcctttttttgttagttaatgatgatgaattgcaaatttcaaaaagataattcaatattattggtttagagttacaaaaaattgaaaatcaccaaaaataatatatttataattaaaaattaatctgtcttctttaatatgtataaaaattttaaaacttggattaatcagtttggtttgctaaattaatcttcaacttggtagtcttgccaaaaagtgtttactagttgaaaaagctgttaggaaaacttggcaagcaaacaaatgcgcgcacacacacacacacacacacacctggttttagtgtcttatgcggtttataaatacgatttagactttaatagagtctcgatctaatctcccacaaagaaaaatcgaagtcatgcatttacagcaaaagctattttctacagtctcatttttaagttctaactctcatcatcagacatgaacgttggtcttcttctcagagactccaacacatcagctgatggtcgaccactctggctaactccacggctcgaccttagcttcggaacactcattgcgctcagaggcggcgttgcagctccaccgttcacttctctcaacaccgacctagctgccttagccgccaccacatcagcagccgcagaaactactcttgattccaatcccgaatctctgacattctcctcgcttgctgctggtgcttcaggttcaccgtttctatgacttgtcccgcaggcaaccccttggttagccatggaccgtgcctttgcagcctcgtgcttctgcatatcgtaaatgagctctttctgaagctgtttgtcagcgacaagcatttcttcgatctcgttcttgtagtctttgaggaggacacggaggcagtccatgagcgaacctgtgagaggactgttcttgctctccaaaagcctcttgagctcaatgaagattggaatcgtgttctgaatcaaaccttttctaacagcgtgcgttatggcccttcctttcgcagttgctgcatctccaccttcttcctctatatctgctgtctccgacgatgctcctctggaaactgataaacggatctctttgcacgccaagatctgaaacgtatcctacaccgagacaaaacgagtaaaaatcggaaatcacaagaagaagaaaaaggctctgtagccatttcggaagttacctgtagaactgattgaccagtgacatcttctatgttgagcattccatcagaagcagctgcgaggatctctgcacataacttggcgaatgtggccaaaaggtgttctggagccatttgtttaagcagagtaatgtagatctgcattcttttagacctagccctttcatcattccctctacagaacaaatgaaacaaagagaatcactaagatcattcacaccaaaatgtcaagtttgcgtatgagcatagactatataactttaacacaagtacctgatagaaaaaacttgatcctttgttcttgattgtttagaatctggattactatggccagtgtgggcatggcagtcgtttaagacataaatagcttccacgaaactgttgtaagctagaagtggcgcctttactataagcaatatggggcataacaataatcaaaatcctagagatcatgtctctctgtaagaatttacaataacaggggaataaaagaatgcatttcatggttgctcacatgagttctcatacctttaaggatgcttccaaataaaaagtctgcaagtcggcgtatcttttcagattcatccactagcgataaaaggaatcgaaggaagagaactcctctccatttcacgtagtctctctgaattaagaaaacaagcctgcttattaattgtcaatccaatactttctaaaaacggaagataaagaatatgtggagaatagcaatacctgtagtaaccttgagagaagtatgaaggtttgccttctaacaacttcacaaggatcccgaagacgtttagtaatcttcggtatgtaactatccaggtaaacaaaccattagaatgtcgcaattatgtttaacatttgagacaagtacaatgaaaaattaatgttctgtgaatgaaataccactcaatcatggctgtatagtgaacaccaaagtctgtcatcgctaacacaagattgttacgcaaggctgcacaatcactcttttcaagttcctgcgagagtaaggcatctacgggttcacataggttgaaatagattgaagagacaaaggagcctcccatccaatgaatcaagttcctgggtcgaaaattttcctttccagaaataatcaaaatgataaaatggccactagaatcagcaaatgcagacagacctgtgcaaagagagggatatatcttttagcaagcttcccgtcagccaaacacatcttcgccatggttaaccaagactgactatagagaagaggagctttttgcttcaagcaaacattagcttggggcagtttgtttttcagctttgagtctgaatttcctgaagtgatgacagtatgtaagaacggaacaattttggtcgtgtcagctgaaggatatataatgacacaagatccaatggtgtatactgctgtgactgcttttgataatttcttggacacagtatccagtctcttgcttcttctacttccaagtgttgctggtgtaacaaaagaatgattattactggaaaccccctcgatgtacttctcagtgaccttagatgctttcgataaaacttgttctacccacttcttgacaagcatatcggcctcctcagaggtgcttgccttctttttgcacaaagtttttaatgctttgacatgtgcatcgacctgtcattcaatggcattgactaagttcatgaagatagatgaaccattttcaaaccagtgaataatgatctgctcaattcaagcgttcaagtttcaggttacagaaaagtaccaaaaaaatatcaaaatcttatagaatacatccttctagacaaaaaccagtaactttctgcactttccaacatgagcttgattttatatagaagatatcaggttaaatatttatcattacctcagcagaatgcaggttaaatttttcgattttcttcagcaaattgtcagccagatctgcagcaggctctgctggcagctgaagggaaacattggagattgtttgcaaaagacaaactcgatcgccagcccatgtagaagaattacactcaaccccttgttcatcaccttgttcatctagcccttcagaaatagccaaattatgatacatacattcatgaaaattggtttagctagggtagaagttaggactaaaaccagagaattacactaccagtaggaagaagtaaagacatgaatcagttgattgagatgtttatagatggataaacagaattctgacaaaccttgtacgtcattcttgtcaagcaactgccaatgatggtgaagaaattcccattcgacagactttggaagataaactgaaacctctgatagaaggaaccaagcaccagcaggagctgtccatctatttattggcattgaacgactcaaccacagtgattcagattcctttatgatacactgaagcgcaagggcaactcttggttttagtcgcttcttctttcccaaacttccacatattttcgtaacccaaggagaaacctcactgttgcaaagctcccttaagagaaccaaaactccttctggaaacaaggcttcaatgtctctgtctagatcttttgaagtagtgttccggttgctagggagagaagcactgtctggagaaagcacatttccagctcgtaatattctctccagaactagttcatgaaagacattctcgcattcttcttggatgctagtttcattgtccatgatcatccgaggaacagaatgtaaccattcagtggtcacaatttcatctgtacatattctgaatgcctacagtgaacagaagacaatgaatttgcattatcagaggaaaaaaaaggacgcggaagaaatatgataacaagtcattagcctaacctatattcagggataagttgagtataaatattatctgattttagtatgaaaccgaaggaagcagttgctatgtattctcccattcattcatctaaaaatatttttggcttgcacattttggtctctttaactttgagctaattaaggacaaagcaaacccgtatataattccactaactctacacatattatgatcgggtaaatgagaaagaagaaactgagttacagaaaacatacctcggaaagagctgaaattgcagcctttcttatacttatgagcggatcagaacaagatgttcccattgtctttaggatactaccatcaaagcaaccacccataagggatgtcaattttgtcaccagaagaagagctgctctccttacagccgccttctcatccacacaccttttcttcaaaaggtcagttactgcaccttttccctctgaagtctcaccgttaaacccaagggcttgtttcagtatcgacctactcctttcatcaccagacaagaaccccacaacttgagccaagttggacaaagctcgagctctaatcaaagcgctcgtgtcagaacaccgctgaactaaagcatcaatacaacctaagccccacgaatcattcaacccattctctgaactaataactcctaaagggttccctaatgagcttatcaacagaggtataatatcaacagctaatactctaaaattagacttcccttgacacatcttcattacaaaatcaacaaactctgattggccctcaacctccattgcctttacaatctccagtaccgcctccacagcgaatccacgcggctcggccttctcaggtgccttatgaaccagaaacttaggcaaattagaaacaacttttttcaatatagagttatctttagccaaactcatcaatttccttgacacaaatcccaacgcaaaacttctcgcttgatgtttccccataagaagcaacggtgtcaaagactttgaaatctcagcagcagtgagtgccatatttccatggtcagaattcaacactccacctaaaatcttcccacacatttccatcaatcgatcataattcaaaactccagagtactccaacaccaataaaggaatctcactcacagtttgtaccaaagatttcaaactatcaggaaatctatctaaatgaacaaaactcagagccgagccaagcttctctaacactataaacaccaatttcgcatcgaatccaccttcttcagtctcttccccatcttcataccctaaattcctcttaccacgtcctctcttcttcttattccctttctcccgctgcgaattactcccttgaccggtcgaatcgtcacggcgtttgaggtagcggcgaattgagccaagtagagaaagaaacgcaatcggagagaagaaagtgaaaacggggcagttcgtggaaagaagtagactgagataagcgtcggaggctaaaatagcaagacggcctgattcaaccggagaatccatggcggcggagatacagcggagaaacgaagaagccattgaggagagactaccgtagaatcgattgagaatttcatcatcgtctgtatcaagtagagatttgagatccgtgacgagttcatgatagtcagattcatcgtctcctccttcgattcctgcaaggattctagtgagcagaagctcttcatccatggcgattctctactgatagagagagaattttggatttcacagaaattcaggtgaaaaggtttcaaatcattttggatttcccgcgatctgttcgttcttattagaattcaaagtgggacttagaaaaaggtttggggctaatttagcatttccacaaagagcagagtcctcagtgggtaatatgatgtatacgaaacaattttgggattttaatgaaacaaaccctgtagttttggctgattcattttaaaaccttcaacttaagttttaatagaaatacctctcatctcagaaagtctaatgaaaaaccagacactatactatactagtcaaaggattcacttaacatttaaggaatatgatttatgcttaacattttaaaatcttctttggtcggctccactagtcaaaggattcactcatcttattgtcaagactgatgtccctgccatgacaaattgtagacaacaaaatatggctagcagtcagaacacgagcgatacatcttcaaggcagtatgaaacaacggagccttctcttgatgaaaacattgatgcattgcttgaggtaaagagccatttgacccttctatacttctaaattatgctatgagcgtgagggaattttatgaatatcgctcacgaataaccttagaaaacctgtaatatggtaattattttgtttaaactctggcaggaagaagagaccttaattacagcacacagaaaagagatcgaggatacaatggaaatagttcacgaggttatggctcatatgtcttgtgattgttttaacattatttcatgtttttttttgtaggaaatgaaattactagcgaaggtggatcggccagggagcatgattgacaactatgttacacagctgagctttgtgttgtcccgtaaagcagctggtcttgtaagtcttcaagcccgtcttgctcggttccaacaccgtctgaaagaacaggagatacttagccggaagagagttccgcgctaggaaaggcagtggaagttagtttgcgttccagtcagtttttgttagagatacacacaagtcttccttcctctcgtgttttatgaattggggaatttgtttttgtttttgggagtgggttttaatatgtcaatgttacatttgggattttgttttttctgtgtccttgtcaacatttgtactcagtgtcttctgcaacttattcataatgaaatgtgaattgtgaagttctttactgccataaactcttaacttaaaacagcaggttgttgtatatttgtaacatattcgtgtatgtattggggaaattgtgcagaacatttgtatatcgaaaacatttgctttcaagaggttattcatggatttttggctattgatatattgaaccgatactggatggaaactttaaactgccttcgcactggtcaagaccggagagaaataaataaggttttcaacatctcatatatcttcagctagactacccaacatagagatccaaaacgcttcatctacattttaaaacaagaaggaaaaattacaataaaaggaacgagctaagagctctggacttgactcagagtttacctctgcttttaaagccgagtgcttcactgcctaaaaggagtgggatttaaagtttgaaca

SEQ ID NO: 33312 - DNA, 1828 bp, Arabidopsis thaliana landsberg
aagtgattcttggtggaatagacggaaacatgttgctacagtttaggccagtccatataaactgtataggtacacatggatctccttgccagttcgttttttgtattctataagtggcttgaatgttcttcaatgtagtgactgggaatataaagtttatatgttgttgaatattttaacctcatgaacaaccaaaaagggtttgtatatctacatagtaattaagtacagttgacaaaccgtcgttttcatctgtttcggtctgaagaagctggagtaacccgaaaacctccatggcattacaatatggtggaagagttgacgacttagttcttgtgagatctagggagcagaaaccatcgtcaccgcatttactcgaggttcttataggtacagtgtcagccatgaactctagaggactgtagtattcactaatgattgtgtttttattccacaagatactaaactctctggtatcactgggcttcaaggcttggatctcggcaaagtgaaggtacacgtgaacgtcgtcgtccgggttttgtatcgaccaggttgtgctccatgtatcacttgcaacttggggtatggaagcctttgaaattatagcttgtggcagatcaaaggcactaacagttgtatttacaggggtggtagtgtttatataagtccattcatcctgaaagtcatcgtatgcgtcccatagacgatcatggacatcatatggatacctaacacaacgatttattatcgataaacaagtcagtggtgaatatgcgtgttaactttttcacttttcacaaactaactaattaaagaaatcataatagaagtttaagagtagttcctacagaatttataaaaacgtaggaacttattatataaaaaaaagaagttattattataaatattttcacagttttatttgtcaaaccaaaatatttataacagcttatgttttcattgtagcaaataactaaaagcgtagaaaaataagctgctatgtcttttagtctaaaataataatattttggcccaaaaacaaaaagtctaaaaataataatgtatattgtttaggagttatttttaatcgccaaatcaaatcgcggcgcgtctacagaaaattcagaggctttcaactcccatgatgtatctttgccagacaaacaaaatgaattatttcaaagtaatttgattatatatacaaatttggaaagacacacaatactaccacattttctccacattttttcaaattctaccacattttcctttttctttccatctatatcacatttggggggtatggggtctattttatcctcattgctttctttctcttttctctctctttctctctcttgttctacgtctatcgttcacaaaccaagctttttcgtatgattttttcaaaacacaaattttaaatttgatttattgaaaaatctttctctttcacgttcatgtctacatccctcaatagattccagatttaattccttgattccttgtttctattactatttatcttttttttaataagttaaaataattttttatctttttcgattttggttgtctccagtttttgtctttcaatttctgaaattattatcataaaactaattcatgtccatgtctcttactagatctacttttagaattatttttactacacttattttaaaatgggggacaagatcccgttcactttctctctccatcaatacctttattttgacacaactctattatgtcactgacgggttaaatggttcatctgatatgacaatccattataatgtggtataaatgaattttttttttg

SEQ ID NO: 33313 - DNA, 5539 bp, Arabidopsis thaliana landsberg
aggtatcgtataccagcccgggatctaccgctcgcgtgggatccacgtttcccgctccaaacgcaaacgctgtggccgccgattcagctcccgcggcgcctctatctccgatcggtcggttcctattgtcagtgatcctcgccgtcgtcatgattgctgatttgatcatcgccggtgaccagtccccgtgaacggacttgattagagcggcgattccgctgatgtgaggacaagccatggaggttcccgagatgatattgaattggacgcgtcttggatcggatctgaggaggctagggctgctgaacggtgaccatccggcgaggatgttcagaccgggagccgcaatgtccggtttagctatttccggtcccgcgacgctaggtcctctggatgagaacgcggctaccatcggggcggttgcaccatacgcggttcctctgaatcgaacggaggcggtggcgtttgctgctccggcgaggtaattcagtaaggttttaccgtcggaaaatccaagtgaaacggccggtaaaacgtgaggatcagcaagaagctcctctccttccgcctctgtgctcacaagaagcatcgctgctcctccgctccgtttcacctcttctcctttggccgttctgccgctggctcctcttaagcaaatgacgattttaccctcgacgagttctctcttgagcgagtcccggatacagaacacggctccgctttcttctccagctgttctgttaaacgccaaaggcagattctttaagctttttcctttatacaaggatgatccgaccaagcttttacggttcccgatccggacaatcgccggaaacgtcctatccgtataactggcagcgacagtcatcaaccacggagctccattactcactgtggatgcagttggtcctgaattacccgcagagcaagacacgaaaatgttcttctgcatcgctccgaacccggctatcgcgataggatccacgtaaaacgggcgtgatgatccacctagcgagagtgaaatcacatctacaccgtctaaaatggctcggtcaatggctgctatgacgtcggtgctggcacatcctagagcccaacaagctttgtaagcagcgatcctcgaagtaaacctcatccctgaagctaaacctttagcttgcccgaaataattcgctttggggacaatgtctccggcagcagtcgaggctgtatgcgtcccatgtccttgtgcgtctcgagtcgacctatggaaccattagtaagggctctccattagtaataacttttaatgagaacatcttgaattaacaaacaaaatatttagttaaaagtcatcaaaagcattttcattttgatcaattatttttgaggaaggtaatttgatgttcggatcaacgttatggagctacccaacgtttttaattatatcttatgtgtttatacgagttatatttgcataatatatatggtagaagtttttttttggtaaaagttggaagttattcttcacgttattcccattaacatttggagactaaacaatgtgagatcaaaagaagttaaaaaacagagggctcatttatatttcaaccgtctaacctgaaatcagtggtttcattgatttttccaacgattgattcgtagcctttgtaaaatgcgctagctccaatgatcttcttgttacactccgaagatgagaagtttgtgccttcatcgcacgaacctctccatctagacggtacaggagtcatgtgcgtgtctcggaagctcacgtgctccggggagatcccagtgtccacaaggccgatgatgacgtccgaagataggctcgtctcgttccaaagaccgatcccgaattcgagaccaagaaactcgtgagaatatgtcgtgtgtagagataagagctcgtctggataagcagagataaacccttttgtgttcttcaccgtatcaagctggtcgtcggtgagagtcgcggagaaaccagacatggcattctcgtaaatatagtgaatctccgggagagaaaaatcatcgtcgttgatattctctgtttggagtgaattaaaaagtgaagttacgatgtgtttggtactggttgtgacagtgtggatcacgtaggtttgtttacgggaagaaacatttgatgcgaaaaagataagaaagaagaaaacgatgaatgatctgaagaacatcatgggacggttgtcgctaaagggaaataagagcattaaaagaaagcgatgcatctacatgtgattcttaggactggtctctgtgggtatataacacataaaagatatatatatgtgacgtgtgaatactgtgagcagtgggagctgaggaaaatgtgactagaaagagtaatatatacgaaaaggttaaatgaaatatatgatatgttttgtaactgtcgctgttgtgaggttcttgtgcgggaccgtctgttactgaatgttgctttagcctttaggggacgtgggttcatttatatatttaccaataaaaacaaacaaatacaagctttttattaatatcacttatagaagagtttgaatgataaaaatatttgcctaccagaatatggaacacgtaatgaacaagtctagtcttatgaggtgcaaattttcatctaagacgtgggaattttgcaataatctttactctatacaaagaaaaagaaaaaaaagccgtgaaagttttaaataggaaaaaaagaaaagaaaacgggtagtagtttagaagaaggacgaggaatgcaggcagcttccaccgccggtaggggtaggtggatattaaatggagagggaggggacaaacgcaacaataattggggcgtgacttaatatattactcataccatataaccaagttttcttctatatttcctatgattcaaatcattgcttgttcacacttcactcataatccctttgtgtactggctttcaagccaagtatgaacacgtaagccgacgacttacatttttttttttttttctttgatgtcctcactcctatgaaattcggagatattcatcgtatcttctcatttaattcaatacccttttaaaaaaggataactacagtctagaaatggtttatcgtgtgtttcactattttacccgcaggcctcagcgagacaccaattaaggtccatacttgcacatttttggataatgcttttctggttttctactagacaattgaatagagtaatacttaaccaacaaagcccgtctagctcagttggtagagcgcaaggctcttaaccttgtggtcgtgggttcgagccccacggtgggcgatagtgttttttctgttgtttttgtaaagagctgaagttataaatgggctttgaaattaatgggttcgaacaccaacggtgggcctttttttctttctatttttgtaaagagctgaattttaaaatgggctttcaaattaatggatcagtgaggttaaggcccatattttctaataaaattagaagtagttacaaacccgacccgacccggttacgtgtatgcggagatcactctcctctccataagctaagctctagaaacaccgcctttaacgtctcgctgcaccatttttcatcgttgatcagtcgtcgatcctcttgagtgatttgattttagactttctacttatcaaactcgaaagatggattctgtccttgtagtgggcattgcatcggttattctcggtgcgttgatcgctgtactcttcttcggtagctacttccggaagcggacatcggaggtgcaatccatggccaaagcggagcctcaggatccgatccggaatccaaagtcgaatcatcctgctccgaagaagaatcatcccaaatctcaagcgtccgataaggtaaggttttaactccattttgttccgagtttagggatttcagatttggatatgagttgactttaaagctttctcttcttcgtttctaaattgcttgtggaatgcagaatcagaacaaacggcatcatcctttagatttaaacacgttgaaaggccacggtgatgctgttactggactctgtttctcgtccgatggaaagagcttggccacaggttagaacctataaacactcctacttagctaatccctgtcaagaagatatttttgctattttacaattctgatcacatttgttcctgtttttgatagcttgcgctgatggagtaatcagggtgttcaagctagatgatgcatcaagcaaaagcttcaagtatttcttcctatatataatctttcaatagacaatgttagccggtgggagtttactttgcaagcccattttcatgatctaactgttttttttgtttgctttctaaaattcagatttttaaggataaatcttcctgctggaggacatccaaccgccgtggcatttgctgacgatgcctcatctattgttgtggcttgtcatcatatgtctggttcatctttgtacatgtacggtgaagataagcaaaaggatcagcaagggaagcttcctcttcctagtatcaaatgggaccaccatcatattcatgagaagagatcagtgcttaccatctctggagctactgcaacttacggtactgctgatggaagtgttgtcattgcctcttgttctgaaggtatgtttttccatggctagtgtcactgtcatagcgatgttaaattggtttcagaatctctagtttaaaacttgtgtataaattgctaaagggtgatttcaatttgtgaatacccttatgttcaatataagttcttgtattgctgttcaaaatgtactgctctggtgaaatatcccttgttttttccttaaaccttgttattcgccagggactgatatcgtcctttggcatgggaaaactgggaggaatttgggacatgttgatacaaaccagttgaagaaccacatggcagctgtatcaccaaatggacgttttttggcagctgcagcatttactgcagatgtgaaagtaagtttttgtataaattcaaaccatcatgagtgtatgtgtgaccgtatctcatgtcttagcaagtgctttgtaggtgtgggaaattgtgtatcagaaagatggttctgtgaaagaggtttcaagagttatgcaacttaaaggccacaaggtattattccactacctatagcatgataatccatctccaacgatatagattttttctcactttttgtcttgtaatcgtttcatgtttaaaccaatgctatggtatccagagtgcagtgacttggttatgcttttctccaaactcagagaaaatcatcaccgcttcaaaagatggttcaataagagtctggaacatcaatggttagtagaattgtttttaaatgtctgcatcattctgattattgccaaatgcaaaacagatccctggtaacataaggggatctgttctggaatttataatagatggaatgattttgatttattaaacaaataacctgaaaggcattgtgttgtgtaatctggttgcagtccgttatcatcttgatgaggatccaaagactttg

SEQ ID NO: 33314 - DNA, 1199 bp, Arabidopsis thaliana landsberg
tacctgcttcattcacttgctattgaattttagtattttttctgttttcaaccattctactcgatcacaccagtctactaacagtgagactgcgtgatagagtaaactgctccatttctgcatattcactctctgtcatcgtgttgtactcgatcacagggtcccttctggcagtcgaccctgcgatcgagtatatcagtcatttctgtcactttttactgttttctgcatcaacactaggactgttagaaaaccaaccaaattctgtctggcttgacttagcaacttctgatcatatctcatctgtctgcatcacacccatttggattgacatctaaaatactacaacgacaggatagtgttttaggattaattgactaaaaaacctactatcaaaaatatatacaaactaaccatgataatgaagagaatcaataaattaactatgatatacaatgttttgtcagagggtagatgaaatgaccattaaacctttcctttcaatttatatattttatcgtcatcaacaacatcttatttctcaccgtcatcaacacaacatccaccaccatcctcaacatcaccaccaacagtcaagatttaattgcccaccaccctcactccaaccaaatcaatattccttctattgtcattaacataacctccaccaccagggacggcccaaaccattttcatgcctaaagcaaaaaatattttaagcctactaataaacaaaacttaaatgaaaaatccaaaaaaaaaagaaaaaaaggaactcgaaccagtcatctcatggacgttttagtacatttacacgactatgccacaagttaaatttgaaatgatgacctcaaaacttttacaatatatttgttatgcctaaagcaccaggttcatgagctttagccttggaccgggcctatccaccatcatcctggacaccaccgccaccatgctcttgaccactgccaccaccatcctcgacaccaccgccgcaatgctttaataactaatatagagatatttatcaatatttcatgctattcaataaaatcgcataaattcttgcaattatgttctatatatttcatgctattcaacaatatcacatgaaatcttgtaattatgttctatataatttcatgagattcaacaaaattacgtgaattttcacaataatgtccaaatttctcaatata

SEQ ID NO: 33315 - DNA, 433 bp, Arabidopsis thaliana landsberg
tagaagaaagttttcagatttataaattgaaaaacgacatcgtttcgataatcgtcatttttcaggactcttcttctcctttcccaatttgacgttctttcatttttcccgttatccagacacactcgcgaaaatggcggctcactcttcttgcaactttgctttgacgaatccgatcatctcacaaatcgattctttctctaagaagaaactatctgctccattatacttcttctctacaagaaaagcattgacgaatccttggttaggcgttgttgattcatccctctctctcacttttccagtctccgctctacaaactaatcgcccaagaagaatccataaatccgtcatctccagcttacccaccgcgtaaatatcacgaattttgatccgagtttgaacaatttttgctcttgtggttgatcttaat

SEQ ID NO: 33316 - DNA, 850 bp, Arabidopsis thaliana landsberg
cttgggcttgtatgattttcctcattttctcaacaatacgattttctgttcttcgggtgaaatcttcgaggtgtgtctgctttgtgacctccatcttaacataatcttcttttagatgcctaatcaacaaaaaccaacattaggaatgaggtgcggaaatgaaaatgtaaaactaatcaacaatgaatagctttgtttttcttgaaatgtactgtttttacggttaaaaaaaggggtatttgttgcactacaattttccttacaactaaattttcttatcaaatttattttattgatgggttacccattaatggacatcttatacttaatactatctgagaagacaatttattaatttccctttgaagtttcaaagtattcacgatataatgcatttgacataaaaaaatttgaagataaataaaaatatccgctttaaaatacgcgaatctaaaaatccagttgcaaaaaattggatcctagcttttaatcttagccattcaattatccgttgatttattattttaaacggattgcatcacagatttacaaatgcttcattgtttgttcacattgaaaacatattttcttttttatataataggtctttaaccttttgcagattgctgcatgtggtgtacttttttctggctctaaatgagtgccttgagaaggcaaatcatttcatagagtcttacgagggaaacaaggatcataaagaatgtgaggtaattatgtttcgattgcgaaattcactatctataaatccatgcaaagttttgcttctgtttgatgatccctttcaggaaacaattaatgaatcaatggtgcatgctccccttacgaaaga

SEQ ID NO: 33317 - DNA, 1998 bp, Arabidopsis thaliana landsberg
  unsure (1)..(1998): unsure at all n locations
caaccctttatatcatggaaatatggaatgataaaattctatcactttcatttataatataaagtgttgttgtattgtgtgaaataaaactgtgttgctgcaaaaaagtggtgataatatgagacgtaacgtacaatttgctcccttgagaaaacgtcgtcatgattaatataagttgacgttcccaattttattactcctacgtaataaaagggggacgggccggaatatcagtttccaatcagagcagagttgtcttatcgcacttaattatttgcaggctacttgttgttactcgtttcttttccattgccatgtgtagaggaatataacgattagcaagaacgaaaaaaccgactaaaagatatatatgcagagaaaaaagatcgacatagagttaatcaccgcatgttacttgtattagtaataatattatgttatgggtcaacacacctttataatattagatccgatcactgaccgatcggagccattgaaaaaggacattttcataaatctcaatatcaaatgatatctggttgtaaccactaaatctgttgctaccatcacgtggctttctatatgtttctatccgtttttgaatttaatcttttcacattttagtatgtttctgtttctatggacatgtttagaagaagcgcacggtgagcgagcgagttggttgttgtttccttgggctaataatcgtattggaccgtgcgttaaatgggccgaaaaggttaaaacaggcctaaattttgacctatagagttataacctttgctatgacttagagagctaagtgctaatcctcgtttcgttttgatcaacgaacaaaccctagaccgttaaaacccttatcaatttcgctgaaacggcaaatggaagaagtgtcgtcggagatggaagtggaggttcaaaatcgtcagctttcggattcttctccggctcaaaacgtgaagaaatttgggctcaagaactctattcagaccaacttcggctctgactacgtcttccagattgtcccaaagtaaaagctttctgttctctcttttcgataaccatactaattagtttactgaaagtgaacccaactctggttttgtgacagaatcgattggacagcaatcgcggtttccttatcaaccaacaccgtcaagctttactcgccggtgactggtcagtactacggcgaatgtaaaggccactccgataccgtcaatcagattgcgttttcctccgactcggcggcgtctcctcacgttttgcactcttgttcctccgatggtaccattagatcttgggacactcgaagtttccaacaggtgagtttttttttttttatataaattctgtcgtaaatgtgattccattttcggaactcattgaatttaagttgatcatgggtgtttcaggtttcgcgtattgatactgggaatgatcaggagattttcagcttctcctatggaggtgctgcagataatcttctggctggtggatgcaaagagcaggttaggcatctcaatcctgtggaatcgtttttttttttttttgtttctctaaatgtttacaaaggagtacgctttgagaaagaaaaaaggctagttttgagcattttctatgtttcagcttgttacaatgtgaagcgatggtgcaggttcttctgtgggactggagaaactcaaagcaagttgcttgtttagaggaatcccacatggacgacgtcactcaggtttgttgctctctcattctttctgctcaagcgggaaaggatctagtttgttgttagtttatagaggtcaactctgttcttaattataggtacactttgttcctaacaagcccaacaagcttctttccgcttccgtggatggattgatatgtctttttaacagtgaaggtgatatcaatgacgatgatcctctcccatgtgtaagttttagatttaaggaatcaaaattcttgctgcatcaagatagtagatgagagttntgaacc

SEQ ID NO: 33318 - DNA, 1116 bp, Arabidopsis thaliana landsberg
ggttgttggtgtctcaagaagggattggtcagctaaacttgatgagactttatgggcctatagaaccgcatacaaaacgcttattaggagaaccccaatccagatgctatatgggaaatcttgtcatctaccagttgaagtggaatataaagccatttgggcaaccaaacttttgaatttggaaatcaagggagctcaagagaaaagagcagtcgacctgcatgaactagaagagattaggctggaagcatatgagagttcaaacatctacaaagaaagaacaaaagcttttcatgaaaaaaagatctctccaaaagatttcaacattggagaccaagttctgcttttgaactccaaactcaagttgtttccaggaaagctaaaatccaggtggtctaggcctttcaccatcaaagaggtactgccatatgggacaattactcttactaagaagggaggttatgaatttactgtgaatgggcagagagttaagcgttatatggcagattgtcctattcctgaaggaactacagttgacctccaggaacccatcaatgcctaaaatagtaagaagtctagcttaagactttaaactagctcacttgggaggaaatcccatgcctatatctgtacagatttaattttgatattttgatgtgctttttagtgtttttggaattcaggaaataaatcaggatttatgagctgtgaactctgtgatctagaaatatttgcaacagaagcaattctactctatcaattggtcgagtaaaattgcatcaccattgtactttatcaattggtcgagtaaagcaactaaacgaccaagcttgatgatatagtggcccacttgtctccccatcattctattactcggtggacaaagcctttacccatcatgctcagtcactatttggtcaacacccgtatcccatcaaagaaagcataggagaccatcctcctccactcattcaaatcgaaacctaaagataagatatcactctctctcactttcttctttgtgcgcacttcaataccatctctctcattatttttctgcttcacaccatctcgaaaatttcagctttcagcttccttcaaagaaaaaaaaaaatc

SEQ ID NO: 33319 - DNA, 759 bp, Arabidopsis thaliana landsberg
  unsure (1)..(759): unsure at all n locations
ggatagcatatgtcaaagcttggggggtatatattttatttcagaaaatatcaaaatccgagattgaggaagaagatatatgtctggcggactgtgcttctacgcacactatnctaagagataaaaaagtacttctcctctctcgaaataaaagactccgctagacgcgtgaatactataaatggccatgcaaagataatattaggctttggcgaagccaattctataatgccaaggggaactcattttaaagtaaatgatgcattatattcccctaagtctcatagaaacttgataagtttcaaaaatatccgaagtaatggatatcatatagagactatgaataaagatggcatagaatatctttacataaaatacgagagacaatatatattagaaaaattgccaatgctatcctcgggattatatttcacaaaaataaatataatcgcatcaaatgttacagtaaatttgagtgacaatcactcgtgtgagtttactagtacatttaagatatgacatgaaagagttggacatccgggttcagtcataattcggaaaatggtgcaaaattttaatggccatccattggaaaaccagagagtatttagatctggtgagttttcatgtaaagcatgttctaaaggaaaactcataataaggtcatcgccaaacaaaattgggcatgaaagacgtggattgttgttgtggataaaaggtaaaattgtggggcaatccacccccgtgcggccgtttcga

SEQ ID NO: 33320 - DNA, 721 bp, Arabidopsis thaliana landsberg
tgtggattcgctacccttgacaccatggggtgacccatatttatgttgtccatccttgacataatcgaacttgatgtattgtataccatcacaaccaccttgtacatatatttttgtaaaaccttcatgttcagctccatcgttccactctgtgcctccttttcctccttttgcttccatcttagttggagaaatccaagtgaagtatgctccaagagagtttaggtttgccatggaatatccgtgaaacccgatgatcttctttccatcctcagctagtgaaaacgtagtaggattaccaaatatagctttttcaaatcctatgatttcagaaatcctcaagttggttttgaattgaactccttgaatcaaatccgacccgggcttgcaataaccctcaacagatacaagttgttcatcttttttatggtcaatctcaaactgcatataatttggtacaaaaaaaaaattcagatcatagtcaatagtatccacattaaaactaaactaaagaactttagttagtatctttcaactaaagataccgtttggaggaggccttgaaaagtgggaccatggaacgatccatattttggttgtccactcttgatatagtcgaatcggatgttccttatgcattctttaccaaagcttacatatatttttgttacgtcatcatgctcggatccatcgtcccacttatgatcgcttgaagaatctt

SEQ ID NO: 33321 - DNA, 1338 bp, Arabidopsis thaliana landsberg
cagaaggctagaggtgcagcaatgggatacccccagagatagaaagctccaaagtttatgtaagcccctatatgctgccacccgcatccgcttgcaacacctgcaaaccaacaaatgagggttaggaatggcagaaaagagttcacctttagttatctttgactaaaaagtgcataacataatattcgacactagtatatgtttgagaaaagaaataggaacagttctcgaacctgagagaaccccttgtaaactgtccagtatgagagaaatagagaccagtggagccatctttgcaacatagtcgatggtattcttgtcactgctgaaaacttggcccaacagattcttaccagctaatagagacgtacccaccatcaatgcatccactactgcaagagacattgccgcgtagaccacaatatgtgctgctcgagagtttccagcacctaattcatttgagattcttgtgctgcacaagaaacatccccttatgaacatgaaaccatatgattccttgccatgaacagcaagtatgcttgaccatttatgaacagcataatggtggctctaaccttgctgcagctgcaatcgctagtggtatcgaataagtcatcgaaagtgtttggagactgttcatagtataaataacattatgttttggcaaattcatgattgtgacgagagttagtaagatgcaggggggagtaccagacagagagcacagaagtctccagttgtgggttgggtaagagaccagatagtaatattatgagttcataagaccaccactctaggctgcaacacataaaagagtttctaacaaaaaatgtagaggcaatgagaagtgaaaaaggaacagagaaaagtgatgtaccaaagcatagccgcagaaggaagagcatatttgataaactctctaacgccctcgaatatctccatggtaagcggtgcacgtgtctcagaacaagcagaggagaagtacatgaaagatccaagaaagatggcatagagccagtatgacaaactgagagccaaggctcctccaatatgatcaagccctgacttataaaccaaaagccaacaaagaggaacatggagacagaacacaacacaagaggtgataaggagaggtgttatcaagctctggtttttgaagtagcgagtaagcggctgtagaacagcgtaacgaaacagtcctgggatgagccaagcagcaaatcttccggcttcgtgtgcaattgaagggtcttggccaaggatcacgagaagcttcccatgttgaacgataggagagagagagggagcacactaatgtaagacagacatagctgtgta

SEQ ID NO: 33322 - DNA, 863 bp, Arabidopsis thaliana landsberg
attggtgattgagtgacgttctgggtcacaggttgcgttatacgactatgaaactaaatcagggatgggaaaattataagaagcatgcgtctctaccagcgaacgaatagatcacgacaaaaaagatatggggaaaggagtatggcaaaacataccaccaaatgagatgaacacatcagcagctccgactctttgacaaagaatgggagggcttcacgaatgatacgagaagagatggctccataaagacacgaacgatcaccccaacaaatcagaagagcggttactacatcacaagacagattaattagaaaacaagtcaagggatccatgcccctacggctctcggaaaggacttgataggaagaagatcccacgtatccggttaggtttaaaggtgtcatgctttaataccctggatttaacagtgaataattcagataaatatttgttttttaaaaacgaaatgatatcaagtactatatatatacttgttttccaatcgaaaattcgactcctaatagtcgacaaaacaaataaaagactccttaatcgcctcagcctttgacctgtccaaataaaagaagaaatcgactaagcattttggatcgtttttagacatatcgtacttaaaacatttactaatacacgatcattacacaagagtatatgttcggataattctgaaagatcgttttctctttttctaaagaaagcagaaaatatgagaaaattgactagaaaaggtgggttggaaaaagagaataaataaatttataggacacttctactttgtagaatattaatttcgaaatgttttcttgtttctgtcagctattaaaatttcatgtttgagataagtg

SEQ ID NO: 33323 - DNA, 1850 bp, Arabidopsis thaliana landsberg
aaaaccagagtcgagcaaccactcattgtcacaccatatttgaaaaatttgaccccttatccagaacagcggaagacgggacaataactatgcatctaaaccctgaagatactctctattccacatttcagatagtaggataaaatgaaaaatagtaatcgtgtatgcatgctaaattcaatttaaatatttaaaatgataaaatttaaactcaattaccgcaatccaacctcagttgtagacaaatttgaccaatggttgagtttgaatatttgcgagatcatacacgagttcagctttatcaattcattttcatcttattgaatggaaattaaaaagattatgtatttttcccaaccagctgatttatcatcggattaacatcatcaatcacgcacttccacgttaatagatccaaaagagttgaataatgtaaaaatatcttctaagaaagctactaatcttagcgttacgaaatagagttagaaatgatacaacttagactagaaaaacatgaaataaggactgaaatttaaagatgacacgtctcaaaacaaactctcctatagtagtagtagtaaataagaaaaacaaaagaaaacgacaaaagtaaaatttgataatattgtaaacatttatcccaaaaaaatgggtaaaaaagattacacaagtaatgaagagaaggacacacgtggcgtatatcgagcaaaagaaatcaaaatcaatcgtcctcgcatagtacacttgtaggtcccacctatcctctataactcttttctcggcgaatccaaaaaaaataaaacttcttcttccttcttttcgctattaacacctgaaagaaatgagataggagagaacaaaaaaaatggtgggactaagtattgttttggagatgactaacaacaacaacaacaacaacaacaacaacaaaaaccctcttagtgaaggtgtcttaattagtcctaaagtcgtcaacaaagccaacattattgtcaccaccgccgtgacgacggacacgactaatctccgtcgttgttatcaagattctggatttctcgaacattgttttctctgtagacgaaaacttcttccagcgaaagatatctacatgtataagtaagtcatcatctataaatggctaaatccatatatattcttttgtttgtttcctgagatctttgatatttttgttttagaggtgatagagcgttttgtagcgtggagtgtagatcgaagcagatgattatggacgaagaagaaagcttgagaagagagtattgttctttaatggatgttaagaagaagaaatttgattctccggcgactgcgccgtcgcgttaccgtcgagatccgagaaaccaagcaggcggtttcgcttactgaagcagagagaatcgcaaaaactgaaaacttatgttttgttgactttgttaccctttggctaatttttgtcgttttgtttaataacgtgtaaagccgaaagggtgttttgggtatttcagagctttctttttgcatatctatgggagcccctagtaaaatatttaatttcatttagtgttttttaatctgattgagacctttttgacaattaagttagctttgatggaactaacttagagattagagtttatttagttcgtttatacaattagtattaaaatctcgcaaccatgcaactttatatttaaaagattagaaattgttagaagatgataaacaaaagggaatttgtgatattatataagtgattagtgatagactatgttgatctaatcccaaaccgacaaacaaaagggatacgtaataaatactacatatttttttattatatagtatacataaagata

SEQ ID NO: 33324 - DNA, 548 bp, Arabidopsis thaliana landsberg
attttcttcatgtttaaagttttaaattaccactttaatttaaatctttttttaattaaaatatttttatatttaaaatgtttatttgaaatatattgccaaaaatacccttaaaatttagtattttacttgatgttttttttaacacgaattattagtattttagttgatgttaatttgtattttaatcattattagtgaaatcaaaattaattaataaaaaaaaaattgggaaagccaaaaacctggatttgctgaatcgttgaaccatcgaaactccaaagctgctacatagtcttcggtttcactgtccctcttttgccactttcttcctcgcatcattagccgccggtgaaagtgttgcggtggtgatccatatggaattagggtttgactgttatgatatcgaatgcacaacagaggatataaatcaatatacgaaacgagacgatccatctcttacgggtaggttctgagatgaatccgttgagatcttcttaacaaggaaaataaccggatggatttgttgccgagagtggctctacatg

SEQ ID NO: 33325 - DNA, 746 bp, Arabidopsis thaliana landsberg
gacgattttttgagcttataatctcaactattatatattgtagactaggttttgacctcatgctacgcgtgaatactttttgatatattttggtgattgattatagtttttaaattaaagtaagaatttcatttcaaatacactatgaaaaattataaaagtcatttgtatttaaaaatcaaatttaatcaaaagaatcataaatcaattttgttttctcatattcaattggatgttaacacctatgtcttcttatatctcttcacatttattgtttcttaattttcatatttctttttgtcttattaattatcaattttttggggagatttgcaaaaatacccttttctactacctttttgcaacaataatttttttgttgtccaaaacctctaaattatttataaagtctttaaatacatatgtaaatactttaaaccccgtttaaaaacctttgtaaatcattttaaaaccttttacaattgttttaaaagatttacaagagtttttaaaggatttacaaagattttaaaacctttgtaaattcttttaaaatctttttaaaactcttataaagtctttaaatcattttttaacttttaaaaaacatttgtaactctatttgaatcttcttaaaactcttatgaacacttaccaaaggttttagaaaaatttagaagaatctttaaagggtttcaaaacccttgtaaatcttttaaaaacccttgtgaaatatttaaaaaatc

SEQ ID NO: 33326 - DNA, 631 bp, Arabidopsis thaliana landsberg
attcagccatttgacctgaaaaaaaagaaagaacaaaaggtttgcagtttaaaatttttgctatgtttctgataaaccgagaagttaaactgtaatagactgttccaaagccagagacataacgcaaattcaagtattgttaaactcaaggataatggaaccagaactagatttctccaatctgagtgatgaggcaaacaaatctataaactcaatgaatcacagaaatcatgtcaaccacggaccacccaaatatggaagatgaacactgagtcagacaagttaacgaatagaattgatgacttgtggtacctgttgatatgctggaaaccatatccattgagggaaattatcaccacaaatttgcttcaaatcgtctctgctaagagagcctagtagtttcatatcaactgcctgtcagaaggtaagagtatacgtattctgttattgtaaggccaagaaaatcctctactcaaacttaaaaaagtaaagcaagccatgtcacttctcacacagaagcatagttaatcagtaaaatagtgaaccaccagcacgctaagtagagtcaacagatgaacactaaattggtacattgatgtcaatagttagaaattgcagagggattttgcta

SEQ ID NO: 33327 - DNA, 3055 bp, Arabidopsis thaliana landsberg
tcccaaaagttgtaataaaaaaatttttggttctaaaaaatcatttttgggttttggctttgaaaaaaggaaattagatcaccaaaattttctaaagttttagaaacttatcaaacaattaattgataagagtttctaatgttttgaatagttttagataattaatgctcctttaataagttcaagaatttatattttatataaccacatactcgtgatgaataatacttagcaacatgaacttttatcacttgtgaaccgtagttttctcacctaaaaactgtttccgtcaatcaaatttgaaagtacttgttactcgttagtagattatcagggaaaaattgtctctaaaagtgttacttacctcggccatgaccctaattttttactcacttaatttatgtcacatataattatatgattgtttggaccaacgtggcggtttgacataacaatgggtgaatctttttgttcaatatgttgttgcttacttgcttttacaatgcgatgttcggtgtcaagtggtttaatttttttttcagcatggaagcattagtttttcctgaagaatatatattacataaaatatgtttttccaaaaaaaaaaataccacaacgtttttgggcagagcgaatagagaagttttaaatctttcataagttacaaaaaaaaaattcatacagccagctttccttaaacatatatgaaaaggggttaaaaaacttaatatggcttctatatctagaaagatttcatataaaattcttaataaaaaattgtgatattttattttttaaaaaattagtgtttcttaagtttccaaattagtgttttctcttaattttgccattttgtcagttcagtttttaatttatttaataaataaaacaaaaaatgagaaaggtttaggataattattgatcagatatattgctatgtgtagctaaggctacatgttttcttatttttacttaaggtagttttgaaaaataatacatataaacaatattttatgaaaaatctcaagaataaggtgatgttattcaattatggagttaaagtcaattctttaagctttagacttgttttctgatattgcttttaagaatatgtttgtatgaatttcaaaatctctgcaatatgtcttggattttgattctagtgatttactcatgaaactccaaagaggtttcatttcaaatgaattaatatacaaagattttacaagtcttttagtttttaataacgctggattttaatgaaatatttaaaatcttaattgaataacatcaaactttaaaatctattaaacatgatttacaaagatgagttccaataacactaaattttaaagttggatatagaatcattagttgaataagagtggattcggcttggatttcaattctattaaaatccattaacgaataacaccccctaaaagactgttgtctacacttagctaaaccaaaaaacagaaccagaaccagcaccaaataaacctaatgaaatttccattttaaattaaaccacgttcagattgttcttgtcttcacttgagattcttgtgcagtggaacctctttgccttgtagaaagtttttcaatcgtttgcttcaagacaggtttcaatctttctcttacaggagtgacctcgcgcagtttctgattcaaccggttcaagatcacaggtaaaactctttgatgattttctttcactatttcaagcatatctctaccatataaattgtctgcacatctgtagaacttccctcaagatctttcaggtccctctctccattaataacttcctctgcattcttcgctgcacttgttagaaatcccaccaacatatctagctcgaacatctgatcttcccagttgtaaatatctttttcgatatcggttaggtttttctgtgcctggatatcataactgttcacaacccaagtgttgtttagtactgtagacgagaccggtgtctgttcttccttgggaattagcttatagttaggtgtcgctcgttcagtctttctccttttcttcagaggtctctcaggttggtctgattcctttggaggcaacattcctctcttcccctttccctccaacttgatcttatccgactctgtgtcttgggggttatcatcaactttaaccctagttccagcctcatcttctccatgaccgtaggcaatgtctacgaaccgttgataaagattcttgtatttctcgatcaaacgttgaagagacttaacgaattggctgtaatcgattctatgagacttaaagtctttacacaagcaagtgtaaactctcaattccgaccgagttagtctctcctcgatagccttcaataactctgtcaacttctgtttcgcttctaaacggtccttcatctttctctccacatcgtctttaggtttataaactatccgtatacgaggtatcatctttggttcattaagaagaatagggttctcttccggcttctcatcatgatcaatctttcgattaaggttattgtctttaagcctcctaagttctctagtgagttcgggatttctgagtagacgtaccgaagatccgtaccttgtctgtaccgatgaagactgtgtcttgacaccgttgtcttcatcaactcatcagcgtcagccatatcttctgaatctcgatagcgtgtgagcgaaacaaacgacttagggtagagtatatctaaggtgttttcgttttcctttttttttgaggagattaaccatctagatttgctgaaagtacgcagattacttgttttctaaccaatggtaataaatcaatttatttaaattagttttctttcaactgattaaaaaacaattaaacgcaaattaaattttgagaatcagtatttgtcttatatataaatttatacatgaaaaatataaaatatttacaacaaaaatcatcatcttatgaagagttcatgaatctcatcaaatctctctgttttctcttgcaacaaaactcacggtgatgtcgtctatacaaatcttgttgctttttatattagaatttg

SEQ ID NO: 33328 - DNA, 965 bp, Arabidopsis thaliana landsberg
cggtaaattgtctcgagttgaaagagacattagaattagatgatattaacacaagtcagccactcttctacatttttagctttctcttagtcggaaagcattccaaactcggaacatacattgtcgtgtttatttgggaagaaatccacgctaaaatatttcagtacatttctaccagattacccggatcaatcaatcaggtatataaaaaataaataaaaaaagcgtagttacttacaacatcaaacagcttgcacagtgaagaaaagtaatcaatcagcagtatatccaatgaatctatacatcttaaaattcagaacgagaaaatagaatgggtcaggtccattgggctttagaggcctaaatatttgaagaaagagtaaacccaaaaatagagaatcgaaaaaagctaaccccccaatttaatattagtttgactaaattttgatgcagttatttgttttctaattaaattcaacattcgaaactcatgttctgcctcatagtaacacttgcccagtggcagagcaggttcagaaaaagaaaaaaagaatccccttttttttctcaaagtcgaacccaaaacccaaaattcgaaattctctctactcttctcgttaaagtgtgttcctttttctccgttcgtcatgcattcgtcgttggagccggagaaaatggaggaagattcacaacaaggaagcaatttgcttaagaggaaattctctgaaatcgatggagatcaaaatctttctcctatggtgactgactctaatgggtatcttcatcttcctctctttgtacttgattttgggtcttatgggttttcctctgagtttctttcaagggttgtagtctttttcactaaagtttacttttttttttggcagtagttatgaattgaacgtgtacgaggttgctaagaacagaaacataattgctgttttggggacaggaattataagtca

SEQ ID NO: 33329 - DNA, 1275 bp, Arabidopsis thaliana landsberg
agttttctctaatctttgagaaaaaaaaaacaaaggtcaaggcgtggatcgtggagacagataggcgaagattgaaaagcgttttcgaaaaaatcccaaactgattttaattgagaagaaagagctgagataaagttgtttcctttttgatccttttatttctatatatttagtaccctctcctcgtttctgtttttcttgccaaattaaacaattggtttggtttattgagattttggtttgggtcagtttgtttttatttttgatttgattcagttttagttaaaaaacaataatttttagttagtttatatattaatatgattatattttttctcaatatgtgtaaatagttaaaatgtaaagttttaataaaacatttatttggtttggtttagttcagatacaatcaaatcagtttatataagattccactacggtttaaacagttcaatttggttcggtgcccttagtttaactattttaggtgaaagtttaataatggaaagtaggtctgggcacgaagcgaatattcggaaaaattgtgatatttgttattcgattcgttttaaccgaatacttgattttatgatttgctttgattcgaaacttttcggatatccggaatttcgaatatccggaattttttgtgatatttgcggatatccgctttgatacgtataaatattaaaaaaaatatataaactatataaccatatcagatattcaaagtttttatttaacatgctttcaaaataagttctaaataccaaatataacctttgttgttatcaccggtcaacaaaaatgttatcaaactaattccaaaaactaaaactcgatagtttttgatgtcattgatcaaaacataacataaaaaaaaatatcaaacaaacatcttaacataaaaacataaggtagcaacaatacacaaactatttatgatatctatatatagatataactatatattctaatatatatcaaaagatacggatcgaagcggatattcgattttttaaaaaacaatatttgctatttgattcggtttttacgaatactacattttcctatttgctttggtccaaaatcttacggatattcggatttttcgaatcaaatcaaatcgaataccgaatcgaagcggatcgatcgaatattttgcccagccctaatggaaagtgttaatgtaattactttatcagcatttttttcgcaagatttccaatgatgaggttactaaactttactacatgtgaaaaagcagaacggttt

SEQ ID NO: 33330 - DNA, 814 bp, Arabidopsis thaliana landsberg
  unsure (1)..(814): unsure at all n locations
tcttggataaccaaattcgttatcgccttttatatttatattatggtattacagaattttgtgtctgatgtgtataatgtgtagaatacacaacgccatgctatgattgtaccaaagactatatgtttgactatagtctttacagaattatactgatataatgattaatcaaacctaagtgatattacaaaatttttgtgtcttatgtctataatgtgtagaatacacaaagtcatgttatggttgtaccaaagactatatatttgactatagtctatatagaattatactgatataatgattaatcaaacctaagtgatattaagttgggcatacatatctactatgatccacatatgtaaccagctatcttgacataaaccaactaatgtatacatcattaaaattccgtaagttcttatatttgatcaacgtgaatatatcttagttgaattccaataacatatgacatcaaggttaggatacacgatataagactcacttctcatgcgttgtctaacggggagtagtgctatttattagccgcagccctatgcacttctctgcacatagatagtgaagatccgtgtcagtctgcggtccacatcatactcttttcaaacgctttcgaagctcatcaagctttggagaaatttgtatatatgacaaatattaatcatagtctaaatatgttttatattatacaaccactagattatgttcattagtagatttgagaaggtaacaggnnnatgggttataacaatatttagttggtgtgaacatattccgaaacccatagttaatgtggttc

SEQ ID NO: 33331 - DNA, 1008 bp, Arabidopsis thaliana landsberg
aacaaaatcttctaattataccaaccttcctagcgtttagtttatactgatcctgaacctcatcaagcaaagtgggccagcgctcaaattccaccttctgccaagagcttgctagggaaataattggctccaaaagatctgtaggataaaaaaaaagaaggaaaacacaatgtgacacctgaaaatatcataaataatggcaggaacgaatgtttagactgagaagagtccataatcaacccattgtaaggagattaaaaatcaataccagagatgggcaatttacatccctcttcctgtaacttgtgaaccttgcagagcagaaattgcaatcctgagagagccttcacaaaaaatggcaaataagaaagtaatggtttagtacataatgcttatgatgaactaacaagatcaaacaatgacggcaggcaatgcaaagaaattaattctgtgggtacaagtaccactgcattaatactttccataacattgtgaccgaagaggcactttgtatagtcatcaaagaatgcttgattgagtctaccaaaacctatgcgagaggagttctggagggaatagccaagagcatatatcgttcaccagattgtttcttaagaccaggatggtccttccgttcatgcaagagagagttaaatctatgttatacaggagtgagcatcttgtccattttccccagctcaggaccatccgagtcttatataagagacagtcagtacacaggcgggcagacatagacgtaaaatcagataaacttcttaagcacgtataagctctcgcagaccttgcaaaagttatattaaatgtttgactgatagtatgcagtgcagttttgtgtggtatccagacagaaaccaagtaggtgttgtggaacaagtttggcatcccagtttgatgtacataaaccccctagcattggtatccagcgatgtgccctgtaatagcgttaatagaatggattagactaggtttatctctacacaaaaatag

SEQ ID NO: 33332 - DNA, 483 bp, Arabidopsis thaliana landsberg
tgcaaagtatgtagtttttttagaaatatgaggaataaacacttttctcttttctctaatacaaatttctatcttttgttttgtcatgtagtcaaataaagacaaaactaacttttttttcttctttttatttatacatatttagtttgttttgctataatttttttattaaataattaccattaaaacatagtaatctttaaaaaatttatgtgaatctaaaaagtctaattttgctatatttcataaatatatcattttttttttaatctcaactcggtggtatacgcgatattgtaagaaaatggtgtactaatagtagtgtacgacgattatttataatatattgatataagaagtggtatacggtatatgagaatgttcaaagcggtgtacaaacaacaatatgaagcggtgtacagtaacataatacgatagtaaacgaaaatgatgtaaaatatggtgtacatgatactaatagta

SEQ ID NO: 33333 - DNA, 2491 bp, Arabidopsis thaliana landsberg
ctcctttctgggtttcttctatcttccaaggattaggaaattagtttgttttttttcatctgctcaagtgatgacgacgagtttggatcggtgggagaaagatcctttctttcccgctgctgaagaagttcaggaatctgccgacaggtttgcgtttttcggatcctcatctcccaattttcgttttgaatctgtgataccataaactctcattgttggtgatgcaatgtcgacgattcgattcgtgttgcttcggatttgggattacgatttctgattaatcaaatcaagtcttagatctgaaatctcacaatgtgtgttgttatcttcgattcatgtgtaggatggagtcagcgtacaggacatggctcaatgggaaacgagactcttcaaaagtatgggactctgagcagcttcatagagatcttcacgcagctcttggaaccaccaaatggcaggtttctttctttcctcagaactcagattcttaatctgtaatgttgatttatgaaacctgtaatatttttggtgtagttagatgaattccaaaaagctgtcaaatctagctatgacaatcgtttgagtgatgaaactagagataggcatcgtgagtttactttcgtaatggaagctcaagtgtcgaaaatcgagaaatctctcaaggaagctgcgcaatccgatgggaaagggaacaccgagatgggttcgtttgggatgaagatgatcgtaatgagcttgctctcttcttgactggtccatctgaatctgctaaagcaaatcctaatggacatagaaggactgcaagtgctgctgaattcagtgcttggaacattgcggtttctgatgatggtttagtgaagaaatcttgtgatgagccagtggttcgacctccgaggaaagtacctagcttctctggattcttgaattatatggatcctgtgtccaagcattgcaatagaaagtggaagggtttagatcgtcaaggagactctgatgctgctttattacctatccaagctaaccaagtaagtttgatcgatcgatctccaaccgcaagatttttgcctcctgctttgaaaatctttgctaagaaatgctttttatttttttgtttctcagcaagatatgaatggatgttcagagaggggcaagagttgtatggagtgtgaggaggactgttatgaaaagcagcttcatggttggtatggagctctacagaggcaactccaacggtctcagtatcgaatgcgatatagtaaatcggttcacgctgcaatttggattattcttttagtttttcttattggtaagatttactgaactctgaatcatttatgtttagaacgcaaagcttactgcatcacttttgagttttgagataaattgttttttttttctgattgcagtggtagttgcagtgcattcaatgtagaagagaggtttggaatagcaaggttcgagttcattcatcttctgtgtaacagcgaaagagacgaatttggcaatccacatttttactgtacagcaaattccaactgtttttggttgtttgtaatatagaaatgcatttttttggttcgattatttgaaacgggtttcattgagcaatcattgttttcttaggcaccaatcctattaaccattgtagaattatttgggactaaacccaagattgaagtggaaccttctaaaaatgacaattcagaatacagaaatgcatttcgtattggattatttgaagtaaccgtttcattgagaaataagaaaaggtgtcagaattcttttacaatcaatccgagcagagtattgaagcacacgactgcttaagtggagtttttggacatgttagccaccttctcctcccgtttatcggcagtctctaactcgatgccttgaaatgtaagtctagatgaacgatagtgactcccaaacgcagtcccgaaaccccacccgaggcccaaacccaccccgcaaccgccacctttgtcaaataccagacgcataagttacgtaattagaatttaggaaaaacctgctcggtgtgtatctatgcgagtgtgggatatttgaagtagaagtttgaaatgcttaccagcaccaacacctaagatgttcataggcattcctgcatgaaagcaacggaaatctccaattcagtaggtttgcaaaatagtatgaatccatcaaaatgtaagcgcaactgatactagctatgcgtttaagcaaccattagctaggaaagaagaagcatttgagtaaagatgatatgtaggagttgataatctctataagagacattaagcaatatgatcacaaaactaaacaagcacagcagagtgcattgcacatcccatagcaactagcaagagaattgttccaatagaattatcttgtaattcagtccagattttgttcaagtaaaagcagaaaaagagagaagttgagaacgaacctccaaaaccccatccaacgccaaatccacaaccgtaga

SEQ ID NO: 33334 - DNA, 972 bp, Arabidopsis thaliana landsberg
tattagtagatatgtagacattcggctaaaagtagatctaattttttggattattaaaccaaaagtaaaagtggtaccataaatataaaatcagaacaaaaacactcataaaattctcaaatttaattctcttcatccacaagtctttcaacacgagtcaagtaataaaagatatttttatgtaacaagttaatatgaaccatataatatacaaacggtacaacataaaaatctaacgtgaacacttttaattatttgtaggacattgttcagagcccctaataaaagttccttcatacaaaactgctattttaatatgtaccgtccgattaacatcatcgaacgacgatctgtaaccgagtcctccataagaccctggctggtaaccgtagcagaacccttttcctgacactactctgctacaatcagctttagcgaaacccactcttctattggtcacatcgaactcaacccaaagatgttgctgatgaacgttcccgattatattactagcagctccaagcatactcgaccgtccgattccaacgcaatgaatcccacctcctacgttaaccaaaaccctctctttcggaacaaatatctcaactcctctagtgaacacaaacacaagatctcctatcaaccgtgggatcatcgccacgtttccatcgaaacacatgtcagctgttccaccgtagacgtaaccctgctttaatcttcgtcctacacgtgtcattatctctgctcttactttatcgcaagctgcgtctactaaatgagtaaactcggatcccgaatcaaccattgtttgacccgacccgcctgcatcgggtctgaaaaccgaaccggaaatgttaagcttcttcaaaccaaatctaatcccaatcataggaacagtgtaagcaagaggatcaagagtcggcatttcgtgactttcaggaaaagtcaacaaaagaaacgtattttgaaacc

SEQ ID NO: 33335 - DNA, 6177 bp, Arabidopsis thaliana landsberg
  unsure (1)..(6177): unsure at all n locations
ctattaaaatggagacgagagaattgcgagcgtgagggagagatcggaagagttttgaagctgctgagggttttgtaatgtggagaacaaatggcggctaggatagttatgtcggaatttggatgaggaaatgggaagattcaacaatgaacacacgcctttcttgtctgagcgttgacaccaacttgtgtgtgaatatgcacatgttggagacactttttaatttgtagcatttttgcttacgtttttctgacgacgaaagggcactctctagaaaaggttactaaccctttgatgctttcaaggggaatcatatcactctcggagctatgcagagggtagattcgtaatttgaatctagtaatttagcattttttgctgtgatagcatctttgctcacctacctcaaacgtaagattagacaagagtcataaaaacgaaatccaaaccttgcatcttcattcatttatgcacatatatttgaaactcaaaattggtgtgaaagactaggctctttcactccaaattaggagacggagatgnnnnnnnnnnnnnnnnnnnnnnntgttctaggaacacctaaaaacactcaaagacattaacctctagagacaataatgaatgtctgattaatatttgggtatgtttgggagcatctcattaatcaagcttctcaatccggtggatttgaagaagacggtttgacagattctgtttttaacaccgctgactacatatttgattatatgtctctgtatcacactgttagttgtcttagatttagcaaaacacttgacatctacacaacacgacaagcaaattatggggaaagttgttgcacggtacaggtcatgttttacctgagcattcatgtttcgcattatcatcatcttcctcggggacatttcttgggaactagggtctgatatatttagtcgatggaccgtattgggccattgggcctgtttgggctcgttgaattattaatgcagttcatctttgtcttcgaaagagaaaagtgtgtagagggttttgtcttaattgggtcagaagaaaggaatatcaaagacaaagacaattacttagggtttgattggttctccctttgttactcgcaaaccctatatttgcgggtgctagcgattgttagcgattgacaccaatcatacaaatcgctagatactgctttacaccgttcaaaatcgccagatttcaaaagctcattcccgcaagcgtttgcggttgcgggcggtagcagttagattattattatttttttaattaattaaaataattatgtcttctacccaaaccctatatatcttattcttattaaaaaaaacctaatcaatatctaacggaagattccaaagatcccaaaatcagatttctaagtgatgttcaaaaagaaaatattcttaagaatattaacgaccagtttgggaaaaatttgagttggagatgtgttaaaaaatcgcttggatatcttgaagaaactttatcatatgtatagaggcaatccggaaacccgcgagttcaacgttatttacagtttatcacactacttgatgcaatttttgtgatgtaccaaatgcataaagtattaagctttttcttacaaaatttatttatttttgaatttaatgttttacttatggttttaattattaagcatgtttaattttctaatattatcaatttatcgtagtaatatattgtatttcaacttttaatagtaatatattatatttattttggttattttttatttaattactatcgcacccgctgttttaccagtcataaaactcccgcaaacgcatccgttatcaaacgctcaaccagtcgttcaaaacgcttgataacgcttgaaaccgcaaccgcccgtttccgcaaactcccgcaatcgcaaccgcacccgatgcgtttaaaccagtcaggccctaagaagtgttttaatcaaacctagatcaaaaccgtagtaaaattgcgagagtgaaaagaactgcaagagtacaaagtcacatctaaatttccaaaagtaaagtttgttctgcaatcaagagatcacttctacagattccacttctaaggtctctacgttaagaaatgtgataagataatagagaaaaagcacacaacataacaagagagacttggtttgtttccatttttttttttttgggtggtgttactcagataaaacggatgtcaaaggtgtgaggatcaatctgccaaacattcaaagctgcatattcctccaaacactcctttagctgagcctcactgtatccctgttttcacaccccaaatctctcgtctcagtgatcatccattttcagaaagaacatgaagatgatgatgaaggaagaaactaacctttctggagatccagttcagggcatttgcgtagctcacatgggtcttttttgatcttgcagcttcgtctcttatgattgagtatgtgtctgatattgcatctagtcctgccttttgtcggtcatcagtatacaacgatattagcgacatctgcattagtctaggcgcctcatccacatcactctgagccactgcttctgaaaatctcaaccttgctaatgcctatagaacagatcggaaatatattaacactcaatagtccaacttatttactcaagttcctacacaaattctacttacagcggatatgcgcagaatgctgagcagtgtcctcactgttgtgtaagaatgaggagtgtttgatttcgcttcttcttgcctgattctggaataagcagttgctatatattcctccaactctgctgggacgtatggtgataatctccttgcagctgaaatgtatgcactagaggaccagagatgctcatgttaaagtctctaactctgcagaacaggaatgctataaaggcgattttaacttaccggagaatattgggttccagcggctcgaaaccaagcgcaggagattcttctgtctgatgtacgtgaagcacatgctttgccaattcaaggtcactgtccatgtcagctcgatctaagatcaaccacagcagatcgaatcttgaaagaagggctggtggaagattaatgttttcagctggagttcttcgcaaatcatatcttccccttcataaacacaaagatatctagttcaataatgatagcaatgatcactcaactttcataagtttttaattcatatcatgagagttctcagtacaggctggattggttgcggcaagagcagctgttcgagcattcaaagacgtggtaatcccagcttttgcaatgcttacagtttgctgctccatgacttcatgaatagcagtacgatctgattcatccatcttatcaaactcatcaattgcacagattcccatgtcagccagcacctgagatagagattgtatcaatcttctaaatcacatagctcttaacaatacatcatattttctaatatatatccaaagcgaaaaatcattgtttctcaccagtgctcctccttctaaaaccatctcatttgttacttgatctctcataacagcggcagttagaccaactccactgctacctttgcctgttgtgtagactccccttggagcaacatttataatgtgcttgagaagctgacttttggcaactccaggatcacccatcagacagatatgcacatctcctctaatctgcaaaagataattaatgaatgtattgtttttaaatcttcacagataaaatgtgttccaatcaagtgcaatgtgctcttgaatggctgaaaatgtttgtaaataataaagctccataactcaatcaatgaagactgcggacactgaaagtgtatggcaaaaggtaaaacaatatagtcggagatgaactaaagcaagcaactgctttctaattagtgtacagtctttatcataatagatagcaatatcatggaaattttgccagaataaattagaggacaggaaagttcaccttcattccatcctttaattgcctgtgaggagcacccacaagaaggagaagcaaagctttcttaatatcttcatgtccataaatctcaggggacagggatcgcgacagcttattgtatatatcaccatcctcagccaaacgtgcaatctgttcttcctcatctttctgaaactcatatctgtagatcataataaaaaaggtataaagatgctttctgatattgtgcacacaccaaagctgcttcttaagttaagcaaatgccaaaaacgcggaataggttactaaatcagaatatttcgttagtgttaaggtgtaacgatgccttactcctcatatttcttcttgaaatgagtaacagacgttgcttccagataggtgtctgctactaagccagctcgaagtgccttaaacccagtgtaaggaatgggaagaaaaatccctgagaattcaacaacatcacctggtgatacctacaagggtttaaggaaaaaagtaagaaattcacaatagtacgatagtaaatgatgctgatatcacaatttctacagatagagtcccagtacaacaatggaaaaaattcctcttaattaaaaactgctcagcatatgcttttaagcggaacaataacttctcattggactattcctaagcaaccgacctactgactctgaaagtagaacaaatagattccaatagtagcatgagactgaggtaaagaaaaggtacctttcttgtcaactctcctcttagatgaacagtcatagacctcggaatatgccctttgggaacgtgctcagccaactcttgcatcttggcctgcaaaaacattgattttttactcactagtttgatatcagtgcattcacataaatgacactcattgaccagaaacagaacctcctgaaactttagaaactttgatgctctgagctgaagaataggattcccggctttactattaagacgacagcgactagagggacacttaaacaaaggcatgaagactctagatgtaacttcctgatgtaaaaaaagaagataaatcagagatagcagttaacaaaacaaaaacaaaactacaatctggcaaaagcatagttgtacctggtaaatctcatgaccacaatcttcgcatgtgtaaacagcaaccgccatcaatggcttgacatcggaacaacgggtcacaataccagatatcctaacaagttgcccaatgtgtgaagccttaacctccctgatggtagatggccttccctttgaaggagctttaaaataaacctcactgaatcaaagtaaattcattagcaaactattgtaaaactcattccctaaagcttatgtccagcaaatagactcagacaaaacttactaatatcttttaatctcagaaggaatctgctgatgaggatcagaaacatctggattatcagtcccatcatctgctctctgagtcatgagaatatcatgatcatcatctggaaacgcttccgttggttcgggtaacaactcgtcaacagcagcggagaatatcgaaacatatcggcgagtgttttccgtcaaccgtccaagaaactcctcactttcatccttatactatacaacatcaaaagagatgaagtggcttttacaattgcaacatccaaaacagaaacaacattagagagaaacaaaaaaaaaactcacattgaataagtcatcaagatcgacttgaatagctcgaatcttacgatttgaaacctcttgctacatagattcataaatagaacataaacccctaaaattagggagattcgcgaaaaccctagaagagagaaattggtggaagataaaggaaattgagacttacgagaatctccatgtacttagacctgccattggcgtcggcgaaattctctagaaatcccttggcaagccctatatacaagaagaaaaaaaaagtgagaatcaaacccagagaaaaaagagggaagagattatcgagaacggagaagaagagagaatgtaacctttgtcgccgtcgaaatcgtggtctttcatggtttcaaaacttgggtctagagagagagtggaagaggaagaagagaaaggaatgaaccagtgactgcgaaattgggcggtaacagggttgtagatgacgatgagtttaggcgggaaaagtattatagagagaaatggcggggggtaaaatgaacgagtccagat

SEQ ID NO: 33336 - DNA, 2270 bp, Arabidopsis thaliana landsberg
aagtcctgcttcgggactaggcttacgccatagccgaacgagcagctcagagcgttttgatatcatgctgctaatcgccttgatgcttcaactaacatgttggcttgcgggcgttcatgctcagaaacaaggttgggacaagcacttccaggctaacacagtcagaaatcgaaacgtactctcaacagttcgcttaggcatggaagttttgcggcattctggctacacaataacaagggaagacttactcgtggctgcaaccctactagctcgaaatttattcacacatggttacgctttggggaaattatgaggggatctctcagtactaagtatgttccgattaaacccattggaagaggagcttatggtgtggtttgttcttctatcaatcgtgagactaatgagagagttgctattaaaaagattcacaatgtgtttgagaatcgtgttgatgctttgagaacgttgagggaacttaagcttcttaggcatcttcgacatgagaatgtgatcgcgcttaaagatgttatgttgcctgctaatagatccagtttcaaggatgtttatttggtttatgagctaatggatactgatcttcatcagattatcaagtcttctcaagttcttagtaacgatcattgccaatacttcttgttccaggtaactttaagtccttcctcagtaactctatgtttccagttttgtatgctttctcctgaaattttgctttgttgttgcatgttctgtttagttgcttcgaggattgaagtatcttcactctgcaaacatacttcaccgggatttgaagcccgggaaccttcttagttaacgcgaattgcgatctcaagatttgtgattttggactagcgagaacgagccaaggtaatgaacagttcatgactgagtatgtggttacacgttggtacagagcacctgagcttcttctttgttgtgataactatggaacctccattgatgtatggtcggttggttgcatattcgcggagattcttggtaggaaaccgatttttccaggaacagaatgcttgaatcagcttaagctaatcatcaacgttggtggtagccaacaagaatctgatattcggttcatagacaacccgaaagctcgaaggtttataaagtcttttccttactcaaaaggaactcatctctccaatctttatccacaagccaatcctctagctatagatttgttacagaggatgcttgtgtttgatccaaccaagagaatctctgtaaccgatgcgctcttacacccgtatatggcggggttgtttgatcctggatccaatccgcctgcacatgtcccaatctctttggacatagatgaaaacatggaggaaccaatgatcagagagatgatgtggaatgagatgctttattaccaccctgaagctgaaatctcaaacgcctaaatcatcatcaatgatcatcaagagtaagctttttccagttttttttgttttgctttctaaaatgcagcttcgatgttatgttatatatagcgagtccacaaacgcgggaacagatcgattaaaaccccggtgctttgatctcgtctggtttgatttagttgcagtgagtgagtagtagtaacagagtttgaaaagtggctctcagtatctttaccactttgtaaatgtggctgtttgttactaagttaaggcttgtttttgttacattatcttggagttggtatgagttgtagtgttttactactgattttaaggccaaaacttgtattttgtatagctttgccatttacccacttaccagccacacgaaatatttttattattaagatattcatactataaagtataaactaataaaaatatagatgttattttctctaattttcacgtttttatcctacctttaaaaagccgccaaaaatgttttcaattcattagaagggaaaattggataatgtgtcacttcatatttttcgtttttttagtactaccaaaacaatttcagattatattagtaatcttataaattttgatctaaggaagtgtgctatttttttcagttccagtatgaaaactagtgtgtttcaagaaaaatacttttttttaataagcgtacttatctcagatctaataaataaatgataaacatattcctagaaatttgtcttttaggtgaaaatattatatatattcaaaaaaaaatgaaaagccaacaaaaaggaaaagaaaaaaacagcacagaccaaaaaaaacgaatggattgagaaggta

SEQ ID NO: 33337 - DNA, 2289 bp, Arabidopsis thaliana landsberg
taatggacgcgaacttatggatatggaaaataattaacatttatctatgaaagttacaggaactttcgaactgtgagattacttgggaaggaaacaataacagataaccattaaatctacacatacgccatttacatgtgtacatgtcactccttgttttttgaagaccggtcttttctttgaccaccaagaatacgagagatttgtagacctctactaaaggcttggttaaagagcattcttgtctggaactcagacacaaaaggaaaccaggccaaaaacgcaactggtgtgaacagaagcaagcccatcacgatctcgtagcctcgagctagcgtcctaactgatgaccatatccctagctgttggatcagaggcttacacgcttgtgcaatctgacgtggaggacaaaacaaagcaactgtcacaaaaaccagacaaaactggtatcttagatacaaatacaggagtttgatggaggagaaagacttacgagaagcattccccatccagttggcatgaaggcaagcatgcagatgaataagtctttgattgtgatcagagaaagtgcgagaaaagttatgaggattgccacaaatgtgaggaacacaagcccctttatgattgtgaatagaagctgcaaattcgggctgaatgttcgccttccaacgcccaaaccctgcaatgatcgttacatagaagaaagcaacacaatgttaagatttggcaagaaattgaaatgtgaatgtgcttaaagattcataccttcacaatcagtagaatgaataagatcacaaaccatgacgctccataaacctgaaaacagagtcattatcgttcaataatcaagagtttcaccattcacagggaagtagttataaggttagcttacccaaaagctctgattttttcctttgaaggtactgagatgatacacaagtccatattgaaagatgaagaagcgcaaggccaaaaagatctcaagggtgataccacgaacccctgaatgtctaagatgttctaactctttctcccaccaagattcccaactcttctcaggagggacaccaattcctcctcggttataaatccatttgttccagtctgtccagtcatcaacaatcttttgccactcaaaaccagacggattgaaaaggaaaggagcaaagagccatgtcaccaccatgaaccatatcgaaacagtgatcagaatataagtaaccacacccctatatgattgaccaaagatctgatataccagtagaagaatcataagttcaatgcccttcacaaagtgacttctcgaatacaacctgtagttctccgcaaacttggcatggaaaacaacaaacccacggcccgtcggtctatatttggaaccaccatgtaaaattgttctcccgtaataatgtgactttgtcccaagctggaatgtaaagaataccgaggctagctgcagctgcattatgaaaaaatcgacaatagcagagcgaaaaccgtgttccaagccaatctccattaccatcggtaacaccatcaagaaaccaagctgaaatattgactgtgtagccagagcctgctcaagagcctcaagctgattcgggcttgcgagtctcaaaatctctttctccaatccgctcataaccatgtacatccgtccatacaggaatgcatatacagtaagaacggtgagctgaaaaaagcacaagtcataatctttaaccatgtgtatacataagatcaactaaaataaaagcaaacttgagatataaagttttgagcataccatgctactaaaatagaatccaatggtcgtaaaatagaatgagagcatcctgtaaaagtcaaaccgatgccccaaacggtaaacatcacggcttagcgtttgctccccgtttccatttgctacttttgcttcaaaaatagagattgggttcaaccccacgtcccgtccctttccaacttggatatactcgtgatgtgtaacatatcctccacggagagttgaattgaagcctatatacattgacaaacaaatcaacagctgcttggaacgaactatcaattctctaacgctgaattgttgacatttagagaattaacatgccattacctccgaaaatatcctcactcaaatttattactttcgaagccttgctcacaccgccccttgttatgtgaaagattctgtcaaatatgtcaggatgaccataatgaaaacggaccctgcacccatagagaagaaatgaagttaaataagtaaatcaagaaagaaatgttgacataaag

SEQ ID NO: 33338 - DNA, 3724 bp, Arabidopsis thaliana landsberg
tcacccggttaacgtcgatgatttagcacttgctgtgatcaacgctgttaaagatgacgacttctttggcattttcactattgagcagatcaaagaagcagctgcaaaaatgagagcgtgaagagtctttagatagataccaaggagtggttattggtttgtataattgtatgcgaaaagtattaataattacatgaatagctctccctttgtcaaattgtaatgtatatcatttgtaaacgtatatattatttacttctacgacgagagtaatcgtaggtaggcctgggactaaaatccgttatccgcgggtattcgaatccggatccgtgatccgatccagaaaaccgaataaccgggtgcgacggatccggatacgggtaaagcatttacgaatccggcggatccggatacggatccggatacgctgaaaaagccggatatccggctccgttacagggctaactatcatcatgatgatagttatcatcataccccacgttaaaattaaatgcatcgttcaccatatccacatatggatcttctacaacattacccacttcttcatgattctcactaaaatacgtcctatcggtgtaactcgttcctatatccatattcatttcttctccatgcttataccaaacataataatcagacataaatcattgactaaacaaatgactactaactcttctacccgagatgatgtgtttttcattcttgcatacactacaaggacaatgaaatttacctcgactactctgtactataggccgactattagcgaatgtcatgaattcctcaactcctgcgacgtattcggttgacaaattcatcgtcacttcattgaatctcttgtacatccaatctcgatagaaaccgccactaccgccataattgtagtttcccaccattatacaataaactaaacttctatttttttcttttcaattgttttttttttcttttgatgttgtttagatttgttggtgaaagaagagtgtcctgaatttttattatatagacgaatttttatgactaatttacgactacaacaaacaaattaggtgtaccaactttgcaatgcgaaaaacgttttccaactactttatgcgactactcagcgactcttatgcgactcttttacgattacagaacgttgtcgtatattagtcgccaaatcagcgactaattaatgtactcggaaattgtagtcgttaattagcgactaagcaacggcaaaattatcccttcaataatataatcgtcaaatagtcgttacttgccgactctttgccgactgcatacgatagtcgtaaaacaacgactatgtaactacaattttttgtgttgtcgcatgcgagtcgtaaatccgtcgtcaaatagtcgtataatgttacgactacgtttgttgtcgctgattgtagtcgtcgtttacctgttttcttgtagtgttaccgaagattctggcggtctacttccatcggtctacctccatttgttgctcgaccgccaaccttaccgatgatcctagcggtgaacctccatttggtgctcgaccaccagcttctgcgattttgattattagtaaacggattcaatctggtttgacccgtggggactcggttcgtttttttccttcagaaaaccatgtttttcttttcttttggagactgcaactttttgagagctctcttgtaagccacaacttagggatttggagattcatcctctttgacactttggagaagatttcttatcccttctcttttatgttttactaggatttaacccgtggtacacctaagggcaaatgtttttttcacatatataataatattaaattttacggtttttaaaatttagtgttaaagttaaataattttaagttaatgttgtaaataaaaatttgtgatgataaaataacaaatagagattgaacccgtattatatcaatccaaacccgtcccgctatataactcgtctcatgttattttaattttttataagtataatattaataatgttttataatgttaaaatatgtcaataaaaattgtttttttgactttaatgtgatgatatttttagctatataaaattaatatatatacaaattatttttgttagaaaaagataaaatttaacaaaaatcagaaaagaaagttttagggtgtgataattattcttacaattgcaaattggaaaaaagtatatagaaaaaaaacattatgatggatggcttctacaaaattggaaaaatattaaggaagtgtgtacgttttgtttttaattgtgatgaatggcttctaatggatgatttaaaacgaaccgttcaaagaaacataatcaaagatatgaaaatataagaaatttgaaaactaaaacatattttttctttaatgaagaattaggactgcagagagtcgatttctcgtaatgaagaaaagcttaaggaatggattttaatttataggggttgggtagaattagggtttcaaattttaaaaatatggcgtaatttttatttatgaaaatattaaagtaatatgagatttgattctttttattaataactaatttaaaacaaaaaaaatcagggtgattaatgctaattgatcctctatgagtgtgttatatatgttagtttagatttggaaagttttcaatgagtttagtgattttttcttttagtttcctaacttttagaaacaaaaatgatttttatttagaatttgagaataaatttgttaaaatataaaatgtcaatggcactgtgttgtaaataaatcccaacttgaggatttatttcataaaagtgttgcaaaactgtatatgtagatttatttttaaatgtgtttttatttcatctctttgtgttgtccttttcaatatgagtgagaagtctcttaattttgttttagggttctaagtaggggattaaatgaattgatggcttaatcattgttgtggagtcctttatttataggttctttgattcacatgttcttaatgctagaataggattgatcaccctgttttagaacttaggtttttctatgcatcacaagtgtttgatagactgtctgaacaaatgtaaattgagcaatgtatttctaaccaatgagagtttatgttagaatgcattgtgaaccgaatgaacctaattctaatacggatttgactaagaaattaaaaacaaaagtttagtagttgcatagttaaatataatgattaatgtcttaagagagacttagtctaaatttgtgttcatgttcaagaacgatgcttcatggttgaattccttgtctaatgttttcattattcattgatatctgaaataccctatagcacaatgtttttaattcataagttgatctttaaattatttgcaatttttatttacaatctgaaaatccaaacaaacaacctttttgcgctagctaaaaatgagtcttggaaatccttagagtatctttggtccttctggatcgactgcgtttatactaacttgtatcgagtaattacttgagaaatcagaaaataaataaatgaaaactacttatatagcataatcatttataaaaactaaatttcagaattttttaatctaataagaatatattatttctatcgtctacaactaatttgtttttaagttatttatatcatttggttcaaaatgatgataataagcattaaggctttatgccataaatta

SEQ ID NO: 33339 - DNA, 831 bp, Arabidopsis thaliana landsberg
gatacggcttttgacccggtttcactttataatttcaactgtttattgattttctaaaaaaccaaaaatcttgatcgtatcgtttgttttaaacttggattgaaatagaaataattcattaagatattaatctaaatttttccaaaaaataaaaaattaattaaatgatgaaaaatctgatatttatggtttatacaaggaaaattattattatatttaaataaaatgttaaaattctgcctacacgaaatatattatagattttcaattttcaataatttttaattatatattacaatagcgaacgaaaaaattggtttaacaaaactgggtttttattatttgttgtgtttaaatttggaaaatcctattagacttaaacatattaagtaaaatatttctaatctttaaattactctttgtttagattttttcaggataaacctaaattgtttaacacacttttgctctctatgaatatatactagattttgctccaattattgacaattgcgttgtttattcaaaattacgagtttacgtttttttggcagaaaattacgggtttatgttttaacggaaaattgcaagtttacgtttttgacaagaaaattacgggttacttttatggcagaaaaattaagagtttctgtttatggcaggaaaattatgataatgttatatcatgactatgatatgttgatatgatgatgataaagatagtatgatgatgatggggatggtagtatgatgttatgagaggtaatgatgatgatgatattgtgttgataatgaataaattgatgggttgatgaagtcattggaaaaagc

SEQ ID NO: 33340 - DNA, 2785 bp, Arabidopsis thaliana landsberg
gagtcagaatcctcctcagaacccgaagcaatcttctcaacaacaatactttttcctttgttcttcataccgcttcctttgccttttcctattcccttgagaccactaacagcttgaatagcagtgctaggatcagcaggaacgggtgctggggttagaggagaagggccaatggtcaaagcagcggagctacccctagcattgctgcggatgcgggggcctactgaagtccagtctccctctttagtagcaggctttggagttttagagcgtttacgtcttcgctttttaacctcctcctgctgcggcttgtttctagggcaattgtccgctttgtgcagggttgaattgcagcccttgcaagtgatgggcgcgacatgacacttccgtaagctatggccaacttccttgcaatgggcacagacgggaggcatccatggactagagacctcgacgcgtctgacatcaccagaagcaaattggacattgaccgcttcaggcagaggctttctagggtcgataatagtgaacactttcgctacttcgaggtttgtcttgttagccgtgcttgggtggaggaactttgggtcaccaaccaaactagcaatgcttgcaagaccatcgtcattgaaaaattggaatggaacatgccttagctcaagccaaattggagcagttgtcagctcaggcttcaccggagtaagcccaggttcccacttggccacgaacattgtctgcccatcaatttgccaaagtcgttgattgaggacgcgggtccttgtttgcacattcgggatgcggaacaagaaagcgttatcctccatttttgacacagtgacatcgcggaattgcttactccaaatcccattcacgatagtgtggatggtaccttgtgaaggaggatcagagtagaactagccaagaatgaacgattcccacgatcgcttatgcttttcgatgaccgaatctaggatcttcacacaagactctctagagggaagcgtgaaggaagtaccctgcttttgaactctctttgatgttcctttgaaaatgtcacaccaactatcttcttcagctgtgttagaacccgattgaggagctgggctcaccgcagcaaccttaacgggtgcagcttgcgcagagggagcagagggactcggttccatgggaggagtcaccgcagcagtcggtggagcagacacagcagacagaggggcagccgcttgtgtcgcaacgaggtcggctagaggctccagatctgagccagatctggggcctgtaggcgggtttgtggccagggctatctgtgggacagcagcctgggcacttgagggagagacaggagactggatctgagggatctgcaactgtacggacgaggctgaggcgggagaggaggaagactcactttgagaggggggagatttcgaaccaggagaaccctttagacgcttttgcttccccatgaggaggggagggcctgaagagagaggggaggagatagcccggcgccgttggagacgccggagatttgccgtgaaagaaaccacttttcgctaaagagggagagaagtcaacggtcaaacgtcttatatctgaagagttcaaaaagaccaaaagtcctgcacgactagttgaggactccatcctagcaggtagcgacatctttaggttggtttgatagttatcattttcgaggtctgatggaaagcttaccacgggtttcatttgaggatattagtctcttactctctttaagaatttttgccttgtgagcccaatatcgtttcgctagtgatgtgatttatatcactgccttgttttgtctttgtcttatgtggcgtatactttatccaccgagtttaagtacaaccatcccacaatcgcctacgccatcacttttaggatccacctcatacaaaaatattgtgaccccttcatagagtgatataaataagagcattccatgaaggggtcgaatctcataaggcttaaatttatgtggatttttcgaattttgggccgaactagaaaagcctgattgacatgcctatatacgtgtataagaaaggtattcctaagaagatattttctatattttagattcgaaagaacttagccatgttctcgaccaaatccattacagctaaagatattaccaagattttttccacttgttctatatctgagaccatcacatcttcactctcaattcccaacaattagatcgtagatctctttaccaaggatgtcaattaattccgcatatttatttctttgttaactatttcggacagttggaggtctcctctcgtttgagcttataaaagctcgttgctttgttctcattacacaatttctatgcaataaaaagttcaagtttctcttcttccaacattcaagtctttgagcattgttttgagtcaatctttttgtgtggtttccccttaaatttctctcacgagtcttgtatccatatatacgcttttccctttgataaattaagccgcgtttatcggttacttatcatctcatctccaccaaatcaatacttttgtaactcatcaacctctatagcatcatcgtaccaccccttgaggtatgtattattaacttgttgggagctaggtagcagtgaatacggtgggagacattatacattccccgaagggatgacttactggtttctttatcaagccttattgtttttatggtttctcgtttgaagatagatctttccatgaactcggattccttgaaaaggaggtttgtggcttcatgacaa

SEQ ID NO: 33341 - DNA, 4651 bp, Arabidopsis thaliana landsberg
gatccgtttttcgattgagacatctttttttgataaatctttagacgatctcattatccaattgtacaatagattttactttttgcttgtgttttggatgtctatgtctatgtatgtattcaactatttatagagaatctataaatgatggagtccatggctagtaaaggacttgctcataaaaattaattagctaaaaatgttgtaatctgttattcaactaagaattaagaattttagaagactttggtttttctttaatatctcatgttattcaaatattgagttctaaatatctttccaaatcctagtttagtactgaacatgaaacttaggtaaaatcatttacaatttcttgttattcaaataatcatttataaaagtcatatgaaatccaatgttattcaaaatttcttaaatttcttaagaaagagtttcggaaagggttttaagatatttttaatcacaattttagttgaaaatagagaaaaatcacattcttgatagggatgtcaaatgggctgatgatcatgtcatagaacagtccaaattataatggttaggttatgatcaaacccaaagtcgaaggagtcatataggctagaaactcatttaccctacaaacaaatgggactaactcatctggacagtgacaatccaataagccttaaaaattagggttactaatttgaagatattttttcctcatttttcttaaaaaacaatagttaaaaaggggttggatttgggaaatttgaagttgaaaaacattccccggaaaattgatgagatgtcgacgttggtttagtttacattttgtgttagttgtctttgggaattaagcctgatccaataataaaggaaggattttaattacagctttgacagaggattgttgtacttcacagtaaagtccaagcttgaaagtcagggaaaagtgaggtactcaaaattgcgttgtgtagtatatatggacattgatgataaattagtgattaaaatgtggaattataaacagagaaagaagcagaactattttcctcagcttacggttctctcagtagcaaaaatacattttttcttggtcaattatgatccaatcatgtagaaaatagtttccagttcaagatcaattatttctgaaatatattggtttttaacttttatctatcaattatattatattttcaagccaaattacatttagacctaaatcaatgaacagcctaggacttatataagataacaaggtctaaagcaaacatactcaaatttgcaaaacgaggagagacaaaattaaaaaacgagggccaagacaccaacaagcggagcagtagtgaccgtcgcaggctcagcttgctggaaattactcctttcatctccataaacatcgttatcgtcgggtcctccgacaactgctcccgctaaaacgttagggtttggtgcaggattgttataccatttatcataccctccactacacgtcactggtgttttgtcctttctgatcgatactatggaggctgctctatggtgtggttttttgggataattggtcccaactccaaccatgtagctcattttctgggggttcgacccaagtatatagtcaacctatataacatgaggaaatcgcaaattagtatatattatattgaaaaaagtcttgatatattttcaacaacatgttttatagttggtactatattaggttttattaactacctgggaacgagcgatttggagaagatcagaagcttgaagagcacctttgggacattggatggaggcttttgcctttgtgagatacttagaatatgctgagaggacgaaagaagcggttgtggtgtattggaggttgttccacggcaagaagtagagcaaaccgccaggggttttcttaacgttgttggaacctttttgagcacagttgcagataaactgctctgccatactcttgtactctgcgatctttccattgctccctactttccgttcaagtgcaagctgcatttgcaaaactttgtgttatgtttgtttcttgccacataagatagtgatatgttttctttagtgaaatagtcataacttaccttggccatcaagacttgtgcacccacgaacttatcgtcccaggcaaaaacacttcttggacctccggtaccagatgcttgtgttaggtaattgagataaatctggtcgttagtagcacggtggagccaagctgcagcccacaacaactcatcttcgtatccactactcgcgtagaagccacccgcgttagtaatggagttttggtaaaggccagggtgagccttagcgaatgcaaataaatcttttgcatgaccaatgagtatattggcataggctttatcaaatggtgcgaaggcgatagacgctgccgccattgcggcagctgtctcacctgctaggtcagaacctggatgttgagcatcgatgcggtatgaagtacgcggagtggtcatatcctcaggtctcatccagcatttgtggtccgagtttccctcacccacttgtccgtacaggacattaggctgaggatgggctttaatgagataatcggtggcccacttgagagccctgagcgagtttccttcctcgcggtgggccctaagctctgatgccatctctatgttgctccaagctagcatcgtcgtagtgaacgctaaaggaaatccaaacttcatattgtctccggcatcgtaataccctccggtgagatcaatctatttttacaattagcaaacagtttacttcaagtaataaatattcattacacaaaaaaatatggaataaaaataagtaattggatattaaacttacatgagcatcagaaccatctttgagtgcagaatctcctctccatgtaactctttggttcggaggcaattttccagaacgttgagcttcgaaatacaaaagactctttgtgagagcgtctccataatttgtagagacagctccacgagccatcgacaatacaaataacacaatgcaaatacttgtccataagcattgtgaagatccaattttcagttgagacatcgtttttttaaataatctttagacgatctcaagaccaattgtagaattgattttattttctcttgtgtttggcatatctatgtatatgtccgtgttcaactatttatagagaatctatataagatggaatccatggctaattaaggatcattaacattcgtagttcttactcaaaaataaattagctaaaaatgttgtagcctaaatctcataatattagacatcttctcatttatcctaaaagatatatacaagaccaataagattgcgaactataattagttaggctatcttcttaaaaatatattccttctatttttcttatgtatatatctattaataatcttatgcattttttgaaagtttcttactatccatgtagaaatttacagtttttggtcaatattctttcaatcttttgtataaaatttacagattttgtcttaatttttttttaatttttttttgcatcatttttaaccatttgttgatttcttattgaatgatagtacaagtacagatatcttagattttttttttttttgtttgttaaaatttttcaagagaatcaatgctacaaaccaaaataacttaaccgagccgaaatcactttagtctcgaaacagaggaaaaacctcatcagtcttcaaaatgtctcactaaatcaagatattttaacaaatcaaattttgtttctctacccttagacctaaaacgttagttgctagagcgtccttgggaaatgtagtccaaagaaaataatacttaaggtcatgcaatggcagccagaacaccaagcaaaggagcaaccgtgacggtatcaggctcgccgtgctgaaaatcagatcgttcatctccgtatgcatcgtactcgtccggtccacccacaattgctccaaccaaaagattagcattcggttttggattgttgtaccaagcatcaaacccgccattacatgtcaccggtttaggatcatttttgattatcacaatacaggctgctctatggtgtggtcttttaggataattggtcccaactccaaccatgtagcttattttctgggggttcgacccaagtatatagtcaacctatataacatgaggaaatcgcaaattagtatatattatattgaaaaaagtcttgatatattttcaacaacatgttttatagttggtactatattaggttttattaactacctgggaacgagcgatttggagaagatcagaagcttgaagagcacctttgggacattggatggaggcttttgcctttgtgagatacttagaatatgctgagaggacgaaagaagcggttgtggtgtattggaggttgttccacggcaagaagtagagcaaaccgccaggggttttcttaacgttgttggaacctttttgagcacagttgcagataaactgctctgccatactcttgtactctgcgatctttccattgctccctactttccgttcaagtgcaagctgcatttgcaaaactttgtgttatgtttgtttcttgccacataagatagtgatatgttttctttagtgaaatagtcataacttaccttggccatcaagactt

SEQ ID NO: 33342 - DNA, 1063 bp, Arabidopsis thaliana landsberg
tgccaagtcttgattctcacaccattagtggttcctataagagtcgctttgttgactaccacattttaaacatatgcttctgagttatcttctcccaaacttccaatactgttttacatgtaaatcaacaaaatatcaataatattgagttaacacatatgcttgtgttataacgcctaacaccatttaaaaacattgcatttatctttttcgttaatattttaaatgacaaaatgatttttgggcatgcatgcatcttataatatccgtccctcattaaaaaatgatggatattaaaaaaaatgtccaattgaagttgataaaaattagttgatagtaatccaacaaagatatagaatgttgattgcacatagtatgttgcttaaaataagacaaaaacaaaaagtttaggtgaaattagggagagagatggttagacctgattccatgaccaggcccgcatgtaatgcctgtcgctctcacattctccgacccactcactatcgatatacaatcatcaccttcatcaccaaaaataaacccaacacattactatttattatccattattaatttttgtatcaaaatatatttaatttattcactaatttgcatgaaaatgtcaaaaacatttatattaaggtggttcattgattaatataccagtacggacgatagagtcttgaattaagatattctgagttccggaaacgtgaatgccatcagtgttaggactatcagccggagatgtgaccataagattcaaagccttcacgtttttgcagtcttgaaacgtcaaatgcatttgctgtgcgttttccaacctaatgttacttactctcaagttattacactccacaaacgtaaccgcctgcccatttatttcattacattaatttcattttttatagcttcattacttaatataagtatctatttataagaactgaaattaagatcgaaaacagcaagttaggcgtttgagattctcaccgttggagctcccaggcaaggctgtttaataaaataactagtcagtttaattattttcattgaggttttc

SEQ ID NO: 33343 - DNA, 987 bp, Arabidopsis thaliana landsberg
actacgctgtaattttaaaagaaaaatctctacatgatttttctacagtacttcatgattttatcacatctcatattgtcgtggtcgttatagcgaataaatccgtttgcggcttgcatagtatatagtagcattctaatagtactgcagatcggaaaaaaaaaatgacgcagactaattacaaccgtttctacataaatataaatttggtccgtagcgattagtactattttctaaaaatatagtggtttaatctggttacggtttagttcgcttcgctcacaagtcacaacatacattcaaaatctctataataattaaaatttgcttatgtgatggtaagctatatgaatccaatcatgataagatatgtatatgaaaaaaaagattctctgagacacttaatcaacctttggtatgtagatgtatgcttatcatgttcgaacaaattcaggttttgtgtcccatacaagttttatatttttatcatggggaatgattatgtttgaggatgagaactgtacaggacaatgaatgaacgtaacttcgaccatccttatatttcaacaaccacaattattgatcaccgatccattatttgtaaacaaattattttcaaaaacattattaaatttgatagaagtgataaaatttctagattttctacacgtagactggatgatattgtaacgcatatctatgtgaatggataaacacctgccctcatttatatttgtctatcattcaatgttggtttacaattagatcatgtacaaaaaaaaaactagcattagtggataatgcgtatgtgtgtgtgggcgttacgggtgacgatgtcaccttacttaccatcacataattgtttgttccaacgactttaaatagaattgggtacactttgtcatagcttagacacacgacatcacccactgtaacctgctttcttttaaaaagtaatttaattaatccaaagctgatttttaacac

SEQ ID NO: 33344 - DNA, 1509 bp, Arabidopsis thaliana landsberg
gaacatggttgagggaaagcatcccctcacatgtcagatgactgttttgtttgtttctagattgtgtagcgcgacctgtgacttaaagttcactgtagttacgccagacagcccggaattcttcacggaatgtgtttaagcgtgccttgagatttggggttcttatgcttgcatgaacaattgttgctgtaacacaaattacaaaaagaggttgagtttataaaagcctatatgtggatttttgaagtagagtgagagaaactaagttatgacttatgaggatttgtgtagactgcataccaagatgtgcaatgagtagcgcaaccgagactctgagcaaaccagaggaaatataccaaagagcaaaactcactgcgaaacaaaaaaaaaactccaaatcatgttttttacggtttttggagatatattacatcaaatgaaaatatacaaagccacataccaagtgagcatgtcaagacaaaaacccaacggggttgaccacatacatggattgctctctttgatgatggacgcccacgagtgacaggtcttaaaaacacagattacatagatgattataagcaaggagttacaaagagtttgaaaggcaacaaagagagataaacatacgtcaaaggaggtctcattttagcagctacctgtggagagaatcttctgacggttcgtgtcgccttctcactaaaagaacctgcaaagctgtagacaagaatattcaatatggatctactgattcaagcatatccactagtcaaagctctgagagtttaaaaacaaaaggaagatgaagaaaaacctgtcatttagaaatgccaaacttaatgctgtcaaaagcgcagcgaagatcgctaaaggccttgtaaggactcccaatcctgagaagtaaaatttgacaattctaagtgaacaagacatcattgataaacaacacagatgataatgcttagccacttcctcacaccacataccaagtataacgacgatcatgatgaaatagtttgttcggtagctgcataaacagatcatcatcacaggtcaaaattaagctcaatacagaaactaagctatcaagactctgtgttctaaccaaagtctaagaattctatgttcaattgggacgaatttgattggtaattctcaacgagagattgatcacaacatcagatccgaatagatatgaaattggcgaacaagaaagagagggagagatcgtactagtagagattgcacttgaggcgactatcccatttagggacagatttaggaacggtgaaccttgagaagaactcagacggaggacgcggcggagacgaccagtcaacttctcggagagcatcgaagagatcatcaaccgttacgtttccccaatccataatcgtcgatcacaaaaacacaacacttctgattccacaatccgtagttaaccttatgagaaaacaggtacacaaattctcaatagactcgatcgattgagatcaaatatcaaagctt

SEQ ID NO: 33345 - DNA, 1654 bp, Arabidopsis thaliana landsberg
cacgtggctcctgggacttttcttttctttaaatgcattatacatttagaattgtgaaattctttaatagtttatgccattttacttatcttaaataataaatactgttgtatttttgcatgggaggaaataagatttagagcaataacgagttacgagttcattttactgtggagcccttaggccatctccaattctccatcccacatcataagagagggtcttcccacaaataaaattgaagacgaagagtttaagactctatcagatcagaaggtctctattttctcgaaacgtcggctttagagaaccaaaacgtcgaggaagcgtttctaagcatgatcggacggatacatgaggttttgactcagaagatctttagaatcaacggtgacggtaataatgaaaggaacgatgcagtcattcccgccggcaaagagattgtgaatattcatgaagttaccgcactcgaccgttgagtacttctttgtccacttgttgctacaagtaaataatttgatggatcatctatttttttattatttgaattctgcgatgatgtaatttttgtaactggtggcttttctggatttgccttatatggtcctgctcatatatttcttgtgccctaccataaaattttaaaaataaataatcacaagtggtatttttaatatttcttgtagggctcttttgcatatataattgggggtatggcatttttcctgtctcttttatatataaaaaaacgccaaaaaaaaaaaattatgcttcctttatatatacaaaaaaaaaattacccaaatataaggctatcgtactatttatctttatatttaagtcggcactgcatttacttacaaaaatcacaaatggtaaactataaagtgttttaatccacgggattggctcatttgagttctagtttatatcggttgaaaaaaaaaagtgttttaatccaagtttttggttttggtttggattattgaatatgtaatgaaccaaagacaaatgaatatgtaaaccgaaaaataaaaccggattcggctgagttagttgtggagtctctttcggcgtttgctaaataaactacgtcaccaacacgtcactgtaacaattgattcatcttcgtcttcttcgtttttttctgatgcgagtgcaattcagaaatcactctgggtgataaaaaacggtgtcgtatggttctttagtctcatcactttcctaaagagcagtgaagcaaaatggcgaattggatctcgtcgaagctcaaagccgccgaaacaattcttcaacaggtaagagagatgtcgaatctcatttttgtttgcatcgaaaacggatgaaaaatactggatttggaattcgctgggctctagcttaatttcgacctccatggtttgctttgggactcttaattcctgcgttgatcaccggattggtgtcttagtttccgggaaattgatgtgatgtgattcaagcttggactaatctaaatcatttggcaatgttattgttacaccatctgggtcattgcattgcactgatttctgcttatactaactatttcagagtcttgtgttcttgtcgaatttgtagttgagctcgtaccacaaaatttgtgctaattggggattatgtaaactttgctttt

SEQ ID NO: 33346 - DNA, 2552 bp, Arabidopsis thaliana landsberg
agctcaaatgagcccatagatttcagcaacataaccacgagacttcccatccggtaaatctatggagaaacggattccttgtggtataacagcaatctcaccaggagttaccaaaagccttccacactcagtttcaatccatagccctaaaacacccactcaaactatcagaactgatccaagactatcttgaatccattctcaatacatgactgactttatttcccaaagatgtggtaaggtaaggcattgggactactaacttacttcctgtttgaggaactaacaagaagtcaccatcagcgttgcaaaatgcggagtctttcattcctgtgttagccacataccttcaaaacaaaatgaatacaaaagatcattactttatgtatcactgatctacaccaaagataccaaaataaaaagaagagttttttacatgtgaatagcgaagccatggcgaagaaacgagcttccagctccacaaatggtaaataacccatcaacgaaatcaatctccgaatcaggaatatcctcaggtctccaccgaagctgagtcggattcgtacgactatttgatgcatcaaactcactcacaagcttcttatgagctggtacacgaggcttgaacggttcatgtgtaaccgatggtttaacccggtacaaccaactgaaaaaaaaaacaagatgaagatcaatcaattcaacgaaattatccaaaacttacaattgaaatgatgatgtaccttctttgattgagcttgcgaggagaagtgaaagaagtaccggagatctgttcggcgtaaagaccgtaaggacaaagaagaggactgttctgatctaacggtaaagctccggcgattgcttccgatgagaagtggttaccaaaacctgattgatacttcaacccttcaagctccttcttctcttccatggcttcttcacatcagagagaggagcttgttaaagagagagacgatgatcgatacatatatttaataacgtggaggaatgatgatgacgtggcatactgatcaaagaggaagaagaaatgacgtctgaatttaaaactctttttcctaacaaaaccataatctctaactattgggcttgaacatatatgggttttgtatacaattaggcccataagcttatgatttcttttttcttacgaattttgcgtcccacatcggtaagcgagtgaagaaataactgctttatatatggctacaaagcaccattggtcacgaccttacttgaacaggatctgttctataggctcgtacctctgtttccttgatttctcaagagacaggccctttaccctggttgatgaaccatgaccgtgcggctagagcgtgattgacggctacgatcgtcctcggacgcatccggtgctgtagaggatcgttacgcggctcggtttctaccttgccgaggtggtcgcacggcggtctgacaggtccctttccttttttcttttttttgccataaacttaaatttgtatatcgatcattgtagatattgaaaacctagaacaaaccaacatccatgtgaatgtctttcatgactgatttagagatcattcttgaattttggaactagaatctataatgagcccttaaccctggttgatgaaccatgaccgtgcggctagagcgtgattgacggctacgatcgtcctcggacgcatccagtgctgtagaggatcgttactcggctcggtttctaccttgccggggtggtcgcacggcggtctgacaggtccctttccttttttcttttttttgccataaacttaaatttgtatatcgatcattgtagatattgaaaacctagaacaaaccaacatccatgtgaatgtctttcatgactgatttagagatcattcttgaattttggaactagaatctataatgagcctaaattaaaacattgtgaatggtcccatagatacttcacttgtgtgtaggatcggctctcttgatgcgagaatattcacttttgagaagaggagggaagaacggatttagtggaaatatttgtgggcaacactttgcatccattgcagacaacgtcgtgcaacacattaattggtccaacattatcaaactttcttgtagaatctgatttatagatttcagttacgcaaccttaggcattgacaagtgatgacaaacattttttgagatcgatgggataaccagggataacagggagttgaggtgtcgtgtgtgcgggtgcacttaagatgatgcgagagcaaccatccttgacaagaggagggaaaaatggattcagtggaaacatttttggccaacagtttgcatccacttccgtaaacgctttgcagctttcaaacttagcggttaaaacatattttaaaatttcgatattgcaaccttgaacattgaagagcgatgaccaacattttgtgagatcaactagagaaccaggaatggaaggaaatcgagttgtcacaagcccctcggctgtcccctccacatccatttgttgcaaatgaaacttgttttgagatggtagaatttttatg

SEQ ID NO: 33347 - DNA, 640 bp, Arabidopsis thaliana landsberg
atggtatgagcatctctacctatctttggcatttacattttgttcatgcaacatgttgaacgcgggcttgggtgttaaacgactagatatatgcctcgaccatgtgcttcatgaatcaactgttatgctatatctcttaagaacccatcctgtttaccttaaaaggaaaatttatcttgcaaaaaatttatctttaaaaagaaacgacaaaaaaatgagagaaataaataaaagaggagatctgatggtggtgaaaaaaataaaagaggagatccgataggaaaaaaaatagatggtggtgaaaaaatccgatgagagggaaaaaaggagaaagaaaagaggagatccaacgaaaataaaagaaatctaatgagggaaagaaaagaaattaatggcgagagaaaaaaaaacgaccaaaaatgaataatatgaaataaaaagtgacaaccgtcatttagcactctctcctggtagatgtaaataatttattaaaatttcataatacaacatatgaacattttttgtaataaatattgactaatttattaaaattcaaccgcattattctaaatctctcgctttacatatttgaatatcgtacctttatataccaaaattttttttacacaaaaatatttag

SEQ ID NO: 33348 - DNA, 1508 bp, Arabidopsis thaliana landsberg
  unsure (1)..(1508): unsure at all n locations
acaacttgaatcacacaaagcacgtatcaagagattaaaagtataagtctgtggagcaatcccacacaaaaccatatctttatacaaccacgaaacgaactccacacgtcgttcctttatacaactttcaagcaacaaattatacagataaacgctaggtttgttctcaggaaaccgcgaccgtactaactgaaactgcggaaacgccttatcaatgtgattcgatttcgcgaagatggatacaacagagagaagagacgaaagtttcgtcttttggattgaagaagagagtataagattgtgaagctcttggatttcttcgtgcattttggctcgaaccaggatacgagcgattgtaggagtcgcatctaaagaaatgccatggctttcttctgaaggagaagagaatatcctcttgaagattctccatgctaatctcggattgttcgtgttcttcaacaaagccttcacaagagattgttccatagaactactacagaactcaaaaattcaatttttccaaattggtcttataagcaaaatactaaattacatacggactaaaacgtataatgttaagaaatcgaggactattatgttaataacagaacatggttttacccaatttggtcttaatgtacaattcaaattataaacggactaaacattaataacggttaaacatttggggctattatgtaaacaataaaagttatagactaaaagtaaacgcttttcttgttctttcttcgttccaaaaagtcgcaactcttcttcatcttcttcctctgacgatcattttcagaagaatctgattccgatcaaaattgcagaagaagatgtctcgccaatcgttttctctactgaagaatcttcgtagcatcgcttccggttccaaaatccagacccgatccgtgacttacatgcccagacccggtgacggaaaaccaagnnnnnnnnnnnnnnnnnnnnnnnnnnnnnnnnnnncgttggtaacaaacgcggttcaacaagtgatggaagcgatgcacgctccggtttacttcgaaccgttcgaagttcatggagatatgaagagtttacctgaaggattgttggaatcgattaagaagaacaaagtttgtttgaaaggtggtcttaagactcccgtcggtggtggtgtgnnnnnnnnnnnnnnnnnnnnnnnnnnnnnnnnnnnnnnnnnnncttctttggtcaactgtttcaatttgcctggtttagcttctcgtcatgagaatgttgatattgttgtgattagagagaacactgaaggtgaatatgcaggtcttgaacatgaagttgttcctggtgttgttgagagccttaaggtgcaatttctcagtttttgttgattgttttggttacaaatgtgatttgattcatagtgatttggtagtagatgtgaaagtaaaagatgataatgttatatcaaaaatgtctctgatgctaatgttttggtaggtgagtacaaagttctgatgagatcg

SEQ ID NO: 33349 - DNA, 528 bp, Arabidopsis thaliana landsberg
aagcactagagtattatataacaaatcattttttaaatgattttttagtttattggtaatagtattaattttagcatggcaactccatattcgacgtataccgaaataaaaatgatgttgaagatatataatctaaggaagtctaatctccggggggaataaatgagagtagaattgaagatgcatggaatggtgtgtgggaaaggcaaagcaccatgacttcacaagttgcgtgagggcaaagtatctattttgggtgaaaccattttgccatctcagccgttggatctctttcttccttcatcatcattccgtcatcctctttgctcctacgccatcttctgtattaatttttactaattttcttacgaactaactttcagttctaaaaaaccaaatcgtttcctaattaactgtcaatcgtttctcaacacagaaaaagttaagtcattcagagttattgaattagaagagctgaactcctacactagagtggatatatatgttttctcaatctattagattata

SEQ ID NO: 33350 - DNA, 1365 bp, Arabidopsis thaliana landsberg
agtgtatcctctcgtaggttccaatctgttacatatgcaacgaaacaagacttgtataatgaaaaagactttgcttctgtttcaggaatcctcttgttcacatgtttctttctcagaagctttcctgttttcacaaaagttggacaagttagctagaccttgtagatgttcttgaaaatcaacaagactcatttatacattgccttttacccatgttatcaacgctctggttcaccttagccacatgatcaaagataaagcaagattgcgtttgctgcaactttccttgatcaccagtagacttgttagatgtgcgattgcgacgagaaggttctccttcttcagctatcttctccctcacgtcatgcttcgatctactctcttggctccatctttggactcgagctctcttgagtggccgagcctctgctccagcctttgggagcctggtgcagagccgaaacacgggcattttggcgttgtgaagcagtttaaatgtacaagaatctccaacttctaatttactttcagtgcagagacttttccaacctccagctacaataactttaccagacttataacttataacttctgattcccatggctttccttcttcgttcatcaaaactatctcatgccttcctatgttgaaaccatatcgctttgcgaaatctctgggcacaccctgcatcagtcatcaaattgcattggggattatatatactcacacatacttaaactgtaaaatcaatatatggaatatagtaacaactaactaaccactgaatctctcattaggtttgaagtggtcacagattggctaaaacatgttagatctgatgaaaactgatctggttctgtttctatattctcctcaatttctttctcctttcttgaagattcccctgaagcagaaaattaacggttcacaaatagtaaagagtctagataaatctaaatgctcattgaatagttttaccaatttcatcactctcttcgttttcaccgtgactacaagatggtgcgtattggacctcacagcaactggatcctaaagcagtgacatcgaagaacatgtctcctttgtgtttgaagatgacgaagtcactgattcgaagatcatgtgcctccacaaactctttccaaccgtcggtgagcgtatggccctcaatcttcactttccatgttctcttcgaagaatctgatctcaattttacggtctttccttcgtgtttccccttgatatacttggagaagaacttcacaggaatgttctgcaacaaacgaatagaattgtgacatgagtctatatgttcagagagagagaaacagagagattacttacgatgtggctcttgaaaccgg

SEQ ID NO: 33351 - DNA, 617 bp, Arabidopsis thaliana landsberg
atgaacgttttctgcccttgtggctactctcggctcctgctgcgtagtattcatcatgtttgattgcttatcctgtcctcacgtctcatgcggattgatttgttgttgttgttgttgttgttgttgtacgacccggtgttggtgctggttttggtgttggttctggttttggtgttggtgttggtgctggtgttgtttctggttctgactgtcggtgctggttctggttctgattctggttctgattctggtgctgttaacacaaaatacaacaaattatatcattagtatactatcagtatttgcctagttggtttagatatcttgctctatatcaaagtgtaagtaatataccatttcaagtggttttggtaccagagctgatgtctcttgatatgtgactagattcgattgatgagaggataacaagaggttagtttcgtctattgtagagacgggtatcaatgcaaaagggtcaacatacggatttatcgcttctactgttgaatacggcaggcaatcctgttaattgtacgaatccaacagttgtattattcataaattgcaaggaaatccatgagagataagatactgaagccttccaataacggaataca

SEQ ID NO: 33352 - DNA, 687 bp, Arabidopsis thaliana landsberg
tatcaatagggtttaaagcatcactaagcgaccttcaaggttttataaaaggggttacatggctgggaattgggtttaaaagattagaaagccctaaagaatgatcaacaagggattttaaaaaggatttacatgctttgcaatagtttttaaaggattagaaagtggtaaagaatgatttacaagggattttaaaagcttttaaaattgtttaacttgatttacaatcgttaagaagcataagtaagtggcatagaatgattacaaggtattttaaaaagggtttccatggtttacaatcgtttttaaagggattttctaatatgataatttttattattgttgtgtttaggaagttgatgcagctttggagttgatgaaaacgaggaaggaaagcaatccataattctgcaaaaacaaaagagttgtatttgttggatcgtctttcttaaatgcgattgatgagtcatacatggagtttttggatgacaaagagggatttcagtttccatctgaagaaatctgtaagctgataatagagaaagaaaccaagtgtatattggctcctttctatatcaaaggaaaatactgggttgccttgctaatccacatggaacagaagacagtttgtatatgggaatgtgcagcttcttatttaacagaagaagccatgaaaacatatgttgg

SEQ ID NO: 33353 - DNA, 2556 bp, Arabidopsis thaliana landsberg
ttatcctccacctccacctcctcctcaaccaccggcgtttgcttaaacggcgtttgcgttgacgcgggagctcgtctgaatctagcgtgtccggttctagatctaccgagtagagaaatgaccttcttgaagctgttaacggcgacgtcagtcaccgcggttatctccgtctgactcttctccgttggttgttgactttgaccgatcagtttaagaaactcctccacaccgtgaatccctgcagaagcagcttctctcaaagcggtatcttccattttcgccgccgcggcgattgcaggaaaaccatcacctcctcctccgccgccgctgtagctgctcatcatcagctcaacagtcatctcatcaaatcagagaccaaccactcagattcttattaaaggtcaaaggacatgtagataaatacaaagattcaacagttttcttgtaagttgtgtttttggttaaagaagaagatgatgatgatgatgaggggaagaataaatgaagagagtgaaaaaggaggagagtcaacgatatgcgtttctctctctatatctttaggtatgtgttgatagtgcatcagtcaaatcgaccaccactcataggcttacacgtgtgatcatttgtcaagcgttttgacactcctcagcgtcaatgattttaaatttggagcaagtggagctcgaattatatatatatattcgttattattattcgggaaaaatctagatattttatatttttgaggctgattagatgctaaaaatataaaaatcaaatttttaattaaagaaagatctaaaaggaggaaggtctctctcttctctctatagtatttttcagagagagacttttctgatgtaagtttagaatcgccgtccgggtttcttccggcttccgtcgtctgggttttttctggctattgtctcccgttgatcgggatttagatttccttttgggcaatttcgaattcggtttcttcggatttgtttttgttttgtagctttaaaatcttgatgatgaaacatgatgacaggcagaatcttcagtttcgaagaggtgttctctttgcatgatttagtttctttctgctttgattggcttcaccgttgggttctgttttttttggctccaacagttttccggcgatgtgtgcgttctcgacaattaggttcgtttggatctactgtgtttaagacagtttcaatttctccacgactaaggttaggtcaaagctcgtttcctatgcaattaagatatgcctttgctgttcttgcaagagatttaattgttagacaagtttgaactactcagttttctctaatttcttttacccatttttgccgaatcttttgtgattcttgcaatcggatgagattaggagattgatgtttgttctgtaacttttaatcggtgattaaaaagaagtctcgttgaccggtgattttccgacgacgtttctgattcaccaggcttgagtctcatgtgcagtggaggttaggcctgggcacgaagcgaatatccggaaaatttgggatatttgttattcgattcgttttaatcgaatacttaattttattatttgctttgatccgaaaatttccgaatatccgaaaatacgaatatccggatttttgtatgatatttgccggatatccgctttgctttgctacatccaaatatttttttatataaattatttaacatagatttcaaattttttaccttatgacttacgagtgtgagattgagagcaactgaaaattttctggttataaattctgtacccaaattgagtgataaaaatagtgaaaggtcgaagaaaggaaacagaaatgtcgctcttatatttgatggattggaaactaaaacgacaattttaggataaaatataaaatatgaaacaattttattttaaaaaattccacttatctaataaaaactgtgtcacaaaaaaaaacacatgcccaaaggatacaaatacaagcccaaatcccaacatatacaaatccacaacctatattatgatatatatacggatcgaagcgaatatccgactttaaaaaaaatagtatttgttatttgcttcgatttttacgaatactacattttcctatttgctttgctccaaaatcttatggatcacccgcattttttgaatcaaatcaaatcgaatagcgagtcgaaacggatcgaacgaatattttgctcaggcctgaacacggggcccttggctttcatacctcaggattacacacctttgcatggtttctacaaaggtagattgtatgtgtggccaatagaggatgctttcaatacagaaaattattttacttgggacaccaattaaaaataagttccacgtcactggggtgggcaatagaatggtttggttaataaccagtaaagtgggggtattaaaatgactttctcattgacagtgactgttcaagtcaaatctaactattatactatccaaagaagcaaacttcaaagaaagtgaaacaccaaaattggcacatttagctactaatcaaaccaaagcatcagaccaag

SEQ ID NO: 33354 - DNA, 597 bp, Arabidopsis thaliana landsberg
agggaggtaatttcgtcttgtgtataaatatctaggattatacattttatggagtatatatttagagatctgtagtaaaatttgtagtataattattcattttcttatcatccgtcgacgataagatcagataatttggtgctaataaatccgtgaaaagagtttatagttcagtggtttgtcgtcagttttgttgtaactttgttttttctttcgtatttgcaaattggcttcgagtaatcatgttagattgcaactgactatatgaagttatttgtccatgtagtagcaataccaaaacctcaataaccggagaagtactaaaaagcataccataagacagttttggtacagaaaaccaatatacatacacttttacatatttgaaaaaacatttttcgccttttttggatcattcatattcatatttcatttagattggtcaagaaattagcaaaaataacccaagaacaagaaataatctcttacctttgcatcgtcggatcattcgagctcaagagctcgttgtattggtttacgacctcttctacaggctttcccagatacttggcaatgtatccaaagtctactttgtct

SEQ ID NO: 33355 - DNA, 3357 bp, Arabidopsis thaliana landsberg
  unsure (1)..(3357): unsure at all n locations
ataaaatgttctatctgagtctgctttggcatccacagtgagaaaatttatgagacatgcagagcagtcaggattcctagatgtcaagtgagttcatgaagaccatttgaaggcgtcctcttgtaccatttatgcagaattgggataacttagattagttgtccaagatatactgttttatgaaacgtttgctattctatgtagttataataatccattcatattgtttatctttacaggtcattgattgtatcatcacacctggaatttaggagcacgaactcatgaaaaaaatcaaggaagaagaagacgacgttgacgtggctgatgtggtggttgaaagttggttgaagcgtcgtaaagagaactgtctaatcatgtttgttgagctctaccagcaggatattcaagctctgacgatcaccgcaagtccaaagattgcgggtgcggaggatattcccgcaataggtggacaagaactcctgagtttggtttctttggtggagatgattgaaaacatggataagaagatggtagaccagctgaatgaaattataacaatgatttcagatttggataaaagagttgaatcgttggaagcattcaaggatgagcagaaagcagagcagggaaaggtacgtattaataattgcgtaatactgagtaacactgataactagagtataattgcgtaatactgatataacttcgttcacccgcagcatcaagatgagatggaccaagaggagaaaaggtgaaccgaaagagaaggatcaagaggaggatattgttcaagagaaagatggtgatcaagaggaggatgttgttcaagagaaagatggtgatcaagaggaggatggtgtcccgaaagagaaggaacaagagaaagagaaggacccgaaagagaaagagaaagagaaggacccgaaagagaaggatggaggtccttcaaaacccgtggaagcaaacgtcacgagaaggatcactcggagaaccaagatttaggatttcaagccttgtggagatttgaatttggtatgccgttttttggttttaggatttgaatttggaatgtttgcatttaagatttcaattttccttatggagatatgaatttggtatgcttttttttggatttcaatttggatatgaattggaatttgatatgttaggatgtaaagataatactgagaatacaaggcaaatctatgatttaacgataatacagagaatacaagggaatactatgatttgaggataataccgagaatacaagagaaaactaagatttaacgataatacagagaatacaagggaaaactaagatttaacgataataccgagaatacaagggaaaactgagaatacaatggaatactgagaatacaatggaaaactaagaattgncgataatacagaaaatacaagagaaanctgtgaatacaatggaatacagggaatacaagggaaaactagataaccataatactgggagtactagagaatactcaataaaagtcttacaaaacaaaggcagaaattaagttcacacaaaccaatcaattcctcactctccacaacaaatcctccacaaagtccccatctttttctggatttcatccaactccgaacgcatttgttggttatagtactccaagctttgaatcttttggtgatggttatcaacttgctctcttaacctattcacctcttctaccatagctttatcccaaagttttcgaatgtgtaacccatcattctacaaaatatgaattctaacaagcttaatgaattattctaaaacaagattgatgatatcttcaatttaccttataattggtgcattcatagtatctttttcctttgtcaccatctttctcagagattatgtcaaggatgcgtccaccacaaggacaaattggcggaattccctccatcattgccacttcttctagttgttgcattatcctctttgcgctcttcatctcaccataccatgggtcactctcacacaatcgatccatagctgattgaaggaattttgagagagagagaatggagaaatgattttgagatcgagagagagagagaattttgagacggagagagagaatgatttgaagagagagagagaattttgagtgagagagagaagagatatttgtttcgttttggggggaatttggttttggtgggaaattttaatggatttggggggaaattgaaattggaggaaaattaatttttgtggagaataaggtgtttccacgtgtgcgccgtaatttatacacgtgcgccgtttttttatatgtagttgtaccctagttattggttgtacaaaatgtccacgtagttgtattttcttgttttatagtttaaacagttttacatatcattcaaaatgatttatttagttgttcagttgatagaagtctatcactattaaattctaaatgtttagtgcactcacatgttaacaatatataaaattgcaaaatttcaattctaagttagagtttatatcaaaagtgagcttaaaagtacaaggaatatgtaggatagagtctattaacatgtattttcaacaaatatttttcctctttatttaattcgtttaaattaatttttaagagttctttatctctttacagtctatttaatatttgatgtttcaaacaaacataaattcgaattttcatatcattcatagtttttcttgtattcccagtattatcgtcaaatcatagttttcacctgttttcttagtattatcgttaaacttgaattccgagtgaaataaaatatagttttacagaacgaaagtgtagtgttacatagttgcacacaacgcgaataaggtttacatgattaaaatcaaatactacgggtgccaaataacaaccattgcagagactgcctcggcctccttttgttttgagtcctttgacgttttggacgtctttctctggtggatgaaaacctaagcacttttgttctacccttcttctttttccgaggcagaggtaataccatcaacgctttgatgtcatctgggatatcccactctgatctatccgagactaaataaataattctataatacgccaatgcccacaactccgcctataatactttgaaaccaattcatgtaaatcaatacctcgagttcttgttttatcactctccaaggcaatgaaagcggctaatgcatgaatacaagaatacttttggatatcaataaccttgcaactgcaagttttcaagagcaagttgaccaaattaatagttgttgcctttgatattccagctgaaatgtgtttagctctgtcacttttagtttttcagcgtcaacccata

SEQ ID NO: 33356 - DNA, 1877 bp, Arabidopsis thaliana landsberg
gtgtagatatattataccatgtccatgatcgaaaaatggttaataccttgctggtttgtcaaaaattacaaaaccaaataaatcaaacaaaaagtatagggaatcattaggttagctagtaaacattattggggacagttaccttaactaacaaactttacgttaataatattggtggtttcagctaaatagtctacaatcgataatacgacagccttacctaatcaaactagtttgtttcccaccatatattttataaacaagccatcatcatcaccaaattaaagttatacccactttctagccgtcttattgtatatctttctatttatttattgaaattcgagacatataatataagctccaaaccattccatagaaagtcgtattaaatactaacatcgttcttggtataggatgatgttatatatggaggtagatgacttcaaactctaatgagaagctttagggatttcattttttttttaattttatttttttattattggttcagcatggtttcctcctttcgtaagggtacgtagttttgttttgttttcttttttttgtcatacatataaaaaccttccacaaagtacacagaacaagggaacaaatctcctatctcgaccaagatcagatgttgcacaagacctgacaccaagaccaagtacgtaacagtatattctacattattgaaggtcatgatagttttggttatatcgtccgtaagtgaaaaacaatttctcgacttaggctctgtttgtttcatcatttaacattttcattcaaatgatccatttacatgattcatttaaatgatgcatttgaatgatgtttctagtatttgtttaaccatttgagatttaatctaaatgatgcatttaaatggatctttatttgtttgattattttgtagttcgtccacattttagtaggtaaaaataattttacggttttggtgaaaaaatattttacggttttgacaagaaaacatgattttacgattttggcggaaaataaaattttacgtttttagcgggaaaacgtgatttttgcggttttggcgggaaaacatgattttgaggttttgacgggaaatcgttattttgcggttttggggggaaaacatgattttacggttttggcggaaaaacattattttacggttttggcgggaaaacgtgatttttgcggttttggcgggaaaacatgattttgaggttttgacgggaaatcgttattttacggttttgacgggaaacatgattttatggttttggcgggaaaacatgattttgcggttttggcgggaaacatgattttacggtttgggcgggaaaaacatgattttacggtttgggcgggaaaaacatgattttgcggttttggcgggaaacatgattttacggttttgcgaaaaacatgattttacggttttgacgggaaacatgattttatggttttggcgggaaaaacatgattttgcggttttggcgggaaacatgattttacggttttgcgaaaaacatgattttacggttttggcgggaaacatgattttatggttttggcgggaaaaacatgattttgcggttttggcgggaaacatgattttacggttttgcgaaaaacatgattttacggttttggcgggaaacatgattttatggttttggcgggaaaaacatgattttgcgtttttggcgtaaaaataagatttttgcggttttggcgggaaaacatgattttgcgggaaaaatgattttgcaattttggcaggaaaacatgattttgtagttttggcgggaaaacattatattgtcattttggcaagactgtatgatttagtggtataccacagtggatatagtttt

SEQ ID NO: 33357 - DNA, 443 bp, Arabidopsis thaliana landsberg
ggaaaaaaacagacgagggtgtcatgattatgactgcagagagttttgtgacttttacaatatgagtgccgcctggagaccgaggaagaagatccatcacaagcttctaataccaccactcatttacactcttcaagttatcaatgacaaccaacaacggtatatccctcaatagctctcttctaaccttggaaaccgcagcatcttcttgttctactcagctcttgatccgccgatatatcctaaaaattctctatccctgaggtcgacttccaaatactgctcaagattcatcataggtttgtcttatgtaacatctctcaccacctatccaaagaaccatcttatacctatggcggatcctgctagcaaaatcgagaagcaactcatttttatcaacccctgtttcacctgacacgcaagccacgcctttcccgtaacaa

SEQ ID NO: 33358 - DNA, 619 bp, Arabidopsis thaliana landsberg
agcttcgtcacttattgactgcattttcttgggtttcagagagttctcatatgtgtgtggccaacgaatgttctgtttgatatcacacccaagctgatgacatagagacgaagcaagtccatgaacttctcagactcatcgagttggtcagaaagcagaacaccaactattccgtgtgccgaggagatgtaccatatgataaaggttaaagagtttaccacttttgtttccatttgcatccatctctcgcgatgttttgaatgctaaagaaagcaaatggtctctccctcatcaggaagaaaatgaaaggcacaagaaagaacaagaggagctagaatcaaaagggtattcagaagagcagctcgcagcattgatgaaggagttacagataatgaatgaacgaaacctcaaggcaatggcagagatggtataaactcctcatattctttcacatataaacataagcataagtggtgttgaagttgtcattaacaatatctttttaatttcctcagatggagaaaaatatgaaaatagctatggaggcgcaggagaaactctttgagcaaagagaaaaagctcaagagatgagctaccagcataaattggaaatgcagga

SEQ ID NO: 33359 - DNA, 810 bp, Arabidopsis thaliana landsberg
gagggccttaaaccttgttagtcgaactaagatcgaatcgaacagtatttcagttaatcggaatttttttgtatagtaattttctcgtcccctttacaaatgacgaatcaatcctatttatacaaactaatcgaatatctgcgaagtaaatggacgctcgaatcacgccgcgaatcacgtctcaataatgtttacgtttcacatagccaccttgcgtattaacgcattctcatttactccgcagatttccgttacgtaacgcttaaaatgattcttcaaatcgacctggctctggtgggcttatctcggcccactccacatttgacaatgctggactcatcgttgaggctttgactcaggcccatttaaagaatgatgacggatctcgggtcggagcaaagatacgagatccgacatccataacttgcaccccaagtcttcgaagtgaattaattcggagacttattttgcgtttaattcacaatcccggtaattgtggtatcacgtcggaacttccttccttatccgcataattctgtagccaaaaaggaaaataaattctcacaattcacgagacttttcttgggaaaagtgtgacggttcgtagtcttagggttttcgttttcccgctcatcagcttccctatctaaacgagttaacctttcatcttcttcactttcgcttataaactgctgcgatctactctcgtcatcccaaggtaatttctctcgatcctccatctcttctaattccgttatttagctgctaggaatttcaccggaattgcttagatctagaaacgattatggt

SEQ ID NO: 33360 - DNA, 1882 bp, Arabidopsis thaliana landsberg
taagttatgaggaagctgagccacactgtccaataattgaatgacgctagacatgtttggtctgatggctgctactggatgagaacagaataagccaagtttcagaacaagtgccgcttgctcctcaacatattcctgaccaatcttatgatcaagaacctgcatgatatcttcattctcccaacactctagcacccaatcagtcagtaccatctctctttgcgatgctcgtggcaatatgggttttcgcccgcaagcaatctctagcatcactattccaaacgcaaatacatctgatcttgtacttgcctttcctgttcttgagagctcaggtgaaatatacccaagtgtaccttccaagtaacaacattttgagtgagaagttcctttttggggctataagtctccaatacaaataagtagaatatttaaaggtacctgccacatgagaggtctgaggatcagtcccatgatcgcagagcttcgcgagaccaaagtcaccaagtttagcattcatattagcgtcaagaaggatgttggctggtttaatatccctgtggataatgacctgcacccattgttggtgcaaataataaagtccagaagctacgtctttgatgatcttgaatctctgtgaccaatcaagattcccagtctgttgatggtaaaggaacttatcaagacttcctttggccatacaatcatacaccaagtagagttcacctttgtgtctgcagtagccttgaagccgaactaagttaggatgtttgagacgcccaatggttgcaatctcagcaataaactctctcattccttgtcttgagtcatgagaaaccatcttcaccgctatctctacgttggacactggtaaagttcctttatagactttcccaaatcatcgtttaccaagaacctcagtatccttgaaaccctttgtagcaatatgcagatctttgaaagcaaacctatgaggaccaaactgaacttcccagtcctcaagaacttccaatagcttcttcctcttcaggaaaagccataaactgagactcaagataatgagtatgatgactcctgatacagttaaactgattgtcaaaatcccatttggactctggatccatggctgatgataacgaggaattttgggaaggcgagaggggtctatatctggagtagtcccattcatcttgaacgtccatcccaatatatagtgagatgcagttaggtcccctgtagttgaagtgaatccaacatacataagttcaagcaaatatggagaaagatccttttcaagagaaagaagtggaatctttggcttagggacataaagaggatgaagtgtgacattaatctgtttctgtttactgtcatactcaatccagatttgcataggttgtccactgttaagcaagagacttcgaaatgtaccgttatccatgtaataacccgctaaagcaactgtatctgaaactaaagtattgatatcaatgccaacatggttagcatctttgtcctcgaattgttggtcaactttagtatcgagctcaacagctactatatgattttttggatctcccatgttgctcctattgaaaagtccaaggtaagtggtgggaaaagtaggagacagatctctcgttggacagataacaaaggcaattccatatcctccatatattccattatgaaactcaatagagaaaacgaaagtggtggagaaggaagaaactgtaccgttcactgagttcttgaatcgaagttggtcattatagaaaacttgaccagctgtttgtggtgtaaaatttgtgagtctgatcagaaccattgtgtttatatatgctgatccactgtgtacatattttcactggtgttgaactctaca

SEQ ID NO: 33361 - DNA, 748 bp, Arabidopsis thaliana landsberg
gtagcagaattaagtggtaaaccaactaaataaaaggaacctaggaaaaaattcccatagtaacatttttgttaaggatcaagaaagagtacctgagggtttagttccctatttgttatattgtctctgccatgccaataataacttcccttttccttacctggtgttttaatcaagtcattaatatatgatgtaggacactaggagtaatgtattcaatgttacttgtcactaagatgcttgaaacaggaaacacagaagctgttgaagagtgaacgcatcctgcaactctataagtatgactccatgttgttacctatctgagaagtattgaaccatttaaaccatgcatctagccgtacaaaagcccggtcaaggaatgacaatattttatctctgtctgcctcgttgaatttctctgtccgtatcccattgatcaaatctgaagaaaataaaaatataagcaatgtcaacatggagttgatttgatttgtaaaccttgttctctacataggatcaattgagacttatactgagttggtcctaacgtagtgtatatgcatgtgtgttatcgtatatagtgatgtatttggttgtttggtcatccgattgtataggaagaatgttagaatccataatagcgtcaagcagtaatgatgtatattctgtggctagtgagagtgtatgacctttacaacaatgtgaatggtgtgtttgcccagaataagctaatgaagaatcgagttct

SEQ ID NO: 33362 - DNA, 3251 bp, Arabidopsis thaliana landsberg
  unsure (1)..(3251): unsure at all n locations
tggccacccaatgtttttcggatttaaataaaatccgtcaaggtggttttggaattgtttataaggtacattagcttacaaagatcgtcggaacttagtaagcaaacaaactatcattgttttactataaagatcatttttacatatggttatttctactattttcagtaatcaactttcactggaggagaatgttcaaacattaaagcaaagttttccttgttatgttcagtgagtagtaattttcaattttccactaaacataatctccaattttccacatttccagacactctacaaacgtaacgtttgaagacacaaattctatctcaaattttagacataacgaacaataaccattttaagagatcggtgttctgcaaaaccagaaattacggtttacgatccggtttaagcagaaagaaaacctattgaaagtgcttctttctacaagaagacaaaaaccaacaacaaatgtaagaaactagaccagaatttttctatacaaattgaatcataaacccaaacaatccaatgaaaaccaacaaaccggtctagaagaaccgaaaccaaacacaaaccccaatccatcaaagtattattcacaaagcaccaaatgtttggcagagacctttaactttgtatgaagtatcaatcaaaccggctcaatctagaaaccaaaaccaaataaactactactactagaaaaatcatagagactcaatgttagctttgctcatgcatacccaatgcaaataccagagttagcaggaggtctaagattcttgaagagaaataacggtttcgaaagcaccaaccaaagccttaactttgcttttccgagcttcgacgagtttactcgctgtttcttcaatgacattgttgaacagtccctgtgcatctttctcctgaacatcttgatgcctcaacacaactttttcaccatcctcattgagttcttcttctctgatatcttccctcttcttaaagcttctcctaacttgtgcatctcgcgttttgtcttcccctagatcccttcctcgtctaaacttgagcttccttgcactctcacccacagtatcaggatccacaatttttccccttctgaaacgtaatttccgtgcagcttcatctgcagaatcaccctcctttctcgccactcttggtttcttctctccattggacaatccaatctcttcttcttcgctctcagcttcgttgcttcctgaagtgtattcgtactcctctggttctgaaacagtactctcatcatcttttggagttgattggttcggtagaagaggaggaagaaaaggttcaacaaaaccttgctgattctgatcattctcagggacgacattgttagttgtttccatttcaacaacgtgcaatgttttctcctcgactggataatcatacaactgcttattaggttcatcagaactattcacgggtcttggtttctgattttgccagcgaggaagaggaaaatgcagcctttaagctctgactctttctcaaacttgaacttccagctagtcttactgatgatcctggagaaagtgacgctcttggagtcactggaaccttctttgacacaactctggtggagacagtagccttctttatctttgcatcttcgtcttttccatcatttcttttacccattttaggtttcaaaactggtgaagcaacaactttttcatggtttactttagatttcgatgttgctagcgctgaatatgatttcgttaaaccttttggcttcagggcatcaacgtttcctgatgaacgagatcccaaatctggtgaaggtttaagtttggaacttaatgttgtcttcttcttcatctgcttcacaggagtttcatcacaagatgatatgatcaatacctctggcttcctcatcccaccagagacaccactcgcttgatacttcacaacctctcttttaatcacctcaaaagaatcatcagtaccctcgtttttctcgacttccctcaccttcttcttcattttagaagaacccggcttcanagtctcattcaaatcatcatcaagagatttcttgaagatctttttagtactcgaacgccatggtttctccacaggtatctgtctcttcccatacttacacaaatcatgacacgaaccagttgatgctctgagataatgaggaatctttttctctttaggctttgaagtcattgccttccctgtagaatcacctcccggattcaaaccatcttccttattcatcatattctcaggcgttacaaatggtttcacaatgtcttcatccatcaagaagcaccaaaacgatcacaacaatctgttcataagttcagacatagacaccacatcaaacagaatcactactttcatatatatacaaacaagaaataaacatgagatcaatatagccgtctaaatttgcattgctttgtgaatttaaagtgtagacaactcaaaaaaacagatcagtgaagagattaaacacaaaaaaaaactaacagaaactaattaaaaacataaacactagaaataggaaatgtcataagataaatccaccaagcaaacaatatatatccaatcccaccacatgattccaaaacttaaaaccctttttctgtaacttaaaacgaaccattttagcactaataaccaaaagaacatacctatcaaaaggtttcaaatttagttaagcaaagcttgaatcttggttatcaaaagaacaaatctgataaacaaaagcagagtgaataagttatcttcaacaatgtcataaatgcaacgtcgactataaagtgaaacttcaccttgaagcataaagatccatactttacgtttctattgaaaatgaaattgtataaaccccaaaaccaaattaaaaaaaaaactcaaaattgcattcacattaccgattaaattggcttgcataatcattctgatctcaaatgttattagccaaagtaataatttttacctgttataagaactgattcaaaagcaaatactttttccaaagacaatgactttatcaatggcgaattcagaaggaaaaaaaaaagctgaatcctttttcttctgggtcggtgtttccttcctttctccgagatcgtgcaagcgacttaagaaaagggtttcttatttttgggtggtgtctccgacattatggggtttccttaacgctggtggtggtggtggtggtggtgggagagtacttggggggtcttatattattgcccaat

SEQ ID NO: 33363 - DNA, 1086 bp, Arabidopsis thaliana landsberg
ggatattagattggtgaagggtcaaaacgcagaaagggcaagcagctggctatcactcctgctaagaaaaagaaacaatatcgcaaagactatggagtatggttttactctgactcggataacactccatagtactattgtttcttgctgtccagagtataacacttaggacactacccttatactttgtgaatttcacttttgggggtaaggtctgttttttgaaatgtttatagacgcttaggacacttagtgcctttcaggtttaatgcttttggctgaacaatctctcttagattgcttcaagttacagtctttattagatttcaatgttgtagtttattggttctcaagttggcaaatttctaggataggatcaatcttcttttactagatccaggtctcttcacactttggtaagcaagaagcgctcttcacacaggcataagatgcaagctttaagttcagttacgaagctttgatttcgtttgctgttcttattgagaagttaagaagattgactttcaaacactgctaccatagtttggcctcttctctggtggttgatcatcgagcatccagacttctcccttttgatgtttatagtcttgactcagttctttgtaatttctttctttagacgtctttggattgtataatatgctctctgtatcatgaatggttgtacgatatgtttcttataaataatatcaccctttggcaaaaaaaaaaaaaaaaaaaacaaaagcttcctttctgagttttcgtcgattgattggtttaaatcctgtcatatcaatttgttctcgattctccgcgaccatgcaaatttagggacttcattttgtttgatgggcgcgaatatctcgggaggctcaccggtgatggaccggatcgatgacgcgtacttgtggaaactaaggttggaggatgcacctgataatggtgtagcgtggattatgacacggctggatccacctgagatttgccggcttgctcgtctcagcaggatggtcacgggggcttgctgagctgagtgcagctgggaatcaaagttgcctgcaaatgatcgcgtgattgcacaca

SEQ ID NO: 33364 - DNA, 3922 bp, Arabidopsis thaliana landsberg
actgtggttcatcttgggattcatgacgatgcgagtttgggacctgatgatttcatacatatcttctttagcttgcagaagaatgcgtctttaagacggttttcgttacaaggctgcaaaggggtaagaggtgatagagtattggaggcaatcactgagacattgcagattaatccattgattgaagaaattgatttagcgagaactccgcttcaagattcagggaaagcagatgagatttatcagaaactgggacacaatggtaggaagatagatgaagcagagacggatgattcactcaaggatatgccacttactgagccaaagagcgttagagctttcctctgtggacaaaactatgcaggaaagacaacactctgcaactctatactgcaaagttcgtctgcttccggttttccttatgtggagaatgtgagaaatttgatgaatcctgtggagcaagtggttaaaacagttggtgggatgaaaataaagacattcaaggacgaggagacaaagatctcgatgtggaatcttgcggggcagcacgagttctttgctcttcatgatcttatgttcccaagcccgtgcttcttcttgatcgtattgagcttgtttaggaaaccgagcaataaagaacccaaaacaccagcagaagtagaggaagagcttgaatactggcttagattcatcgtttccaactcgagaaaagcggtccaacaatgcatgaaaccaaatgtcacaattgttctcacacattccgaaaaaatcaatctacaatctgaaagctttcaggcaactgtgggttgcattcagagactgagagataagtttcaggctttagtggaattttatccgactgtattcacagttgatgcaagatcatctccttcggttagtaaactcacacatcatattcggatgactagcaaagccatccttcaaagagttcctcgggtttatcagctctgcaatgatatagtacagctcttatcagactggagatcagagaattcaaacaaacctattatgagatggaaagcctttgcagacctctgccagtttaaggttccttccctgagaataaagtctcgcaacgagaacattcagattgtggagacaagacggcatgctatagccacatgcctccaccaaatgggagaggtgatttactttgatgacttgggctttttgatactagactatgaatggttttgtggggaggttcttactcagttgataaagcttgatgtaagaaagcaaagcactggggaaagaaatgggtttgtgagcaggaaagagctagagaagactttgagaagtagtttacagagtccaattccagggatgacctcaaaggtacttgagcactttgatgcgtgtgaccttgtgaagatgatgaagaaagtagaactttgctatgagcaagacccttccagtccagactcttcattgttagtcccatcgattctcgaagaaggcagaggaaagacacagaaatggcagataaacacacatgactgtgtttattcaggccgtcatcttcagtgcgatgattcaagtcacatgtttctcacagctggattcttccctcgtttacaggcaagggctcaaaatcacttttctgtttctttcatctctttaactcaaaccttaccaatttttcatgttgcatgcacaggtgcatcttcacaacagaatcatggaactgaagaaccaacacggggcgacttatagtcttgagaagtacctcattgctataacgatccatggtattaacattagagtggaacttggaggacagttgggaaattacattgatgttctggcttgttcatcaaagagcttgacagaaactctgaggctcattcaccagctaatcattccggctatccagagcagctgccgaggtgtaatcctccttgagcacatcataagaccacaatgcgtccaggacttgactccaccgcgattccgacaaagccagtttgtttccctccacagactaaaagaagcattatcatcagttcctgcagagactatgtatgactatcaacacacatgggactctgttctagattcaggtaagactgttctaagagccggatttgatttagcccgcaacctcctctctgatgatgatttcagagaagtcctgcaaagaaggtaccatgatctgcacaacttagcacaagaactacaagttccaacagacgaaaaccccgaagcagataatcatgtaccggtgaccaatgagctggaaaaagttgatcctagcttcggtggaattgctaaaggagtagaagcagtacttcagagactgaagattattgagcaagagatacgcgacctgaaacaagagatccaaggactgagatactatgagcacagacttctgatccagcttcatcacaaagtgaattaccttgtcaactataatgtccagatggatgaaagaaaagttccaaacatgttttacttcatcagagcagagaactacgggagacgactgatcacatctatggttcctggcatggtcgctctaaggatacacatgttatgcgaatttaggcgggaaatgcacgtcgtagaggatcagcttggttgtgacgtaatgcagatagacaaccaagctgtgaagtgcttggctccatacatgacaaacttcatgaaactggtgacttttgcattgaggataggagcaaactgggcagctgggatgggacacatgatacctgacttgagccatactatcgctcacctagccaacccagctgtcatgactggagcggccggagctgcaggagccataggggtcgctgctgcattgggtaggaaccgaggcagagatagagatattcaggaacaagaacaaagagcagctcaacagtggctcatcgattacttgagggaacagacttgctcaaccgggagggatattgcagaaaaatttggcctctggcgagttagatacagagacgatgggtccatcgcctggatttgcaaacggcatatgatcaccagagcccatgaagtgatccaagttcctctctaatggttgctagctagctacaaataaacagtaagagaaagtagtttaataggcaaaaccattttcattaaattatgttgcattacgataatgttttgaatcttttacttacttactgttgaatcccttaccttttattaccacatggtatgaagacagaaaagcaacctcaagatcctgtgaaaaggacatttcaactaaccaaaaaacatccaaacatttgttctcaagattttttcagaaagctgaatcattggatcctttgcctctctctctccccacctatggacctcctctttgatggtcacaaagaaaaagtaggaccagagagtgaaagtcacaccatatgatgattgcacgaataattaagcaatctaagcatttatcactatgctttaaagattcttgtggatgtaaaaagcagtaactcagaaaatacaaacatgattaggcagcagaagttcatataatgcgtacatagttctaatagagtaaaggctagtgatacgtaataataactcacatcaactaaagcatcaagctgaccagatgggagatacaacatcaaatagtacattataaaattacatcattaggattagtctttcttcattagaaaagtctaagagtgacctgcgttctttctctgaacttggtaaaagagatgctcagaagaaaggcctgctcccatagaacacacgggatccgttgttgctctttggtgttggcagcttctgagaatcagagcttgaattttctgattttgttgggctgtcaatgtccagaggaagcttcatcttaaacagtgaatctgtaaactgttgcatgcttttcatgtacatgtcgactatatcctgctgcaccaccttt

SEQ ID NO: 33365 - DNA, 1026 bp, Arabidopsis thaliana landsberg
gtccttttgagagacgaacaagtcattctattgttctcattcagtactttacaatttacccctacctcctctagctagggcgattgtaccttactgtatttataataatctacaaacattaaatatttgtcaccatatggtacaaatgatccaatcttctgcaagaaaagatttacatgtatttgttgtgaaatgcaccaaacaatagaatccatcagtcttgtctatcgtgagtatcctcgaggaggctggtatattacaagattagagtttttatgacaatggctatgaaactttctcatgtgggatatctaatttttaagttcaattcttataaatgtagctagagacattacaaatcttctgaaccagcagaatcgggacaaagttagattcttctaatttttaattagtattcaattgaaaaatagaatttttggagttggaaaataatatgattggccatgtgcaaagccgtaaggccggccaaagattggatctgtaaattctatcgatcattcgccaaccataaaagtaaaacaaacaaatttgtggattatatattacatgtatgcatgagaaacatacaaaataaataatagagatgaataatttgatttcctgataaagactaaagtgttaagtgtactactccacgaattaataaaaagacatctttagagaagaaagtagacatccaacaaagttggaacccgtgagactgatcggtgatttgctattttcttcgtctcaaattgacaacatacatccctagtttaaagtttaaacctgccccaaggatactcaggtcaatgatccatcacatttactagcatgtccattacttaactggtcgtttttaattgaatctgaaaaagttggaccttttatcggattatttagggtttgggccctttgggcccgggtttttctctgccaaccatcagccaatacattttgttttatatttgtcaagagaagatttataaaaaaaaacaagttcgcaaatcgaaccacaaaaacgat

SEQ ID NO: 33366 - DNA, 410 bp, Arabidopsis thaliana landsberg
gaagcagtccggaatttcaaaaagtcggggagcacaaggtttacgtttactatgtcctaggtacgaacttcttgtttgagaccatgcaagagggcttttctacttagaaatataatattccgccaccataatactcaaatcgtggcagtatttgtccgggttaagaactgtccacctctgatcaaaaagatataccttggttatatttcatctcttcaacaagtttcgtaagaggcagagcggccctattgttccgatggagagaagaacctatgattagcttttcagcaatcagccgacccaacactttgagtcatttcaccgatatcataaacaatggggttgacagggcaagctactgctccaagagtatataagtactgcagcagccggcgggtacttacgtggag

SEQ ID NO: 33367 - DNA, 4577 bp, Arabidopsis thaliana landsberg
tatgaatattcaccgtatatataagatgggtagaagaaaataacatattctatacataaatcatcctttggccagagaaactctcacacagttttacacagcattccaagaagacaatggtggagtgtcggagtttttgaaggttggcactgtggccatgtatctttctcctttcacagactctggttgggcaatggtctcaagctcagacatctcttcaggagtgagtttcactgataaagctctaatgttctggttgaggttttcaatcttagtggttcctggaatgggacaaacatcatctccctggtggtgaacccaagcgagggctagttgtgcgggagtgcaccctttcttctcagacattgcagaaactttctcatagagaatcttgttgtgatccaagttttcctgttggaatcttggtagagcctgcaataattgagtttatatataaaatcatttgatttatccacaggttatgtaaggttcatcaatcaaacaagtcatccaaaaagcctctgcacttgcctttctgaagtcattattgtctaggttctcaacaagcttaggtcctgatgcaaagaaacctcttcctagaggactgtaagaaacaatcccaattccaagttccctgaagaaaggaagacaagacgttacataattgatggatttatgcatcatgaaaggatgatgaaatctgcatacctgcaggttgggacaatttcttcttccacgtctcttgtccacaaggaccactctaactgcacggcggtgattgggtgaacagtatgcgctcttctgatagttgaggcagaggcctcagacaaacctatgtactttattttaccctcttcaattagcttcttcagttctcccatcttggtattgacaatcaaaataaatggtttaagtttagcaaaaggtgccagctttctataaaggtcaggaagtgtaagcgaactagagagcttagaaccaacccttaaggagtctagtcaaacgaaaaatcattaggggaaatgataaaaaaccacactggaaggaaaagtaactaagtaagcatcccacatcagagagaggaaacaatagtaaatggcttatactaaatatcatttcatcagaaattggttctatatgaataagttagcactttctgaaagaaacctacgcagaaaccaaacatataccaagccaaagatgtgaagctcactgagataaactcaagcacacttgaagtactaaagtatgtaacttccctttcatctgaaagtaaaaatgcttacagtgatttcgataggaacacgagtatcaatccgatgctgataatacagatcaatgcaggtaacatctagtctctttaaactagcctcacaagcagctctaacataagcaggatctcccttaatctctctctttccctctgcataactgattccaaatttggtcgcaagctccactttctccctcacaccatccttaagagcctaacagcattcaaaatttcaataatgattgatcaatcattcccatctctaagttttcccaacagagaacgaattcaaatatgttggacaatttcttcgaaatttaaccatctaaaagcggaaaggtcagatggcagattgtggaatttcgaaaatagaacctttccgaggagaatttcattggtttcaggaccatacatgtcaaaagtgtcaaggaaagtaacaccggagtgaatagcgtggtggataagagccatggcttcagtttccggcttgaaagcaccgtaatgaccggtgagtcccatgcaaccaaggccttgcgccgatacctctaggccttggcttcctagctttatcctcctcactctgcaagattccgccatggatttctctcacacaaatctctctctctatctctcgtgtatcaatggcgagttttgaattggagtggtcgagtggagtggtttaatttgacagatgagtgatgatgatgattgaacaaaaaagccaataggtggcgcagctttaattttaacgctcaaatcctggtttgactaaaccatcacttttaaaccgaaaaatatcaattacgttttaattaaaccgaaaataagataatcgatgggatcattcatccattggcattaggtgtttaaactcctaaccctaagccaggtgggacatttaaatcatgcggatgggtcactaagactatgaagagagtggtatagctaaaggtattcacagaatctattcacaccatctgaatttattgtcgtcctcgctcttcctccgtgtgttgttcttcaagaattgtcccactgcttctttgttaatcttgaacacaaagtttattcctctaatctgcaaaatttgggcggttctagttatagaaagatgcataaactcgcttgcacaaagcataagctggtgcttacattgattgaactacacgatgtgagtgttacaatctggcctctatcgagtttttcgccatttacaaggatttgtcgctttccaaggttctttaaagagaatgatccgtagttctctagcttaaccaatgccttgttcaaaacatggagacagaaaagtatagcacattagcaactaattagcaaggaggtaaactaaatttaatttgggaaaggggaagaggatcacctgacgccgagatatcttgctcccataattatatttacccaagtcaatgtcaacattcaggccaccagatgatctcccaataattacctatgacaaataaatgatcatttgccatgtaactaagagaatttgatatgacatgaaaacatccaggcagaagaaaatgatttttcttaacatacctcgcgttttctgacaaaatgctttgaatcaggacaatgcaggacggcaattgccccatgaaacataattgctctttgcaatgaagttcttgtgcattgttccaatccaattaatgcatgtctaggctgcttagacatgttccattctaggtatcatgaagcgaaccatagttgagacaaccatagtttgagagagacataactattttttagcatgcaacagtgtgaactagttacatgattggttgaaaatcaacagccatatggcttaccttccctgttgaagcatgaatctgaatcatctgggactagattcaatttgcggatctggagatattttcatgtgatatcaaagatcagaaaacacattgaaggataatttgtaacacgtttgtgtatagagtaatcagggtttaccattgcatcaatgtcaatctcttcttcaccatccacttcttcctgatatagagttgatgggggttgagaaagttctgcgtccctatcctcagaggtagtagcatttgcatataattgttcatccaaagaagtacaagcacctgagctatcttccattagaggtaagtttctgagtgcagctatagagcaacaaactgaccatggccttctaggtctttcaagagtttttgttaaaggtattggagagatttcaagaccaatattatcatcatgaacgttgtattcatttatacatctgtcgatctgatgacgtgaacacgtttctagcaataagctttcgcagccattaggaggaacaatgctgatcggtattggttcatcgtctttattccacagtctatgatcatcattgatgcacattatctccatagacccctgcatgttgatttcatctccacatctaacttcaattgcagatgatttgtcgccatcattcttgaaaatatcagaattgcttgggacacctgaatcttctttagaccttacatcattcttctcgttatgagtttctgaagaccacttactaaccagagttccatcatcctcactggaccatatagacaaagatttcgatccggttatcaaatcattgtcttcaggaacatgctctgatataacatcaaactctgaagattcagatatgtctgtgtcactgccacttgcgtctacaattgaaccctcatccagaggatcataaggattatccataagattttcaaaccagaaatcactttcaggtctcagacaatttcgtatatcctcatcaccatcaccaatatctgcattattatctaaatccggaaacatatcatcatcaacagacttgtgcctacatgttctctttctcatgacagagaatagactttcaactttccttttgacattggaactctctgatgtatcttcttcaccagaaattttgacatcaccaccctgtcatgtgacaaaagactaaaatcagaaaaaggcttgtgcaaattgctccattgagaactaaaaatctgggatctaatgcaaatagtgggcaaaaaaaaagccatttcaaccatggagattcttaagctacttaagaggatcgatcatttagtgtaagtgtagcagacaaaaacgcgaaattcatgaaatgagatgatcacgtcatttcctttatatatggttcaatgtctgcaatactgatgagaaagatatatagatgaatagagagagatgcacgaagagatccttattgacgaagagatgctcagatactcgaagaccttcttccatt

SEQ ID NO: 33368 - DNA, 883 bp, Arabidopsis thaliana landsberg
cactataattttattatggcgcatcatacgaaatgtatattctaatttagtttatctactctattattgtgcggattgggacacaaatcataggatgcttgattaagaaactcatagttgaaatcatggatgtttctaacttagaagattctctaacgttttaatggcatattccactggacaaatattttaataaactctaagttttgcatatttattttctttgtttaatacatgcatatctaactcatattttagtttaaatttgaaatcaaaagtttgatttcaaatacattgtgttacaatcaacaaaatatctacataatttaaatctaaattattaataagaataacaatatcaaaatagttaaaattttatctaagtttacagaactatagtgatttagtaagcattaaataaaacgaagcataatcaaagttaatattttacagaaatcatgcataggaaatgaaataaaaacaaaaacaaagtcttaacaatacatttttttaagcataatagagaagatttaataaaaacgatggaaatgggtctggtcttgatgtcttaagttctcatcaacaacttcacctagctcacctggttgcattcgttcaagaaattgagccctgaaacaataggaaaacaaaaaagaaataaacagccaagagtaaaatattttataatacactaaaacgttcttacgtgatgtgatccatgttaatctctaggtaactttgtttgaatataattcttagaagcagcattatgtgagattagacattaacaacctaaaatatttatgttttattatatgcataagctatataaattaaagataggatgagaagagtgttaaatttaccttcatgatcagcaacc

SEQ ID NO: 33369 - DNA, 1362 bp, Arabidopsis thaliana landsberg
aaaagggtaaccaggtcatacacaataaataacaaaacgaccattagaccggtaccaaaaaataaaatagaaacttgttcatacagaaataaaaataatacaagaccgagttcataaagataaatacaaaaacataattttaagtcgatgttcaaccgccattccttgcaccttcatcacggaacctacaaaacaaataaatgtggcatggaattatcaataataatattacattccgtttatacaattactgataggtctataatttgcatgttttacacatcctattatcaccattttgagtgtagtttcatccatctttcataacattcaccatcatttttgtacattttgcatcttttgttgagtctaggactagtcttgcatacattctgcattctggagttgtttcaggtgttttggagctattggtgctcagaaagaaggaaaacagaacagaaagtcacacttccaccaacatactcgatcaccagtagcagagagggaagcagtcagctcagcagtccatccagacacttctactatatcacagaggagaccagacagtccattctgccaaatatacttgatcacagaggagaccaggcagtccattatgcaattctactctatcgcagaggcgaccaagcagtccactttgccagtccaccagttaaactcgatcgcagaggagaagaaccagtccatcctgacagctgacacacttactcgatcacagaggacaagaagcagcccaaaccattctgtcaaccaacctactcgaccaccacctcgaccctctgatcaatccgcactcaaccaaacaacctgagcatcgaaaagagaagagaagagaagacccattcgaagcccacttcgaagcccatcaagaagcccactttgagccgacactctggatcacgctgtccatgggccgttaagtgggctcgaagcccgctttcttatcttagtataaataagtctctaagggttttgccctgagacatgcacttttagagacacaaatttcgcactattattcagcagccgcttttcattcctgcaactttgtatttcaatttttcttctaagttattcagattttgctttcatttgcttgttcatctttgtttcatatttttagtatgcaatctttcgtttctatgttattgtatttaagcatgttgtctgagtagtgattaggacttctgaggatgggatagagtagttgtggaacccctggtcaaatctgttggttaagtgtagatttattgaatcccttctgcattagttgtgttcactgcttattcctttatgataaactggaatccgatcccagacgttccagcgcccagaaggcgt

SEQ ID NO: 33370 - DNA, 1047 bp, Arabidopsis thaliana landsberg
  unsure (1)..(1047): unsure at all n locations
tgttggcctgatataatgttacatcatcagattcattacatttaattaataggtgtttaatcagccgaaaattgagatgagttctgaattgtgagtctaataatttagatttttgtaatagaaaagatagtgggtggttagagatgttaacttagaacactttaaaaacaaagtaagaagaagaacttgaccgcaattataaggtccctaatcaaatgtttatttattttggttttttcttttgcagaaaatcaaagagtggacttgcaaattacaaaatttgatactagatatctttgaaatcacatacacgatgggagatattatcaattggatagcgagggggtccatgtcttcctactatatggtaatatggttatgattgccattccctttccgtctcttaaattagtagcatttttctatataccttttttttactatatacccattccacttagaaattttacgtatttatattttgnnnnnnnnnnnnnnnnnntcagtcccgaaatctataattatcatgattttttttttaaaaatatcttaatttttcatattcaaccataaactgtaacttatatctagcacatccgatatgtttatacattcgtaaaagaaccgatcgataagagcatcatagaatcaaccataaagacagtagatacattctcaataggtcagtacatagaaaattttaagtggaaatgatcaacataagcttttgataaatgttgggtaaaatagcatttgaaaagtaattgtgtaatgcgttttttcttcttttattacatatatggcccattggctctctttttttaaccctttgtgaataggggaaatcgaattgcagctcttgagataccgattcaggggattgaatatgttacttggtcgatgtagtgattaaataaacgaaatattttcaagttatcaagtttatatatatatactcacaatccagtctattgacaactagacgttcacaccttggggaaaataaatattatatgtagtatatcttcttttccgagctttgtgtga

SEQ ID NO: 33371 - DNA, 2487 bp, Arabidopsis thaliana landsberg
tttttgcccaatagcttattgggtcccttttggtttaaacacgattggatcgctattctgaaggtcaaacctatgagccaaacaatttaatattctattgggttgggtaccgttttggttttaatacgattttaaacaaattttgttaacttgaaaagtttaaacaaacgtgaaagaagttttcaggagtgaccatttcacatactaaagatataatcaacagtgaagacaagattttgagtttaatactagttagaataagcaatcgaggattgcaaacgcaagcataaaaacatattttttttaacagtaacaatggcatttttttgctccaccagcaaaacgtttgcaaaaaccgcctttcttattatcacatccatcaagacaccatttgttgcatctctttctgtcttggtatgtgttgcaagctccaaatttcgcatgtgtgttacagcacaacgaacttccggatccttcaacgacatctataacatgcaaacaacaatttttcatctttaagattcacgtaaagatcaaacaaaaactttttatataatacatctttgtatccccaaaaatatcaaaatttatggtgagagactaaccaatagagaacaaaagaacaagtagcatagcaaaagacattattttcatggtggtggtcatcttcttgatcctcttctcctccctatgagcataattctttttggtggagtactctttcatctatttatcctattttgccaacgtattataaatttagatacctaatgctatttcccgatttaatggatcaaatttccttttgtttcaccggtaattatagatcagttatctttttccagattcatgttcatgttgatcaaaacaattcttgttatatatgttgagggcaatctaaacagtcattctatttgcaaaatcaccaatactagtatattaggggaatttgatccaagtattgtaaaactaaacttgcaaaggttgctgtgatgatggtagaaaagatttgatgtccatttgtgacttgaaagaaaaacaaatgacttgattcttgagaaatcacgccaaattaccaaaaacaaaacttagggggtgttatgtatttgtgatttaaatagaattttagtgacttaaaatgttatgtagaatctgttgttatttaatcaagattctttaaaaatatgttaaagtttggtgttattagtttaaaatttgtcaatagtagtataaaatcttcataaatctggaattgttggattcctactttatatagtcaataaaagttttgtgttattcaattaaaacaaaagaatctatgattgttaatgaatcaaattattatgctattagtttatagttatttttttacactcttctttacaaaataaagtcatgacaaatatcatcaaaatagagagattggtcggaaaactacaagattatgaaaaaccaatctaaaagattttaaaaaaacctctagcaagcaatagtttaaaatatttcatttgtttactttctataattttattaaaatcatcaaaattccttgtaaaataggaactaataaccaccctattaaattcaacggtcgatatctatattttttttccaatttccccctctcatctttttaagctctgaattctaaaaagatatatttttcacaaggtttgaattataaaaaaaacagacaaatttatgagaaaatggctcgatgcttaatacttgtagaccaactcaaatgcctaatacttgtagaaaccttattctcagtttcgtttacttccttttgagctacctttacctctagaattaggtgaagaagtcataacagggtatcttgaccgtttcttcttattagttttccaactatgtaatggcttctcattttcttcttcactctctttcccactctcctccttcctttcttcttcttcttcttctttttcctcatcgctttcactcaacacagcctctgcctttgacccattactcattcttgtctttgtgtccgttctctttcgtttctgagagactttggaagcatcttcgtcttcactctccatcgctttcatccactgcaaatcgcttaaagagtcgctatacactgcttcttttcgtttccgtttacccgtgaggctaccaaaatggtttttcgcgttagtcttgtcttcttgagtctctgaagtgtaagcccactcgggaacttccttctcttccatgagacgtgtcttgtagttctcctttttacgtctttcctcgtccatttgttcaaacatccaaaactcttcctcagttcgagctgcgagccggttaatctctctctcacttggcacatcttctcccagtgagcttgttcctttgctcatgatctcttccagcatctctctcctgtcttgagctgttgatgattcaaagagattagcatgtagtctccaaatcatgtttttagttgataagaatatatatatatatgaagacttt

SEQ ID NO: 33372 - DNA, 4681 bp, Arabidopsis thaliana landsberg
  unsure (1)..(4681): unsure at all n locations
atagcaaacgtggaagaaagcgtttcccagatctcccgcaatgtgttcgccttcgagagaagaggctgaacagagagagatatagcaccaaggcgagcactataaatcagcttgtcttgtcgcttccaaagtgtatagtcgttgttggtagtgacaacgccatcagcagtggtgcgagtcggggttgggatggggatagatccgtcgacgtagccggctagatcataaccatcaagtagggcgtgaacctgacgactccacataacaaagttggaatcggtgaggcgggtgacgttcgtcatgttgacattcagcaaggtggaagtggagacggcgatggtctcggagacagatactggggaggttgaatcagacatcgtgaaagaagagagagaaaaagagagatggaaaagagaagaagaaagagcggcggtagggaatttttttttctttttttttttctttagatttaggtatcgacaagctctgataccatgtatgaaatgaggctcaatagtttattacatagatgtttgtacaatatatatagtgattacaagagtaattaggtatctataatttacaattatatccttagtcatttctcccttacgcgccccctcaagatggaggtgctttagcaacaccaatcttggaaatcagagtagtgaacggttgtcgtggtagaggcttcgtcaaggcatctgcgagttgatctttggtagagacatgagtaacacggagagctccagcttggacactttcacgaacaaagtggaaatcaagtgctatatgtttcattcgtgagtggaataccggattagcagataggtatgtagcacctacattgtcacagtaaacaaccggcggtgacgacaatgtgatgccaagttcagtgaggagggagcatacccaacgaatctcggaagtggcattcgcaactgctcgatattctgcttcggtggatgatcgagcaacacctttctgcttcttggatgaccatgaaatcggattactcccaagatacaaaatgtaagcattggtagagttgtagttgtcaatatcaccggcccaatccgcatcagagtaagcatgtagtgtgagaggcgtatcagctcggatgaagatcccatgagatggtgttccagcaagatatcgaagaatgcgcttggcggcctgccaatgaagatcggttggacagtgcatatattgtgacaagcgattcaccgcataggcaatgtccggtcttgtaaacaagagatattggagactaccaagcacggcccgatattcacttggtttgtcaagtggtttgcctgaggtaagcgatagctttggagtcggggacatcggagtgagaaccggatgtgcagcaagcatattagttttctccaacagatcaagaacataccgtttttgcattaggtgaagtcctttggatgtgcgagttgcttcaatcccgagaaaataactcatttcccctagatccttaagtgaaaaccgagctgcaagattagcaataaaccgcgtgatgatgtttgtgtcactgccagtgatgagcatatcgtccacataaactagaacatagagtatggtgcgctcgtgacgaagagtgaatagagacgtgtcggcgacagagttgacgaagccttgtgtaagaagatacgagcgcaattcttggtaccacgcacgtggagcttgtttgagaccatagagagctttgtagaggtgacacacatggttgggtctgtctggatctatgaatcctggtggttgtgcaacgtaaacatcgtccgtgaggcgaccttgcaagaaagcgttgttgatatcaagttgtcttatatcccatgaacggttaaccgcaatgtcaaggaccgtccgaaccgtcgtggatttgacaacgggactgaatgtctctgtgtaatcaacgccttgttgttgattgaagccctttgcaacgaaacgtgctttgtacctatcaatagagccatcaggattatatttaattgtaaaaatccagcgactaccaacaatattttggtgtggttctgacgggactagctcatatgtgccattacgaagaacagcattaaattcttcggacatagcatttctccagtttggatcacgaagagctttagccacagtggatgggatttttgatttggctttgagagaggcggctagggttagctttttgataggtttggttatgttatttttggctcgggttcgcatggagtgttgattttggagtggtgggggtggtgatggcgagggagagggagttggattcggaacagaggaagaagacgatggtgaggttggtggagtgttgttgggctgacttgagtgagatgggctagtggtggacgtaggtgggcttttggaggtggtagtaggtgaatttgggcctgttggaattgtaggtgaatttgggcctgttggaattgtaggtgaatttaggcttgttggacttgtaggtgaatttgcttcatgtgacgttgtgcaagattcacgattggtcgacgatgtcgtgattggtgatgtcggattcaatggcgttgagggcaacgacggtgggtgaggatctccggtcggggttgatgacgacggaatctgtatgagcggtgacgacgggagtggaatggctcaaggttgattattgatgatttgtgggactgtttcttcaaagattgtgatttgatctagtttgggattggcaaacggataggcattctcgacaaactgnacgtgtcgggatgtgtagacacggccagtggttctattcaagcagagatacgcactctgtgttagcgaatagccgaggaacacacatggagcagaacgatcatccagcttgtgtgtggtatacggtcggagccacgggaagcagagacaaccaaacacacggagtttcagataattcggagtttttcaaagagccgcttatatggagatgtgccaccaatgacttcgcttggcattctattgatgagataaacggcagtggatagtgcataggaccaataaatggttggcattgaggcatgagtaaggagagatagcccagtttcgacaatatgtcgatgacgtctttcggagaggccattgtgttctggagtgtgtggaggagtagtgagatgacttatgccatttgttgatagaaactcccgaagagctatgtattctccaccattgtcagaaaataaagttccaatttttgtttgaaacctattttcgactagagctttgaatttgataaatgtttctttgacatgagactttagtttgagaggatagaaccaagtgtagcgtgtgtaatgatcaacaattataacataatatttataattgtcaattgacatgatgggagatgtccacacatcactaaacaaaatttcaagaggacgagaagaaagaatggaggtttgagagaaaggtaatttgtgacttttattaatggaacaatctctgcaaagagagtttatttgtgattgcgaaaacggtaaagaaaattgggaaacaatggtttttagaatgcgaagagaggggtggcctagacgagagtgccactcttgtagagtaggctttgtggtggtggaagtgagatatgatgcgactgatggattgtgtataggccactcgtatagctccgcgttagttcgaccttggagtaattgggcccccgttctgagatccttcacctgaaaatgagccgggaaaaattcaaccgaaactttgttagcgttacaaagccgatatacagagagaagatttttctgtattgagggtacataaagcacatcattaagctttaaatctttggtgaaagagggtaaagaagcagaaccagtgtgagtgatccttaaaccggagccatctccgaccaaaacctcctctcctccattgtaaggctgatgaagagagagattgttgagatcggttgtgatgtgatgtgtggaacctgaatcgagaacccaaggattgtagctgagagccggaggtgtagtggtggctagattggctctgggaaaccatttggatggaggatatggtggtgttggtagcaagccttgagttggtgatggttgagaagcgaatgactgcagttggttacaccgttttgcggagtgaccttgaactccacagatttgacacttaccaaggtaaggtcgtgaagtccgtgtgtcttgaccacgagcagcttgttgtttccatggttgagtttgatttgcagcaggcttggatgaggagcgattctggttccggctattagcgtagtttgcggtgataggaacattggcaaatgcagcgaaggtgatgagttttgcttcatggttgaggagcttctcatgaatttcgctgaggcttggtggtgtgccacgtccttccatctgatcaacaatgggtttgtagtcttctggcagaccccgagaatgtaatcaacttgatcttcatggtcaatgattttgccaattaatgccaactgatcaaatcgattgataaagccttgaacgtactcgtcgatggtgcgggtgtctttcttccattgtttgatttggtgttggagctgtttgatatggccacgacttggtttggcataggtaccagcaagagtggcccaaatatcagcagaggtagcggcgcgggacaccgttggttggacggtgagagagag

SEQ ID NO: 33373 - DNA, 1054 bp, Arabidopsis thaliana landsberg
gcattttgaaagcagactaatgtctccaaatccttccctacgtttatttagtatttaagcagaacacatttagaaagctcaaaaaattgcacataaggaatccacttaacaatcccaacacacaaaataacttagtcgaccaatgttaaagtattcaagcagaacaacacacttaaaactacacaaagtttcaccaaagcaatccacgcaacaatcctaagccaccaaataacttggtcaacaagcgatggggtttactattctaatcaacatattcaaatggatgacaacgagccagcttccaaggtttgtcagctctgagtacaacccaacatatccgtcgaaaccatcatgtcagattgttccatcgaatctatgtccttcgagccatgcacaactgtctcccgggacgtggtggattcaccattccctaatgatctatagctctcagtacgacccacgattttgaagacatcaaactgctcatcccagattcttctgactatagcaacgcgatcggcatcctcaccagtccgagcctggtatgagtctgtgtacctaacgtagaaagttgcatcacaggcgccaaggtcttgtgtagtttccatagccactctcaaaatcttaattggccacaccatatttgatacggtgcctattagtcgtggcaactgcaagttccaaatacaaacgaaaccagtcattgtcttcttgcagctcataataattcaactgcaaaaagaaagaaaaagcttatggaaaacatcactcacaaaagcaaaactcacaggtcttaatcttaccagctttgaatgttcaaaagggttctctgggggccagtcaggcatggtatttatgggggagaagtttttgtacaagctgctgctgcatctcttgattacatctatggtggcttcccctatacaagaataataaaaaaatcagcaatgctttacgtgagactgatgatttagtaagatggcttgcttggtgtataagcaagcaccaaagtcttgtaattacctagaggtctagcaattcggcaggataaagc

SEQ ID NO: 33374 - DNA, 739 bp, Arabidopsis thaliana landsberg
cctgtgacagatgaatcttgcaaagcatcttcttccttagttgtttctgtgacagatgaatcttgcaaagcaccttcttccttaaatgtttctgtgacagatgaatcttgcaaagcatctttttccttagttgtttctgtgacagatgaatcttgcaaagcatctttttccttagttgtttttgtgacggttgaatcttgcaaagcatcgtctttcgtgatctctgatgtgatgttcgaatttccaggagtggagaatgaactctggacatcattatcgttgttcagagacatagctgtttcttcagctacaacagagctagtctccgagacctgcacctgattggattcttcagagatattgtacagttccgaaagttccttcatagcatcagcaagcccatccatgttattgcgacgagcatacaatttcaactcttctttcatcttgtcaagtggctagattccaaaacaaacaaagccagtgagataataaaacaaacgaatcaagacttattccaaattaaagctttcattgaaaatgagcattttcacctcacaccctgcatgaagagcaagtttaaagaaaccgagagagatcgaatgtttcgccccggattcagctagcttgatatgagtcagccaataagtagaggaagacaagtcttcaactttctttcgagtcactgatgatctgagattactagagacaggtggtgttgtttcattgaagcttctag

SEQ ID NO: 33375 - DNA, 435 bp, Arabidopsis thaliana landsberg
aatgaatatgtcttttgaatccctcccttcttaacattacatgccaatgcagtttctctgatgctgaggagcgccactgcaacgaacaacatcgagaaaagtgttctcatcacatggaatccatagtcttgatgaattataagcatcttgcgcttgatcaagcaatgctttaaagattggatgagtaagcaaactcatctttatcacaaacctcttgtaatcatcaccaacatacactaccaaatgtcctctcggaacatctttaggtattgcttcattttccttcttgaatccccaagaaaccttgtcgcagcaactctcgcatgaagatgtacaacaaggtagaactatggatttgctcttcatgattctgaatttgttttcgcacgattttatgaacttgttcttcattttgagtatagaatgagaggttcg

SEQ ID NO: 33376 - DNA, 649 bp, Arabidopsis thaliana landsberg
accgtcttcggcgatgtcgagcggccgcgtcttgtgcatctggcggaagccaatcccgagctggcgaaatcccgtgcctccgaattcggcttcgaaaaggcgacggccgactggaaggcgctgatatcagatcccgaggtcgatgtcgtctccgtcaccacccccaaccagttccacgccgaaatggcgattgcagcgctcgaggccggcaagcacgtctggtgcgaaaagccgatggcccccgcttacgccgatgccgaacgcatgcgcgccgctgccgcaaaatccggcaaggcggctgtcatgggctataattatatccagaatccgctgatccggcacatgaaatcgctgattgacgatggcgcgatcggcgcgcttacccatgtccgagtcgaaatggacgaggactacatggccgatcccgacgagccgttctactggaagagcgaggcacagtccggctatggtgcgctcgacgatttcgccgtccatccgctgtcgctgctgacgctgctcaccggcatgccggccgaggtgatgaccgatatggccaagccctatgccgaccgtccggccaaagatggcggccggcgggccgtcgagaattacgatatcgccaatgtgctgatgcatatgcaaagcggga

SEQ ID NO: 33377 - DNA, 571 bp, Arabidopsis thaliana landsberg
ggatttatctatgtaaatttatgaattatactatatatttccacgcaacatctctttcacaacttttccgattgtttacggcaaatgcagagcgctacgacctcttttccacgaaaccaagaaataaatatatttatgactggactttttttcttttgaatcggacttgtctactttaattcacaaaattaaaaatatatgttaataagtgtacctagcaagtacaacacttttccagttttaccctcgtctctctatttataagaccttctcactctcttgagtcttgcctcttgtaaatcacactactcggctctttagaggttctttggacgatgaaacaactaatccgccgtttatcgcgtgtcgcggactcaacacagtatagcctcctccggtctgaatcccaacgtggccgcaccaagaaggagaaacacaaatcttgggttcccgaggggcacgtgcctgtttacgtaggccactagatggagcggaccatggtgaatgcggagctgatcacccaccccgtggtcggagcgtacatggagcagtcgcctggagagtatggata

SEQ ID NO: 33378 - DNA, 1020 bp, Arabidopsis thaliana landsberg
  unsure (1)..(1020): unsure at all n locations
tttttgttgcacatgtatatacttgcataaaaaccatatttttcgatatgcgctatgacatattaacatttaatagttgtgaaaaagcagtttaactgtgaatgaacgaattaatatgctctacgcctctaacaagtaatatatcaccatgcatatagcatattcggctttatacatgacatatcctaagtatatatagcaggtagatgtcgaagcctgtttgaaaaattctatacgttttggaagttgtagcttgccatataatgtactggccactaatggtcgaagacattataaaacaacaatgtttacctaaattttgttttcttccaaagcaaaaaactcataatattctcaacccctaaagcatgacgaggaaaaatagttgtaatgcgttacgactttttgttactaatattttggaaatatatatacgatttatatattataactcaatgtaataatataaattcaatgtaataaatggaaaatggatgtgtgtgaagagaaactggaaaaagctgtaaagaccgaacatggccacataactcattcatcaatcacgatcttgtcggttctttaattttgatcatatttcaaagccattagctctttcccgttgacttacgattatgtttgggtagaatgttgacctctaatttctttctttgtttttatcatgtcatagtttatgatgactatgattaaatagattaaaaagtgcattagtttacacgtactattttagtatttttatagtctaatagttcagcatttttgccaaatttgaatttggcttgcgacacatcaaacaaaattatcagaagtgggtcaaatatttgaatcgacctgaatatcacattattccaaacggtatatattattgtgcagagtaaaccaaaaccctactnnnnnnnnnnnnnnnnnnnnnnnnattaatgattttttggtgaattaaacatattaaagatacatttaaactactaacttaaatttatatttttaacttcgttataatcg

SEQ ID NO: 33379 - DNA, 1411 bp, Arabidopsis thaliana landsberg
ttactgttcaaacataaggttggatatgtgcatagaaagcagcattagataatgacttaacactgacaaggaaatgaacataaatatcttgtcctatgcctatctaatatgtgccttacgaaatgttatatgcattaccgtgtgtttgcaatttacattgcttgcaatcaaccctcttcctccttctctaagcaaaacatcaagtcacaaagacctcaagcattttccaaacctatccaacaaatttggaattttttcaaataaccaatccaaaccaaacatgtaatactcaatcacacaaagtcacatacgaattacgaactaagttgtttaaccaaatattttgttgcaagaatacaaataaccttagagaattattgttatccaaccatattcgtaccgttaatttacatttttaatttgggcatataccaatatcttgtctacgttttagcatctagcaagtctcctgcacgttcccaaaaccttaacttgtaaaccatcttttattatatatttacaaaatttccctatcatttttctttctaaccaaacaaaccccacaattttgctttttgtgaacccaatttccaaatccgtcgttatctcttctcctcttgactaagcaaaatgttgaaaaaagtgaggcgaaaagtcaaagtcttaatcaccaaaccctttaaaaagcccaagaacagacctccatcaccaccaccacctcttcctcttcctccttcaccatctccaccaccgtctcaacaaatgtcttcctcaagacaaaaaaacattccgtttctcttcccaagatccgattcctctgttctacccgacccgtctcgtttcttcagccacgatctcctctcatctcctctccctacaaactctttcttccaaaacttcactctcaacaatggcgaccaagctgagtactttcatccttacatcatcaaaccctcgacttcatctctctccatctcctacccatctctctcccacaactctgctttcatctacgaagctttcaacgccgacataaccataaccgggtcagatggacccgacccgcattctcgtaaatctcatctcatctcttccttcagcgatctcggcgtcactctcgatttcccctcctctaatctcagattcttcctcgttagaggaagccctttcatcaccttctccgttaactcctccatcacaatctcaacgatccacgctgttttatcactttccggtaacacctcttcaacaaagtacaccgtcaaactcaacaacaaccaaacatggctaatctacgcctcttctccgatcaatctaaccaaagacggcgtttcttcaatcaattgcggtgatgggttttcgggtattatccggatcgtcgtgttaccaaatccaaatccgtatttcgaaa

SEQ ID NO: 33380 - DNA, 890 bp, Arabidopsis thaliana landsberg
gatctttgtattgggaagtctatatcacttgattttgtttttcattgtatagagataaacatagggtaggggataggtatcttttgattggtctcaatgatcattgagattgaatcatacacattcattttacttagatgtgaggtgtcgtgatattgtgcgaaaactgacgactctgttagcagtctaggcctattcattcgctacattgcgccctgttaatgttgtactgtgttctgatcttgtatgtgctgcatctggtcgtctatgatttagttcgaaaagttgtatgatgttcccttccgatgaatatgtattcgtgaattggttttatgatgcttaaagtgagtactttttgtcatttgtgcagtcgaatatgaggatcttggtgaccggaggagctggattcattggttcacatctcgttgataaattgatgcaaaacgaaaagaatgaagtaatcgttgcggataattacttcacaggatcaaaagacaatctcaagaaatggattggtcatccaagatttgagctaattcgtcatggtatagtatcttcttaattaatcaaacttacttaatactcattaaccaaaacaatgcattaatactcattcttgtgattttttcagatgtgactgaacctcttttcgtcgaggttgatcaaatctaccatttagcatgtcccgcttctccaattttctacaaatacaaccccgttaaggtttgttaaacttcgttactcaaaactcgcaaaatgctagctgatatatttttatgacttatgatcatatatcctcttcatctttctaatggcagacgataaaaacaaatgtgattggcacacttaacatgttaggactagcttagcgaggtggagccaggatttta

SEQ ID NO: 33381 - DNA, 600 bp, Arabidopsis thaliana landsberg
  unsure (1)..(600): unsure at all n locations
aacgcaaaagccaaggccttcaaagagttcaaacaactaaaagattactttatcattttatcgtacttgaaactaaaataaatgggtacgggtaaacagaaatgtcattcctcataacaaaatgatatacatatttatacatgcatccatgaatcgtgtatattgaaccatatagtagtatcatagctgaaagtgcacacttcaaaatatgggtgtaggaaacccataaaagtaatcatgttctccacaaaactctagacactagtaccgtaacataatggcaagtgtttttcttacaatatcttctactactactactactatactttaaaaaacacaatggcaatgggactagatgtaagattaataaatgaaaatagctagagtctataaaataaaataaacaaaaatttggggaaaaaagaaagagaaagaaacataattggtgaagaagagaggcagtaatggagaacaaggtcatgggtttcagcgttttttattttataaacttcccttcatacccgcgcacttactcttccttccgttggctntcctttttatttntattagtnatctttcttctttaaatattttatagag

SEQ ID NO: 33382 - DNA, 2023 bp, Arabidopsis thaliana landsberg
gaaactaagcccaaacgagaagaacataacctaatttatttgaaaactaaaggtccaaacgatatgggggggtacagcaaaatcaccaaacgaaagataaaaaggactttggtctaccaactccaaacagaagagatcatcaagcacaacgagagagcgtacttcaaaataagatggctctatgatttttgggtctatttgatctcttaagatataaggttggctgcatatgtttctagtttaagggttctttaaaatatatggttgagcattgttgggcgtcacatgcttatttatgagaacctaatgcttgaaaatacttttacgactatatttccgaagatatttgtgtcgtctaccgacttaaatttcttttgtttgagaattgtatttctcttcggttttacaactacagtagacactctataaattaataatattgggaccatgaaattttattaatttatagtaatattaatttattctatttacgtaaaatataataccatatttttcttaaaatgttaatttatagtgatatgaaatatttacgtaaaatataatactatatttttttaaaaatgtttttaatttaattttccatatgttttgttgtttacatatataattatgttagatttttatttttatttgacttctttaatttatttttctttaagatattgtgtcggtatatctacgatattgacgtgaactaaacgtaaacgtgaggcttaatctaatttttccttatacaaatcttagcaataccttctcaaatacaagattttacaaaatcaactatgacggattaaatacgcaaaaagttatgtgaatacgatagagattataccaattgtattttaaaaagagttataattaaagtttgaacaaaaatttcatataagaattagtcttaaaatgtatacttaagatctagggatgtcaaaatgggtcaaaattcatgggtcaactcaactcaactcaacccatgaaccctaataagttgaaaattttgactcaaatgagttgatgagccaaatgagttgatgagtcaatcggtttgatgagtaaaatgagttgggttgtaatggttaatggtttcaatggtttacccaattaacccatcaagttttgtaaaattgaattaaaccaactaaaatctctaaaccaatgctaatttaagtttaaccaacatatttaaaccaatttaataaaattaatatttttccaaatatcttaaatatacaagcgatgacattgagaaaaagtaaactcgtaatttttccactaaaaaacataaacccgtgatttttccgccaaaaacgtaaaccagagatttttccgccaaaaacgtaaacccgtgattttcccgtcaaaaacgtaaacccgagattttcccgccaataacgtaaatccataatttttctgccaaaaacgtaaacccgtaattttcccgccaaaaacgtaaatccgtgatttttccgccaaaaaataaacccgtgatttttctgccaaaaacgaaaacccgtgatttttctgccaaaaacgtaaacccgtgatttttccgccaaaaacgtaaacccgtgattttctcgccaaaaacgtaaacccgtaattttcccgccaaaaacataaacccatgatttccccgccaaaaacattaatccgtaattttcccgccaaaaacgtaaacccgtaattttcccgccaaaaacgtaaactcataattttcccgccaaaaaacgtaaatccgtgattttcccgccaaaaacgtaaaccttagatttttccgccaaaaacgtaagcccgtaaatttctcgccaaaaacatcaacccgtaattttcccgccaaaaacgtaaacctttaattttcccgccaaaaacgtaaacccgtgattttcccgctgaaaacgtagacccgtaaaaagtggaatccgtaaataacctaagtttgataataatgaaaaactaatgataattatttattattgtattataataataattaataatattatta

SEQ ID NO: 33383 - DNA, 2104 bp, Arabidopsis thaliana landsberg
ctattgtccagaaacattattgcactgaacatatcttaccacactatacgtagacataccttatacacgtttcctaaatttaaatatgcatcagggaatgcaggtttcaacttcacagcttcctggtaaattaagaaaatcagccaacatagttaaaacataaagaatttaatctgggggacaaacgcacacataacacaatgtcaacaggatctttctaggagagaatgaagcataccttgtagtattgaagggctctgttgagatcacctgactccatgaaaagaccagcaagattcgaccatgcaatagcaaatgttggttgtatacgaacagcttcaaggtaacaactgtatgcctgcacaaaatattacattctaactatttggactctggcagtagacactgactataagactgacgatcatccctgcttgcctttcagtaacaacttgatgtctgtattgattgtggattatgacacagtacaacacagaaaaatgaatgcatctattagtaattgcagttgataaaccagtaaaatgactacagatgtgatgctatattcctagtgcatcacgtcaccgtccatttaattataatatattttggttcaattaaaagttcttctgcaatgacaaaactttgatcaatcaattgtagaattaggggccgcatccataactaggacacaagaaaattgcagataatcgggttggaacaggaacagaataacttaaatagactaattcgaaagacttacttcatgaatcaatccttgagccttcatcagattccccagattactatgtgcgtcaacctaagaacagtttacattaccaggtgagaagactaacaaaagaagatagacagtgaatctcccagcagtagtgagacagaaaacttaaaaagaaggatcataaagtcaattaccagaagtggattcaatgagagggcctgctgacagcattgtgttgcctcactgagtcttccctttcgcatgtatgcacttgccaagttcgaccaagcatcagcaaaattgggcctcagctgaagaattatattgaaaagaaagtgtaagcaaggggaaatgaagaaaggtaaaagcatcagtataggatgagaagtgaatagcagatatcgagaagcataaattggatatagcacaacctcaattgcaattaaatagtagcggattgcacgatcagtgtcccctttttcctggaaatagcagattacagatataagaatatatgtattggcaataaaaccacctgatcagacaaagaccaagccattcaccttccacgcgtttgccatgtttccataacactcagcaaactgaggttgaatacgaagagcttcttcatttcgagctatgcacatatcatactcttgaagctgcacggtatataccatacaagtaaacaactaattaaccgaaaacaagaggatagagtaatgactaatgagataaggagaaaaatagtacctggtaataaatagcaccaattagaagaagattatcagtgcgtaatgggtttctctggtaaaccatgttgctgtgctccagggcttgtttgaaatcgcctcctttgtatagctgatgagcaagagctaggcgtgcgtcatcatcacctgcacgaaacgcttacagtaaacatcagcacaatcattaccagtcacattctcccaaaagaagttagctttttttatcctaaaacgaacaaaccaaataacaaagctaaaaactttgctcgcccaaaagtagaattcccaaaagtcaagtagcagttagtagcaagtttgatttcaccaaatctaatgatctttgaattgtaacataacaattatacctagaaaaggaaaattagatcgcacaacctagtgttcttagtaaaacagatggaaactaacttccacaaggatcagctgtgaagatgcgattacacaaagaagagacatcgaaaaaaaacaaaaatttaagctcgtgacaaatcagaaccttcatgagtcttattgaactgctggaggaggctcgaagaagacgaagaagagacagacaaatcaagctttctagagaagacttcatcaactcgatcgg

SEQ ID NO: 33384 - DNA, 802 bp, Arabidopsis thaliana landsberg
aaggcggtggagagttctttatatctacgcaggattcaacattgtcctgctttacctctatcaactaccaataaacttttccgatatgattcgttggatagcaagctttataggtctattcagaatctccctggaaactgaaggccctgatatttgttctggtcttttccttgtgttgttctacatcatggtatgtcttttgtttttcgaggattagtattacttggtctcactcaagtgtaaaatgataaactatattactgaaccatataattgatgaactgtttctcaaaacaactgtcaatatgtggtgaccgtgtttggggagttggttatgaacaccaacagccagtgtagtttttccttcaagtgaactgacttacccgccttaatctgttaacgagctaccactatgttatacctgtcacagacttgacatgcctgtcgttctgctattgcagctatcctatgtaaggtcagacctcgaggatatggactttatcatgtccaccagtggaaataacttggcagagcggcttcttcctccaaaatattcattatttattcgagaatcaaggtattttatatagcttgttggttaggttcttcctactgggagctgatgcgggtttaacatagtatatgaggtcttcaaggcaaactttaggtctgctgtgtaatgaccacttacttatgtgcattaatcaatgggtgaatctgctcaaagaattgcgttcaagggtagggactaccaaacgtggaagccttaacactggacagctctatgaacacatagctggga

SEQ ID NO: 33385 - DNA, 1106 bp, Arabidopsis thaliana landsberg
cccctttaaatgataaaacactttaactggagaaaagaagattcatcaagagataacttttttttttttccataggactttttaaaaaagtatcaaggggaaaatattatcctgatttttaaaaattcaaaataaataataaataattaccaaaaacagaaaaattattttagttaatcattttcttgctatatagcttaaactcttaagagaaaaaaaaaaaagaaaaacgaaaaaaaagggttccaagataatttttgggaatgtgagagttgataatttggtgacaattgaacctcatgggctggaaatagacaagttgagctataattagaataaagcttaccaatccattgagtaggcaaatactacaaaactttaatatgtaaaaagagtacaaaacgattaaaaaagccaaggcagcgggataaatttcgtgatatccactaccgtctgatgataaagaagaagatcgtgggggaaataaatggacatgacataaaattacaaacaccaattactttctttagttggtccctcaacgacaataacatgaacctctcaattcttgggtaatgactaatgtggttgagcccatttattgaatttaataaatttaaatagaagcccagaaaaggggtttctatacagggtaaaaaaaacagttcctaatttacccaagaaaaaaacaaccgtgaaaagaggtaagaagaaaaacaaattcttcaaaagcccatatcatttttttttacatggagaccttgttgttatgctatctttgggtatttctgtttggcacttctccactttaaacgatgctttcaaatgcaactagtgtgtgagaagaagtgggctttaagctccacgatgagtctccaagacctcttaggagcttaagcacgtcggcttcatcagacaagaagtatttagctatgctgggtttgcttacaaccgcgcatgcaaaaacctgtggctgcacaagaagttcctgatttgtcactgtgcttaatatgctctcaaacatgtctgcgaatgatctatcgtatcctatgcacatcaccatttccggcggctccccgcgttctatcatatcttggattactttc

SEQ ID NO: 33386 - DNA, 1787 bp, Arabidopsis thaliana landsberg
tacctgcacgcctcttcagaagatacattgtgatctgtggggacctgcaccaataaagtcagtgcaaggctttagtgattatgtcatctttgtagacaattactctcgattttgctggttttatccactaaagttcacgtcagatttctttaagatattcacaatatttcaagctctagtggaaaatcagtttcaaaccaaaattggcagctttcagtgtgatggtgggggagaattcacaagtgctttatgaatcatctacaacaacatggtattcaacaacttatctcatgtccatatacaccacaacagaatggactatctgaaagaaagcataggcaccttattgagttagctctggctatgatgtgtcacagccgaatgccactgaagtattgttttgaagggttcttcactgccaactttctcatcaatctcctgcctaccactgccctgacagaaagcaaaagtccttatgaggtactatatgttcataaacctaactatacttctttaagagtatttggatgtgcttgttatcctactctaagggattatgcaaagaataagtttgatccacggtcattgaagtgtgttttcttggggtacaatgagaagtacaagggatatcgttgcttactcatctcaacaggtcgtgtgtatataagtcgtcatgtggtgtttgatgagcaggatttcccattccatacagtctcaccatctccattgacactgtctacacctctcctaaaagcctggcaaaaaagttttcagagtcagtctacaaacaacacagagaatcagtcacagaatcagccagaggaagtacagagaatacctgaagatcagacaataggcattccaattcagcgtcttacaacaacctcattacttcctattgtgactgatactgagaattatgggtgtacggcaggctttgatcctgttcctataggcaaaagttctcagttatcatctcatagtatggatagtgatgagccatcagcggtttcacctacagagtcagtgccaagtgaacacaacaacgaaataagcttcagtcagtctacagaaatcagagagttagcagaagatacagattgtaccttgagagcatacaacgacagtgatcacggaggctgtcaggaaacaagcagatctactggaggattctgcaccttcttgggtaataatatcatctcctggcaatcacagaaacaacctacagttgctaaaagttctacagaagctgagtatagatcgatgtcagaggcagcatcagagattacctggttgtgtaagatcttaaaagagcttggaataccactacatcaaacaccagaactctactgtgataatctttcagccgtctacctcactgcaaatccagccttacacaagcgcagcaaacacttagcgaatcacttccactatgtgcgagaacaagtggctttgggaacactgcgagtctctcatatcccaaactacttgcagctggcagacatctgtaccaaatcacttgctatggcgccatttgctttactgcgattcaaactcggcgtcgatgttccacctactccaagtttgagggggactattaatagagagagtgaagtagagcaattctgcttgcctaaagcaaaagaagaagaagagagatcgacaaaagctgagcaaaaggacaagagagttaacctagcttcagacagaactcttaacgacattgttggattaagtgagctgaaacagaaactgaaacccagtaacatgttctggaagccccaagc

SEQ ID NO: 33387 - DNA, 1817 bp, Arabidopsis thaliana landsberg
ggctgaattcaaacgctggaaaattttcgctacccattttattttaagactcggcccattaaaagcccgggagaggatccaatgttatcccaaaaaaccctaaaattcatcctctttcgattcagcctctctcgattcttctccatcttcattcttcttcttcgaatctctaaatctctctcattctcttccaatctcgctcactctcttccaatctctctgaatctctgtctcgatgcctctagctaagcgaggaaggaagagaaaagccgatccaaatgtttcaaagagacccggagcctctaaagccactaatgtgaaaagaaaccctttacctagtcattacaacttcacccccgcggccgagattcctcatgcccagtcttcccaagggcgagtccgagttcaaccccaacaagcaaggtcagcagctccacgagtctccgactagctacctcctcaagttcttttccagaactccgtgaatcatgatctcccttcacctctttcgtcacaagaagtccagaatgatgcagctaatcgatcgactccacaacatgaccctccaagttctccaattcagaactctcatgtaagtcaaccatcttcctaaggaaacaacttccaagaacatgtcagttctgtgttaccggaactccaagccgataacgtaaaggctctaaacgacattcttcaagtgcctggtcgtgaggcgtggacccccgttctttctcccataccgatagaaaaaaacaacttggttagtcatctttttatctggttttccaatattatttaggtggttggtctctagtttagaattaagtgtgtctggtctttgatttcttaacgtttagttgatgtgtctggttttgatgtgtgaatgtattgattagagtccgagtgtattgatgtgtgtgagtgtattgtgaagtgtctagtttagttgtgtaagtcctaagagtctgagtgtaatggaaatcgatgaagtttgtttgtttctttcctgacattagctttgaaatctgagttaagacagtaagtgagccatcgagtgttggagttaagattcattgagttttgaacctctggaacttgttttgataggagaatgatcgagtggtcgttgacaacacttgagcagtctccatgctttgataacctctggaacttgttttgatagcttttgtgtaaagaggttctagttagggtttatgtttagctcagtctccatgcttttatgtgtttctttctcttttagctcattagctcattagctagctgtgctaagatttagtgaagtgttttggttacttgttatattttggttttgatgtctggttttgattggagaatgtgttttgatgtttggttttgatattgtcttgtttctttcttaacaatgtattgattagagtccgagtgtattgtgtaagtgtattgtgtaagtgataagagtgtaagtttattgtgtaagtgataagagtgtaagtttaatgtgtaagtgcattgtttagttgtgtaagtgtctggtttatttggtagtgtctggtttagttggtagtgtctggtttagttggtagtgtgttatgattggtatgtgtatattaaggctgcttattggtagtcataaaggtagttttttggatgtgctgttatataaagtcagtgtattggtatgtagtgttaaacttatttgtagttgtgtggtctattgtgatctctattgcgtctggttgatggtgagcatatgacatggttaatgtgtaggcttggatcctattaatgggagtgctatgcattgaactgtatcttgc

SEQ ID NO: 33388 - DNA, 839 bp, Arabidopsis thaliana landsberg
ttgaggccaatcccgcaggttccggatcatctcgttgatcgtatccttaagcgcggtttcctcgccctgcgcgccgacggtaaggggaggcgtcaggtcgcccttggtaacggcggtcgccacttcggcgatggcgcggacctgcgtggtcaggttggccgcaagctggttcacgttttctgtgaggcctttccatgtgcccgacgcgcccggcaccttcgcctggccgcccagctgcccttcgacgcccacctcgcgcgccacggtcgtaacctggtcggcgaaggtcgcgagcgtgtccatcatgttgttgatggtgtcggccagctcggcgatctcgcctttcgcttccacggtcagtttccgcttcaggtcgcccatcgcgaccgaggtcacaactttcgcgatgttgcgcacctgcagcgtcaggttcgacgccatcgagttgacgtggtcggtcaggtccttccacgtgccggatacgtccggcacctgcgcctggccgcctagcttgccttccgtgccgacctcgcgcgcgacgcgcgtcacttccgcggcgaagccgttgagctggtcgaccatcgtgttgacggtttccttcagctgcaggatctcgccctgcacgtccaccgtgatcttgcgcgacaggtcgccgcgggccacggcggtcgtcacctcggcgatgttgcgcacctgcgacgtcaggttcgacgccatcgcgttcaccgagtcggtgaggtccttccaggtgcccgcgacgaaaaacacgatcgcctggccgccgagcttgccctcggtgccgacctcgcgggccacgcgcgtcaccaaggaggcgaagc

SEQ ID NO: 33389 - DNA, 1683 bp, Arabidopsis thaliana landsberg
cctggaccccatattcacattaaactctgctgaaataacactaaacaagatttcaaccttctgtgcaggatttttggcgatctttgtcaagtccatatgcttctgcgcatgagtctcgccaggtttgagtttaaggctagaacttcttcttttgctccaacgagcagccctaatttctttgaacttcttgttgaccatgttccaagttatctcttcatgatctaaactaaacaacatctcccaagaaacattatcagcagaatcctccaccacctcctcttcatactcatcatcgtcttcgatttctggagactccctaaatcttttgatatcttcttggtactgcagattgttcttcttcagtttctgtctcattgcgttcaaagccttggagttactagtactcatcttctcctttgttttcatattatcttcattcaagaaatcttccaacatcacaagggtcttgatatacaaagtcggagtctttacggacttactaatctgtttgtggagtttctcaaacgtttcttgcaagttaacacaactcattgatgttcatggcatgcttcatattctctatagtgttggccatctcctaaaacgtttatctttttttggcttaaccacactttttttatccataccacaacaaatctcaccgtcaggtaagtctgcaaggtaacgagtgttgttaccctcaacctcttctttttcaaaatcactctcatcttcactttcacttccactctgtaaacgaaacataagcaaagaaaaatcattaagaaactgttacaaaaaaatataggttttgataagtaaacaaaggtctatggaaagaaacctgagcgaaaaaacgagaagtcgtcgtcatcttcgttagcaaggagaagaacctgatacatcaaaatataaaactttgagacgatggagatataattgcaggggggacacaaaacatagatgaagaacaaaaaactcgaacctaaaatttgttcaaggaaagatgaagaagaatgaaattacctttgattgatttgagacgatggagagattgatgtgagacgatggagatgcttgactagagaataacgaatcgttgagaagagaggcgaattattggtttactctaaaacctaagaaccgattgattttatagatccaaggtaaaaacgaaatttaccactaagaaaaatgtcgaaagtgaaactaaaaagtaaaaataaaaacaaaggcggtgacagtttttctagtaaacaaaaccgctataaaccgaattgaccgaaccagaattaattgaataaaaaagtaaccgagtcttaattgtcacataaaccctaaaattttaaggacttggttactttcacagcaaggaccgagagatttttcagaggaagagaaaagggtttgaaacaatgacgttgacgatctccgatcttccgagggatctgaagaagaaaatattctcaagaattccgttgagatatgtgagagcattgcgattaacctgcatagagtgggaaactttaatcaaaagtcggagcttaaagatcgacgaagaggagtctcagatggtcgcgttgatggattacaatctttgtttaatgagcaaatcctttaatggaggagatccatctacagagattaaaggcaaacttacttgcttagacgaacaagtaaagg

SEQ ID NO: 33390 - DNA, 4229 bp, Arabidopsis thaliana landsberg
cttgattttttgcttagtatcagtagatccacatatatattgcttcaattttgctacatgatgatgttcatttcgaattgataagttttgagtacatttcgtaccaattgaaacttacgacttctcaattgtaattgtagtattcagttaagaaattttaaagaattaagaggatcaaaagtagattttaaggaattgaattaattctaaccaaatctttgcatgaattcctggaattttttattcacaatcttgagtgggattttttctttattaatcctaatattgaataacactagcatttaataaaatttgttaatcaagaatttaaataatactagaattaatagaatctaaaatacaaaaattaaattcttaaaattgaacacacactcatccccctctccttctaaagttagtgtaggccttcatttctttcttcgctaaaccgcggccggtaagctttttgctaccacactcatccatgtgtctactcgagtcttcccacctgccccgtcgtctttgtttagactaaatttatttttttggtctttgatttcattttattttattttatacttttttaaagtgtattatgtttttttgaatatttcattgtttctacaaaataaaatgtatcatgaatgaattgtcatataaaggtaaaaatgttagatttacaattcctatgcataatattaatttttttttttgttatttacctagaagtttaaaatactttaatttacgcagattgatgttgacatagatatagaagttaaacaaaaacaagaagaactttttaaaattaaaactttaattaaataatgtaaataaatatgccacatgctacattaatattaaacatgtggatacataacaataaaaaagaagcacataacaataaaaaaaaaaaaaaaattaaggtaaaacggtaaatgccacaatactactgattagagctgcaatagctccaaccacaaatcctggtaagttttcacctccaaataacgcatcaataggaccaactccaaacgatacaatcatttgtggtatgactattgccatgtttaaaactcctagagagagtcctgaaaaaatgacaaaaaatgttatcactatccttattaatctgataatacgctttaataataatcttaaacagaacgattatgtatcttattgatacatttatgacaaattttatatggtgaatgaaaaccaactaataattgaagatgtaaacagattgtataaaaatatcaattaaccaataaattagtacataacatacatcaccctatgtgaaaatatatactcgatcgtttttcttataattggaaactgatctctccattaccgttttttgtgttcacacattttaattagcattactatgagaatgtaggttcaaattagaaacaaaaggagaggttaaaattaaataccttgaccggcaccggaactgcttgaaataatggaagctaatgcaaatggaatactaaatgtaatctataaaatatagcaaaaaatggattaatattgttaaacaaaataataattcatggataatagtaacacaaattggtaaaagacatggtggacttacagcaagaggaattccaagaatagcaaagagactcaatgctccatctctgatggcattggtaggaagggccatccgaccagcgatcttccggtgctcctcagcctttttagtaaccaaaactgtcattgccaaacacaccgcgaggattatgttcacagctccccaaagccttttagctccaattttcttactaatcactccaataacaagggacatgactccaagaacgatagagttaagcatcaaccccaacgaaccaacttggattccgtggttgtatagtttcttcattttgtcatctccttttgagtctcccccatacacttcacgacccatccaatcggtatcgtataaaagaaaaggaaaccatgcgatccagttcaaggccgtgacgattagaagcatccacattggacgtttcatcaccttaaaagctccaaagatctcaccgaagaacggagttttctcgttgtcggagtctgccttaggcgaccattgcttatcttccacgtaccatagagctatgatggtgacgactaggaggagagtgatggaaaggaagaaacagctcttgagatttgcgcaatagatgtcgcatgctttagtcattgtgaaagggaagatcttgtagaggttagtgtacgatcctgccgcatatcccaaaacgtttccaacggccatgaagaaagagaaaaacgcatttgccgttcgtgttttcttagcgtctccagcggctaaatcaccaagaaaagcacggcatggtccttggagagtgttgttagccacgtcaaggatccagaacccgagagcgaagataactacggctcgcatcttgacaggtttgtcgatgttgtccccatgctgtggcgaaatcagccgcgtatccgattagtacaacagaaacagcgaccagcaaggcacccccatggcgatgaaaggacgacgtcgaccaaatttggcctacatcggtcactgaagtaaccgacgatggttgaacaatcatgccggagactggaccacagagccaaatgagagatgaccatttgtgagggattccgaggagttgaacgtacggagtaagaagagagagctgtaaggcccacccgaactgtacaccggcggcgatagaagccactgatatcatctttcttagaggtgacggctcatcaggaaccacaaccgacgaagaagactgtctatcaacaggcgccgcatcttcttttgcttggatgtcactcatagtttcttcacgttatcttaagaggttgtgttttggtgatggtgaatcgtgatagaggagatgaaaagaaacggactcgtctcttaaagacgaggtgtggaagatgaatgagatttatgtttctataaacgttttgattctgtgtttcattagttaagaaaataaatcatttatactaaaggatataacgcaaatatccttataggaatttggtaataatgacaagactaactgaaatcagtttattatcttatctttacatattctgagatcgtgacagatttcttgtttctgtaatatgtttttgtttacaatttctcgtcaaatttgttttgttcgttttccttttttaaatttctgtttgcatcaaaccgcattactgttacatattattttgacttcctccacaagaaaaagaaggtgaaacaaatgatatctcaaaacccaatttgggtacgttaagtatccaaattgattatgtcgtcagttacgagcctaacataaaatggttaagtatccaaaattccaaagtgattatgtcgtaagatatgggcctaaagtccataaacgtgaaaaagcttcttcgattaaggtaaaacaagcaagttttcacgttatcttcactagatatatgtctatcaatattgatgataatattaaagtcaaatttcacaaacctcgaacgaagctgcaatgtcaagcgaagaaatttgccagcagcagagaaaacgagaacatcttctttccagcatgattgcaagctctccaaaagactaacgctctgtctgagcatcaagttgcgggaaatcgggtttatatgagtcagaaacctgaatgaaaacaagagaagctgagaagccactactctaatggcaagtatagccatctatgatagttctcgagtacctcagtgaaaagtacactcccacattccattacttcatgaattcagtacatatcgcttgagagttacatcagaccttgacggacaataacttctttcaggatagattttgctaagaagttgtctgttttagcaacaagatacaaagaaaagagtacaatgagtgaaatgtaaaacgacatcatagaaggaaacaatgtccaattatgattaatgaacaaggttggtaatacatcaaaatatgaagtctgagatggatctcggtgctgaagacggtaactttcacgacctgacattttcgaatcgctgtttcccctcccctgtgcagaccaccggcgatggaggagtttgtcatatagtgtctctgtatttagactgcgtgccgaattaaagttatagagcagaactccgtgtcggcatggctcaatccaattcggttcggtttgggttcggttttagtaagaagaaaaaaactt

SEQ ID NO: 33391 - DNA, 800 bp, Arabidopsis thaliana landsberg
  unsure (1)..(800): unsure at all n locations
agatacatgtacgattttgttagaaatttctctttgaaaatatttctaaacctttctcttactaataaaagaagctcattgtggcttctcaaaccatctacatcagcaaattcaagactacctaaaatcatgccacatcagcaaattcataattatacattcagtaaattaacgacatgaaacaatatttatgtattattgagttaacttaatgaaaaagccacgtcatattactctctttctaactcaaaattcttaccaagtacnnnnnnnnnnnnnnnnnnnagacttctctcgacatagaatctttagtctaagaaattagggttttcaataatgtccaagaaagttcaatcgtttcaccttcctaccatttatctcataaacgacacctctccacatctcccttaagtgcatcaccgaagttttttccctaacctttttgatgaacaattgtcctttttgatgcagaatttaggtacgcttctcaagcattcattcttctcatttccttcggtttgaagctactttcatttccttcggtcttacataatttgattcattatcttctgtgtggttatgaaaaatcacagagcatggtgataaacaagatcttcatgctgaccaaatcaagagaagaggtgatcaagtgaacgcatgagttggaaaggttagtgcatccggaagtaagccaaaaacaggaacgagatcctcaatgatatttcaccatggttccttcatgtattcatgggggatataaatctgtactcatagttttcttttatccaattgatgcccta

SEQ ID NO: 33392 - DNA, 448 bp, Arabidopsis thaliana landsberg
tttatatggtcgttgggattaatacagcttttggtggcataaagagaagagattctattcaagcaacttggatgcctcaaggtttttattacacttttatctttgatcaactatgttccttgatggttgtatctgattgaaatgttgttgttttcaggtgaaaaaaggaagatactagaagaggagaaggggattatcatccggtttgtcattggtcacaggtgaagttttgttttctttagattctgatgtgagtttcattttggttctctgtatactgaagatgtgtgtcattgttctatagcgccacgaccgggggaattctagatcgagctatagaagctgaggacaggaagcatggagatttcttgaaactggtataagctctgatatagctcactggttaacaagtctaaggctagctcttatcttcattctcattactcac

SEQ ID NO: 33393 - DNA, 404 bp, Arabidopsis thaliana landsberg
actcaggtgggtatgattcccttgtccgtggttgcgcctaacgtcaagtgtttttaaacgagtaccactgacgaacatatcaggaagaatcccacagaaattgttgttatggagaataagcctttcaagattcttggtggattttcttagacatgaaggaattgacccactgaagctattgttggacatatctaagagctctaaagatctaagcttgcatacccaatggggaaatggtccttggaatgaatttgactcaagactcaatacacgcattggagctctatctagaacttctaatgactttccaatgctactaaaagaagttgtgagaaagcgataaccatgtcaatcttgataagcaacctggtactgttccttccatcttattgaggaaaagatca

SEQ ID NO: 33394 - DNA, 427 bp, Arabidopsis thaliana landsberg
gcaacatttactcaatcctccttctacgaaatatggaattttgattgacatttgagtcttgaggggaccaggtttcgtcgtctttctttacatacatcaattaatctcacttgttcactattttcagtttaattcaatactaatctttgtttacctgtacattaaacacaaactatacaatctcataatatagattccaatcattttttaatgcattcaacattggtgattaaagaggagttcaagctctaacttgaggattaacatgcggtgatcatatgaaccatctaattaaagagcacaaccatatcattatttgatatgacaaagataagtatatgtctatttttaattatctctatatacataagaacatatttgaattgagctttcttttgaagtagtactcattataagggttaatatt

SEQ ID NO: 33395 - DNA, 1061 bp, Arabidopsis thaliana landsberg
cgactgtaaattcaatctgcttcttcgttccttgacttatgtttcaattaagcagccataatcatactttcctacacgcatccattctctgagaacatcatgcgtactctggtttattataacccctgatgttctaaaagaatccagacattagaatttctttggtctacttttcttcgaaataataggattgttagtcctattactttgcattgcatttgtagataagaacttgtgttcctccttcgaagctcgtggaagtgattgtcgaatcattacctcctcaacttctctttctacactgtttttaatttctgcaacttcttttggagtagtgtcttgtgtgtctaatccctgctcttcttttccctcaggttgcgattcatgaagtttttcatcaccagaaatagttatctccccttcttcctctccttcttctttgtcactaagacatgagaaagtattagttagaagtgatacttcactaaaccgtaattcctttatgttgactgggcttcttcctacttttgttggtgtgctccactcattattgcttcctttcaccacttccaactcatttccactgttctctgtgtccttagattctaacacatgttgtttctttccttcctctactacatttttcttttctcctgatttttcctctgtaacctctttttctgctgattttgtttctatattcttcttcttccctatcaagcagtctgatgtttggtgaccccacttgttacaatccgtacatctcggaggtagccaaggataaacgaactccacaattgtgtccccacatgtttctgatttaaacgaaaacaactttggtagtttgtttgttaaatccacttccactaacacttttgcctcttcaaatgacttgcatgcttctgtatctggatggagtttctgtggcactcccaatggacttgttatagcctttaaaactttccaagagaaatactttggtggtacgtttttcactatcacccaaagaggtataattttcacctcttcttgttccatgtcagcaatgggagtccattttg

SEQ ID NO: 33396 - DNA, 6365 bp, Arabidopsis thaliana landsberg
  unsure (1)..(6365): unsure at all n locations
ctaactaattccattgaagaaaataataataatcaattaaaaccgggattatttttaaactgaattgaaccgggattttggtgggcgggtttctgttcttgtgggccaaagagtttattaataagcccaaatggacaacatagagagtgatacaaagatattttaaagtccaaataacaaatgaaccaaaacataaaatatgactgttatttgattttagttctatgtagcagatgagaaaaacgtcggaacaccatgagttgcttatccctgatcttgagttgagcatctctctattttgccaccaaaagtcgaaaaaattcaagcgtgtgttggacatgggcttcaccctcaacatatcatttggctcaaacagagacttaagtgtttaatgggcttgttgtctccaacaaattagcctattaaacgcaaggggcaaaacggtaatttacaggaggagtagaagaatctttaggttaagaggcttgtcctataaataaagcactattggcgaaatagtgacacagaagataatacccagagaatcagagcaatattcggactaaaactctttgtctttcggttcgtttttgtttcggttagttttgtcttcggttcgttttgttctcggttcgttttgttctcggttcgttttagttcacggttcgttttgttctcaattcgagtcgtgttacgttgccgatcgatataaatcacttgtaactattcgaccggcatgttgtttacccttctcgttcgtcagctaataaaagatacttcgttttcccgaaaatcccttacttattcattgttacaacctcggtacaaacaattggcgcccaccgtggggcagttcgaagcttttctttcaccgaacgagaacggcgagcaacgtagatgtcccctgcgatccacgaaaccaaagacgacatgacagacacatcgagcgaaaacggatctgacgccagccaacaacagccggcacctgacgcaatgcaactgccaccggagaacccagcacccgctcaagcttgcctgaatcccgcacgcgccgaaccacgtcctgccggggtagcagccgcagtgggagacaccgcgcttggcggtgacgctgcacctgcaaaccaaggttcccatctggatgacctcgtgcaaaccatcttagatcgactcgacggtcaagacgcacgaacaaccgaacgaatcgatgcccttgttgcagcgcaagttgcttcgcaaagtcagatagaacggttacgacgccgaagacgtgactctcagcctcgcgacgatcacgaacgcctgccatctccccgaactctcgctgcggaacgttccgaaaaccggcgacaaagaccgacattagttatcgtaggatctgttgacgggcaactccgtgagaatctaccgaacgaccgcatcctaccgagcagcagaagtttaccgaaccgatcttccgacaacgtcaaccaaacacgcgacatggaaatcgaacgcatgaacacggtcatcaaagccatgtcatccaaaatgcaccgtgccattagctctgccccgaaactggagaaagtattggaagaaacacaaagatcacctttcacggcacgcatttcagaagttcgcgtccgacacataacgaaggttaagctggttccctacaacggtctcaccgacccgaagatttttctaaagtctgttagcctcgcaatcaaccgcaatcatttctctccgaagaacgcgacgcgggcagctgccagatattcgtagaaaatctgatcgacgacgcgttaaactggttttcgcgacttgaggccaatatgattgacaactatcaccaacttatggtcgtcttcttgcagcaccattcgatatttatgattaagggtgcctctaatgctgacttgtggactatgtcccaaaaagacaaggagccgttgcgagagttcaacgaacgattcaacaaggttgtttccaatattgctataaccaatgatgccgcaatcgatgccctgcagaacgctgtgtcatacgaatcgcgattcagggaagacttggtaatcacccaaccggcaacactagaggatgccctacatcgcgctaaccgatttatcaaagtcgaagaagaaaaagccgtgatggcaagacgccaacccaaagcctcgcattcaaaggacaaatcatacgacgaacactacgaacctcgtcagcattatgataaggattatagtaaatgagataagggcaagaaagcagcaacttacgcaattggtagttcagaagggcaaccttctaaaccgtggaacaagtattatcgggaaactgataccaaacgtaacccggcctactgcgagttccataaaatctccggtcattcgactgatgattgtcgacaacttcagctcctactcctctcaaaattcaagaaaggcgacctcgatgttgagtacgaacgacgtcaggtagcaacgcacaaggacaacatgtatcacttagttcagagagatgattataaccaacgtaacgagcgtcagcggacagaagagcctcggcaaaacgaatgtgcccgagatgatgattggcgaactaataccccgaaacgaaaccgcgacgagcaacggaatgataacgcccccatccctcagaacaagatccacatgatcatgggtggactaacgacttgccgcgattccgtcagatccatcagaaattatcgccgacaagctgaagtaacacgggattggctcgccaacagtactccaacttttgataacactgaaccgataatcttcactgaagccgacgcagaaggcttgacaggcccgcataatgatccgttagttgtcgagttgataatcgctgaaagcacagtcaccaaagtcctcattgacactggtagctcagtcaacgtcatcttcaaggacgttctgatgcaaatggtggtcgacttgcgctcaaccgaacacaacgttcaacctttaacggggtcgacggcgatattgttatgaccgttggaacaataatgctgtcaatctacgtcggcagaacaatgcattatttcaatttcgccgtcgtcgataaaccgatcgtttataacgttattctcgggaccccttggttacataaaatgaaagcagttgcgtctacctaccatcagtgtgtgaaattccctacaacgcatggaatttatactctaagaggcgacccgcttgttgctcgtatgtgtttcatagtcgagcgtcaactcagaaatgctaaagcttttatgataactgaacccactccttcacttgatgaacgcatagtaccaaggactgaatcggtaatccaagttaacattgacgcaattaaccctcttcgatgtgttggtattcgcgctgatttaccgcaacaattgaaggacgagctcgtacagtttttaagtcataatgtcatgaccttcgcatagtcaatggaagatatgactgttgtcgcaccatatattacttgccatgaacttaacgttgactccacgttcaaaccgatcaaacaaaaacgacgcatacttggtccggaacgcgcaaatgccgtcaatgaagaggttcagaaactactcgaagcaagatcgattgttgaagtgcgatatcccgattggctaatcaatcctgtcgttgtaaagaaaaagaacggctaatggcgagtctgcatcgacttcacagatctcaacaaagcttgtctaaaagatagtttcccactcccatatatagatcgtctcgtggaatcaacttgccggaaacgaattgctatcctttatggatgccttttcgggatacaaccaaatcatgatgaatccagaagatcaagagaaaactttatttatcacggataggggcatctattgttacaaagttatgccattctggttgaagaacgcgggagcgacctatcaacggctgtttaacaagatgttcaacgagcatctcgggaaaacaatggaagtctacatcgatgatatgctagtcaaatcattgaaaaaggaagaccatgttaagcatctagaagagtgtttcgcaatccttaaccaatatcaaatgaagctgaacccagcaaaatgtacatttggagtcccgtccggggaatttctcggttatattgtcacaaagagaggaattgaggcaaacccaaatcaaatcagcgcttttctcaacatgccatctcccaagaatttcaaggaagtacaacgattaaccggtcagattgcagcattgaatcgttttatttcgagatcgaccgataaatctttacccttttatcaaatcttaaagggtaacaaggaatttctttgggattaaaagtgcgaggaagcgtttggacagctaaaagagtatctaacttcgccacctgtattgtccaaacctgaggtagacgaaaaactctatctatatgtctcagtttcgaaccatgcgggtagcggagtcctaatctgagaaggccggtgggaacaaaaaccaatttattacataagtaaatccatgacggatcctgagaccaggtatatcgatgatggagaagcttgcacttgcagtagtaacctcagcttaggaaaacttcgtccatggttttcaatcccatccaatgcgaagtgttatcaaatcagccacttcggactattctccataccccgaaccagtccggtagattagcaaaatgggcggtggagttaagtgaatatgatatagagtacaagaaccgagtcgccatgaaagctcaagtcctagccgattttttaacggaattatccggtatcccggaggggcaagaaccagccgcaaaatcagacttggaagttgcatgttgatggatcgtcatcaaaacatggatccggggtgggaatcaagttagaatctcccacttcggaaatccttgagtagtcatttcgattgttattcaccgcatctaataatgaagcnnnnnnnnnnnnnnnnnnnnnnnnacttaggttggcacaaggagttagggccgatgaagtggtcgcctactgtgattcccaactagttgttaaccagtttaatggtgattatgaagcaaaagactcacgaatggaggcatatcttgaggtggtcaaagacttggctagaaactttaggaaattcgaactcattcgcataccacagggagaaaacaataccgcagatgcactcgcagtcctgacatcaacatccgatcatgaagtcaaaagaatcattccagtagagtgtatttcggaaaggagtattatggacaaaaaggagacattcgtcatcccaagatccctagctgcagcccgagatcgcggcgaacctactattgaattaccacctgtcaaaaggcgaaagtcaaaagaaacaactgtacctaagcctactgtgcagaaagatattgggctcgaaccagtagaagaaatcactcccgataccacagtcgaagctgaaaccgaaccgtgggttgaagaagatatactagcgccaaatgaacatcctgaatcagaagctcgagtatttcacgaaatcgaccgaattccggctaaagattggggggctgattggagggagccaataaagcattacatcgttacaggcgagctcccaaagaacagatggcaagctaggaaaatgagaatcgttagcgcgaaattttgtctatcaaagaattctttgtatagacgaggtgtaagtgatccctacttactttgcatttttgggcccgaagtcgagattgttatgagcgaagtacatgaaggcttgtgtggaagtcattcctcgggaagggctatggctttcaagataaagagaatgggttactactggcctactatgatcacggactgcgttaagtatgcccaacgatgcaaacgttgccaactccatgcaccactcattcaccaaccttcggagttattctcttcgatctccgccccataccctttcatgagatggtcaatggatatcattggaccattacataggtcgacccgaggtgtacaatatctattggttctaactgattatttttcgaagtggattgaagccgaagcgtatgtgaatattaaagattcggcagtaaagactttcatttggaagaacatcatatgcaagcacggcgttccatacgaaatagttactgacaatgggccacaatttatttcacacgagtttgaagcattttgctcggactgggggattaaagtcagttattccactccgcggtatccacaagggaacggtcaggccgaagctgcaaacaagacaattctaagcaaccttaagaaacgtttgaatcatttgaaagggggctggtatgatgaacttcagccagtcttatgggcatatcgcacaactcctaggcgttcg

SEQ ID NO: 33397 - DNA, 795 bp, Arabidopsis thaliana landsberg
ttataccggtacaggtgatccatctaataacaaagtccctcaagccggaaactactcatcacccgcatttgtatccgaccacatcaatgatggtgagaattttaaggccggatggaatttcagttcagcaatactagcgggaacttcatcgagcagctcgacaccgttgaattcgtcttcgactttttatgtcaatggtggaagcgaagatgatagagagagttttggtagcgacatgttgatgtttcatcatcatcatgatcataataataatgctttgaatctatcataatgtcttatttattttgcttcttgatcttatttgttttatttttactttttttttttaatgggggtttgtaattgtgtcacatactttgtaatataagagcttagtctattattatcttgactctgttttttttttgttctactttttttgatccgaaaaggtttaaaattaaatacacttaaaaagtcataaaacctaagaggataacagctagcgtgcctgtatcttgactttggtcgtctactaattattggtttttctgcttcgaagaactttacattagtcgactctcaaaaggtcataagatggttgataagtgtgtgtgtgttacgtacatacttagtattttaagagttaagtgtatccttaaccttggatttcttgtgcattttcttccactaattgttcttattttccaattcgaagaactttccattcgtaatacctaaaagggcttcaacttgtacgaaaattttctggtggtataggtttaatattctatt

SEQ ID NO: 33398 - DNA, 541 bp, Arabidopsis thaliana landsberg
cttaaccagtttccggtcatgttctttacttcgttgacggtgtacaatgtgtaacaccgtgtagaagaatctgaactcttcatggtagctgcgagaacattattgctgttgtctccaacaacgaactgaaacagattgataccttttctcaatgtgaattgtaaaagagcgtgaactcttgagctgctttgcttcttttccttggttggtggtcttgtgttggaaggttttgaagccacttgtaatgatggtacattatttttttcggtcttgggtttcaatataggacctgatctagttctgttgtgaccattagactttgttctggtcgagtgagtggtgtaaactgagttggtgaatgtcaaaggacctgatttagctgaagcatgagatgtgcttgacaatgacgatgagctttctttggaactgaaacttctactcatctgactaaaactgaagctaaaccgcctgttaggtgaaggatctctttcctttttggatgacattgtgggaatgtttgctccccccagcagagtttctc

SEQ ID NO: 33399 - DNA, 6847 bp, Arabidopsis thaliana landsberg
  unsure (1)..(6847): unsure at all n locations
aatggatttgggtgaatgagtttatcatatgtataagaatctaatataatatttgaaaaacgctcataggttattttgtaattaagaatagtgacaacttacaatataccaaacggaaaatgatagagaaagaacaagagacttggacttttttttttcttataataaatcaattaaccatggttggaaagggatgtgaggtaaaagtaataactcctggttttaattttaaccatggttaagttaaaataaagagagaaggaagcaggtttttatgcagtatatatcatcattgaggtaacagaggtctctctgacacaagtcatcattgaaaccctaagcctccccacaaccccatatctctttgtctgaaaaaactcttttgcatatataaataaatataagccatatcttttgaaactgtactgctgcacaagtgtagaggcagtggcacaacatctttaagaaagagagagagaaagagtcatttattcatttcctcgcttaaaaatcttgagcacccagacagaattcttctttcttctttctggggttgagaaaaatgagtgaaagagatgatggattggggctaagtttgagcttgagtttaggttttaatcaaaaggacccgtcctcgaggttaaatccaatgcctctggcttcttatgcatcttcatcacacatgcagcatatgcagcagagcaattataaccatcctcaaaagattcagaacacttggattaacatgtttcagtcatcaggtatttacctccttttactaatccagattcatgtctaagattataggtttctttgttttagatccgatctttttattacactttatcctataatagataaaattttcttgatatgtttggggatttttaatcatttggcgtgattaacgtaacgtgcagagagaaactcggacatgagatcgtttctccggggaatagacgtaaacagagctccatcgacggtggtggttgacgtggaggatgaaggcgccggagtttcgtctccgaacagcaccgtctcaagcgtgatgagcgggaagaggagcgagcgagagctaatggctgcggcagctgcagttggaggaggaggtagagtagaagataatgagattgagagagcttcttgctcgctcggcggtggtagcgacgatgaagacggtagcgggaacggagatgactgttcgaggaagaaactccgattgtctaaagaacaagctttggttcttgaagaaacttttaaagaacatagtacactcaatccggtcagtggcatttccgtagttttcttcaataggttgactttttatatgtttttcattgactttttttgttgttgttggatgcagaagcaaaagatggctttggctaagcaattgaatctgaggacgagacaagttgaagtgtggttccaaaaccgaagggcaaggtataaatttttattctattttaaggggttactttcgtaaattttatatagtccaacaaataaaacattagtagttattgctatgatggtgatatgtgtaatggtccattttatgacccataagattatcctaaaggattttaatgggtctctcatgtcttaaattaggaggtttggtttaagctattcagttttcccggtttaagaattaaaaccgccaatgttgtttttgagtcaaattttggttaaagtgttttcagttttccggttcaagaacaataaccgccagtttcgaatacaagaaacaaatgtacttcgggttttctctttcccggatagttaaaccggatatcggattttaatgttttggactgtttgtgtgtgtgtttataggacgaagctgaagcaaacggaagtagactgtgaatatcttaagagatgttgcgagaatctaacggatgagaatcggagattgcaaaaggaagtgagtgagcttagggctttaaagctttctccacacttatacatgcacatgaaacctcccactactctcacaatgtgtccttcttgcgagcgagtcgctgttacgtcatcttcgtcatcggtggctcctcctgtgatgaattcatcgtctccgatgggtccgatgagtccgtgggctgccatgcctctacggcaacgacctgctgctggttctcattagagtttaattagtctaaagataataggtttggtgatttgtttttattatatcgttgaacggacttggaagttcttttcaagagttggtcccatgctcttctttcctttgttttattcagtttctatttatagctgaattctggataatggaaaatctactaatattattgtccaattattagtttggggaaagataagaggttctatcattctttattgttatatattttgattacatcatatgtctgtttttcaccaaatccagagttctattttaaggccatcgaatcataataacgaatggtgcataaactaattttcgcgagcgtcatttattaaagttgtaattgtttaattggggttttctttcttttgcttggaacttaagaaagggatttgtaaagatgattattaattacagtagaagattagttagaagtataaagtaaaaagaagcaatgaaaggtgttatgattgatggagcaagcgtgtgttgtttgcatatgtaataagtaaatgttagccaatacgaatatcgagacatgtacgtgacataacatagcatttggtatgtatatggagatatttgggtccacatagacgaagtcagaccattagaatctcttgcagaacactgaagatacgatatttttttcttcccttatgtcaaaagatctcaaccgacagagaaagagaaaatgagaggtacgaccaagatatctctcggtgtttcaatttttggcagaggcaaaaatagagaaaattatacagaaactaataaatgggcctttgaaggcatgccacttcccacatgtggctatcgagtataggctttaggtggacagttaaatcaaaatgagcgttaaccaatttgtatataagccctggttggttctatacgctccataccaatcaaacttaatcacaaccaaattagtttctaccaaatcgaactggattttttttaatatattattttattaaatattaatactacaaggtaaaattaatactatataaagtgtggtgaaaccatgaaagcgtcataccaattaccaaccgttacttcaaatttttggaaaaaatgaaatgttgaagcgattacaaaatagcactgtctcaaacttgtgaagtaggattagtgcatcatgtggctagtggtcccatagctaaaaaatctctgaagcttgcaagttggagattcgatttcaaatagatcgaaaattttagagatgttctaaccaaattttattaacacaattttttattcaaaacccaggaggcaggaacaatggacagcctaaacgtctagaactgatacgacggcgtttaggaaggggtcaaacgatacgacgtcgtataattctggattgaataatgccaaggtcaattccgtaaatctcggcaacggtctttgtgagcggcttcgtctttttgctttatggtggtggtctgctgctgcagatagtttccattctcactctttctctctcaatggttagatctgtcttttacgtcgcttcgaagtcttctttcttcccttcacatacccaacgaatcctctcaaatccctaattatccaatttcacactcgagatctcgaattggagtttctcatcatcaccaatggcgtctccaaatccctacaccaagcgccgctctccgccgaatgtcgttgtaccgccacagcctcggtctaaatccataggaggaggaggatttttctgtaagtctgttctattcgctctttttctcctcgccttgccgttgttcccttctcaagctcctgatttcgtcggtgagactgtgctcactaagttctgggaactgattcatctcctattcgtcggcattgctgttgcttatggtttgtttagccgtaggaatgttgaatccgctgttgatttaaggatgactcgtgtagatgagtcttctttgtcttatgtatctagaatcttccaggtttcttctgtttttgacgaagagtttgatgataattcttgtgagtttgttgatgtgaggagtgatgagagtgtgagtgctcgagcttctgtggttgggaaatctgagtcttttgttgttgaaagcggcgaattggaagaatcgtctgaatttggtgaaactaatgaagtccgagcttggaattcgcagtattttcagggtaagtctaaggttgtggttgctcgacctgcttatggtcttgatggtcacgttgtgcatcagccattaggcttgcctattaggaggttaaggtcatctttgagagataatgctgctcctcaagacaaatcttttgctgatagctgtgatggagctgttaatgcggaagctgagtcattattggctgataatttttttgatgaggtcttggctgctccggcttcacctgttccatggcaagctagacctgaaatgatgggaatcggagacaactatccttcaaatttccagcctatatctgtggatgaaacccttaaatcgatatcttctcggtctactggttcttcttcatctcaaactagttatgcatcccagaatcagaacagattctctccttctcgatctgtttccgcagagtcactaaactcaaatgtggaagagttggtcaaggagaagagtcgccagagttcatcacggtctagttcgccatccttgcccccatcaccttcactgtctccatctccaccatcgccagaattagtgcccaatgatactcnnnnnnnnnnnnnnnnnnnnnnnnnnnnnnnnnntcccaggcgtgcgtcacattctcggcattatagtgatggttccttgttagaggaagatgtaaggcgggggtttgaaaatgagttggaggggagtaaagtcagaggcagaaaagcagaattcttcagtaagaaggaacggggatctaaatcacttaatttggcagctgaaagttcccggagagggaacaagtctcgcagatcctatcctcctgagtctatctcatctcccgttggtggtgctgatgactccacaactagaagacaagatcttcagcaaaagagtaattgtcatttgcttgaagaaaatatcaggaaaggagtggaagctgaccataacaatctgagggtcaaaaagggaaggagtcacgactctttggagctaacagcagaagattctgcaaaagatgagaaggtcagtgaatcttttcctgctcttgatgtagtgttccaaccaacaaatgctaaagcttcaaggcgcgccatgcgttcttcacgagggggacgtgacactttgccggagaaggatgttgtcaccagaaaattagaggatgacactgtggattcggataagtccaggaaaaaggaccttcctggtataagctaggaaagttgacaccggaacattgtgctcattttgaaagtcatgttgtcatgtgcaggagctgcattatggaatggtgcaacgagaagcaagaatgccctctttgtcgaacgcccaatacccattcaagtttggtttgtttgtatcattctgatttttaggcacaatgggatcaacaaagacaggcactgcagaaaggcaaagcagctaagacagtgacacctaaggacagtgcatctgctacaggaatggaatctgcttcggcttcagactttttgagtaagatcaacaagttatgagagaagacagaataaatatatttctgacatcattctcgatcccatgcctacctttttctctatgatatttagtgcagaaaccacagaggtttgttgttttacatttcattaaaaagagttggagatgttaggtggtctttcacattctatattacatataataatctcaattggagatctattacaagacaagaaaatctcatattaggcacaataccattttaaaatgttaggtgttgttcgtttaatcagttaggtagtgcctctgggtgatccatccagaagatccattcagatgcatcatttggatgatgttcgtttctgaagttgatagtgcatctggatgaatcatttgaatgcagatgtgttcgtttgaattgttttttaacaatgtgcatctgcatctgaatgcataatgtaccaaatgactaaaaaggacatatatttattttagtgtaattcttcaaattttaaaggagtattttagagatttaccatttttgactgcagctgatgcatctagatgcaccgatcaaagtcagctaaatattttaatttttttgtatgagttttataaactcagccaactgatgtatcaaactattctgttatattgtgttcaaacgaacatcagttatcatctgcatctagatgcatcagtcaactgatcaaacgaacgacaccttaatcatacaaactgaacattgagttcagacaacccttgtttcttggagatatagaaagatatcaaaatcgagagtaactcttaagaactcaagagtgattttgctccgcaatttgttaatcctcctagatggaaatcttaaacataaagatgtcttatatgaaagggtttaacaattgatagagatatatgagcgtgtcatcacccagcggaaataagctagataagattactccagtatacgtatgcggttatgtgtagcagatgttgcattggtagaaccggtaagtggatgtggatcatgtcacctcgccgacttttacagcaaactattttggttttaatatatgcctcaattgaagtt

SEQ ID NO: 33400 - DNA, 1081 bp, Arabidopsis thaliana landsberg
cagtaattagattttttacatccgcgtcattttgtacctggcgactatcatcttctaaggaatgaaggtccagtttaactttggcaagagaatctaaaggacaatgtggagctttaggccgaggaaaatcagagtagtaggtcgacaacattcggcgtgtcaagtgtaagaattgtagaacgatcaacatgatagctacaattaatggtaactgagagtttcttaaggcttttgctggatatgaagaatgggcgaaacatgtgatgtatggttaagtcctcaagtgcagggcaagctgcgagaaacacatcagataattgattatcctcaaaccatatatattcaagtaggaggacttttaggaccgggagagatgtatcttgaggaattcttgggcaggctagttgtgttcccaatgacagcataaccagtgtggtgctggtgaagaatttgtatgggaatccaaactgccacaaagaatctttttgtatgttctaatatagccagggtataacagaatccactacatgttcaaatctatatatttcattacttattagtgagaacgtctttatatggccaccacctaggagcgccaatgtcctctccatgaactcctcaaaacttttttgaatgtcgttactaaaagtacttgttgtaactgtcttcatggtgccaaaagattgaatcgtccaagtcaagattatgcacgagagaaaacagagtcctccacctctttgggagaagagacttgctacgggggcccgggtgttaagttggaatagagacgcttcggggatctgctatctttgcaacagctgccttgaactagagatcatctttttttctcttgcacgtttatttcggaaatttgggatgcacttgctagaggactgtttaagcaggagtttacaagtgattggtctcaacttatcaatatagtctcagccccgcgtagtgatcgagtggagaggtttctcatgagatacttatttcaagcaacagtctatactgtttggagggaaaagaacgggaggcgccatgaggaaaagccacaatctgcaactatacttattcagtg

SEQ ID NO: 33401 - DNA, 1337 bp, Arabidopsis thaliana landsberg
  unsure (1)..(1337): unsure at all n locations
catcttcaatataatacaattggtcatgtcatttctgttgcttatgaaccagagcacaaagtttataaccctcaccaagcatagccttcaaagcttcaccaacctactctaccttactagcagtttgtatctcatctaccttactagataggccgttgatttgtgtctcagcagcagtctcaccaaactgctccattgccaaatttttagtttgtgcctcaacaccaagctgatatccctaatcatgacacatacaatatatgtgttggcgacgattgggaggttgattagatagttaagcatttaaaaattttgaaaactgatttgatgaaactttgtaatttttttgtttgttgttgtgcaagtgagattttatttatttgaacaaagacaattagggtgatatagtagtttcaaatcatataaacgacatagtatgagtaaagactcttcttcagcgcaagtatctcctactcgagctcttccttcttgaatcctttctcttagccactattcctcatcctttgcctcttctcataccttctagccattcttcccgttctggctcctttactcacaaaggctaatgacacgacaagactatcaaatttgagtaacaagtgatttgtgtttaaaaacaattaaaaataaaatgattaatacagttataattgttgaaacacaccaacaaaacatcttcgatttgacccaataaaagaaacatgtagggcaactaaattcattgtccattcaggacaaaatattagaccaaccaccaaactttagcttttgcctatgacattgttcttatatcctactattatgtttgcacaaactcgagtataaatgtataataaggcattaagccattaaattgtttttgtaaaatatttgtttgtctataaaatatttgtttttgtacgaaattgcatagattcgtttgagcatttcagcccaagctttagaggaagaaacattggttacataacgaactaccgagcccattcaaaagcccattagtgtataaaacgaaagccctaatttctccaatacgcaaagcgagtgtcgaatagagagatcatctacgaagaagnnnnnnnnnnnnnnnnnnnnnnnnnnnnnncgatctgacggtgaacggcacaaaactctcaatccaacaagacaatggctctatgcacgtcggaacttccgtctggccttgctcactaatcctatccaaattcgctgaacgctggtcaacactagactcatcatcatcaacaacatctccaaatccatactccgaactcttcgatttccagagccgtcgatgaatcgcgctaggaacaggatgc

SEQ ID NO: 33402 - DNA, 1960 bp, Arabidopsis thaliana landsberg
agctttccgcgcgtgagggaggggccgacatcaaatttctttaattgaaactcgattccgcagtgctgtggggtgtatggattccttttctacttctgagtctgatccagaagccattgctgtgtagccggagacgccttcaaaaacttcaactttgaaagagagggctaaaaagagagagagagctctgctttttctattcccttgaattcactcaccctagtctttttattattttctttatcaccctcttatttattaagaatctcttttctgcccaatagttttttttgttagtgttcctaactattttgtcataaagtcatttattgtttttgatgacatgtaacattaccaatgagtcaatgcactatcattctatcaatgtgtattgtatacataaacctattcataacatttaaaatatacttttgcaaagacactttttccatatatttatgtcaattttgatttttaaagatcttccttttcaattgggggagaaacttttttccttatcaaattgtgacattttgggtgggttacaaattattgtaaggctttaaatgggtaaagttcataaataagttataaagaagggcttttaataaaaatacttaaatttgggcaaagaagcaatttttattcctcgtgaactccacgccccctttcttctccgtcagataacaaaaaacaaatcaagcaaatttatttatcttggtcaagagacattgattctcttaaatttctgcaaaattaagctcagagattcacaccgcatctgaaattgtgctcagaggggttccaaatattaccagtcgttaggtatttctgttcacatctctccaagtttgtatctttggggttagattttagcgtttctcttctgaattcgattgagttttctagggcttttcgagggtttctatatatacttctcggttttgtgttattgtgtttctccggtccgacattgttatttacctgtttctgcatcttgagaaaaagactagacctttaagctgttgttggattatcaatatatatatatatatatatatatatatatatatatatatatagctgtattggtcaacgatcaataggagaagtttggaacgaaatctctaacatcttatttgctgaaatgttgaattgttggatgtgttgagtttatgcatgagtagatctcgtagtgagttagcttatagctgacttcgtcttgcaggaagcaatcacgagttgttttaggaattagtgaacgtgataatggctagcaatgagatggaaaaatcgagtaaagagaaggaacctaaaacacctcctccttcttctactgcccctccctcttcacaggtttgtgtttgcccttctctgcttccaattttcttaagaggaccataatgtaaaaagggaaaacaaatcccatgatttaagctattagaagccgaattagaagtgagatactagaaaggaaaataaaaatattctagatttcagctaattgtgattttgtatacctatcagtgatatgctttagttggaatatttctgtgtttgtaggaaccttcatcggctgtgagtgctggcatggctactccagattggtctggttttcaggttaggacagattcctccatctatggatctgcgctctcttttcttgttgcatttgatctttacggctttcttttcgacaggcatattctcctatgccgccgcctcatggttatgtggcatctagtccccaacctcacccttatatgtggggagttcaggtgaactggcttacgctttatcgctttttactgtgatgtctatcggtgttcagagtgctggaaaattgcaacattcttattgacttataacgaattcgttcagctgtctttcatcatatctttgattgattactgaatgagacattaaattttgcagcatatgatgccctcctatggaactc

SEQ ID NO: 33403 - DNA, 2134 bp, Arabidopsis thaliana landsberg
acactccctcttggatgaccattataaaaatatagtctcaaatgagcatgtaagatgatgatgcttcattaaaaaaccttaccagaaaaaaccaatggaaaaaaccatggttaaggaaaaaagagtgcagcgtgcttctactccccctcatgagtacaacactagaaatcttcaagatgccgcgatccaattatgatgaactaacttcttgaaatagtagttcgaaacgtcttggtaaagaggctcgccaaatcttcacttgaacaaatttgtagggcacgtacatcaccattcttctacagttcattggtcttagaggtgactcatcttgatcattgtctttacttaccataatctcataaatgtatggcaaagactttgaataataatggtctctcatccccggaatcaaaatatttctctttatgtgtctatcattcgtatattatttgttgtttcgtaaaaaccatttcatgaaaagacgcaatgggataaaatcatgataatgggaaaatagtacaactatgcacataaccatatttctccccctaaaatcattatctttaaaataccagtcatatatatatcatcttttaagaaatcattatattcttaaacttagtaaacatacttttcaataaatctttttatcaactgttgtttatgatcctcgattttactttataacattatcaactgcttcactacatgcaaaataaattaccacgttagtttgcttttgttccattctattctagacatgactcaacttgttgagatttcctttcattatcattctcaggtacctgaatgtattttttatacatatataactctcttctagagatatttcataattcattgcttcctcggtgccatattaatttagggggattgacacaaatagcactaaaaaactttattattccaaaaatgacaccttcttttgaaacttccaaaaatagcatataaagtttttaatcctccaaataaaaatgagagcaaacacaaatctaatattaatttgaatcaaaatcttttaaatagtgaaaatatataccctaaattggaaataaaaaaaccaaatataatacaacaaactaattttaaaacaaaaaatctcttttaaatggtgaaaatatataccctaaattgtaaataggaaacccaaatataataccataaactaatactaaaatggatcaaaacttctttaaaatagttgaaatatataccctaaattagaaatagagaacccaaatatattattttaattttttttttaatttattttggttgaatagatttatataaaattatggtattattattgtccatcaaacttgttttagtgttacttttaggaatttctcaaataattatttgagtactatttatgtctaaaaaactttttaatgctatttatatccaaaaaacttaaaagtatgctatttgtgggaatttctctttaaagatttgcttgtcaagttgggtgtttgtaaccttcacacttcacttagaaaaaggagggtaggtatcaagctatatgggccttggcccttcggtttattgtaataattgggtccatcgctatgcttcagttcatggccaccaatatataaggcaaatagatgtaacttgaaacttaagaaatctgcagatttatactactaaaggtttcttgagatcacataattcttctgaaatctgcagatgtattttgcgaaatctcctttattgttcatttatcaaacaatgtcaacttgccgatcgataacccaacatatatcatgaacgctaatccgtgaatatctaaaatccacaaacaattcatacatactatactaggccgtgcatgcatgatatgataccatttaaagcacatatattcatttacgtcctactattggtaaaagataccaaattgagaaatgttttggtattacgatagaaacaacaataattcgttaatccgttcatagttacatagaagactatgaagtttcagccataaaagaatagtcaagaaatacgatattatttttggattgaccttgaacaggccaagaaacagattattaaatccgttaaaaaaaaaattttcggtatcaaaagcatggtaaaaattcacttt

SEQ ID NO: 33404 - DNA, 422 bp, Arabidopsis thaliana landsberg
ggacggtgatgacattgccgccgccaaggtcgatgacggtgtcggcgccgacctgtctgatgatggcggtggactgggcgtgataggcgctgacgtggatcatgtcgccctccgccgccgagaagtccgtgatcgtgtcctggccgctcagggcgtggaacaggaaggtgtccgcgccaaccccacccgtcagggtgtcgttaccgcgattaccgtccagaatgttgtcgccgccattgccgaccagaatattgtcctggaagctgcccgtgccgttcagattgtccgacccggtcagcatcagggtctcgacatacgcgttcagcgtgaagctgacgctggagatcaccgtgtcatgaccgccattggccggcgtgctctcgaacacctggtcgccgacattatccacccagtagggtgtc

SEQ ID NO: 33405 - DNA, 1334 bp, Arabidopsis thaliana landsberg
  unsure (1)..(1334): unsure at all n locations
tgcacaggtaccttattacattttctaaacatgtcaggtcacatccttgaataagtctgttgcttttattattatgcatgcatgttcttacataaaatctatgtggcttgtgtcaacagaaacgtgcgatggatgcagagtatgaagctgcagaagcatatagacagattgacaagctgaagaagaaacatgaaaacgaaatcaacacacttaaccaactcgtcccacaatctcatattcacaatgaatgctctaccaaatgtgatcaagccgtggaaccatcagtaaatgcaagtagtgagcagcaatggagagatgagtttgagccgctttacaaaaaagaaactgagttttcaaatcttgctgagccttcttggttttcgggttatgataggtgcaacatataattctaatatctattttgtgtgtttaatgtgtataaaatgggtgtctgattctgtgatataagtccaatttcactcataacttgcaactcattatgtacaaatgacgcaaacctcctggattcgtagaagattaatccaaccttcatgcagatctcttagcttagactgcaatcctaattcccaaacaattctacttttcattttcatatctcgcactctctttattctagtaacaatattcatatttttggttattacactaactagcaaattacactaacggaactacgtctatcaacgtcttcaaagccaactccacgatcgtgacctgtccggacaaatatgttctaagattgtcgaagcccaactgcaaagaagtcaaagtttttacttgccacaacaacgtcaacaacctttattcatgatagtctctgtcagattgacacacaagttatacagtgttgtgccttgtatttcttctccgtcggcaacagatttcgaccaagagagccaacaagaagatgaagaagaatcggagacttgtgcaatctgtttggagaatatgtcgagatcggagaattattgccagatgccttattgtaagcattattttcatgaaggatgtctcactgagtggttgacccgagataatagctcatgccctctctgtcgcaaacctgttgacaaactacacagttgactacatgtttactaattagggttttacttttacgtcttatctgttaacttgttcacgtttatgggttgcgagattcaattacggtttcccatacccatgtatctngtattgctacaactatgcaatacatcactgattttatcaacttcatttaccactcttatcctcttctgcgacacatatttcttgcatcacaaatcacttactcatccctcatatatattcca

SEQ ID NO: 33406 - DNA, 555 bp, Arabidopsis thaliana landsberg
tataacgactatttcactgcgcctccgactcgaaactccctctcctcgtttacttccacggtggaggattcatcattgagacagctttctctccaacttaccacactttcctcacgacgtctgtctctgcgtcgaactgtgtagcggtctctgttgattaccgtcgtgcaccgggagcatccgatctccgtcccgttcgatgattcttggacagctctcaaatgggtattcacccatatcactggatctggtcaagaagattggttaaacaaacatgctgacttcagcagagtgttcctctccggagacagtgcaggagcaaacatcgtgcatcacatggcgatgagagctgcgaaagagaaactcactcctgatttgaacgatacaggaatctctggaatcatcttgcttcatccttacttctggccgaaaacaccaatcgacgagaaagatactaaggacgaagcgctgaggatgaagatagaggcgttttggatgatggctagtcctaatagcaaagatggaacagatgatccgttgctcaacgtagtgcat

SEQ ID NO: 33407 - DNA, 349 bp, Arabidopsis thaliana landsberg
atcccggtggttcttgtataggcttcatcgatcaaggttttatgtgtgtatgtaaagtaggataaaactgatgaaaattgctactcacatttaaacatggatggatctcttctctgggatacatgagcttttcaactacgtgtcatatagccattaacgactaactagtgggatttatgaaataaagattcaacatttttctcccataactgggacatatctgctgtgtttggaccaccggccgatcgcacacgctgccgggtctactcgctccattaccacatgagtgtcctcaccgaacatgagctccatccgctacccagacaatatcatgacttgttcgaagacc

SEQ ID NO: 33408 - DNA, 4250 bp, Arabidopsis thaliana landsberg
aaaactgcaagtcattgagacgctaaaatgaagaaatctaacttttcggaaacaaaagtaaaatttagaatgtaatgaaaaaaactattgttgtgtacctgtgtcaataacaccaatgatagtttgatcacccatgtttgtatcacttacgagattcttcgaattatcagcagaaggacctaagtagtcccaaatccgcgttgttgcaagttcatagtaactatccggtatgacatggataacttcaggagaatctgtaatttgcagaataaaaatgcatcagcaatgaaaacattcagctcagacgatcaaagtatttgagtgctaagaagctaaagacatgggtgtgagttaagagtaccagcgattttcttggcttgtgacttggtgagtttggccgcaaagcctgagaatccatgtcgataactatacaccattgactcatgggcatcatctttactgtgacacaagaataaaactcttcagtaagagctttagacataatgcgacccattggaattgaatcagctgtgtaccttccaagaaatgaagacaacatctggtgatgagattctgtgacaaatttaggatcatcatgttgcttctcccccagatacactatatgaacctatataattatcatcatcacaaaacaaccagaagttggttaaaacctattttttgttcaatgtatgataaaaaaaaactatcaaatttaccttgctcttagcactagctcgtgcgacgttcaaaactattatcagacttagcaccacaagaactgatgatctaaaattcctcattccaagcaaacaaagaaagtttcattaatgaaactatacgaggaggcacgaacatgtttatatatagatgtcttctccaagaatgttgacattacttggacatggtcttttcgcatgttcttctatttcagtcacatataaactaaagaatgttttccactcagtagaaggtcaactatattctagtttaaagaaagtttagattcaagacaggattcgacagagcttaccagcaaataaagccaccgtggctcctatgtgatgattgagaatctgtaaaaaacttggttcttctggtagtggcagtgcactacttggtatcatccatcccaatatcctaagctatgtagaaaaagcctccatggtaaaaacaagattacttacagtccattatcggcaatcaatatacaaggcggccatacggcacgggaaggaaaatgccgtgaggagtaataatgttataccaaagcaaaacccactaagtcgatttgtcttattggtttattaacatatgagcaaggcagatgaacttgcttaatacaatttattcaaggtaataagaatcattcagttctcatcatagtagttttgcagaatctgcgttctcacagacacaggaatagtcacattatgcatagaatctgtccatatcaagtttccaaagtagaatccagtgttgattttgtgtgtagttgatacacggaccgtgaaggagacatttttggttttggagttaaacactagtgtctccggtgccacaaccacttgaatgccaagcggcggctcgaccacgaccttgtagacagagtcgactgttccaacgttagtgacggttcgggtgagagtgacctcgtctttaaggtctgggatggtgattgacggcaaattgacatcaagaacggaagttttgggggttgagcagactgttacattaccgacaagctgagtgatagatgagtcgttgtacccggcggagcataagtagagaatgtagtctcttggacccatgtcgtatatgagaccgggatctgcagctttctcagggttcacaatgcctccaccgtaatcaaacggatcagctactttgcgagatgacccttctgcaaatatctgctctccgaatggatctgttctccaagctgcaaagtagtgaacacaattattgagacaagtgtatcctttgccctttgcttttgatcggttgttctgcgattgagtgaaaataagaacctgtagtgacaatagctgatctaaatgcagcaggagaccaattaggatgcaaagctttaagaagtgcaacaactcccgcaacaactggagctgccatcgatgttcccgcaagaatatcaaatccccctacacttgaattggaatcggtagatgtagcagctaatatgctcactcccggtgcccctatgtctggctgcattgcaaaaaacgttacattttcttgtttttgaaaacatctgatgcagaaaatctgaaaattaggatccggacatactttaagaatcgctggggaaatcgagttaggtcctcttgatgagaaagttgccacctttgtccccacaggttgtccaacaagtgttctagaaggttgtatcttcacaacaggtgatctgaaaattatatacaagtccataaaaatactgatgcatgttcatatttgctcatagttcatatattcataccctgtggaacgtatgtataaaagtatatctgtcccaagctcgtagtcaacagcaacacaaggaaaatcatcttcacatggtgaaagattgtcgccggggtttcttgctacaattacgccaagaccaccagcttccttcacaaaagacacagcacttgatacagtgatgtaacgtgttgatgttgtgaagcataacacgactttccccgccattgtatggttggagttgaaaaatagaagctcacagtcactgcatgatatgatgttagagaaatgatgtcatccatatagaaagatttggtcctaattaatgagaaactagagatttgatcttcacccagaaaaactctcgttgctgttccctggattctctgggtaaaccaagctagtgaagccaagttctggaccggtgtacattgcttgaccctgtaataaaattaccaaactcacactaaggcacgtatcatcaaacattatgttgtgaaaaaaacattatggtgttgtatatatcttgttgttaccaatatcagtttattgttcccaagtgttataggggtgggaaaggaccggtctagagtggttgcagccactgttaagatccaaggagctatgtttaccacagtctgagctgctggaccatcgttaccacctgcacaaacaactacaatgccttttgccacagcatggaataatccagtagcaaactcatcacgtatgtcggtttcagaattcagaggaatttgaccaacaagagagattgacaaaacatcaacaccatcatgtatagcttcgtcaattgctttcatgatgtcagaatctgaacaagtcactccttttagctcttcatgaaaccaacaagccttgtacattgctatgcgagcacgaggtgcaccacctctcaaggttcctccagcaaggcctttgtagcttacgttgggaacaaatgaaccacccgctatggaggcgacgtgcgtgccatggccatcaaagtctctagcggaaatgtagtcacgtgattctgtggtgttgaatcctttgttttcagcaagaaacccgttgataaagtacttcgctcctatgagctttctgttgcaatctgttgatctgaagttttctcctgattcacagcctcctttccatttccttggtattggtccaaccccattgtcattaaatgattcagactctggccacactcctacaaccacacaaaacaacaagttattgaggcactaaaatatagaaacaaagataagatctccaatgtgatgaaatatatatactgatacctgtgtcaataacgccaatgataagttggtcacccatgttcgtatcatttaggaggttctttggattggcagaagaaaggcctaagtattcccaagtccgtgttgtcgcaagctcatggaaaccatccggtatgacgtgaacaacttcaggtaaatctgtttcaagaatcagcaatgaaaacattaagctctgcttggttagacagtcaaactatagtgttagttaatatcaaatattttgaatgctaagaagcaaagacaaggtgtgtgtgacacttaagacaaccacgagttccagctatttttttggctcgggacttggtgagcctggccgcaaaaccttgaaagccatgtcggttactatacaccattgagttatcggcatcctttttactgtgacacaaaattaaaatcttggtaaaaagcttgagacataatgtgccaccccaatgaactgaatattgatca

SEQ ID NO: 33409 - DNA, 135 bp, Arabidopsis thaliana landsberg
caactagaaccaaatcttggttctaaattgaaagtctgagactactatagttaagcagctaaccatggaattattggtgcccctatgaaaaatgacgtcgggtaaagaaggcacccaacctaaagatgaaatttg

SEQ ID NO: 33410 - DNA, 426 bp, Arabidopsis thaliana landsberg
catgtatggtggtagggtaaaccgttcaccgtttgttgtgtagggtagatcgtgaatttgtaggaattttatatttgcgtcaattatatatttgggtacataatatctcctggttctcaacatttcgaaactacagaaatcaaaaatgatactgaaatttctgtttttggtggctgaaggggatcgatcgacccggagcaggtccaataatagaccggacccaagtcatgtttaaaaaaacatgagctcgacaatttcttaaatcttaaggatcagacttttcaacattcgataatatttgattttgttttttttttacaaattatatgattttgtgcaccatcacacgagtttaagtatacggacttagtttagaaaatatcggagcgagaggaccatctctcaaaagtgcggttaaatgtgaac

SEQ ID NO: 33411 - DNA, 2534 bp, Arabidopsis thaliana landsberg
gcgaatgtgacatggaggatgacacacagaggctcccattggtgcagaagaagaagtcaccaccgtttggacgccgccgttgatcaatgagtcgttggaggtaacggggaagggagatgtagaaacggcgtcgtttagctcgtcggatgatgtggactactcgacactgtgtgttatatgcttcgaggaacgtagaaactgtttctttgtaccgtgtggtcactctgccacttgtcgcggctgtgctcaaaggatcttgtcggaagaaagtaaggtgtgtccgatttgccgaagggtgatacgcaaatcaaagagattagtgttgaaaaagctttgagcgccgttgctttgcctaatcaccattttgcgaactcatgcttccaagaaacgccctttgctttgcgttttattattatttgttcttttcagttttcagcgacacaagtgaaagaaagatccgagtatctttggtgtcaccacaagactataattccatacaatctgtaatttaacaatgcaattctttaacaaccaaaaacaaagacaattccatgccaatgtacacactagcatttggatttgtttctttttcggtaaaccgatttgtatttatcatgccaactgtttgcgtttttgggggtgtatcatgaaattaaaatcaattctgtaaagtttagatttgaaatttgaaattatttttaaaaatctattttgagccatttgaaatgaaatttcttccgagtttataacattggatgctaatgaaagtatttaaaatcttagttgaataacaccaaattatagattctagtaagcatgatttacaaatgtaaagatttcataacaacagattttaaagcatagtttagaatcattaattgaataacattggattagtgttaaatttcagttctattaaattcatgattgaataacaccaccttatagtttatgccggattataattggaagaaagaaaatattggtttttgagctatagtgtatatgttcttataaatttagtatttggtattttagaatgtatcaacaatatttaccatgctaaaatcaaataataaatcataaaaataaaaaactactttcataaatttaaaggtctacataagaaaactctacaaagtaacatattgcaaatataacaaaaaattcaaaacatattttaaccatatgaaaaatcttaattattatattatggattaggatattcacggaatttatctgatttttgtttgttccccatagaattccgcaaaaatgggttgtggtggaaccatatgggtgggttcttgttgactcacacaagttggtacataatgagccgggccgtgagtccctaccgattcactcttcacacgcttagcacgtgcagttttcatcaaaaaacgcaaacgaaattgagcaaaaaaataaatattcaccaatcgcttcataagatttttagttattaaatatttattgccaaaaagaataaacgaagaaaaagccttttcttctctctcgttttcgcgacaaccttttcttcgaagaagaagaagaacgaggttttctctcagagctgccaaccatcgttgcccggagatttaaaaaacctgtgataaatcgtaactgagtgagagatatatacacatatatatacacagagggacaaggaaagagattgggatatgcgagtgcgcatcggttctgtcggaacggctaactcgcttgacctagggtttcgtcttccttgtgcttcgtggtgagttctatattcctctctctctttttacaatgatgaatagctctgaaattcgcctagggtttattagtggtattcatttggtcatctgtcttcaattttttaatcactttttgaattgatctttggaatcttattcattgaattggcttaatctcatattatttgtcgtatagttctccacatgtgttgaattttgctagttttttcttcttctcaattttagggttttgatcctggacctgggatttggttggcatgatttttaaatagatgtactctatagtttctgagattgggagattttacaatttttgttgtcctttgtctgtaccatcaatttgaaagtcgctgtattcctgttaatatcagtcacggtcactagaaggtatagtgtagttgtcctgcatattgtagttatttgtttttggtactatgccaaatgtaaattcatatttcttcgacaatggagtgatcttggattccttgcatatgaattgggtctctctaagccatggtgaactcgatttcatattcaaaatattttgaacagtttgattgtgttttttttgtacttgtcacagtaggttaatgacataaagtttgtcttgttctgtttttgttttgtttctcaggaatttttcgaatgggagaaagaacctttttgctttctaaccgtgttctatatttttggagttgtcatacgtaaagccagtatgacccttgaagatttcttaccctaacagaattaaaagatggactcaccgtcacttct

SEQ ID NO: 33412 - DNA, 474 bp, Arabidopsis thaliana landsberg
acaatgagcaatgctacatcattttagcgtttgcctgttaggatctagaggttacgagttatgggtctgttcaacacacaatactattgtggatctctatgcgaccaaagacttatttatactctatcaggctaatgaataatcctaataacgaacacaatgaaactacaaaatctaatattgaacgatcaaaaatgtaaattatacttatttagaatcatcacatagttaaggatcacatgataacatcaatcttaacataaaacaagagaaaacaaagttgatgagaaaatcagttgttacatcaaatttatgaaccatatatctcaatctaattgcatataaaagttaaagttcttgactatgaaatatgaattacaccttttcctcttattttatatgtgtattggctcggatacctctaaaattgagtctctttaacatttgttggcataggaatgatttgcttttatt

SEQ ID NO: 33413 - DNA, 1557 bp, Arabidopsis thaliana landsberg
ttgatatatccaaaaagaaccaaaatatatcaatcggaaaataatgaacagggtcctaatggatatattcatagagatgatcacagaaaagtcgtctatatgtagcaaaaataaaagtgaaatgtggataaatcatgatcatttatttaagcgtatggtcccattttaattacataacaaataataatctacgtccaagtcagcctgctttggctgcttaagaacttttcaaaacacgacagcttcttcaccaagcaagcaagaaactcaacacaaattataagagaaaaacaaaaaaaatacagacttcactatttttttcttctcctaacttattttccaaaaaatggatcatgacatcacgacgaaagtcagggcgatgtttgatcaccgtaggttaaaccgctctggatcatcactcttcacagcgtttgcttccacggttatagctctggtcgttttcaccatcgttctcgtctctaatttatcggtgagagaagatttctcagcgaaggtggtgacaatagagatcaagacaattgttccttacttacctctaagctcagagaaggaggtaagtgatcaagtcaacaataactattcgatcaagcaacaaatcacagtcaaagaagagattaacaaactgcaagttcttgaagtttttggaggcaaagacgtgtcggagaagtttcaacagagagcaacagagtttttgagagatgattgtgaggtcaagttcatgatgacatggatctcacctgcggaattgttcggtaagagagagatattatctgtagaaagcgtattcaaatctcatgctagaggttgtttgatgattttatcatccacaatggattctcttcaagggtttagaatcctgaaaccgtttcttgatcgaggttacagagttatggcggtcacgccggatttgccttttcttctcaaggacacagccggagaatcttggcttgaagagattcagaccggtaaaagagatccaggaaagatctctctagctcagaatctatcaaacctcatgagacttgcttatttgttcaaattcggaggtgtttatctagacacagacatgattgttttaaagagctttaaaactctaaggaacgtgatcggtgcgcagactctggagccggtttcgagaaactggacaagattgaacaatgcggtattgatcttcgacaagaatcatccattcttgctcaaatccattgaagaatttgcgttgacttttaatggaaacgtttggggacataacggaccgtatcttgtttcacgagtggctcgagccgtggaaggaaccgatggctataacttcaccatcttgacacctcctgcgttttatccagtgaattgggttgagattgagaagctattcaaggttccaagaacagagaaagattcaaagagagttcaagtcaaggttcttgaaatgcagaagagaagctatggattgcatttgtggaataagtttaacagaaaattccaaattgaacaaggaagtgccatggataaattggttgcaaatcagatgtataattt

SEQ ID NO: 33414 - DNA, 5181 bp, Arabidopsis thaliana landsberg
  unsure (1)..(5181): unsure at all n locations
aaccgtctttacattgcaaacacacccacgtaccactcagccaaaatgttagtaccattcagtctcgtgtccgttctttaaatgcaggaaattctagagttcggagaactatctttggatccccaaattcccttccgcgaaatgcaacaagtgaccaaacgaccccggatggtacaaacgcggagaatcaaccagaagatgttgaaacttcgttcagtgaccagcacgagcaggaaaacttcgaccagctcaaaaccatgaaagaagtaagccgggagttgaaagaaatgaggacgagattccaccaagctacaagctgggagccggatatcaaccgagttatcgaggaagctaggcgaacaccgttcactccgcgaattacgagtttgagaatcagagattctcgaaaactcaacttagaaccatataatggtttggaagatccgaaaggttatctcgcagcctttttgatagccgctgcgcgagttgacctaaacgaagcagatgaagacagagggtattgcaaacttttctctgaaaatttgtgtgggcaagccctgatatggttcactcaattggaaccaggatcgatcagtaatttcaacgaactatcggcagtatttttaaaacaatactcaattctaatggataagagcattttggacaccgacttctggaatctatctcaagggccaaatgagacacttcggactttcattaccaaattcaaaacgtgcttcaaaagctcccaagaatctcacaacaatcggctctgtctgctcttcgaaagggattatggcatgattcgaggtttaaggaagatctgatacttcacaaacctgatactattcaggatgcattgtttcgagcgaacaattggatggaagtcgaagatgaaaaagaaagtttcgcaaaaagaaataagcaagcaaaactagcggtcacttttccaccaaagaagttcgaacctcgggaaaatcagggaccaaggaagtttggttcacaaccattcaataacaacgtcggaaagcagtttcaggggaaaggaaggtcaaatacctgggtccgagatgaaacctcgtactgcgatatacatagagtcacaagacatctgaccaaagactgcagtatccttaaaaggcatatcgcagaattatgggccagtggagacatttcaaaattcaacatggagaactttgtcaagcaatatcatgaatcaagggataactcagaggctcaaaactctaaaagaccaagaccggctggcgaagaggaaccaagaactttaaatggtaaaataaacgtaatacttggaggatctaaactctgccgtgattccattagcgcaatcaagaaatatagacgcaatgttcatctgaaatcaagcttaagtgaagaagtagactttcaaggcacttcgatattattcgaggaaaaggagacacagcatctcgaaagacctcatgatgatgcacttgtaattacgttggattcgaagtatcgaggatcctcattgataccggtagttcggtcgatctaatttttcttagcactttggaaaggatggggataagcagggccgacgtggtaggaccgccatcccccttagtggcttttacaagcgaatcgctaatgtctctcggaacaatcaagctaccagttttggctggaaagatctcgaagactgtggattttgtcgtttttgataaaccagcagcctataacatcattcttggaactccgtggatctaccaaatgaaagcggtcccctctacttatcaccaatgcctcaaattcccaactccgagcggagtggaaacaattcagggagatcaagaagcttcgagaacttgttatttagctagccaccgattaaaaattcaatagcaattaacgaagcccgcaaagaaaggagtagtcccgagattccctagcgggcagaaagtggatgatgtcgtggtcgaagtaattctagaagcagacaaaccggatcagaaagttcgaaacggagctaccttatctggcgaggtgaaggaagccttagttgaacttttaaaaaggaacaagaaatcatttgcttggtcggcagcagatatgcccggtatagatccaaatataatttgtcacgggttgaatgtggatccgagcttcaaacccgtaaaacaaaaaagaagaaaactcggattggagagagcaaaagcagtaaacgacgaagtggataaactcctaaagattgggtctataagggaggtgcaatatccggattggttagcaaacaccgttgtggtcaaaaagaagaatggaaagaatagtgtgcattgactttacagatctcaacaaagcttgtccaaaagatagtttcccacttccacacatagataatcttgtggaatcaaccgccggaaatgagttgttgtcctttatggatgctttatcgggatataaccaaatcatgatgaatccggaagatcaagagaaaacttcgtttatcacggataggggcatttattgttacaaagttatgccattctnnnnnnnnnnnnnnnnnnnnnnnnnnnnnnnnnnnnnnnncaagatgttcaacgaacatctaggaaaaacaatggaagtctacatcgattatatgctagtcaaatcattaaaaaaggaagatcacgtgaaacatctagaagagtgttttgcgattcttaaccaatatcaaatgaagttgaatccggcgaagtgtacatttggagtcccatccgaggaatttcttagctacattgtcagaaagagaggaattgaggcaaatccaaatcaaatcaacgcttttctcaacatgtcatctccaaaaaattttaaggaagtacaacggctaactggtcggattgcagcattgaatcgttttatttcgaggtcgaccgataaatctttacccttctatcaaatcctaaagggaaacaaggaatttctttgggatgagaagtgtgaagaagcgttcagacagctaaaggcgtatctgacttctccacccgtattgtccaaaccagaggtagacgaaaaactctatctatatgtctcagtttcggaccatgcggttagcggagtcttaatccgagaagaccggggagagcaaaaaccaatttactacataagtaaatccatgacggacccggaaaccagatacacaatgatggagaagcttgcacttgcagtagtaatctcagctcgaaaacttcgtccatattttcaatcccacccaatcgaagtattgtcaaatcagccacttcggactattctccatagtccgaaccagtccggtatattagcaaaatgggcggtggagttaagtgaatacgacatagagtacaagaatcgagtcgccataaaagctcaagtcctagtcgattttttgacagaattaccggtacccggagagaaggaacaaccgcaaaatcagacttggaagcttcatgttgatggatcatcatcaaaaaacggatctagagtgggaatcaagttagaatctcccacttcggaaatccttgaacagtcattttgcttgttattcaccgcatctaataatgaagcaaagtacgaagcattaatcgctggacttaggttggcacagggcgttggggccaatgaagtggtcgcctactatgattcgcaactggttgttaaccaattcaatgatgattatgaagcaaaagactcacgaatggaggcatatcttgaagtggtcaaagacttggcttaaaactataagaagttcgaactcattcgcataccacgggggaaaacactactgcagatgcactagcagccctggcatcaacatctgatcccgaagtcaatagaatcattccagtagagtgtatttcagaaaggagcattaaggacgaaaaggaggcattcgtcgtcacaaggtcccgacctgcagcccgagatcgcggcgaacctgttattgaattaccacctgtcaaaaggcgaaagtcaaaagagacaaccatacctaagcctactgtgcaagaagatagtggactcgaagaaaatgacgaaccaatagaagaaatcacctcggacaccacagtcgaagctagaaccgaaccgtgggttgatgaagacatactagcgccaaatgagcatcccgaaccagaagctcggatatttcacgaaatcgaccaaattccgactaaagattggggggctgattggagggagccaataaagcattacatcgttacaggcgagctcccttaaaatagatggcaagctaggaaaaatgagaatcgttagcgcgaaattttgtctttcaaaggatgcattgtatagacgaggtgtcagcgatccttatctattgggcatttttgggctcgaagtcgagatcgtcatgagcgaagtacacgaaggtttgtgtggcattcattcgttaggaagggccatggttttcaagattaaaagaatggggtattactggctcactatgatcacagattgtgttaagtacgcccaacgatgtaaaggttgccaacttcatgcacctcttatccatcagccttcggagttattctcctccatctctgccccatacctgttcatgaggtggtcgatggatatcattggaccattgcacaggtcaacccgaggcgtgcaatatctttttggtcttaactgactacttttcaaaatggattgagactgaagcatacatgagcatcaaggactcggcggtaaaaaccttcatttggaaaaacattatatgtcgacacagtgtcccatacgagataattacagacaacggaccacaattcatttcacacaaattcgaagctttctgtttggattggggaatcaaagttagttactcaactccaccgtacccacaaggaaatggccaagccgaagccgtaaacaagacaatcctacgtaacctaaaaaagcgccttagtcatttgaagggaggatggtacgatgagctccaaccggttttattggcttactgcacaactcttaggcgttctaccgaggaaactccattttctttggtgtacaggatgaaggcagtggttccggccgagctcaacgtgcctggacttcgccgaacagaggctcccctaaacgaaaaggaaaactcagcgatgctcgatgattcgttagatactatcaatgaaaggtgagattaagccttaatccggattc

SEQ ID NO: 33415 - DNA, 889 bp, Arabidopsis thaliana landsberg
atgaacaccgacagagaaaccttttgatggtttcttttacatccattgagataatggggcagggtgactagtccaggtcttattttttgtacctttttttgtttgtatggcagacatagctgcgagtgcagaattttactgcgtggggaacaaaaaatgacttcaaacagatgagtttaaatgattattcttaatctcggattgttcttaatctcaaagatgtgtcttgagattgttttcttaacagttcatatgatcaggatgctacctgcgatttcagatacaagcaactgtgatttatgtcctaaacgtcacatagagttaacatataacaataatgagaaagtacatacatcactaatattgtaataactttttgaacttagcatcaaccaaaatgtgtttatcaaaccagccgttacaaacgtcgattgcatcaggcagacaatcaatagatcgtttcatccgttggtgtagtagacgccaacaccaccaaaatgaagcaaagactcttgttatattctttttaatgttggtttaaacttatcttgtaatatttttgttgctgtacatcttcttctgtatgtggctatactcgcttgcacttttcttttcactagatattagagactttaaaactagtcttttcaaacgtagtatgggtaaagcgataaggtagttctcagacttctttcttcattatcaccattgaaaggtcaagagttgggaacatgcaatcagaaatcaaagaccaacacaatgagtaaacatctaatgttcaaaaagaaaaatagattattgtttatgtacaataataatatagaggccatccagctttcactaggaggtaaattttatgaaggtagcataggagtgtgaccctaattca

SEQ ID NO: 33416 - DNA, 4564 bp, Arabidopsis thaliana landsberg
  unsure (1)..(4564): unsure at all n locations
tctttcaaatcttctgtgaaggcttctccgctagaagcaggaagacgaatctatttgttctgcatcgacgcagacacggcataacaaggcatgtgagagtgtttcaagctccaaagtagacatatgaatctcctactgtatcttgaagatgttcttcagtttcactactagcttccattcttccaacgataattcatcctgcaaattagtttgggtttttgatctacatcagttttcctatcaaaatgatgatttaaaaggggaaacaagctcattttctccacttacccggtagttagattttagtatgtcgatagatctcctcgatatgtgactcactagctcatcttccatgtcaaagtgccttccaaacatcttctgttcttcagcattcgaaccaacaatctgtataccaaagaaaccatcgattacgaggcgtgaaactgaaaccgcagcaaacataactcttttcttctctgtaagcaaaagatttgcaaccttgttaaaacagaatgatccaattattacctttattgccaccttgttgcccttctttgcatagtcaacaggcttgtggttattctcaatcgaggcaattcggccaatatcgatgaactctctgccagggacgcaaatgggggttccaatctgaaaacaaacaagacagataagaaagtgtgaaccctagcacttgtgtcatcatgggtgagagttacagagaatgtaggaaattaaaagcatagataccttaagtataccctcgatgacatcgactccaggattattgggtctctcttattgaacacacagttaggtaaaatctgaaggacacatgggaagactgcctcaccggctgattccttctttttctcctctttgatattctcaatgtaaacctgaaactgattgaataactgatagatgatatcagcgcagaagatttttactcccatttcgtctgcaagttcacgagcctctgtagtcactttcacatcaaaagccaaaattgtagcatattcctttttcttctcgagcatcactccagccttcattatatccttcttatgcacaggccctatcccaataccactgacaggtatatttacagctggggtcttcaagaattcaagcaatgcttctaatgaccctaatgtagacgtttgtacataaactccttcaccacttttgtcaatcctgctcaaaaccgattccatatcttccatagccgactccttcattgcctcgatgtcatcatcaggtccaaccacatgcagggaagtaccagcaattgcgtgttcaaggcccttttaaacacaacccaaaatatttaggatatcatctaaacgtcagtatatttaataccagctgctagtgacaaagattatagtagagttagtccatttcacctgggcagtaattttgatgccttgtgcagcctttatttctttgtgatgcagataagtaccctgcaacatcaaaacaacactttttgatgtgtgttaaaaaaattgacatcggcaacaatttgcataatgtatgttactcgaggaaaaaacagtaacaagagacatgaagtggagatctaaaagtaccttcacccttaactccttcattggatgaggagtcagtaatgctctaatcgttgtgacaataggtccctgaaatatgaggaagaataagctcacttttctaagttctatgtatacccagtgcgttacttgtttggatcattagtttttttacttgcctgtagcccacaaacgacgatttgatcaccttcatggagttcaccgtttaccaacacaacatcaatcgttgtcccatggccttcaataactttgacctcaagtacagtacactgttcaacaatttcaagaaaagatcagaatccgcatgctgaagtattgcagaaacaagtgttacctaaagagaaaggaaagagacctgcacttcgtcaacatatgtaagtttctcaaccattgttttctgagcccattgaaccaaccacagcaagagatctgggaccccttctccactgtaatatcaagaaccaacgttacccaattacgtttaggatgaataacttgtctgttacgctgtatattacaaacagtaaatagagattcatacggcatgaatcataccttttagcactagtaggaacaatactgaaagtttctcccatttctttattcttgtaataaatctcagtgttgagtccttgctccttgaattgggttataatctggaataccatagaacaacataatttgaaaaatatgtacacaaagtgatagctcaaaccatacataagaaactctagacgtataacttacatcagtcagccttatgttgaattcattcgtaacatctttattttgctgcttcattgccttcacgataggagcattcttgcatgttttccatccatatagcctatccacctggaaagtgaagattttattttccatataagtttttgcaacagagaaaaaaatcccatcgtagcagaataacaagcagtcttaccttattcaatgcaataatgaactctgtattcctcatcctcaaaagatttagagactctatggtttgcggctgtaaaccatgcgttatgtcaaccaccaaaatggcaaggtcacacaaacttgaacctcttgaccgcagattagtgaaggactcatggccaggtgtatcgataaccaatagaccaggcaccttaagttttgcatcggctttcagttccctggtcctctctcggatgtttttggcagggaaatatgttgcaccaatctgctgagttatacctccagcctcaccttcctgtacatttgttcctctgatacaatccaacagctttgttttaccactatcgacatgacccatgatacagcaaatgatagaacggagtttttctccaccttcttctataaattcatttggagctaagcatttacccttcttagcacgttttgtctgtgtagcagcatcttctacttcagaaatagctttcaccgcagctgtttctagcttgctcatacctgctggtttagctgttggcttttcagtttcatggtctgtaacagttcaataaattagattaaaaacagacattggataaaacactagggagaagaattaactacatttcgtactaacctgaatcatgtgcctttaattctttcttaaccacaggctgagcttcttcctctttatcgtcaattttaagatcaacattatcccagctttttgcatcccattcatcatcttcctcaaccccattctcctgagctacatcagcaggacctgatttctcgcctgtgtttgctgactctagtaaatcaaccttttcagtgtcttctgaacccacttcacctaaagtagctgcatggttttcttgtggctctacctcatcttccacctggacagaagtgtcattgcctttctggcgagatggttttttcttgttggcataaatgggacgctttgaggaagtagcatcaccaacatcatctgcaacaggaagacctctaccagcagccagcagctggttcttaaacgcctccctcttttgagcttcagtcttttgctttgctgttagaagcttgccctctagcttcttcctcaacagtttctccttttccttttcctttctcttacgcttagcctcctcagcctgagcctcaagctcttcctgcctgcggcgctcctcttcctccttccttaatttttcttcttcttccttcttttttctctcttctgcttcttgccgccgtgcaagagcctcttgcatctctctaacatgtttaggaattttcttctctgctgctttaccctttgcatccttcttcttcggctgtagtggctcagtaactgattcttcttgtttttcctccttagcctctacagaagaggttgctgcagcagctgcttttttttccttgtctttctccttcttctttttctttttcttcgctgcagcagtctcaacagtctctttttcaccctccttctcaccagcattctctacaggtgcaactggcccaggctgagcttgaactttctctacttcgggtgtcgatgaagcaggtctttcagcagcaggggtttctccaagttctgcaagaagtttgtccaaatcatcctcttcctctaatgtccttgcaaccttattcttattcttcttctttttcttgatctttccagtttctataacctccacactcttagtatcaggagttttagcttgactagtttcgtnnnnnnnnnnnnnnnnnnnnnntgaggccaaaacaatgctgcccttctttttaccggaaaacgtgatttcgaggctctcttcgtctcccattgtcccttcttcctcgtcaggcaaagcaactttattagtggtcttcttagaagatttggaggacctcgttttcttaccagagaaagtgataggtgaaacttgttcctcatctccatccacttcctcgtcatccttatcaccaccaagggcatcaaaagctgaaaccgcaaaaaatttaatacccttgttagacgcattcttcttacctgtaag

SEQ ID NO: 33417 - DNA, 9107 bp, Arabidopsis thaliana landsberg
  unsure (1)..(9107): unsure at all n locations
cttcgttcagatcaactcgcccaacaacgattagaatagttgttagatatcctttcggatcttccaaggcgttggacggttcaaagttaagttttcgagaatctctgtttctcaagctagcaatttgcagggtgaaaggtgttcgcctagtttcttcgatgacccggttgatatcaggttcctagcttgtagcttggtggaatttcaatctcatatctttcagttcgcggcttacttctctcatggtttcgaactggttgaagttttcttgctcgtgttgattaacgaactggttgttgtcttcgggatgcgtttctctatcttccagttggatgtccgcgtttgtaccatccgaggtcgtttgatcacttgctgcatttcgcggaagggaatttggggaaccgaagatagttcttcgaacttcagaggacttgcctgcattcaaagaacgaacgcgagattgaatagtactaacattttgactgagtgatacatgggttgtttgcagtgtttcgacggtttttttcacattcgaaaacttctgcgccatatcggccatagtttgttgcatggtcttgagggtttcggctaatgaagccttggtagcatcttctccagacattacggctcacttcggaaatgtaatatatagaaaaaatctgacgactcaagaatcctccgtccccacagacggcgccaaaatatggatgtcggattcacacactcaagtatttatttattagtgagaaggattattcttgaggacaaatgtactagaaaatagattgatgactatcgagaaaactatgagctttgtaggaaaatgcctatagtgtgtttgcccaaaaatgcgtgtccctttacatggtctttgacccataatttatacccaaagaatacatttaatcctcatttacacaaaattattctaccttaaatgtatccgtttcagtctttgaattaattattcaacgttcgaatttgaaaccactccgggcctcctttacccttcggcccatttgtcttcttcaattcgagtagtcctaacttcgatgttgcacccacttcgccaatcgacatctcacccatactcttactttgaagaatcttacgggcttttcatcttatgggcctcccatacttgtgtagcaatctttggccggtcccgagcccatggtgcgggatccgacaccaacacttatagccaaatatcccgaaaccctaatacttaaaacgacgaagtatttggacgggttaagaactgtactcgacccaggtggtcgagtgagaggtcgagtgaatagctggagtcttcttttcttccttgtgctcgagtgtctggttgagtgcggaatgaagaaggctctgaagcttgtcatcgagtatgcagtcaagtgttgtgatggcgatactcgacctctaagttgagtgacgaggtcgagtagtggtctggcagtgaaggtgaaggcactcgacctgggggtcgagtgatgtgatcgagtggtgttagaagatactcgacttccaggttgagtgaagaggtcgagtggtggtctgatgatggaggtgaagacactcgacctcatggtcgagtgaagtgatcgagtgatggtctggtgatggagatgagggcactcgaccaagaggtcgagtggtgaagtgaagtggtgatgtcctctgctcgacctgggggtcgagtggtctcttgagatcttgaagctcctactcgacctcttggtcgagtggtttgtcatgatcaggtctgcttcttccagatagctcgtcaacagctccaaatcacctgaaatcaacgcaaatatgcaacatgcatgcaaaactatcctaaacatgcaaagtgatgacaaatgatgtgaaatggtataaaacagtgatgatatgatgctaaagtgatgacaaatggatgctcaagacaagcaaaatacacacttatcacatacacatgacatcaagtcatattcgactccaaaaaactaaccaagcttcttcttgcttctcaaagctttgatgggaccccaggtcgagtgtcttcaccttcattgccagaccactactcgacctcatcactcaacctggatgtcgagtatctcctgtccttcactcgatcacatcactcgaccccgaggtcgagtgtcttcaccttcattgccagaccactactcgacctcatcactctacctggaagtcgagtatcaccatcacaccactcgactgcatactcgatgacaagcttcagagccttcttcattccgcactcaaccagacactcgagcacaaggaagaaaagaagattccagctattcactcgacctctcactcgaccacatgggtcgagtacagttcttaatccgtcccaatacttcgtcgttttgagtattagggtttcgggatatttggctataagtagcatgtacttcacattttcgcagacaagaagtttttacctagttttattccgcagaccttgtgttctagactttttgtaatccggatttctctttatctattcagtattcagtattcagcttttgtcttgatttcgtttactgttgttcattctgttatcatcctgctattacactgttgttatcatgttttcaacttgttcaacgtttatgctttctattatgatgtctgagtagtgaatagatttctgaggatgggttagagtagtggagaattctcagtatgctaggtgattgagtattgattgatagatcccttctggattagttgttcttaatgcctattgctttctaatcaactggaatttgagcccagacatttccgctcccaaaaggtgttcgatgaaatatctgaaccactaattccagagattcgtggccttgtaccaaggtattggttgcagggagcgttttggctttaacttgttaattcgtaatgcctgttaggttagctctcgtcaatggtgattgagtctgggactaggtcaacttgagggtctctgttgcagtggcacttagatttggttaatgaacttgttctctagggataatttattgagcatgtcaatcacctgtaaactgaggaatcgaaactactcaattaccccatcctcgcgaattctttatctgattgaagtctttgtttactctactgttgtttactacatcttatcgtctgttgcttaatttctgcaattctttcttgttactcgatctcatactcccccacccagatgtctggcaatagactttgcagtcgagtatctgtgttatactttctttctgttactcgacctgtcactcgacctcacccagtgctctgcaaagagttgtgttggtcgagtgttttactgtttctgtttgattttctgttttctgcatgttcacttaggactgctagaacacaccaaaacctgttattgcttggcttgacttagtgacttctgatcacatcttgatttttnnnnnnnnnnnnnnnnnnnnnnnnnnnnnnnaatactacaacgatatgatagtgctctaggattaattgatcttaaaaacctattatcaatttggcgtcgttaccaattgggtgtttgtttgttacatttgagatttcagacttgcttaaatcaagttctttttcaattttcaatccgattgctaactgtgtgtttttcttgttgtcttcttgatccaggtacacctctactgtatgtgaactcgatcaacaggcaatcagaacctccttttcaacgataacatcgaccgcatagctcgcgaactcagagaaaggagaaatacagttaactttgtacctaggcaaccactcgaaatggctgacgaacagaatcaacaaaatggccctgccaacattggtggtggagatgcaccacgtgatcaccgtcagaggaaaggaattgcacctcctgctatcctgaacaacaacttcgagattaagagtggtctcatcttcgagattatgcttctggataccgctagcaatggaaatttccagaacaaagatgttgaagaaggctggatttgcagcaaccaccaactggatttgctggatttgcacctcagcaaaaccaaggtccggctgctcctgacgctgacatgaaacaaatgctacaacagctgcttcacggagaaacctctggctccatggagatggcaaacaagatatctgagttacataataagctggactgtagctacaatgatctcaatgtcaagatggaaacactgaataccaaagtccgatacttagagggacattctgcatcttcttcagctccaaaacaaacaagccaactaccaggcaaagcagttcagaatccaaaagaatatgctcatgctatcacactgcgtagtggaaaagcacttccaactagggaggaaccaaagacggtcactgaggacagtgaagatcaagatggggaggatttaagtctcgagcaaccactcgaccgtgctacttgacctatcttcccagcagtatcatcaactcctccaaaacccgttgctgtcaaaaacaaagaaaaggtctttgtccctcctccctacaaaccgcagcttccatttcctagtcgtcacaagaaagcgttagcagacaagtatagagctatgtttgccaagaatattacggaggtcgagttgcggatacctcttgttgacgctctagcgttaatcccagactctcacaagtttttaaaagacttgatcatggagagaattcaagaagtgcaagggatggtggtattgactcatgaatgcagcgctatcatacagaagaagatcgttcctaagaagcttagtgatcctggttcattcactctaccatgctctttagatccattggctttcaacagacgcctatgtgatttaggaagattttcatggtatgctgatcacgtcaattacttgccatgcagagtagagcctcccaacctgatcaattatgaaaggaagaagtttttcagagacatacaattactactgggatgagccttatatttacactctctgtaaagataagatctacaggagatgcgtctgagaagatgaagtagaaggtatcattctgcattgccatggctccgcatatggtggtcactttgcgacattcaaggcactgttaaagattctgcaagcatgcttttggtggccaacaatgtttaaggacgctcaggaatttgttttaaaatgtgattcatgccagaggaaaagcaacatcagcagaagaaatgagatgcctcagaacccaatcttggaagttgagatctttgatgtatggggaatcgattttatgggtccattcccatcttcatacggtaacaagtatatactggtcgccgtagattatgtatcaaagtgggtcgaatctattgtcagtcctaccaacgatgcaaaagttgtgctgaagctgttcaagaccatagtcttccgaagatttggagttcccaaggtagtaataagtgatggtggaaagcatttcatcaacaaggtttttgaaaaccttctgaagaagcatggagtaaaacacaaggtcgccactccttatcatccacatacaagtgggcaggttaagatttccaacaggtagataaaagcaactatggaaaagactgttgggattacaaggaaagactggtctacaaagctcgatgacgcattgtgggcttacaggacaactttcaagacccccattggtacaactcctttcaatcttctctatggaaaatcatgtcacctaccttttgagcgcgagtacaaagcaatgtgggcggtaaaacttctgaactnnnnnnnnnnnnnnnnnnaggagaagcgattgatccaactcggtgacctcgatgagatccgtctagaagcttatgaaagttctaaaatctacaaggagagaaccaagcttttccatgacaagaagatcatcactaaggatttccaggttggtgatcaggtgctgctattcaactctcgcttgaaactctttccaggaaaacttaaatccagatggtctggccccttctgcatcactgaggtccgtccttatggagcagtcactctagctggtaagagtggagattttacagtaaatggtcaaaggctcaagaaatacttagcagaccaatccttccagaggtgacatcggttcatctccaggagcttcttgatgattaaaggagtaaaggaatcaagctaatgactttaaacaagctcacttgggaggaagtcctatgactatccttgtaaataatttttactttcttgttatttttgatttgttttagttgtgtttgtggttttcagagacaagagaacaacgtggagatagagtaaaaattcaaaacttttactctacagaagacctggagatcgagtgtacagcccgttggagtacaaaattttgaaaatcttctgttgcacctggagaccttgcactcgagtacattggtcgagtatgtgtgatgtttaaaacccaaaaacttttaaatcatcattttactcgaccaacagaagctacagagacttgcagaaatttcctgcagtttacagtaggttttctgcaaattttctcagtcaacagagtgtggaccacgcgctgaggataagctggagagagaatctaaaactcaacctagaccactcattttgaagcgtcactcgacttcacgaaatccactcgaccttcctcttttcatttcaccaccgacactctaatctctctacaccacgaatcgccgtccaaagagctactcgatcctaagaatttcactcgacctccgaaacccactcgacctccgcgccgacgtcaccagctcattccctccgtcacccgaccagaccacttcactcgattcctttgatatactcgaccaattcatccacatcaaccgccgtctctttcaaaagaagctactcgacctcgtttcccggtctcgtagcggcattcgaccgacgtcgccctagccgacttcaacaactcactcgaccaccagaaagcactcgacccctgcaaaatctactcggcttcttgttcatgaattcagtagagccttccaacttcagagaagttactcgacctctaggtttcacgactcactcgacctccacgattcactcgacctgctgtagcattccaactcgacctctgagaagatactcgattcatttcgtctaagctcaggaacaactcaggttactcgagtacagaattgtactcgacctattcaatctatttcattgcctattgacaataattttggtttcattgctatctttgagactaacctattgacatttgagctttgagttctaaatccctacaggagaatcatgagcaattacagtggcagttcttctgttgatcctgactacaacatggatgagacagaatcgtcatcttcaaggccagagagagaacagagagaatacgaaagtttcagaaggaaagctgagatagcccgaggaaagagagcgatgacagagaggtatgagcttataaacgaagatctggaagatgagtacatgcctgaacatttttgcagagctaccaaacttctgcacaagcccgacgtattgcctgctgaggaatatgttaggcttttcaagctgaacgagttctgtagcataaggtatccttgctcgacctcacttgcacaactcggattgttggaagatgttcatcacctgtaccagagttgtcatctggacactctgatggcttatccgtatgtagcgtatgaagatgagacaatacaatttctctccacgctgcaagtagagctctaccaaggtatgacctctgatgagttggattgtgaaggattgggattcttgcgattttctctgtatggtcatgagtataggttatcaatcaagcgcttggaaggattgtttggcttccctagtggaacgggatctaagcccaagtatgacagagaagagttgaaagacttgtggatcaccattggcagctctgtaccgctgaatgcttccaggtcaaagagcaatcagatacgcagccctgtcatcaggtacttccagcgttctatagccaatgtactctactcccgagagatcacatggactgttactaactctgatatggagatgatcgcaatggccctcaagggaactcttcgccaaactaagaatggtatgtctctccaaggtgaaatcaatgacacacctctctctgtacttcttctgatccatctgtgtggatacaagagttgggctgtcagcaataaccgcaagagagcaggaggcgctctgtgcataggtggtgttgtgacaccgattctgatagcttgtggagtcccaatcatatctgtcggactcgagccgcgagcaatggatatcgagcacctacgtcactgtgaattcctggagtttgcaatggttgacgacttccacaggttcaggtttgagcactctacaaacaggagagctaacatccttctccctagccctgaggttacacgaataatagagggagataatattgattttcgacctgaggttggacgcctctactatgagaacgctccgccattagatgaggaggatcttctagaataagctgtttcggatgggatggatgacgattgcgcagtggagttcgacactagcatgtatcactttggtgaacatgtacctccagcgaggcagagcaagagcttgaccgaagctcataagaacaacagtaaattgcagaagtggtgcaagaagcaggacaagctgctcaccaagtgtttcaaggctatcaagcttctgacagataagctgagttgttcctcctccaccacagctattccacagggactgcctcctctggagatgccagcgaggagatttgatgagcctgagtactctcttccaagtttattcacacagtggactgtgtgatttaagtttgggggagggctcaggaagtgtgtgttgcattgtatatatttttgagtctgcattcatctaaggcatagaaaaaccaaaaaaaatttgaaaaatttcagaaaatgatttcacaaaaaaagagtgttcatgtagtttcattacatttaggatcaagtctagagtgtttcatttaagattgttgcatatgcataggggatgatgatgagatagtcttgt

SEQ ID NO: 33418 - DNA, 1280 bp, Arabidopsis thaliana landsberg
aaacaccgtatctttgcgcctatatattggataaccttcattgtcaagagacgtgttctcaacatggttctttggataatacttggaacatgtaccattttccatgcatgacgaattaggattaaccaatctggatggtccatgaatcatacattccgagacagcttgatatagctctggatctttttctttatctgaaatttcagcaaaaataatcttctcaacgtgatcaactgtaggaaacttgtatctaggatccatccaaacaattatgtgagcatgtggaagacgtcttttttgaaattctactgtatacatagctgtttcaacataataattatgagttgtcacttgtaagttaaaattcatgaaatatatgtaactaaatttgaaataatgtagtacctgatttggttttgccaaagatatgattctttgttagatcatccatcaagttgtcgagtttcattttataaatcctgcaaatgatatccggcctgtcctcaccattcaacttccgctcttttacaaatcttgtgatctctggccacttagtattacatgtgagggttataaacaggtcgggaaatccgaaatgtttacaggtacccattgcatctaagtagttctgctgcatataaggtggaccaccggtgaaagatggaggaataataacactttttcctttattagaaagatcattatctccagcatcagaagcatcttgaactgcctgcttgttggtactgcgcagcttcgtctgattttttttgataaatcttagccgattagactctatcattgtaaaagcgtcaactataaattgttgaagtaaacgttttgagcgaaggaggatgtgcttctcatcttttctctcttgtaaacggtagtcaaaccactgcctcatactaacatcttcctgcttcttctttccttttgaagttttggtaggagttttttttattccaagcctatacccatcctctccttttggaaataacaatggatactgaagagctagatatgaaacgtgacattcatgtattttccttaactttccagacttcatttgtagaactatatctcttttatctagattgtcgtcgaaatctccaggtatcaatgcagcaacttcagcttccatctgtctcgcggttagatataatcctcatatgaaaatttgtcttttctttctctatgttgaatctatcacgggcaatcctaaatttgcaacatgagggtttatattttccaacatctttagcaaagctgaaactgtt

SEQ ID NO: 33419 - DNA, 2227 bp, Arabidopsis thaliana landsberg
cccctagcagcaggctacaggtggcctctcccgcgtttttggtgtgtttcttttgaaccatcccgagcgtttcatctgagcgtctcttgctcttgacggtgatgactttatggtttcaggttcagatgtggaaggaccaagatattccctcttgtcaaggcaagtttcttgtccagatgcaacatttctggaatcagatttggcccgagatttctttatcttcttgtctgtaccttggatcaatgcagtgactctttcgatggagttatcagaaccgtgacaatgtctaatgtgggttttatcaatactgttagatacgcttgactcttgtgatctgcttacaactctagcttctgcatggataaaccaaggcttttggttatccaggaagatgtaccttataggcacagactccacaaggtggtaaaagcgagactttcgtttaacctatactaagagagaaggagaagttagaatgagtttgctgcaatggtttgaggttaacaaaatcaaaagcacaggagtagaaagaaaataaaattgctagctcattttcattaccatcagaccatgaacttctatctcccctacgctcgataagcaacttgcatgcgtcttctcgagttttcctgcaaaaaaaaagaaagcattttgcattgatacatgctctgaattcttaaataaaaagtgtaacacaaacgaaagatcattaaccttcaaatttaaggcaaaaggaagaaaaagaaaaacaatacatgtccaatctcatctcaagatgtcatgaagtaacatataagcaatgattcacattcaaaggaaatgagcaatgcactgtgccctgccagtccttaagtgtgtaatagacagaactttaaaagaaaacaaacaccaatgatgcagaaggcaatgtgaaaagaacatttcttttagtgctcaccataggaattcacaaccttgaaaattttcatcccgaaatgcgcatgcaaatcagtttcctcacagaccaacacattatacatccagaaagattcaattagagaatcctatcagttcacctataagctaagtttcgaaattgagaaaccgaggaagaccaaaaacttaataagaacagtaggctacgggaaacaacattcgaaagagaagaccaaaagggaatttctttagagggtggtatcgagcttactcttgaaatctgctgctgtgatatccagaggaaccgccatgacgattcgagttcccaagctagtctcagcaaagacagtaacttcttctgcaatagccattgtgtgagagagcagtggcgagaatttggttcctgttgttgttcatcgggaaaataaaatacatcacgctgtttcaagtcatgttaagacaaatgtttgcagtatttattaacctagaaacggcaggctgtgcaagtgtatatttcgaaagactgaaattcacaaaacggtaccgtttcctcggaatcatcatctttccctctttccttccaccgagagcaaaacctaaaaatggtcgtttgattctctctctctctctccgttcaaaaatgcgccggcacaagcgatggcctttgaggtctcttgtctgcagcttcagctcctctgcggcggagacagttactacttcaacggcagcttcagcgacggcggcttttccgttgaagcatgtgacaaggtcgaacttcgagacgacgctgaatgatctacgctcactcgtaaaggctgcagatttcgtggcgatttgacctttaaaagactggcgtaacaagcgctccgtggcgagtctccttagagttcgaccgctgcgacgtcagatacctcaaagtcaaagactccgccgagaaattcgccgtcgttcagtttggtgtctgtccctttcgttgggattctcgtacccagtcattcgtgtcctacccgttagtctctctttctctttctctttagcttcaattgtgtagctttgactaaacgggtctcgttttgggggcaggcacaatttctttgtatttcctcgtcaagaactcacatttgatccaccagctcatgaatttctctgtcagactacatcaatggattttcttgccaagtatcagtttgatttcaacacctgcatacatgaaggtgcttcctttctccttttcatttttgattctaaagagagaaaaagtgtagcaatttcaagtttgtttccagaatgtgaggaattcacatatatttaa

SEQ ID NO: 33420 - DNA, 606 bp, Arabidopsis thaliana landsberg
  unsure (1)..(606): unsure at all n locations
ctaaacataatgtaataattttaaaaatgctattttaattttttcaaaacaaaaatatctgttttttaattatatttaatgatttttgtcaaaaatttgataaaaccatttctagttaaaaaaattatattacttttcttaagtttactctatatagtttttgcttaattgtgttatttaggaaattataactctttgattgtattatttacaatggattgtattgttaattgttgttattaagattaagattacttatattgagtacatttaacttataaattgatatttgttcaaaaaatattaatgaaaatttaacataaatttttaaactaaatattaatatgatcactatttttttgctaaaaaaagaaaaatattattaatatatttatgagatacccattgggcttctctaatagagattgtatttgataatgaggttctcaacttaaattaatattattttggtgagataaccaatagaaatactcttagtgacaaataaaaaggaactttntggtgacaaataaaagaaaagaaactatagaacctagagcatctncagtggttaagattgtaaagcatcttaatttggatcttaac

SEQ ID NO: 33421 - DNA, 564 bp, Arabidopsis thaliana landsberg
tgatgcatatatatacttaatgatttgcgtttaccaaaaaggttcgtagtactttttgttttctctacatgaacaaacattctctcctgaggctaaagctcatcagattaaaaaaaaggaacatgaacttgccaatatgatatgcctacacatctcgcgatgtggtaaccatacaactgtttttacccaaaaagctgaatttaaaactttaaagaagggctaagagtagaaatgtgtgtacgcgagtgaccaataaagccttggaagatagaaactcagcaggtcagaaatgtgtgtttctgcctcggcctctcccaccagagtagtaaccataacccgagtttgagtagtagttgttgttgttgttattatggtatccgcctctgtaattggtttgtgcagcgagatatgcaccctgacctggttgtagtggaggtggcctttgaaaattattaccaaatgcctgaatagaaagataaagagatcaaaaactccatcagcaaacactattgcgattggagaagactagtttcagaacttgggttggtggctatagaatatgtg

SEQ ID NO: 33422 - DNA, 1128 bp, Arabidopsis thaliana landsberg
  unsure (1)..(1128): unsure at all n locations
gaaactgtttcctttgtattagaagatctaatttttggcctaacttaaaattagtttttgtataatgttttggttatatttgtgaacctaattgggccctatattaaattatctttgatagggctcacgaaaaaacagacccgataaccaatccattatccgaaccaaaaaaccgggttagagcgggttagaattttaggaaaaggnnttatcacatagagttttagtaaacccgtggatatccgattggtccagaaattaccctttatccaaagagggtattcaaaaacccaaacattaatttaatatccaaaatattaattatatttaatcgtaatataatctaattatctaaaattataattataaatctaaatatgtcaattaattttggacctaaatatccaaaacaactaaactattcaaaaattatgtgttatgtttgtcaaaatttagtaaaatatattcaaatataattaaatttattaaaacttaacaaatctaaaagttttttttgtttggagacccactatctacatacaaaatacccgtttctatttttttggatatttttagggtctgaaactttttccaaactgacccaaacccaactggatctgaccggaaccagaaccgaatatttagaattattctattgggtagtaaatcatatacccattaatcccaaactcgaacgggttctacccaaactcgaatgggttactcatatgcccaactctattctgtgatttaattatctaaaaactcccaaaaaaacatatgttttgctgactacttttttttaaaaaaattttacatcctcttctgccaaaatcatttcttaagacatcacaaaacctttggaataataattccatgaatgaagaatcctaatttgaatataccaagaggttttgaaaggttttaactttttaataggtgtgtatgtgacaaggtatagacatcgtgatagtaatctgcttatttataatttcaacttgcagtataccgcaggtaggcttatattttagttaaactaaaaacttttattgtaaagatgattataaatatatgatattattttatttgattttaaatatacagtaaactgcgagttgtatagttttg

SEQ ID NO: 33423 - DNA, 5261 bp, Arabidopsis thaliana landsberg
atcttcctggcctgagagacaatggttggtggatggattgcagccagatatatcagcaccaggagtggagattctcgcagcctattcacctttgggttcaccatctgaggaagagagcgataaaagacgtgtaaagtactctgttctgtcgggaacttctatgtcttgtccgcacgttgcaggtgtggctgcgtacatcaagactttccatccaaaatggtctccttccgttatccaatctgccatcatgacaaccggtaagcgaaaactaaatccaatatttagtatcttgccctacaagtaacctctgttttaaactctgttcttataaagtctctttactaataatcgttgcagcttggccaatgaaacctaatagacctggctttgcatcaaccgagtttgcttatggagctggacatgtcgacccaatagccgctattaaccctggactcgtctatgaattagacaaagcagaccacatcgcctttctttgcggtttgaactacacttcgaaaacccttcatctcatcgccggtgaagccgttacttgcagtggaaagaccttaccaagaaacctcaactatccttcaatgtcagctaaaattgatggatataatagctccttcaccgtgactttcaaaagaaccgtcaccaatctcggtacccccaactctacgtacaaatccaagatcgtcttaaatcacggagctaagctcgtcaaggtctcgcctagtgttctttcttttaaaagggtgaacgaaaaacagtctttcacagtaactttttcaggcaatctcaacctaaatctacctacatctgcaaatctaatctggtctgatggaacacataacgtgagaagtgtgattgttgtctacacaacgtgaggcagtatcagttcaccgtagtcatcattatcataatattgtcgccgatgtgtttctttctgatgattggttttcgtgtttcagagctttgcatttatttgaattaaattcatctatatgtcctagaataaatatattaattgaagctttctctttctaactatcatctcaagtctcaagaaaaaaaaaattgtaatatttgcggcgggaagttgaaaaaacgaaaagaagttgagttcataatagatgagacaaatttacaccaatatgttttctaaaagtataaacacaatattactgctgttaacatgaaaaataaaccatttgagacttgagaggatgtacgggattaaagttcagaaactcttagaaatttttgaaaaatctaaaccaataaccaataaactatttataaccattttgctatgaaatatcaatggctcttggctacgaatagccacggcttatttgtaattagtcgcaagcaatcattagccactacgactccacatttgttttgtgttattgaatgtttttttaaaaattctcatatttgtttagtatgaggaaaaaaatgaaagagagaataattgttgtaacatttttttgttttgttttcagtaaaaatataaaagaaatttagttcagaccaaatgtataaaataaaacaagagatatgtttcctaaagatataaatacattgataccattctatgttttcgacataccatttaatacgaaaatatcattaatatatggtaatactagttttattagtcaaatgatatgattcatatcctaccatacgaatatgataccatttgatacagataatcattaatatatggtaatactagtttttattataatcaaaaggtaaagaaacaaaatcagaggtatttaattaggatttttattcttgacacggtttaggaatgattctatcatttatacatcctttggatctccatatcatttgaaagtttattcattcataagaaaaggatggtgaaacgagcttccttttgtctcctctcatgtctcattatattgtttttgagttcagtctcagcaattatagatgatcctcaagataaacaagtatttaaatcattgtcaatatatttcgtttctccttattatacgatctttcttacatgatgataatgatgatgatgatgatgataatccatgaaggtgtatgttgtctatatgggctcacttccgtctcaaccaaactacacaccaatgtcgaatcacataaatattcttcaagaggtcaccggagaaaggtgtggttttattaattcattctctaatctatgattggttataattagtttacgttatgaggattataaaagtgatatacacatatgtatactatagttccatagaaggtcgtttggtgagaagttacaagaggagtttcaacggtttctcggccctactcactgagtcagaacgagagagagtagccggttagtgttcttagatcgagacacattttatgttgaaatgtttttaaagatttaaccatttgaaactcttttgtgttgttagaaatggaggaagttgtgtctgtgttccggagtaagaactacaaactccaaacgacggcgtcttgggacttcatgggaatgaaggaaggtaagaatacaaagagaaacttcgccgtagagagtgatactattatcggtgtcatcgacagtgggatttggccagaatccgagagcttctctgataaaggctttggtcctcctcctaagaaatggaaaggtgtttgtaaaggtggcaaaaactttacttgtaacaagtaagtcattaaaatttctctaatagaagattagtattgttttaggcagagatttatgtgttcacaatttcagcaagttgatcggagcaagagactacacaagcgaaggcactagggacctccaaggacatggtactcacacaacgtccacagcggctggaaacgcagttgcggatacaagcttctttggaataggcaatggaacagcgagaggtggtgttccagcctctagagtcgcagcttacaaagtctgcaccccgacagggtgtagttcggaagctctactgtctgcattcgatgacgcgattgctgatggagtagacctcatcaccatctctatcggagataaaactgcgtccatgttccaaaatgacccgattgcgatcggggcttttcacgctatggccaaagggattctcactgtgcactcagccggtaacgctggtccgaatccaaccacagttgtgagcgtagcgccgtggatgttaacggttgcagcaaccaccaccaaccggaggtttttaaccaaagttgttcttggaaatggcaagacacttgttgtaagtatcaagtaacattctcattttcatcatcatagtatctttgtcccattaaattaccaattggtttttcttaacaggggaaatcagtgaatgcttttgatctgaaaggaaagaagtatcctcttgagtacggagattatttgaacgaatctctggtgaaaggaaagatcttggtttccagatacttaagtgggtcagaagtagctgtttcattcataactacagacaacaaagactatgcatctattagctctcggcccctctctgtcttatcacaagatgactttgactctctcgtctcttacattaactccacaaggtacctagcagtcttctttctatttcattactcttaatattctccttctttgtcctctgatacccttgtgtttgctttctcaggtccccgcaagggtctgttcttaaaactgaggcaatctttaatcagttatctcctaaagttgcttctttctcttcccgcggtccaaacactattgcggttgatattcttaaggtatcatattatttatgctcttgattctttctttttttttcctggcctgagagacaatggttggtggatggattgcagccagatatatcagcaccaggagtggagattctcgctgcgtattcacctttgagtttaccatctgaggacaggcgcgataaaagacgtgtaaagtactctgtactgtccggaacttctatggcttgtccacacgttacaggcgtggctgcgtacatcaagacatttcatcctgattggtctccttccgtaatccaatctgccatcatgacaaccggtaaacaaaagtccaacttttactttcttgcatcgcaagtaacttgtgttgacaactctgttcttatactgtctcttaatgaatctttgcagcttggcagatgaatgctactggaactggggctgaatcgaccgagtttgcttatggagctggccatgtcgacccaatagccgctataaatcctggacttgtctatgaattagacaaatcagaccacatcgcctttctctgcggcatgaactacacttcgcaagtcctgaaagtcatctctggtgaaaccgtcacttgctccgaagcaaaacaaatcctaccaagaaacctcaactacccttcaatgtctgccaaattgtcaggatctggtaccaccttcactgtaacgttcaacagaaccttgactaatgttggcacgccaaactctacatacacatcaaaggtagtggcgggtcacggatctaagctcgacgttaagatcacacctagtgttctgtcttttaagactgtgaacgagaagcaatcttttacggttactgttaccggcagcaatctcgactctgaagtgccttcgtctggaaatctgatctggtctgacggtacccataacgtgagaagtcccattgttgtttatactagtgattactgaagagtcatcatcaattcacaccatcgtcataaataattttttattgttgtaatgtttcttcattctatgttttagttatcttattgctctgtgatgtctcggcttcctctatgtacgttgatgtcttgagatacgctaattggataatcgagatgctttgtttttttaatcatattttgttcaaatgcaaaggtttctgccagcaataatattgaaataattttttctataacctgaatacaggaaaatcataatcgcatcttgagatcaaagtccattgcagggttcacaagatactaaacattttttaaagcgaatctggattttgataagtgttaagaaattgattattatttatgttttacaagattttctgtaaacttttatttttctttttgaaaaatatagttagattttctcaaaagtgagtgcaaaatatcaatgaagggggaaagccagtatgaggttcttctttttggccaagtaaatattttttccaagtaaaagttttccaagaaagaaaaaagtaaatatgtttctctaaacttg

SEQ ID NO: 33424 - DNA, 3554 bp, Arabidopsis thaliana landsberg
tcattaagtcctgagaaagatcctgaagggcacaagaagactcatcaaaccatagcgtgcaacccatagacttagtcagacagctgacacttaaaaggttaaacttgaattgagggatatgtagaacattatgaagctctaagtttctacccaatcgtatagatcctaatccaacaatgctcactaagccaccattaggaagattaacattagtggtttcaagaggttggaatttagagaaagaagagcgatcatggcagatgtgattagtagctcctgtgtctataacccaagcattaatagcaataatgttgctattgcgcagaacaagcatacggcctatcagtactggtaaaagaacaaacgatagagggataaaaggtaccaggtactggaccagtgtttgaaagagaagggagggaagacactgaaacagcatgaacttcaggtgcaggtgtggagctatggatgcgagtattgagaaatgagacaatcttctgcatttgttctgtagagagatcatcagtgcctgcagctggttccaaagctgttgtaatctcaggagagagctcagaaatcacattagctgctgttggggagcgtgaaggcttgaaacgaggatgaccaacaggatagccatgtttcttgtagcatttgtcaacaacatgaccagtcctaccacagaaagtgcagataggtttgtcctttctaaactgaaaaccaccagaagaactcccctgttgagaaacttgaaaagctgatgtatcaagagtgccagaaggaggaagacaagcagatcgctgagaatcatcttgatctaacatgttgtaaacctcatagagagaaggcagactcttcttcatcaagatctggctacgaacagtgtcatatgtgttgttcaaacccattagaaagtcaatgacacgatttgtttctttttcagcaatcaaatcctcaacagtgtgcgcattaacctgaagactagacagttcttcccacagagattgagtgcgagtatgataagtagagagatccatactaccttgacgaagggaattgatctgttgtctgagtttgtagaggcgaggtaagttggacttgtggtaacgagtgtacagatccttccaaatctcatgagctgtgttgaaatagagaatactggagtagatctgcttcgaaacactgttaagcaaccaagacttcaccatactattgcaacgtttccaaatcaagtagtaggaatcagtttcaagaggacgaacaatagatccatccagaaaacccagcttattcttagcttcaatactagttgtcatagcaacaatccaggttccatagtatgtaccatcgagaagatcaggaacaagaactaaacctggatgatcggagctgtgaagatgataagggctgtgaatattgtctggagaatcagagatgacgaacggaggagatgacgatgtagatcgagcgttgagaagcggttttgcagaagctgagcccacatgaaccggcgatgagctacgatcgttgatcggagagacaggatccgatggatcaggggtggagacgcgatacttcgagttagtctttcgttttcccatggaggacagatttgagctcaaaaacaaatagcaaaagctagatgaagctgaatccgagaaggaatcgaaaagaaaacgaagatccaaagaacaccggtggtcgaaatcggaacaaagagcggaagcgacggctaacaaacttttccgatgaggattgttcgttagagagaaaaagagatttcttgctctgataccatatcagtaaataatctcattctcattcctttggtaaaagatacaattgtgggtttatatacatttgaccaggcctaaaccagagcctctaaaccagctaaaccaaacctatacagactccaattaaacctatacaaaaccataatatttacattgaaactatatacataatatccaccataccaagggtttgatacacagcgcctttgacaggatagttaacgaattccttttcgttggacctgcgatcaaatctataagaagtggcattgcaacctgttttcaaaccataaaagagatatctcctcatcaaattctcaagcggattgacagtaacagaagtcttttgttaagggataagagtttgatgattaattacagtatgctgtgcttgtactgcatattatacattcctcgtctacctggacgcgggataaaaaaacttatggacttctttgacgtccaagctcgcattcaaggtcagctagatgaggcgctctacacatccagtgatcgtctcaccctggatctatgggaacacatattcgcagaggttaaaagcagatcccgtttcgttgacgactatgaaagcgccaggatgttatcttcagctagaggtgattggactctgagcgaaatacaaggtgaagacaaagaaacaaaaagaatgcgtgagaaacttctacgctatgtgatggacatggattatggtcagagccttcttgtgtggcatattgccactgagctcttataccagacagaagaaggcactaaagcgaatcatagcagccgtgagttcagtaaaatcctttcagactacatgatttaccttctcatgatgcaacccactctgatgtcagctgttgtgggtattggaaatataagattcagagacacctgcgaggaggctaagaggttctttgataggaggcatatcgttgagaaatcctcaaagaaggtcaccgatgcaaagggagccagcttggcaattttatcagtggcggcgccagcagaagctgagcccatcgacgtgaaaggtgatagaagtaagtccgtcctgtttgatggggccaggctggcaaatgagctgaagggtttaagaaacatcgaggacaatgcaaatatgtggaaagtagtgagcaaagtgtgggtggagatgctttgctacgcagcaactcactgtgattctaaacaacatgcagctcaactcaacaaaggtggtgaactgatcaactttgtttggctattgatggctcatttcggactcggagagcaattcaggaccaccaaggaagattctagagccacactgattcttaccaaaacaagcacctcttgccttgtgtaacacattgtatctctcgtcttttgtcttcaacatctttggttattgttgactaatcataatccacaactcgtctcaattctttaaaaccctaatttgctatatgtaacctaaattgccttactgcctgagtatttcgtgctcctgctccatattcaaaccagagaatccagaagtagctttgctaacttttctaactctaatttcaaaacagagaatttagcttctaagatcagattaatcctgagttgtttttgggcttaacctgatcgtgttcatcctgtgagcaaaaatctcaatcagagccaccactgatatcgtcgtcactttcacctgagagaatcgtgcattaccactttcttgagatttcgcgagctttgttccagccttccagatttgagtgacgaatctga

SEQ ID NO: 33425 - DNA, 1606 bp, Arabidopsis thaliana landsberg
cattatcatcaaacacaatcaacggaaaatataataacatgatcactcaagttgaccataccacaccccttggatcttcacatcctttggtaccttagcacccaagtcagtatccgacggctgaagactctcgaacactccgatcacctctcctgtctccggcttgctctttgtcactttcagagtgatctctcccactgaagcggcagtgttcttcacgttctcctttacaagctcctcctcgtctcctctgcctccagctggcaatgccacggcgttgtcatatcctgtggatccaccacggccctttgggtccaagaaggaagagccacggtacgatggaaccaagaattttccggtgaagctgtctggtttgcctgaggcgtcaagctgtttgactgtgaaaaggaatggcacacgttcacctcctggaagttggactgtgactgcagcatagtcgattccatcttcttccttgaaattgacgcttccgtctgaagcaacctgctcattaaagagacgatcaatcacaaaccctaaccctaagcagagttttttcttgcagtctaagcaaagacgcgaaatcgaacctcgaagggtccttcgatctcgtcaagggtgtaagtgagacgggtcatgagctttgtgttctggaaatccggcggtgcattcttgcttacactgtctgccttgacggtgaaggaagtgggctcgaagcagaacttctttcctgtgtacttaccagctttgaacgagaatgtctcagaagccaccatcgatagttggacactggtttgccgtaccggtaccctttacctccatgtaagtcttgctctgtatctcgtcgtacgttagcctctgtggtgctccctccgcaacggcccccttcattacccaaaacataggttaaaaatactagactttgcaaataaacatgcaatgtaatctacatatattactgtgacataacaaaacctctatacactaagctattagccctagccaacacaacttcataagtttgttttcttcaataaacacaaggcctataaattttgttaagtttgtgagatgaatgagaatatgaagttataccgagacaacgagagcagaggtggctagagcaaaaccggcgatcttggcggcgtcggagcattttccagcgaagtctttgaggtcagagtggagagagcacgtgagcctagcttgtgaagagtctaacccaaaggacttgcccacggtttggtttaatcggagatggacattacgagaaggagaagcggcaatcttcgccggttgaagaaaagttgcggcggcttggagagaagttgccatgatgacaagactcagatgtcaatatgtttgtttgagtgataatgcgaagttgagtagtaataatcagaggagagattttgtttcgctaagataaggtcggataagttttgaaaattttccattggattgttttcatgagtatatggttgattaatagccacgtgtctaaagctgatgtggaaatagagatactgtcccaatcagtattggtgacgtggttataaaattatcaattccactggaatatacaaagttgaataaatagtttggt

SEQ ID NO: 33426 - DNA, 526 bp, Arabidopsis thaliana landsberg
aaaatcctagtttttaattatataggtaaatgaaataatttttaatattttttaaattgaattatgttagaggttaggtagatgaatagatcaatcgaggcttgaagccaagcgtgtgccagcaagaaggggtgacactgatagtataaatatataaaacgaaagatatgatgtatctctcctgcatttataattgttttcagagatttattaattaaaattgacaactaaatttgtttataacagatattaagaacaaagtagaaaagaaaaaaaaaacgaaatacaaacaagttagcttagcttcaatgaaggacgtgtttctacaactattagtctgatgacaaaaataatctcgtcagcctattttttgttatattttttcatttttgttttgtgtcattattagtcattttgagttcatgtatacagcttaagatgtataagggttatcatggagtaggtattaggtacattctaatgacaatagccaaagaatattgatcagttttaaaaatgaagaatt

SEQ ID NO: 33427 - DNA, 890 bp, Arabidopsis thaliana landsberg
gaaaaacggcgaaggatgtgactatggatcacaattcgttcacggaaacagacagaaacagatttattgcgttcatcattgttcttcaacagattaatggcaaacacagacctctctgatgaatcatcaagaatactatacataaaatcttaacaaaaacaaaagtatttagtatgatactgaaaggttttgcaaaagaaagaagaatctttgacgtataaaacacgcttcaaaaataaacataaaaataaagacagctcgcccatgaaatatacagaacacttaaatccactgtacgtattgacattgtatgtatttgtatatctttatgttctctacatctgttagaaataagaaagaaagaaagaaaaaagctaaagggactgaccaaaagagacggccattctctgaagatccttggggaacacgtcacaagcttggctttggctccaaggaaaggcaatgttggagttgaaatccgtctctgatttcacgtaaacttgggtagagaataacgattcgtttaggtactcgtcggaccatttcatttgtcccataacgggattgttgaggttgcttgtggttccacagtgtgattcccaattaggctctgacacttttacatgatcttgttcagagatagtgcttgaagtgttgtttggaggaggaaaaagaataatcgagggtttcacgcatacttgtgtctcaaaacccgcatttgagacagatccatcaatgtcgatgttgaattgcgtagggatcatggaagagagcgaattgttgagtgaaacagagttggattcttgcttctgaaacgcagaatacacggaaaaatcagacgtttgcttgacaaagaagtcttgattagtttctgaggaaaaacttgtgga

SEQ ID NO: 33428 - DNA, 2358 bp, Arabidopsis thaliana landsberg
  unsure (1)..(2358): unsure at all n locations
aaatcacaatgctcaacgtttcttttgcgttacatgtacaataattggtgtttatcgaatacaatcttttttaatcgtgaaatgttaacgaaccaagtgcgttagctctattggtaagaccgaccctagggagacttagaaatcaccagttcgagtgacgcttggaccaaactaatattgtaatttgtattttcgggtctaaagggattaagaattttttttgttcgaaatacgggcttttgcattaacattattaaaaacacataaattagtgtgtcaaacaacggtagccctaaacaaaagtgaaatgtcattctagaaactcacagaattcaatcattaattcgttcgaaatttattttatgtttttaggtagtggtagaaggtaccttatatcgatggcacaactcgcagagatcacggtcccgccacttccgattgtacaaccagacaatgaagaaggctggacagttcaagtcttccggtcgatagatgatggtgcagttgaagggttcccagaggatccacgtgaagctgcaagcataggacttataagcggaaaagataacgtgatcgaaagaagcattcaagacgcttacgttaatgccataaggagagccaaaaacttcatctacattgagaaccaatattttctaggaagctcctttggatggaactctagagacataaatttaaatgagatcaatgcactacaactcattcctaaagagatttctctaaaaatcgtgagtaaaatcgaggcaggcaagcggttttcggtgtatatagtgattccgttatggcctgaaggtaaacctggttccgcatcggttcaagcaatactagactggcaaaggagaacaatggagatgatgtatactgatataatcattgcactacgtaaaaaaggtttagatgcaaaccctagagactacctaacgtttttctgcctcgggaaccgggaaaagggcaaggtgggtgaatacttgcctccggaaaaaccggaggctaattctgattacgcaagagctcaaaaatctcgtcggttcatgatctatgtccactctaaaatgatgattggtaagtctaaatttacctttcataactcatcatttttatttggctttaaggaatgtggcgtttatcagagacaacaactaggattagtggtgggtcatgtcgggctgaagaccgaatgagtctagttaatttcgttaggcccattttttccgaatatagtgttaaattataataaaagataaaaaaaagtagcggttttacaataagtgcatcgtttgtttgataaaaaaaattaaacgtaaaaagtttataaaaatttaacttactgatttaaaccaaaatttttaaattttgtttggccaattgctacaaacgtattaagaacaatcaaaaagctcttaacatggttcatatttctatgcagttgatgatgagtacataataataggatcagccaatataaaccaaaggtcaatggatggaggtcgagacacagagatcgccatgggagcatatcaacctagccatctcctatctactaataatatgaggccggttggccaaatatttagcttcaggatatcactatggcttgaacacctacgagtaacaaccaatgcatttcagtgccccgaaagcgaagagtgtataagaatggttaatgcaacggcagacgagctatggggactatactcagcacaagagtatcctcgaaatgacgatttaccggggcatttgcttagttatccgattagcattggtagcaatggggaagtaacaaatcttgctgggactgaattctttcctgattctaacgcaaaggttgtaggcgaaaaatctaattatcttcctccaatccttacttcttaggtgatgtaacactctcatatcataatcttgaaatgtgtaatttcggtgtatagttatgctattcatactcataattagtaaggagtttttaattaatcttccgcattttctcaattaagtaacacataaaatttccaaattaacaacaaaataagaaacttaagaactcgctaaaaacaaccaaatcacttcctaatttctatgtgttacttattcaaagttcttatttccaaaacttaaatatatatcatttacgcgaagtggtttaaatcgagttggctatagtaatttacctctagacttttcactaacttttattgatcaaaacatagggataacacctaacgaaaaacactccacacttttcatattatcaataattgagatggcgacacatttcaacttatctatttacattgccgacanaatatccatataccatattcactcatttaatgttattggtca

SEQ ID NO: 33429 - DNA, 505 bp, Arabidopsis thaliana landsberg
tcaccatcggatctaaatcctgaagaagattccactttcggcaatattgtttcgtcttttgacagattgttctcttttttctccgaatctaacgaagcgttgctttctctcgtcagtggtatgatagaatccaatacggagctgtttccttcgccggatcctgagctctttagttgattactgaacggaacttgactttttgaaggagcttcggcttcggatttgattgtagtgacgcgtgaactgttatcgtcttcgtacttgacatgtctcggcttctttctcttaggagctgaagcgaaaatggtaaaacaaagtgagcaaaaaagacaaaaaaaacaaaaaaaacaaaaatagtcgttccgatttgtgaatggagagaggatgttaccgatggctgaaacattataggagctagaatttgcagctagtgtgatagatgattgaggaagagtctgaggatttgagatcggtgaagagactcgagatttgacttctacagatg

SEQ ID NO: 33430 - DNA, 2481 bp, Arabidopsis thaliana landsberg
  unsure (1)..(2481): unsure at all n locations
tttagtttcaaaaactgtagtaacccatatctttggtaaaaagacgaaataaccttaatgattaattgtaatcaaattaaaataaaaaataaaaaataaaacaaatcttttatattttaaagcacaagtcactccaccaataaaattttgacaaatcagcaaaaccaaattatttttcaacagatttataaaaggaaaatttgcagatataacttaaaagcatttataaattaacaaactaaccaataaaaacaacctaacaatataacatatgtaatatatattattacaattttatccccaccactaacaccactaaccaccactacaaccaccgccgccggataaccaccgccgccggccaaccacctccgccgccggccaaccacctccaccgccggacaaccacctccgccgccggacaaccacaaccaccgtcgccggaaaaccgacgccgccggaatcaccaccataacgaccatcgccggcaaccaccgccgttgccggaaaaccgccgccgccaccgccggacaaccaccgtcaccatcgccggacaaccaccgccgccgttgccggacaaccaccgtcaccatcgctggacaaccaccgtcgccgtcgccggataaccgccgccgccggaactaccaccataaccaccatcgccggacaaccacctctaccggaatcaccaccgccggaatcactaccgccgccgtcgccggaatcaccactcgccgccgtcgccggaaccaccaccgccatcttcgctggaaccaccaccaccaccaccttagatcattttacctaccccttaagttacttacttaataattacatatatagtgctatattcttaatttttctctcaaaaagtgttattcatgcaaatcactcattataaaatcaaaaaagaaatcgtggataaaaaagaaaaccaaaacctatattacataattaaaacaaaaacgaaaatccagttaacgtgagaacaaactttttttaaaataataattttgaacaaaatttagataaagaagaatcttcttcacatatttcgtttttgattttaaaaatattaaagaaaaacaatttaattttgatattgcatattataaattgacttgttttagcttaccaataatattttgacatgtatcaattcacaaataattgatttgatggtaggaatagaagaagaaaaaaaacggttatgaaaacccttggagaatttatcatgactaataaaattcattaaaattcaaatatgacaatattatgtaaaaatctgccgacattaataaaagtctgtcgtgacgttatgaaaatttctttttcaaaaaaaaaaaaaaatctagtcaaaccggatttaacatacaatcagaccggaaataatttaattgagggctagctaataaatctcatataacaaaaaatttcgaaattttaaaaataaatctgctaaaaaaagtctgttattactaaaaaggttattctagacataaacaaatcggccataacattgacatgagtaaatctgttatgctttgacactgaaaaacaaaactgtcatcactaaaaacaaatctgttatcactatgtgactgtgtagtaattttattttttaactaaaatctgttgtaaaacaccagatttgttaacaagttaattaaatctgtgattacacaaaacaactctgtcatgcctatataacatttttcgaggttaacaaatctgttataacacaacagatttttgggtgcaaatagaaaatctgttgccaccataaagaaaaatttgtggtccggaaaacaaatcagtgacagatttggtttcaacattcttacttttgaaatttaaataaaatctgtggagactatatgaaacaaatcagtcacggttaaaaaatctgcgaaaaaaaaaaaatctggcgtaacataacacagtaaagtctgtggtacaaaacaagtatgttgtaaaaaatctgtggttgaccaacaaatctgtgatcgataacaaatccgtcgcaacaagaggcacagatttaccaaaaacgacgatggcattttcgtaaataaatgtggttttattgccttgctggaattaaatagtaatggcatttctgtaatattgttttcctctgcaaaggaaaacaaggataatttaggtataattattactcaaataactcatatttttagcattccttttgggtcattatgtataaaatatgggttactctactaaatttcccaaaaaaaaatgctatcattgagggagaagttctgtcttaggattcaatgttgaaggataaattttgtgcatttggattttagctttgggcttgtctcatatatataaaatgaaaaagtcacactcatgatttggccaactaaattcatgtgcagaactctntaaactgtaattacttatnttgaaatatacgttcaaaatataagtggagacccgtttgacaaatataca

SEQ ID NO: 33431 - DNA, 2668 bp, Arabidopsis thaliana landsberg
ataatacaaacgatatccatatttgcagctttatgtgctgatgtgcactgtaaccttttctacaaaccttcttgtgtataacctcttaagaagaacaaaattacagactgcttcaacaagacgaaaatgttgtggaccctgagtcgctgagtattgtaaaattgtattagcgacaaaaatatatataaaaagattgattatactatgtttgtctataggcccatcctaagcccttaaatttagccacccagaaaataaaagagatggatttcattttttccctataggcccaacttaattagacctagaaggacccaacgcattggatgaagccgatgaccacgtcatcatcatcttccccaaaccaagttttccggttttcctcgcaattatcgaagcgataatccaaaacagtatctcgctgctcacacgaccaaacaagactgaattacaacatacggatatgttctgattgaactacagtatatagacgacgacaccataagatggatataatttgctactcaattttgataattatgtttatacacaattcagtggtttatggtttatcagtgaagttcattggctgttagatgatatcttcaattttgtctcgaaatggaaaacgtatcggatgcttctgaaccagattttgctgactcgattgtagttgttctagattgtgaaacagctaatgtgaaacactgggcttaagaatatctctatatacataattattatacagatctttgaagaagtacttggagagctccaagctattctagtctgaaagaatctgcaagcacgaggaaaattcaatgttacaggtaaattagatgtaccgtgattccttattcgtctctggtatgtaaccctactttctgagtgccttgctacagaatcctgcatgatgcttcttttatcacgcatgaattggagaatggacacatcatcagcttctggattctaccgtcttcttcccaagacacagtttcggacgtttttcacaatcttggagagatcaaggcagaggaagagccaactccaacaatctgtacggtcaccgtctacaaatagttcgtctaatctagattcacagctacctttgatgctctcttcaaaagcttctgattcagattcacagctacctttgatactctcttcgggtaagatcttggcaccgcattctataatttcgaagtcgcgggatttgctgctgaatttgaatattatctctctgttgtcttcagatgggtggaatcctcccaggtcagagtgaaatacaaaaagatgttccgattgaaatttggagacttcgcctacgtacttggggtgagctgaaagggagtagtattgacctttgatgtgagtccacaatatgttgcgaacactattttctgtgagtggctggttaggggaaatcactacgcaaacccgaacgccacggtaagacctgttactatcgagaagaatggtcaaggagtttccttttgcgcggtgatcaaagaactctgcgggcacttccctagcaggtaagagcgccgtttctggagaaagagtttgttggataatttctcttcgttgggctaatttgaagcagttggtgagatggaggcacttatatgatctgtttaaagggaaaaatatggtctctagtgattcacaatcttgtgcgtatatgtctgtgagtgagccagggagctctggcagtgaaaaaagttttggacagccagatatataaaggcattttagccgatgaagatctttgatgcaatcaggaatcctctctatatcagaatcatttatgagtagtgtcattacgctcttgggaagatgttttaatcccttgaggtctcctttgctactcaaatagagatgctcgaggcaagaccaaaacctaactgatggaggcacgccttgaaccgctgtccgtggtataaacagatttttgatgttggttgacacaactggaatatttctcaatcttgagcatcctctcatattgacgtatttaagagatgttaagttcatttgaactgggatgacttgtaggtttttgcatttactcatcgacaatttctgtagtttatgcagatgcgaacaagaggatggaatctctaccaaactctcgcaacccatcagatccaaattctccagatttgtagcatttgaaagatccgggatttccttcaaattcttggacattgacaaatccatcttcttgagattcttgagcggctgaatatgtaatgtaaaaagatcgtcatattaataactggaagagaaagtacatatatcttcatatattttcatgtacaataccaacctgggttccttcccaaagcttctctagcttgttattttgcaagttgagttccacaagatattctggcctaaatgtagaaggaagagactttcctgggtatacctcccaatgtaaagaccttagacgatgtgggaaatccatgtcatcgggtacatttactctaaggtttacatcacgtcttgtctcgtagatgcttagaaatcgaagattacgcatattttgaaaagcttttgcgcttatatgcacgccattcgggattgtagatacattaaaggatatgcccatcacatttgcacaaccctaatcagtaccagataatgtaaaagttagcacaataag

SEQ ID NO: 33432 - DNA, 3017 bp, Arabidopsis thaliana landsberg
gctccattccaggagtaggaggaggagccataaacacttttcattagcaaaagcgttttcgtcgcatccagtttcttcttcgtgattaggtgcgatatgaagcaagccgtgacaacaggcgtcatcatcatcttcaaggtcaatatcgagatcagggattggaggaggagcaaggtcatcatcatcatcatcaacaaccagctgctcttccatctgaagaccatcaaattcaaaattgaaatcgaaatcggaaacccaaattgaaatcaaaatttgtagtaaatagagagagagaaaggaagacagtagaaaccaaccgccgagatgcagagattagggttgggcgagagagagtggtcggacggtgacggtgacggtgagatgtagacgctattaccgatcatcttccactaaactaaaaactaaaatcaacaaacaaacaacaacaatcgtttcatctcagaggacgctgagctacctgaatcaacggagactctatccctttttttttttttgctgcgccaaggaataaagtttctatacacttggtttgttgcatctattctatgcggtctgttttgtttttgtcgcataactaaataaccagagcggaggcatgtctttatatatatggtaacaattcctcaatgactcatttctcacgaatcgggtaaatttgactgagcaccaccactatccccttgcgtaaaatataaaacatagacaactaactaccatcaaaactcaacatgggcaattcttggggggacttcgcaggcgtacgaatagggcacacaacttttgataaagaagttgacaaacgaaaacagaataacacatatcaacattacaaaatatcaatttgaacccaaacggacaaaagaataaattacagatgaaggacgcccacggctcaagctcaagctctcataacaacgaaaacaaaacaaaaattcttttcaattgcacaacaacctcctgaaaacaaaacagcaaacacaagttcaaattataatgtggttaaaacctctcttcaattggtatcttgagagaaattgcgtacctaataaaaataggtaacaataatagcagcccaaacggcttcataaagcagttggagaagcaccaagggcctgctgctcctaaggagctcttctctctcaccctcctcctttcactccacttagtcaaattagatgaccttcttcctttccactcttctttactcacttgctaaagctcatctccgagtatctgcacatccctcgtcaacatgtgctcgttagtgtttcatttcatcctggaccaatattaacatttcatttccacaaatatctgtatccaactactcctgtggtactttgatttcaaggtggtttcacgtcacactaacactgaccgataaataaactagattgcttcaaaactcacctacgaggctgcttgtttgggttgctatttgaccgttgagaattcccattgttcgtaacctctacatcaataaacccccatacgaatcagtctctccatgtaatcattcaaatttcttattcgccaaaacacaacaaaatcttctgaatccattataacaaccccatttaattggcaagagttattacttaccaggtctctccatgggctcttcatcattaggattattggaactgttctcttggctgcaacaaaaaatcaaaaatataaggtaattgggtacttgagctcaaattatatgctttactagacgctcataatcagagatgattgacatggttacatgagtgcccaaccaagaaagtgagtctgtttaatgaaaactacatgtttctgggtgtacatagtcgagaaactactaatctaagcacttaagaaatgtaaatctaacaggtaacaagcattttgcagtgggtctagaataagaggaaccacaaatctaaaatctcacatacgttacttagttaagggcttaaagctgcattcccatactactcttcctctaaggtaaaaagcaaagagtctacacatatgcatatggaaatgacatgttgattaacaatactgagaaaattatttctaaacctggacgatccggcagaggaaggtaaccctggtttgtctgcttggtaagaaccatcaaggacagtataaggtggacaatatgaaccccctaatgctccagggccagccaaaattggcagcctgtcaataatttaagaaaataatagcagtaataaggacctactatagatagagaaatagggaaatcaaacaaaaaacaaacagcagacgagtgaaagcaataattcaggttctgtttgggctagtaaaagactagttacaagattaaacatcctctcaaattacaaaagcatgcagcaagtcaactaagaatgcaccaaatatataacttttaaaacatagctgtggaactgcataccatgtcatctcaggatttccggtaccatgttctggttggaaataacctggaagagccattccaaaagttggaaccccaccatgctgaccaccgaattgcataactgaacatgaaaatgaaaacaaacaagtttaaactagtcaggcgtgcatattagcacctgtacaaaaaggtgccgttctcaagcggccctagacatgggcaaccaggccaagcggctcagcatcaatagctctcaatttcactagcatgcatagattgattctgaaagatgtctttcaaccattacaatgtaggatgaacaatgacattcaagaacaacttaccaggtagaaaagcagggaaatttggattgccgtgaccagctgccatcccggcagggcccataaactgtgtccctccatacataaaagatcccttccactaggttggagagacccttttcccttggcaaccaaagcacctgtttctacggctgactctatttcaccagaaagatacggattttctgatgatccggtttttgaaagaaaaagaaggcagcaaactgataacagccgaatgttgattaaaaaccggaccg

SEQ ID NO: 33433 - DNA, 543 bp, Arabidopsis thaliana landsberg
gatcactagcatctgaaatcgcttggaaaatgaaatattcctgaatgctttagagtttagacttcaattagagtaataaaattccactctccaaaaacattcatgcattgcacaaagctatatatataatcaaacctttactaccaaactttaagagtttgtttgcagaattcaattattagagactttcaaaccgaaagactcaaaaataaaaagttgctcaacatagaaattgaagtccatgcttctattattgtgtcgccatgatggaactcatgtaagcagacttcttgccagatgctcccgagctgttgctagcgcttgtgttagtgtctgcaataccgaaatgtaaacagagggttcaaattagaagttcacgtttgtgtttatagccaaaccagaccaaagttatagcaaaactaaatcaagactattgcttttccacagggagatgtaacaataatagtccccagcgtcgttacctgttcagagagtgaaccaataacttctgtgctctgcattgctactttccccgcaatgacg

SEQ ID NO: 33434 - DNA, 2908 bp, Arabidopsis thaliana landsberg
aaacattaactcttctctgaataataaccgttagatcgattttctctccaaaataaacgaacggctgagattaaaaacatgttaactatagttagcggagcagctgacgtcatcaggggtagaattgtattgatttttattaaacagtagaaaatctccaaaaaagtgtctactcccttcaaagtgctctaaatgggcttaaaaacttggaaagtgccccaacatagaagaaacccttaaaactataacaaaaatcaaaaacaaaataaactaaaacttgaaaaacaaaataactattaatatgtttaatttatttagcgactatttagcgactatttacaaagttattgggctaatttaatccgcaaaaccaagcccaactatttttgacccaataattttagcccaattgatcataaaccctaagaataaaacgtttctctttcgacgcctctctcattctttcttccccaaattctctcgatctaaccctaatctcccaatttttccacaaatctttcattcaatcgattaagatgactggccggcgaggctggaagagaaagaacgcccccaacgcgtctcaaagagccgttggttccaccattttaaaccaaagaccgtcgaatctaccttctcagtacgccatcagaactctggaggaggatacgacagcagctttgcatcagctgcttatggtacctggccgacacttgtatacaaccgttctatctccaatatcgttgccagagacgacttggtatgacatattctatctccttatgcttctttatctatgttaaaatgagtataagtatcaagatgagtataagttttgagatgagtataagtcgaggtttgatgtcgtgtttgttagatgagtatgtcgagtttgatgttttaatcgtgtttgctagagtcagtttattattaagacgacttgatgtcattgttttgagttgagtttaagtcttgatatgagtttgatgtctttgttttgagatgagtttaagtcatgttatgagtcagtttgagtcctaatcggttttgctagagtcagtttttttattaagtagaattgattaatcatttttgagttgagtttaagtcttaatatgagtttgatgtctttgttttgagttgagtttaagtcatgttatgagtcagtttttaacttaatcggttttgctagagtaagtttgttattaagtagacttgatgtctttgttttaagtttagtttaagtcttgatatgagtttgatgtctttgttttgagatgagtttaagtcatgttatgagtcagtttgagtcttaatcggttttgctagagtctgttttctattaagtagacttgattaaccagttttgagttgagtttaagtcatgttatgagtcagtttttaacttaatcgtttttgctagagtaagtttgttattaagtagacttgattaatcggttttgagttgagtttaagtcttaatatgagtttgatgtctttgttttgagatgggtttaagtcatgttatgagtttgatgtctttgttttgatttgagttttaagtcattatgtgattttgatgtcttaatcgtgtttgctagagtttgtttaatgtaagggtttgattgtttggatttttaagcatacaagtgttgtagacttctttacttctttgattcagattcgctctccacttgtgtacaattgttgcaagtttacttgcgactatagatcaagattggtaaggaagattaccaaagtttttacaaacaaattcgatggtccgtactatagttggacatgcgtgcctcgtgaaagggcactgataataggttcttagtcaattatcctaaaacaccaatcatatcgttgtactattttaggttgtcaatccaaatgggtgtgatgagagccatcaaaataatatcaaaaactcaaatcagaaacatggttggtggtgagatattaaaggacatatcacctgatgagcagctatgatatttgtacccattgatgtagcaaagtacacaaggagcgtatagaacaaaacctaaggggacaagacacaaatttcagataaggaagagacgatcttgtggcaattctatagatacaagtgaagtattaacctttgacatcatagttataaagacaggggcagcgagtccaaaaatcgtcaaaagttcacttggagaaggaacacagaatgagaatgcgctgtatcctttcttgttcaatgcgtccatcatcatataagcagcaacaacctaaaacacctcgcattatgaccatattgttaactagctgatatgatattgaatcagacaagaagatttcagttccaaaatcagaactttttggaatcttaaagatttcagcttacttgtgacaccatagttgcccaagctgcacctgctataccatatcctagaaaggtgcataagaccacatcaccaacaccgtttattgcactagcaaccgccaaagccttaagaggtccccatgagtctttcataccaagactaagacaaacaaataagaaaagaggatgttacaccacaataacagtggaatataatccttgcaggctattaagatcccacagccagaattgtatgacaatgctgaaactttggaagagcaaaaaatgcaagacgcagaagaaaatggggtataaagggaccttgcactttgagcaacccatccaatgagaacagctggccatgctaaaccacgaatctgagaatatggaaaaacaatcaacaatattcaaggctattagcatggatcgaacttagtataagttgtacatctccagacaggttcacaaggaaaagccatactatttttctatacacatagagccaacaagctcaccaaagcccacagtagagtgtactaagatata

SEQ ID NO: 33435 - DNA, 953 bp, Arabidopsis thaliana landsberg
gaaacctctattattgataatatatggtcctacatatgactatagtacaataaaacgccatcaaacgtctattattggtaattaattaagtaattaacttcttttttttgggataaaaattaaagatccttgtttcctaagatgactcgatctttagaaactaagagagaatgaaactaacactagaattcctacagaaaaaaatgaaatcaacaccaaaattgctgcttctacttctgtttatcataaatcatcatgttgattctggctctatcgtcaagtttcttcccggctttgaaggccctcttcctttcgaactcgaaaccgggtttgttaaatctctcttttaaaaataatgtgttttgagtttggagttataagtatttagtccttcttctgaatgaaggtacattggtattggtgaggaagaggatgtgcaattgttctactactttataaagtctgagagaaatccaaaagaagaccctcttcttctctggttaagtggaggacctgggtgttcttctatcactggccttcttttcgagaatggtaatcttcttcttctttttgctcttgctctaaggattattttcaaaggcttgcttaaagtgggttaaaactatactaggacctttggctttgaagtccgaggtttacaatggaactgtcccttctttggtctctactacatattcgtggacaaaggtagcagaaagtatgttcatatgttaaattgttaatgacaaaacacaatgatctatcaatttatttgattatttattcagacggcgaacataatattcttggatcagcctgttggagctggcttctcctactcaagagctccacttattgatacacctactgacacaggagaagttaagaggattcatgagtttctccaaaaggtaaacacgttacttaatttggcatctcaaagcatttgccat

SEQ ID NO: 33436 - DNA, 1774 bp, Arabidopsis thaliana landsberg
gatctcattccttctagatatgttcccaactcttttgcatggatcgcatttcgctatgaattcctgagtatccttaaacattgtgggccaccatagacctgcttgcattattttctgagcagtcttgaaggttgcaaaatgccctccataggtggatccatggcaatgtctcagtataccttgaacttccccttcagagacacacctcctgaatagcccatcattcccctttttatacaagtacggctcatcccaatagtaatggtggatgtctctaaagaacttctttttttatatgcatccaaactctaggggatcataccacttaccaaataattgactaaatctgcataccagggcaacttttcttcttcaactgcatatgcttcttccagcatgtcttttgtgtcgaagcttttgttaaccaggttgtagaacataagctgttcttcaggcatagtatcatctatcgggactgaatcttcaattctcatcctggagagatggtctgcaactccattttcaacacctttcttatcaatgatttccatgtcaaactcttgaagcaatagtatccacctcagaagccttggcttggtttccttcttggcatagatgtgccttagcgctgcatggtctgtgtagaccttcactttggagccaaccaaatagcttctaaatttctcaaaggcgaaaaccacagctaaaaactccttttctatggttgcatatcttgtttgagcttcgtccattattcttctagcgtagtagatgacgtgaagtttgccattaatattttggcctacgacagccccaactgcataatcggatgcatcacacatgatttcaaatgggtggtcccagttgggtgctcgaacgataggggcggacaccaatgcttcctttatcaaatggaaagctttgagacaatcttcatcaaagttgaactcagtttccttgcacagcagtctatttaggggtcgagcagtctttgaaaaatcttttatgaacctcctgtaaaatcctgcatggccgaggaagctcctgatatccttaactgtcttagggggttgcagctgaatcatgacatcgatttttgccttgtcaacttcaattcctttaccagaaatcttatgccctagcacaattccttcctgaacgatgaagtgacacttctcccagttgagtaccaaattggtttcctcacacatttctagaaccctgcacaagtttaacaaacatgaggagaaagaggatctatagactgaaaaatcgtccacgaatacctccattatctcctcaataaaatccgagaatatcgaagtcatgcttctctggaaagtcccaggagcattacataaaccaaaaggcattctcttaaaagcaaaggttccatagggacaggtgaaagtggtttttttttggtcattagggcgaattgcaatttgaaagaaacctctatagccatcaagaaaacagtaataaacatggttagctagcctttctaacatttgatcaatgaatggcaagggaaaatggtcctctctagttgcaacatttagtttcctgtaatcaatgcacattctatgtcttgttatagttctagtgggaatgagctcatctaaatcatttttaactatagtcattcctcccttcttgggaacacaatgcacaggagagacccatgtactgtcagaaattggctagattatatcagcatcaagcgatttaagaaattcctttttaaccacatctttcaaatttggattcaatc

SEQ ID NO: 33437 - DNA, 1062 bp, Arabidopsis thaliana landsberg
ggcaaggctttatgctttgggcagcgatgggtgttttgatgccaattggtataatctccatcagattaatgtctatcaaataccaacctataatcactcttcgacgactcttctttcttcatgtcacttctcaggcatgtttcatttttcttggctctcttatttaaattatatatatcaaatatatattacaattcaacaaactaaatcataagtatgttgaaagtattgtataagttgaaaatgaaatttaatggtcggtgcgagaagataggtggatggagagtaaagcaaagatgcttctctcttcatctaaacaataaagattgcatccaattaacaactttttcgtgatttttaattagtactccattagtaattagtacggccttttaggttattctagattgttaatcacattgataatcatggaaacttgaaggccaagctaaagcatctatcttcttcctctgtatttttagctttaacgactttctgactttctctttctctcatttttatacttaactaagaaacctcacctactagcgggtcaatggtgttacaaaacaatatttgataattaaacagcagcaagtacttttaactattgttatctatcaacaagcggctcatagtttacttggaatattaagtgagcaattaacaatgtgattaatttatgaagcagatggttgcagtgatacttgtgacaataggggcagtaatgtcagtaataaacttcaacaattccttcagtaatcatcaccaacagcttggaattggactttacgtcattgtatggttccaagctcttcttggcttcctccgacctccaaggtacttctgtttcttttctcttcaataaaataagctgttacaccgataattctttgtgacaaaattaagctagcttaagattaataacactcattattttgttcttgaatatttctaagaaaaatcttgaatgcaaattagttagacttaatcaaatgttatgatgacgagaactacgaaatgcgtctagtactttatattcaatctttaatttgattactc

SEQ ID NO: 33438 - DNA, 638 bp, Arabidopsis thaliana landsberg
  unsure (1)..(638): unsure at all n locations
aggattataactaatgatataataattaaattactaatttagttgaagctgtaattttcgcctaggttgtattgtaagtatccgatgggtacgaaatttgcttaaactagattacactatattacataacggtacaagattcaaaaattattactttcaccaaacaatgtgcttgttggttggagtgaatttttgtgattaaaaagtttataatttctttgttgaaaaatcttatcataagattatttatgtttacgcttgtgaaatcatggaatttataccccttaattatttatatgcgtgttgacaaaataattggagtgtaaattttaatgattatctacgtacagtattattacaacaaaaaagcatatgtgattttggattaatcatgttatgtatatgtatgtatcttcacatatataatattataacttataagttttatttatttatttattacaacttataagatgttctaccttatgttagtgacttggcttaaccggaaaatgttcatactcaactcacgttctctagaagatagcgctacctttcacagcttatcattcanatcttacgaacccaaaatctcacttaccagncgactctctccctttcgctggctacttttctac

SEQ ID NO: 33439 - DNA, 580 bp, Arabidopsis thaliana landsberg
ccgctacttgatgtcgatgcattctcaatttctcatgtgtacactgtaacagtacagttaacaaaataaatttgttactattattaaatgtgtttttgtaacagtataatagcataaatgactgatacattgacacaacagtataaattcaactcccactaaagaagatgataaatcaaagaccaaatcatggaaaaagccaagcaaaacataaaaaggtgaaaaaaatagtatttcattcatactttagattggatattacatgaggacggtgaagataaatcggtcaatggccaaaagctttatggataatagtggtatacatgtcttattactgtgttggcgttttatgtgccatcttttttattttcttatatatctccactaggtatgttacttcttttcggtttcagagttgtcgattctggtcgggatcggtttacttttacatagagagtcataataatacccaagattgcctcttggtcttgttatatcactgcaggattacataatattccatgtgaaacatttaggtattattaagaaaacattttaggtataaaagatttgatagcct

SEQ ID NO: 33440 - DNA, 570 bp, Arabidopsis thaliana landsberg
aaataccacacggtacctcatatgagatcgacgaacaacttcaacatacaatatcgtatgcatcatgctcagcatgtattacttgacaaggctgcctatctggctgaggtcgccatcagagccaaggagaggttctatattacccatcgagatcatggctgttgcgaaatctgccgcgaattttgaccggttcttgctatattccgacacaatgccgtcagttgatgcaccggacccgaacaaaacttgatcggttactaatagtcctttcttttgcattaagtttttgtagtaattgttgtcgaaagaattaggtgttactagatccaatgctgccagattaccatcacctcccacggttgggcatctacgtttgcgtgtgctggcaaatcctgcgtcgatgtcgcttgagttctcgtaaagcctgtcccggaacaagaagcattgagattgtcctatggtgtgtgctcctgaatagttatcgtgacaaagaatataaattagaaattataaatttggctagtacattgttattactagtgatgcaattagcatagctattcacacatt

SEQ ID NO: 33441 - DNA, 2056 bp, Arabidopsis thaliana landsberg
cccactgattaagcacgaacagtggatcaagcaatgcaatgacgatgaactcatttggtttaggggcttaggctaagagacaaaaatggttcctttatgaatatggtcgagtaacaggggactctcatagaaagattgagttttagcagaatgctaaaggttagagccaacagacacatacaagaactgactcccatctacccaatgatatatagtattatagttcaaaagatgatccatgtcccttagatgtcctaactcaactcttatacccattcttttctctttttttggttcatgctcttaggggtgtttcttaaaaacaattcaagagtctagcgggtttggttttaaacttttacaaacttaaggcttttcttctaatcttatagcatagagagcgttttacccttttctttgaattacaatgcctaactttcttttctctttgaactccaaaccctttactagactaccactttcttttgtatcacccattaagaactctaaactctttctctctttgctttcttttcattcccattctcttttcctctcattccatacacaatcccaatcccaaatacaagtctccacctagtcctagctaacccaaaaagcgtgagctaggtccacatgaaagactgctcttgttggctgatgcatgttttatttcgcctcaggcttttacctgaaagaccacacgactactacaagtgcacagtatatcggagtagtattttaggatcgaatcttcgggagtgtagctacaaggaataattcaagttaggtaacctggatcaagacaaacaaaagtgtgagggttgttgtatgcggagaaaataagtaaagactgcaataaaactaaaaagaaataaacggaaactaatgaaaaaccaataaagtaaatgccaataagaagagcggtgtaaaacaagtaaaacgaaacgctaggtcatcaggggttctctccgggcatcatggttcaataataaggtatagatctcaatctaggtgataacatggctaggtttgtttacttccaaattcccgaacatacgagaattgataaatccaaagcttgataaatcttttgataaatatatagaaaagggtttagagatcttctctggaaatccaaagcttgataaatcttcttccttttacaagtagagaatagagaattgaagagaaaagagagatctaatgaaaaaaaagaggaggacgactttagggcggtgagaggcgcaggaggcagcctttttcgtgggtgtcctctagggtttcccctaaacttgtatttatagggcttcattaggtcaaagggtagaaacgtccttccattgattagtaagtgatgggccaagttcctgggcttttagggttgtttggaagtcggcggcaagaggaaaggaaggagtggttgtgcgccctagtggtcggtggaaaactcgaggggacgcccgggttcaagtcaccatggctggcggttttaaattgatcattttcaaaaccgcgattctaggacatgtcttcactcttcggacataacttctgaacggtttcatggattgcttcgattcgacttcgccgggaatcttgactcttctagatttccaaagacttcatgtcgagataggaaagaccttggccgaatgccaaacatctgaggtacggaaactgtcttgaaatggattttggtcgacttctactattttttgcatgaaaactcataattcttccttaaagctcatatactcgaaatatgccttgaagtgtccattaactcctgatttctccatcgaaaacctaataaaatacgatgttatcaactcccccagacttagactttgcttgtcctcaaggaaacaacaaagccaaactggtggaaagattttgaaagagcgggaactttcctactatcagagaccgtgtcctaaaagatatcctgaggatgcataaagacaaagacatcacgttagaacatcctcactatagacccaaaacgttcactagccttatccatccgtctcggacctacaagagaactctagaa

SEQ ID NO: 33442 - DNA, 562 bp, Arabidopsis thaliana landsberg
gagttttcaatgcactattttttatttttccgggtttatatgtgtaaaatgcatgttttttcgtgaaaaatgtatatttatcttttattagatattgccatgaatccattacacatgagtttcaatatgggttgaatagaaataaatatttttatttttcattataataaatgaaatgtcaaacaattgttattattagatttccaaacagataagccggtgaaataaaattctaattgtttttgttttattatttagcataaatatagttttatttatgtttaacttcaaatgatgggaaaaagtagggaaaatatgtctctaagttaaatgttataagcttttataaattgaaaccataacgtttttatataattaatttaatattatataacaattattattatttatatgtgatgtaatggcaacaataaatgaaaccaaaaacttaggaatcatatatataaaagtaaggtttcactctttccttaatggtccacttggcaatataagttctttttttaaatttatataaataataaataacttatttaacacacag

SEQ ID NO: 33443 - DNA, 2541 bp, Arabidopsis thaliana landsberg
aaggttatggtctagttccaggtattgggtgggtaaattcgtttgattaggttttattctgaggagaggaaaaggtttttagattgttaggaacataaatgaaagctttaagacggattcaaacgacgtcttcgttttctaatccttcatcgccattatcatctcctcttttttcttcatcatcatcctcgtggatccaaatacgttctgctctcttcgttgttgcttcttcatctcaggcttcttgttctgatcggttagtctattagatctccattgtttgaaattagattcttaagatctcgaatctatttaattgactttgttagactttcataatcatcgaatcttagataattaattagagtttagctgaatctgtacatttaaagctttcaaggctatttctggatgttttgttttctattttggtcttgttgaaatcaagtaggcacatttttaacctctgtttcattttgttgcaggcctcgtcttaaatcaccatggtctcggaggaaaaggaaaaggccacttagacctcagcaatggaagaggttttttactcctgacggtagattgcggaatggaggagtggatttgttgaagaaagttcgaagtagagtgagtcacagcttcatggaactaacttcacagtcacagccatttttgtggttgttgattttaaagattgtttatatttctcttgtttccttgtagggtattgagccaagcattcggctagaggtgtggccattccttcttggattgtaagtatacagtcaaaactctagtagctaaatcctattagctacgattgcttctatgaaagagttgtggtttagttagaagaaactgaaaagttgcactctttttggtatgtttgctgatttgtttttatactaacaggtatggttttaatagttctaaagaagagagagttactataagaaaccggaggaggtgagatagactgattgaattactatattgggggatagttttttttacttttatagctcttttttcgattctttagctcatcggttttgttacaaatgcagaaaggagtatgagagactacgtaggcagtgcaaacggcttcaaaaacacaataacgggactcgtaagttatacaacggcagtgaaactatccaagatgagtatgattggcctcgagttcaagacactgacagttcatgttctgatgaagttgttagtgcccgtgagtctctctctagtgacgaagacatttctgaagatattgggtctatgagcgaggtttcatgtacagttgagagagacgacggtagtagttcaagacgaatcaccaatgctactatctctacacttaattccgagtcatcagattcagattcttcagatgagagtgaagtggtacaggtctttcaatcttctgctactccggatgtgaatagtacttatccagccagttcatctattccccggacagaagaggattttgtgacgtggcagcgtattatccgtctagacgccgtgcgtgctgactcagagtggacctcctattctccatcccaggcagttatatcggaggatagagcatgtcgtgccgctgaggcggttgggttgaaagattacaatcacctggaaccgtacaaaatctttcaagctgcacggctagttgctgttcttgaagcttatgctttgtatgaccctgacattggatattgccaaggaatgagtgatcttctctctcctatactctctgtaatccctgatgaccatgaagtcttttggtgtttcgtcgggttcatgaagaaagctcgtcacaatttcagacttgacgaggttggaatcagaagacaactcaacatagtctcaaagataatcaaatctaaagactctcagctttataggcaccttgagaaactccaagctgaagactgtttctttgtatacagaatggttgttgtgatgttcagacgagagctgacacttgatcagacattgtgtctatgggaagtaatgtgggcagatcaagccgcaatcagagccgggatgggaaaatccgcgtggagtaggataaggcaacgtgcacctcccactgatgatttggtgctctatgcaatagcggcctcggtgttgcaaagaaggaaacgtattatagaaaggtataacagcatggatgagattttaagggagtgccaaagtatggcagggcagttagatgtgtggaagctccttgatgatgcacatgacctcgttgttactctacacaccaagattgaacattcattctcataaatatttatctctatattattccgcgggatttgtggatcctgcgactagtttaaaatggtggattcttggggaagtccccagtttcgtgcaggctcgaattgggccgtgagctctatctgaatccttgccgatatggaatgaggctagagagattgtgaaagagtggtgaacagagaggggtgtgtaatttaattaaaataaagtgtatgtgtgtgtgttgtgaagaatgtggaaaggttgaggagggtttctaaatta

SEQ ID NO: 33444 - DNA, 1791 bp, Arabidopsis thaliana landsberg
cgaaacccctaattagtacatcttctaaaagcatcgacacaaacaaagctgatctaaattctaagctctttctcaccggccggagagatacaccggttcaaggttattatcaatcgactctttcacagcatcaacaagcaactgcgtattccggctaaacctcatccaaaaccagcccggtttagctcctctgtttttaatttctccaaccaaccgagcaaactccataaccatacacgtctcttgtggaagcacagtcataactttatgttcactaacacaacctccaccacttgtagtaaacacagcctcggtttccatatacggtataacaaaatcatgaacccgaaggctacctttcgtaccaatcgcagttatctccatcgtcaaattcgccaagaaagaacagtaaatcgttgcattgaccccatcttcccaatcaaacaacgcaccacaagaaagaacaatccccgcatcgtttaaaacagaacaggacaaagcagtaacggtctttggaagtttaaagttgttaacaagaagaatcgcttggatcgtataccatccagcatcaccgagagctccaagtccatcaagaccaggctttacacgaatatcatgttttaagaaatcatcactcgcagcaaatgagaaacaactatacacctgcataagcataagaccatcgttctatactcaaaatttcaataaacatgattaagttactaatttaagtacttaaacacttacagatttaatctgaccaaaactctctaaatcattcacaaattccttaatcttaaccgttctagggttatgcatccactgagttccatccataaattgaacaccattaacctcacaagcttcaacgatctgatcaaactcagctacgtttaaagcaacaggcttatcaaggagtatatgtttacccttaatagcggcgagtgtagcccactcgacgtggaggcgagtggggatagggaaatagacggcgtcgacgtcgggatcttctagaagtgactcgtaggagctgtggatctttgtattcggagggaaattgttggatttagcaaatgattttgcttcttcgatggagcttgtggtggctatggcggatatagtagcgtttggagagagatttatagctctagagagtttgcggactttgtttgtgcagcttaagagtccgattcggatctggttatcaccggacattagctcgattttttcgacggtaacagaaaggagagagtaaagaagaagaagacttggtcacttaatttccgctttagtgtctccaatgtttagtaaattttaagatgttgatattaagccttctgttttgggaataatttgtatagttaattgttgaaatatgtgtgttactaaatctgccattattgaccacatttagtgttcttggaattttcaaagagagcgcaataacaagttttttttatttatattaatgtaaaaaagaagataaaacagatttttttccttacttatataaaatagaatacaatcagatccgtaacaaacacctaataattcatttttttaactcgctaaacattattcgatgctaaaaatttcacatgatttaattttaggggtcgacacgaacggaatattcaaaattgtaatattatttgttatccgatttgttttatccgaataattagtgttctgatttatatttgtttcgaaaataacggaatttttggatatctattcaaatctgaactatttgccaaatattcaatttgttcagtatatattaaaaaataa

SEQ ID NO: 33445 - DNA, 539 bp, Arabidopsis thaliana landsberg
caaaggaaatggaatgagtactgagcatgtgatgcaggagtgcaagttgttctatttcgccgggcaagagacaacttcggtacttctggtctgggcaatggtgctgttaagccaccaccaagattggcaggctcgtgcacgagaggaagtgaagcaagtttttggcgataaagaacctgatacagaatgtcttagccagctcaaagttgtaagtataaaccaaatcataaaccttcaggtgactttagtacttttattgtgtttagatggttttgctgaatgtttccaacagatgacaatgatattatatgaggttctcaggctatatcctcctgtaactcacctgacccgagcgattgacaaagagatgaagctaggtgacttgacactaccagccggtgttcatatcagtctacctataatgctagtccaacgcgaccccatgctgtggggtactgatgcagcagaatttaagcctgaaagattaaagacggtctttaaaaggcaacaaagagccaagtctccttctgccattacat

SEQ ID NO: 33446 - DNA, 963 bp, Arabidopsis thaliana landsberg
tttgtcatcactttgcatgtttaggatagatatgaatgcatattgcatatttgtgttgttttcatttgattcggagctggcggtgagctaattggaagaagccgacctgatcaaatcaacatactcgtccacgagctcgggtatcggcatcctggacttcctgaagtactcggacacaacctctacattaaatcactcgaccgggacactctatccaccactcgaccacgagcttgagtagctaacatcaccgtttctcaccaccactcgaccaattggtcgagcacatccatcacaatgcctcgccattcactcgagctgctgatcgagcaacaccatcgccaccttttgtcaatcactcgatcactacaactagaccccatggtcgagtaccaccatcatcattcactcgtttcatcactctggcaccaagtcgagtccaccttgatctacaactcgatatgctgactcgactgccagcttaagagtcttctgaattacgcactcaaccagacattcgagcataaggaagagaagaagactttggctcgtcactcgacccactactcgaccacctgggtcgattaccgttcttaatactccccaatactgtgtcgttttgagtattagggtttcagaacatttctctataagtagcatgtactttatatattcgagactaagttttattccatcgacagtttgtgtgttcttcgcttttgtaatccggattcctcttaatctattcagtattcgctttcctttttactaagttgttcatcctgttatcgttctcttatcattatgttgcaatgatgtttccatacatgtcatcgtttacgttatctgtaatgaagtctgagtagtgactaggtttctgaggctatgttagagtagtttagaatcctcggtctgttaggtggttgagtttgatttatagatcccttctggattagttgttct

SEQ ID NO: 33447 - DNA, 681 bp, Arabidopsis thaliana landsberg
ttaagcataaaggctgacttttttgttatgtgagatttttttcgggttgggctagtcacacgttggtttgatattatctacaataacacaattccaaaactgctgacatcggtcatttcaggtgaccgacctgttctgtaatatctggtgaggcgagaatatgaggtacaattaatacgagttggttgcaccactaagaggaaggacaaaattttaacacttttgtatccattttcattatagatcattccatatctagggctagaacctcttaataattcaaaaagaaaaaaaaaatactcactcggggtctagatatccaggagtaccagcaacaacggttgaaacctgagattcatctccgagttgaaaagatcttgacagcccaaaatccacaattttagcggtaaattgatcgtccaacaatatatttgtacttttgacatctctatgcaccatcgatggtcgacatccaatatgtaagtattccagtcctttaatttatcagatcaggaaaaagcctttcggtattaattctgattgtgtgattatttaacttatcttagtaagaatcataagaaaaacgtttaaacgaaaaatatctaaaccttctaaattttaaaaactatactctcatccttaagaaagtttttgaaaatgtggaatactttattgcactat

SEQ ID NO: 33448 - DNA, 2803 bp, Arabidopsis thaliana landsberg
  unsure (1)..(2803): unsure at all n locations
ctacagtcaaatcgaaatcaaacaaaactaagggtatacaaaagtatattccttatacgtgggggacatttatgaaatggataagacttggtaactgtaaaatagtaacttcccactctctcaccctcttcactgggacggttatttttttttttaaaattcatttgcatcaaaagtcgttaccttccagtaatatttatagatttataacgatgcaatactcactaaagaaacagaaacagagataattttttcgaaagaaattgatgagaagaatgattccaacatcgttttcaagtaagtttcaaggagtactaagtatgaatgcgttgagatgttatgtatcagagtttatctcaaccttcttcttcgtcctcgcagcgntggttctgtcatgtcttcaagtaattactctgtttcttgatgagtttgatccttttttgcaataagaagaaattgttaaccagtgttttttcttatcagggaaattgatggctggtgatgtgtctggtccgtttggtgttttaataccggcgattgctaatgcgttggcgttatcatcgtcagtttacatctcttggaacgtctctggtggtcatgtgaatccagcggttacgtttgcgatggctgttgctggtcggattagcgttccaaccgctatgttttattggacttctcagatgattgcctctgttatggcttgccttgttcttaaagtaaccgtcatggaacaggtaatcaaacatatttactttttgtctgattttgtgtgcttcgttttgtttggttattctgattagtgtgtttgaatttatcagcacgtaccgatttataagattgctggagaaatgactggatttggagcatctgttcttgaaggtgttttagctttcgtcttggtttatactgtgttcacggctagcgatcccagacgtgggctacctttagcagtgggacctatatttatagggtttgttgcgggagccaatgttctagccgctggtccattctctggaggttcaatgaatcctgcgtgtgcctttgggtcggcgatggtttacggaagctttaagaaccaagctgtgtattgggttgggcctctgcttggaggagccacagctgctttagtgtatgataacgtggtggtccttgtagaagatgatcgtggttcatctactggtgatgccattggtgtgtaatgacttgtttttactgtttcatttgttgaattgttgatgtagatcttttttaattttcagtttctgaaatgttgttgactagatgtttaattccttgaatgctatgttacttaagtagatttcattacaaacaatttactattttgttacatataactctggtttgtgatactaagccgatatttttgcatctaaacaaaaaaaattcaaaagtaccatttgggtcttacttcttcttccttatcggttaactcacgatactgataccattcagtacctgaagtaccaattggcaatgttggtcgaagaaaaacttcaactggttttggcacactgacacaaatatgtatctcatgctctgcttcattgagatctctcggttcagttcctcgtgttttgcggattggttcaattgaaatccatcctaaccctgatattgccacatcactagccggtctgatcaagaggtgtgttaacgttaggtgaggatcatttgttttactaaacatagatgggaatggaagatatatatttcacctttttgcatcgttgatttcgatttgaagtaaccggtgagattgtaaccctttccactcctgcatctgatttttccctgatggaggtgttagaagcacacccagttctttctgcagaacaaatgagtatcaagtaaatggtaataagaagatttaacttgtccttaaataagtaacgaagttgaaaatgatggggaacggaacttgcctcgtaaaaggcagtcgctgttttggttggtactgcatgaatctcaagagcttttggtccatagaatgtgaaacatgtttccggtagagcctgcaatatgtcaagtatgttaaaaaattctgatatccactgtgaaactgaaacataattctagtaataatagttattaccttcaagatgtcaatcctaacgagacctccccagaaaaatgtataaccgtttaagctctcacccttgggactacttgacgattgagttggcaaagttgaaatctgtaaggaacaaaaagcacaggaagatcatcacactggtgttacggtaaaataatctttacctggccgtaataaagcagacttacatcgaaagattggcctctgagacgattttgaggagcaagggcgggtaaatcatctgaatgaacgacagctgcttgcctgtggtgtaggtgcacacccggtgtgtcatacaacttctgtggtaataatgtattcttttagcaaaatgtctactattgcaatttttggaaagttctagaatctgatcttggtttaagtttatacctctcctccgaggaaagcgttgatctgaattggacctaaggtggttccagggacagcagattgaattggtttgtacttttgtgccgctgctgcaacaggatccctttcggccatcgtttctgtatggggaagtacatatacactcattcaaactgtttttataaatcgtgactatatggggcatactctagagcacgataacataaacctcacaccatattcatgaccatacactattgagcgacctgcgacgcaacacacacatggtgaacacaagacttatctagctatagcattggt

SEQ ID NO: 33449 - DNA, 674 bp, Arabidopsis thaliana landsberg
atcggtctggactgataaatcttcttactttttcctgctataagaagccctttgcactgttttttaggaatgaaatttgtcaacctttgttaacttggttgtagaaattttgtttccaatttctgatggaaaaattttgtattccaaattaagagctgttctttttaaatattggtatggatgtatgaacagtttgttaagtttcacagttgccaaaaaaacatctcagacaagtgcaccaggactttcacgataataagctgcaggtatatacatagaaaagaaaaccttaatgttctatatgtgttatggctcaaacttagtgatctactctgttatccacttcgctattcctgcttctttttattggaatactacgtggaagatcactaacgttgttttacgcctctgcaggttgttgttgccacaattgcgtttggaatgggaattgacaagaaaaatgttcggaaaatcatccattatggttggccgcaggtctctcgaagctcttataagatttctatatctcaacatttcacatttcctataatttacgttctattcaaattcggtgagctctctaatactggaataatgaaacttcacagagcttggaagcatacttccatgaagctggttgtgctggaatgagatggcgaactggctgagtgtgg

SEQ ID NO: 33450 - DNA, 544 bp, Arabidopsis thaliana landsberg
tgtagacagcatggacagtatactgaaaagtatcatatcatcaaggcacaaaggatatgtgcatcatattccattttagtgccatttcttctgttgcaggagacacaaaaatacataacaaacttacatattaagatttacaaacttcaaaatggacaatctactgtggatggtaaatgtcttatgtattaagattaacagggtggagaattgacaacatacagcttataacagtaagaccgtaacaaatggaactcagagaaaccatgatacaatgctaaaatgcaacatacccaataagtagctggtttgttgcaaaacgtgtaagcatctttgccacctctatcaattgcttcaagtacatcagcatcagacaactgattgtctccaatgcttgcttttgatttgacttcacttaccacagagcttacaaggttattagcacgcacaaaatgagagtcttcctcacccactacatggtatatgaggaaacattttcgaatgctctgcgatcacaaattaacaaagattagattcaatttag

SEQ ID NO: 33451 - DNA, 438 bp, Arabidopsis thaliana landsberg
  unsure (1)..(438): unsure at all n locations
cgtgaatcggttcgctggcacaagactggtcaaaccaaaccggtgatgctcaatggaatccagaagggattcaagaagatcatggtgctctacaagagcgcgagaaagggattcaaacccgagaaatnnnnnnnnnnnnnnnnnnnnnnnnntttgggaactgaagaaggcgagattggggaatatgttgtctctaagatcacatatcagcaaccaaagcaacaggagaaaaccatcgatgagagtgagagttctggggttcgaggtggccctagcacaccgaaaactagtactattacacaagttagacctgtgatttctgttgatgaggatgaaatagcttttgatgatgattctaagatggttcttgattcatatgccgaggttagctcctttctctgcaagtatcaatgacgttcttcttgttgcgtgtatgtt

SEQ ID NO: 33452 - DNA, 564 bp, Arabidopsis thaliana landsberg
gaaggaagacaaaaatcaaacaagaaatagacttaactatcccaatttcagcctatcaattaaaagataatttctatggcggtttactctaatcatgctcattcatgctctctttggtctattaattagtgtaatggttgtgattactaaatcagccactctttctcttttacaccaatgttctagaatattctactcaaattactcagctagccaacctctgttactacataaaatgtgtactaaagtctattatacctacagaaaatgtgtgctaacttctaagaaaaaagaaaataaacatgtactataataatacatacatacatatatcaattttgtgatatgaaaaaacatgtacgtactataatatgttacaatcatgctttttatttcaacatgaagaaatattaactagcgttacttaattattaattaatgttcatatatctgtgttatgtctggctagcctagtaagattacgcatttgtaatgtctatattcgttttgagaagggacgagaaagtgttggttatcgcatcgaaaatggatcggaatgttagt

SEQ ID NO: 33453 - DNA, 516 bp, Arabidopsis thaliana landsberg
  unsure (1)..(516): unsure at all n locations
aacaggaaatatggcatactaagcttttcatattttaaatgtaccacgaactataaagggtaagctgtatggaaaggtaataaaatcaagcgaaaatatattatctatttaaaaatgtattcaaacaattatcataaatctcgaaaatttagatgataacattcctaaattttcagagatgtctatcaatttataaaacccatgattactttctgaaaccttccagaaatttactaaaaacatgttgttcctagatacttatgagttttgacaattgacacaatgaggaccattcctatatcttttgtaagatactctagtagtctagtcctactgtctcgatcttctattaaatctttgagtatagaagatccaagttaccttacatatagttaatatcaaagttaataatattaaatttataaaaaaatttggtaacgctgtttttttttttcaattagtgaaaggaaaaaagcattcaggaattggttttattttatgttttgtntacattca

SEQ ID NO: 33454 - DNA, 573 bp, Arabidopsis thaliana landsberg
gcaatctacacaagttatggctcctctaagatctatcttcctatcgagaactttagcctaaaatcagagtgcttcaatggattgtgtcatcaatgaactaagcaagacctgaaagatgggaatcttcaatggctcgcaacaaataggacaatcaataacatgtggatccaataacgttacaaaaagaggctaatctttgctcgtagaagaactctgactatttacaaatttaccaactcgtctctcctcaatcacaacttaacgatcgctattatcgctcgttgatcctcgatcctcagattctggtctcattccttgatactgagtttgggcttcggcttcttcaccggaacttccggccctgggggtctcggacgcttcttcattttcatagagtgaaggaagtcgtggcctttcccgggcttggagatcgatgctacttggtccttctccgtcgcctgctcctctaactgagaatctcgccatgagtcagacctaattgtcagggagggtcatttcattttgatccagagacaggcctgtatacagatcaaaccaaaccgatctgaaccg

SEQ ID NO: 33455 - DNA, 549 bp, Arabidopsis thaliana landsberg
acttctactatcctacggctgtcaaatatctacgaggatctattcaacgttgtcagattgcaaaaaagggtgatcctttgtcaatctcagtctacttcaaagacctttgggctttggacaggaactgccaccgttggagcaaccggaatcctcgggttgactttgcttgggacgttggctttcgttctatatgtgacactcaaagacaaaaatcacactgatgaaatctctcccgaaaattgtagattgctagtttgctactcctacttgctatatacacgaaatcaaacgagactatgtatattattattacaatatattttcatccattctgcagaggcatacttaaaaaaaatcggttactttattttctatataataaattttcgtttctaatatcaaatcaatgattcaatcttagtgactaaatatagtagtcaatattcagagccatccttcaactcattttccttatctaaaataaaatgcaatatatggatttaaaattaacataatcacaaaaagatatctaaaaatcataccaaaaaa

SEQ ID NO: 33456 - DNA, 1470 bp, Arabidopsis thaliana landsberg
gccaagctcatgccgtccaacagctggtggggcaccttttgttagctgttacagttgctcagaaaacctgcagcttcctgtagactttctcattttcaagaggaaacatcatcttctcagatgcggcacttgcaccactgttctcagattctcacttcagtccagaaatcatttagttcctgcagtaacacatgacataaatgctaataggaatagcaattcaacatcagagtctcccatagacaaagctccctccaaacctgaaaagctgagatcctctgttcaggatgaggagctacctgtggctagaggctctccgcttcaccgactaatgggatattctactgtaagccaagtctttaaagtttcacagcgtcctccttctatatagatctctgcttcagatgaagcaacgagaactatgaacttctgagaatctgagatggaaagttttgccattgtttgccattctttatttcacttctgtgtataggtaaaagatttgtctctgcacttttgtttaaagtagaaaccatgacacttgtgaaaaattatacaaaaaaatagaagaagatatagttcatctgttgtatatagtcatgatatgtttgtaacaagattgaattcatcatcgttcttggcttgataatctactataacattaccacttgtaaataaataaaaagtttgaataggtttagtgaagtatatttgcataaacttagttgaagctgtccttgtatccattcgtcctcttgttggacgcgatagagatccgctgatcctgcagcatgttcaggtttggggctaatagtcttgtgtatcgatcgaagtacagaagttgctttaacagaagtgcaaactctcttcggaacttaagaccatatgattcgctaacacgcacctataagaaagtgaacttattttcaactgctgaaagctcaaatcctggggtttatcttaactcaatgcaacttctatatcctcttaacaactttcaaaccaaaaaaaaatccttaagaaattacgtctaactgcttaccaggtcgaggaaaagagcattcatctgtctctcatccataactacgttagcagcaacagcagtagtgtctgaatttgttccacgagctgtagccactactatctctgtatctagttcctgcaagaagagattcacttttctctataagattagccaaagttgttgtagttgttttgcactacagttcggaaagcaaatcaagctggttcctctgaacagatgtagctggttacagagagccatcatagtcagtaaagagtaaaatttcttgcctggatagatgagaacatcttttccaagtcttttgcaaaagctttgccatcaacatctctgtttgtggcgcccatttgaatcaaagctgaggccatggattcatattcttcagttgcaatagacgcttaaaatactttcttagcagcccatgtttt

SEQ ID NO: 33457 - DNA, 1357 bp, Arabidopsis thaliana landsberg
atacgacggattcctttatctttgctttctctggttgccttttccaaggtttatccaggagaacgtgacctggtatcagatggctctctcttagataacggcctggtctttgaggcatctcattgggatactggtgcatggttatgagaccgaaaccgaggttacgtttgccaatctgaggaattatctggagatccggcgagtctcgaagtccgtggtggaccgatattatatttctcctgctaaaggtaggaaaattatcgaaggcttcctgagcaaagatgacgcctacaccgatcactttttctttgtggccttagaggatgtcattcttgatgatctcctcgggaaagttctgacgaaatggagactttgggtagtttagattttatggtttattcattcgtgcctgaggtgattgttacgaccctttgcttacacaattttctttatcgcagatcgcccaattcgattcctcgagctgtgtcccgtagatctcgtctcgtgtcatcaagagttgttggcccggaagtgccattggacaaagcacttctcttgagagcgagttgaacgggcgcttcgattatttcatggtgtttcttgcccttccagctcggaatcttcaaatcagcgaacccaattccttgtcgatatgcacaccagcaaacctaccataagggaggtttatgaaaggaagaggcttgcagccgagaagaaacatgcggccaaggaaaagcgtatttcagatgataaacgcgctgctgagggtgcgagtgtcgatcccgatgcagtcgaggatcgggaaggtgcccctaaaactgttgtgcccgccgcatcggagcccgctgaggcggatggcattgatgcggttctgacagatctgtcggtataagcgggcaagcaagcaatcgtcgcacttccagctggtgaaaaggtttcggggaagcgtccacaggtcgacgattccgaggagaagaagagaaagaagaagaagaagaaggtagcaaaaaggatgacgagcctcccattttcgaagataaggctactttggtgaatctcgtcgggaagtgtgccggtcgcctgctcccgcctccagatactctactagagtctagaaagtacgtgagactgctttatattttctaagggtaagtatgttattcattttagatgcttggcgtgttctccgagctgttatgatcgtggatgcctgtttttatgtatcaggttgttggctcgatgaaccggatggtccaatcttatgattcggccatgcgggtcaatctagaggcgattaataggatggctgaggcttaggccagggcgtcagaggccgataagcagagagacgcggcgg

SEQ ID NO: 33458 - DNA, 937 bp, Arabidopsis thaliana landsberg
  unsure (1)..(937): unsure at all n locations
atctcacctaccattattgtctttaacccacatcacccgaatcttagaacccagcaaagctagccaaaaatgctaacaagagactaagatcaaagctccaaccagccttagaagcagaagaagatggtttagccttatcagcagcttcaatcttctcattatcggcgcttggcgcaggagctggagccatcagcctctggtgtgtctgttgcagcgtgcagcgtggagtttttgggacagcagactctggggaattgtcatcagcagctggtcctggagctctttcagcattcatggcagatggcgctggaaccactgaagcatccatgggagttggcgatggagctacatgcacgtatggtggtggaggtgcgatacctgcaaggctgagtccatcagccactattggcatggtaatctggatgatagagaggttatatggattgtggtacaccgtcgagacatactcttcgtttaaaggagagttcttcacttccgatccaaaggaaggtcttccttttgatttggaaacgttcaagaaaccattcatctgttcacccaacccggtggtttggtataaggtagtaagcattatactcttctccctcatcccctgaagcttaagctcatcgtagtagtcaagaataacatgagtcatgaggatgttcctgagctcaacttcggatctgttagtgatggagctgatagcgtcattgctaacagcaagcacggttatcgtctggtatttgtcgatggctgcaatgagcttggtcttgatgaagaggtccctcatggtgctgaatttggagtatttctgaaaggccagcgtgatgttattcgccgtaacgaccttagagaagacgagtaagatggtgagggagaggagagaaagggaggctntgagacccatctcgtgtcgtgtgttctctttgctaaa

SEQ ID NO: 33459 - DNA, 769 bp, Arabidopsis thaliana landsberg
ttatgtaaaccatccctcacgactaagttcaatatgcgtcctcttcaactgacatgcatataatcaccatttaagaccaatgcatcatctcatcttagcttgaaagaatccacaaaactctcaaaagcattagtgtttgcagtagcattgtcaacagtaatcgtgaatagcttccttattccccattcagccagacacttgagaagaacattgcaaatagtttttcctttgtgatgagagacgtgcttaaaaccaattatcagcttcctgaggcgccaatttccatcgattaaatttgttgtgataaccatgtaactagctcctgttgtgggagcaacccctatatcggttgtaagagaaactcgttggttataagaagtaagcaccttcattatagcggctttcctttgcacatacatctccacaatctctctactggctgtcctccgagactgagggtagccaagattcacccgagtgcaaaaatgcctccaagccaagctttcaatccacacaagtggccattcacccaagacaagcatttacctaagagcttgatcgaaaacatcgtatgaaaccttatccaatctcagatcccccataccattagatgttgcacaacacattacgctagcacatgcatgacatgtacacttatccttatcctctgggggacacgaaaaatgataccatacccacgaccctaggcaactactagaaccctcggtacctccgtcttagaatgtcctgcaataacaccatctccttt

SEQ ID NO: 33460 - DNA, 522 bp, Arabidopsis thaliana landsberg
aagatgcttccattgtgacactcaagcaacaaaaaaaatagacttcaatgtcactaaattaactttctataatagcaagcaaaaacagaacaaacaaaatgtaataaccaaataaatccttggtatgtcctttgatcttccaaatattgctccatcatgtaaccaacatcccatacaaactaaaaagaatatattttaaaaagccctaattaatcaacaagcattgggatatgtaagaaatcatacccattggaaagatcatgaacaacattttaagcttgtatatccttcagagaccaaaccagcttgcaatatgtccagtgctatatggcatccactttctcctccgtttcatcttccttcgcaccaacactgtcaccactgaacaagccaccaccggcatcaaaagcttccacatctcaatatctaccaatatacagactagctgggagagataaatgactgcaaaatgtctgatggaatttggcaaagtcgtcggaatatatatatacgatggataca

SEQ ID NO: 33461 - DNA, 3532 bp, Arabidopsis thaliana landsberg
  unsure (1)..(3532): unsure at all n locations
tcacctactgctgcttctgcgagctctgatatgtatggtgctgcagttttagacgctgttgagcagattatagctaaattggagcctgttgcatctaaacacaatttcaactccattcgctgagggtagctttagaagagctcaagtggggagatgcagctcatacatggatttaaccaggagctttactcacttgcagacctggaaactacaaaataccttaagaagaaactttactcacaacattcagtttctcttctcaaggtatgcaaccataagaagaagctctttgaattggtggcaacaaatttgaaactgatgaacctaagattatactgatgaagctcattttgctagtttaaagttttcaacttttcaccaaaggtaattaagcatttaactacataaatcaaacccagtagtatactaaaagacattagacaaatgagagagacagcttcgattttcagacagctttaggttggatttgttcgaagtcgaaaacctcaaacatgagccgccgaacatcgggtttcccgtagatggtgtaggcgaggccgtgaatggcttgttggacagcggttgtcgccggattcctaagtctccggttatgttcataccgatcatgaacctcctctgagtatattataaagttgtgaagacgtttttctctaagataccggccgcagaatttgttcattaatagacgtctatgcttctcttgcaaccacttccctggtgcgtccaagtgcttcattaacaaacgttcagccattgctatgtcctgcatgatcccgagacgaaaaatcgggttaaaaaaaaagaaagaaagaaaagaaccgttcttttgatcttttaagatgagagatcgttatcctcacctgtatcttctgtcctacatattccagccgctcaaaacaaaaccgcgggtgttcaaacttatgctttgaaggatgcaagaagcagagctgtgtgatttaaggtaagtgaaaaaagtttagagaaggaaagtaacatatcacatgacaaagccagaagtaatagcttttgtacctgtaaaccgagtccaagttcgatgtttcttgcttcagttatctccttgattctatcattcatcgttaaagggtatccgagggtctgcataacttttggtttgctgtcaaaatcccatatgttccctctgaaacgatgcattcccggtggaacacaagctctgaatagcctagggtgtgcgaataaagcatcttcaggaggctgaagcaacaggagaaaaaataaagaaatcactcttgttagatagaccaaagaagtagactgtgattttgttatatcatgcagttttatttaccttgtaagtagcaatatcttgccaacctagctttttcccttcaaattcaacagaaacataatctacatcctcgagctgtctcctgcttcgaggctgacactcatcagcatctggatccatcccaaacacctcaaaaagtacacgatactcttccggcatcccaaggcatagatagatggcacctaacatagcccagaacacagatctagccagaacaaaagaaattaacatggataagtacatgtcacttatgagacattgggatgcacagactcgtcaagttttcagtcatttaattcaaccaaatggaaagcccaacctagataattagcaccagctatcacaaagcccctttcaatcaaataactaaacaaatgatgacacactacaaacatataagacagatcttatctaagatgagaaacctttgaacagctaaaagctttcatagtgagacttgggcttatctaaacacagaatatagttcttgacaggatctactagttccatatacagcaaaaccagatattaacacatatcattgtttatttccatgaagctaaagtctcagctcaaagcaaccaaagtatggactaacactcaagtgaaataatcatcatcattaaagaagagagaaacttaatccaaatgatgacagactacaagcagataagactgatcataatccaagatgagaaatctttgatcagctaaaagttcttggcgtcataacaactcatggtgggatttgggcttatctaaacacaatgttagatacatagcaagttcttgagagaatggaacaacatctagtagttccattaaagctaaaaaaactcagttcaaagcaaacaaactatggactaatactcaactgaaataatcatcattgtcaaagaagagaaacttacttaaccggtggctcacgctctttcctaatcaacttatccatatcatcataaggaaagatgagattttgcaagctcgctgctttaatccatttcgggagatacctcttcccaatcaaagcaaacactctctccctcataggtcccggagattccctcggatacctctgcaagaaaaactccgtaagagcaagctcaagcacatactgacccagaaaccaaagcctcgagtgcccattcttcacatgcctcgcacgtgctctatcacaagacggatgctggaaagcaagatagagcaacgtatcaaagtgtttcgccggattatcatctcctaaactctctgaaggttccagagaataccctaaagcttgtttaacttcaagaagatactcatcgatccatgttttatcagcgttgttaagctttgacgatggaagacaagagctaagtaaaggaaacgacttcagagacaattgtggactattgaggaatctctcagctaatttcttatcgtctaatggtggccttaagatgaatcgtttaggaggaacctttttcttcggtcctgtcgctgttttacgctgtgctagctctttgaggagacgttgagggctgtctcgtggaagaccttgagtctccgccgtcacggaagcgcaaattcggagattttggaatctggattttgtgagaatcgattgggttttagatgggaactgagaaattgaagatgaaaatgagatttctggtgctgaagatgaacaaatgcgaaggagagaagaagatggagatgaagaacaaagctccattgcttctttagactgttactatcaaacaaaaattaagaatcaaatcatccaattcgactcgagaacacgcaaaagacnnnnnnnnnnnnnnnnnnnnagaaaatggtaacgaagaagattgcagagttccatggataaggtcatggcggggagatttttctaatggatcatggtttcagtgtaaatcattcaggcccgtaatagcctattataaagcccaataatatagcaagacccgtaagacattgtagtatgaaatgatcattaatatagcttagacttagattatttcacattcaaaattcaaagatgctcaaatctatatgtggatctctgttacgttggatacttttctatagcatgcattcaaaatctatattattttgcttctctaacctgtattgtattgcagcatgaattataatatataatatgtaatcatgacaatagactatagatataatcatata

SEQ ID NO: 33462 - DNA, 3850 bp, Arabidopsis thaliana landsberg
agtgagcgacaatgtctggagaagatgctaccaacgcttcactagccgaaattctcaagaccatgcagtatactatgtcggaaatggcgcagaagtttttgaatgtagaaaaaaccgtcgaaacactgcaaacaacccaggtatcactcagtcaaaatgttagtactattcaatctcgcattcgttcattgaatgcaggtaattcctctggagttcgaagaactatcttcggttccccaaattcccttccgcgaaatgcagcaagtgatcaaacgaccccggatggtacaaacgcggacatccatccgaaagatggagaaacacatcccgaagacgacaaccagttcgttaatcaacacgagcaagaaaacttcaaccagttcgaaaccatgagagaagtaagccgggaactgaaagaaatgaggtcaaaattccaccaagctacaagctcagaaccggatatcaaccgggtcatagaagaagctaggcgaacacctttcaccctgcaaattgctagcttgagaatcagagattctcgaaaacttaacttagaaccgtacaacggtttggaagatccgaaaggctatctcgcagctttcctaattgctgctgggcgagttgatctgaatgaagccgatgaagacagaggatactgcaaacttttctctgaaaatttgtgtgggcaagccctgatatggttcactcaattggaaccaggatcgatcagcaatttcaacgaactatcggcagtatttttaaaacaatactcaattctaatggataagagcattttggacaccgacttctggaatctatctcaagggccaaatgagacacttcggactttcattaccaaattcaaaaacgtgctttcaaagctcccaagaatctcacaacaatcggctctttctgctcttcgaaagggattatggcatgattccaggtttaaggaagatctgatacttcacaaacctgatactattcaagacatactatttcgagcgaataattggatggaagtcgaagatgaaaaagtaaagtttcgcaaaaagagataagcaagcaaaaccagcggtcactttttcgcccaaaaagttcgaacctcgggagaatcagggaccaaggaagtttggtttgctaccattcaataacaacgtcggaaagcagtttcaggggaaaggaaggtcgaatacctggatccgtgatgaaagctcgtattgcgatatacaccgagtcacgggacatctgaccaaagactgcagcatccttaagaggcatctcgcagaattataggccagtggagatctctcaaaattcgacatggagaacttcatcaaacaatatcatgaatcaagggataatccagagaatcaaaactctaaaagaccaaggccggcgagcgaagagggaccaagaacttcaaagggtaaaatcaacgtaattctcggaggatctaaactctgtcgtgattccatcagtgtaatcaagaaacatagccgtaacgttcatttgaaattaagcttaagtgaggaagtagattttcaaagcacttcgatattgttcgatgagaaggagacgcaacacctcgaaagatctcatgatgatgcgctcgtagttacgttggatgttgctaacttcgaagtgtcaaggatcctcattgatactggcagttcggtagacttaatctttcttagcactttggaaagaatggggataagcagggcggacgtggtaggacctccatcacccttagtggcttttacaagtgaattagcaatgtctctcggaactatcaagcaaccagttttggctggaaagatctcgaagattgtggattttgtcgttttcgataaaccagcggcctataacatcattcttggaactccgtggatttatcaaatgaaagcggttccttctacctatcaccaatgcctcaaattcccaacttcgagcggagtggaaacaattcggggagatcaagaagctttgagaacttgttatttagctagccaccgattaaaaattcaatagcaattaacgaaacccgcaaagaaaggagtgatcccaagatttcctagcgggcagaaagtggatgatgttgtggtcgaagtaattctagaagcggataagccagatcaaaaagtccgaattggagctactttatcgggcgaagtaaaggaagccttgattgagctgttgaaaaggaacaagaaatcatttgcctggtcggtagcagatatgcctggcatagatccaaatataatttgtcacgagttaaatgtagacccaagtttcaaaccggtgaaacaaaagagaagaaaactcggagtggagagagcaaaagcagtaaatgacgaagtggaaaaacttctgaaaattggatctataagggaggtacaatatccagattggttagcaaacaccattgtagtcaaaaagaagaatggaaaggatagagtgtgcattgactttacagatcctcaacaaagcttgtccgaaagatagcttcccactcccacacatagatcgtctcgtggagtcaaccgccgggaatgaattgttatccgttatggatgccttttcaggatataaccaaatcatgatgaatccggaagatcaagagaaaacgtcttttatcacggataggggtatctattgttataaggttatgccattcgggttgaagaatgcaagagcaacttatcaacggctggttaacaagatgttcaatgaagcacctcggaaaaacaatggaagtctacatcgatgacatgctggttaagtcagtgaaaaaggaagaccacgtaaaacatctagaagagtgttttgcgattctcaaccaatatcaaatgaagttgaatccggcgaagtgtacgtttggagtcccatctggggaatttctcggctacattgtcacgaaaagaggaattgaggcaaacccgaacaaaatcaacgctttcctcaacatgtcatctccaaagaatttcaaagaagtacaacggttaacatgtaatcgttttatttcaaggtcaaccgataaatctttaccctttcatcaaatcttaaagggtaacaagaaatttctttgggatgagaagtgtgaggaagcattcgacagctaaaagcgtatcagacttcgccacccgtgctgtccaaaccagaagtagacgaaaaactttatctatacgtctcagtttctaatgatgcagtcagcggattcttaatccgagaagaccggggggaacaaaaaccaatttattacataagtaagtttatggcggaccctgaaaccggatacacaatgatggagaagcgtgcacttgcagtggtaatctcagcttgaaaactgagtccatagtttgaatcccacacaaggtaagtaaaatcaagtcagccactagggatgattctgcagagcccgtaccagacgggtaggttagcgaaatggcagctgaagaagcgagcatatgtcgtgacgtacaatacttggtgttgttatgtatgatgacctcatcacctagtttctcactttcacgcccagttatctccatatcttctccagtaaaaccatccttattctctcgcttattcttcttcttcctcttcttttccttatccttcatagaactgtgctcggaaatgaattcttcaccggtttcttcagaatcaaccttagcgtcactctttttcttcttattcttcttctcctcagccatctcatataccggcggacacggttacgaaaccctaatcacaaaaaccgccgcgactttcgctcaaatctaaatccgaatttcgattgagtgattttaagacacagcgatgctgagattgattgtgaaggagcttt

SEQ ID NO: 33463 - DNA, 1230 bp, Arabidopsis thaliana landsberg
  unsure (1)..(1230): unsure at all n locations
cagtcttgcaaacgtttgcgcattatgaagggatctgtttcatttttacttggtacatctctaacttttgggtttgggtctttcaatttttaccaattttctttttattttaatataattctgttttcttggttatagctccgagagcaatggagaagtactgcatgaacagatcttgaattaataataaaaaaaaaagaagcatcaatgatcaacaatatgacgggttcttgattttatatgtatttttatgattgtatgtggctatcacctatatatgtgtgttgtagttttaaatacttgatgggtatatagggcagttttttaccagttagatgtggacaaacttgttatgtgaccaaaagagaggaaacttcaatatctctgtgtttgtgtcatatttattgcccaacatgtgtctgtcggtttgatgatcaatcacaacttgatatgtgcatacatataaatgtgtgtatgtaggtgtgtgtccatgtacctgtgttttgatcccttactctgctacttgtcgtttcttgtgtgtgttatctaatagttttttcccanaatgaataattcgttgttatgtttactattttaccaataaaatcttagctttttaattctactctctaaccattactagcgttttttagttttaaaaactctgattatgtattgacttttagatgaagtctttaatgaacaattgaacatatcctacaacccccaaaaaaaagaagaagtagaatttaaagttggtttgttgtcatttcatcataaattgtgtatcctaattttttgggacatgtggtccgtaatctgtcatattttaaactaactgatgattatatgtgtagcggctttacaagattaatttagtcatcatttcaaaaatatgttgaaatcaatataatttgttttcattattaaaaaaaaagtgagtaagatacagttacaaaagaggatataaaagttttaatattcggatgtttgttactcacttacaatttgttacgacttgcgagttattgatggttcttactggtggatggatgatggatcattagatatatatattgtattcatattatagattaataatctcatataaattatgtaagtcgttgatgcctccaaatagtataatttgacctcttttgcgctctaattttgtgggaggaatttatcaaattcaggacccatgagaggggtagggaacaagagcatgtg

SEQ ID NO: 33464 - DNA, 423 bp, Arabidopsis thaliana landsberg
  unsure (1)..(423): unsure at all n locations
agaaccttttgttctgtattaatatgaatgcattatgaattttttttattacattccaattcctataccaggggcggtgatggaaaatcccccattggatcccaaattgacgggttagtgcgagcatactcatgcggatatgccctcttcgaatatgaattcatattctgnnnnnnnnnnnnnnnnnnnnnnnngcgggttgttccgagcctttcgacgacctatgttgtgatgaagggataattagatgatccgaacaattgcagtaatagcccgcagattcaacggaaccggcgagagtatacataagtatacagaacagacagtcatatatctttgatattaaactaggactttctattacataagaccagttacgtgatccttggagaaatgagtcctttcttccgggataacatgatg

SEQ ID NO: 33465 - DNA, 783 bp, Arabidopsis thaliana landsberg
ccattgaagccaattctgatctaagccactcttcttatgttcagctcgtatgtctcttttttttgatttttgctgaatttttcttcatcgggagatgttgttgatgtttttgcgtgtgtatgttttcaggcaacgattggtttaaatggacggccttcgaatcgtaccgtcgtattcaggtgacacaaatgcctaatttctctgttccagttgtcaaattttgatttgtttggtgtcggttgataggggatttgaagagaacagtgacaggattcaaatcaacaccgatcttcgcagtcgtaaggtcttagttatcttttcagattatgttgtagctacttgcagatttgagctctctttgattgatcctgtaaaaatccttgttgcagattgaagagcttaagcattgtcctttttctgaggtaagaaattatttggattatacattatggatcgaagaatcatgcgttgattgattctactgcggtggtggttgttttttccccaagatgtgtcggtattcctcggatacttgggaccaattccggatcaatggaagaattgaggtcattgatgcgtacaatcctgaccagaccaagcttcaggttttatgtacattattacaatttaatattactattttggaaaggaagaaacactttgtatattctaattgctttgatttatatgtagcaaagagagaaagcttggttcgctaattctttaaggtcaaggcttatatacgtctgtcctactcccggtggtccttgcaacagcgagcaa

SEQ ID NO: 33466 - DNA, 4697 bp, Arabidopsis thaliana landsberg
agaggatctgagaggaagacctggaggtgcctctcccttcgctgcagcagcctgaacaagggagttgatgtaggaataatgacatcaagcaggacacaggcactttacagttgatttagcttatccaaattaagatgactgtttaggtgaatgatctgtttagtatgttaggagtcacatactcacatactaagtgatgctgaaacgctactcactgagagtcagcgtttttcagtgactcaatggagaaatggaatactagagaaaaaaaacaggacttgccttttacaatttatctatcaagaaacactcacccttacttcctcgtaggcaactatacttgaaacacgacgatgttcctttcgacgtggggttttcggatcagtaatactttccattctaagacctggatcagccgtcagcaccagcctgacccactcaagatcactttccaaaccagtcctcaggacaccagtcacaccactgcttactgatttggtatttgaattactatgcgtctccaccgagagacatgcattcacaagttttacctcagacttatgagtcattgcttgatcaattgcttcaacagttgataatgacattcggtctgcactgttacggtaaacctcctgagcagtagatagcggataagcccatggaggtggcttgtgcaagaatgcatccccgtttgccagtggaatgcctcctttagaaagcttaagggaagtagatgtggttttagcaccactacaaagtttcaaaagacaataagaacaatgagagaggttaccaagaaaccctttaaagtatacttagaaggtaagaaagtaaattctaaaacgaaaagcagtagattaatcgtaatttttgagttttctatttaccagggtgtttctgctttcaaaacttccacacatatcatataaggcaccttttccctagaattcaaaagaacatactcgtcttcaggaatattaacaacacgataaactcctctccccattggaaaacagattcctgaaattatattgaaagtataatcaatatctgatactgaatcagttaccgcaatagaaacatgaacagagtaaaaaatagccgttggaaaatgactccaatgcaaaagggtggtgccaaatgtattgggggcacatggttcactcatgtgtgagacaaaactgaacaagcaaattctaagatatttaagaaaatacctccagtagtttcagcctgagctaaatgggaattgatctctgcaatagactaacaccaaacaaaagaaacatgaaatcttagttaaataaaggataatgctaatatctacgttttaaatatcaatatagaaaggtagggatttaaagaaaacctcacgaagagcggtcttccgatcttcaatgggaaaaatgtctaccaaatcatatgacgtttcacataatgcatgtacaaactctaaagactcgtggtaagaccctttcctgaactgtgctgcagtattgtttggtagagggggctttttagatggagtattattctgcggtttgggtgaacctggacacttctgcaaatgtcagcaaattaatggcagcctgagcaaatccagcaaatataatgaatggcaggcatactaactttttccgcctactaaaatatactgaagtgagagaaatttaacatgacctgagagcagtagcgctcttggcttacgtgccatcatacactaccatcctatgtattaatgtatgagggtaaaccaagcaacacgagcacaacttttcgatagtctaatacataaagctaatatctcatataatatcctagaaagaaaccttaacagatgaagtaatcaggggatatggttgaaagagaaagaaaagagtgtctaaggctctaagcattacaaataaaacctgagataaagttatatggggacaaacctccttatatttctttgagccaaaaagttcagaatctttaacagatctgtcacgatctctgaacaatttgcggaaaaagttttctgtcccaggactgctttcaacaaaaccgccattgctgcagttttcacttggtaaagtagtttttacgtcttctggatgtctacggaacaatcttctgaacagtgagaattctgaagattcgtcatcctcgctttcattcccatcatcggctttgccaatgtttggtttgtcttcaaacttctctttaaacaattttttgaaaaatccctcccttccgttatcttcaccagatgtttcgtcagtatacacggtttcatctgtctcattcctctcgttaccatttcttttctcatcaaacttttctttgaaaagtttcttaagaaacccatctttttcctcatcatctactgcgttagaaactttatcatcctcattcttgctctcatgaaaaagtttcttgaagaacccttctgtgtttgcatttggctcctcgtcttcatttttactatcccgcaataacttcttgaagaaaccctccgagttggcacccaattcctcttcatctcctttattatctcgtaacaatctcttaaagaatccatctgaactcgatgtcaattcctcttcatctcctttactactccttagcctcttaaagaacccctcggaattgtttgatatctcctcctcttctgacttattgtctttcaaaagtcgcttaaagaaaccctctgagtttgacctttgttcatcatcctcacctctgctgtccctcaagagtctcttgaaaaatccatccttttcacattcctcgtcttctttgtcagctgacttcctaaacaataaagcatctctaactttaggacttgggattagtctcttaaaaatcttattgtcgtccgcagataactgactaccatcatcctgcaagttgctccccgatgtaggtgagaatagtaaagacttctgggtgggtggagataaagtcaaagagaagagcttctgttttgatgacaaaaacttattaaggaccttgctccctggagttgaaggctcgttatgtggccgcataagaggcgaccactcacccaccagagtagctgcaatttggcacttctcttgaatcctactaataccttcattatcatcagaatcctcaagttccgccaacaaaaaccaatgcactttcaatgctatcttaagtgactttgcacagatatctatcacaaacttatcaagtgagggacttggtttgtgcaccatcaagtagcatatctggaacaaataactctcgataccggataaaggaagcgtatacatcctattgcataagtaatctctcacacccgaatgctggtgcttgtacaaataactgactgcaatccactcacagaagaaggaagaatcaaaaaagcggataagccacccattcgaaccggactcgctgatgaggttactgggcgaggtaatctcacgaggagactcaatcgaatcacctcgaaccaatgaaagaaactgtgccatctgcatttttgatgatcagtcttagaataagagattctagctcacagactcaaatcatccgaaccaaagaagtagatcgtgaagcttctctaccgaatccagaccaatttcaaaaacataatcttatactagaccttaatgtcctcgctaaaaacccaaatctcgtatatgctaaaatcaaaattcgaatcccccaatcgagagaaattgggacttcacaattacacgtacatgagcttctccaaatgtcaaagcacagaccaacaggttcctcgtctccttagtcaacaaaaaccggtaatgactgaaaattttccccgagacgaaaataatctcagggagaagaataagagtttagaacccagtgattagcttcttcaaagcaaacccattattcgttgtcactaaaagttgcaagctttagaaatttcaaatgcggagttgaaaatagctgagttcaatcgccgtcgtctccgccgttgtcggaggcttttgatggcaattcaacaaagagagagaaaggaagtaaaactattgttggcagtatttttaaaattaaagtttttttattttaaatttgtcgaatgatgatgggatctaacgtgcgctggaaaaccacgcaagctgaatctttctttgcaatttcgtttggtttttccctccatttattattgtctcgtttcacatggccatttgaattttgaatttaaataccacaccaaaatcttggtagtgacataatggacaactaaacttttcttgattccaaagcatttatgggactacacttcattcaaaaatggcagaaaagatcataaacactaacaagaaggaagatcaggaggaggcttgaccatacgggaagatttagtcggtccatctttcactatgaacactgtgttcattccccatgtggcatgtctctctatatggcaatgcaacaaccacacccctttaataaacaaatcaaaccatgatcgtcaatatctcaaattaggcatcacaaaaattgtattttattctcacgagttgtctaataaattcatatttttcatttaaacaataatatcttttgtataaactaatgcaaaattgatatatattttcacgtgaaacgtttgagaaacgtagagtgtgaactgacctggattattagctacgaatctgacggcggtccaaaagtaacaaggaacaccgacggttgtctcctcc

SEQ ID NO: 33467 - DNA, 1957 bp, Arabidopsis thaliana landsberg
acaagggaacaagataacgtgatcccgaccactagtgaaatggaggagttctttgcatatgctttgcagcagcaacagaggctattcatggagaagtaagcttattctttattttatttttgtgtcattacgaagagggtgaacaacactcatgtgttttcaataatcttcaggtacaacttcgacattgtgaatgatatccccctcagcggacgttacgaatgggtgcaagtcaaaccatgaagttcaaaaggaaacagctccaaaagacatggtgtgaagttagagaatgtgatggagttaacagactaaccaaacatcagaaatcgtgtaatcttaagtaataatgtggttagagaacaagtttgagagtagcttagggaccttaaaacctcacaccatttgtactactaatcttcttcagatgcttagtgaaattttctcatctgtttctttcaagtgtttgtttttctatctatctctcatgtttattcaaagctatatgtaatgatgatgattgagagggatgtgtgtgaacatgtttaagcttggcatatagtgaaaaaaatgattcagatgcagaagaaagagacccaattgagaggttcacgtgtgaattttggtaggtgtaaaaatctgaatcatatcctttttctttcaactatacaagattggtcccttttcttctcttaccataattatgacgcacgtgaatgtgtgtgtaaatactttgacgtttacattgaaatactgtaatgtaagttcagagttaaaagtacaaacacaaaggtgaattttgtactaattagtaaagagataagagtgttttgaatcttgaatatcaaattattattaacaagaaactgacaaaaagatgagacagtgttcattgagaagatctctgttgttttatctttttttttacatttcttggaaattggcaaaaccagtgtgatgaaactgtgaaatcttatctcgaacccaatcattgttctatgtttttctttaatctctaaaagtgaaaaagtgaatgcatgaaacgttcagatacattcattatattatacatttatacatatggacatggtgtacgtatgtacacgggtgcttgtttgatcacgggctcactgactataaaaatcatgttttttgggacatatagattcgcttacatcaactgtgtgaccaatggggtatctgaattcagcttgttcgatgttttgtttgactcttttaaactatttggtagtaaaaagccaaaaaggaagagcactgattacgaaagcctttttgtctttttgattcttcttctctagctctctttcgttctccttttgggttagtccttcaaaataaatgtctttaacttgtcatgtatagtttctttctctcgttgaacaccaaccataggccttgcaatgtgagtcaaaacatgcattgaaaaaagaagtgaatttcaacattaaatgctctcgtttaacatgcctatggttccattaagcaaagtacacactctatatatgtcgaaagaactatacagtcggtgttttagccctatagttagatacattcgaactgattacagaaatatcaaatatccagttctaagatcggattaaggcaaatacatttaaactacttctagcgaatgaggttcacatagaaaaactttttaaaatgaatcactaaacaagattcattttctttctaaatagtgtaaagacgagtgatgcatgcaactgctctcctttccgttggtcccttgtcaaaatatacgaccgtgaataattcttcccatcatatttatctgtcggagagttccaacctcaaaacattctccttctcttatcaattctttctaaaatcataaaccaacaaactgcgcctctgatcaattattcatattcaatttaaataaactaacccatgctttgtacacggccttccgcattgccct

SEQ ID NO: 33468 - DNA, 1121 bp, Arabidopsis thaliana landsberg
  unsure (1)..(1121): unsure at all n locations
tcgagcttggttcactccagcacggtcgtggttggtaatatcgaaggtaatggacctgggataggagtgtatagtggaacagatatatcaatcttactgatttagtagtagaaaacaaatatgtattatttattacctgttcaannnnnnnnnnnnnnnnnnnnnnnnnatttctgagtaaacgcataagtagattaatccactcagtctcacatgtgcatagccttagatgtacgagacggttgaagatattaccagcaggatacgacacattctggataagagaaagtataattacaattacacaagcaatgtttgatttaattagtctggattagagaccaataatcatattatagcaagctaataaataacatacctttgaggttggtaagcagagatgaagatacttggctaaagttgtagaacccaaaagtgctcagttcgtggatgaaaaatgtcaacttttgccttacagtcgtaggcatatcactctaacaatgttacacccggtcgaaaaatcaacaatattcatgcactccaaagcaggagtgtttatcacaaacccattagctatgcttttaacaacgttttttacttcttggttcaagactaacctctttagagaaggcactctaacagtcacaatggccaaattgtcgttgaggatttgtttcacaaccaagtcttcaagaattggacaacttgatataagcgtgttgaaaaattcatcaccacctgggtacttcatggatataagactcaagtttttgagggatgcatgggaaaaacagtagtgaagtaacatcatcggtaagaaccacgttccttagttttaatgtcacaagcattttgcaccatgtaaacaagctcctcggaagtgtgacaggagtaatatatatattactaggaggagtatcaatctcgataatcagctcatgcacacgacgttcatcggcagctctaatcaacgctggaatatctccactactacaggcgttaccaattttgaaatgcaaagtatctataagtggagccttgtgcagcaacaaagacctgtttacaaaggtcgaaaatcttccatagtcaatatccagatagctagcatcgtacacaagcct

SEQ ID NO: 33469 - DNA, 4353 bp, Arabidopsis thaliana landsberg
aaagacttggttggaaaacgaatattctcttggcagcgataagagtgtcgatcgacatcagtttctgaaaaacgtccttcaagatctttattgctgaaaagcttccaaaattctttattgtgctccatagttcccagatgtgtgagtgtacctgaaatgactcaaaacgtacgaaaaagactagaaagactctaaaaaccattctgaaactatgttagaaatcagtaaaaaccggaacatatcaactcctccagacttagcttttgcttgccctcaagcaaaacaaaaggttgaatctgtgaaagaggtttcaaaaacatagaaactcccaatctttctggtttattaccttgatcatacaaaccaaatccatgcactaaacagttctaatcaaatcttgaccaccatgtaattctccgctagcccacacaacatcctaggatccataccaaagcactcaactatatccactatgctatcatcgccgggtctcgtcaatcaagtgaatgcttacgaaccttctagactcattcatgtactagaccatgataaatcgaccattcttttatagtttttctttggtgttctttctctccccatacttattctttttagagtgtaaacaaaggggaactcttatattggatcgacaccctcggcatttatccaacctttgtaattgatcgttccaaataatgtataataatgggtcataggaaacattcctacccctatacactatctgaaagtcttctcaatctatcgttatttattattattatatattatttttctttgggagagaaatattttctttttgacacattagtcgatttatcaggtatgaataaggagtcaagtcctatgagcactaaccattttgatgaggtaaaaggaagagcaatgagattagctccagcctttgtggattatgttaggaatggatgtccttaagtttgttgattggccttctggatttttcattagtcggattgatttgaatctgcaatacttaaacaattcaggcaataaactcgagagatagatcataatttcagacaaaagttttgactcaataaacgactatctaagttagaatgacacaactgactcatacgaaaagaaaagataaagttagtaactgactcccccagacttagataacactgtccccagagttattaagctagaggaatcgaaagaaaaataatcaaaagttaaaagttagagaaacgtgagttgccacctgagagtggtgtcgatcgataccatgggtgtgtcgatcgacactctggtcgttttgcctagctttcgaattgcagctcattgttgtagagccttggttagtgttttcacatggatcctccagttacaactgttgaatcactaaaacacctatcagcaggtccaacaaagcataggaaaataagtgcaacaagtttcaaaccaaataaccaatagtctgaaataaagcaaaaacaaagtcagaaaacaaagcaagatagggaggatggctagtcctcatgctctgagccggagttgggtgcgggagagcgacgacgacgacgagtgcgagcaacaaaaccgcagcgagaaagtgtagctatgacgttccagacgctcttgaaactgtcgacgacgtactgctgaaagacttgtggctccatcgggatgggtggaggagaaggcagctgatatggaagagcgaacgaggaacttgtcctcggtctttgtaggcgcagatcctgaagctgaacctctctgtcgtttttggtcgacactctcttcttcttttttttttttttttaaaaaaaaaaaatctgaataaaaatcttaagttaagaatcaaatgaatgaaatgaataaaaagaacaaatacttaccagtgggttgcctcccactaagcgcttgtttatattcaatagcttgactctgcagttgcttaatcaacaggtgggtcctaaagatccaaaggcttttctactggaatcttggcttcatgccagtaaagtttgactctctgtccattcacggcaaatggttttccattgttgtttttgaaaataactgttccatatggcctaaccgagtggactgtgtagggacctgaccaacgagaagacaattttccaggaaatattgtcaacctagaatcataaagaagtacctagtcattaggctcaaaggtccgagtgaggatctttttgtcggggtaagctttaatatgttccttgtagagcttcgagttatcataggcatgaattcgtatctcatcgagctcattcaactgaataagtctcctttctccagctgatttgatgtcaaaattcatcatcttgactgtccaagctgctttgtgctctaattccactggaagatgacaagctttaccatatagaagatgataaggtgtggtcccaagcggagttttgaaagttgtcctataagcccacagtacatcatcgaacttgtaagaccactcctttttcgctttacccactgttttctcaacaatctctttgatctgtctgttggaaacttcaacttgaccgcttgtttgtggatggtagggagtagccactggatgctgaactccatactgaagaagcaattttgcaagaatcttgttaatgaaatgcttacctccgtcactaatgactatgcatggcactccaaaatgggggaagatgatagagttggagagtttcatgacaaccgctgaattgttcttcagactagctataacttctacccatttggggacataatccacagctactaggatgtagagattcttgttggaaggtgggaagggtcccatgaaatctataccccaacaatcgaagacttcgacttcgaggataaatttctgaggcatctcattacgcttgctgatctttccccttctctgacacgggtcacattgcgatatgaacttctgagcatcccgaaacattgtaagccaccaaaagcctgcttgaagaactttggatactgtcttgaaggttgcaaaatgaccatcatagttagagctgtgacaatgtgatagtatcaggtacgtgggttgcttcaatgcatctcctataaactccatcagaacaatgcttatagagataaggttcatcccaataatatcgcctaatctctcttaggaatctcttcttgttgtaatctgtgaaattatcaggttccacatctataactaggtagttaacactgttagcataccatggatagtccttctcgaccgttgtgacagtgcaattctcaattggtgaccaatttcttgtcgatctagaagggtgtcgatcgacaggtgcagtggtgtcgatcgacaccatcgcacaacttcgaatgtctacttcctctgaaatgtgagtgtcgatcgacataatgggagtgtcaatcgacactgaagctcgattctgcaacctatcacgtttgtagtcatcttcttcagctgtatcaatcatgtatatgttcttttcaggcaagaaatcgtttatagggacatcatcatcgatcataatgcgtgataaatgatctgctacaccattctcaactcctttcttatctctaacctcgatgtcaaatttctgaagaagcaaaatccatctcaaaagtcttggcttagcatccttcttttgcatcaattacttcaaggcagcatgatgatctgtttgaacaataaccttgaatccaacaagataagatctgaatttctcggacgcgaacaccacagctaacaactctttctctgtagttgcataattcctttgaacatcatcaagagttctacttgtatagtagattgcatgaagcttcttatctttcctctgtcctagaatagctccaactgcaaaatcacttgcatcacacattacctcaaaaggtaaatcccaatttggtggctgaacaattggtgcactgatcaaggcctgttttatcttctgaaatgcatcatgacactcctgtgtaaactcgaatttgactcctttacagagtaaagcagtcaatggtcttacgattctgctgaagtctttgatgaatctcctataaaaaccagcatgtccaaggaaactcctcactgctttgacattatctagcgcttgaagactcgtcatgacctcaatcttaactctatcaacttctataccatgctcagaaatcatgtgtcctagaactattccatccggtacaatgaattgacatttctcccaattcaaaactagatgtttctcctcaaatcttgctaacactttgtagagattctctaaacaattctcaaatgatgatccataaactgaaaaatcatccatgaaaacctccatgatatcctcgatcatatctgtg

SEQ ID NO: 33470 - DNA, 907 bp, Arabidopsis thaliana landsberg
tgatctcagacaaaaaaatcaaatccagagatgtcaagaaagacaaccaaatgtagaaatcgcgaagggaaagctatcttgatcatgatgttcttgttcttgattatcattatgatatctccaaatatcttctataggaattaccgttgagtgtgtcttcaacgaagctctgaaatttgtagaataaatcaaacatatacttatatttgattacatatatattaacacatgaaatattgtgcacttaacattgataaacatcactaccttttcaagttccttgcttgatactcctacccatctcaagtcttcaacaagtctttctttcttagaattcacatggagatcttgcatatctacagccttcacgttcacctgtaggcatgagactttttctccagaatagttaaagtctccatggaagttcccggatgcagaaccaccgtcccatgaggctagactgtttcgtggctcatgtgaggcttgagccaatgctataatcttgctcaacatttcatctgtatcgttagctacattgtttccaaaatattcattgtgtgtgagaccttctacgtaaagtggtggtactggtggcaacatacgattttgtagtcttgcacactctaacgctatatcaacctattatatgaggagaattcaatggataagagattagtttgaaaacaaaaggttacatattcaccaattttaattttgtatttctttgagatatatagtttaaattttaccttcgagggaggatatgagattgttccatattgagactgaggtgggaagttgaaggacgtgtcatgcgacataaactgactccatttattaactatcgtttccatatccgacgacgaattattaccgagttgagttaagcctcctgtctcaggtgaga

SEQ ID NO: 33471 - DNA, 924 bp, Arabidopsis thaliana landsberg
  unsure (1)..(924): unsure at all n locations
agccttacggttgttgtttcctttttgaatgttcggatgatagtgtacaagcctcactattgctgttttatgtagtctggaatctcatagctgcaagcttttcatatgctactttgttctactaataaaattacttagactcgtctactcatatatgttagttgctagataatgttttttgacacattcatgatccattgtgaggttttcgagatcctaattatggcattgcctggttgttttcaaaagctttgtttaaattttgagaacaattgtttgaactggacttattacatatcccaatattatatattctaaaagaacactgctatggaagcccaagtagtcaagtacctaagaaaaaaatgttaggaatgaaagtgagaaagagaaacatgcagtgtcttggcaactctaggtcatagttgaggttaaaagctgaggaagctgattggtaacaccaatctattaaggtgtttcatggatgtcaagaaaagtttacgagaaaacacaaaaatgtatatccatttgttcggcactaggtggatacaccgtcatttcttaaactatatccatctggtcgatgttacatggatacatctctacttctaaatatcatatatgaacatttacttgcggattgtcagctataggaatccgtccattactcttcgaacatatgttctccacctaatgaagtgttcttgtatttgattttggtgaacaatgtttagatttggtgattcatctttcgtgttctgttgtgcagctaaaacatttcaatctaagagctgtaaaatataggatcatttctatggtgatattcatatgattatattcagaaatggttcatacgagtgtgtaaacactctacccttaacgcttttgcacaaatccttacttacttaccttanaattaaactc

SEQ ID NO: 33472 - DNA, 1864 bp, Arabidopsis thaliana landsberg
cctttggtgctgaaataatacctgatgaacgaggcaaagaggctgccactttggtttttacaggctcagtattcagtgctgatgatatacctgaaggacgaggcatagaaactgtggaagcagtttttacgggttcagtcttcggcaccaacgcagaaacagcattctttcctggttcaatcttaggcactgttacagcggttgccaggccagacatacaggctgcagcagctactgaattagcagttaccattaggtctgctctcgaagtggagttccctgttgttttctttacaggaactcgagattttgcaactggcactgatgttgttgcccgtgataatgcttgaatttgtggctgaggctgttgttgaccttgcaatgtactaccactgctggcaccattggcttgtgctcccttgatggtaccggatgacagcattggagtcatacctacaaacagtcaaattgacaaatctgattgagataagtatagagactaaccaatatcaactttgcaagaaaaaacaatctaaacaagtataacatagcctagaagaactacctaaatagtacaataagctggaagaatcttctgttactcgtacctactgcaagtttttttgagggtaaccgatttcccaccgctaaagataatgcacgattagctgccatttgtgcttctgttcgctgtaggccagtttgggtagaagtgtttgaagtatcagtccttctccttatagccccccaccgctgcaaataagtaaattcagccagattacagatgtatgctaaataaacagcatcacagatgcccatacaatgttgtccccagatatctttcttaacactacttactaagaagtatacctggaaacatcagaaataggtgacgaaaaaatatccacaaaaatggtggacagagagattattgccaacagcagctaaaatctacgttttctacgagattattaatcataacatttagagatccgttgccgggatttgaacccgggaacaatggggggaaacccacatcaagaccaaactagatgacaacggatatatttctaaagcaatgaccacaattctgttgatatcattcgataaagaagagtgtgataatgccacctagttgcatctagacaaagtgtgacatatatggtgtaaaagcctaagagcataaggagctcatgaaattatgtttcagagggtctaagtaaacactcagataatggtgtaaagcaggtagtaatgccaagaacaaggcactaactgaaaaatataaggaaggcactgcaatattaacaacagagcaaaccatcacccctcatgcctagttgctatacactccaaatcctagatcatacttgttttttttcttttctaaagcaattagaaatccacttcctttgaatctcaaattcctttactatattcctgtaactacgaaatagctatctgcgtgatgattaacgagaccatgcatatgacacagagcaataataaaaagagaatgcataaacttcgtacaaacgcttaagcatgctgagtcgagatgatgcacaatataattgaagaaaatctaaaggtatgaggaaaatgacgaaacaatatcagcccaatgaaattaaaacctgtgagagttgtgaggctgttcgctctccttcaaattcttccttagagataagggcccagctgccttcaccatgtcgcttcacagcagcaatcagctcctcatcctcctcagctgaccatttttttcttctcttccgaggagccaagctactggctaacccattcccattatgtccttcagctgctttcggaagaaaaacaggaaaggtgatattcatccctcttg

SEQ ID NO: 33473 - DNA, 590 bp, Arabidopsis thaliana landsberg
cttggagattaagagttaataatacttccaatgaccactgtctccgagttcgtggatggaggaagttctggcgggatggctaccgcttcgggaatcgtcaccagcacgatgggtgcttcgggttccatgggatcactggggcctgagacaattatttcggattagaaaaagtacaagaataatttgctatggttaggtttcaaaagctttgaaatgtaccggcctaatctaaaccagattcgtccaagggaggcgattcggtgaagaattcctcaaactgttgagggttgaacgacgaggaaggaaggacagctaaacgacttcgcttctcctccaggacggtcttcaactcgttcctctcttgtttctcggagaagtcgtcttcatgggtttggtccaaaaggaggagattgctctcgtactccttgatgtctgattccaactccgtcctagccttctcggtttgaatgaagatgattgccccttggatcaattccatcccgcgatctttcacttcttttctggcctttgatgccgacctcgttaattcagcatcccgatagttagccactgcttggtacttgagctgc

SEQ ID NO: 33474 - DNA, 962 bp, Arabidopsis thaliana landsberg
actttccggctaaagcggttcctaatgctccgttgcaccatgccgagttcctagagtattcaaccgattaaaaaatatttcttaaaaaatgcagcaatacaaatattttggtacaatatatatacaacaatttaaaataataatgagccagatacgtcttaagaatattagataataattactatataaagaaacaagatcgttaattagataacaattgatttttgataagaaaaagattccttaaaccagaagcatgatcttgaaaagttataatcttggagatcctaagaaggagacacttacgaagaatctgtgatctgggcaaaatcgacataaccctttccaggaacgtacttgaggattttaccaccggagactccggtgtagaatccgccggtagagtcaaaggcgaaagattcagggcctgacctcttgtcaggcaccggaagtttctgaaaagaagcatcatcggagaaaacagccgacgaaaaagagagaagaagaagagaaatcacaaagacaaacgacgccatgatcgtatcttaattaagtctatgaaagtaaaattagtacacgaatgatctctatgtgggtgtatatgcacatatatatatataaaataataaggtaaatactaaatagaaatttccttttttttgacgttaccaataacacgaaaaagaaaagatctactgttccgtaaataaatggataaattctttttctggggatttgacagcttttcttcagactatgattgatagaatgattcttttatgttaggaagaaaataggcaaaaaatataaagcaaacaaaaacacgagtaaaaggaaagaaatgtaaatattgcatgtacgaggatttataaaattaacagaaatagcaatttaaagcatggttatcttatattattggaaaattgatgattcttgcatagtattttcaaattttagatagc

SEQ ID NO: 33475 - DNA, 1074 bp, Arabidopsis thaliana landsberg
acgaaagcaaaagatccaatagaagccatatgcacagagatatatggagatattacaaagatacatgaacaaaatgatccaatttttttccaagaaagagcaatattatgtcccaccaacgaagatgtcaaccaaataaatgagaccatgcttgataacctccaaggttattactaattcagaagcattgatttgtaactttatttacttatataaatagtgtttctatttgctattccttctttaactgtaactaaccaaaattttaattttcaggagaggagtttacattcctaagttcagacagtttagacccagctgacattggtggtagaaataatccggcattgactcctgactttttgaatagtgttaaagtttcaaggttgcctaaccataagcttcgtctaaagattggttgtcctgtgatgttgttcagaaatattgatcctataggtggtctaatgaatggcacaaggttacgaatcacgcaaatgggtccattcattttgcaagcaatgattctaaccggtgacagagctggtcatttagtattgattccaagattgaagctagcaccatcagacacaaagttgccatttagaatgcgaagaacacaactacctttagctgtttgctttgcaatgactatcaacaaaagccaaggtcaatctttgaaaagagtaggaatttttctacttaggccttgcttttcacacggccaactttatgttgccatatccagagttacatcaaagacaagattaaagattcgattgtggatgatgaaggtaagccacaaaagcaaacaaaaaatgtagttttcaaagaagtttttaagaatctttagtttccatttgttttttacttctgttggatttttatcagagcagttttatatctacaatattcgttgaacatttgctacttcaatctaagaatttacactatcaaatacagattctaaccggtgtgacttagattatctatttatcaaccatatcatacaaatgcagacattctacttgcttaaagattaagaaccatgtaccttttcaagattggttgtgtctg

SEQ ID NO: 33476 - DNA, 3795 bp, Arabidopsis thaliana landsberg
tcattggtttatttgaagtgtgatcgctccttcttgctttgtttttagatttctgttcttgttctttgatgtaatttatgtttttatggtcttgttctctatgctttgttaaagttgtgtgttatggccattgataaaatgcagttacatagagatgtgtgtgcaagaaattatctgcactttattacaaggtgtggtcgatcttcctgtcgttggaaattgcaagacctcggagtaaacccgggattcaagccttgtgttcgttacataattcacttgaggaagcaaagaacattcttcaccactgttttgagtgtagcaaacattacctggtgaatttctctttatctcactttctttgcataggtatcccccactctgttgtggtctgttgaattcccccattttgttttggtccttgtaaacaggccatcactggggatgctataccgtagaaattgagaaaccaaaatatgcatgtatgaaaagtcttagacgcatggaggacattgttcctagatcaagtgggtttcaggtgatgtctgttttagtgcacaacacatttcctttttcacattagggcttatgtatctcttgctagctacttgcttgtcttttgtttttttgattacacaagcataccctcgtgtttatttgtttcttgaaattagagttcggattggtaaaacttggtatctgctagttcctagttgcgaattctaattttgatttgtgatttcttcagattcagtgttggtgatcgggtaattgaactatttgacaactcctgtgacagctctggtggaacgtagtagaacttcttctagatcagctatggtggaggcgacatgctttaaagaaactcattgactgggaaagtgtggaagaagacaaggggaaggattccattgtggcttacatcttgcatctcatgaaaaagtactccaagctattcagaagtgaaattgtggatgacaaatgactctggttaaggttgtaatgaacatcgtgttcatgcgtttgggcgccaactatcgaagtttggttctatcaactataagcttatgaacagtaggaaatcaggacagattttcattccaccagaagaacagatatctttgcagcttatgcgtgatcctgtcattgttgcttctggacagacttatgaacgggtctgtgtcgagaaatggttctgtgatggaccactccagccccaatactcagaagcagctcccacatctttccctgactcgcaactactgtgttacaagtctgattgcgagttggtatcagcagaatgggatcactgcatcattttctgtccaaagtatttctgaataagtaggatgaaacttcatcgaaacaacgattgctgagggatgtatcatatggtattattacaaaaaagaccgattattcacggcaaacgctagtctagcagtaacatacaacgatttggctgctaccaaaatggtgtaacctgaggaacaacatatgtgcccccgttatcttaaaagggaagttctgactctgtaagttctgattcatgggccacagccattcgcttcctcgcttcacgagcctagagttcaaatatgcatccaactgaacatcaatatgtttatttcacaatagaaacatgtcatgaagaagaaagaacaaaagaaaagggaaaaagacctggttttcccagtttatgcagcctgtgacaagagccagcagaagagtttgcagaacggcaccggctattattccaatccaaaggccaacacctttcagatgaacccagaaggctaaagatgcagcaatgggtatcccccagagatagaaagctccaaagtttatgtaagcccctatatgctgccacccgcatccgcttgcaacacctgcaaaccaacaaatgagggttaggaatggcagaaaagagttcacctttagttatctttgactaaaaagtgcataacataatattcgacactagtatatgtttgagaaaagaaataggaacagttctcgaacctgagagaaccccttgtaaactgtccagtatgagagaaatagagaccagtggagccatctttgcaacatagtcgatggtattcttgtcactgctgaaaacttggcccaacagattcttaccagctaatagagacgtacccaccatcaatgcatccactactgcaagagacattgctgcgtagaccacaatatgtgctgctcgagagtttccagcacctaactcatttgagattcttgtgctgcacaagaaaatacttgcttatggacatgaaacaactagtgtatgcttcagctcttatgtactgcatgcaaagtaggtgactgaatctctaaccttgctgcagctgcgattgcaagatgtatcgaatagacggtcgcagttgtttggagactgtccatcgtatgcataacattatgctttggctaatttaagattgtgacaagaaatggaaaaatgcaaggagaagtaccagacagagagcacagaagtctccagctgtgggttgggtaagagaccagagagtaatattatgagttcatatgaccaccactccaggctgcaacccaagaaagagtttttaaccaaaatgtgaaggcattgagaagtgaaaaggcaccgagaaaaatgaagtaccaaatcatagccgcagaaggaagagcatatctgaagaactctccaatgccgtcaaatatctccatggagagcggcgcgcgtgtctcagaacaggcagaggagaagcacattaaagatccaaggataatggtataaagacagttcgaaaaactgagagctaaggctcctccaagattaccaagccctgacttataaaccaaaagccagcagagaggaacatggagacagaacacaaaacaagaggtgatgaggagaggtgtaatcatgctctggttttggaagtagcgagtgagaggctgtagaacagcgtaagcaaacagtcatgggatgaggcaagcagcatatctgccggcttcgtgagcaatagaaggatcttggccaaagaatacaagaagcgtttccatgtttaaccatatgagagtgagagggagacatactaaagtaagacagaacatagctgtgtaagcctgaacacctactttccgatatagcttagctccataagcttgaccactcaaagtatctaaggcacatgacaatcctatctatcatcaaaaagtaacaagaaagtgaggagaggatgcaatttccatggttctggtagctagtaacagagataagtgcgtcaatttagaggaaagaaggaaaaggaaaacaaacaatgaagctgaagccagtgacgttacagaaggagactgcgaaggaagcgctagcgagggagagtctaccgaggtgacccaccatcaccattgagattatctgtatcatgaactgaatgataaccacggcagccataggagccgcaaagcagataagcctcttgagttctgcggtgaaagatccgtcttgcagatctctccatgtcactttctcaattctgtctaccggatcattggtggttctctccgcgtcttgcatggcttgtgagagagagtttgaaagttgaaacggaaagtggtgagtgataatcgtgaagtactactgtctgctttttggtgcttggttatgtgtaattccttaccaaaggaatctatagtgtagtgccacttggcaaaattccaaaaccatgaatgaaatatatacgttaaatttggctcatcggtagagagtgttcattgataatgtactctaacgtgttttaa

SEQ ID NO: 33477 - DNA, 687 bp, Arabidopsis thaliana landsberg
aaaacgtaaaacttgtaatacaagtttcagaggttcttgacctttcaataacagtttgagagttttagagcaaaccttggctgcgtagtcatcggttaggtagatttccgatgaattgaagtccgtatgagccataggcgggttcatcccgtgcatatgttgaagacagtaagccgttcccattattattctcatccgtgcgctccaatcaagatgctctgtctccttatctgatagccgaaaaaagttattaaccgagagagtgaaagccaagataacatcatgaaaagacctagaccaatgtttgtaccgtgcaaatgttcgaaaagagttccatttggagcatattcaaagaccatcatcctattaaaaggatcatcttcttcgcagtatccaatcagattcacaaagttcttgtggttgatccgcgataatgtatcaatctacaaaaaagaccttttaagttataatggtaagacctttaagttagttttttttggagttaagaaggagtaagcagtaacctttctacggtatgccatttccatggctcttgtccattctttagattcagcaatcgcggttgaagctaccgctatctcaacaccactcgacaatgttcctttatacacagtgtaaccgtcaaatgtctctatgatgttgctgaaatcttcacacgctgtttca

SEQ ID NO: 33478 - DNA, 5892 bp, Arabidopsis thaliana landsberg
  unsure (1)..(5892): unsure at all n locations
agaaaatgagacgtcctaggcagtcaaaagacgaaatgcctccaccagcttcccttcaaggcccatctggtgagaatgaatcctagtgctatttatggttttaggcagctgtaaggtcttatcgctcaaccatgtttgatttcagaaacttcctccacagaccctggaaagagaggtcatcacatgggtgattatatcccacttgaggagctagataagttcctttcaaagtgcaatgacgcagctgcacaaaaagccacaaaggaggctgctgagaaagcgaagatccaagcagataatgttggacataaactcttgtcaaaaatgggttggaaagaaggtgcttacttgcatcactctatctgtaaattggtgcccttgtttctttctgtatcttgtgcctttatggagacaaagagcttagaaaattggaggagtggattacaggtgaaggtataggaagctccagaaagggtatggcagaccctataatggcaggcgatgtaaagacaaacaacttgggagttggtgcttccgctccaggagaagtcaagcctgaggatgatatatacgagcagtacaagaagcggatgatgctgggttacaaacacagacccaatccactggtattttatccatctttagctccattctttttgtgatagcacttcttttactcaccatctgtctcaattgtactacagggaaatcccaggaaggcgtattactaaggatcaaatcaatgtgttatgcgcaattattatctttggttcacctcagcaccgtctgagctttgcttttctattataaagaatgttcaagcttttagattactgatatattgaagtgttggtatgcattgaatttgcgtttcagtgtgcaaatagatctctttgacagacatatcagttgaaatacaatggatttgttattgctaatgactgagattttgattcgattgtcataactttattaatgttttggaagtctgggacataatacactaagcagcaaggttattaaagagaaaggtaaatgaaaaaagaaaagaaaagaaagatgatatgtccttcctagttgatgatatcgcagggagggaaattagcagagcatctctgagggagctgaagagccatggagcggtcaatgccagagagtggaggtccattggcaaggaggcaaagacaaggacgaccaagtgtgacaacggcagagcaacatatctcggtcggtgggatcgggctaaaaggagcaactgctgctctacatggtatgagctgtaccagcgcggagaaaaatgtcctgctgcatcctcccacttcctcctcgggcaacattggtggtggaggtggttgttgcaggccctcttgctgcgctgcaacaatggtaagaacggttatggtcatgagcagcgtcattgccaacccaactctcatagctttcatcatcatgtaaacagcgatggtaatgagatgacgcaacaacgagatgctgctggtttatataccataccatataatgaaaggggtaacaatgtcatgccgtttcacacctctctcctacctcacaaccaaatagcctcacgattactccgtgtgtgtgtctccactgtccagagctttaatcttcgatcaaactcacaaaaattataacatatcaccggttcctcctagctacaaatattaaacccataataataatattgtggtcagtgattattctcacctactgtgggtatctaaaaacttgcttaaaattctgatgatttgcaataaatttcgcatctttcccgctttaaaaaagcccaaacaaagcccattagaaacccaaaaaggagggattggtttgttattctctgtatctctctcctagtattcagctctaacacatagagaggagtcagaatatcatcagccgcctctttcacttcaaccctccttaaacctcatctctttcctactccgccgctctctccgtggtctggcccgttactccatttctctcgacccctccaggtaattccttttcagatcctctactagaccctttacttattttagtgaattggtctttctccatttccatctatcccttacgtatctgtgactttttccccccttttggattgtattcctcatcttcctctgtttccgtcaaatgaatgatctttctgaaattcaatcacttttgtatcgtttctgaatctttcctctaataggtgaaaatggctgggaagtcgaacaaatcgaaggccaagagagcggctcagagcactaccaccaattccactactgatgttaaatccgatgctcctgctcctcctgttgctgctactgttcctgctactgctccggttactgctgctgctgctccggttgctactgctgctgctccggttactgctcccgataatggcaccctcactgctgttgactctgcggtgcctgaagccaatgaagttgctcctacgattcctaaggctgacgaaagtgagtcacaagttgaaaataacgatgcccaacccaagcaaggttagctctaatgcttttattagtaaatcacccaattttttagtatatctcaatttgaagtgtcagtgtggttttctcgtaagctaagtagattcatccacaccctcttgtgtattgcttttaagtgtctaatttttctgctttcacaggtgaactccgtctttatcctgtgtctgtcaaaacacaaagtgggggtaaaatggagcttcaagtgagttttttttttttttttttttttttttgctttctcgcttatatactattggctagtcttagaaaatcaaatagtgttttagtttcgtcagggatttaatacctgtagatatttcttgtaaagcattaccttttcctactggtttctcttatatatattggtgtaaattactaaatctgtccaatgtttgtgttttcagttgaaccctggagactctgtgatggatataaggcagttcctccttgatgctccagagacgtgctacttcacttgttatgagttgttactccgcaataaagatggagagactcatcatttggaagactacaatgagatctctgaagtannnnnnnnnnnnnnnnntggttgctccttggaaatggttgcaggtagctaagtctgtcttttcttcatttttttgggttgagactaaaaacagaaagttgacttgttatgtttcttcccacagcattgtatgatgatagatctatcagagcgcatgttcaccgtgccagagatcttttgtctctttcaacacttcactcttctctatcaacaacacttgccttgcagtatgacgcagcactgaacaaagttcagaaccctggaggtttcaaatttgaatcattctcttaatattgttttgctttgctaatattttcatgcactgcgaaggatttatttatggcctctatattgaaacagataaaccaaagtctgacgttccagagctggaatgtttgggttttatggaagatgtgcctggctctctcaagaagttaataaattctacatcagaagagatcagatctgtggaaaacattgtgttctcatcgttcaaccctcctccaagccacagaaggtattgagcaacttattttagcatttgtaaaggcataaatttaccatttatgttgtttcttatgaatatatttgttgcaggcttgtaggagatctaatatatttagatgttgtgaccttggaaggtaacaagtactgcataacaggcacaaccaaaacattttatgttaattccagctcagggaatattctcgatccaagaccaagtaaatctggatttgaagcagctacgctgattggactattacaaaagcttagctctaagtttaaaaaaggtgggaaacagcttatacaccattcttcttaagtctattctttactctttttatgacgtgataatcattcaatctgttgattagcttctatttttccttttatttgaagctttccgtgaagtcatggaaaagaaagcctctgctcatccgtttgaaaatgttcaatcgcttttgccaccacactcatggctaagaactttttcagttcccggtgagtttaattttagtagcgtttggattgtcatccatcttgcacagacgtacttgtttattatagtatacttgcgttctgcacagtagtatggtttagtaccttaactctctcctttcgtggctatctcaactgttctttcagaggtctttactctgtgttattcagttttatgcactgataatggttctgagatattcatatggcagccatagaagtagtgtggttgaaggagtccttgtttttaattgcagaatatgcaatatatccttgaagtccctctctagtgcattctctttgtgactgccttttaatggccaagtcatatcttgcacaatctcgaataatattttattttattttttattatttatttatttatttatttattcttttatctcgaataatattcattttgatgtttttagtcttaacaaaattttgtaaattaattctcttaatagaatgtggtccatttcgttgcgtgtttattgactatgtactaattttctggttttatatattgaacgtgtgctttgtagctacacttgaattagtttttctattaaatctaagcacggaatgttgtatctggactcagatcacaagcgtgatgcagcgagagcagaagaagcacttaccatttcctatggtagtgagttaattggcatgcagagagattggaacgaagagttgcaatcttgcagagagttccctcacacttctcctcaagagaggtacaagcgatacctaactacaatgatttctcggtagcatgaaattttgagattctgttccatttcagatttgtttccttaattgaaaatttccttcgttgcaggatattacgagacagggcactttacaaagtgtcttctgattttgtcgatgcagcacttaacggagctattggagtaatcagccggtgtataccacccataaacccaactgatccagagtgtttgcacatgtcagtgtgaattgtttggcccttatttttgattctccgtgccaattcgtttattttattgatctagctaattgtgttcatgaaattttggcagtttagtaactccctttgtgttttataacgtggacaaatgacagaggatctagatgttcacatatttgtgtttatgcattgagtttttcaattctgaacacttgctattcttccactgttgtaggtatgtgcacaacaacatctttttcagttttgctgttgatgccgacattgaacagctctccaagaaacgtccatctaatcaaatgacggagaaggtgtcctcatctgaaaaggtttcatgcacagaaggaacctgcgataatgaagagcataacaactgtaatgaggcgccacttgttgagaatgagcaggctacgtatgcctctgcaaacaatgatttgaaaggcacaaaattatatcaagaagctgatgtcccagggctatataatctggcaatggccattattgattacagaggccatagggttgttgctcaggtttgttcaaatactggaacttccaagtccttattcttgagattgtctgtgtcttgcttgtgttcattttaatagtatctttgcaatgtgttttagagtgttctaccgggaatcctttaaggggataaatcagatgcgcttttgtacggtttaatcgacaatggcaagaaaatatgctggaatgaagattttcatgcttaggtaaatgaatatagtctctttgctgctggatacccgtaggcattaatgtgaaaattctaagagtaatctatttgtacaatattaatattaatattt

SEQ ID NO: 33479 - DNA, 392 bp, Arabidopsis thaliana landsberg
gacaagaatttttgattgacacgtttttatgatcatatgccaatatttatttggacggcaaacagctgaaaaatctaggggattgtcgatgtagtgattctccagaaattggtttgggcctattcacaagtcgtaaaaccatttgccaaacctcatgcaaatactcacttgtcttaagtagcaccagaaaatgggaatttcatgtcgacctgtgaaagcaattcaggtatgcaacctaggagacggacagagttaacactgaaagatgctggtgatgcgcaccacctcgatgcaggatggaattggttcatgtattcatggtctaagttattaagaaaggtaaaatagactagaaacagtacctcagagacagaagccctggactctgccac

SEQ ID NO: 33480 - DNA, 1497 bp, Arabidopsis thaliana landsberg
tagccgtttagccaccatcgtgctctcttgtctacccctcctccatgtaaacttattacctctgaatccgaaatcaatcaaagacaactaattgatccagtctccaaaagctaaaaaatctggtgaaagcctcccatttccacccattctctcatccactctcaagatggtgataaagtctcctccaattatcaacagccctaccaaaccagatacaactttcttcaactctccccataaaccacttcgccgactcatagatggcgccgcataaaccactattagattcatcggatccccattacagaccaccttagcgtggatatattggcttgttgacaccacaatatccacttcccccacactcgacttccatagcacccacaagcccccactctgacctgttgcatccaccctatatgcattctcaaaccccagcttctgacaaattctacctgctttttcaccccccccccccgcgtgagtctcaaaaagcgctagtacctccgtatcaaatttctttagcatataccgtatcgatcttctaaagatggatttattcgccccccaacaattccaaagcatacaattcatgatgacttcacataaactcataagaactttcgggaagtaccattacttccctccgctactgatactatggctgcatgccccttctttcgggccaagatccatcgacgcacttccactagccggtgatcttacctcctctccatccctctgattcccaactggcagctgtgcatttcctaaattcctgctactcccattagaaaacgcacctccaggtctgcctacattctcatgctccacctgcagcctcttcctaggtgacacctctgtttgctctcctctgatcgttccaaacaccaaacctctggtagcgatcgtattccttcctcctttacctttcagtccccctcctttcattggtttatagtgaccagctctcctatctgttactaccccaagccttccttttccttccactaacttcccatcaggcccacctaacctcacaacgctggttaacgcagccccatccccctcattctctttattttcttcccctgagctatctggcaccagcatcccttgttcctttactactgcttccaacccgccaaagctattagaaatctccatcaattcagtaccactcctcttctctctttccacactctttcctgatctcttctccgccgatccccctgctggaaacgtcattccctttccttggactggcccccgcctggacagtatacgtacctccgtaaacccatcactgggttggtcccaccacttggactagcaccactctcagtactggtgacctgcactaccggacccggactcctcttaggacaagctccaggcaaatgcccaaaaactccacacaaagagcaggataacatttcaaactctcataggaagcatagtagcattcgccattcaccaccaatgtgccttttaaag

SEQ ID NO: 33481 - DNA, 900 bp, Arabidopsis thaliana landsberg
tcgcgagagaaatatgagtttattagtttatatggtttgaataaaaaatgggactcgttttgacgtctactaaaaagaagacttaacttttccccctcgaaaacaaaaatatccatttagtcacagactcacagtaatacactgatacttccattatcattataaatttttatttagctcgtgtcatggaaaagatcatgataatggaagcattactgtgagtctgtgactatgcataattgatagaatagtttattttctttcccgtaagctgctttgatgcgtcgttaattttcatgaaaatattacatatatctgccaatctaagcctagaaactattaatgagtgatatatagtaatgttataatgtttacaaaaatgtaacttttttccgcgaaaaatatgtattctaattagaatctttagtatatggtaaaaacaacatcaataattaaaatagccctgcgtatgaataaagtatagtagtatatggcatacatgtatagctttgagaattttaaataagcaaaaaatagctagcttaagacttaagtgtttcttaaaatttttttgtcggcaatgtttcttaatataactaaatcaaagctttttttttgttaatcaactagatcaaagttcaaccatccactttacatttttatttcatatctttttttctgtcacatggggtaacgacttttgaaaggacattccgttgaaaaataaccgacttttttctcttttttttttgtttgatcaaaaatcaaacaaagcactgatattttacattgattacatttatgtatatgcacatactatatatagggtccaagcaaccattataaaggatcattcttagtcttacaacagagtttaacaaaacacagacactgatcaat

SEQ ID NO: 33482 - DNA, 4189 bp, Arabidopsis thaliana landsberg
  unsure (1)..(4189): unsure at all n locations
gtatccttttcaactacagaaaatgacatttgactcgtaaaacaaacattactaaaagaaaaacataatattccccgatttgttgcaagagagaaacaaaaaactaaggaagctgtcaagtattcatcaactagtctacttgagttagaacttcgatttgcagatcggttacaaatatttttactaaaacgtgtatgatgaaagaaaatatgttgatataatgtcatacttagtannnnnnnnnnnnnnnnnnnnnnnnnnnnnnnaacaatttcagtaagtttttaacgtatgtgtggaaataaaatttctatttttgtttttagatgtaagcatggaactaaattaaagtaaactaaaaatgtacgcgttttacaactcaacaagttaaattcagggtaataacataatctatacacaaaagatccaattactatgtaagactttttgtcactatttatacagtggaagtacatagaaaatacactactatcctcatctctatttttactttactttcttttattgattactatctcctttctctttcatatatttatccatctccttgttctctgactttgagttcatcaattagattctcaaatgatcatgaaaattttagaacaaacttgtgaatttaagaaatacatgatcgatatagttcatgtggtggagaaagataattggtagcggtggttcctattgcgattcagtgccggtcgttgcggtggagattaagtggtgctcatttttgcttaaaacgattaagtttttaacaatggtaaagatgatatttacagcgataatgatgatgattatattatcgatggcggtgagtttaggaaaaaagaaggtaacatgaatgaaatcatggattgagcttgagtcagggaggtgtggcaagctaaaagattttatgttgatggccatcgttttctaagtctatcttgtcagtgagcagatgtaaaacaaaattattatttttcattgctaattattttcattgttatcacgttaacgttattactaattattatcggtagttattttgtattaattatacgtttaaataaatattattcatatattgattatcttaccattttaagacaaatattatttcgatatttagtatattagcatgttatttttcatatatcgcttattttaccgtgttgagacaaatattatttcgatatttagtatgttaacttgttattattctatgtaacatgttgttataatcgttatcatgttaactatgtaacatgatattttgttgtgttgatatatatataaataaaaataatgattcataattttaaatcaataaatatttatttgacatataatatgtaaatttataacgttattatttatgttaggtcgttaaaaaatagttatatacttattttcaaatatgaaagttattttgaattgatggcattttgtaataaatataaaaaatgatatttttggtttatattttatttctcttttctatttacctaaataacaaatttttatgtacaaattcttaatttcttgttcgtctatgcatatatttttaactcactctaacatatatcgactagtttaagataatgaagcagtaacgtagagccatgccctaatttagcagcagtcatcaaaacatatatcgactagattaagataatgaagcagtaacgcagagccatgccctaatttagcagcagataatgaatatgacttccacatgttaattagtcatgaccattagattaatgttcaaattgtccatgtttgttggtgtggtatatatagtacctataatatactaaccaaagacacacatatcacacaacaagactctaatttagaagagatcaatgagtttgacaaggtggtccagtcaacaaagaatcaaaggaatagttaagtacgatgtgggtagggaccgtgtagtgacccgcataagggcatcgggcacggccaaaggaccgaatgagaaaattttgcccgaatgcatggccaattgaccacatgtgcccaaaaggtgccacaccatcaaagggcaaagatgggaaagaatgggcacgaattggcaaaaatgggaaaagttgggcgtgtcgtagtttgccccgccagccgcgtaaccgacatgtgttgacacctcactcgcggtgccccgtggctcaagtcaccaaccttagagacgaagtcagctgagtcttcgagccgaagctgatggggcggtggagtgacacccgtttccacctgtcaccacgccgtcgaaagtggcacctgtcgcctgtgggtgcgataaatgtccggacgtgtggcggcttgcggtgctgcatgggcagtttaaggtggactataatacataccattctccgcccattttcatttcacagagcaaaagagagatcgaaaggctatccgtttgatataaacttgcccaaatcgataaaaacttgcccacatcaagagaaatttgtccgagactgaagaatcgtcgcctgtggtcgagagcactcgtacgtgagtaagggatcgtcgaccatgattgaggaattttgcccgagacccagaaaccttttgaattaccgaatatgtgatttgtggtcgaattgtgtgtttgtttgcatgttttgtagagctagtctttagatcatatgcatgcatagtcacttagacttcactaatcggaattcggtttgagttagaacttgaatcttaaaatgatgggcatttgatgaccttgatagttaatatcattaaggaatggaatggactggtgcatgactaggctaagtgaatatggacttaactaagtttacttgatgaatcgagatttgattcgatggattacttgcctggttagattgttatacttatatgagatatgctatgaggctgtgaataagtccttgctatattatgtatatatatatatatatatatatataaatacgtgatttggtacttgattttgttatacttgtttggggtgtggtaaactacttatatttagtactgcatgaggttattgtgtctaagtggtattcagggtttaccggatatcatcatgctttaagtaagctgttaccttcctttttgtgttgtgattgtgtcagtaagtcttgatcctgagtggtcacttacatgatggcacaagtctcgtagcgtatgtcgggtaatgcatgacgatgcattaaagtgatgtgccagttataagctcgggtgttcatagttgtgtacgtacatgtggtgtgggtgtggacgtacatgtgtgtgatagcatacatgtggagaaaatgtatacacgtatgcgggagtttgtgctgatgttgtggtgcacctttttggtaaggtttgcagtattttgggccaaaggttcattcatgtgtctagttcggctgcatattctggtattattataagtatataataatacgtttgctgcgtgttttgtgatatatgatggctaagtttacttattaagttgattaaaccctagagatttaattgtgcatagaccgagctcactgagtaatgctagattactcatgattctacttgtcttacaggtaaccatagtgggatgaccatagcgggaagacaaacactaggaattgccggaaataggatgtttgcgttgcttctgcaaaattacttgttattatgtatttttaacaaggatccgacataaagatatatttttgggtaactctttgcaaagtataagctatatactacatataaagtgttttcttaaaagcagccgagtgtttaatgatataagacctagtctgggccgctcaacactagaatatcacgagggttggcaggcctaagtggtgttcctagtgggaagatggtcgattataatctggttaaggatccggattcatcttaaacctctactgagttatggtcgatcatcttcactctagtgtaactaggtcgcccatggcttgtccgccaatagggcgattcaggggcgttacattatcctaatctaatccatcctcaagaaccctaataactactcaaacaacaaaatcaaaaacataaacccaaaaattactctaaacatatcaaaatgtagatctaaacaatataaacaactttactcaaagaactaaatgcaaaaacgaaatagattaagagtaattaaggtttcaagattcttaaacac

SEQ ID NO: 33483 - DNA, 3771 bp, Arabidopsis thaliana landsberg
ttaatttcggtgaaacgaaaactaaggaggagaggcagagatggatccaagctttaatttttgttggcaacatagctggagaacactcgctgaaatggtttgtttgttttcgatcgactaattttggggctttcttttaagttacacatcactttataacgcctatctgatattttgtttcctctcttgttagggaaaatgaagcggatatgattgaaaagatagccaaagatgtttcagataaactgaatgctacaccttctaaagattttgatgcatttgtgggacttgagtttcacattagggaattaagttctctgctatacctagactatgagcaagtgaggatagtaggaatctgtggccctgcaggaatcggtaagactaccattgctcgtgctttacaaagcctactctctagcaattttcagcgaagttgttttatggagaatgttaggggaagtcttaatattgggcttgacgagtatggtctgaagttagatttacaagaacgacttctttcaaagattatgaaccaaaagggtatgaggatagagcatttaggcacaataagagataggttacatgaccaaaaagtgcttatcattctagatgatgttaatgatctcgatttgtatgctttggctgatcagacaacgtggtttggtcctggaagtaggattatcgtgacaacagaagacaacgagcttttgcagaaacatgatattaacaatgtctaccatgtggattttccatctagaaaagaagctcttgagatcttttgcagatgtgcttttagacaaagctctgcacctgatacgattctaaagcttgcagaacgagtaacagagctttgtggtaatcttccattgggtctctgtgtcataggttcatctttacacgggaaaactgaggatgagtgggaaattttaattcgcagactagaaattagtcttgatcgagatatcgaggcacaacttagagttgggtatgatagcttacatgagaacgagcaagctttatttctcagcattgcagtcttcttcaactataaagaccgtcagcttgtgatggccatgctccttgacagtaacctagatgtcgagtatgggttaagaaccctcgccaataaatctctaatacatatatctaggaatgagaaaatagtgatgcataacttactacaacatgtgggtagacaagccattcaaagacaagaaccttggaaacgccacatcttaatagatgctgacgagatatgcaatgtccttgaaaatgatacagtaagtattccacgttctaaacttaatcatattgtgaagattcacagatcttacatattgtgctcacgatttcttacctttgtaatattttttcaggatgctagaattgtgtcagggatatcatttgatatatccagaatcggcgaagtttttttaagcgagagagcttttaaaagattgtgtaatctccaattcctcagggtgtttaagactagatatgatgaaaaaaacagagtgcgcataccggagaacatggagtttccacctcgtctaaggttactacagtgggaagcatatccgaggagaagtctttctcttaaacttaacctggaatatcttgtcgaacttgatatggaaggtagcctgctcgagaagctatgggatggaactcaggttagttatcataaattcatatctttaatgatgttatacatattttctctctattctgatgtttctactctaacatctggtttacattcagccccttgcaaatctcaagaagatgtcgttgtcaagttcatggtatttaaagaaacttccggatctgtcaaatgctacaaatctcgaagaattggatctgagagcttgccagaatttagtagagcttccttcctccttttcttgtctgcataagctaaagtatttgaatatgatgggatgcagaaggctaaaagaagttccacctcatatcaacttgaagtctcttgaattggtcaacatgtatggatgctcaagattaaaaagctttccagatatttctacaaacatcagttcactcgacatatcatacactgatgtggaagaactacctgaatcaatgacgatgtggtctcgcctacgtactctcgaaatatacaaaagtagaaacctcaagatagtaacacatgtgcccctaaacctaacatatctagacctcagcgagactagaattgagaagattccagatgacatcaaaaatgttcatgggctgcaaattttatttctaggtggctgcagaaaactcgcatcattgccagagcttcctggttcgctcttgttcttatcagcaaacgagcgtgaatcacttgagagcgtatcttgcccttttaatacttcatacatggaactcagcttcaccaactgcttcaaactaaaccaagaagcacgcagaggaattattcaacaatcattttctcatgggtgggcatccttacctggaagagagttgcccactgacttataccaccgatctaccggacattccatcaccgttcgtcttgagggcaagactcctttttctgtattctttggatttaaggttttcctcgtgatttcccctaaccatgatgctgaagaaactagcaattctcccttattttgtcctcgcattggcaaaatcggttgctccgatgacgaaacacctgtttatattatccccaaacctcgagcagaacatctagttatgtttcactctgacttgcataacaaggaaaaatgtcatgaagtaggcaacgagatactgtttgaattcagcaacatatccgacacctatgagattattgagtgtggtgtcagattctatacagatgaaacaggtgaaatcagtgaaaggagaaatgaatatgaaatagaccaagtttgtgaagatgaaaacgattggagctatgagtttggacccgtggaagcattggaatgctctaaaaataatggacataatgatagcctaatctgtacttcgaacgaagacaagatcgaagccaacaaatacacagattgttggagttggctcatcatctgttttgatgtctcccatattgtgagaagcatcggaagtttagtttggggaggaagatgagagaagcaagaaggagaatatcaaagtggagaagtcgaacgaatttgcaagtgaggaaagaatatctgtttatactttacaatgacttgttcggctgcttcactgagttggatatgatgagtagtagcatcatactgtttgaattcggatgcagcaaatattactgaaattgatagtagcaacaacagtgaattatgttgggcctgaaactatccgttttaaatgggcttttgagcctttcacattatctatgtaattttcggttttatcttcctttttttacaccttctcgacgaacacacctacacaaaaatcaatcacagtctctgtctcactcgccggagtttcggtcactgcgccatctccggggtcgagttcgtcgtacttcatcgaactatgaactctcatgatatcgatgatcagttagaagcagatgtatacagtaacttgccttctcgaaatgattcttcaacagggaggagaaatcgaaactcgtgtagatcgaaacactcagagactgagcaacgaagaagaaaaaaaatcaatgaaaggtaaataataagtgttcaaagtttgaatttttatcagattttctaaaaagggtaacaagaaagtttcgtaatttgtgattgttggttggtggatacagat

SEQ ID NO: 33484 - DNA, 2798 bp, Arabidopsis thaliana landsberg
gtaatcatgcaagatgaacgtgttgaccaagatatgatctttgatctggttaaacaagaagaagaagagaggaagctgaaaacgtttactgagatatgtttcgcaggattgaagacgcagaggaacctccactttcaagactcttatttcgcaggaggtcaagagatgtctccatgggacaacatggtgaccaacaacaatccttttgggctcgtgtttaatacccatgggcacgagatgcaagaaccacctgtcattaatggggtcaattaataaagatttatcttggtatggtgcagggaaagagcagatgataaaaagaagaaagcaatgttgagtgctcgttatttttcgttgtttgagtgtgtttgtacatattatctctgtatttggtagtggagacgatggtttagagcaaaaagtcaaataaagacattcattttataactataaatttagagagaaagggaaagaaaataaatagtgacagctacataaacttgcatacaacaacataaatatatttttgctatcgtaaacaaaacattatatcattatcaattagaagcagtcatgtgaagctgaacaagcgaagcataaaccccaccttcgattttgatcaacgtctcgtgagtccctttctcagcgatcacaccgttcttaactacggcaatgacgtcagcgtttttaatggtagataaccggtgagccaccactatcgtggttcggtttaccatcactctgtcaagcgcatcctgaaccactcgctctgattccgcatcaagagcgcttgttgcttcgtccaaaagcaatatcttcggctctttcacgatggctcgtgctatagccacccgctgtttctgtcctccggataactggatccctctctctcccaccactgtgtcataaccctaaaaattgtattgcttgcattgtaagaaactttgaaaaacagagttcttacaaatttgttctgttttttttttccattacctgttgtatgctagagatgaatttgtgtgcattggcaagttctgcagcggctatgatttcagactcggtagcggcctcttcgcttcctttgccataagcaatgttggctcgaatcgtgtcgttgaacaagacaggttcttgtcccactagtcccatttgttgtctcaaccatttcaactgcagcttcttgagctcaactccatctaaagttatatgaccggaatctggatcgtaaaatctttgtaacagcgagatcaccgttgatttccccgacccgctttctcctaccagagcaacagtctaagagaaaaacaaaaagagtttgtttaatagtctaatcgaagattaaaaattcctaagatacagcttggtttaagagtttgtttacctttcctgcgcgaatggttaagcaaagatcacgaaagatctgaatgtctggtcttgctggataagtgaagcttaagtgacgcagctcaatatctcccttaacgttctccaacactgtccctgtctcatcgctcgagtctatctttgattttctatcgatgatcgcgaagattgaagcagctgcgaccttcgctttgctcgaatctggagcgaaagtacttgactgagaaattccaatcgctgccattgttaacgcaaagaacacctgcaagatccattcttcttcattactaggtcacagagattttcaacagtacttgagcagtgattaagacagttattcacctggaagacattattgaaagtagtcttgccatcttcaaccaatctagcccctgcgtagaagcttgtcgcgtagacacaaaacagaatgaagaaggagaatccaaaccctaatccgctgatgaaaccttgctttattccatcttttatcggaccttcgcattgcttcttatacatctgcatcactttttcctctgcgcagaaagacgcaactgttcttatactccctaccgcatcattcgctacctgacttgcctcctcgtactttgactgcatagtaatccaaaaccagagtaagttcctcgattcacaagaaaaaaaacaaaggatttttgcagagcctaaaaaaaatggaaccaaaccggttgatgtacgaacctttgcgtcggcgctgaatcctttcatgaacttgacttgaacaaaaccattgataccaataagaggaagcatcactaagattataagagctagttcccaactcgcagtgatcgcgataatcaatccagacgcagcatatgcaacattttgaacggctaaagacaatgcatctccaactagagccctaatcaaagttgcatcagccgagagccttgctcccattgtaccactcgaattctgtggctcatcgaaccaggcaacttccatgtgaaccgctttctcaaagcacattgaccgaattcgtcgaatcagttttcctccagctactgcaaacagatacatttgagtcggtgagacgatcaacgaagttactccaagagctacaaatatgatcgcccaaaatcttgaatctctctttaactcatgagctggtttgaagaacgcttcgatgactctagagatcagaatcccaaaaagcgggaaaatagcgccgtttattgctgctgctacggttcctagaagaagaaccgggatctcgggtttgtttagagccgcgattcgggtgagtgatacttttggaggtggttcttgactcgccgttccagtttcgtcttggcctgctcgctggctatggctgccgaggtctagtcctgtggttaaaccaagaacattcaaagaatgatgacggctactattac

SEQ ID NO: 33485 - DNA, 760 bp, Arabidopsis thaliana landsberg
agttgacataagatttgtggtacgcccacacttaccctataatgcagagcttgcaaaagaatgttctatcatctggtgaggaagggatgccttatgataacatattcgtatggaattcgtatctgacgcagcctattcgatcaaggtgcaacaacactatttggacactggcattagttcatgggcactttaagcaggtattgtcttagggcttcaatcctatgtttgatgccaggagttaaaatggttctaactaactttccccatcattcagataagactatcaatatatggaagagacttcagtgttactttagtctccagacgttctcgacattttgcaggcacacggtaagaattctttcttatcaggcctctaatgtatgacaaattcatggtgaccgtttcgattttctgatgccctttcttagttataccttttatctttagagaactttggttagggtgaatataattagtgatgtgaccttttctagaccagtttggatgattgtctccgttttttactgtaaaatatatatagcccttttcattctgtaaaacttgtatttcagttacttgaaaaggggagtgaatgatcgtggaagggttgcaaacgatgttgaaccagaacaacttgttcttgatgatgaatctggatcatgcaaaggaaaaatgagctcagaggtgcaaatgcgagggtcagttccactcttttgtcacccgaggcctccagatttagccctaagcctgatatctt

SEQ ID NO: 33486 - DNA, 10876 bp, Arabidopsis thaliana landsberg
agacatcgatcgcctcgtagaatcaacttctggaaacaagttgctgtcattcatgaacgctttcgctggttacaacccgatcatgatgaaccccgaggttcaagaaaaaactgcattctacacagaacaaggcatcttttgttaccgagtaatgccattcggactcaaaaacgctggggcaacttatcaacgtttcgtcaacaaaatcttcgcattatagatcgggaagacaatggaagtttacatcgacgacatgttggtgaaattcttggcggaggaagaacacgtatcccatttgcgcgaacgtttccagcagcttaacctctacaacgtctaactcaatctagccaagtgccgcttcggggtaagatccggagagtccctcgggtatctagttacgcaccgcggcatcgaggcaaatccgaagcaaatcgaggcgttattagggatgtcatcgccacaaaataagcgagaagtgcagcgcctaaccgaaagagtcgcatcccttaaccggttcatctcacaatccaccaagaagtgcttggccttttacgatgtgcttcgggggaacaagaaattcgaatggattacccgatgcgaagaggctttccaggaactcaagaaatacctggcgaccccaccaatcctcgcaaaacctgtaatcggggaacaactctacttatatgttgctgtatcggacaatgcagtcagcagagtgttagttcgagaagacagaggcgaacagaaaccgattttttacgtctcgcagtaattcaccggtgcagaatctgctacccgcaaatggaaaaactcgctttagcagtcgtaatgtcggctcggaaactgcgaccctattttcaatcccattccatcgtataatgggatccatgccgctccgcactgtcctacacagtccaagccaatcgggacgcctggctaaatcggcaatcgagctcagcgagtatgacatcgattatcggaacaaaacatgtgcaaaatcccaggtcctagcagattttatcgtcgaattacccacaaaggaggcccgggagaatccgctcgatacaacttggctattgcacgtaaacggctcttcatcaaagcaaggtttgggcgtgggcatccgtcttacctcgccaacgggagaggttctcgagcaatcattcagattaaacttcaaggctaccaacaacgtggctgaatacgaagcgctcgtagccgggggctaaagatagagaaaatccgagcttttgtgactctcagctcgtcgcaaatcaattcaacggagaatacacagcacaggacgaaaagatggaagcctacctaattcatgtacaaaatctggcgaaggatttcgacgaattcgagttaacaaggatccctcagggagaaaatacatcggctgacgccctatcagctctagcctcgacatccgacccgagcctgagaagaatcatcccaatagaattcattgagaagccaagtattgaaatcggcaaagaagaacacgtcctcccaatacaaatcggtgcggatcaagacgacccagatgactacaacccaaaatggatagaacccatcaaaagctatatatccgaagggaaattgccctcagacaaatggaaagctcggaaactcaaagctcaagctgcacggttcgttctaggaaataaaaaactttacaagtggcgattatccggaccattgatgacatgcgtggaaggagaagaggttagcaagatcataaaggaaattcacggtggctcgtgcaaaaatcattccggggaaagagctttagccattaaaataaaacgccacggattcttctggccgacaatgatcaaagactgcgaaaattattcaaaacgatgcaaaatgtcaaaggcacgcgccaacaatccatcagccagccgagctcttatcatcaatcgcctcgccgtatccattcatgcgatggtcaatggacataattggacctatgcatccctcgaagcagaaaaagttagttctcgtcttgaccgactatttctctaagtggatagaggccgaatcttacgccagtataaagtacgctcaagtcgagaacttcgtgtggaaacatatcctatgtcgccacgggataccttatgagatcgttacggataatgggtggcagtttatatcaacccgcttccaaggcttctgtgataaatggggaattcgacttagcaagttaacaccacgatatccccaaggaaacggccaagccgaggctgctaactaaacaatcctcgacgaattgagaaaactgctcgatgctaaaaagggctcttggtccgacgaactcgaaggtgttctatggtcgcatcgaacaactcctcgctgagccacaggagaatcccctttcgccttagtatacggaacgaaatacataattccggccgaaatgatagtaccgagcctacgtaggagtctatctcccgaaaacaactctgataatactcagaggctcctcgacgaactcgatttgatcgatgaacgaagagattcagccttggttcgcatacaaaattatcagaatgaaacggctcgtcattataactcaaacgttcgacagcgaagattccatgaaggagatcgggtcctccgaaaagtttttcagaacaccgccgaaccaaacgctggaaagctcgagacgaactgggaaggaccatacttgatctctaaagttatccgacccggagtatatgagctcgcagacttaaacggcaaagccgttccaagatcatggaacacaatgcacataaggaaatactacaactaaatccaaggtgactaaatttgtactacgaggtggcttgatccctgaaaagggtacgtaggcagctcgtcttcggacgagttcagctacccccccattaaaaaaggggggagtgggtccgtatattcatactcccattttattatcttataggtttccgaaccgaaacaaataaaaaattcaactttttactcatctaatacaatgagcgacggctcggagtatccattacaccgcttcggttacagcgcgctatataaatattcaagataagaatctgctcgaatgtttttccgagcaggctatgaattctatcttctgaaacccggttatacttaacaccggtgccccagctcgtttctaaacgctggtcaaggagtgaatacgatcgggtcgcaaccgagagactcactctatacatttttttaaaaaaacaattcagaattaataaaccataatttttgggtttcaaaaaatgacttaaactggataaagccatccaggcgggttctacataacggataaagctatccaggcataagtattataaccgagcagaaagagaagaaaaacaaaaaaccgcctcggatccctagtcgagatcttcggatggtcggttatcctttgcagggaggagagatccggcttgatccgtaattcccgcctcatcggccaatgactcgaccgatctgtgaccacccggactcagaggagcgggctcgggagctggagctttgagatcgtctttcagctcagcccatgaaacgattaagaattacctcagcatcagcgaaatccttcaaccactcatcaacttgttctttctctctctccagaaccccgcctagattagctacgcatttgctcgcgcctgagataggtaaatgaattgggcattgacctcatcaaggagcgacactttgtgctcggcagcttttaacttggcggtgaaggcttccgaaacctcccacctcgtcgtctgaatggcccgagtcacctcgctatcacgaagtcctctctcctcagacaacatccccctgagaaggacaatctcagaatccgccttgagattctgctcggccatattaatggcgttttctttgtttacgaaggccatccgctcctaaaccctccctctccaaattcgccgcggcagctttggaaagcgcttcattcttctcccgctcggcggcttgaatccgagactccgcctcagctaacttgccaaccgcctccatattactctgcatagccaaatcatatgaatgtaccatccggttcatcaaagcaacggcctgaaaaaggaaaagttagatttacaatgtcgaaactaaaggcgaattatgagtaatgaagcatatacccgtaaaaagttagatgtcgtctcggcatacgtccgagattccaggagagtatctggaggaggaagcaaggagccaacacatcccccgagcagattggccgaggcaatgcgatcttcgaagatcgggagtattttctccgcctcggagccggatgtcttctttttcttcttcttcttctttgatgattcatcgtcaacccgaacgcgtttacccgccgctttggcacttgcaggtaacgccacaaccgcctcgggcgcagtaacagacggctcagttccctgagcctcagcgggcgccgcgtcaaccggcgcggcagtatcgggaataatgttcccatctcgggacgcatcaggagcagcccgcggcaagatcaaccccgcatcaaccggcgcggcagcatcgggaataacattcccatcttgggtcgcctcaggatcggcccgcggcgagatcaatcccgcattaacaaggcgcctctcctccgccaatcgcctctccttgtcctctttcttcttggcatagacctcccgcaaagtaagtttcgtcgattgcttgtccacgaaaaattgactccgaactagtgggacaagaaacaccgtgaagaagacgaagcgcacgctcaactcgctcccgagaaaaatgtttcagccaatcgcaccttggagccgacaacgcgtgaaaagccgaaagaaaatcgtctggaatcggctcgagaaacttgagagtgcgttctgcaaaaggaaaactgcaattagagaacgaaattaacatcacctcgggtactaataaatttctaactacaactacccaaaattccccatctcgtcagaacagtcccgaggagatcttcatgaatagcatcttcaatggctacaaagaagaagtgatcggtatatggctcgtctttgctcgggaacccatcgataattttctttcccttagcgggggaaatgtaataccggtccacttcggattttggcacccgccggatctcgagaaaatttctcagatgagctagcgttatctccgtttctgactcgtaactccgaatcaaaatcccgagcaagtgcctcaaagattgcatcatgatctgggaaagggcgatctgattagcctcgggatcggtaaccacaagaagcaaccatagaagaaccctcgtacaaagtatagaaacctgcagggggattgtcggctcgctcgtcagggctcggaacacgtagggttacagcgctaagactaaatcgagccctaaggtccgagagagaccgctcggtgcacaatgacgaaccaggaggatatggcattacgacctttttattcctcttccttttcttcttctcagccttttcgaaagccttatgctcgttaagacgcaagatatcttctgtctcgttcgggccgaagtaaagaaaatcctcgatcttaaccgtcggcatgaagggctttgacgcatcttgccaattggatgtcccggcttcgtcagccatcggagcaaagaacctacgaacgagaggcggctcgggatcgtcgggtaaatccaattcccgagcgatatcggcattggtatcttcccgagccgtgaagggagtcgtctgctcgggggaattcgaagaagaaacagtatcttcagaggacgtccaaactgatctccgtttgtatatcgggggaagatcatctggatgactcgaatcgctagaatcgacaaaagaagcgctcggggtcgacggagattgtgaagaactcattctcggctcgggacgttagacgagaagggaaataaccggaaaacaagaatttctatcccggaaaaatcaaaaataataagaagaacgacggagcttcgccggaaaagaaaaaacgatagaaatttcaagatcagagagaaggaagcaaaccttgtttattttcttcgaaaacttcaagtgaactcccgttggagtggctcgccatatatatagaatttttggaggcgcgtcgggtccgcattaaacaattgaaatgcattcaagcgcgtgggctcggaagaagaaaaagatccgcgtgatcctcgggaataagcgagaaacgtttccacttctttaaaaataaaatcggcggcacgcaacggaagtttgaccgtccgggaagatgaagcgacaactaagtctaaagagataaagagtcggctcgagaacctatctatgaagcttatcgtctcactgccaagtcaatgagctgggggacaaactgttggggtcggattccacctaataaaccgagccgaccatgtttaacgccttggcgaccttgtaaagaaccatcccgagccaagcccaaaaaacctcagggattatgtcgtggaaatgtcccgaggcgaccccaaaaacgcctcggaacatcaccacaaaggattccccgacctgatcttgaagcgcctcggacagcaatctggagaattaccccgaggcggaccttaagatgcctcaggagcgcatcattcgattaacgaagtccgagccactcaaccacaacctgagagccaactcaacccggctcggaggaacatcggatcgggacagaaccttcaagaaatgacttaaccaatatgagatcaaacataccatttgcgaaaaacacggaagagattagaaaatctccgaggatatcaccaaatatagggatgggcagaatcttcggaagataaagataaatctcctttgccagctctgagataaggagaaatcttccgagaatatcgcgagaagcgatctattaaaaccctatataaagaacttctgagaaaaggagagaggctctcaacttaaagctatcaaaaacgctctgactttgaaagcaaaaacacttattttcatattcaaaaacacttgtacgatcaaattcttactatttcaatagtacaaccaagaacaccgtttacggtaatcaacaattctgttgttctttgagaatctcacaaagactcgttctttgaagaaacccttaaaacaatttctattgtgcgagttttgactctcacaacctttggatgatgaagaagctgaagcagaggaaggcttgcagatactctcactaggcactatgtcagaaaactcgaggggtaaatccatgaagatgcgtggatacattaggagcacaagcgtggtaatactgatagattttggggccacgagttgcttcattcacgaaggcatagtgaaacacaaaggttggcgagtcacagaaaccagaggctttggagtaaaggttggtggaggtagagtaataagaggaagcggtaaatgtgcagacatagcactggaagttcaaggcatcgaatttatagaggatttcttgctttttgatttgggggatttagatgtggtgttgggattttcttggctggccaggttaggagacacaagagcaaaatggggacaactcaaactaagctggcagattggtaacacatgggttacccttcatggtgatcccgaattatgcagagaacaggtctctctgagagccatggaaagggtgattaaatacactggagcagcttacttgctggagttatctactttatttgatcatatgagccgcaagataaaaaggcaattgtgcaagacattaagagagtcttggataattagggatcagtgtttcagatgctaaaggggcttcctccttcccgtaacatggaacatgcgatcactttgcaggatggtacctcatcgattaatctgcgtccttataggcactcttttggacagaaaaacgagattgaaaagttggtcagagagatgctggactctcagattatacgtccgagtataatccaatactcaagcccagtggcggatccaggatatgattctatataaggcacagttaaaaaaaaatcaataaaaagacattagtaaagcttgaacttgggttaatgtggggcaccattaagtaaaaaaccactacaccaagtacatttttaactacatagtgcaaacttatataatatttattgaattcagtatagggcacatgccccacccaagaccaacgtggatccgtcccagctctagccctatcctactggtcaagaagagagatgggggctggagattctgcgttgattatagagcgctcaacaaagctactattctggataggtatctcattcctgttatcgaggagctactagatgagctcaaaggagttgcgatgttctccaagctggatttaaagtcaggatattttcaaataagaatgaaggcggaggatgtcgagaagactacgtttaaaacccatcaaggccattacgaattcttagtaatgcccttcgggttgtctaatgcaccctcaacctttcagagcgtcatgaatgatcttttccgtccctacctcagaaaattcattttggtgttctttgacgacatcttagtctttagccccgacatgaagactcacgtgaagcacttggagacggtacttcagctgctgaaatttcataaattctacgtcaatgagaagaagtgtgtgttcggaagtaccaagatatcttatctaggacacatcatgtcttcacaaggagtggctacggatcaaaattactaagctggcctcaaccaaaatcagttacagaattgagcggatttctaggcttaacgggttactaccgcagatttgtaaaaaactatggccttattgcaagacctttgatagatctcttaagtagatggcttcttgtggaatgaggctgccactagttcatttcaggcattgaagaaggctgtcactcaactccctgtcttgattctaccagattttcagaagcagtttactgtggaaaccgatgcatctggtacaggaattggtgttgtgctctcccaggaaaagagaccaattgcatttctcagtcaaggtttttcaagccaagggaggattaaatcagtttacgaaagagagttgttggcaatagtaatggttgttaccaagtggaaacattacctagcgggaaaggagtttgttatcaagacagatcagcggagcttgaaacacctcctagatcaaaacgcagtctccacaatacagcaacgatgggcttcgaagttaatagggctgaagtataagattgaatacaagcctggtgtggacaacaaggtggctgacgcactgtccaggaaaccccagaccgaggtgttctcacagctaacattgcaagctactcacaccatcgacataacagctctaaaagaagcagtcaaggcagataaagaattgagtaagctgttgcaggatatagaacaaggctgtcagaaaaatggagattttactgtggaagatggtgtgccttacaggaaaggttgtcttgtaatacctgtagtaactcccttcattccaaaactactggaaacgttccacacaagcgctgttgggggccatgaaggagctctgaaaacgtttaaacgattgactaaggaggtgtgttggacatgcatgagaagtgatgttgttaagttcatcaagggttgccaagtatgtcaggagaacaagtattccacactctcttcagctggattattagctcctttgcctatcccgcaacagacttgggaagacatcagtttagacttggtggagggtttgtcagtctcaagagggttcaattcgattctcgtggtggtagacaggttgagcaaatatggtcactttatcgcattgaaacacccattcacagcaaaaacagtggcaaaggcatttatgagagaggtagtcaaactgcatgggtttccatcaacgatggtttctgatagagataagatattcttgagccatttctggacttagcttttcaagttacaaggtaccgctcttcacaagagctttgcttaccatccccaaacggatggccaaaccgaggtggacaacaggtgtttggaatcatatttgcgatgcttcacgggtagacgtccaactacttggaatcaatggttgccttgggcggaatactggtataatacatcctaccattctgctactaagaccacaccattcatggcagtctatggaagagagcctcctgcaatgatcacgtatggcgatgtccctactccaaatgctaatgttgaagagctgcttagagacagatatggtatcctaatggaattgagagaaaacttggtcctagcacagaacaggatgtgtaaagatgctaataaacacaggagagatgttgtgtttgaagttgacgagtgggtgtacttaaagctgaggccttatagacagaactcagtggttcacaggaagaatgagaagttagctccccgttactttggcccgtatcagataatcagtaaagtgggcaatgtggcttataagttgaaactccctgctcacagccacattgacccggtattccatgtcccccagctgaagctggccgtgcatgcagcctacagccctcaggagctacccaagatcatgacccctttgctggaatgggcggtgggtcctgagaagctacttgacatcagaaaagcagaatcaggaaacagtgcagaggttttagtgcaatggagtgggttatccgagctggaacctttgatcacacttgtgcaacagtttccaaagttcgatcttgaggacaagatcaatctcctgcgggggagcattgataggctcagggttgcattgggaaagatgaggaggaagatgagaagtggcggaagaaaggcaagag

SEQ ID NO: 33487 - DNA, 691 bp, Arabidopsis thaliana landsberg
aaaaccttggtaatgttgagatatatataagtgaccaatctagtgagcgggtggccatacataggtgtattagtgcttatgagttggtaagaaatatagtctcgagaaatctcttcttctcttctgcccttcttctcttcctagtctgcatgatttttatctcaacatgataatcatgtcgatagtttatgattagatagaccatttccattttttttaatacttctttcctaaattttttagatacgggaatttttaataaagagagaatatcacaaaaaccgcgtataataaggtaaaattttcaatcttattaatttttttttcttataacatctttattcacccaactgttatgatttttatggatatagatatccaaattatataagatttattaaaaaaatatctatgtgtttttatataagtcacataatttatgaacaatagtttttaaaactatataaaatatagtatataaatcttgaataaagatccatgtattttgattttcgttcatatcttcttttgtattttatatttatattctaattagtgttagttatgtataatatcgacattgtcggaacaaataattgtttctcaaggtaactcggatcagaacatcttaaaattttaaggcatttagtttcgtgtacatttctattgtattaaatcatcaaatacacac

SEQ ID NO: 33488 - DNA, 1099 bp, Arabidopsis thaliana landsberg
  unsure (1)..(1099): unsure at all n locations
acatctgtcgaagaagaaaaagagagatcaacatctataatttttacttattcgttttggactcttgacaaagggcaacggcgcattaacattaaaatttcatgtgtgtaattcgtgttcgaataaaagcaattaaaaatggacgggaaagtgttatcaaatataatattgtatgtttatagcgggaattgaaaaaaagaaaaacctaatcacaaagtgagactttttgtttaattatctaattatacatatatatagagggagagataattcatcttgtctggtcggaagagataatacactttatttaggttagtacacttttttttttttaatgaaatttttagaaaaatatggagatgtacatgcatgtaatgatgtaaatgtaaaaacaacacgtttaaatgaattaactaattacaaagagagacatgatatatccatagattcggattttcttagatccatggaaacatcatgcatggatcacatcacatggacttaatgttatcatgtggtaggtttgcgagactttgttttgcttgatttattcacaacgattggaagatatttgtaacatcagcaaggactcaccaccaaggagcttgagttggattaataaacaacaacaaaaagaacaccagtggtggttacttagagagattgaaacaataatagatccttatctttcactttttaatttccattattggtattaataagaaaaagaataccattattgatgtttgcattctttcatagaaaaggctatatatgattataggcttctagctacaaactttcttcctctcataatatcaggtaacaggttccctatctgattagccttcctttcttgtcgtcgatttccattctcctgtgtcataagaaaagatgcagattgatacatatgtcgacaactttataaattttcttaatactataatcgattaatgtaagtgtgtttggtattatgatatactccctctattccaagttatttgatgttttagttttttttttgttccaccgagattgatatttntgtaaaataaaattattaactttgtttgtagccaatagtgaaaagaaagaataa

SEQ ID NO: 33489 - DNA, 698 bp, Arabidopsis thaliana landsberg
catctgcaaatagatgaggctcgaaacatttagtgatatgacaaagtaggtcacataatttcaactataggcatatgagcagacccgtcaaaacacctaacagttagacgaagcagatcgagagaactaagcataaggaagaatgaagatatccacataattttactaagatgcaattgcaagtacacatgaccatgagattgaaattggacacataaatataaaatcatgataagatatatcctccgtatatgaagccaaaatcatttagtgtgctcatatagagcagacgccacaaaaacattgatcagaagtattttcgtcatgcgtaaaaatcagaagaagagggtgttgcctgtgcgaaaatcaaagacattatcttccgtgtagcaaaagcctccccttgcagtgtaacagaacctgatttacagtgataacccattagatggtatcagacacaaagaagagacataggataataaatgatgtcatgcttgaaacagggcacggtcatacccgctgtgtactagatgcatatggatctttgcaagagcataagcagcagcaggaagaagagattcgacctcttcatcactgacctgaaaggcagaacgatcctagataagcaaaagacaggtcctgatcgaagcaactttcatctagagactgactattctacaattgattctgtagagaac

SEQ ID NO: 33490 - DNA, 152 bp, Arabidopsis thaliana landsberg
  unsure (1)..(152): unsure at all n locations
ggggccagccaaagaccacaggaggcacaaccacaggacccgcgaacaaggaaacaccacacaggccgcaaggacaagccagcggcacaagacccaaaacccaaccagacacacgacaccaagncacagacgcccccaaaacaccaaccaag

SEQ ID NO: 33491 - DNA, 1553 bp, Arabidopsis thaliana landsberg
aataagaggttatggaggttaatataacaatcatcatccattcaaagacgggcgtagcctattaaaaaagtcttttgagcatacatttcagagcaattcgtcgatgcataaaaaacaactcaaaacatcgaacacgagctcggtaatccgacctctccattagaacttgaactacgaacggcttgatccctaactgggtacgtaggcaatccttcgtaaggatgcagctataccacttaataaaattaaagtttgcattctcaatacggaattcgctttaagatctgtaataaatcaactctcggcaccctggccaggtgttcgatgcgcgtctcacatggatgcagtggtgaaataatccacgccctattagaaacttaatttttctaatagggatagccgagaccagtattctcgcacttaagctctggttcggacagaaatataagccgaaccctgtatttcgcgatctgccgaacagatgctctacggggagtaagccgagcccagcatctggctccccaactaatatgctgagtccgcctcattttttatacagagcccagaactccctctttaaattatacataggcctactgggcataagccgagagacgtctctcgcccagtccacgccgaatacttttatttagaaagccgagctcagtctcgcacttaacatctaacccgaacttagacagaaaaaatcggctgtgacgttaggtgaaaaccagtccgcccgaaagccgagctcaaagcttgcagatggcttataatttagtcgatttaaaacctaatttcaagattgggaatccgatatggttaatacgtaatcaaccgacggaggttcacaaaaaaaaaaaaaacatgaacttgttcttaaggacaaacattttattcaaatataaaagtctgaaagataagagtggtcgacataagtcaaccgaccttcctagctcccagttcgtctgtagctttcctagctcccagctcgtatgcacttcgcctagctaacagctcgtctgcagcctttctagctcccagttcgtctgtagctttcctagctcgcagtccgtctagctaacagctcgtttgcagcctttctagctcccagttcgtctgtagctttcctagctagcagctcgtctgcacttcgcctaacagctcgtccacagcttgcctagctccctgttcgtctgtagctttcctacctcgtagttcgtctagctagcacctagtctgcacttttcctagctattgcccgcctaacagctcgtttacagcttggagttcttcagcatgtagcctagcagcttccctagctcacaacttgtcaacagctaacattttgagctttttctacaagacaagtcaacaatgtggagtgctccaaagaagtttacaaagactccaaaattccagatctcaacttgagcagcatcgcatgtctccctccttcgttaaaagttctgaagcagcacaaagtatcctttgctttaatcgtcatgaattctgatcgccaatggagcaacaaaacaactcggaaaattgcg

SEQ ID NO: 33492 - DNA, 837 bp, Arabidopsis thaliana landsberg
tttgattttggttaagaatttgctatcatatcattagtaggggtctcttatgaggaaaaacaaatattaagcaacatcattatagtttttctcatgtatcttgtgcgtaattatgtaaatgtcataattattaaaacatgaaattaggaagaacagaagtttggtgttagacaccaaccatttttatacaaacaaataataaaaatctcattatatcacctttgcatttcatcactcatcacattcacaatccttctctttttctcacatcaatatatatctctctttctctctcttcatttgatagatttgaagatttgagaggagagagaggaagaaaaaatgggagagatgaagagtatgcaaatgggtgtgattggagcattgtttctatcagttgcatcttctgtctccattgtcatttgcaacaaagctttgatgaccaatcttggtttcccttttggtaattactagtacttttcttctgttgctttgtgagaatatattttgtaagatctttatcaaaaacccgattattcgtcttaggattgatcgcatttgtgctatggttttgatacagcatcaacacttactagatgtgcattgatggtaacatattgcacacttcacgtggcatataaactaaacttctatagaataaaccaatagacatgagaactgtggttctctttggcctcctgaacggcatttccattggtcttctcaatctcagcctcggctttaattccatcggcttttatcaagtatatatctatgacatactttagatcattgaacacttatatgactcacccatttgatgtttgaccattacta

SEQ ID NO: 33493 - DNA, 3241 bp, Arabidopsis thaliana landsberg
  unsure (1)..(3241): unsure at all n locations
taaattagggattaaaatcttttttaagctatttgggttcaggcaaaaagtgaaccaaattaattgtgggttagaagcgtcatatgtaatctgcgttaagcacacgaacaaacaactctcggtcgagcctaagagagtttgggtctggtaaagctccgttgaagtaaggatagagcggaatctcttggatactaaagagaaagttggatagtacaatcttaagatgcgggccaaattaaacagtttaaaaccaaatcatcaggaagcataagaaaattcatccgtcttcttttaaaaggtggctcttctccgttcattgctgtggaagtgcacccgagagcgctagctgtgtcggctttgctttttttttctctctctcttttagggtttaagtagcttttcacgtaagaaactctttattgtgtgttttgcgcttaggctttttatgtctcacttgaaatctttatatagcgaattatcattcctaatctaatgaggaaatctaacttctttttctattttactcctttatgttaacttacctttttcataagataaaaagaaggatactaattaacaaaactgaaaacaaacaaaaaaaatgcaaagtgttatccgttagtgtggtttgttattggaagtttgaaccatgtcccaaaataacaaatttttgcatgaagattttggaggttcactcattagtcatgactcaaccattcacagtgttataaaaaacacttaaaaagagttgttacgtgggttctcaaggatctttttcttagattcataatcctgcgaaaaacggttttgcagaaaacatacgattaagagtaaaagccaagcgaatcccaccgtgtgcaagtctcttctctacaacgggtaaccgagaaaggaaatactcatctgcagagaaagcagaagatcaagtcatgtccatgattaaagaaaacaaaaagccacgatctggtttcatagagtaagtatacctcctaaagtagtccccggagtagcgttcctgtaannnnnnnnnnnnnnnnnnnnnnnnnnnnnngaagcatacctttaacacatcaaagaacaaagagaatcaacaatgatatggtaacgaaaactaagttttctctgctattaagcaacttaacnnnnnnnnnnnnnnnnnnnnnnnnntttggacaggccttttggtgaaagtgacatgacttccacgacggaacatcattcgaccagccgttctatattaagacagacgtaacaacaaacactcaatgtaagttgtgtttatcttggatacggctataacttgctgaagctgattagagaaggcaagattgtaccttgagtttggcttgaagagcttgaatcatgtgtggaaggcttgaattgtagtatgtttctagagcagagtcaattatcatgttgtcccagaccttcaagttaagatcgttccacttccgtgtcaggaaagatactttttagcatcaatatgactaaaaaacaaagcacttacatggtgcaaatttgatttgttatggtaccagttgactattattgtgttaccacctagatctccaagaaannnnnnnnnnnnnnnnnnnnnnnatcataatccacataaagattagccatactcttgtgttgctactatacactaatcaaacctccagagtccagagtagatagagtagtagcctcaaatgcatataactctgacagcattcgctcgtaatattatgattcgactgaatttgcaaaaaggactaacctgatgaacatctcccatataatgtgataagaacatgagagcctctgttaagttatctgcaaagcaaaaaaaaacaccaagtcacactattatgatgcttcatataactcacacacaaaagtatcagaattcactagaactctaactcacagtggactatactctgtgagttttcagaagtagacattagttggttagtgtaattgaagattgcccctgtcacacaccagtctttaggacagtccccttcacagaaagacaacaaagcacatatacttttataccaacgtcaaacagaaacatgagtgaaatttgaaagaaaagatcaataaaagacccacgagagtactcatagttgcatttgtaatcaggcgtatcagcaaaatgcaaagcactagtccatcgccattgcgggagctttttgatttcatcaggccatgagcaaacagctgctagctcaccatttgcagattcaggcagaagtttcttcacagaaactacagtatcttcctcaaaataactctaaagattgaaaaatggtattaatcaagatatcacacaaaggtccaaagaagagtttttagtagattcaatgaaacagtaaaacaaaacaaaacaaaaagcctcccttttttcctctcagtcttaacaatagagtattaaattgatattcaagtatcttacaacactcactcaagtacgaaatctctcagatctatactcacatagatcatttactaagataaatttagagctacgctttagaaagtaagttaaggaaattttaacctgagctattttgcagacagcgtaatgaccagcgtctccccaacagagagctccattaacgagctgtgtaagcacgagtatactcacaatccacattctcaacgaccaacccattctgagaaaagcttctacttttttctttccaaagttaaaaacagagaagcagtttttcaacaccgagtaagcaaaaaaggtttttttagtgtataaacaatgagaacctgattcaagtgcagagaagaaagaagaagccaaagagccttgaatttttcctttttctactccatggagtatagtcttatacttccattgatggtactatgtattcattatggtggaatagcaacaaacaaaaaaataatagtttttattttgtcaccacgttcataaatatttgtttactcaaattgtatatagttactcttgagtcatttaaagtgagtctcgacccaagcaagtaaccggaagttttccagctgtttaacatttctgaaaaactgtgtttattaataaagatatcaagatatatggttgttgggtgatatcaacttatcaagtaagcaagcatagcttctccaaaaactaagcattacatgagctaaaggagctaacagagttgtgcaaaaaaaaaaaaaaaaaaaaaaaggagctaacagagtggtcttgggaatatttatctcagtttcatga

SEQ ID NO: 33494 - DNA, 207 bp, Arabidopsis thaliana landsberg
taacagcctcccacattacccccattatcatctccattagccgagcttgatactcttggtgatactgaaaggtatccacctcccactccagaggatatacctaagatagcacaggaaacaatggatgcttatgagaaagtgagattgggggtaacgaaattaatgaggaaattcacggtgaaagcatgcggatattgttcgaagtgc

SEQ ID NO: 33495 - DNA, 6528 bp, Arabidopsis thaliana landsberg
ctgacatcttacaaaggccttgggagaatgaagtttaaagagatgagagatctcattggtgtcaaagaagtgttgaatgtgacttcaagctaaaggggataatgttggattaagtttgaagaagataacttaagaataagttattattgagaaaagagataaaagctaggatatttagagttatctaaatatttgtttaggagttatctaaaacaaataggttttggttttaagtttctcatataaggagttatggagatgtgatagtccttatgagctttatggagagatttgagggaaccaaaagagagttttagatttgagttgattttctttaacttgtgtgttcttaacaaatctagtaaaacaaagtaggcggcttaagtttacagtgagagaaactcatatataaaagttgttgtttcaatttcccataaaaataagaggagtgatcagagactagaacgtatttctccttgtgcgtttaaaccctttgtttcttagttcgtcgagagatatgaagattgctacgacatcaagtgctttcgatttgttgcccaaggatcagaaatacaaaaccaaacgtgttagttacaacgatttctcagacctctccttcttacccgtagtaaaccctaagatcaagagacaaaagaagactctggaagaagaagtggactcaacttctaaggtaatatcggtcttcttaaaccctagtttccaaccgtttgttttttaatttagggtgaactatttgcttacgttttttccttttattaaatctttcaggcgaaatctagcaggacgagtcttaccaaatcagttacaacaacaacaaagttgacaaaaccggaggaaacaatcacggcttcttcgaaagagtgtcttcaagaaacaaagacgaataagaagcctgatttaagagacttgatcgccaaggcacaagaaaaaatccaaaacaaaagggagattaatcatcgaagagaatacatcacaagacagaggatagctgcacgcttagctctaaaccagatggtagcaaccgttagctttgacgatcatctcaactatcatagagaaatggaacagcgtggctacacatttattcaagatcaagttgataacttgaacatgttcagtttatggtcaagaagcgattacaatggtatcactaactctgtcttggaaacgagcaatacgacaatgcggtctgatgaagattcatcgagaaagaagcagcagatcatcaaaaaaaagagcaacacattccctacagatgtcaaagaacattgaatctgctgagagcagtaatcagagtcaaagctcagaaagtgtgatcatttagatatagagtaatactgtatgtccgaatacagttttggtataatttgtgtgattgtgctcaatgcaatctacatataagcatattagataaaacatgtttgatatcaatcttttaacacgtaggtttgagaataattctgtctatactatttgcaaattttcttgctttcttgttttcatatcataatcaataggaagagttgcaaggtttttgattcaatcccattccactgatgcttctgtgtcttactgataagttcatgtaagcgtggtttagctacattactggaatatcaaagttccagcaagctaagttgttattattgtctttggagttgctcttatttgtatcagactcttctttagtaattttacagtaacttcaatctaagacaaaaacctgtatgagaatctttccattgatgttaaattcaatctagatgcgtttactatgttctttgcaaccataagaacaccaaagtaacactgctaatatagtacaacacaatgaataacttgatgaatataagggcaagtctctgcaacatcttttgttagattctcatgaaaaaaaggttttagacgttttagttttatttctcattcccaatttattccttaactaatctagacactaggaatctattgaaatttcttcaggtttatggttttaacttctctgagaacatcaaagggcctacaagttctgcatctttcattcacttgcacatgtctctgtatctacgtatttctgtaaaagattcataatagtattcacatgatcacgtctttaagcttggtttgtcataattgaatcacgtgaatattggttggtctctaagctcatgtattcctttcattgaatagtatcaatcactagtactatcaatcattgaatagtatcaatcactattactaacaaccatttactgtgtcttttttatcattgatattgtagcatcattgtgaatgttgcaacacccgtgcaggttgagaagtctcccataaatgctgagtactcattcgggctagggaactgcagagcataagaaggaacttagaaaatggaaacaaagaactctctttttaagactctactttgattaatatgagaatgtagttattgattatttgttacttaacagagggcattttagtcatttatatatatatgagaatgtgaatgattcatccaaatgatcaaacaaacaaagctccatctaaatgatgcatttagatgaattagcaaatgattagcaaatgatcaaacaaacatcattaagatgaatcattcaaatggattatttggatggatcatttggatgcaaattccaaatgatcaaacaaatagggttatagagtacatacagaactttaggtatataaatcatcggtttcgtaacttattttagaacttgtttaaaaatatcaatcatgacaatgaaagaacatgtaacttattatatagattaggtttttataatgtttagtttgtaaatttccgaattgaagtgtttggttatgtttttatatctaatatcgatcaaattaaagtatcaatgtctaagaaaaaatataaacataccaaactttaaaatttcgaaatgcaaaaatcgagaggttgtaatacgtcggtagttggttgcaaagtgcgactgttttcttttgtcgtcgcaaataagttcaaagagcgactgttttgtgactttttggagaacttcagaagacaaacttttgaaatccacatagtttgatccaatctattgataaaaattactgaaaaacacctattttagtgatatagagtacatacagaactttaggtatataaattatcggttttgtaacttattttagaacttgtttaaaaatatcaatcatgacaatgaaagaacatggaacttattatatagattaggtttttttgaatgtttagtttgtaaattttcgcatttgaagtgtttggttatgtttttatatctaatatcgatcaaattaaagtatccacgtctaagaaaacatataaacacaccaaactttaaaatttcgaaatgcaaaaatcgagagttggtaatacgtaggtaattgattgcaaagtgcgactattttcttttgtcgtcgcaaataagttgcaaagagcgactggtatgtgacgttttggaaaatacacttttgaaatccacatagattgatccattctattgataaaaattactgaaaagcactcattttagtgatatagagtacatacagaactttaggtatataaatcatcggtttcgtaacttatttttgaacatgtttaaaaatatcaatctcgacaatgaaagaacatggaacttattatatagattaggtttttataatgtttggtttgtaaatttccgaattgaagtgtttagttatatttttatatctaatatcgatcaaattaaagtattcacgtctaagaaaacatataaacacaccaaactttaaaattttgaaacgcaaaaatcgagagttagtaatacgtaggtaattggttgcaaagtgcgactgttttcttttttggtcgcaaataagttgcaaagagcgactgctttgtgactttttggaaaacttcagaagtcaaacttttgaaatacacatagtttgactccaatctattgataaaaattactgaaaagcacccactttagtgatatagagtacatacagaactttaggtatataaatcatctgtttcgtaacttattttagaacttgtttaaaaatatcaatcatgacaatgacacaacatggaacttattatatagattaggtttttttgaatttttagtttgtaaatttccgaattgaagggtttggttatgtttttatatctaatatcgatcaaattaaagtatcaatatgtaagaaataatataaacacaccaaactttaaaatttcgaaacgcaaaaatcgagagttggtacaacgtaggtaattggttgcaaagtgcgacagttttcttttgtcgtcgcaaataagttgcaaagagcgactggtatgtgacgttttggaaaacttcaaaacacaaacttttgaaatccccatagtttgatccaatctattgataaaaattactgaaaagcacccacttaagtgatatagagtacatacagaactttaggtatataaatcatcggtttcgtaacttattttagaacttgtttaagcatatcaatcatgacaatgaaagaacatggaacttattatatagattagtttttttttgaatgtttagtttgtaaatttccgaattgaagtgtttggttatgtttttatatctaatatctatcaaattaaagtatcattgtctaagaaaacatataaacagaccaaactttaaaatttcgaaacgcaaaaatcgagagttggtacgacgtaggtaatcggttgcaaagtgcgactgttttcttttgtcgtcacaaataagttgcaaagagcggctggtttgtgacgttttgtaaaactttagaacacaaacttttgaaatacacatagtttgttccgatctattgatagaacttattgaaaaacacccattatagtgatatagagtacatatagaactttatgtatataaatcatcggtttcgtaacttattttagaacttgtttaaaaatatcagccatgacaatgaaagaacatggaacttatgatatagatttggtttttttgaatgtttagtttgtaaatttccgaattgaagtgtttcgttatgtttttatatctaatatcaatcaaattaaagtatcaacgtctaagaaaacatataagcacaccaaaactttaaaatttctaaatgcaaaaatcgagagttggtaatacgtaggtaattggtggcaaagtgcgactgtttttgttttcgtcgcaaataagttgcaaagagcgactgttatgttaagttttggaaaacttcagaagacaaacttttgaaatccaaatagtttgatccaatctattgataaaattactaaaaagcatccattttacaaatatagagtacatacagaacgttaggtatataaatcatcggtttcgtaacttattttagatcttgttcaaaatttttaatcatcacaatgaaagaacatgaaacttatgatatagattaggttttttgaatatttagtttgtaaatttcagaattggagtgttggttatgtttttatatttaatatcgatcaaattaaagtatcaacgtctaagaaaacatataaacagaccaaactttaacatttcgaaacgcaaaaatcgagagttggtaatacgtaggtaattggttgcaaagtgcgactgttttcttttttcgtcgcaaataagttgcaaagagcgactgttctgtgacgttttggaaaacttgagaggacaaacttttgaaatacacataatagtttgatccaatctattgataaaaattattgaaaagcacccagtttagtgatatagagtacatacaaaactttaggtatataaatcattggtttcataacttattttaaaattattttgaaaatatcaatcatgacaatgaaagaacctggaacttatcatatagattaggtttttttgaatgtttagttttaaaaattcagaattgaagtgtttggttatgtttttatatctaatatcgatcaaattaaaatatcaatgtataagaaaacatataaacagaccaaaacaataaaaaattaaaatgcaaaattcgagagttggtaatacgtaggtaattggttgcaaagtccaactgttttttttttcctcgcaaatcagatgcaaagagcgactgttttgtgacgttttggaaaacttcagaagacaaacttttgaaatacacatagtttgatccaatctattgataaaacttattgaaaaccacccattatagtgatatagagtacatatagaactttatgtatataaatcatcggtttcgtaacttattttagaacttgtttaaaaatatcaaccatgacaatgaaagaacatggaacttatgatatagatttggtttttttgaatgtttagtttgtaaatttccgaattgaagtgtttcgttatgtttttatatctaatatcaatcaaattaaagtatcaacgtctaagaaaacatataagcacaccaaactttaaatgtctaatgcaaaaatgagag

SEQ ID NO: 33496 - DNA, 1098 bp, Arabidopsis thaliana landsberg
  unsure (1)..(1098): unsure at all n locations
gtatctttactcgacacctgtcttctcaattcagcacaaccacaatactctacgtcgtacacatgtacgcctttaaaggttgcaaatgtagtccttactccttcccctgcattttctcaacaaagagacattcaaacacaaaatttgatcgataaaagggactattcatagactctttgctttaataaaaccttagaagaagatgttctctccagagaaacaaagcacaaagaatgtgtaaaagatccaaaaagacttaagaacataatgtgtttgtttaccgtgagtgaccaagagcaagttctctgaaggatacttatcagcaagagtctttatcaaactaagaaatctatctgtgcagccttccacagtctcttcccattgtggcatctaaacaatgccaacaagagaatcaagtttaaactcaaattgcttcgaagattagaagataaacagaaacagaacaagacaagtctagatactacaaaattccaaaacctcacctctttataaacaggatctacactatgatcaaccattccatcaggaaaaatcgcttcaagttctgaaatcatgaaatcgaatttcccatctttgggagcaatctcaggcttaatagcaattgaattcagcatctcactcaaaccaaattcaatggaaacctgagaagtatacaagaatcaaccttaaatgattaatatcacacattcaacaacaattcagctcaacattcttaaactagaattcaatcaacagagattcacagatacacatggaacaccaaaagatttcaaactcgaaggcgattacagcgattatctgaccttaagcttagatttatcgattgaagtgacgtctttggacgaagtagcgttaggatcgaaatcgacggcggagagagcagcgatgacttcggaagcagtctgtatacatcggataaaaggagagacgaagacacggtgaatcggaaattggatctgagatcgaatccgttgaccagtttgaaacgcacgaaccataccgtcttgaacgagaggaggatcccaaggtctcgcagctgtatcaagccagagtggatcgattntgtcaatgcgatca

SEQ ID NO: 33497 - DNA, 1091 bp, Arabidopsis thaliana landsberg
  unsure (1)..(1091): unsure at all n locations
accttaaaatcattgcctttggtgtaagcaagtgtacccactctttagttccatttcaagacacacctacttaatactaattgtgtttcagttttgtttaacttctacaatcagcatatttacaaaaaacacaatttctcacatttattccgtgaaagaagggttaaaagaagccgtacaagatttatatacacaagccaaagtagttttaaataaacgtgaaattgtagtcatcttctttttgggggttaagtcatgggcaaacgaacgagttttattcaaaggcatgtgaagttacgaaaaaaagagaagtcataaatacatccaaaaacaaccacctcactgtttatgatgtttcacgttctacaacacttttgatccatgattattttttgtaggttttacggctccaaagtccaaacactcttcttcttcattatttctttctttttttcttctcccaccataattatatcaaatcttgaatgctgagacaatataagaggacaaaaaaatgcattttaattggggtatactatgattttcatacaaagaaaaaagtaacaaatagtttatttcacaaaggaaactatttgtatccgaaataataatctaaaacataataatggtggagtgtaatatttgaactaaaccaagattgagctaacctggacatgagatggggaaagagagcatttacaaaatggtccaaaacggctgaaatagaatcatgaaggatgatggttcgaaccaatctttaccatcattgcgaatctttagaggtcgatggcctattctactatagcccctgtcattagtcctacacaaatgacaatattaccctcctgtgtactacttccttcgtaatgacgtaaatacccttactctagttcttttaaccgaatcttctgttgagaggacgaatacgatgaagagccaaaagaagtgctaggggactctttngaaattacgaaaatatccctgaagatcaatttcgaaagaagagcaagcaagacaactcctttttttttcttctctctctctaactgatgtgtctgtaataaatgatcatgattcacatgacgcaatat

SEQ ID NO: 33498 - DNA, 485 bp, Arabidopsis thaliana landsberg
ctaacgaaaagatacatcatcaatgtataaagaacaattgcttaaaaagaactgacaagtagcccaagaagtacaaacttgttctaaagtttagatccagtgctacgcaccacacttgaaccactctcatattcaccaatcgtatggataagaacctctcttaaaagactctctctcatcttaccatacacgtgtccatcaccacctctctgaacaatctcctcacctaacttaatggcggcttcaaccgtctccgtcgcactaccatacgccgaatcaacaatccccatcttaacacccacatccgccgtcactttcgccgccgtcaacatcacatcccttctggccgccggagaaccaatcttacccctaataacagccataaaccacgccggaactatcaactcaatatccaattcactcatatacaaaaaacctctatcacgacgcatcaatacataatcatgactcatcgctaaaataca

SEQ ID NO: 33499 - DNA, 804 bp, Arabidopsis thaliana landsberg
gctaaaacattggctcataacacatagtttctttttaatcacaggatgtgaatttgtggcctacgaaaacaaaaatttatgaattgcaaaaaaaagaaaagacgagtgattttaacaaatgatacctgtgatcatcagtgttcctattgtgtttatgaagttcccaacagtcatcactaccagaagaatgccacaaaccatcatttgaaaagcgacaacatttattttactttacttcctattttttaagtctctgttctctattgaattaggatttgtcggcctataccgggaataaacccgttgaaaacaatgccaaaagagtgaaaataatatacctgccattcattaacaactccagttactgtttttcttagcaacagcagtccaacgtatgcttcaaacacctgagttttagcaacacattgttaagcccaataagttaaacagaaaacctcaagactattgtggaaaaagcaaagaggttctactatacaagccatctaagagatctcattacatcagataatctattaaatatattgactttcaaatatatacatagaaatgttcacagttgttaaaaagaaggaagacattaaacgctttaaaatgttttagcataaacttgattcatctatgtacagaaaaaagctcacctgtaaaatgaacagtataggacataacagccatagttgtccatcaactccagccgtttctccccaaacaacatccattctcttagcctaaaacataaaccacaacgcaaactttacaaaaacaaatagaattttgaactgaaga

SEQ ID NO: 33500 - DNA, 963 bp, Arabidopsis thaliana landsberg
  unsure (1)..(963): unsure at all n locations
aattagtgttatatcatggacccaaaccgactcttaaaccaacaagaaacaaatatcttacttatcgcaaaactccttaattttttcatctaattatccataacaaatttattattttatactatcaaacacaacatatgtaatgttaagtaacatgaaaaccgagctttaacaagatacagttctatttctctttaccatttttagaattttggtagctttcactgtgactacaaacgttaaaaactaatataagtggaaaagattaaggaaactaggaaagagacaaaaagtcaagcgacttcaaaagaattgaactagaacataatctacatataaataatgtgaaaaccagcacaaaatatcaatgaacgtcagtttcggtctataaaatttatccacaaagttgctttcaatttctcgacattgacccactcttttgaattttcacaacatgacaactcattttcagacacataagccaactcaagtatagataaatactcaaatagtcatatccttacatataattagtgtctttttgtatgcatgtgcgtatataagatcaaccagtcatattaattgactatacctaaaaatgaaaatctctgctcttggtcgcggtggctcctcccctttgtccgcctgtttccatccttccgccaccgccatcaacgaagatctaccgtcggctcttccatccccatcaaatccatcgtatatctccacctccggcgacgctaccacaacttgtcagtaccacactaacgttggtgttttctttctttcatggtctcgatccttcctccgacgctctctccaccttcatttctactcatgcaactccacanattgctatctacactctctagattgttaccgtcactccattcccttcgccttccggctcgaaatcaaacccttgacattctggagaaanaatggatcaaagaagttatctcg

SEQ ID NO: 33501 - DNA, 1731 bp, Arabidopsis thaliana landsberg
gtgcttgtcgacgggcataactgaattctaaaagacaatgagtataatgtcctgtgtgattcccaagtatttatgtcgtttaccaaagcattctgtttaagataatttcttgttgatttcagctctccgaaggtgtcaagaagtatgttggtgtcaaacatgagttggaagctggattttcatggtctctagttcatagggaatgcacaaattcagatttatccttaagtggacaccctcatattgtggaaaacaattccaagcttgcattagctttgacagtcatggatgaatgctttctgcccattattgacaggaggagtggggtgaatatagtacaaaatgtcctttacaattgtgggtaagcttttcagcactgcaaaaaattttgtctgcgtaattttactacagtgattttctttggtatttctttgtgttggttcgtttgcttatacattgcttttcgtaggtccaacttcaatcggctgaactttggtggattctatactgctcttcttgaaagaggcgacgaaatagttgcttcagcatctattaggttattcccctccttataatcctttgttttagtttcaatcctatatgtgagatggcaacaatatggcagagataaagctagtgtcaagatatatttgtctgtgcatgcttatcttatacacttgatttcgtttactttgatgcatttttttcctgtttaagggatctactgcttagtgatgatatttgcttttctctttagatttcatggtaaccgtctagctgagatgccgttcattggaactcggcatgtctacagacaccaagggatgtgccggcggcttttcagcgtagttgaatcagtaagttcaaccgctgatgtagcgaagttaactgactctttctgtataactctgctaatttgttttctggttctctgtgtcttttgatgtgaaggctcttcaacatctcaaagtcaaattactaattatccctgcaactgccgactttagccatgtttggatatccaaattcgggtttcgacaagtcgaggattctgtgaagaaagaaatgcggtccatgaatctgctaaccttccctggcattgatgtgttacagaaagagctcgtagcaccacgacataccgagtctgctgtcgacacaggttttactttaagaacaatttagcttcttcttcttcttcttcttcttctttttcgttcctatcgatattcttactttggctccattgtttgtcaagaagactgtgacccatgcaatgaaggcactaattcagcgatcaagactaatgaagtttccgtcttggagaccacatcaccgtcaagagataaactggtatcagattatttggtcgaacaccaaccatatgaggatgtaagttctgcttcccgggatagtctagtccacgatggttaccccaaaatgctagagactgcgttcaaaacttcaaccatggcgagatcatcagatatggagaagcacatggactgcaaaacttcctatagtcgatttgatggagaagatgaggaagatagtttaattgagtctcctcctcaacgaaacagcgacatggctttcttagatcacatcatccgctctccggtagacactggtgcaacggaaaacagagatgtctatggttcaggggaccccgattctcccgaaacgcaatgaaacagagttaaaatgttgataagtctttttagcattttggtg

SEQ ID NO: 33502 - DNA, 5513 bp, Arabidopsis thaliana landsberg
aagctgataacaccgatgaaaatccaaactataaggctacttggtcacagagtcgattactcggttaagcagagccaacttaatatttgaccaagacaaaatttgatttaccttttgactcttctctctgaggaaggatggagaaggaactaaacagtcctgatagttgctctaaagcagattctgagggagatctcttgaatgactaagacaaccggaaaataaaaccagctctccgatttagatcatttacaagaaactagtaacaattcatgaaacgaaatcagtaaaccgattaccgatgattctgtatttccactgccgtatttgctctgtatctgcaaacacaataaagaagatttaaggttcacaatggagaagactcaaagtaagaaacatatttcaatgtttttgtttaaagttcaagaaaccttgagtgcaaaatcgttgacgtctagaagaagtaacttggcatcgaagaaatgagctagggctttggctagcatttgttggtaaagctctgcaaggaaacataataaaattcaaaacacaaacgaattggttcaagatcaagatcgaatcatcggaatctaaccggcagggccggacaaaagaatggctcggctagctggagacaagtttctcgtatattttgaagcatcgaagtgcttcaaatggacataagctgcacttgttagaagcaatcgtgtttgttcactgcacaatcccaaaaaggtaaaaacattgatgaacaagactacatgtactatgtatcgatcggtgtgggtatgtttcagtgatcaaaagaataaatccaaacattttgggataaagatcaaagaatctaaatgatagtgacacgtgtcggaactagaaaaacaatgaaatcattatcggcgtatgtaaacagaaattcacatgcttcaccattattatcactccaacaaatatcttatccgtttttgtaaaactacatttaataactaaaacaaacaaaaaaaactatccaaaaaatatgtgatgactcatattatttccttatcatttctatattctcacttgtattatcgtcttgaaactcgtaaactataaattaaagtgacgatcaaaacatatgtatattccatcacaagaattgttttaagatcctaattagaattgattgatcttaaagtctagttgaatgcatgcgaattatgggaactttcgatgttatatgttttaaattacctgagataataaggaaactcatcgaaagtaattttactctctctgccgtcaacaacttgacggagtatctccttctccatcttatccgccgtgacggcgttatttgacgacgagttcccgccggcccattttccgacggcttgaccagaagccaagcctaaacccacacctactccaactccgacgccaagcgccgacaacaacatctgtttgctgtccatttgatcttccaaaagcaaaatatgtattaaaaaaaaaacaaaaaaaaacaaagtattagtattattaatatatagatcaagatctaaaacgttgttactaatcgtaacaacaataaaaattgaatgataacaaacaaaaggtatcgatttatctataattctatattgactatttaacctaacttattagagaatccaaccgaaactttgaaagtattttcaaagatttaacaagagaaatatataccttgtttggtaagatatctctctcaaatcttttcttctgcggtttctttttacttgttttggtcctaacgatacaatagtttgaaaaatcacagagagtagtgagaaccgtgaaaaccagatctatttacacgtcatcaccggtgttgaaaatgaggcaaagacggcggcggatatgagagatttagggttcttttaatgaagatttttttgatcgcttctctgcttttttatttcatgggggtaatatgtttgcacatgaaaactgatgagtcattaccgagactttgcgtacgtgttgtcatataaacggctactaggttggtttttcggcagttttttaattctgatgttgccgcttctttactctaatgccctttagttttttagtttctttaatttattccttgatagtttcggaattgtcattatagtccagctttaattaaattattccggtaaattttgttttcgattgtgggtattctgtgataattgaatatttttataggggtacgttatagatgttggcacaaaattaaacacaaaggaaaaaatgtagataaaacactaaaaaaaaaaaggggtgcagactgtagaaagcatgactgtgttagatctggaaggcgtggctcatttagaaccgttggattgtataataggatcccacgtaagggaacaagctgacggcttagattgaaaggtatggcttctccagtcttcaaagaatcgtaggcattattaaacaaatatatcctactttcaatcttttggtctattgatttactattgatatttttctagtgattgaatgggctttttgttttggtcctcgaaagaaaaactaaccattcgaaattttgaagtcatatacacactatagggtttcttaaaaatatgtatgggccagtcttggatgttttataggaaaaacatatagcttctgaaaataatacatacactttgtcaccaaaaaaaagagtctgaagattggtatggatattgaaaattatacgagtatttatactatatacgtataagtttaacaaaaagtcagggtggccgagtggtctaaggcgccagactcaagttctggtcctcgtaagagggcgtgggttcaaatcccacttctgacatttctttttatgctttcaaaaaaaaatcttttacccattccaatagacaattggaccattctcagatactttcatagacgtaataacctaatttgagcatgaaaaggatattaaaaaatcagtataaaatcacacgcctcgtctcatgaactcaaaatcgcttccaaaaaaaaagaattaagtctgtttctaaaccaacaagagaaaagccatgggtgacgctaattttgactacagtgtctctttccgccaggacttaacttctccgcttaccgtcgagctaacgtgcaccaacgtcgtccacaaaaaaatccgtctcttcaccggcgaaacaaaaacactctctctacccgaacaaaccatcgaccaccacaccagctttattcccctgaacgtatccaccccctccacaaacactcaaaacgacctccttttcgacatctttcgtagtcccgaccaaaccactgttatctccagaccaagcaagactagtagtaattattcgctaagttgcgtgagaatctccaaaatcttgagcagcttcggcgtcaccgaaaacggctgctctactatcttgcgcgagatcgacatggccattacatcatcatcatcatcatcgagaggcagaggagtggttgaaatcaagatatggaaaatcaagactgagttttacaaagccaacaaagctgcggagaacttgttgatcgacagctactgttataattacttgaacgttgcaacaacggaggagaatggatgcgctatttgcatggaagattacatagaaggatcatcaatagtggctaaattgccttgtgatcatgaattccatggagattgcatcaacaagtggttgcaactcaatcatatgtgtcccttgtgtcgatcatcaattctaaggatgttaaatccgggtatcagtcctgtttagattcaatttttaggtgttttggattctgaaaaatagttactatattcatatttagtttggttttggttcagttacgcctttcaaaaaaattcggttaatcaaataactacagttatgttttgtttgattttgaattgttcatatctctgttacattcatatttaagcagaacaaaattattaaacaacaagatttttttatttttttaagttacaaatacatattggaaaaattaaaggtcgaaatacgctaaacttgggcagatgattaattcataaaattcgtcaaacgcaagatactctagctattgatccacaacgaatgttgtatatggtaatactcgatcagtgactgacattgatccacaagccgaatcctttacccagtcgaacatgctactaaaccacactctgtcactctcattctcatgtggttcataaatttaatacttatccatgcatgcagaaatatacatgaatgtttgcaagtttctaaggccatgaatgtttctagttttaaaaatggtttttggattttggtttttagtttttgattttcttggtttttgtttttggtgtagattttagtttcttaaaaacttgagtggtaatttgtttagattttggtttttatgttaatggataatatatttttttacaaaaaaaatctaaaaataaaaaaaaatgtgatcgatggtttttgagagagaaactcccaaaacatagattttggttttctttgaaaagttgttaaaacactcaaaaactagattccctatttttttaggaaaacttgttttttcaaaatcttgaatgggtacaaaatagattttagaaaaaactaaaaccaaaaactagtttaaaaatcacatccattcaaggcctaattttttacatgttatctgtatacaaatataattcatgacgctatataacacagatcataaccgtgccaaatgaaggttttctgcaaaattttatcaaacgtatattgattgcacagacgaaagtaagaatattaaaaaataaaagttaatgagattttttgaatcaaaatcatatttaaaagctctaactgcacttgttaaatgaagattgttacatatacaaaagtaagactaataaattattcttgtaaaaaagtagcaacttgttttgggttcgtatacacaccaattggctacttgtttgttaaataaaaatctaccttttcagttattttgtttggatgctctcaaaaagtcataatctcttcattttcctacttgagatttgacccaagacactgttttctgtcatctgttaaagtgtaaagtcttgtgagatttgtctttagttacatgagtttctcttttttgtaaggtaatttggtagcaaacatactaaaactgtcatggcctgtttattggaagttatcaaccacacatgctaacaataatccgtaattaacggtcttatatttcatcattatatcatataattttgttgacaaagaaacagaagaaaatgtgatgagattgtttttgtgtaatatttttagtttatgcaaatgggtgaccttttgagatttttttgggggaatctaatttgagtttagtagtaattaatacttcagagcatgctcaacttactccttttaatattaacatattgaagttgaataaatgcgtatatcaatagattactattggttaggtcttacgagagatctctggcatcaagaactggttcaatctagttagttgcaact

SEQ ID NO: 33503 - DNA, 3659 bp, Arabidopsis thaliana landsberg
  unsure (1)..(3659): unsure at all n locations
atgtatctttttgttctgaaatggaaaaaaaagcttaatttcaacatatgaatgagtagaaaagagaggaaatgcatcagaatattgaatacatgttcatcagataaaatcagtactagtgtttcaccagttttctgtgtatattgtttccaaggatggataactttgacctgtagcctccatgttgtagtgtgggggaagaaatccttgaggtatgcaaaggttgtagccattttgatagaaagtaatgaattcaattgtaatgttgatgcgtttggtgatggtagagtaggttaagatgtattgtatttatagtaaaaacatagtaggttaataatattcttaagtcgtcaaaatctttggtgcttgtagatgattttttaaattagtttttgcaagatttaatctccatttatttttgattttccatgattaggtgatcgttaattgcttatgaattgttttaaaaatttgattaaaaataaatgtataggtttaggcaagtaatatatttcgtgattggaatcccactagactttattgtttaaggatagtatgagttgaaagatattgaggatttaattctcgggaatatgcgactaagtaagatattgaattctattttgagtttatacgaacattgtaaatcactatagttaagggattgataataatgtttggtgtgtgattgttttaaaagttatatgttgaaatacatttaacctaaatattagggattgattgaatttaaaatcatgaatttaacggaaatataaagatttggtgtgattacattttgagttaagacgatcagtgtaaatcactatatttaagggattgataatattgtttggtgtgaagttgttttgaaagttatatgtaagaatacgtttaagctaaatatatattagggattgattgaatttaaaatcacaagattaaaggaaatattattaagtgggaaatataaagatttaatgctaatgacattgggttgtaaataagttcaagataatgattgacttgctaaaagtgttgcaaaaatgtaaatttagatatatttcactgtaaaataatagttcatgagagaggctagtgagagaaaacgctcccaggcacttctcgcaagaagcttttttccttcggcaaattagatctagatccagttctgcggtggttgatacggtggttttcaatttccgtctctccttcactttatttgggttcgctttggtttcttgaagccagaaggttgtcaatctgctatgtcacgacgactctcttatgccgacaaagggaatgcggtggcctcggagagtagtgggcccagagttttgagagtcagagctccggacaacgataactcaactcttatactttggcacaagctcactctcatcggcagggtcacaaatccgacagttcaacgcgcctgggcgtttatttcgttcttcacggagcactggaaaacttcttcccgaccattgggaacttacctcagacacgggttcttccaatttttgtttgctgcagaagaggatcttcaattggttctagacggcagaccctatcatacaacaggtttcatgctcattttgcaaggatgggtgccgacgatttccaggtcatttccgtcggaaattctgttttggatccaagttacccggattccagttcacctctggacggagaagcttattcgatgtattggggaagatattggttgtgtggctgagttggaggttttgggaacaatgaccagaatgcgggtccacgttaatggcctccaacctcttgttaagacctccannnnnnnnnnnnnnnnnnnnnnnnnnnnnnnnnnnnnnnnnnnctatcaaagattgaagaggcattgtaagttatgttacagattggaccacaaagacaaagactgcccatcgtcaacctcaaggcggaactctgcggtacctcctccaccaccgcgtgtacgagatagttgacctataaggagtacttcctcctccactcagcgtaataaacactccaatcggccagccagagacaatagatctacccaagtacctcaaagatcttcatcccatggttcacatggtcctgtagcctctataaggagcgtaggtatggatcctcccgcgaagatgataagcaaagatttagatactactctagtagctctcgtttactcccaagaagtgaggagtactcacttcatgaaaatacttcggattatccaaaggaaagggcaccatcttggaggtttaccagagatgatgaagaacgagtatctgaatctagttagccttcctctaatcgatcacatcagtcgatttgtaaaggttctgtggacctcagagatagctcgcgtccggtgctagaagagaatagaggcctcagttcttgtaagagacgagactcagtggttattccacaagaggcgctggcagttgcctttgaataggttagagattttatgtttcagtagacaaactgtgtggatcctacagagagtgcggcaagaaaggaaaggcttaaaaaggcagaacttcaaggtcagattgaggaaactgctgaacaggtggtgagagcaaaccttactcttccctcacctgcagcttttggatctaattctctagagctagctgataactttgagagaattccagtttcgcagaggcttggaccacctaatattttgatccctgcctaaaggccgaagaaaaagaccgccacgaaaaggaaacctgacaggcctcctggaagacctccaaagaaagctcaagggaagaagaagcaagttcagattccttcactttatattgggggtaaacaaaagaagcgccagttattgcagtcaaaggggcaacctaccccgagaagaagattaattctggaagccaaccaagttcaggaaccaattgaaattggggaaccgtctagtgctagaggggctctgcctaacctgcttctcccttttagttggacgcaacggttggttctaactctacagctgaccaaaggtcaaggcacacttcagctggtttgatggatttcttgaatccatccaacacccttccgtaaaagtagcgtgttggaactgtcaagggttggggaaccccaagactgttcacaggttaaggcaaattcatcgtaaaatcttgcctggtgtgttgtttctcatggaaacaaaaaactcagaaagtgtggtgttgaatgttgttcaagagctcaactttgtacatagtgctttggtccctccacatggtcatggtggacgaggtttgactttgttttggaatcaagatttggaggtggaggttctttcccgctgtgataattttattgataccaaattctttttcgcaactgagcagagtaaaacaaagattgtttgggatatttttaaagatttagctccacaaaaggaccttggtttctgtccggggactttaatgatattgtcggtaactctaaaaagaaaggcggtcctctgagatcggagtggtcttttgtggagttacgttctttatgtttgaatgcaatctatatgatgtaaggcattcttgtaatttactctcctagcgtgcggtgcgacataatcatgttgtcagatgtagcctggacagggcaatgggaaacagtgaatgggcagaatgttc

SEQ ID NO: 33504 - DNA, 583 bp, Arabidopsis thaliana landsberg
ctccttaaaagatggaaatccatatgtcacatggtttctgatctgtgacaatcaatggctaaaaatggggagagaaggtaacaatagcttattataccacttcttttctcactgtccgtctccttgtcggatggctctttggagtttcttcttctgattcgttggccaattgtctagctgcaacttgagaaaccatcttctgcacagttgatccaaacgtgaaattcaacaaaaggtttaacagtattatttccacaagagaaatctatgatcgtctgtcttggtttcaacctttctctttgatgattgtggaacaagagtatctaggggtgcacgttctaaattccttttcttagcaaccgagcgagctgatagtctctttccactggagtttacaatcttagcttctacaactggcttcttcttggctgttttctgactcttctctaggccatcattgcgcctagcccgtttgctggagtatccaatcttcgtgccatcatcttggtttggctgttcatcccgcaagcgtgatgccaagttcttccatctcggtgcagaaacaaaatcagaatcatagtca

SEQ ID NO: 33505 - DNA, 3565 bp, Arabidopsis thaliana landsberg
aatgtggtccccacataaatgtactcatcaacgggcttttaatctcggcccataacatcccgtttagcattcgttttgtttcgcacttactgaaatgtaaaatgtttgttcttgaattttggagtttaattttttactcaacgggaatcgtcctgtaacatggccacgccacttgatccttaaataaaaaatcaaaatattacaatcatttaaaacgtttaccatgactaacagagaaatgtaatactagttgagagatgagactcagtttttgggtttcgacattctaaactaacggaaaacgaaacaagttatcaaattcttttaaactagctatatctctaacaaaattctaaaagaaatgccatgatcgcataatttctttaatgggaacttacaaaagcttacaacgacgtatttctattaccgtgtttaacaagttacaaaaccctccaagccaaatcagaagcttcgcagctacaagaactcgtcaatgtctaccttgtctgcccaattcacttgtcttgctcaagcttcgtctgttatatacactgacaccaaaatttggaacatgtaacaaagcattcccaattctctcaatcactcttaaggctccttatctcgcgattcttcgaccaacggagtttccttgagcgaaaactcatcgagactttcgtcttcctctgtatcagccttcatctctttgaacattgccatcacttgaatcattgtcggccgcttaaacggtcgatcatccaagcattgagacgcgatcttcaaataatgaaacagctcaacatcgcctgatttatcggttacaagctccggatcaagaatctcagctcctcttttctctctgtatagctgtttcgcccaccctacaaggttattgtcttctccaaactcccctggatcaattggtttcttaccagacagaagctcaagaagtataactccgtagctgtaaacatcccctttagctgtacaccggaaactctggtaatattcgggtggaacgtatcctggagtacccgcgagcgtcgtcacgctcagatgtgtgtctagagcgctgaccagcctcgccattccgaaatccgagacacgtgcttcgaaatcttcgtccagaagaacattgcttgatttcatgtctctgtggataatgtgaggaatgcagctatggtgcaaaaacgctagccctcttgcagctccaatcgcgatcttcttccttgcggcccaattcagatatattccgcctttcttcgatgatttctcgtgaagaacggtttctaagcttccccatttcatgtattcgtagacaagaagcctctcttcaccaaccttgcaatatcccaaaagtggaacaaggtttctgtgtttgatttttccgattgtttccatctcagccatgaactctctgtcgccttgtcccgtgattcgaatcaacttcttgatcgctacaacagatccgtctctgagttgggccttgtatacttctccaaacccaccagacccgaccatagtctctgcgctaaacccgtttgtagcttcaagaagatgagcgaaagtgagttttctcagcggtttctcgaatgtagcaacgttgatgctaagcggttcaggaacgctagagagcttccagctgcagcttccggaagttggaaggctctcaatgtatttctccctcttctgttccttcttctgaactttcctcaccctgtaaagcgccatgactagcatcacaaagcacatgaaagaaaacgcaattccagcgatcacagcggttgcaacagtttgcttcttggcatggatgcgggaggtaatgggccgtcgaggagctgaaccgcagggacgcaaaggaacaccacagaggcctgagttgtttgcgtatctcgagacagggaaccgttgtaagctgacctccaaatgggattggaccagtaaggttgttgttagagacatcaagatcactgaggaaagaaagcgaccccagcgacccgggtaagtacccttgaagattgttgtgagatagatcgagaacaccaatcgctttcaatcctccaaaactgtccgggatggttccggttatccggttatgtcccaaattcaagacctggagatagcccatgttaccataaccaggaggtataaaacctgaaacagcattatacgagatgtcgaaatagatcatgcttccatttgctgagaatgtgtacattgtcatgcctgagtatatccgtgtcgcgggacacgaatgaaccattggtagccgctctaatcgttcagcacgaatgccttcaaactctactaacccacctgcacctctgcagtctgttccaccttcgtttctcacaaacgcaaactgtttacctgaaacgctcccaggcattactaacccggcttggctagctagctcacccgggaggtccccggttagattgttgctgttcagatcaagccagatcagactcttgcagttcccaagctggcgaggaacgttcccggacagagagttattccctagctgcaagattgctaacttggaaagattaccaatcccgctcgggattttaccggtgagacggttactagaaagagaaatccagatcatattggtgcatcttgagatcgactcagggattgaaccggttaaaagattgttgttgaggataagagtttccaaatttcctcctttaacacaaacaccttccgggatcgtcccagtgagattgttcgcccacataaccaaatccgagagattcggtaacatccatatctctttcggaatcggaccagtaagctcattgaagctaagatcaattgtcttcaagctcttgcatttaccaagctccataggaattgttcctgagaggtaattgttagctatgagaatcttttcaagaaccggcgagctttgcagagagcagaaaccagacggtacatttccggtgaaaccatttgagcttagatcaagaacacgaagatttgaacagtttgtgagagaaatcggaacagagcctgagatgttgttgtaagcaacgtatagataagtgattccggtgattttactcacgaccgtgtttaagaaatctccggagaggtagttgtttccgaggttaagattctgtaacgagacgcaggcggtgaactgtgaaggaagctcgccggagaaagtgtttccggagagatcaagaatcactagggttttgcagagtagagaaagctccggtgggatttcgccggagagacggttatgagctagagagagctgtttcagattctggaaacttccccaatactctccgttagggatttttccggcgagattgttccgagatatgtttaatgtctcgaggaatttgcagtttggtagagtgattgggaatttatcaccggagatattgttctgtgatagactgaacaaggtgagattcccacagataccgaaactgagatcggaaaagtcgccggataagttgttgtgagttagatcgagatatttcaacgacgccggaaaatctgaaataaaactctccggaatcttatctgataagatattgtatgagag

SEQ ID NO: 33506 - DNA, 1381 bp, Arabidopsis thaliana landsberg
caatatattcatacagtataaaaagattttcctaggggtacatgcgcaatttccacatatacaatactagttaaacagtgatttttttggacatttaaataacaattcttccaagtatagattgtgcaattttcctaaacaaaaagcagtctaaaccgttgatagatttgtccgtcctaaccgcgtaaccatttgaactcttagctttttttaatgttaagttgttgccaataaaccgaccgtaaatgaaccgagatacttgatttgaaaagtcaatccaaaatcaaatcaaacaaaaaaaatggtttaaaaccgaaatttctttaaaaattaaggatattgtagataaacattcaaaaccgaaccaaaataaaaccatactaaaccatccataatttggataccagtactaagaaaccaaatttttaaaaaccgaataattcaaataaaaaccgaaccgaaatcacatggtcctgtaagagatcatttgaaaaagataaaaaaaaattcgctcaacaattttgtttctctataatcaatcaccaatcaccaaaattctacggtttcaattatcttctctgcgatttgaatgaacaaatccaacttcattcacaaatttcaccactccgcaaaaccatatacaatggaagataacgaagaagaagaagaagaatcaccgacggagctaaacacgatcaccggtttaagcggttttgtagctatctctcccgataagctttctctcaaatacactggcgtttctcaacacggtcaccatgtcggcgttgttcaagctaataaacctgctccgtgtaaacgtttcgcttattacttcgagatttatgttaaagatgctggtgttaaaggacgtgtctccattggtttcactactgatagtttcagaatcgcgagacatcctgggtattgtttagatttgattaggttcttaaagatctcgaattttgtttagttgttttaagtttgattaggttcaggatttggttcaattgtgtgatttaggatctaaacaaactaaagttttggattttgtttctatatcattgttgctgagcattgaaattgtagttttgtgatatttcttatgtaatggttagatgggaactcaacacttgtggttatcatggtgaagatgggcttatatatctaggaaaacgtcaaggtgaagcttttggtccgacttatacaactggtgatactgttggtggtggtataaactatgattcgcaggaattctttttcacgtgagtatctaagagttcaagagtcaattcattttcatgttacagttctgacatatctttgttatgagatgccaagtgtaatggaactctggtagggacagtctccaagtacatcaagg

SEQ ID NO: 33507 - DNA, 658 bp, Arabidopsis thaliana landsberg
aagagacaaaaatgtataccttgtactttagtttatacaaatttgattcagattcatgagctagcaacatgttatggcctgcaatatatgtttccatacaataatttcctgtagtacaatttccatacctaacgtctttgccataaaaagcaaaggcgaagattgtagcttcgttgattgtagtccataacttcacatcctccccaaactctctgaagcatacatctgcaaaagctgtaaagtcttctctgcaatataacaaataaacaacattaattctatttttgtttttctattcatattttaaaacgtgactttgttagatcataatcttctttgatcatttacatgattttgtggttgatccatcctccatactcatcttcaagagactgaggaagatcgtagtggtaaagtgtaacgtgaggttcgattcctgtttaatagttttgtgagaagcaaatgaattggctttagttccgttaaaagtaaaaagacaaaaaccttaccatggcttcgtagctctttgatgagattcttgtaaaacaataaaccttttgggttaatgcgtcctcttgcatctgaaaaatgacacagacaaaaagggtctaatataagaggtcagagacaacattattagttacttgggaattaaaaa

SEQ ID NO: 33508 - DNA, 1753 bp, Arabidopsis thaliana landsberg
ggtctatcacacaactaattacaattagatttgagcgcttacaaacaacttcagatggaaaacaaatattgacaagatttaaaaattggatatagtaaggccttggaagtatcgccttgggtcagactttagttgtttcacatggcgtggacgctggatctcagtggcaacaataatcaatatttcacgtggtatggcattaattttgatcatatgcattatttgattattcatcgttatatgcccactttgagagatccgatagaaacaaaaatagaaaagaaaaacatcacaaaagagatctgtggtttgatttggatcaccatggaaaaagtagaggtaccaccaattcataaccatccgctgttaccttttactcgtttttcctacaaggcttgtaaagggtgtgggtatgttggttacatatatggaggctaccattgcaatgagttggggtgtgaatctgtgtttcataaagagtgtgccgacccgttaccagaaatcaaccactcttctcatccagaccatcctctaaagctcctcataaatgtcgaaccacttgcttcttgtagccagtgtccatcttcgtttgaaaatggttatctttgttcgatttgtgacttcaagttggattttcgttgcgcgacgaggttgcctttggaatttattcttgaagaatccactgtccacgagcatccgattcagctctctgatggaacccgtgacggttttgtgcaactttgcaaaacatgcaaatggggagttttcgatgctgttcattacaaatgtaataaatgcgatttacgctttcatgtggagtgtaccaaactttttccacaagctagccacgttttacacccccaacacccactcaagctccttagatgtgaagaagcacccgattacgccgacaacaagtgtcttctttgcgggaataagtttgacggacgaattcaccactgtgatgtttgtaactttaccatatgtggcggctgtatggaaaacccaccgccgcttagtgttgtaagcccgaccacccatgagcatcaactttatcttctttcaaaacctctcggtttcacttgcaatgcttgcgggactcaagctgatcaaagcccttatttctgtcttcaatgcaacttcatgattcattgggagtgtatcgatttgccccgcgtcataaacatcaaccgccacgatcatcgcatctcctacactcgtcgtcttggacatgggcaaaatacatgcggggtttgtcgtaaaaaggttgatggcttctacgggggttattcttgctcaaaatgttttgattattttgttcattcaagatgcgcaaccagaagggatgtatgggacatgatcgaactggaagggacacccgaagaagaggaagatgcgccattcaaggtgattgatgacaacacgatagaccattacggccataagcataacttacgaatttaccgtggctggaatctaccagaaagtgtagtttgtaccgcatgtgtcttccagatttgttcagaaccgttctacgcttgcgcgagaaagagatgcgatttcataatccacgaaaaatgtgccaagcttcctttaaagaaacgtcatgtgtgccacaaccagccactcgaactatccccaaattatggcacctacttaaaacataggtgtagtatttgccgtcaactgttcaccggtttctcctatgaatctaaggaattaaggatagatgtacggtgcgctccagttgcgg

SEQ ID NO: 33509 - DNA, 2636 bp, Arabidopsis thaliana landsberg
gaaaaacttatatgcttgtgtcaagcatcatatgaaaataagataagtatttgattattgtgtaaataatttcaactcttcatatagttgacaactgtatgccatttccgtatagttcgtcactcgattcattggtttctaatgatagaccataatgttccacctcaatcaatacgatttagtataaaatattatacatcaaatgtatcacatttcttagagaaaaaattacaaggtcttttcatgtgctttatttatttatattgaattgactaggaaacagtataagaaaaaaatgatatgaaatgtctgcatcacagaaaccgagttttgttggagaccacaagaaaccaagcaagtcgaagacaaagattgaagtataaagttttaaaagcatacactaattaactagtgctattatattcattctatgcctaaaagtaaatgttgcaaacatatcacgtgaccaagacaaatgtgcactttaaattaattaacaataatctcatcgacaatacatatctttacaagttttctcttttgttttcacggttctcactcttatattcttgcgtttctctaattttttttttttttggataccatgtttgtaccattcttttccttgaaattcggtcattatgatacaatcaaagaataataatacattaaagatttaaaggtactgataactgcagcttaaaagactaaatccaactttaagcatatgcataattacaacttttcagacgaaacctgcaaaggaaaagatctttcattgctcttaatattcctttcgtatagttgggccttgaacgcttttttttttttttttaacatggaggggtttggggccttgggctttagggccttaaattatttaagaaccataaaacgctttttattaacagttgatttatttctgcacttctcatgtctttgggcaaaggaaacaacataatcttgaaagttttcataaattgtcatatgtgcaattgaaaacactgagacaacattacataatcaaggatcagaagaatcctcacaatcattggcataggatcctgtcaatattcgcatgatgttgaattatatgaatcagaaaggtatggattgccgatcaggccaagactcgatcttctggaagtaatcgacaggcaatacaccatcaatgccttcagtcaaaatcactttgttgtctgatatgtagaacgcaatcccatctgggtgcaccaataaagtggaattttaatattgaatctttcaagggcatatcactattttttcagacaagttattaagttctcataccttcaagagctttcttgatgtcgaggaagatgataacatttacatttcttctcatgccttagccaaattatgtcgatatggaaaatcagataaatatgcatatgaaataatgtctgaccaacaacaataggattaatcaaatattaccactaatcacttcaccatctgttggtaatccacaagagaagtgaacatgcattctattcatacgctttaagcccgatgctaagatggattccaaattcttcctataagttccatgtacacacactgccattacagaaattcaaatgaactcgagtaacacataacaataacataattttacaagtatgtgtcctagtagtacctggagcttcttctggtgacagtattggtttaagtaacttctctgactcaaccgtctgcgcacaaagacataagctaaagctattgatcaaaactaggagaacaaaaatccaatcatagtgctactgtgtctcaacgaagaagaaaacagccaaatgctaaggattcattgttcaagttctattaccgtgatcgaatggccttggttagcgcgaatcaagagctctccattctcatcgatgagactaaaccgttgcttattgtcccttctcacagcctgcaagttaacgaaaaccatacacaaactcatctcaaaaacgtctccaatcgaaaatgctcgttgacaaaaacaagtgaaaaaaatgaaactaacctctctaatttcatcaatcgtgtgtgactttaactgaatatttgcagaagttttcaaattcaggttaagtaaatcttcaactttaacaaaaccatcacctctcatgttcaatctcagctcagtagccatatgtcgcaatattctcgtcctgattatcaatccattatagattcaaaattcaagctaattctctaacatctagaatccagtattgatcgattacacttacaagagtcgtccaagtgcatcgattctatcctttccgcctccaccgtcgccacgaccctgaggtctccgtcgatcgatatctctctcatatcctcctcctctaccaccgctaaatccatcaaaatcaaacaccaaaccttacatgaaaaaacgagggaaaatcaaaagggattttgacttttcgaataatttgaaaaattagaattcaccttcgactggactgagcgaaggaagagacattagattttctagaagaattgggatttgaagcatccatgaaagcagaagaaacaggagacgatttcgagaagaagacagagctgctcaaagtcagaggaagaggaagtcgatgacgacagagacgcagcaacattat

SEQ ID NO: 33510 - DNA, 440 bp, Arabidopsis thaliana landsberg
  unsure (1)..(440): unsure at all n locations
cagcaaaggatgcgacccgccgcacggaggagaaaacaaaacaaggcggaccgaacgacgccaccgccgaacggacaaagccaacgacaccggcccacgggagccgaagccccaacagagggccggcaaacgggcggggggcgcaagcgccgcgccgagcccggaaccagacacaaaggcgaccagggacaagccaacgcacggaagcaccgcgccacaaggcgaccaaccaagcgcgangaccaacggagcgaagcaacggccccccgcgnacgaggaggaaacacgaacgcgacgcgggcacgaggagggcaaaacgaacaccgggcacgacgggcaaaacccagcncgacgccccaaagggagggggaacaaaccaacaccggcggaagacggcagcacaangagaggaagagccgacaccgaaagaccaaaaagca

SEQ ID NO: 33511 - DNA, 433 bp, Arabidopsis thaliana landsberg
ggttacaagtctgttctcaaatccctccgtggctccaaaggtaattgtgtcgaacacttggtctgcatacctaaatgttctagctttttgtagttggttattgattctggtttttgcttatgttcacagggaaactgattctaatctccaccaattgcccaccgttgagaagatcagagattgagtactacgcattgctcgctaaagttggtgtccaccattacaatggaagtaagttcctttcttctttagctcgtccagtttttaaagattcattgttctcttgtttttgagaaggttttcattgtgtataataactgagaatgtataatcttaagtagctgaaagtgttaaaatctgcttctatagaccattaaactgatgatggaagtatgatctcaagtcgacaaaactgtactgtatattgacgtga

SEQ ID NO: 33512 - DNA, 581 bp, Arabidopsis thaliana landsberg
ttgaaagtttgagactaatttggttacaattgatttcatggtcattacgcattttacttttttccgttttttataggaggaaatattttataaagtttggaaggatgtccctgatgtgtattcacatgattggaaggatgattctgatgttttatacatacaaggtatataaacttgatataaatagatacatattcaaattttccgtgttgaaaatgaaattcatcaacattcttttaaaataaacttacagaaaaattcatttaaaaagacatttcaggacgtatatacataatattttgttcaataagcaaatcaaaaagttaaacagtggagtttgttcaacagacagatgtaatgagaattgatgaaagaaaacaaattattaatttaattaagatttattaactaattatgagaatcgtattttggaaagaaagataaacaacttcctccattattacaacaataaaccccaaattatatattgcataaaagctttgaaggaagaaataaacgagaattttgataatatatgatccataatggttatgatcatcataaatacatatattaccaat

SEQ ID NO: 33513 - DNA, 2102 bp, Arabidopsis thaliana landsberg
gacttccccaagagtttcctgtttctcaatcacagcccctacaaaatataaagcaatcttaaatcataagaccgaaactagggacagatacaaatcttaatgtaaaattaaaaggacatcattgagaaacctaacctcgacggcagaacggcaaatcatagtattgataggtctcactgcaaacaaaacaaaacaccaaactttaaaatggggtttaagaaaatgtgccatctttgagttccatggtcaaactaaagctagaacaaaaacatatcttacacattctctaacttgatctcctcctcttagattactcacccgtcatcataagccaataaaaagcaaaatgcataagaattaccaaaagatttgaatttgagaacaacctcggattgtggagaggacccactttgttgacgaacaaagggacatgatcgccggcattataatggttcgacgagcctgatccgattccgatccagaaggtcaatgcaagtaggacttgtagtacagtaagcagaaattgcgccatgaattggcactcttcttctgctgggttccaaaagaaacgaatcaatatgtgcaacaagaagagctccagaagcagtcatcttctaaaatcttaatctaacaacagctcaagaagaaaaaaattccatagctagagagaacacaaagtcacaagacgacgtcgtagaggcacaaagtcaaacctgaatggcttaagccgaactgagtggttttgactagaccatcatcagaaaagtctccaagacggtagtcggatgttagatcgctcaagtaatttttggttttgttggtctcacgttttcagctgcccatttgatttcagtttgggcttttccttatctctaaaggcccaatttcatttaggtttagtttatttgatcattatccttactataaaggcttcgcctttcgagaaatttagggtttcttctgtctgtctcgtcactcaggtttgtgcctcaacgactgcttcacttctagcttgattcttcttcttcgtttatatgtatactgtacattagattattcttgtttctcgagcttctgctatagattttgattcttttttttgttgtctttgtttcgtttccaggatcagatcttagctaaattgagacaagctcaaaatgaggtacttgacgcatctcttacattcactgtttaattagagaacaatacgtctctgaatcgtgattcagagacgtattgttcttctgtcatatgcaataagtttaattagagaacaatacgtctctgaatcgtgattgttttttggatgtgcgttattgatagctttatgatgttaatagtctaggattgacacgaagttgttctgcagttttgcataaatgctctttactaaggcctctaaatttggatgacaaatctaaatcttgcctcataaaaatttaggtgtattaagataagattattttgtatggtagtgtctataatgtgggttgttcatgttgaggttgtcaatgttgtgtatttttgtttgtttagttaatttgcttaactctgttcttgtgggttaatacagtaagcttcaaagtgaggccgttcgtgaagccatcactactatcacagggaaatccgaggcaaagaaacgtaactttgtcgagactattgagctccagatcggtctgaagaactatgaccctcaaaaggacaagcgtttcagtggatctgtcaagttaccacatatccgccgtcctaaaatgaagatctgcatgctcggagatgcccagcatgttgaagaggtgatatatcttttcatggaaattgatcattttgtgctctgtttcttgtataatggttttgtgctcatttcatttggtggctctattagtttcatttgatgttgtatatgtcttctgaatgtagatgcatgatgttttcggaatttggtcattgtttatttaggcttcatttcttgcataattaaatatttgcttatttcatcttgtatcttttcgtaggctgagaagatggggttggaaaacatggatgttgagtctctaaaaaagcttaacaagaacaagaaactcgtcaagaagcttgcaaagaaa

SEQ ID NO: 33514 - DNA, 454 bp, Arabidopsis thaliana landsberg
attacttagtattgtaggttatgtagatcatggtgatccgacttacaaatgttgtttttgtggagctataatgtggtacgacgagcgtgttaacaaaagaaggagatataaaaatcctacgttctctctatgctgtttacaagggacaataaaattaccatttcttaaaaagtctccagaatgcctaacaaagttacttacaggaaaagatcgattaagtagacattttcagaaaaataccagagcgtacaaaattgtattttgaatgacttcacttggtggtaaagttgataggtcagttcaaaaaggaaaaggaccaaatatgtttcaactagaaggagcaaactatcatctcattggaagtatgaagcctaaatacaacgactatgcaaagttttcacaactttacatttgtgatacagaaaatgaagttactaatagagatactggttct

SEQ ID NO: 33515 - DNA, 340 bp, Arabidopsis thaliana landsberg
atagtgaatgtagggaactgaaagtcaaatacaaattgtgaataaaaatgggggcgtgtctataaaaggaaaatatatacttttttgtctaagaaatagcaaaagctccaaatgttgaagattttttagtgtgttttgattttactgctgagagatttggaccgcgccttcctctgccgtttcactcttgcggtttgttttcagaacatgtgactttatcatgtgtaagagatgagcacttagctgtcttatatcgacggtacaatggagtaatggagatatatattacaactaagattgagccgaatgaggtattctggagcaatttcttgaaagtgga

SEQ ID NO: 33516 - DNA, 2333 bp, Arabidopsis thaliana landsberg
tggcagctcggtttcctagacagagttgtgtaagcttgatcatgtgcttacatatgtatcccttttctgcccagctgcaactgcaaaccccaaactgtgaccctggattccatacaacatgaatttcgttgccgtcacactcatctgttatttttgcagacataccagagataacaacatcagaatctggtatactcaatgctttgcggaaggaagtcaacccgctcacccattcctctttccaatacctggcaaaattatcctttccagaatattcgtcaagccagaagtaagaatgtacttttgtccctaacttatcaaccaaccaatcagcacgttgataagcttcagagtccctctcattcaaaagcctgcacttcagctgatagtggtaaagctccatcgctgcacaggtctcttggcttgccaagggaagagattgtaacgcactagtccaggctcctaaaataaattggagggaaaaagtcattctcgagaggactagtgtcaaatatcaacaataatttcaggtagagtgcaatgtagaattacaagtaagaacttgatacctaggtccacgaaccttctgagctatcaattaattgtagagtgtaaacagaaaagaaaagagagaataggaaaataacctattctgggagaccaaacagatctgaagtactccacaaattctggactaccaacaaaatcctccacaaaactgtcaaacaatgtggctgttccttgccttctagagattttatctacagcctgcccaagatgtcttgaaatctcaacgcgtgtctttgtttctcgacatctcttgattatgttcttatgccatgcatggcgaagacgccaaaatgataacaagactgtacactgaaatacatccctgacaatatcgcaagcaatagcattcaataaatataatatttagggttggcaatttggttccttgtctgaaatatgtgtatgacaaatttctttctaacaaaagagaaagatatggttcagtatctgttgatgaaccccataatctaactatgtcaagccttcttcacatagccaattgccagttccatcaaggattcaagacctatggttgtaacatcctagtcaatttgtccaaatagtgctacatagagctccactatcgaaaattcgaaattaccaaagtcagcttcattcaatacgttgatatttggtatgtacttaagttaactacattcaaagctaaacgctttgctgtggtaaactctgccaaatttcgtgaaggaaagaacatgcgaaatatgttttataatgaaaaagtggcctttgaagcaaccaacctgatcgctattatgtcagcaaaaggatcatcaactatgaacccagccaccttccaggagggatccttggcatggactcggttacaaagagctctcatccatctgtatgcatctccactagaaaaccgcggtgcaattatccaagcaactggaatagccttattctcagagtcgaatacaacaggactatggataggatactgaaaataaaccaacacatagacctgagaatcatcctgataatataaataccaaatttagcacctgatgcaaactgacctttagtgtatttgtcccaaaccttgagtctgaagccaaaagtctacagtttccaaatctaatcatttgttgcaactgccactcagtttggatacccaaggaaaaagggtctgtatcagagaacccctcgaagaaaaacacatgactttggtgactttcaacccacatgctgatgctgacatcatcatcctcatcgagctcatatgttgaacgtcgaatactcctctcaagtcttcgtacatatctatgagttaacagatcatctcggttacttggaccaccttgtttttccactgattcattatgcctttgcattatggtctccacagagacaccgacatagagcaaagatgatacacgtagcctaaggtcttctgatatatatggagcaaacatggctcttgttccagcagcctttttgtcttgtggaccatggcacggaaaccctttttcatctacatgcttgtcattgttataaattactaatgctacagtcggttctgcaattaagcgtttcacaatgaagtgacacctgcaccctctcttagaattgggtcggcctgcattgttctttttcggaacatacgtactcctacttggccgtacagttccgccttttctattgtcattcgggccaaaggaacaccaatacctactcaaacaaaaacactaatttataacaacgattttggtccacactgactaacaaaaagagatgcatgc

SEQ ID NO: 33517 - DNA, 1486 bp, Arabidopsis thaliana landsberg
tatccgattacgatgaacatataccactgatcaacgactctatgatacaatttttccataacattcgaatccaccacggacagttttgcatgtattatatctgatgaacatgttctccattacctcacctatcttctagtaatagttgctcgataaaattggaatttatctctacaaacccaacttcagtccacctacaattcgataagttacggatatatgattttgatgttggcttttcacctcttatgaatgtgctttcggtctgcaatcaaaatttgtctcctttcaactttgatgaaggtgctttacaactaaaagaaaaaaaattagaagcttcaacttacctgctatctatgcaattgtggcggattaaaatctcatgaacaatttctctaaatatggaagggtaaaatcataaattgtccttttccaaaaatttccaaatctgtcagctcgaaaatttgcattttaaaaaaattgagcctacaataattcttctaaatagaaaaaatcgtcgtacgtgaatctcactcgcaagcgatttttctctctcaactcttcttcttctgagcataaattcgtgcaccgtcgatagggtttctttgtcgattccggcgacagtgagacccggtggctcatggttcatcatacgtaatccacttcatctttttggcgaggctattctgatcaaaatcaaggggagctgtgatgggggacaattccacaagactccaaaggtaagagctctaccggtggaattgcgttgtggtgtggaagaaggagacttcacggcgaggaacgaaagagaaaggtggttagattcggagtgtggcgacgcaggagatttcacgggactattggttcctgggggaggtcgtctgtggtccggtgaagctatgccaccgtcgatggattcctaatctattctctaccgctttttctctctcacgacggctcatggtgcttcctcaacaaatatcaagatcggttatcttctttctccggctcttccttggcgggatgatgacggatcttgtgtcaccatcatcgttcggcttacgacgtcctggctcgtcgaagatcctcttttccgatgagtatgcgcaattctagggcggcggcttcgattatgttttcttttgaagattagggtttctttttcagtttattctggtttgttgaattgggccggttttgtttagatggtcttgtccggtttggtgtttgtggatttggccctaaggaaatttgtatgggcctaaatccggaaatagcccattggacaattatttataatattgaatatccttttaaaaaaaaaattcttttaaaatattaataacttcaagattaaattgtttaaactttggaatatttgcaaaaatatatttttttctaccattttgcaacaatacctttttatattgtccattctaaaaaataccctttttgaacaaaatgaccaaattaccctcatcaaatg

SEQ ID NO: 33518 - DNA, 430 bp, Arabidopsis thaliana landsberg
acaactatggccaggaacaaaaagaaacacctaaaaagagttgcattaatttaatttttaatgaaaagctaagatcctcgatgacctgggtgatgtaaaccctaaaccaatgaatcaaatatgtctaacatgttaatgcaatctggaaggtttcattcctctgtcttctctttagttctgattgctacgtgagaacaatgcagtcttttcactagactctttggcttacgattctccctgtcgaatccccttacacagacatatcctgcatatatattacaatgctagtcaaaccccacctcaaagctctataaaaacaatattaaccaacttaagctatatcttctatcctttcctatcaacatcttacatcgccaaagcaaaaacatcgtgactgattttgatactattggttcggtcttttcatgaa

SEQ ID NO: 33519 - DNA, 390 bp, Arabidopsis thaliana landsberg
tgacctttggtgggggtcctctagcatttcattgtggtgagcttctgttgctgctcttttgcgatgatctcatgatgtggctttcgacagaaaattgtaacgccgagatgtcactttatacttggattcaacatctgtgaagagcctcttatacataagcatgtgtttctatggacatggcttaaaagttgggatattgatatttgcttttattcttgcccatctgatcagctgcgttatggaagaaagtggaagacatctgcctgaaaagagaagccattctcttaacttggcttacttgaatccttacaacctaaactctttacataccttaacatgccttgcccctgacatcccctaagtttattcaattccttaaacatccatcaa

SEQ ID NO: 33520 - DNA, 480 bp, Arabidopsis thaliana landsberg
aacaaaagggaacaaaagccggaaccgggcccccccccgagggcgacggcaccgataagccagaatacgaacccccgcagcccgggggaaccacgggaacaagagcggccgccaccgcggaggacgccccaaaccgccccacaaaggagacgaccacaagacacaggccgacgagaaacaacgccgcgacagggaaaaccccggcgaaacccaacgcaaccgccgcgcagcacaccccccgaccgccagctggcgcaagagcgaagaggcccgaaccgaccggccaccccaacaggggcgcagcccgaacggcgaacgggacgcgcccagaagcggcgcacaaagcgcggcgggagaggaggacacgcgcaacgagaccgcaacacaagccagagccccaacgcccgcaccacacgcaaacaaaccgaacaaacacgacacgaacggcggcccccccagaaagcaccaaaacgggggccc

SEQ ID NO: 33521 - DNA, 437 bp, Arabidopsis thaliana landsberg
caaagctttcgaattcggccacaagatccaccacacgggtgttacgcaggtccgggcagttttccttgaaggtaaggcccagcaccagcacgcggctgttcttgatggcatgtcctttgccaatcatcaacttcaccacttcgctggccacgtgctggcccatggcgtcgttgatacgacgacaggcaagcaggatgtccgggtagtaacccacggactgcgccttctgaatcaggtagtacggatccacgccgatgcaatgcccaccgacgagccccgggcggaatggcaagaagttccacttggtgccggccgcttccagcacatccgtggtgtcgatgcccaggcggtggaaaatcagggcaaatacgttgatcagcgcaatgttggcgtcacgctgagtgttctcgatgaccttggcggcctcggccaccaca

SEQ ID NO: 33522 - DNA, 3982 bp, Arabidopsis thaliana landsberg
  unsure (1)..(3982): unsure at all n locations
ctctttaattccctttttcgtacacaagtcacttcacttaaaagtcttctttttattttattttactgcactttttaagaaaaaggaggaaacgaatctcagtggagtgagcacatgtatggatcttttattgaccagctagctaaaaaggcacaccacatcactcaaagtcttctaaaaagtaacaataaaaacagactcaaagtgtaaagactgatgggctttcttgtgttttgtgaatgtttggtgcaggcaggagccagggaatggttagagatgaagcatgtatggggagccaactggtgcatcattggagggccactcaagggaccattctccatcaagctcaccactttgtctgccggtaaaacactctctgccaccgacgttgtccctagaaactgggctcccaaagcaacttacagttcccgcctcaacttctcccctgtcctttgaaccatctcttctacatagtcaaagactattatagttctattactactactactcgtgtgatcgtttttttttagagagaaacagagtgactgctggccgtaggatggaaacagtaagaaaagtacatccgaatcaacggctattgcgttctctcctcttccttcttgtgatgtggatttgtgtgtgtgtgatgtgtcggtgagtgtgttatagaagtcactatagccatcttcaaaggggagatagagctaggagtagtatttggtggtgtcacgtcgtttgttttttctatataatttttgtcactatgtctttctattatgggacatggcataatatatcatatgaataatttatcactatgtctttctattgtgggacattacataataatgtatgatatgaatattatgtacactacttcagagagagcattggtattctaccagaaccttcagagtatctcttcttgtttcgtctcctcaaaacccaagaaatataaaatatactacgaactaatacgaatcttcaggttccacttctgtttcagaaactgcatcttttggggtttgttcccaactgatattggctcctaaacatttgtccttcatgtatttttcatctttagtatatatcctctttcctgattttgttggttttggatcgacgcagctttcaagcatgtcacgtgattctgcaggatattaaaggtaaccattaaactacaataaactcaaacagtaaagacaagccaatatttaggaatgaatataaagattttccaagaatcacagccagatcatacacctagagaattttacctcccccaatgacaacgagcttcatcagtccaccatggtaatattccttgtataatttcacaatacattcccgtagatcaaccccattttccattgcaccacttaagctcttcttgttaccttccagagcacatgaaggacatattaacaataaatcctctcaagaatatcttaaatgtggcaagtaaggcacacttgcggtatccttaccccatgcaaacctattaaaaggatgaccctttgcagatgtatagactgnaagttgttgcaggcgacatgcatcattttggagggcctgggtaattcatcaaatttggattttgtaaacaagacacttttaactatatagaaagatttatatatctgaatgttgattggagatggatcttttgataatttcaaacaaagaaataagagtacgaaacaagcaagataaacctgaatcaacggccaggacttcccgttccatagcttcagtcttcatgagcggtgcaacaaaaaactgagagaatctaataataacgagaaaacagttctaaggtcaaataagcattttgaataagaaaaatgaaaaggaaaagattaaacttaacagaaagctcaaatattgcgtacggaatttttttacaacaactggtataggaaagacaagtaattacataatgacgaccaggaaggataaaaaactatgcatcttccttacaatgataacaatctctgggcatgcataccgacataaatatcgactgccttggtaaattttacagcaaaatgacgtttatctagatatgtgaagtagcagctcaagcaatttttgtaccttttcaaggccccttgaagaaattctctcttgacttcgaagtgatagcatgtatgctccatttctgtgtatgcgttagaggatccaccatgcttagacaagtaactatcatactgcaagaagtcaaaaccggaagaattaaaagatacatcatgctaacaaaacgaagtccatatccattatatccaagctccgtaaagattcattgttatatctaatcattctaactcggttagtttcttgattcaaagatagaaaattctaaagtaagcagaatacttatttcatatgaatctataaataatgccaaaccattgaaaccatagaaaataatgcaatgcttacttcattctcatcggggaactcagtgctacccataaaaagcatgtgttcttcaccaaacataaacatgagagtgattcaattagtaaaaaaaatcagaagaagtgcattcaaaatgtagttcaaactcatagaaagaagaaaataccaagaaagtgagccaggccttgtgcctccggagagatccaagaagcttcccattgaaacacacatagctgcagcagcctgagacacacaacacaaaatatactagtttaaaaatcaaaacccgatacaagaagaaaacagagatatagcttttaattgaaaacctttttggtctgatgatcccctttccctttcacttcatcttcatcctcatcctcatcttcttcatctccttccccatcttcctcatcatcttcatcatcatcatcatcttcagagctcccgtcactatcttcttcttcaccgtcctcgtcatcttcatcaatttgatccggaacagagccttcggggtaaatatctggatcgtgaatgagcagagcacacaatccattctccaattcaatcactctgtataacctccgatcgtttggtgacttcaccactacattgtccaaagccgagacggatttcattgaagacattgttctcgttttgagaagaagatagcgactggtgaacaagttctgctgctgctgcagcttcctcttcttaggtcttgcttctctgtacccaatgaatccgattccgccgcaaatgccttctgatgatttttcgtttattaaaaaatgtaaaaagttagaagcagtgagtatcttgccgttttctccctagggatattgaatgtgagccgtttatagtaaataaaacgacacgcgtttctatttttaaagatggaaacggcaaaaagttatggttctttcttccatcgcttcgttttcgcctctgtaatcggaagaaaatcgaaaagtgaaaaattggaaatttgaagtgttacaaacctaattgacctttcctgtgtaacccaattcgagagacggaatcggcgagtgagaaagtactgatttctctaaaaagcccaaacattgcttggttgatttagcaacaatggcactctcgcagtggaaggaagctatactcgaagggattttcatggagattgaggatggtattgtggaagagaagaatctcgagcgattagagaatcttgtggagattttacacaaaagaaggttctaaagtacccaaatcagtcacggaagcgtattgtaaagtagctgtggagtgcacagtgaagtgtctcgcttatgagaaagatgcaaaaaaggcttacaccgaagcaatcaaaacgatatggctcggtaggattatgcctttatgcgataaggttagttgtttggttactcttgacctcttgaaatgctgtcgaagattatggaaggcccacactgacgacaaggcttgtaagacactgatccatgagctccaagagacaaagctttggtttgtttaaggagagatgttttagatttgaatcccaatcctgttttacagaatc

SEQ ID NO: 33523 - DNA, 930 bp, Arabidopsis thaliana landsberg
tacaattgtacgttatgatataataattcaatgtacaacaaaactcaactaccaaagtttgcttattactctcaaagaaaaaaacactgattaaaaatagcaaaagagatttgtttatctatatgaaaaataaacttatatagaaattcttatatgattagttgcaattgtaggtgtaacatttaatcgttgatttgtttttttttttggggtgcatttctcttgtagttgtaacaatatttcacacttaagactttcagacaatagtttaaaaacaaccgaacagaagttgcaggtacctataacttgtgtatgaatccatccacagttttgtaaacgttgactgtttgacattttgaatgtaattttatttaattagatcctacacaacaataatcacatctataatttgccaatacattttaataaaaccacttaacaaaatggttttaccttttaatccagtaattttctgtagtgggtgtcatgatttaataagtactgtacacatttccaagatctaccgaacaatcataatcgataataattgtacctaccaaatttggtctaaaaaaatagaagaagtgattatatatatatatatatatattcttttttgtttttgatgctaaatatattttttttaatgtgattatcgtttatcattgcacctcacggtaattattattgtttttccctgattttataaaaaagagatatagagagattattgagaccaatgaagagcagaaactgttgggagtcaaaaaaaacttatcaccaatttctaacagtgttctatgtcggattccatcaatctctctctcttccatcatctgtcactttctttgtttactacgcaacaagaaaccgaagaaaaaaaaataacaatttactaaagtattaattcctttttttgtgtaacaaaat

SEQ ID NO: 33524 - DNA, 500 bp, Arabidopsis thaliana landsberg
caatacatatatcctgtaaagtgtcacataaatattccatacaaaactttgaattccaaactattgaagcactagagagattccacagacatacgttgtaaatttacttattatcaatgattctcaactcaaatacatgtgaacaaaaagctagcaatactctcaagcactgatgttttcgaaacttgcgcttttatctactctcttgaatatccctgcaattacctggtgtttgaatgccacaaaacacacaacttagaagaagaagaagaaacctccatctataatgagtttacgaagatagaaaaatacctttccaggtcccaattcgtagctgcttttaagtcctttggataagagagtctttactgttgtctcccattggactggagatgtcacctgtagtcaacatttgcatcttttttttatatagcgtcgcaaaagagaaataattcacatagttctctgagtattgatttattacctggcgtgcaagtatc

SEQ ID NO: 33525 - DNA, 126 bp, Arabidopsis thaliana landsberg
  unsure (1)..(126): unsure at all n locations
caaaaaaaggaggcacgcggcgcacaaaaagaacacgccccaccacaaaacgaaagacgggggggccnaaccaaccaacagcnaaaccaaccccaaggaccaaagaacccgcccggaacaaccccc

SEQ ID NO: 33526 - DNA, 2824 bp, Arabidopsis thaliana landsberg
atttaagtttagacatatgttacaaccaaacatcaaagacttaaaacaaaagtgaattccgacaactaaaaaaaaaaaaacatgtttcaagaaaaaatcaaaacagttaaatgttactcatcagtgtccatattgcatttgctcaggggaataataagtaagaagcttcttgaacagaggaacaagtgcaaccacagcaagttgaagctgctcagagctgtttacgcggatgcttacttgccctgctcctctgttattcagattagcacgagcaatgagattagaggaacgtccaatgggtacttgagactgtatattccctccgatagcaagatcgccatgccaatccatcacagagagtccaagagttgataaaaaccgaccaagcggataatctttatctcgaaactgagcttctaaagtaccaccataagcaacatctccacgactagtcattgctccacctgacataaccatcctgaaccgtttgttagcaatcaacttatcttcgacttttagtcccgcggaaactgaatcacctaagagcgttacagagagaccagctgctgctttgtttttcctaaacttgttaaatcttgtttcacttcgaatagtgtacgctaattccttcccagcattttgcatgtcaaaacctagggaagttgatctaccttctccatgtttaaccgagctggccaattctagctgcacatgtgcatccttcttgtcctttgtcacttggccagagaaagatactggtattttgtctttaacaacaaatagtccgttccgcattcacaccttcataaccaatatcatgatccccacccatgagtttccagcactggcctaacaagccattgattggaggtatcaaggtaccggtaccgatgagtaggattgtcagagtcaaaagatgcaggtagagataaatctggcattggaactggaacagatgcaggttcacttctctcctcttccacattttcactatacccgttaggcatatctttaatctcagcagcaaatttcttcaacaacttacgtctctttctttcctctttcatctgtctcttcataaatagtttctcccgatactccatctcatcgagatattccttcttctgagatttgctaagcttcgtcatctctgctttagtcaaccgcttaaagggaggaagctcatcatactctgattcttcctcagaatctgatgattcgtctaaatcatcttcatcgtcttcatcttcgaactgttgctcagaaagcttagcttgtggtcttgattgcaaaagcgataaaaggagcaatggtagtggcggagccttggaccgagttgcaatttgtccccctggaatattatcttgtaatttcagaagagcatttgcttcggcaagaatcttggatgcaaatgagagtaataacaaatgaggcttccacacttggccattaggtaatactctctggcctgcccgatttgtcctgcaagcagagtggttctcaactaaagaaacagggttcatgagcctcatatctcccgctgcttggcgaatggcctgctggatgacatgagaacgttgtgtcacaaacatgtcatagctagaagcagtaccatttgggccatctggtggagccgaagcggcatgagtcaaacccacaatggcattaaaccatattgatggtccaaaaacatcagtgatggtgcgtaagagaggcatgtcaccagaatctctgctttgcatatccaacctatcaagatataacacaatgtcaggcggacttttcttgatgaatgccctaacagacttcaggatcttctcattcttgtgttgatctgaccaggatggtaagagaccgggagtgtcaattacccgtaccttaattccctgaacaaaaccctcaatatcctgaaccttctttgtccccacctggaatgcatcagtactaattttcagttcatcaaaaatagaattgatggttgcacttttaccaaccccacttttaccaagcaccataatcgtacaagaaaaatcaaggggatcttgtgcagctgcctcaagctgttctgccatggcactggcacgatcaaaactaaaggcaccaacacggcttccgtttctgcccctcaactgttcagccaatccaagcctgtacaaaacctgagcaacaacaacattatgtggagtttgccctaatctatgtgaaagcctcaaaaatttgaccctgataaactggagcttctcacgggtctcatcatgctcatctgtctctgcagtggtagagtcttcagcttgctgaggctgattgtgagacacatttccattgacacgaggctgttgtgtaacgcgtggtgcaggttccaaaagtggagcagcacgaccaagacctgctgggcgagcaggtggtaatgctgcagtatcacttctagactctgttggtgaaacagaacttaatacctcagattctctttccatatgttggctttccttaatctctggacctatatttacactgctatcttgctgctttacaatttccttattagattgaatatcatgtcctccattactgttttgactttcagtctctcccttctcctcggaactagatttttccaatggagataaggtcccagctgctacttcaatgctatcattcaagaatttgtcacctgaaacaattttaacactattgaactcagcaccagtcttaccatttctttgttctgttaccatgccagctgatacatcaatttcttcctcccatttttcgtcgtcaataccattactccctgtttccacggaacaggcacttactgagataa

SEQ ID NO: 33527 - DNA, 2614 bp, Arabidopsis thaliana landsberg
tatctacaacctaagtgatcatgcaagaatgaaactagagtaagcagaatgtaaagaactcaaatgataaaagcagagatgaaactaaaatcgaggaactgccaaatgcaagaactggaaagtaaaccaagcacaaagtcaagcactcggtcgagcatgaagctaaacaggtcgagtacaatactaaaaacaccaattttgcacgagacgaacagagtactaaaaacacgagtcttgcacaataaaacgaaacagagctcttaagaatggggtaattggtcttagtgaactcctcaatccattagctaactaacaaactcaatcaagctatccctagataatagattcaaaaccaaatcaatccactttcgtgacaacgattctcataactttatcacttcctaatctcaattttcattgatgaaacataataaagcaggctttaaacaccaatctattaaagtcaataagcagtctaaacatccaaggtcttgggctagaatctacaaatctctgaaattagttggttcagacatttcatcaaacaccttttggatggagaaagtctgaaatcaattttcaattgatcaaaaagaaaatagcattaagaactcctaaaacggaagggaatcatgcatataaacacttagctagctaaagaagagaggaatccacctaaacctaacccatcctcaagaactctgaagaacactactcaagaacaatgaagaacatcatagaacaaaacccagaaaattcataaaactcagaaatcattataaacttagcaaaagatagatctcaatgagataaacaagtttgcagaagaaatcaaatccaaattctcaacagaacaaccagaaaatgcaaaagaaaatcaaagaaccctaaaaaccagcggacaaaacgaagatcctctgggcaaaaacataagaggtctatttataggccatcctaggttgccctaattgggaataagacaaaaaagataagtcggcgcaggagcgctcggccctaggccgagtagaaaagccgagtggcttggtcttggtcacacagctcggctctaggccgagtggcttggtcgagtagcttctcttcatccttaagtgcacaactcggcctccagccgagtgccttggtcgagtaggctccttgttcttcacgtgtgctccactcggcctccagccgagtacataggccgagtatacttcaaatccttccttaggtcccccgaactcgagtctgtccatcccttgtgctagaaacctccaagttgagtccaaaagtacctgattcatctgcaaaacactccaaatgcaagtatgctatgcaatgcaatgcaaaatattcaaaagaaggaaaagagactaagaatgcataaaaagagacttgaatctaagctaaatgcatgaaaaacaagggcttaaaaaggttaaaatctagtgttatcaaacctaaggccgacggaagaaggatttcatgggctagcctacgatgatccgatagatgaatccacagacccttgggtgtgttaagaatatcgttcggattgtaaggatggatagataagccgaaagctttatcgaccaccatagaccggacggataaacggttagtaaactgtgggcggtcgtagtaaacgaccgggtcggaaacatggatggttcgataagctgagggctgaatcgtccaccatggcagcgaaggggcgtacgtttcgaggacggatggaccaatgagccaagagcttgattcggccatcgtgaaccaagggaatcgtatgatccctaatctctatcgtagtacttagactagtggggttggttggttgtatggctaagtaacgataggaattggttcatcaattcacgatcggatacgagtcgttgaacgaatggagtaaggcgacaaacgtgctaaggaatcaaatccgcatattggccaaggtatgtaacgatctagcttactagttaggatagacgtttgggaattgaccgtgaaaatagaataaaggaatatgcgattgttaggcctagaatggttagcgaacaatatgcatgtcttgaacgagtaaaggattgatctaaatctaagggacaaagacgatgaaaccggtacaagagttggttagaattaaaccaaggttagaaagacttccactgtgtaataagagagcgattatagaagttagcctcgtaaaggcaattctatgttgaatcgcgaaaaattaagaggttcggccgggaagaggcgcgaacttgagtacacggtcgccggacgccgagacgtccggaactgggtctcacagcacgtgacatttgtgaggaggtgctagaagatataaagaaatatggtaatactttaaaatacacatacgctaacggtttttcgtacccggaatgtggtgacgtaagcactcctaaatgcgcggagatgtgttacatgagatcgagactcttcaataatctttgcaaccaatgttacatctggttgtgtgctaaacggattagccagatcctgtagagctcacattcgccacgatcctgtcatatttataagtattccatgcaacaatatgtgagcttttaacgttgattatcagtaatggaag

SEQ ID NO: 33528 - DNA, 1234 bp, Arabidopsis thaliana landsberg
ctgccttgattggtgtatagatcaacatgtaaaagccaagtacgtaaacagaggacagcgagtattatattgctccccaaaccaaataacataacttaggagacaattcaacaataactaatgtcttaaacaccttcttgaactgtttcggatactccttttgtccttggatattacgggtatcacattctgttacctttccgtccgtaatgttaaaagatactataatacaatattttcacgctaagacccgaacctgttagtttgaccctgtgaccagtacacacttccaatttgggttaacatccaacagtttaaaacttagaaaaaaaacacaaaaaattcaccattaacatgctatccactgaaccagtcgggtttgagttttaacaaaatccatttgattttgatattttggaattaaatattaggaatggtgagagaaacaacggtgattagttatattgttttcgcaatgttttattagttttttttgttgataatctcatactatctaagtattttttttatggttttagttggatttaaaaattttaatcactttatttttattatgaaacttcatattttgttaaacatggtataattattttttatttttatatttataatactatataatttctaaaagtattaaaaatattaaataaattttaatcaattgatctatggtccagtctggttgactcgatgaccaaatgacctagaagatagtccaattcactatccggatcgggtttaaaaacataacattaaagaattaatgaaatatatagggtgtctggcctatttagggttagatcgatcaaaatgtttatttttttgttggacctatttttgtttgagtaaacgcagcatgtaattactatgttaatttgcatgaatttccaacaaattataaattgcacatttgtgggggtaacactcgtctctaatatgtgaatgttggtcccttttatcttatgtgggatcaacacgctttcttgagatggtatcatttttagattctatttttttttatattgcatggtattgaatgcaacaaagcacaaatatataattatccaaagttaaagaatgtaaatttaccgctagtaaaatcatctcctggtctattcgtatcttctcttccctcactagttctgcttctgcaaggtttttagattcaattaccctatattgtacaatacgcccccattttcttcctagaaaa

SEQ ID NO: 33529 - DNA, 1197 bp, Arabidopsis thaliana landsberg
  unsure (1)..(1197): unsure at all n locations
aagtattttataaattgcaccgggtattctcatattacaataagaaattgagatgaacaagtatatatccaaaagaagagttacatgtataaatatgagcaaacatttaaatcaataagatgtttgtttatcctacataacactcacacatatagtgattggtgtagccttgacaagaacccccgagaaaaccttgttcattacagtaaatatagcatttcgctttttggtctacaccgtttggatcttcgcattttcttccccttgggttctgtgcttgtccaaactctatcagtttatgttaaaaacaaaattaacgattttatttgctaaacaatatttaataaataaatgatatttttaatgaatcacgcgaacaaacttaatttggataatatatattataaaataattccaactcaaaataaataactcacaagaatatatatgatattagtaaagctatttaaagagaaacatatgtcaaagacattgattacctgctgttgggaggacacatagaatangcataaagatgaatgagactttgttagatgcccttttcttatctgagttttattttttcttacaaatatgtcaatttacagtctttgctagaccccaaatatatatatatatggtctagaagagtttattcaactatggaattttaattcatttccaattttatattagatatttttctaacaattaaagacatgtttgcgacaattagaaataaatcttaaaatgacgtttttggcaaaatattagcatacatataaaggaaagtaaaattactttagtacattgttctgtcatctttgaatgtttgaagtgtgcatgaaccatttaagtcgatctgaaccataacatctatattttcttaaagacaaacatatattgagtttttgttgacccatatatatcttgactcattttaacacccataaatttaccttttgataaaaagaaaaaaggaaaaagaaataatatctaaatgacattgttggtattttgataaattcgtaatgaaatatgtttctacttttcttaagttttagatattattctggcccatgtatttctaattattttttttcattttttttgtatctatcaaaaatattgtaagtctttgatttgatgaatttaagaaaaattgaatcataatccatttgggacatacacaaaaat

SEQ ID NO: 33530 - DNA, 731 bp, Arabidopsis thaliana landsberg
taaagaacatactttataaaaaatagacaatgaaaacaaaatacctatgacattattataaaatatcttacacattatttaaaagtatttaaagaacaaaaaaagcaacatttacatggaagataaacaaaatttataaaacagtaaaaatggtctcttctattaaccaattaaaattttctatatcactcataaataatgtatatgtataatagttgtttttttataattatatataatagttcgctataaagctttacaatataaattagttcgtcaaactaaaaagttcatgtaatacaacaagatagttaaaaaatcaaaaacattataaaagaatcactttatattaatccacatttaaaattgaaaacataattataatcattaaaaattaaaaaatattgcatacaaaagtttagataaaaagaaagaaacaaacatacccatagtcaaccttttggacacttttttggacacacatacacacataccttagacacatttttcaaacatttaaaattttagatcctctatatttggatcccatcattggacaatgtcaaatataaatctagttcaaatgtctatttgtaaattctttattgtaaaatatggatcccattgctgtagatgctctaagggaaaatacgcatggtcaattttgtcaagattgagaaagaaaagttgaaccatatataatataacttaacattgattatgtctttctt

SEQ ID NO: 33531 - DNA, 7994 bp, Arabidopsis thaliana landsberg
  unsure (1)..(7994): unsure at all n locations
agattcgcttagaagcttatgagagttccaaaatctacaaggagcgaaccaagtctttccatgacaagaagatagtctcaagaggtttttgttggtgatcaagtgctgctgttcaactctcgcctgaggctttttccaggcaagctcaagtctagatggtctggtcctttctctgttactacagtccgaccttatggtgctattactctagcaggaaagaatggagacttcacagtcaatggccagcgggtcaagaagtacatgatagatcagtttattccagaaggaacttttgttccttcggaggagcctttaaacgcctaatgagtatgaagagtcaagctagagacctaaaacaagctcacttgggagaaagtcccatgcctatatttgtacatatctttaattttccttgttgtttttgatgcatcttgttagtgttttcaggagataagtatgaagagctgagggaaatagattctggccttgagggaacagcaatacactcgaccacggagcaatcaaggacactcgacattgttctggcttctccaccccaggaaatcactcgaccacaccctacagggactgaatgacgatgtgatcgagtatagcaaatgatgcaatcacaacttctccatgtcagtaaatcactcgaccgcggtgctgaccgcagcataagaagagaggtcgagtatcattagagcggttctggccgcgatgaaggagcagaggtcgagtacccccagggggaagctgagacataacagggagattcttcgatggcctgggagcaatcacaggcggctattgacgaccaactccgcttcttctttcactgaggtaagcacctcactccaccattgtaatataccatctcctgtcttttattttgtttctatgatgtgttttgtcctgagtactctcttccaaatttggtcacacagtggactgtgtgatttaagtttgggggagggcttaggaagtgtgtgttacattgtatataatgttgagtctgcattcatctaaggcatagaaaaaacaaaaaaaaaatgaaaaatttcagaaaatgatttcacaaaatagagtgtcatgtagattgcatttcattttagaattgtatatagtgtgtttgcatttaggattgctcatttgcataggagataatgatgatttcaaaccgttaagcatgttttaattcaatgaagtaagttcaatgcccaggttgttagttctatgttgcataactgattgtttctctataataagacctgaccctgctttgaatttacaacttgactatactgctttgattcgaaactcgcttatctgatgtcattccctatctattagaacctgaactgaatttgcaattatcatgtctgtgtattgtttgtgaactcatggctaccatatacatacttggattatcttattaacttcaccaccctctgttaattcaagtagatgtctctcatttttagagcagtttccccccttagcctagccttattttatgccaaagatcatttgtgtgtgactgtgaggtctttttcgattgagcttggtataacgtgttagctatgagccgacaagagcagtctttcatgtagtcctagcccacgctttttgggttatctaggactaggtggagacttgtatttgggattgggattgtgtatcgattgaatgggaatgagaaagagaatgaaaataaaaagaaaaggaaaaaaaaattgtttacagttcttaagggggatacaaaaaagtgttagtctagtaaagggtttggaattcaaagaagttaggcattgtgattcaaagaaaaggataaatcgccctatgtgctaagattagaatagaagccttaagtntgtcaaagtatataaccaagtccgctagactcttatatcgtttcaaagaagaaccacttagaacttgaaccaaaagagagagaaaaatgagaaaaagggtagagttagcacatttatgtgactgggatcatcttctaagctatcatactatatcattgagtagatgggagtcttttcttgtttatgtccattggcttttacctttagcattctactaaagctcaatcttttctctcagagtcccctgatactcgaccaaacccttagagggaccatttttgtctcttagcctaagcccaaaaccaaatgagttcataaccatgacattgctggatccactgttcgtgcttaatgaatgttaaaggccactggttgatgtgaatgcttgaatagattaagacaagttgttaggttgcattgtgacgagtatggctaacgtttttgagtaagggtctatcatcttgcaacctagaattagctacctggacattgagcttacccattttatatgcatgcttcggtttttgaatccccaccttcaaacctctccttcaacttaagattttttgtttgcttgagggcaagcaagagataagtttgggggagttgataacactgtattttactcattttaggtgtatgtttatcatcatttagctttgcatttactcattgtatcatatcattttgcaccattttagcttgttttgcatacttaggcatctaggatcatcttgcattcgcattgcatgttttggtgtgttttcaggtgcaaaaggaggcatcactctactcgacctcactactcgatccaggatgctacaaaggaggctgcagtttactcgaccctcctactcgatcaaggcaacctcagatgaagcagtagattcaactactcgcccctcctactcgatccactactcgatccatttactcgaccaagggtgaccatctctacaagacttgttgagctatcaaagcgtcttcggatcctcctcattccccactcaaccagacatctgagcatacggataggagaggatgaagcatctactcgaccaattgatcactcggagcatagacacaaaggcgtagactttgcagcaccctctttacacgatccccaaggtcgagtattcgcccaaaccgcctcaagtctcttgtcttctggtgaatctagggtttcaacattttactataaatagatcattttggggtttgtccaaaagatctagactttatctttcagtttttctttatgtttctgaatcttgaaactttaattactcttaatctatttcgtttttgcatttgattgtttaagtaaagttgtttagcttgtttagatctacattttggtatgattttagtaatttctggatttgtgttcttgagaatgttgcttgagtagggattagggttcttgaggatggattagaaaagggtaatctctaggttagttaggtggttagtgtttaggtttatactcttctggattcgcttgccccctatggggtttttgctggctaatgtggagattcgatcatagacgtccagcgtccaaaagacgttcaaatggatgtctgatctacgaattccagagatttgtagactcgaccaagagatttgcttgtctgcttattggttttggtagatcgtttcttaaaccctgctctgctatgtttcataaacgagagttgagattaggaagtggtagagttatgggggtctctatcatgagagtggattgacccggtttttgaatctatcgtcaagggtacctccctttcgcctattagccatttgatgaaccctagagttgcccttatcaatgaatccatctttaggacttctattaaatttatttgtatcccctgttgattgcacttttatttacctgttatttgtatctcctatttgtatcccctattgattgtattttagttcttaattttgtcacctgttggttctactcgacccaatgatcgagtagggctcttaaagttctcatttttacttgtttgaatcctgacctaggattgttactagaaacccaccatcatcataatctggcttgacttagttgcttctatacacatcttgattgctagcaatacagtggactggattgacaccccctatagctgcatcgacatgtttgtgttttaggggaattgaactgaatcacacattcaacataagcaggcctaaaaaacatgcttatcagactggctatcgcttccacccactttgacacatagtgcactgctaccagtatgtacttgtttccataagaagatggaaatggacccatgaaatcaattccccacacatcaaaaatttcaacttccaagatcggattttgaggcatctcattccttctgctgatgttccctcttctctaacatgattcacattttgagacaaattcctgagcatgcttaaacattatcggccaccataaacctgcttgcaggatttttgacactgtcctgaaagttgcaaagtggccaccataggcagacccatggcaatacagtaggatgccatcagtttcttcttatgagacgcatcacttgtagatcttatctttacagagtgtgtagagataaggctcggcccattagaaatggttaatgtccttgaagaacttcttcttctcatagctcaacatattcggaggctcttcaccactaaccaagtagttgacgtgatcagcataccacgaaagcttatcttttatggcacatacttgatcgagtgatttcaaaatttgagcactctcgttcagttgttgaatagccattagctgttcttctggcatggagtcgtcaatagggaccttatcttcaattctcatcctagagagatggtcagctacaccgttttcaattcccttcttattaactatcttcatgtcaaacttttgaagcaataagatccaccttagaagtcttggcttggtatccttcttagcatatatatgcctcaaagtagcatgatcagtgtagactgtcaccttagaacctactaggtagcttctaaatttctcgaatgcaaataccatagctagcagttctttctctgtagtggcataccttacttgtgcatcatccatcgttctgctcgcgtagtagatgacgtgaagtttgccatcaatcttttgtcctaggacacctgcaactacataatcggatgcgtcacacatgatctcaaatgggttatcccagatgggtgcttgaacgacttgtacgatcaaatcattactttctcattaatacaatcaagaacaccgtccgcggtaattgagaattctgttgttctttgagaatctcacaaagattcattctttgaagaaacccttaaaataaactctgctgtgcgagttttgactctcacacaaatgatcattaaaatagttttcattaatatgaacggaaattaaaagaaatggtcattaaaaatttcaagaatgctattgttatgttcaaggtaaaaagtttctgacgagtcactccaaattcaagctcaaatagcaatataattttagttaaaaataaactaaagatatgtgattttttcttcaattcaagttattttaacattatatctaaattatttgtttttttttttaatgaatgcaaaatttgttcaccaaaaaatcctggtttacatcaagtgcatcttttctaagtttttgaaaaatctaaagacaaaataaaaatttacattttaatgcctagtggaaagccaaaatatgaaaaggttatcatacttcgggttcccggtttttcgaagtagtgtaatttggttgcgaatgtttttgtcgatggttctctctagggtagttgcagtgaccgactcttctctatgccatctgttatttctctctcgtcacatggtgtggactgtgattgacagtgcgtattgcagaagcagcaacaccttcctttcaacagtcggatttgtgatgagcagtgagagttgatcccaatcccactacgaagtaatcttttaactagcttttctcatatttcccttgaataacagcattgaaaaagaggtggtttctagtttcgacccgtttaatgcagaatttacatgagatatcggcttgtatattccacttctgcatgtaaatgccaaatgatcagagcacattttagcatactagtattatattacgatcctcacaagccaacctgacataataaaatgacataatatatggtactattttatgtcatgaaattagtgatacaaaaataaaattgaaggggtcaatagaggatttggaacaaaagatatagggatcatcataaacattattaaccagttcacttaagttttacatttaaaaattaaaatacaaagaaatatttataatttacaaaatctgttggggtcagttgacctcccaccttaccacgtagctacgtggttaaaacaatatgttctcgaacgtatacttgttccaagttaccaatgcaacttcgatattaaaacaatattgtgattactgattagtcatgactcatatatccttttaatcctaactaattaataaacataatccattgaaaatgcgaacccattgcaatattgcatcttttaagttgacgtcggtttagtaaaccgttgccaataccaatgcttctcccaaacttgatacatagaatccacaggtatccctttggtctcgggcaagaacatgatgacgaatatcgtcattgtaaagatccaaccgccgtaaaacaagaaagcaccgtacttgaaatcgcagagcgttgctaagaacgtttgagagagagcaaacgttgcggcgaagttcacggcaacgcttaagctctgaccagctggtcgtatcttgagtgggaatatctcacttgggacaagccagcttaatggcccccacgaccatccaaatccagctgcgtatatgcaaagtaacaccaccaccgtcacggcgtaacccttcttcatctctccgtccccggtggctcccactgtcacagctagtaacacagccactgcaatctgtacacaagattgagttatcaatatttggcaattggcatgtttggcccaatcacataaatttgtttttgtcactcttaacagtttagtataatttgaagacggtaaccaaagtaaaacgttactaaaaatgcttcatatttcggaacacatttcattttagattttcatagttacttttctaagattatgttaaatagacgaagaaaaaactaaaaaatgtgatcaagtgtcgttagctcaattggtaaagaccgtatgcaaagcttagaggtcgccgattcgaatgacgcttgggacgaaactaatattacatgttgtggtttcgagcctcgagtattacagactttaaaagttaaatgtcaagaaaaaacatttattcaagatatataaacaatattaatggattaaaaatctcttacggtttcctagtgtgatatccagcaatatttgctacattggtcaacgcttggccccaacgttgtatctcataatctgttctgttcttgcaagtctctttaaaagactctccaaattctccctcttgtttcctaacatcagaaggatctaaatcatagaaaactggtatcacaatttccttgcaattcacaatctctaccaactcattcaaacaccaactcgaagaagagtagtttttggagaacacaaccacnnnnnnnnnnnnnnnnnnnnnnnnnnntataagctcggtaccgatcgagttccctctctcaatctcattgtctttgaaagcaataatcatttttcgatcaagctccttgagaaagtgggtgaggaaagttacacggatatcttccccgctgaagcttgtgaaaacgtcgtaaacccagttatgagaagaagaagaagccattgaaatgttttttgtttttcgaaaggaacaacgatcatgagatgagaaactcaagaggaaacgaagaaagtcaatgacctctgttttctttgcattaatgagcactagagggaatgagtttagctagtcgtcgaagacaaataagttacttaatagtatgaggtttaacacaacgatgtatgaaccttagaatcacgttagatgtttcg

SEQ ID NO: 33532 - DNA, 3176 bp, Arabidopsis thaliana landsberg
ggaattatagacactcagagtgctgatacattgtcttgacaattttgccatttcgttcatcaaaaagcaaatgaatgaactttgtttacttgagaatacttcaacgcgttaacaaaaattgttgatatatacgattgtacaaggtactaaagtaatgttctgtatttgtgacttctctgattgcagactatttataccaaccagcaagaaagtgtcgaagtatgaagcagaaggcgcaggctagagcctgtagcaaaaacaagcagagtatgacaacactaaagcgactacttcattatatacgaatggcgatatacatatatctgagacctacctggaaaacgagaagatggatgcaaagagacttttctgatttaggaccaaacaacctcaagtaaacattgacgagtgtcccatcttttgtgccggtcagtaatccggtagcaggatcatacctggatattttcaaaagacaagatgagtgatgcgtctgttctttaatcagtctacaaagggtaagaaaacaaagggggttaccttgggagacgatggcgcggacatttcacaatcccagcaagctgaagagttatcatatatagtatgttaaatttttgaaacatgagttgacaagattatacgtatgccatagaagagtgaaaaggtgatatgaacctgaggaagcgataatagaaagttcagaacttgaggaagaaagaagatgaggagggtttcactgcagaagcaaaatttcaatacagaaagatggcatgggaatcagttgcatggtcatacagtagctggatatatgatgcaaatgatcaatctaagagttggtagtttccatgtattagtgaagtgcctgtgcctcagagaagataagtgggtttggaagtatacctgaagtgacccagaataccaacaactgccatagtcattccggcgaagactgtgtaagtgtctccaacaaaaactgaagaaggatacctaacagcagaagattgcgagaactggtcagaaatatcattacttccactcaaaaaaaaaaagttttaaagagaaagcctgctagggattttaccaattgtaagcaagcattgccaaggatgtggccatcagcggttgagtaagaaatatcgagaaggcatgagcttggtgatactcgggatcaacagatgctccgatttgcataacgttgtgtatcaggatctacaggtaactgggatgcatcatatctcaacccaaaagaaacaaaatgagaaaaattcagagacattatgtatgaccataagacttacagcagcggcaataacaactgtttgaccgatttcaaggccattcagaccagcgtggatgttaatagagtttgtacaaaagacagcaagtagccccatatataacttatatatccttcctgccacgttaaaacatctattgagttagctgactataatcatttacctcctcaaaagaaaaatacaattatggaagtcaatttgtacaaataggtggtaacatgtacaagaaccattgcttagatcaagcactagcggaatcgttggctcgtttcgtttcccgcgctctggattttgactccaaaatctgttcgcatggcctgacaaggatttcagagcaattaccaatctgcgtcacaacgaccaatagaaatttgtcacgtctctgaattacgacaccgtgtcatccaagtagaaccttaagtttgccacgtcgctgtaaaatctagtatgtgtgttgattaatcataactttaattctccatatatgaccccaaaaagcaaatgtttcaattcttctggcatatataacttcctgttgctacaaaaatatcataacttcgtggttatgaaaggagtctaatttatatatatatatatatatatatatatatatatatatatatatatatataataaccttaaaatcaaattacgtcatatgttaatattattcataaattattcatagctagacatatcacatattgtttctgtagcttttaaagcgatcgataaattgtacatttcttttttgagtcctagagaaatgggattttctttttgtcaacaagtgtatttaattagagtgaaggaagctattgctcaaactaagcccataataacgatagcaaattttattaatgatagatatagtatcatatctataaataagtaaaagatgtggctagaagaacacactcgacgaactgacgatgaagcacaccatagctcttgctctgcttttgacacttagcttccttttaacgtatcttctccttgtccgttgtcgctgttaaatcacgacgacggagatcaagctcacagctcactggcactgcttccgggacctctcggaccttcgggatgacccgtaatcggaaaccttctccagatcatcggaaaagctcctcaccgttcatttgctgatctctcgagagtttatggaccagtcatgagtcttaggcttggaagtttaaccacagtggtcatttcttcaccagatgcagcaagagaggttctgaaaacgcttgaccatgtcttatctggacgtacctttagcgagacggttcgagccttcggtcaccatgaagtctccatagcatggctaccttcgacgtcgtctcgttggaggtaacttataaattagtgtgaattaaatatgataatctatatgaatacaatattgttcctattaggttatggaggaaggtactggcgacaaaacttttctcacgggagcgtcacaaagccacaaagtccgtacggtctaagaaagcgaaagaacttataacattcattatcgaaagagccgaaagaggcttctcggtggacattgctcgtgcttgcttcgtcacatcacatcgcttaatgtaatctcaaacgttgtgttttccaccgacttaggtagttacgatgcgaaagcctccacggaactccaggattcgttgtctcgtatgatgaaaataatggggaaaccgaacctcgcaaactattttccgtctcttgagtttcttgatctacaaggtatccggaaagagatgaaggtgtgttcggagaggttctttcaggtttttcaagggctcatcgatgctagaatcgcggaaagatcatcccagactggacctagagatgcattaagaggcgatttgttggattcactga

SEQ ID NO: 33533 - DNA, 2100 bp, Arabidopsis thaliana landsberg
actcatgcagaagggatctatcaatcaatactcaatcacctagcatactgagaattcgacactactctaacccatcctcagaaacctattcactactcagacatcataacagaaagcataaacgttgaacaagttgaagacatgagaacagacagtggaacagcaggatgataacagaatgaacaacaataaacgaaatcaagaacaaaagctgaatactgaatactgaatagataaagagaaatccgtattacaaaaggtctagaacacaaagtctgcggaataaaactagataaaaaacttgtttgcgaaaatgtgaagtacatgctacttatagccaaatatctcgaaaccctaatactcaaaacgacaaagtattgggatagattaagaactgtactcgacccaagtggtcgagttggaggtcgagtgaatagctggagtctttttatcttccttgtgctcgagtgtctggttgagtgcagaatgaagaagactctgaagcttgccatcgggtatgtagtcgagtggtggtgatggtgatactcgacttcaaggtagagtggtgagatcgagtagtagtctggcaatgaaggtgaagacactcgacctcggagtcgagtgatgtgatcgagtgatggtcaggtgatgggatgaagacactcgacctcggggtcgagtgatgtggtgaagtagtgatgtcctctactcgaccaggaggtcgagtgatctgttgagatcttgaagcttctactcgacctcggggtcgagtggtttgacatgatcaggcccgcttcttccagatagctcgtcaacagctccaaatcacctgaaatcaacgcaaatatgcaacatgcatgcaaatctatcctaaacatgtaaagtgatgacaaatgatgagaaatgatataaaacagtgatgatatgatgctaaagtgatgaaaaatggatgctcaaaacatgcaaaatacacacttatcaactcccccaaacttagtctttgcttgccctcaagcaaacaatcaagaacaagctggaggtgaggtttgaaagcggggactcagagccaaagcaccagataaaccatacgaaatcaatgtccaagttgaaagttctaagctgcaagatcgaattctacttaaaaacgttagccatgcctcattatcaatcaattcgactcatatgctcgacctacacatgttattaaatctaccaatccctttaacattcattagttgtggaacgtgaatcaagcaatgcatcatcaatgaactcatttggctaaggtaaaaggtcgtgagacaaagatggtcccttacagaataggcttcagtaacaggggatctctcaaaaaatgattaagctttagtagaatgttaaaggtaagtctcaagctatgcatacagagataagatcccatctacccagagtacatcaaatgaagctctaatggtaatcccatctccaatcccaatataagaacttaactctaccctttgcattcatgaatcttttaagccctttttctaatcattcttttcttttctcttaactctaggagaagctttctcaacactttgatacatctagcggatttggatttctttaacaactaaggttcctgtttttaacattttaaaaccaagggcttttgcccatcttcaatagctaacaagaactctttcttttctttacaaaacccaaaacctttactagactttttctgcttctttaccttacttcacctagagtcttttactttttctcatcaatgaatcaaccattttttttcttttaaacacatcccaacccaaagtataagcgcccacctagtcctatctagtccgaaaaatgcgaactagaactacatgagacactatctctgtcgttacgaacctaacactttctaccaagcttaatcggaataagacctcacaaacactcacaagtgatatagggcttgaaagaaagtctaggtttgggtttcagttaactgctctaataaggagagtcagctacttggatcaaaatgaataagaaaaaccaagtattttagggtatccgtgagttcaaatttgatgcatacatgataattaaata

SEQ ID NO: 33534 - DNA, 547 bp, Arabidopsis thaliana landsberg
gctgctacagggttgggtcatgtttactcaaagtgtggaacattagaatctgctcacaagatattcaatggaatccaggaaaaacacaagagcaaagatgtagttctatggggtgcgttaatatccggctacgggatgcacggagatggtcataatgcgttgcaagttttcatggaaatggttcgatctggtgtaacgccaaacgaaatcacatttacatctgccttgaatgcttgcagtcattcgggtttggttgaagaaggcttgacattattcaggttcatgcttgaacattacaaaacgttagccagatcaaaccattacacttgcattgttgatctccttggtcgagcaggtcggttagacgaagcttacaatctcatcacaacaattccatttgaaccaacgtcaaccgtttggggtgcgttgcttgctgcttgtgtcacacatgagaatgtccagcttggagaaatggcagcaaacaagttgttcgagctggaaccagagaacacgggcaactatgtgttgttggcaaacatctatgcgg

SEQ ID NO: 33535 - DNA, 1491 bp, Arabidopsis thaliana landsberg
attttcccgccaaaaatgaaaaccctgtgattttcccgccaaaaacgaaaacctgtgattttcccgccaaaaacgaaaaacatgtaattttccagccaaaaacaaaaacccgttattttcccgccaaaaacgtaaacccgtgattttcccgccaaaaacgaaaaacatgtaattttccagtcaaaaacgaaaacccgtgattttcccgccaaaaacgaaaacccgtgattttcccgccaaaaacgtaaacccgtgattttcccgccaaaaacgaaaacacgtgatttttctgccaaaaacgaaaacctgtgattttcccgccaaaaacgtaaatccgtgattttctcgctaaaaacgtaaacccgtaatttttccgccaaaaacgtaaatccgtaaacggtagaatctgtaaatattctaagtttgatgataatgaattaataattattaataatgataatttttattattgttttataataataattaattaaattattatttaaatgggttaacccatttaacaactcaacctatcaaattaaatgagttatgggttgacccaacccataaaacaaaatgagttggattaacccataactcatataaccctaaactcatttgattatgagttgagttacctattttgacacccctaattatatataacaactttatctttaaatatccatatatttcttagatgatatttttgtgctcaaacgttagtaagttactaacatacatcatctggtaacaacgattgtatatggcaccgacgttggataaaatcttgggaaatttgcaagtataacctaaaaaaatttaataatttggaaactaacacttcaaaaactataaggtgatattgtgtatattatatgtaataaatacaattataccctcttcttctttcttatgtgtgaacattttctcttttctttcttcttttcttccactaccaccacaaccaccactacctttaaaaccattgtcgccggaaaatcgtatccagagccacatcgccggaaaatcgtcaccggagccatcatcaccattgtactattctattttgctgttagatttttgaaaattgaaagttgagatgatttcatttcgtttaatgatttttgtttgggttctatgtatagtatcttagggtttagttttcttaaatcaatatatatttataattatcttttcgtcaccggcaccgccattgtcgtcaccatcgccactaacaccgcgattgttgccgtcaccatcaccaccggcactgccactgttgtcgtcaccatcgccatcggcaccaccactgttgtctcactatcgccatcggcaccaccactgttatcatcactattaccatcggcaccgctattgttactattaccatcttcgctatcattaagctagccaacacttttctctttttatgtatgtccataaaccaaaaagagtgtgaaagatcacgtcactcttgttctgctt

SEQ ID NO: 33536 - DNA, 1167 bp, Arabidopsis thaliana landsberg
aaatgattatctcatcaataacaaagaattggtgaatgatacacaaattcattacactatctttagttcataaatagttttatatttacttcgcattatagcattcataatctctctaatgaaatccatgatacgtttctatatcatccaataatgaaaacataacaccaaatagaaaatttgcaaatcagtttaattatgagatttcatatttgttttaataatcaggttagtagtataatagtatgttctatcatattttcagctaacacttaatgtcgtcgttgttgaggaaacaaaattagaaatcgcatgcaatcccttttgtcaacgaaagtttgtataataaattcacattgttgtcaagttttcaagtttcaaccatatttctttcttccacaggtttctaatttcaatgtatagtaaaaacagtttgactttttttgatatacacttcgaagtgaatagagttaagaccgcgtgagtaggaaacagccaacacatcgagacgacccaaaaatgcaaaaatacaacaactaaaaataaaaataaagctattttgattacattttttaaacagatttaaaaatagctaatcatatcatattaaagttatgttatttaaacagtcttaaaaggaattgaataacgtgcgatgttcctaaatatgaatgtatgattaaatcatgtaaaacatagtactaataatcttatatagaaaaaattataaattagtggaacgttccatgcattcattgtattcagtaaataatctttactattggcaattttgtcgaacttatgacccgcttgctttaattagaagactacagagccatataaaactgcttgtccattgtgtaaacgttattaaataagttttaaccgtgggtttagaaaatgttttgttttattcaccgagttaaaaacaattaatttacttactattttaaaataccaattaattaattaattaaaatattccttaaaacctaactaattgttcttgtagaaacagtcaaataatcttataatgaaaaaatccctatttttagattataagaatctttttgtttcacttataaccaaaacaatgttggtggttttttaagcaaaaggtaagcaattcttagtaccaatattaaatttaacaaattgccttttacc

SEQ ID NO: 33537 - DNA, 1320 bp, Arabidopsis thaliana landsberg
caaacttttgtaccacaaacttcataaaccctatgctttggttaggactgtttcatcatacgtttcataaaaataagtgcttaggttcataaggtagtattagggtttagtttgcgtatggtgtatcccaatggtgctgttaaatacaaaagtttcatcatccatttcataaaactcattgcgtgggttccttagtcagtattagggtttagttttcgacttttgtacgcaattttcgatttcagtaaaatcttaatgaagcagattacggaccaaagaaggggaaatacacaaattgtgaggtttcttatatatacatttcaaaagcggtgttacaaggcattgcatacttacatcgggattcaagaaaccaacacaaatatatacgaattgtagggagcacacaacaatcaaaatagtaaggtatacaccacatttggctataccaaactattttgaaaaatgtattgtagcctgcattaggaaaagtaaataaacccgcttccgcaaagtaggccggaacaaccattattatgcccaaaccagaaagttacttcataacaccttataacaccccatagcagtagttaacgttttctatagcattacggcaggaggctttgttgtggccaacaccacaacaacgtgagcacctccttagggaactggacttcttgcgctgcaaattagaagtatagaagctgttagcttttaaaaaatagaatggactatgtactcttttaatgttctgaacttgccttgaattcaccacgagatagattttctcctcgtaacttagcttcactaactcattaaaatattcgtttgctgctaacgaatctgtaagaactccaagtcgagcagtagcggctattgcgtaagcacaaggtatccctaaaccctgaaaatccaagcaagaacaaatagactcgtccaatttgacaataaaacattcaccaggccgaacttggacctggaactcaaagttgcaaatcggcttaacagacattgacatgacggcttgatagatttcctatactctttcctgcactctcgaagataaagtggtagggcagtcttcaacttgatcctttctaatagcaaaccaatccatcaaagttgttcttatgtactccagcatgcaaataagcgggtactcgcgtgcctatctaaaaacgttgttttacgactcacatatgttactatccataatattgaaacgccgaccttttgaatgccctctggtctattctgaaaaccctatacacgttacaacatacatggttatgtaatttacaatcatgtcaaccactttactat

SEQ ID NO: 33538 - DNA, 2113 bp, Arabidopsis thaliana landsberg
actccttcaacaccattcaacgaccaagaacctttttcaaaactgtatcctcctatgcctccactggggtctcatcttgctcttcttgatcaagtccatcctcactttatggccagtttccaccgctttcaacggggatgatacaacctggtaagatctaaattttagcaagcaatacccaagttaagtggaaaagccggacactgacacattacaacgtgggagcaggagtgtctttgtgagaacgcatggaactggttttcaatctcttttacctcttttttatgcttaaacatgactaaattgacttaagttttcttatactcatgatgtcatgtttaagcgcttttagtttacttaaatcaggaacaaatcttttaagcattacatgaactcttgcattgagagtgtcaaccatattgagatattgaaagacaggtttgtgtttgccttgtggtcctttcttctgtcggcttttaattaccttggaaacattattatttagttattacattagcataaaagaaacactcagtttagtgagagctattgatatgatgaagtcaacacaaataactttttttattatattatactctttagctacaatatatgactcgagattcacctacttcacatctggcagctggttctgcacttcagacatatattaaacaggtccagtcataacttactcaaacaattttaaatttgaacttaacaaactaacaatggatctcttgtctaaacttttaagtacaattcaatggtaatttttgtttttttctcagagcttgaacttatcagcagaccaatacttattaaacccatctcttatgtgaaccagaggaatctcttgggatggtctgaattggccttctaggtttctttgaatcacctgtagaggaaccccgtctcacccttgaagaagaagaaactgaaacaggcttccgagtagtcgatggactaactactgaaggcggctttacagatttcacaagtgacgtcgaggatttagctggcgctgatttattggtttgtcccaaagttgcgggttcctcctttacggaatcaactggagcctccagcacagctcgctggggtgtgtttacagtagcttctgaatcagaggatgaagaagctgtaagaacatccatatcataaagaagattatccattctcattgggaactcatgggtatttgagactgcaggtgaataggaggacctccggagcctagtgagctgtgtgacctgcacatttgacaacgaatggacggtatcacatacaacgatttttagtactgaagttgttaccaagaaaaatcgaaagtaaggctctggaacttgtaaaggtcggttaagtttatcaccttgtcttctaacaccaatacgtctctcttgagcttcttaattattgtttttttcctgctaataatctcttcgagctctgcttctcgctgttaaagaaagaagaaacatatgtttgtgtaagtcatatggaaaaaagtttaatggcgtttgaaaaagtctaggaatccacaattacttttgaaccagctttgttggtcagctgaagaaatgaagttaagtcctttattgttgcatctttctcttgacactcctttctgagggaaagcatgtcttggtcgagtgaaagactatcaaactgcaataaatatttaaaccaagtgagtattcatttgcaacaagatccaccacaaagattgtttcagcaaatttcacatattcttaacatacatgggtttctgcagcagaagtgacactagaacaccaatctgacatgtaagacatacgcctttcctctggctctgcatcaagcaccagatttgtgggagctttatcctaaacagtataatcagtgaaaacatgttcaatataagatcatatacagatgctcagtgattgccatggaaaagcaaagagcacacacacaaacacacctgtacagcaggtgacgagtgatgatgttgatcacatagccagcagccacaaactacgaaattaatcctctcagatccaaacttttctttaagagctgactgtggataatcatgatctgagacctttgatacagctccagactgatcctt

SEQ ID NO: 33539 - DNA, 894 bp, Arabidopsis thaliana landsberg
aaatcacacatcaaagggtaatgatgtatccaataacatttctatacatgggtttaaattttctcgaataatatatcaatcttgcactgctttctttaattattattacagatcctttaagtatccttgagcctcattgaattgcttagtgtataaaagtaggcatggtatccgacagctaaagagtggttgggcggatggaccgtcctatgtgacacaatgtccaattcggatgggacaaagatatgtttacaacttcacggtgaccggacaaagaggaaccttgtggaggcatgctcatatgcagcggatgagagctactgagtacggaccattaatcattcgtcctaggctaatcaaccatacccttttaccaaaccctacaaacaagttcctatactctttggcattatatatgttttttcctcttagtcgtaacctttttaccttacgtatgagtcccaaaagactgatcaatgttctatgattaccttagatagtaattgatattacttggacactctaatctttatcaaattcaaatcgattagaagttgatcaacaaaaaaaataaaaaaacttgtttaaatagacgtctaaatggctaattagttcgtcaatgtgcatgttcaatatatatatataatttttttttttttaagtttttttagaacagtgttttgattaaatgattgaacaactaatgtttttgagttgtgcataggtgagtggtttaatgctgatcctcaagcagtggtgcaacaagctttttagacgggtgcaggttcaaatgcatttgatgctgatacttttaatgggctcccaggaccattatacaattgctctacaaaaggtaaatgatcacttttttatatgtgattaattttaaataag

SEQ ID NO: 33540 - DNA, 899 bp, Arabidopsis thaliana landsberg
  unsure (1)..(899): unsure at all n locations
atgcacactcactctcattgggtagttcagctattttgctctgctgtgctcggtaggacagtggagttccaattgcttgaactagttcccagttatattgtcttcccatcctcatttgcacatttgtatcatttgataatcactatagaaaacattactattattgtcatgcctgtttctttagaggacttactctcatcttcttatattcaataggaaggtgacgcaatagttgagaaggcatcatatgaccgtacaaatttcactgagaaggcaacaagcgcttccgcgtactcctgacaatgttagatgacacttgccaaaacttatgtttctatgaccaaagaacacagtactcttcgcttagctcctgctcaataacacacacatcagaaattgcctcttctgctctcaaaagctgcaatcaaaagatgacatataacgttagcggaagctcagcctgtaactatcggcttatcagctctactcttcaaggaaccactacaacctagccaccacaatgatgaccatgaaatctcacatcaagaaccttaccgttcagaccacattgtttggacaatctgttgctaaggccataccaaagaccctagagtgctcggtggtcgagctgacatcaaactggttaacagagccgtctcttcaggagctagtggatgagaacataaactcaactagacccgttgacaacaacctcgggaagtaaaaaccttactgggacaggtacactcgagccattcttatttgcaattgtatcacagcttaaagcactgaagaggtttgttttcttcatcaagtcattacgaaaatagatatctagatacttactaantcaggntgaatcttgtacatanaattgtagaccttataacagcagcaga

SEQ ID NO: 33541 - DNA, 3181 bp, Arabidopsis thaliana landsberg
cagccgaccataaacaacagcaaattccgcaaaatccctgattaggtttcatgtcactactcctttctgtttttccatatggtaacaagcgagacgcccattagagacataacaaccgtctgcaaaatatcaaaaatttccggttaaacaaaacatggttaagagaagaaaatagatgtaacaaaactatattgaaaactcacggagattgctggaggcactccaacgagaggatcttgaaagaactttgtagcgagggccagagcgagaagactactttgcattcctgtttcataggaaattgttctttgcagagcttttacatcaggtgccttgctgaagaagaaaccagtgaaaaagtaaccagcaacaaaagccaagagatgaaacgtgatgacgaggaacaaaatggttgcaccaaacggagacaagattgaatctatattcaaagcaaggggtgctcctatgcaacaactcatatcgataactgttaacgccgggagaaatggtttgattgcattagacaaccttggaaacaacctgcactcacatttgtttagttttttttctaacatataacattacaataattctaatcgattgagatgatgtcccaccggttcagaagtagtcctgcggcaataggtgtaatcaccacttggagaatgctagagatcattccaaacacatcaacgggaagctttttaccaatgagtaagagtgaaagcataggtgtaacgaggacgcagtagcggttgatagagatgtcatgacgatgctaagaggtgccaatgctggatcagttaggaatgtcgcatagtttgacaactgagctccactaacacatgataccaacatgattccagcacctgagagattgagaaagattggttaatgtgagagataggttaagagtcttgaatgatgagagacagggagcttttaccaattggagttgggagttggaaaagagaaacagcagctaggccaaagatgaaacctaggacaggctttacgagatattgtccaacataaccgaggaggatagcttttggtcttttgaaagcttcaagaaagtctttctcgtttgaattgataccaaccgcaaacatcaaaaaacctaaagcgggcacaaagtacctaaaataacaggagagtaaagaagagctttttagcaaacctcatgtctacaattcaaagtcttagatcaatttgaccttgttccaatgggaagagcctcgacgtaaaccaagtgaaagaaggaggatagataagagctaatattgtactcgccaacactacatgaggaagaattgagtttgctttcttcattctatccactatagaaggcttctcaataacctgcaagccacttactagattcatgttggttctcggaagtaacataaaattcttaacaactgaaatcatcagcaaacgaagaacaaagtagcaaaactgtgatccagggatgatttttagctaatcagattcaaaagtaggataattaacaagtcttcaatagtgcaaaatcacattttgacattaaagatgacacattttgagaagactattcaaacccaacataacatagaatggaaaaggaaagatcccatagcgcacaccttgaatggatcagctccaggatccaaacccatctccgagaaattatcagatgcatatctacgccacaaattcctcgatccgccaactgtgtatatagtaggttgaagaaaaccatgagagaagaaagtgtaaattttgcaggtacccaacaagcataaacgcctgaggatcgatgagagtaagatgaacaaaccttgagagattgggtcgatgcgaagtggagaactcagagaagtgttcgagaagatgttgggcgggaaaacttgaatccgttgactgcgataaacagctcgtggtagaagacgaagtgttgactttaggtgcagggtctctattggagttgtgatcacgctcattttttttctttggactttgtgatctttcagattcttcagaagaagtggtgaaactctgagagttctgggaaatggaagaaagagggagagattcagagaatctgggacccgagaatctgtcgcatcatcaacctaacaaaacccgacccgacccagttagagtttaagtttctggaaatggcccactgggctttaagataatgtatatttcaaattatgattttcttattttaaaactgatatttggaatataatgtgttgtgtagtgagaaagacgcaattaatatacttaagttagggtaataaaaaaatcggtacaagactacaaagcaaagacacaaatcaaggagaaaacttccacaaattgtctctctttctttcctacacaccaatttgttttgtgattctttcgattgcattcttctttttcgaattcccgatcactggattttcccgtttaaccggaaaatccagtggattagattttacccagtgttatctttttggattggattcgatgactgttacggaggacgaaaaaccggttcttgagctgctggtgagagttgaagacgacgatgagaaagggccttatgtgaaattgagtgaggttttagagaaaggtcaagaatcagagcaggagaaggaagaagaaaagactgattcgtcgcggttttggttttgggtcaagctttctcttttattcgcctttcttgctgcattggctgttgtgggttacatttggatcggtccattgatcatggataaggtttgattttaacttccatcatcagattcagttttagctttatttgctcttgcatgtgtctcaaaaagtttaattctttgtctgattgaattctttaactcatgattattcactcttgtggaagattctaagtagtcttgaggaatgaggctgatctagttgcgtatagtctgcatgcttgtagtctgactagatttgatgttgatgcttaatgtatctattagtattcatgtatgatcaaagagttcttgcatttgagcttgttgtatgtgtaatgtcttttacaatcttcactaacaaggggaattatctacttgcctggttctgcaggagcttataccgcttatacaatggaagatacgaacttttacacatcctgtgtgtggtcttcttgtttttgcatcagtggcgatatttccaactatacttc

SEQ ID NO: 33542 - DNA, 1281 bp, Arabidopsis thaliana landsberg
gaaccgggatcttttgagagttggaacaatcaaacacaaactatattaaagtctaaaagtaaataaataaaagaacagcaaaaatccaatcagaaaacaaaatacgtaatctaaaaagaaaacaaaaaaaaataaagttctaaatgaaaccaacgactaaagaagtttaggccctagtgttgccagattctaattcctctactggaaagaaatatctgttatgcaacataattgaatcagcggcaacaggctcgttgtcttggttcctatgccatgtgtactgcgcgtgagtcctattcataatctctaaaaccgcatggccaaaactcgcctctctatatgctgagtaactcggttgtggatccacgaaactacatcaaccaagacatacaaatgttagtttcacatcaccaaaacaacaaaatattattgaaaaaattgtttactctctttacctgtttgcaattccttcaatgtttcctccatctccgatagtgatgtaaataggagcattaggatctttcacaggagagctcaagccattggtgatgttgtacttaatattggagatacgttcagatctctcataggcatggacatgaccagacaaaaccaaatcaaccttgctgttaacgagccacgactcaaacataactctcatgctctcaccttccatgtaatggtagttattactgttgtaccacggagagtgaacaatgacaatcaaccatggagtctcttctctgttcacattctttagctcttgctcaagccaaatgtattgaggcgtgtattttcctgaaatgagataacttgttatataagaaaactcaatggcattcaaatatatttgatttttcatgtgtttgttaattaattaccgtaggccgagtaagaagagaggacgatgatgtgagcagaagcacgtctcactgagtaccaaagaggagaagtgctttgtgaagctttgtaggcgttagggtaacggtgagtgtagggcttgaatgcgtgaggctcaccctagtaagatgtaagttggttaaataaactactaaaccaaataacaaaaagacagattataaagagttattatgtgaatcttacaatgtttggaacaaaatcaatttcatgattcccggcagcaaagatgaagggctggtaagcagcacaaggctccataaatcttccccaagtatcccactttctctggtcataattcgggtggtcgtctgcatatgacaagtctccagcaaagagaacagcttggcctttagggtttga

SEQ ID NO: 33543 - DNA, 726 bp, Arabidopsis thaliana landsberg
  unsure (1)..(726): unsure at all n locations
tggcgagtacctagtagaaagtaaacttaaggtgggtaatattttgataagaaagtaaatttctcttttgttacaaacctatattaagcaatgcaaagaaccagaataacccagggtttgttgtagagaaccccaaactctcctgaggggaagtggttcagcattattatgaattcagtgcactgcttattcaatatttctgtttatcctctcattatggttgctaatgatcattgttgtctactacaggaattggtgaagagatattctgaattcattaacttccctatctccctctgggctagcaaagaggttgaaaccgaggtcccagttgaggaagatgaatcagctgatgaggaaactggtgagtattaatgaaacaccatattataattttctgctgcagtgttatcttttttcccttcagtttaggcagccctgatttttggtaatggtacttgacttcagaaaccacctctaccgaggaagaaaaggaagaagatgctgaggaggaagatggtgagaaaaagcagaaaaccaagaaggtgaaagaaacagtttatgaatgggagcttctgaatgatgttaaggctatatggctgagaagtccaaaggaggtgacannnnnnnnnnnnnnnnnnnnntaccactctctctcaaaggtgaaaaccatgcgttaactaaatcatacttgttacatactaggcttaaaattttcgcgcggat

SEQ ID NO: 33544 - DNA, 833 bp, Arabidopsis thaliana landsberg
acacatgatttcgttgcctgtcatcctctcttaattctcttctgatggcaggctgaagtagcaaatgaaatcaatgtcaaaatgctggttgagttggctcattcatcaaatgatggagtcacacggaaccatatcttctccttgttcactgcaattgttaaatttgtccctgataaggttttggaccatattatcagcatacttacacttgttggtgaatcaactgtgacacaggtttgtagtctatatcttcgtagtcttgtgtaaatttctttttttcctttaaactcttcagatctctggatctttcttggcattcctcgatatttttggtcgttactgtatcttccctaactactggttcgttatttttgatatgtagattgatagtccctcaaagtctatctttgaggggttaatataaatggtctttcaattttggctgtctaaaactaagagtgaggaccagttgttccaggtaatttttccctaaatattgtactttaaatgtaaaatcaattgtcaattaatattttcttattttcaatttgatttttcagatttttgtgaaagtcttacctgatattgttgagcatagaaggcgttcaattgtagcttacttgctggggtaatgtgtagatagtaaaaaaatttaaacgggattttgtgtgttttaatctgaaaatgctgaaagatgatccttcatttctgcagagttatcggtgaacgaaatggcttgcctgctttgcttgtcctcttatttaagtctttgataacaagaaaagactcagcttggcttggtaatgccaacgtttctgagagttttgcttcca

SEQ ID NO: 33545 - DNA, 3676 bp, Arabidopsis thaliana landsberg
aaaccccaccttcaagaggcttcagaagaaaaatgagagactttttggtcctgaacacattcagactgcagtatgctaccacgctcttgccattgcgttcaactgtatgggggcattcaagctctcacaccaggtactaaaactttcggaaagtcttctagatcccacctttcgactctgttgttgtcaacatgagaactatatgtctcacctttcgacttaattgttctgttcttgtcagcatgagaagaaaacatacgacatacttgttaaacaattgggagacgatgattctaggacacgagactctctaaattggatgaagacgtataagatgcgtgagcttcaagtttggtgcactgataatgactgaagagaaccctatttatctagtatacattttgtttggatttctcaaattttctggttgggttttgaatcagatgactgcacaaaagcagaaaggacaggcagctaatgcagccaacacgcaaaaggctatcgatctcctaaaggtatacttgcagctttagatttcggcatattttgctgaaaaggaataactcctctatctttgatgttgtagagttgaaataataatgaaatcgttttcctgattggtatacaataggcacatccagacctgatacatgcgttccaaaacgcagctgctactgggaggacaaatgcactgaactctgctgtccttggggagactcaaccacggggcagaggttttgatgaaagagcagctcgtgctgcagctgaagttaggaagaaagcagctgcaaaggggctactggttcgcccccagggtggtgttccagttcaagccatgccaccgctctctcagctccaaaacatgatcaataccgccacagtttcgtctgagaaaggtggagaaaacggggaggcaaaggtacaagagaagaaagaatcctctgaaaatgggaaaacagaaaacctggctcctgcaggattaggtgctggtttaacatctttggataagaagaagcaaaaagccaaaaaataagaaacagtaggatcttgaaggaaaatggtgctcaaagaaagtgcacgattctaagtagtgaagttggtttttgtctctggaagtcgataaaccacttgctgatttcattacatgacaacaacgcttttgtacgttaagctttgtttttcttcccattatgtcacaacgatttgggtaagtcccgcttccaggcatgtctggcttttttcttttttcttttcccctcacttttctgcgggtgtaattttataccacaaaaacgtcattgattttctagtaactccaataagctcacagttcacgcttatacctaaccttgcagccttactatttttttgtgctctatacaaaaatcttttacttggcttcttgtgtctctagagtctagactttagagggacactagattgaactcgactaacaacgaagaatcatggagtggatacatcaatttcgatcaaccattaatgatcatcacatacttcatttatgttcatcttccatcaatgataaagatgaacagtggcctgtagtgatgttgtcactggccaaaacagtggtcaggcgtaacccgaacaagtacctaagtgtttatcaacccatttaagtttaagtctgcggcgtgagagacgggtaaatgggtaatgtttctaggcccaaattataggccttaataaggcccaattatccacacaggttagaagtgaggacggctaatggataatgttgacgacactcgcaacttcttccttatcgacacctacactctcctgctacaatggcgactttcctaacaaatgttgtttcaatcaaacctacaatcttctcattccagtccgaatccttcactcctttgcatacacgggtcaatgtattctcctcgaaaccctttccttctctcgctggaactttctcccggagctctagaacgagattcattccttatgctgtaacggagacggaagaaaaacccgccgctttggaccctagttcagaagctgccaggcgtgtgtatatcggtaacatacccaggacggtgaccaatgagcagctcactaaacttgttgaagaacacggtgctgttgaaaaagttcaggtttttattcataacatctccttcttctattatttcttagttagttatcatcaagatttgttatttgatgttgtgttgatatcatcaggtgatgtatgataagtattcaggaagaagccgtcgatttgggtttgctacaatgaaatcagttgaagatgctaatgctgtggttgagaaattgaatggcaatgtaagtttttgaacccttaactgcttcgttctatacattttagttctgaatatgacagagcttgtttttggtttctcagaccgttgaagggcgtgagataaaggttaacattacagagaaacctatagcatcatcacctgatttatcagttcttcagtctgaggattcagcatttgtagatagcccttacaaagtgtatgttgggaatctagcaaagactgttacaaaagagatgcttgagaatttgttttctgagaaagggaaagtagtaagtgctaaggtttcaagagtacctggaacttccaaatccaccgggtttggattcgttacgttttcttctgaagaagatgtggaagcagccattgttgctctaacaattcggtaagtatctctcaactgttccatcttcttcgactatagagtgtgcataatctttttgtctcattttgttgttggttttaaaatgcagttgctggaaggacagaagattcgggtgaataaggcttagcctattggatcataaagaatgtgaaaagaatcgctttgaagagtttttgtaatgcaaatcattagagcttagtgtatcatcttgtattcattctaagttgaaaatgaaaccatatcttttcaaaagcttatagttgtggtaatcttgtttctaggcagtgtaaacagagaactccaatgacatgaacaagtcatgctacatccaattcagaggtagggatgataatgaagatccccaagctaaatttatctccaccaagtttcctttccataaatgtatcatacaatgtaaaattgctacttgtgtgacttgtgagctttggtcactcaaaatttcttaatttagtgtctacttctgtagctcttctgttgcttgttatgttgtaagttgattgcaaatttgcaacggtccttgttcgatgaggaagaaccagagcttcgagaagcacttgattctcattggactttcgttggcaaactgatcaaaatctcgaccaacggttcctcagaggtctcaagttcaaaactttttctctctgggtccttacttctaccttggaacaactgagtaccgatcttatctttaaatttcacggcgaaggattagaaataaagaaattacctttctttaactaaaaatcaagccagagatgcttagcttgcagtgtcttcctcctttcttcatctccgtcccaaatcggagcaccaattcttgctccacggctccacttcgtgcggtcagtgacttcgctgcttctcagtcgccctcaatctcccgccgtcttatccttctcagacacgctcacagttcctgggatgatctttccctcagaggtactgtgattctcct

SEQ ID NO: 33546 - DNA, 1061 bp, Arabidopsis thaliana landsberg
tgaaattgaataagttgctcacttgctctatttatataagaacactcaaactagataagaacgtaacgtatgaaattgattgataaatttattttggcttcataaattcataatcataaagaattaattaataaaatatgcagatacttcattgacttcataaattttggcttttgtcatttaatatgcagaaatttgggctctttttgagatatgaattagcaccaaaaacaaaattgcttttatactagaaggggagaatttttagctaattagcccaaaatatagtcagagtttctgcatattacatgcaaaatagtcaaagtttctggatatgaatatataataatagtcatagtttttgcatattacaagaatatccgtcttaatagcatattgattgatgttgtgatacatatatacatatattgtttggatatatattggttaatgtctggttagaatcacattacaaaaatttaatatgaatgattctagttaatttccgcagaagaacgtattaaaaatgttccataaaattgttcaacgtgacgaccacgctgtcttaattctaacaattgacttcgaaacttcaaattcatacaaacgtttcacgtttgcatttttttagttcttggtttgggaaggggtgatttctacatgacgctaattaatgatccttgggagcagaattggatctcctaaatcattaaatcgcattcgtcagtatcaacgtcaataaaatgtagaaactaatactactaaatagctttcctccgtctctgaattggttgatatctaaagttaacgacgttagggttcatattattcaaacatacattatccacaacattttaggaattttaaagttatttaactattaggagtaaaatgtcatggctaactgaatttttctctcatatataaaaaattccataaaaccctttcttaagagaattaaagaaactcaatggctaaatgtagcctaatatcatcggaatagacatgcaagtctataaaaaagcgtatttggaaccatcaatgtgatatctttaattata

SEQ ID NO: 33547 - DNA, 1557 bp, Arabidopsis thaliana landsberg
tcgatcggaatgtctctggttgggatttgagattggaatgtctaccatggccatcatataggtgtaccgggcctgatccggcccatattttcataggaaccaaacttgcaacgttcgatccctaaagtcaaaaggatcaatcaaacattttctgcgtccaagaatcaatcacatgtgttcttgaccatttacataaatgtcaaaatgttcgatacactaaccgttgttattagccagatttctgcatgctgtcctgatgattacatgagaacagcctcatttttaccagggtccatatgacagttctttcaaacacacctggttgcctccttgggaatgttatgctccattctgggtatttcactaaatatccccagttcctaaaacacacgaatagaaagagaatgcaaattttcctatgtcctgtttgtgttctagataatgatccagtggaagcttccaaaatgactaaccttcttaaactgtttacgaagtctggaccttcagcagaaggtgaggtggaacagttagtgaggatttcttcatcagtaagctgattaagttcccaaacatattcaatcaagcgcattgtcctatattacaaacataaacacgatttatgaaactgtaatgaggagtagtggatagagtaattactttaaatctggtgagaaagacaagatataatggtagatgcaattatatgtaatgtgacagaagtagcgttttgtttttaccagcggcatggtgcgatgatgaatctatcagtttttgtgtcatatgtgtcaagtaactttcccttccagctagaatcttcaaacgatgatgaaactcgaattcttctaacgatctcatccggacatctagatgttctgttgaaactggctggcaagattgcaccggtgctggtattcacctgataaaaaggttataaagaaacatggttacgctgattactgattcatatgaacaaatttcaagcaattctattgtctagtttgtccctaaggaagaaagacagtattttgacaatgaaaaccaattacaaaagtggtcttagtacatgttacctatcaagtttagatgaatgagggtcaatttccatttctctatttgtatagaatgacttagtacatcttctaattagcatagtagagaagaagcagacatattaggctactatccaggcgtcggtgaacaatggggcacgagtacgcttgtgaatccaacttgcggttgggcccaagaataaagagggtttgaatgtgaaagtcttgtcttttcttctgcaaagagtctactaatttgccacacaacggaaatgaataaccctgtgggttgggataatcaccaacaccatcatcattctgcacataacggccaagacatctatctaaagacctctctacagcttagaactaagtcgggtgagaaatagaaaatctacagacgaacttttttgtccacatgattataaccaccgaccatatggacctgcatacaaagccttggacatattcaaaagcactcagaattaattactgaattattaacata

SEQ ID NO: 33548 - DNA, 690 bp, Arabidopsis thaliana landsberg
tataatttatgttttccacttctccacctttggtataaaccattttcgaagacctctactcggggatttatactaaatgcctcggattgttacttatgcatatagtatatctaagcttttatactttgtatctagggctgctccgctggcatctattacaattcgttaccttgttctgtacaccactaatgagagttggaaggtgagatttgcgagcatgatgtaagaaaattgttttctggaagaattagtactctgaatgaattctcatttacaggttgtaaatctgaaagaagcaagggacttctctactaacacaggatttatttatttgtttaaggtattgatgccactctttagctagttttccttgatacatattcttgatggattaagcattccatcttagcgaaaacagtgccatatatctatctatttccatggcgcttgcttttaaaagttctttattcctacctgataatcttctttgaagataatattcttgatgtgatttttttctacatgtgatgcatatcctttcgttatcagaaacttgaatgggaagctttatcaattgatcttctaccacatcctgatatgttcactgaagctaatttagcccggtctgtagaagcaaatctcacagatgacgatggtgcacaacgagtattctttggcggagaacgcttt

SEQ ID NO: 33549 - DNA, 2250 bp, Arabidopsis thaliana landsberg
cgtccttcgaagcattattccccttaggatataacgctttccgaacgaaggttatgaaatgcgtaccttcataaatacactatacagtgacgaaggatgaattgtaaggaatataaagaacaacatgaacaattaaatattattatcatgtataaacagaaatagcgttgaattacaaatgtaccttcaacttgaaggagatgaaagtacaagcgtgacgcaaaagtgaatgccaaatcagcgtgaacagtacgggggtactgttcacctatttataggcacaggacacagcctatacaaaattacatttatgccctttacatttgataatagttctacagtaatctatcgaggtctgaatagccttttcatctttaagtcggcttcatttcgttgctaccacgccgaagctttcctgctcgcaccttcggtcgtgtatcaaccttcgtattgttctggtttgctgtgataccgacttgagtccgaagatacctgtgcacacattaaactccagaaatactgttaaatcctgtttttgaggacttcgtaaccgaccgcccaacaccaaatttgctcctaaggctgtagaaggctttttactaggatatgattcaaacacaagggcatatagagtctttaacaagtcctcaagactagttgaagtttattgtgacgttgtgtttgatgagactaacgactctcaagtagagcaagttgatcttgatgagataggtaatgaagaggctctgtgcgtcgcgctaaggaacatgtccattggggatgtgtgtcctaaggaatccgaagagccaccacatgcacaagatcaaccatctttctccacacaagcatctccaccaactcaagatgaggatggggctcataatgatgaaggagaagatcaagatgttgagccacctcaacaagagagcaatgatcaagggggagatgctcatgatcaagatgaggaagatgaacaagttccaaggccgccacacccaagagtccatcaagcaatccaacgagatcaccccgtcgacaccatcctatgcgacattcataagggggtaactactagatctcgtgttgcacatttttgtgagcattactcttttgtttcctctattgagccacacagggtagaggaagcactccaagattcggattgggtgatggcgatgcaagaggagctcaacaacttcactaggaatgaggtatggcatttagttccacgtcctaatcaaaatgttgtaggaaccaaatgggtcttccgcaacaaacaagatgagcatggtgtggtgacaaggaacaaagctcggcttgtggccaaggtactcccaagtcgaaggtttggatttcgtgaaacctatgcacccgtagctaggcttgagtcaattcgcatattattggcctatgctacttaccatggctttaagctttatcaaatggacgtgaaaagtgccttcctcaatggaccaatcaaggaagaggtctatgttcagcaacctcccggctttgaagacagtgagtatcctaaccatgtttataggctctctaaggcgctttatgggctcaaacaagccccaagagcatggtatgaatgcctaagagatttccttattgctaatggcttcaaagtcggcaaggccgatcctacactctttactaaaactcttgaaaatgacttgtttgtatgccaaatttatgttgatgatattatatttgggtctactaacgagtctacatgtgaagagtttagtaggatcatgacacagaaattcgagatgtcgatgatgggggagttgaagtattttctaggattccaagtcaagcaactccaagagggcaccttcattagccaaacgaagtacactcaagacattcttgcaaagtttgggatgaaggatgctaagcccatcaagacacccatgggaactaatgggcatctcgacctcgacaccggaggtaaatcaatagatcaaaaggtataccggtcgatgataggttctttactctatttatgtgcttcacgaccggatattatgctttccgtatgcatgtgtgcaagattccaagccgatcctaaggaagttcaccttagggctgtgaaacgaatcttgagatatttagtttatactcctaagtttggcctttgataccccaggggatccacatttgatttaattggttattccgatgctgattgggcaggttgtaaaattaatagaaagatcacatcagggacttgccagt

SEQ ID NO: 33550 - DNA, 4772 bp, Arabidopsis thaliana landsberg
tggaaaaagcacatctggtcacattttctaccttgaaggaagtccggtttcatggtgctctccaaaacaagatattgtagcaatgtcatcctgtgaagctgagtttatggcttgtacatatgcggcaaaacaagccatttggcttcaggacttgttaagtgaaatcacaggaaactcaagtgagaaagtcaccatattcattgacaacaaatcagcaatagccctcacaaagaatccagtgtttcatggcagaagtaaacatatcaatagacgttaccactttataagggaatgcgtctagaatgatcaaatagaggttacacatgttcccggtgaagaacagaaggctgatattctaaccaaagctcttgaaaggattaagttcaaagagatgcgagatctcatcggtgtaagagatatggagaaagaagattttgagcttaaaggagagattgttggagtaagctcaaagacttgaagaagaagaaagtctaaaccaagactaaaccgaattatggctaaaccgagatatggtttaatgtgaagataagattagtgagatttaggagatatctaaatcatgtaatcctattaggtttaggattagaaatcttcttatataaggacatgttggtttgtaacatagttcttaagaggtttataagatattgagagtttaggttttgaggaattttcctagactaataaaagacagtaattcttttgatcttgtgttcttaatctcttcattcagatctataaagactactacccggaactttttaagaacgacattgctcaaccaggaatgttgaatgcggagacgaattctccttaagtgggggagaattgtaacaccccaaacccagtcccttgaacgcaccctattttgttaaaaacaaaaatccatggagcccattgaagcctaagtgaagcaaattacaaaataaaagggtttacacatgtgtatgtatatctatctccttcttcgtcaccacttgagccaccatcacgaccataaaccctaatctaagagcagccacgccatagttatccagagaagagaagacaagtcacaaacttaaggtggaggagatctgtgaagagaggaaaggatcgtggagaaggagaagcgacggaagagaagggatcatcaccaccgtgaaggaaaaacattgggagagggagatttagttcaaaacagtaagggggattcacgctgaagaagatcaaagcatcctaggcgggggcaaagcaaaacagaatcaaagaaggaaaaagatgaagggaaaagtgcagtttcaagttggggttttgcgaggctgattcccgtcctacgagaaaacgttagatggtgaataagacgtctttggaaaggtcacagttccatgaatccacagcaacaaacggagtttacatcgaggttatattaaagaagatatgcgcgtttcttcttagacagaaataactgcagaatctggaatcctagaaatctatttcgcattggcttcttcacagcaacgtttggaggtctgaaactttgccgatcgggacaaaatttggtagagagctttatgttactactgtctagataatcaacggagggattaaaacgttaactgttcattgaagcgttattatggcgtctttaaggcagctgaaacaagtgttctacatcagcaagtggccaaggtgagggtgtgatctgcagagattcgattacaagtttctatgtttatgcttcatgattcattgcataggaatagatatgtttgcttagtaataatgaattgttataaaggattggcaatatgatgattgttctagtattataggatgattgaattattgtacttgtgataacaagtaattatatgtgccatataagaaagtggaattaccatcttttgagatgatgaaaagtggagcagtggaaaatggtctacattaaattgatgggttctttgtagctcaataaaagactggcgagtccagtggatctagataggttcaaaggtcaggggagatgatcgatcctggtattgatgtagagagctttcttaagcaagaatgagatgtgtgttatagtcttgcatagtgatgcatactatatgagtgttgtgtctttttctatgtgattgctgattgtgttttaaaggtagaatcgcgtatggtacttccactgggcggaaaagatcctctcactgagtaattctttactcaccccttttcctccaggtcacggtgagaatcgtgtgtagtcgctcaagtccgtcttgcttatggtgtattttttgaacttcgggtttattttctactattgttattttcttatacgatttattaaagagttttcaatgatttaagattatttttaagacaattttgttttttaattaagaaagtggaatagaggaaagatataagtaaggggaaagcgcgccgtctcaatgttgaggaagacgggcttgacaaatggtatcagagcggaggttaaagtcaagccggtgctgacccggaaggctaagtcgaagagttttcttaaaagattgattttaacaaagagtttataaataaaaaaaattagtatttgataaacgtgaagaagaattttccaaaatataaagagcattaaaggagcgagactggcgttaaagttattttgtacagtttaggttttcatagagagcatatcatttcgatggttaaagtagagaagttatagtggaaaaaaagcagagtcgattcaaagtttgctaggaaagagatagaattcatgagatatagtggaaatcggaaagagtaatgcaggtagactactacccagaatttttaagaacgacattgctcaacaaggaattttgaattcggggacgaattctccttaagtgggggagtattgtcacaccccaaacccagtcccttgaacgcaccctattttgttaaaaacaaaaatccatggagcccattgaagcttaagtgaagcaaattgcaaaataaaagggtttacacatgtgtatgtatatctatctccttcttagtcaccacttgagccaccatcacgaccataaaccctaatctaagagcagccacgccatagttatccagagaagagaagacaagtctcaaacttaaggtggaggagatctgtgaagagaggaaaggatcgtggagaaggagaagcgacggaagagaagggatcatcaccaccgtgaaggaaaaacattgggagagggagatttagttcaaaacagtaagggggattcacgctgaagaagatcaaagcatcctaggcgggggcaaagcaaaacagaatcaaagaaggaaaaagatgaagggaaaagtgcagtttcaagttggggttttgcgaggctgattcccgtcctacgagaaaacgttagatggtgaataagacgtctttggaaaggtcacagttccatgaatccacagcaacagacggagtttgaattgaggttatattcaagaaatatgagcgtttcttcctagataagtaactgcagaatctggtgaacttggaatcccataaatctatttccgattggcttcttcgaggcaacgtttgaaggtctgcaactatgctgatcgggacgaaattcggtggagagcttcatggtactattggctagataatcacggagggattaaaacattaacggttcactgaagagttattagggcgtctttgaggcagctgaaacaagtgttctacatcagcaagtggccaaggtgagggtgtgatctgcggagattcgattacatgtttctatttttatgcttcatgattcattgcattggaatagatctgtttggttagtaataatgaattgttaattaggattgatgatatgatgattgttctagtaatataggatgattgaattattgtacttgtgatgacaagtaattatatgtgttatatgagaaagtggaatcacgatcttttgagatgatgaaaagtggaacaatggaaaagtggaactgtggaatagtggaaaatggtctacattgaattgacgggttctttgtagctcaataaaagactgacgagtccaatggaactagataggttcaaaggtcagggagatgatcaaacctggaaatgatgtggagatcttgcttaagcaagaatgagttggtatgttattgttttgcatagtgatgcagactatgtgagtgttgtgtctattttctatgtgattgttgattgtggtctaaaggtagaattgtgtaccgtatttccagtgggtggaaaggatcctctcactgagtaattctttactcacccctatcttttccctttttccctaggtcacggtgagaatcgtgtgtagtcgctcaagtccgtcttgcttatggtgtattttgggaacttcgggtttattttctactattgttattttcttatacgatttattaaagagttttcaatgatttaagattatttttaagacaattttgttttttaattaagaaagtggaatagaggaaagatataagtaaggggaaagcgcgccgtctcaatgttgaggaagacgggcttgacaaatggtatcagagcggaggttaaagtcaagccggtgctgacccggaaggctaagtcgaagagttttcttaaaagattgattttaacaaagagtttataaataaaaaaaattagtatttgataaacgtgaagaagaattttccaaaatataaagagaattaaaggagcgagactggcgtgtaaagataatatgaaccgatcaggtttt

SEQ ID NO: 33551 - DNA, 1074 bp, Arabidopsis thaliana landsberg
agaatcagcagaacatatcaaacctggatgtattggaagaaaagaaggcagcatttttagttttggtggcgttggattagttccagaccaatcatagactccaagtatctagatatagaaaaccaactgatggtttatatatagaaccttaagcattcaacatctcccatttaagttaacaaaatatacatggctcaaaagattttaccgagagccaaaatttcccccaagaaggaataaagatcactccaccacggtcaagaatccattgtctagctcgtttgcatgcgtcttgttcaggattttctccaagcatacgtaaacatatgtaattcaacacggtgcaaaacataacactcttgctttcgatgtgtaatccccatccaccatctttgttctgcaaaaagacaaaacatatataatctcatgtaagagtacattaattcgagattagtgacctttacaactaaaagtatatatacctggtggcaatagatatgccgaagcatctctttgcgatgttctgcatcaaatatcttctcgaggtgtcctgtgatatagaaacaaaatacctgcaggaaggacaattctcttcgtgattcttcttccttattactatataaatccctaattagaaccctaagagtattcgccggtagatatcaagtaagaatcgaaaggaaaacgaaaaagaaacataccaatggaggaaggaagaagagagttccggtgatttccgccggccagtggccatcggaggactgcaaagccgagtagaaagaaactgctctccgtaacgcatccgtcgcgtttttgtaagttatgccttcgccgtcgtcgatcttcaccggcgggatcacttgctcgaatttcgcctctttcaaaaactgtgcagttttacagtcaaatcatctcagaccaaaataaaaacattttcgcgttgaaaaaaaaatagaataaaaagagactatggctattgggtagttacatggcccattaaattttagggcccaaaaattaaaaaggttcattacgaattcgttcattggttttttttttttttttttttttctg

SEQ ID NO: 33552 - DNA, 714 bp, Arabidopsis thaliana landsberg
tgattatcattttttagatagcagttatggagtctagtaaaaaaaattttataaaaaatataattacccactccaaccaagattctattttggttatgcaaacctttggctattactcattaaactttatattttagaatacagttgtccctattataactttaaaaataaaactatttttgtagcaactaactatattaccttcgtcaaatgagaaaaggtaaaaaaaatctcaacatacacattttgacccataataatcacaacttacgcaatttggtcagtaaaaatcttaacttacgcaatttggccaaaacaaaatttgaatatttttattgctaaaaatagttatcaacttatttgttttgggaaataaatttttatttaggtttactttacctcatttagttcaatgttattcaaactttatgggatgttaagtttgattatgttggctctaatttggcaaaatcaattatatgcgttttgtctatcaaaatcccaacttacgcaatttggccggtccaacttacacaatttggcggtccaacttacgcaatttggcctgtaagaattctaacttacgcaatttggctaatacaaaatttcaatatttttactgccaaaaatagttatcaacttatttgttttagcgaataaattcttatttaggtttattttatcccaatttgttcaatgttagtcaaacttaat

SEQ ID NO: 33553 - DNA, 495 bp, Arabidopsis thaliana landsberg
acttaactataaaagtttcagtaaatttgtagattagattgtttgacatatgatattgtctagttgattaatttcaccactcagcttattgcattaatcaagaatatttttctttttcgtatttaatgagaaagatattcaaaattagaaatacaaggttccaaagtcacatgatccctttttttgtgtatttttccacatgagtgggtgaaaactgtttaaagtccaattcagtgagatttgctcttttattgcaagccttgtattagagaaattgttttattgcacactgcagtaagtttggtttgatcccacttgcaaaaattatcatcaaagagaaaatgacacaaatgcccatccgtggacattgaaaacaggccagaaataggcctggggtcattaaaaacaggccagatataggcccattatatgtcattcttaatttgtaatttggtttcataatgaacaagaatgtcttagcatcttccttaccag

SEQ ID NO: 33554 - DNA, 521 bp, Arabidopsis thaliana landsberg
aaacctttttacatattttacagtacactgaattttcatgatattagaactaaagaactttatttttaaaacataccacaaaattatagcaaattaactttagtcgtagtttttttaattttattataatattgttggcaatcaccgattaggtgtggcttattaacgttggttggaatttataaatatgaacacttttatttgacttcgggtgcaaagttaatgatattatcagactatcagtcatcacaatcaactaactctttatttagcatctaacgttgcttttgatactaaagaaaaagaagaaaaaaaacatttaaattatagtaccattgtattcgatagatgatccaaaacaaaaagataagttcgagcatcacatatataggtctgatcaagtacttctcaatttgcatacgtatacatcaaactgttgcatcagcctcctcgtgagccatatcgaaacatgtatgacaaatttgtatgcctattcttcgcaattatattcgtgtatcgaa

SEQ ID NO: 33555 - DNA, 3064 bp, Arabidopsis thaliana landsberg
ctaagtttgtaatgaaatggtacatggtaatgcaatgcaatgcttgttttgttcttggttactaatgtttgtgtttggttagatggcttttatctaagtttgtaatgaaaccatgattggtaatgcaattcttgttttgtttcacaatgattaataatcctaaacaaagttcatacattaaaaacgattcatacattataatactaatgtcacaaagccaagacaagtcgaaacaacaaaatgaaaccgatactaagctaagtcataaagacaagttcaaccaccaaaaagaaacttatgactaagctgcagacaataacaaaaagaaacttgtgactaagattgtctagaacactcaaaccatgattcaaatagacgaagtccttgtggttctgcttgtgcttatgctgaaccatgtcttctatcaggttgcggtccttgtgatggtccacctgcttgtctttgtgctccacgaccaccacctgatgttgtttgtccttgtgctccacgaccacgacctgcagccctttgtccttgtgctccgcaaccacgacctgcagcccttggtccttgtgcttcgcgaccacgacctgcagcacttggtccttgtgctccgcgaccacgacctccagcacttggtccttgtgatccaagaccacgacctgcagcacttggtccttgtgatccaagaccacgacctgcagcacttggtccttgtgatccaagaccacgacctgcagcacttggtccttgtgattcaagatcagcctgtgatccttgatgagattgtggttgctcttgtaatccaagataagattgtgattgctcttgtgatccaagataagattgagatccaaacacttctggttcctaaattaaaaaagagagtcagaaacacatgttggattgttaaaaaggagagtcataaatgaatgttggattgttaaaaaggagagtcagaaatgagagttacaaacctgatttttcctaggacgacctcttggtctctttgttggattcaagacagttggattgttgcacctttgcttgttgtgcccttcttgatggcagttagagcatgtcatgattctcttttcccgagacatcttgtttggatttgaaggagctgcagcttcatttctaccttttctcctagcatagttacttggcctcccagcattgcctcttctccatggtggtggtaatacaggcaacctattcgtcctacaccataaaggcatcccttggacaggccttatacctttcaagtaagtttctcgccaccttacctttgtgtaatagtcactcacgtagtcttccaccttttctttttttccgattatcacacaagtcgcatgaatacaagggatcccaaccatctgccacttcctgcaaccacaagttttctgctccatatcaacaaaatagctaacattattcacatatatctcatgcaagttttctctggctatatatctctcgcactgtctaagcccaacaatcattttttcaatctcttcatgagctctctttgtgaaccttgtctgcaatttttcagcaattaggaatctctttgcagttctgaccatgcattgcctccggatatcctccagcatatccaatattggctttctccttgcctgcctaatagtcttattaaaagactcactcaaattattgaggttgtcattgcaacatgtacctattctgaaaaatgctcttgaccatgtcactggactagtaagctgcaaagattcatgagcttgacgattgtactgctgtagctccatcatatgattattaaactcctcaaccgtgtagcttcgtgctatcttccaaaacagacgctggagctctaaatcatggctgtcccttttccaattatccatgatgtgttttgaacattatcgatgctcagcatgcagaagtattgtatggatagctttgactagcccctgcaatatgacataaaacatgaccaaaaatcagtaaacaaaacaacaaaccaatttaacaaagacacaaagttaaaaaaactaacagatcgtttatcagagaggatagctatattagccatttgacaaagccccaaacttgcagatagatgtcttaaaaaccagtcccagttgtcatcattttctatctcaacgacagcccaagcaataggaacaatcttgttatctccatctcttccaactgcagctagaagatggcctttaatatcccatttcagaaaagctccatcaagtcctatgataggtctacacgtttttatccatgaatccttttgagccttaaaacaaatgtataaccaaaaaaacctctgtttggctccaatgacagcccctgcagttgtctctatctcaaactcagtccctggattctgctttattacctctgcttggtaattccagactcttgcaaaatgggcttcatggctagcatttcttgctttcaccactttcgtctttgctttagcacattggtccggagtcacttccaagttgtattccctcaatatctcagcagccatctcatattttgtaagctttggattcactcgcagcctttcctcaaacaaataagcaatggaagaccgctttaacatcttcgaatgcccagacctcacacatatatggttattcacataagttcttatttgcatcttatgcatagtcttctcatatgaacaatacactttccacggacattgaacaccatccttatcaacatagctacactttgcagcaacaatcctagcttctgatctaaacagtttaatgtcataccttgtcttcaatgagtacctcaagactgcaagcttgaagtcatcgggagtgttgtaagttttcttcaattctagcaaaacctcttcattcgcagcatctctatgaccatgtacttctctggttctgctctcatcttcgtcatcagatgaaaacggatcgggaattttatcttcctcccatacatcatccggtggatcatcatcactacaatcttcttctactcccgcaaactctgggaattcttctgcaaggttgaggttagcatcttcttcaac

SEQ ID NO: 33556 - DNA, 4809 bp, Arabidopsis thaliana landsberg
cccatgagtgttagacgtgtcaacgaaaataattatacatttggtataatatatttaattgtgggaagaatttaaaaaatctcatattctaaagaagtaagaggctgaaaacttaacttactatataaatattggttttcaaaattgttagctcgagacgtgttaaataaaatattatatttttgaaaggttaacatatactaaaattaccatatgttttcaaagtatatttttttccaacaattaccatatagatctatgctactaaaatcatagaaatgaaatatttttgatagattttaagttgaaaaaaaagaaacttaacattttcttcaaccacgatgactagtgacacaaacatgccagaaccaaattcaaagtcaagtataccaatgtaagctattaaatacaaacgcaataaaatcaaaataatttataccttatcttggtttagtgatataacttgtcaagaagtcatcgaaaatctgaggtagaatttgagaaagaaatcacaaacaaacatcactcacttaacaccatgaaaatgccctttcggttaactttttttcaaaaccttttctttctagaaacttctctcaagttattataaatgtcacacatatctaacattctgcaatatatatagagaatgaaaccaaaaaactaactaacatgagagttagtgggtgacaaaaaaagttacatgagagttagtgggaagttcctaccactaaaccactcactaatcaccgattttgatgcatcatttgagagaaatacatatctatttgaaatagtgacaatgtaaattggtaaagcaaagtgaaaactttcttgaaggagagttttgcaacagtaagtttgtttctaacaaggatactacaacaatcacaagaggatgggaacctaaagatagcagcttctaaacattctgtgttaataaaaacaatcaaccaaaatctgaaatccatcaaacctaacaaatccgtgaaaagaaaccgtatgatcatcatcagctcggaatctcgttgtcagattggctatcgcctccgaattcttcgtcttcaccttctaattcgtcgtcatcttcttcaccctcttcttctcctacctctccacctcctcctcctcctactgggatagacgagaagggatccttgacatggttaaccgagtttgtatagtaactgtgaaccgcatttgttgtgtttacatgcgtgtatgaagtggttggtgcaggaatagcaacagacttgttaagcctctcgaatctcgccttccgttcttctgcggatatgttaaaggagatagaagatggttgaaccccaaatcttagccgtctttcttttgctagctccagctgtgactgctcttgaccagctataaaagtccctaccattacctgtaataaatccatgtcagacacaaaatataactcatgttctgagaccacatactatctggaaacttaaacgaacctggacaggaccagcagcaagaaagagaccagcgagtcctccaccaaagacacgaccatctggtcctgcaaggcaaacactcataccaccagctctacttcgagttcctccagagtcattttgcataaacgaacccgtcaaagagagaatctcaaaacgaccctgctcacaataagacaaaaaacattagaaggaaaccaaatacaaagaatgcattctttatatatatatatgaaaatggagaagatggatgatagaagagagcatgtggacctcataagttagagtaccaccggatgtcatagattgacgaagcgtaacattggagatgggaccattagctgaaaggatgcagatagcacgagatccttgttgagagaatgtcattatcttcatcgtcacatcctacacaaatccacaggtcaacagcttagcttaataactgatcatagtaagcgatttgaagactatatgatcattcagaaaaaaacatacctctccggcgttgacgatcaggacatgaggtgtaaagttggcaccaacaaaatcagcagttcctacacctgccaaattggtatcaactgaatccagacaagtcaaaaatcaaagttgagacaacaaaacactaagatatacacaagacagacaaatatcaaactaaaacaagatgtaactgatctataagacaaacacaagaccaagactgtacttaattaaagctgttctctcctaatccctgagcttttgggaaatgttgtgatgtgcatattctaatctacttcccctaaagtcgtagcctttctcttcactagcttatgacttctgacacaaaaagttctcttcttattccaacatcgtacaagtcaaccccatatatagatccatgtcagttacactactaacttttaacagacatcaaaggaaggttctaaaaagatatttaccaggacttctatcgaattggaacatttgagacttcttgagccatcgattagacttgccacgtcctcttcctcgtttccttggaggaaactccgacgtcaacggaacagaggacgagattggcatcggcgataaagtcacggcaagagtcccatcgggattatactttctcggcctacctctcttctttttcagctgctcagctgaagtgttctccgtcggcattgttaagctaaacggagtagccgcattctcagtaacagctgctgctacggtggcgacaacggggacagtagtgggtgggactaaaaacgggttagggttttcgggtcttggtggtgggtccattgagtaaccaccatcagaagcagcagcttcatgttgctgcttcaagccgaaactgctagtgatgttgttgttgatgttggttccttctctctcctccatccggacataagatcaagtgattctgtagtgagagattccgacaaatcagtagagatcctccacgaatctttatgattacgaaagattcaaaattgcttcttcttctacaagaaactcaagattcagagataaagagttttaaagaaaaagatgggattttgtagcaaaaacagatcagtagaagctaagctaagctaaggaaaataaaaacagagcttcttccatggaggaatgaatcttaatttcagaaaattcgacctaaaacatacataattataagcaaccaagaaagatctaattttttttgtttattttttctaagggggtggtttaagttgggggagaaatttcttaagtgaaggtgaaattagggttttggcaagaaatggaaagagaaaacaaaaataaaaatatggaataaaacagatgggatattataatttttgttatgtagaaaaagaaagagagagaaataaggaaaaaatgtaactgtaagtttgaataaaataaaatgaaaaatcttgacttaattcgaataattaattacttggttaagggagaaaatttgttccggtttggttgatattatagcgttaggtgaaattagtttttgtaatttggttacgaaccaaacaattgggataaatatgtacttattttgttggtcaactaatgtttttctgtattagtaagtaaatctttttggggatattaaaataggaaaaaaaaaagctgtaaagaaggagctaacgtaacgtttgagccatgccaatttgcttcttttttttcgttgtctacaatattaacattattaaaaatagagacataatatatcactttagtgtgataatctggttgacgactaaagatgaagtaccctttgaagaaatattcctcccaaactttcacaaactctggttcttttacgtgtcagagttcattttcacttgtccatgaatcatcatctcacacgtttgacttatgataaaattttgatgatataaaccggtctatcctccattgttgttccacgggactagctatcacattttgtcaagaatcttttgctagtaagagttttgttcttgaaatctaaattgtattggcatgtatctgccaaagaattattctttgattttctgtagtagacaaatatttttgtattttatatgtatgttacatacatatatgagatgtcaaaagtcctaacatataaaagttgtacaatcgtaaaaataaataaattgatatgcagaataaaatgaaactcgtataatattctcttccaaataaaatcaaccaacatattttaaaaataattttattctactatttttcattctgcaagttttcagtttacgaatttttattatgcaacttatatcattatgttattgtgctattatgcaatcttaccaataaaagtcttttaaattatatttttgttaaaaattatcctttgaatatatccctttgtttgagttattttgattttatagttgatgtatttattttattttattttggtgttaaaaggaaaaaaaaaaaaagagagagaaaggaaagaataaacatgattggtggcaaaaaccctaaatctaaacccgaatacaacacctgacccgtttcttgttccggcactaagcagacacgatgagctcggagaacgaagactcttcatttgagcgacggcccgtgtcctgtactaaatgcttagatgcaatctggttcagctaacgtaagttttcgatttccctgcgtccgatacgcattctttgactctacaacatcccaatacatctgcactcaccacctctaaactgcaaaaatgtttatcctgagctcacaaaatttgaacttgatcgagacttgatcaaccaaacaatagcctttcggacaagatcacgagctcgctatcgaccaataaaaagccttggcgaga

SEQ ID NO: 33557 - DNA, 455 bp, Arabidopsis thaliana landsberg
  unsure (1)..(455): unsure at all n locations
atttcacaaaacacacaaataaaaataaaaagtatatgaaatgtgcacagcgagaccgggctgtgtcttctttgaggttttatgaacatggacttagctgaattggcacacaccaatcacaggatgttgcattcttgtttcttctctgcctgcttctcttcagctcttttacgatgagcatcatttcctattattgaaatttccataaagtctttcatcatattcatttgtctctcattcgccgctgctgtttctttaaatatcctctccatctaaaagaagacaaaaacacatnatttaggactaaggatagtttccaccgggataattaggaaattgtaaggtatatagagttggcaaaaaaatatatatttaccatcaatgccatcatgttcatggttttggctatacgacatgtctaactgcttcttcaacgctgctttctcttcgtctgc

SEQ ID NO: 33558 - DNA, 4884 bp, Arabidopsis thaliana landsberg
aggaagaacaggcttgaataggagccgccattaacaaacacgttgattgaagaaagaaggagactttggttttttacgacgaagaagaaacgatggtgaattggtgatgccatcaccatatcaaaattcatcaacgattcaccgtaagtcgtaacggtgctaaagaagacgttgcgggtcaacccgcaaatccgcggtcaaaaatgggtcgggtttctttcaaccgcgatccaaacggaccatgaccgtgaggcccgcatttttttgggctttattaaatgtgcccgtacccgccccgttgcatccctatacgggcctggcccgcgggcttcaagcccgattgacacccctagtcagcgctctgacgaagatggtgacataacagcttttggctgatgtgatgatacaggacgaaaaatcatggtggaagcataaaggattaggggacagaataatggagaacaactggtttctactgttgttattgggtatttaaaaatgacttgtttaaacaaattggttatccaaaattctgcgggggacaacgtaatatataatacattagaagacatgattacctgataccgggggacaacgtaatatataacgcattaggggacatgattacctgttagcagagaacaattggagcaagacttttgttttagtctccagatcttgtccccgaatagaaattctctgttgcatctacgttttgtcctcgatttcatcatcttgctctattattatgaatcatacatcttatatgcaattgttctcatttaagaattttgaattttatttagattttcgccatctattttggtccacagattagttgagcgttattgtcttcacctacacgttttcaattgcatataatatatttaaataatatgttatatggggacaagttcagattgaatgagtaatagaattagatcgggataaattcagatcgaatgttgaacaagataatatgttataactggatattttgttattttggaatagaatgagaaaaaatttaataatctaggtcggtgaagacaataacgctcaactaatctgtggaccaaaataagatggcgaaaatctaaataaaattcaaaattcttaaataagaacaattgcatataagatgtaggattcataataatagagcaagatgatgaaatctaggacaaaacgtagatgcaacagacaatttctattcagagacaagatctggagactaaaacaaaagtcttgctccaattgttctccgttaacaggtaatcatgtcccctaatgcattatatattacattgtcccccgctatcaggtaatcatgtctcctaatgtattatatattacgttgcccccctagaattttggataaccaatatgtttaaacaagtcatttttaaatacccaataacaacagtagaagccagctgttctccactattatttcccctaatcctttatgcttccaccatgatttttcgtcctgtatcatcacatcagccaaaagctgatatgtcgccatcttcgtcagagcgctgtcccactttaagggtaatttcgtccattatgattatttttttactcttgaccctgtgcagagcacaggattaaactagtgaactaataaattgttttggtttggaatttaatcaatttaaattagttgttataaaagtaaagagatgttactatatataatactttgtagcctaaaataactggtaggactatttttaagttgattaattccaaactataatttaaaatatataatttatgaaaatttttaataattttaaagtgtgtgtcgacaatttttgcttaagaatgttaccaaatctagtattaatgttaatagtcataggacataaaaaaaaaaaaagatctgaaccaaaaagaaaatgcatacaaaaaaatgagattcataaccaccaaagagaaaaaattggattgcggcttttgctttgatacgttctctatttttcatctcacatctgctttactctcttttgatctttcatcttcaaatctgggtttttgattttcggattcaattgtttctccgattggtttagatacttttgctttcttcttattctctaatgtgatctgattgccagagagctcagtttctccataattttgatctcaatttcagggtatgatccttaatccatctgacacactaagcatgtttcgatctaattttctgaactctgctttatcaactctaatcttgtcttttcgcaatggttgtaaggtatgtgtaatgttgtaaaatgactgatagctttttatgtttggtgatgaaaaacggggtttaggtgtttagtatttataggataactaattaggcttcgctaattcatagcaagcgacaaaaaaatattcactgccgcaagatattagggaataaatgtttgattatgccaggtttatagagatatcaaaaaactatggaaagatcaaatgttaatggcgaataacaaggttaggagataactgctaggtttatcgagagatcatcaagatatggaaggtttgaattaaagttgttatgattgcatataagttagcaaatgagttgaatttaaccgactattatggaaagaatttaaggtaataaagatgtgtattgttcatttgtgataaaacaggatccaaacaaattaataaaaaaacccatcaaatatttatccatggttcgaatacgataaaaccgggtgaatccagacccgaatgaattaaaaccgggtttaaggaaattaacttgaggtatttgccgtttgtcagtctaatccagattttccataaagtatagaaaaatgtgacaaacataaagaaattggtacgtatacatttactgatttatgtagttatttttttctcttttgtataattctagatattgactcgtgatacaccgctagttgatatttccgttcaaaaattaaagattttattttagtaatattatttatatataaataatattttaagagttataacacggacttatataatttttgtttttaagatgatttatagatatatgttattgtttttcatctagataaatttcctcaaatgacactaaatgaagtttttcgccccaaaaatggcactaaatgaattttttgtgacaaaaatagcattcctaagtttattggacaaatatagcactcatttaccttatttttgatttttaaaaaattaataaacaccaagagacgataatgggaatacgtgagttctctctcaggccctaatatcgagaagctctcgctagccatgctttttgatgtcggttaagcttcggctcgccgacgtcgggattttgtctcttctttcttcctctttcgcaatctatgttctgttttaatcttacttcaactattttctcaactttttaaaaactttcatcaacctttttgaaccctttttcaatcaacaagctcaaatgatccctcaattcatagtggcaacaaatggaggagttgtcaggtgcagctcttccagattcatgctctgcccacactccctaaggtgaagctattatccccaatacctccccaaatttttagatctgaatcaaatcaaaggttagatttgtccaccaccaaccttttttgcaccatgaagactatgtgtagcatgtgtactccacttctttcccctctggcaaagagtgtctcaactccgatcatatgctcgtctctacgtagccgccacaccatcagcattcccagccctgctgaggagaaattaggtttctttctattgggcatgtggtcaactttaggcccattatccaagtcccggcccattcttaaaagcaaaggcccaaaccctaaaaaagagtggcccaggtctgttctcccaattttcttgtcgacgccttactatttgctgcatcgtttctctgctctctttggccatggactccaatcgagacgtgaattgattatcctaaggtatggtttttgtcaccttaaaacctggtcgctatattcatctctggatttgctttgtgagagtttattattgttgccttttgctcgacgttatgactttgggcatcgatctttgttggccaaatccgtttatgatttagttctgtcaacctgaatcttcgttgcccctcttattcctgctttggctggtcgaagtttccacgctagcagtgtattggtaccgttagtgtggtttgatagatatcgttgtcgccatcagatggaatggttatttcggattctcaccgaggctcccactcccaaccattaccaattgcccccaaagagtgaagaagtatggcattatgaccccgtctccacggagcggtggttaccatagcttctttcactttctctacccacacccgctaattatcgagctcttccaagtgatcattgaatatatggataatttgcaacgctgtgagagtttggacaagatcagcattatgaccgcatcttcaagaggtggttaccgcatccgctccgatcctctatatccggcagcctcccccgtggagcatcttcctaaaagctcgtttgcgttatccgcgcaagccgtctatgaccacttgttggtcgaggatttcgcgaagcccgtcttcatggtcgaatccgctaagatctcaaaagatctttcaaatgttgtaaacttttctcaaagtgaacatctttttggaaaactcatgaagtctctatttctatttcatgtatttcttctttgctttagtatgtatgaattgccctcgtttgaggtttaagtaatgaaatttccagctgtcagacacaaaatgaaatcgtttcctaagagataacacatttgtatgtttattactagaattctacacgtttttttttttat

SEQ ID NO: 33559 - DNA, 713 bp, Arabidopsis thaliana landsberg
tgacatcctaaatccgccaagatgtcatcagattgttggttatgtacatatcgtgttttacccatttgatacatgtgcgcggaagctctccaactcatattatcaaaaagaaattcatacaactatagatagttcttgaggcgtagatgatttatggaatttaatcgcaccatcttaaaagattacctacaatcctgaaaaactgatttgataagccttttcttaaattggattttctcctttcttaaacctcctaccaacctaaccataactcaagtgcggctccatgaatttaaactcatccctatacgctacaaacacaagaggctttggcaagcctgtaaacgccgagtttgatttgaggatcgaaaaatgagaggctttggaaaaaactaaaacacaagaggctttggaaaaaacacaagaggctttggaaaaaactatataaattgttttaaagaaacacttacaatcctaaaacttacaatcttatattgatgtatattaatattttaaaaaaattttaagtttcaattatttaaaataatgaaccagataatacttttaatttttgatatcttataaagcaaactctctgctcattcgtattcaaaatcactttggtctttttatagtatgattcttaacgatttcctcattttttaagcaatgtgggacctttaaaacttattttttttatcgatggagtatta

SEQ ID NO: 33560 - DNA, 980 bp, Arabidopsis thaliana landsberg
caattgtatccaaacctcccgaatcataatcgaatcttctttcaaagtctccgctatttttagatatacaacaaacccagatctgaaaacaaagcatacgtcggaactcggaaatacaacgaaactcgtatcggtagatctgtaaacgaaaccttccgatctgaggaagaggcaacaacaccaggaaaatcagaaatcgatgtaacaaaaagcaaaccctagctgtgaaacgaaaatcgaaatgaaacggagagacatgaaagtatgaaattaccagaggtttcgcaatacagatgtaagaaaaggaacagatctagcagattcgaagagagatctgtgcgtctgcgagagagaaattatcgggtcaaccagagagagagagagagaggtttcaagtggtatggctttggagaagatgaagtgataaataaagacaagtgtgagccttgaaacgaagccgttttgtttgacgatgaaaagcttatacgacgacgttttgccgtgcgtcttcttacatcaatcattacgttttggccagttaccaattattttatccgtattgtccgttttctaattattttaatgatgcgaattgtgtgatatgatgaccaatttttatttatgtgtatcacggaaattccgttcgtttgtaacttccatgatcttttttttttcttttgctttgtagacctacctccattattcttaaattttatgtattttatagcatttggtactagagttaaattgttataccttattatgacgatcgaactttatagttataggaaaagttgtataaactaaactgcattttgatttttgtacaagtctaaatttatatggttaagaaacagattgtgctaataaacaatcaaaattatctatttttgctatggagctagtcagctagatgatttgaagaaccttaaaacttctttttccttataattttaactcagttttatatcatttggtaa

SEQ ID NO: 33561 - DNA, 657 bp, Arabidopsis thaliana landsberg
caaggtttatataatatagtgcatgtaatctgtcttgttttagtgttttctagctaggatcattactcctcagatttatataagtattactgttttcagacttttatataagtaattttgttgttttctgaccaaaaaaaaaagaagaaggattattgtagtcaagagtgaaagcatttttcattatatatatatatacaggccaacggttatacaaatatacgagaagaaatcagtggagggagttcaaattgctcctcatttagtgctgttgattcaatgtagtttgtgggttttgtatggtctccctgttgttcacaaggacagtattctcgtcaccactagtaatagtattggtttcgttaacgaagtaatctttgtggttgtcttttggatctgctgtgaagacgaatcacgtgtaggtccatcttttatacttagatatgtctaattctgcatattgattttgatgatgttgatgttgatgtgcagaagagaaatgttaatctatgtcttctggctgtgtttgattttgtgacatcgttctatgtgattactatttgggcaattcaaagtttatccgccaagtatacactcattgggattgtttgcaacattttcaacatttgtatctatgtttcatttgccaaggtaaag

SEQ ID NO: 33562 - DNA, 536 bp, Arabidopsis thaliana landsberg
  unsure (1)..(536): unsure at all n locations
cctcacagtttgatctttggttgcaatcactacaagagaaattgtaaacttcttgctccttgttgtgacaagggcttcacatgtatacgatgccatgatgaagaagctgatcactcggtggataggtagtaatatcttctactttcatacaaggagcttcaacaatcttgttgtgtctttaatcatctctagttctcttgaatttttcatgcaggaaacagattacaaagatgatgtgcatgaaatgcctcttgattcaaccgattggtgcaaattgctcaaatacttcgtgcaagtcgtcaatgggaaaatacttctgcaaaatatgcaaattatatgacgatgaaagggaacgtttcttcccctgcttcatcttttcttgcaagttataaaactatgaaatgaaatatcgntcttgtgctttctttctaagtatcggtagagggttaacagtcaaagcttattcataacaggaaaatttatcactgtccttactgcaacctctgtcgagtagggaaaggattgggtattgacta

SEQ ID NO: 33563 - DNA, 1237 bp, Arabidopsis thaliana landsberg
actatcaagtcagcatacgaaaatgtcgcggctattgaatgagattccacttctacagtaagatagaacaaacgggtgagataggttcccaaaaaggtggagaaacttacaaagctggttttgagcttctcaacaaattcactgttcttgaatccactcaatatttctaacgagcttcgtttctcaaactctttaaatctactcttcaaagacctaatcggttcccaatcaccgaaataggcttttccatctctctcagcctccgcgaaaaactccgtaaacctaaccctatcactattacgccgtctcctcaatctactcatctccaaaactccctgacgctcatgcaattccatctcagacacaatcgccttcttaatcgccgatagatccattgcaagcttcgctctcgcaggtccccatctctccataaccttgcgactaatctccggcgccgaataaaccctacgaaactccgaaatcttcggctgaagcttcttcatgataccaatttcatttgagaaagacgacgccgatggtgaaccaacgggaaacgcagacctcgccgagttattgaggaaattctcgatctctctatcgaacgttgatgctagattcttaacagagttagctctgtctcgcatcagctgcaaatccgcatctgctgaatcccatacctctctccatcctttcgacaaaaacgataacgcgtttgttgaggataacgtcattgaaagagacgaagaagaagatgttccggtcgtcattgacgtagatgacggaggaattagagtttcctttaccatgacttagggtttatcgtttcgtcacgacgatttcgtgagagtgctgctaataaggttttctctatctgttgagagaatttgggaagaagaagaagagaaattgacggctgagattaatttggattgttttatttttttaattctctttctgattattctggaagattaacacgtggaaaataaacaagtcggacggacgataggcgctctttactgaagccttctcccgtgagaccgtgtccaacgtggcatgggttccacatcattgattacgtggcgtgttgtgagtggttgacgagattatccgattgtgtcggatttaacttaggaatatgctggaatcgaagaatctggtcctacggggcatggtattgacaatgacatttagcaaaaaaaatcattggtaagtaatatcagtggaggtaatgtag

SEQ ID NO: 33564 - DNA, 1819 bp, Arabidopsis thaliana landsberg
cagagttaagtaaatttcgttttattacaaaaaagtgatattgtaaactgttaatgcaaaacaataaatatatttaatatggcaggtaaaatttgttaacaaggttacacatgccgccgcaatagtaagacgtaaaatgaaagagaaaaatttataaaaaactatcattcgtatcatttgttttcctttagtgtttctttattaaagtggtggcattttctttcaagttgaaacagagttagttatataaagtagccatacacattcaccacggacggctaataatgcttgttttcgaaagagggaaatgaatcacttttgcgggagacaatatggatctttataaaacattggagctaaaggaattaagctgcacatccctgttaaaagtgggacagtttaggggaagctgtaaaagctgtaactgatcttcttggcatgcagacttgtaaggttagtctcttccacttttttctcatactctactgagacttgagggctaaaattattgttgataaagtcttttttgagtatatgaccatttgttgtgttcctgaaattgaaactgacactggataaataacaggggacggagacaattccgctcaatgcaaggtcacacacgtgtctattgtcaggtgtgtacataggcaacgtgaaagtgttagtgagggcacagtttggaatggacagctcaaaggacattgcaatgaagctgacagttagagctgaagacgtttctgtcgccgaggccattcacgagattgttgccagcggctaaaacctcttgcgtttcttcaatatcagagaatgtcatctattcctgctgctaaacctcaaaaatacatcaactattataaatagcatagtattactttctttcttttttccttgcattattactgtcaaatacactatggaggttttctttttattttatgacggtgctttttgatttctcatttctgaattttattattacccgttttctcgccaagttgggaatctacagatcatcttgctcggatttgaaaaccactaccgtaccgtacaacaggctaggctttctccataagttagaaactcaaaaatagtagcgttttatcgtctgcgttcaatatgaagagatgatagtaaagtaaagactggtgggtacacaattgattacagaattcacattgagtagcgtgttgaaggagtttagttcccaatgaagaaataaataaatcaaagcacactacaaaaagggaagtttaattcttctaaccactccactatttcaaaccaaacaccttccacaaaccgaaccttacttcccgactacagaatatattaaccaacaactggagacgtgactcctactttcgttaaatcttcttcaaatcactctcctgtgtcctccaaacgcccatatctgtgtgaattcaacgaaatttcatctatcctctaatttccttacaaacataacatggtaaatgataagcagagacactactaagtactaacctttagatttgaatcccaacttcctgtacacaaggcacttccatctgctgacaaccccaaacagcttattctattcctgtgtgaatcctgctgtaatcccaaatccaatacaacctgcaagaaaactcctcacgtttcaatcataaaccttacatgagcgaaaacaactctcaccactcattactcaaatactaattgcttacctctcccaagagagtatcccaaacgtagcaggtgttgttgctcgcatagccagcgaaaagaagtctccctgacacagagaatgcaatggaggtgacaggtccgttctcac

SEQ ID NO: 33565 - DNA, 2477 bp, Arabidopsis thaliana landsberg
acctgctcgtttcctcttaaagaatttgaaatgctaccatccatcgtaatactaccaccacctcccaatttctcttgttgatgaatactgtgatttgaactctgtggttgcggatttgtaagggcaagctgattaagtggttgtggctgcggctgtggctgtggtggattcccaccaccctgctgttgatgttgctgctgctgctgtaacagagccatctttaactacaaagcataatcaattattaaaaatttagggcaaacgtcacagccattgaaaaagagcagagattattatatcttcttccaaatttaccaaacaatacccttaagagtttattcagagttgcaaaattttgaaagacatgaaagccagccacttaagatttgtaaaaaaagaagacaaggccaaccttaagtagcatatcggtgtctccacgaggcaaaagagagccaccaggttgtaatgacgatccgacatttggtaacacatcccctacagaactcccaaggccatcctttcctaggctcatgctccggttgttcaatagcattttcagtcttctgttctcttcactgacggactgtgaatttagattctgttgagccagcatgagctgttgctgatgctgaggagttagcatgttgagttggtgaaaagactgagactgcataaatggtttttgctgctgaagaagaccagaacgaagctgatcaaatccctgaatcaggaaagaaagcagcagtcaatagaaacttcttttgagataagagagtgagacgagctatagtaaaatgcatggataaagcttacagtgagtggccaccctttaagtgtaaggttgttgctgccttgatttgaacctgaaacaggaaaccagtcattaatcctaagcaaattcttgtgagctgaagtacttatactacatttgacacgcttaaccaactgaaatgatacactcagaacagcaaacctaccaggaattccaatcaacgatccttctggaacagcagttctgggagtgagcacgggattgatctcacttttaatatcctaaacccaaataagccagtgtgtattaactaccaactaacagtaaaaaactacaagggggtagacacaaaatttattcaatataacataccactgcagacccaggaagttgctgatttcgagtttgaacctgtggagacataccaccacttgtactgtgtaacacttgcctgtgattcaccagaaaatggcatttagaacaagagagagatattgaatgatttttcgatgcgacaaaatcattttatactaggcgaggtagcataggatataagtggaaacaatgaagatagaagtataagaacagcaccctgcaggctgtccagaggctgcagcagatttcaatattgatgcatgacttgggtccaacagttgtccaacattgtccccaaatcgctgccaccaatgaaaatttgaattataccatttgatgaaactaaggtgtgacaaaaagaagaaataaaatttaaacacacgcctagccaaaactaaccttcatagcagcctcatctaaggactccctctgagtaggcatttttacacgctcctcatatgctttactagctaaggaactcccagacccaggattttgcctcataactggttcactgttattaccaacgagtccatttgctgatccatttgcaaggtgggacccgtctcttctctgaggctgctgctgtggtgtaggctgctgttggtgttgaggcgttgattgctgctgctgctgttgagaaggtggttggttttgatgttgttgttgctgctgctgctgctgttgctgttgctgctgctgttgctgttgctgttgctgatgatgatgatgttgttgttgttgctgctgctgctgttgctgtgcacgttgcaacaagagttgttgcatttgaatctgctgttgttgttgttgctgctgctgctgtgaaacttgtgggtgttgagattgctgcaattgctgttctcgtgctttgatcatctgtgtctgtaagaaacacacgaaatttctgatcttattaacttaaccaaaacaaaatagaaatactccagcttagtcaatcatccataacatactaattggacaaaacatttctgattttacatattcaactccaaattcttctcttaaaacagaaaggaaaagagaacaccattcaactgtacacaatgaaggtgctaactaactccatatcactaactaaagagactatcgcagctttccgcagttatataatcactagtatccctagtggtcagggtaaaaaagaaaagagacctacctctatgtaagatgcagcaacctcggaatggttttcattggtcctagccattaatatattccaaaaggccggcccccccttcaaccagaaatccaccaggtgggtcaatagctccaaaccaatgcaataagaaaatgaaggtggttaggt

SEQ ID NO: 33566 - DNA, 2803 bp, Arabidopsis thaliana landsberg
  unsure (1)..(2803): unsure at all n locations
tgaagagattgctcacacttacaatcacatctatggactctctcttactggcttgaggtttttcaccgtctatggtccttggggaaggcctgacatggcctatttcttcttcaccagagacattctcaaagggaaagccatttcaatctttgagggggtcaaccatggaaccgtggctagggacttcacttacattgatgacattgtcaaggggtgtttaggggctttggacacggctgagaagagcactggtagtggtggtaagaagcgcggtgcggctcagttacgggttttcaatctcggcaacacttcgcccgttccagtgactgatcttgtcaccattcttgagagacttctcaaagtcaaggccaagaggaacattatgaagttgccgaggaacggggatgtgcagttcactcatgctaatatcagttctgcgcagagagagctcggctacaaacccaccaccgatcttcagacgggtctcaagaagtttgcgagatggtatttgggttactacaatggcggaaagaaagctgcaagctgatgattgactatctgcaatgagtttgtagctttttttttttgattctgagattcttgtgattgtttcactctttaacacttgctctttttgttggttctttggccggctcataccctgtctttgccgtatatgtttttactcaaaaccatttatactccataagaaccattatttcgggattacattctttgtcactcttgtctctcagttcattccaaatctcttgtctctcagttcattcctaatctcttgtctctcagttcattcctaatctcttgtctctcagttcattacactatagtaacgctatgcgaatgcttaaaaggggatgatggttccaatagtgatttcatgatcatgtggttatcttaaggaaaagagtataaggatgcaaaagcatattcaatagtaaattcaagatcatacgattctcttaaacaagggagcataagattccggaaaaaaaagagaggcaaacacaaaaatcctgctgacacattaagactaaagttgagaattcatcaaaacaaaagggaagcaacagactagtagaatcctcctccagactccagcttaagccacaagggtgctcgcggtagtggattcgctgcagataagagtgtaagtcagtgcaattcatagagtcatagagaacaggtgggttcattcatgcaaaagggtggccaagtaaacgatagttcataagccgttctaaacaaaactacttatacagagaccaaaccaacttcgactaaactacttatacagagaccaaaccaacttctactaaacaacttatgagtgactgctgatattgaaagcaacatgtcattaagagacaatgaataaggtaactcactacttccagacgggagggagcttcttggtcttcttgtaatagcgagcgaggcggtgaatcctgctctcaaccaagatgagcctgaacttggaatccttgtccttcctgttcctctcgagatgtttacggatggcaacagccttcttaattagatggtacagatcctcagggatctcaggagcaaggccttgcaagtgtatgaatatgacattaacatcataagccaaaatgacaaatgcagaacgaaagattgggaaattgaaaacacaccatgagctttgagtatcctcaagatcttgcttccagtaacactcttgacctgagggataccgtgagagtcacggagaatcacaccaatctgggaaggggtcaatccctttttggcaaatttgcagattgattcatcaacctgtcaaatgtaataataataatgtgaaggcatgattcattcaacaaagcagagcaaaaaagtagagatgatatcaacttacatcctgagaggtggtcttgagccagctcggagacgatctcttgtaaggcaacgcagaggctgaaataccctttctacataaatgatagcgatatgttagatttcacaattgacgtaactaaaatacgaagaagacgaagaagaagaacaaaccctcgactgtgcatacgacccatggtggcagattctcacacttttctcctacggatgcgcactgactgctgaagacaaagagaaaccctaattctggctgttattagagagtgtgctttttaggttatattcgggacttacgtgggcctttcatatttctggcccagttttcaatttgccttcaaaaagcccatcgagtccacgaccctacttatttttgatttttcacttggttggggggattttttttgtattatttaccaaattaccatatgtatgtagtactatcatttttctgatacaaagaaaacaaaatgcgtataataattttaatcgattcatatttcttagtgttgttgtgtgctttttaaatttccttaatttggaaaacatagaagactgtgagtgttgtactagtcctatgagcaaaattcaaaacttcagaagttaaaagacacttggtaacaagaaggactttaaaccacccttcatttgatcccaacttgggactcgaannnnnnnnnnnnnnnnnnnnnnnnnnnnnnnnnnnnnnnnnnnnnnnnnnnnnnnnntcatcaagggactacgtgtatgcgagagcctacaaagattgcgactttggagcttcccacagcttcactttcttgtcatcgcctgatgtccccaaaaccatggcatgtctttcccctgagaaccaacaacaccacatgagaatcagatcacatacaactttacatacaagaaagaatcagac

SEQ ID NO: 33567 - DNA, 572 bp, Arabidopsis thaliana landsberg
  unsure (1)..(572): unsure at all n locations
aataacataaatacaaggaaatgaaaaacaaaagtagccattattttaaaaccaattgcaacaaacaatggaataacgcagaaacaagaaaggtactaatactactaattcttttattttttattttaaagagagaaattaagcaaaaacaagatacaaaacatcttgaatttattaaaactccactagtctttgataagaaaacctccaaattagccgccaagtcttagagacgctttatcaagtgaaggatcgagtcgttctggatgttgtagtcagctaaagtgagaccatcttcgagttnnnnnnnnnnnnnnnnnnnnnnnnnnnnnnnnnnnnnnatgccttgtttatcttgaattttggccttgatgttttcaatagtgtcgcagttctccacctctaagacgattctccttcctgtcaaagtctttataaaaataagcatgacttcatgacgaaagtccggcccgttatatctaccggttggattttcgtcgatattgatgtcgatggtttaggagctatcgacctctacgttgatcattgtgtttcctttcacagtttttata

SEQ ID NO: 33568 - DNA, 677 bp, Arabidopsis thaliana landsberg
cgcacctaatctcaacgcttcttcaacttcagacccatcaccacttttacaaaccttccacatcacagaaaccaaatctttcttctcagaaatcttcaaaatcttcttcaccaaaatcggtatcaccagcttgtttcttctcactttctctcttccttctttagtttcacaaatcacgtttaataccgttaacgctttctcgcaaacgctgttttctgaatccactagcatctccactgttatattcacaagatccaattcaagaaaccttgatacggtttcttgatttgtcaagatcatatggtggattgatattaacgagttgacgcatgtagaatcgcgattaatcgatttcatgaacgcttcttggacgccattgatctttgttaacgcgtgaacgtgagttacgttaagctcaagaagctcttttatcaaaaacgcagcgttttgatcaccatttctcaacagttccactaaacgattaaacgacgacgtcgtggtgagtttggattgaccttctaaaccaatgggaagcatccacgtcagcacagacacagtctcctccaataataatgacgcgtttgcgttttcggaaaacgcgtcgaagcaaacgcaaagaaccaatcccgcgccgttttccttaacgcattttcgattcctctcgctctcttttccta

SEQ ID NO: 33569 - DNA, 4628 bp, Arabidopsis thaliana landsberg
  unsure (1)..(4628): unsure at all n locations
aagacactaccaagaatatgattacaaaagtcacaatctttaactaattcagcttttaagaattccaattaaacaaaaacatgaaggagcatatacaagtctcacataaaacaaaccagtcatacctaaagttctaatccaataaattaacatcttttgaaactcgatcatcatccatttagctcaaaatctataaaatcaaccaggataaaacttctagatcccaatacaagaacaagaccgttaaagtgttgtttcaagtttaaggaagagagatggtaacaaatcaatgcattcgaactggccatggtcatgtcacatataccaacacaagaaatttttatacatgttataaactttcttggccttacagtcaaggaaattaatatcttctcacttaaaaactatacagaagacaagatcacttaaaaaaaaaaaaaaactagcaatatagttaattctttaaaataaaatatttgggtagctagctatagagatttagatgcagagaataccgagtttcttagatctcatcttccatacccttccaagatcgagtgagtaacatgcattgatgaatctgggataccaatggtagatgatggttccactgaaactggcataaaacccccaatacctggagaatctggtgagaaatccggtaagggttgtttccggcttaggtattgtatcacttgctccatgtcaggccttgattctgcaacaatgtttgtgcagatcaatccgagtttcagaaccattacggtttcttctaccgagtattcacctcccaatcttgtatcaatagcatcaactatagagtcccttctccagcaatcacaaacccatttgatcaaatgccgtttctcagatggaatcttgggatccaacggtcttcttccacaagttacttcgagcatgagtacaccaaatgcataaacatctgttcttgtagaagttcccattgttgttagctcaggtgccatgtaacccattgtgcctacagctgctgttaccggtacgctatctccataatcttcaaacctcgccattccaaaatctcctaaccttccattgaattcagaatctaacatgacattagaagcttttatatctctgtgtaacacaacttggttagctcctgtgtgtaagtaactgagagcagaagcgatatctttcaaaatgacaagcctttgagaccatgaaagagcgagtttttctctgtgaaacaagtattgatcaagactgccattagacatatactcagaaaccagaagaagctctcctttcctcctgcagtacccgagaagaggaaccaaattccggtgctttaaacttcccatagtcactacttcagccacaaactgtttcatgccttgctttgcatcgtggcacactctttttaccgctatatctccaacgtgaggcagatttcctctgtagacttctccaaaaccgccttttcctaaacggccgtctttatcaaacctgtttgttgctttgtatagagatttataagaaaaccggtgtggactgtattctttttcccatacttctctaacttctgcatacttctttctcctgtataagtaaattcctccaagaacagccaacattatgagtactagtaacatgagtagaacgataagcagtggagatgtttgctcctgtttggcttttggatgaggaatctgaggaagttttgagaagtccagactctgcaacaacattctgcttctgctgaaactccatcctaagatatattggtaactgactaatgttcctgttgctgcagaaaatcctaaaaacagccttcgatccgggaagatgtcagtgagattaatggatcttgacagaagaggatggtttggtttctggatacttacaggagctcactgtgacattgagtaaagctccttcataatccacccagatttgtatagggtctccacttaagagcttgatgctttgattcttccctttggcgtttgaaaagtatgaagctgaagcagactctacagaattcaggcttttgatgtctataccgacatgattcttgtcgatatcatcaaactctgcgctctcaacagtatcgagctcaatagctagaagctgagaagatggagatccatttgttgagatgtttaaaagtcccaagtactgagttggatctgcttgtgtgaaatctatggaagaggatacaacaaaggcaattccatggccaccatcagctcccggtttaggcacaagcgcacacacaaaatgagtcgaaaaagagagtttcttctcatatgaatcaaacttgaatggtttcttgaagaaagcatgacccatttgttgtgttgaggcatttgtcaactgcaacaatccatctggaaagaggattttagcagctccgtctagatgaagaccagcttgagcttggccaaagccattgtagatgaaaccggcttcttcttgttgacttaacaagaaagtcagatgattaaagaagaccaataagatcagatgcaatctttcagaagccattgctaatgaaacagagagaagtctggttttgtttctggagtttcaaaatgcaaatttatcttcaaacacaagtttcaacattccaagttcaattgtcttcaggaaatgtatttcctagaggcatctcttgagttgaatatacaaaatgaaattgattaaatgtaaccatgacaataacttcaaaccagttattttatgttgttgttcaatacaataattatatggtctcttgtctggttctaacaatgtatgtcataatagcctcaaaatactattgttttggatatctttcttatgtattataaccatgtgtatcagactgtcaatcacatttataaaggatttcttcttatatgataataatgtaattcatattgaccaaaaaaataaaatttaaattcaattatccacatgttaaataagtttcatcatcaaagcatttgaagtcaacgatgccaaaaggaagggatgactcatgtaatgaatttggtatcagaccaaaacaataacgtagaccatagcctcaagttgttaccatggatcacagagaatgttgctgtggataatcgctaaacagacggttaaaatcttcagcaaaacaaagaatttaagggagaacaagatgatacagttatgaatgattacagtaccagggagatgactaaaagtctaccaattacaattctaggaaattggataactgttagtttcttgtattggttaggacaagtgagatagataaaaatcttgagacctaataatatatatgctttctgctacgtgtacattgggtgggagttcttagttttccaatgtgtgtccccattaaggtgagttagtggccgacgaagcagctgaccagctccttgaagcnnnnnnnnnnnnnnnnnnnnnnnnnnnnnnnnnnnnnnnnnnnnnnnnnncagtgtatggtgagaaatctggcaatggtaggttctggtttaagtataggataacttgctccattgtgggtctggattctggcactgtatttgagcagagcaaaccgagtttcataaccatctcgacttcctcggataagaagtttccacgtaaccgggggtcggtagcatcaaacaaagaatccattttccagcactcacaaacccattcgatcagaatttgtttctcaagttgcaactgtggttccacaggtcttctcccacatgttacttcaagcatgaatgcaccaaatgcatacacatctgttctagtggaagttcctgttgacgttagctcgagcgccatgtagcctatggttcctacagctgcagttgcagagaggttagacccatgatcatcaaacctagccattccaaaatctcctaaaaacccttggagatttccatttaacatgacattagaagctttgatatctcggtgtaaaacaacttgactagctcctgtatgcaagtaacagagcgcagatgcgatatctctcaatattgctactctttgagaccaagaaagaggcggtttatcaccgtgaaataagtactgatcaacactacctccttccatgtacttagagaccagcaataactcgccttttcgcctacaatacccgagaagaggtactaaattcttgtgctgtaagctccccattgtcacaacttcggccacaaactgtttcatgccttgctctgcattgtgtgatagtctcttcacagctatatctcctactagaggcaggcttcctttatacacttctccaaaaccgccttttcctagacgaccatctttgttaaacccttttgttgctttgtacaaagattcataggaataacgaagcggaccatattctttttcccatggctctctaacttctgcatacttcttccttctgtacagataacatcctccaagacccattaccgcaggaatcactaataagatgaccaacccaataagtaatggagataatttcttcttttcctctttaggaagaggaacccgagcaagtgtagaaaggtccaggctctgtaattgttcttttcttctactaaacctccatccaagtatataatggttactgagaagattccctgttgatgaagagaacccagcatacatcttct

SEQ ID NO: 33570 - DNA, 467 bp, Arabidopsis thaliana landsberg
aggttgtgcatcgcatggctcatagcgtccgcaaccgctcgatcgccgcgtccagcgtcgcttcgttcttggcgaagcacatccgcgccaggcgctgcccgggcggcggggtttcgtagaacggcgacagcgggatcgcggtcacgcccttctcgatggtcagccagcggcagaattccgcatcgtcgaggtcgctgaccgccgaatagtagaccagctgtaaatacccgcccggcaccggcagcgggcgcagtttggtcgtgagcagctgctcgcggaagcggtcgcgcttggcttcatagaatgcaccgagttcctcgtagtgcccgggttcctcgcggatcatttcggctaaggcatgctgcgccgggttgaaggtgcagaacacgatgtactggtggaccctgcggaatgcggcagtcagccccgccggcgcgagtgcaggagccgaccttccagccggtgca

SEQ ID NO: 33571 - DNA, 1907 bp, Arabidopsis thaliana landsberg
tttaacgctttagtaacttgtttatgtttctatatgtgtctgatcgttattcttaatttatttgtaatgtttcttcgtatttttgatactttgaatctctgatcattagtctttgtaatgttatccgagagaaaacaaagataataatcaatttattatattcttcttatttgtagatggattcatcatcatcattaccagctgaagataacagagattttgatgatgaagaagagtatatgactcctgatttgggtcaaaggggtaaaaggaagcaaacacctgaagctggagattcgtctgaacaaactaagcctaagaagatacttccctcaagatcagatgtgtagaatcatttcaaaagacgattgcccatctgtgacaagagtaattgtcactattgcaaaaaggagctttcatatccaacaaattcagggactaaaaacttgtggaatcatcttgagatttgtaaggaatacaaagcatggaaagatggtcaagatccgaaagagggtcaacaagttattaacaagaaaggaaatcttcaagttacaaaagtttttgagaatgtttttcagagaagcagtgaatgagatgcttgtgataggagagttgccatattctttcattgaaagtatggcttggagacacttttgcaacaacgtacttttgaaataaggcagattctttctttttacatatttctatacttgaatagttgaatgactctctctctcattgtatatactatttaggtaatcttgtgcaatccacactcaagaagaaccgcaacaagaaacattgttgagatgtatgttaagagaaaggctgctctaaggaaatggttccaaggcaacaatcaaagagtctcgcttacataagatatatgggtttctcatgtcataggtaatgttttctgaatttctaaaattaatttgcgatcattaacttgtcttacttaatgtattaacatgacttaatgttgattgctattcacaggtgatagttatatggttataacaacacattatgttgatgcctattggaagttaaagaagctgattataggtttcaagtatgtcacagatcacaaaggtgagacaattgctgttgttttactagaatgcctagctgattgggggatagaaaagatcttttgtgtgactgttgacaatgctactgctaatagtaatgcgttaatagtaaagctgcgtttgaaaagatggagttagaggacaagctgtacaatgaccatttcttggagtctgaaaaggggaaaaaaaggattggacctccttcactggaagattgacgtgcagtagagaggatcaataagtttctggtcattttctaccactctaccttggtagtctcaacctctactactttgaattctcacaagtgttttggtgagatagtgaacataacaacgaatcttcggatacatcgtaatagttttgacagtgatttgaagaaaaaggctaaggatatgtacgaaaattttgataagtattgggatggcttgaagaacataaagatgtggatagtggcgactgtgtttgatcctaggaagaagatgcaatttggaaacttgtgttttgcggatttgtatagtgaaggttctacaaatgctaaggtgctttatgaatctgtctatgatatcttggtggatatgtttaaggagtatactggaaggtatggtaaagctaccgatgtgcaagattctcaatcacagtcatctcagtctactcaagaaaagcaagcagagacagaattgggtgttgaagaagatcctagttatccttctattgataaaaggtacaatgctttactgaatgtgataggagtgaaacaaacaaagaatgagttgtattcatatctgaaggaacatgttagaatccagtggc

SEQ ID NO: 33572 - DNA, 736 bp, Arabidopsis thaliana landsberg
cccccacaatgcaaataaaaaagttgccggaaaaatgaatgcagcttaaattatgaagatcacatagtgctgtaatactcagctagagggaggttgtgcactaacgtgaaccaatgctggtaacaagtaagccaatgtcttaccagagccagtctcagcaataccaatcaaatccctacccttcaacgccatcggccatccctgagcttgtataggtgttggctcagtaaatcccaatttagcaattgcttcaagaatgttatctaacagataaaaggaaccattaaactaagaacccaaattagatataaatgaactggaaactctatgaccaatccaatcaaaatacctggaaagttagcatcttggaacatcttcatcggcttaggaacatcacgaccttcaacggatatatccctctcggttctgtacattgcaacatcctgctctgtcatagcttgcacagtgggactctccacatagaaattcttctcaaaatgtacaagattcccaaaattctgcttcggaagagaaacactatctagctctctttactcgatccgccacgtccacctcatcctcccacaattccctccgccgtttctatccccgtattgaccatatccagagcttcaacgaccgcggacaacacagaaagcgccacgagttgcttggaaagacaggatacggttatagccggaaggatcaccggccactaccggagatcggtccatag

SEQ ID NO: 33573 - DNA, 1382 bp, Arabidopsis thaliana landsberg
aagatatcgcagctggtgtcgcattcgaagagaaatgatgcaacgagagagcttttttcattcttcgaccaaactttctggaataggaaacgagtgtaagctagaaattgcatcttggaaacgaaagtttagggttttaccaaagcttattattttgtacagttaagaatcattcatgacttttcaactatggtttctatttgataagattaatttatttgagatacagtattcaaaatattactaaaacagagatgagtctagtgagtagctgagtacaatgagtatatttatacgaaaaagttcctaatttctaaatctctctatacacaagcaatacatgtggctcatgaccactctgttgatgaacaaccagagtctcctctccaaaaattattatcgaactttaagaagacagagatgagagagtggtggtggtttgactagttgaccatctcttgcctctcaagcttccataagataattttatttgcagaccagtgaaattgttaacactcctgtgaaatgcacaaaagggtttatggagattgaagaagctttaatacatttcttctgtacaaattaagccaaaaaatgagtgtgagaatttgagtctgataatgtaacttgtaaacatcaagaggtgataaatcatgacataccaagcaagttcttaagctgttccagtgattagtttttcccgttgatcgaacttcttaacctttatgattccgattagaacttggaggctgaagaaagcacatactgtatatgctatagttgcaggtgtctgagaacacaaagaaacaagaacgttggtgaatttgagcagacaaagaggtttataggtgaaaaaaaaagaacaagagtaccaacttacttttatagaattcagatacaaaattgttgcgagattgactaaacttcctgagcaacagcctgtagagaaacacaatgggtttaacaaaaagaggaaaagaaaccaactttaacacacaaaacagaaaacatgaaatgctttcaaagaacgacttgaagagattttgatgtaaaaaagacatgagaatggaaagctctacttacacttcctactgttttttgaacagctgcaacgcgttgaaatgccctctcagactctagcgctcggaccctaagcttcaaatcaccttgctcctgaggatgaaagtaaactcattagaaagaaattcatgtagaatgggagtttgtggtgggtgagagtgttagtttcttacaagccgttcaattgactacagctagctttttaaactctattcgtttgtttaatatgattgtagaatgcttgtgattgcctgttcccatctttttctcaggtcctacaatagttaatttgattgaatatg

SEQ ID NO: 33574 - DNA, 874 bp, Arabidopsis thaliana landsberg
ccgtccgattatttctattggtcaaatccaacggtcgtgatccaatttgtttatttagagtctcatcgtctctcaaccacgagatggggtcgctcgctcgctccctcgtcgtcgtcctctctacgatatcgaccaacataccagatctttttcgatcccgcctacgtcgccgttgctttcgttattttactcagccgccgtttccaactgtttttaactttttctcgccggagattgagattgggattgagatttctttagggcatttacacgatccgattaattttagagacgaggttttatcgacccccaccgacaccggtagtggtttgttctctcaatctcgatcctttgattgttataataacctaccctccattgatctatcgtctctgattcattggttttgtttgttaattcgtctgattgctatctaaattttacttcttttaaacaattttaggttgcagcgatttaaagatcgttttttttttggtaattaaatgtgattcgtatttgtttcaatcaaattgtgcatgacactgtctattgattgtggtttgtgttgggtttagattatgtctgcaaaagctggtgtcgtaagaggggataagtcttttgatttgtgttaatgtgggattatacactggttatgactatacatacgagatggcttcagaaggaaaattgtgatttgatcttaatgaacttcctacagaagatgatgatggcattgataatgttaacttcaatcagcagccacaggtgactatcccatcttctaaccccagttcctgtgccttgcaaaaaaaacaaaagtcttctcaagataatgtaaacaacaaccgagtgttgtctcgcgcggcaacagttt

SEQ ID NO: 33575 - DNA, 1649 bp, Arabidopsis thaliana landsberg
aatgtcgaactgcttgtggttgatgaggcggctcagcttaaggtttgtgaatcagttgctgcattgcaacttccgggactgcgtcacgccattttaataggagatgagtttcaattgcctgcaatggttcataatgagatgtgtgaaaaggcgaaattcggaagaagcttgtttgagagattggttttgcttggtcacaacaaacacttgcttgatgttcaatatcgaatgcatccttctattagtcgtttccccaacaaggagttttatggtgggagaatcaaagatgctgaaaatgttaaagaaagtatttatcaaaagaggtttcttaaaggaaacatgtttggctcattttcttttatcaatgttggacgtggaaaagaagagtttggtgatggacatagtcccaaaaacatggttgaagttgctgtcatttctgaaattatatcaaatctttacaaagtttcatgtgaaaggaggatgaaggtgagtgtcggagtggtctcaccttacaaaggacagatgagagcaatccaagagaaaatcggagataagtacagttccttatcaggtcagcaattcactttgaatgttcggtccgtagatggtttccaaggaggagaagaagacattattatcatctccaccgttagaagtaccagtaatggaaaagtggggtttctcaccaaccgtcaaagagctaacgtggcactgactcgagcaagacactgtttatgggtgattgggaacgagacaactttggctctaagtggttcgatttgggcaacactgataagtgagtctaggacacgtgaaatgtttccatgatgctactgatgagatgaatctaagagatgccatgaatgaagctttgcttgaggatgtgtcttcgagtcttggatctctttcgcttaggaatggccatggaagaagaaatgtttggtagattttttatgtgagcttgttttatgtttttgtgtgtttcctatcaaaactctgtattggatttttatgatgttttatggtatcagagcccgatccgcacatactcaacccgatccacatcggttcggcccaatacttggcccgccgatccatgcccaaacatatcgagatcaatggctagaagagccatcatctcgagggggcgtattagggacaatgtcccacattgtaagttgagtaggatcttaagtggtatatataagatatggacctctccacctattgtcaattggttttaggttggaagcccacagtctaataagttatacactagtaaaaattcattcatgtaaataattttaacaaaactgacgatttaatctttaaagcttttctctaatctacgagcgaataaaatcaactcattccacagaaaaacgaagaagccgatgagtaaaacggtgataaaaacagttcaaaaatgaatgatccaaatcggaattggaaaacgcagaaaaatagaaacaaatgatgagaggagaaaaaaccttgaggctaggaatgtaagagagatacgactcggggttgtcaccaataatttctcgacggcgagagggtttagggtttcggaataaacaaaattagcgagtaaaaaaataatactagtagtagtatcatgaaaaccaagccggtttacaataata

SEQ ID NO: 33576 - DNA, 110 bp, Arabidopsis thaliana landsberg
tactgtgctctctagagagcagttctgctctgagtcttaaaagctgatgagctggagtccgataccaactaaggaatctagtgcttctggaggatccagctccaggagaa

SEQ ID NO: 33577 - DNA, 1427 bp, Arabidopsis thaliana landsberg
aactatcatactaatcaatagaatagcttaaacccaaatatattattattctctcatcacatgtggctctgtgtgttacttatgactcgtgggatctaatgtgttgtgaattacatttcgttcacttgtggttcaattctgttttcttttttcgaaaaaggcaacatggaacattggcccttgtgattcatctctgcaccatgttcaacaatcaacattgatgtaaaaaagatatggaagatcaagagaaatcataattaaggtacaaacatatattgattatgcagacacaagaggcaattttgagttattggaacgagacctttaggcattaagattatatggtgtttgtttgatcttcctttgtttttagagtctcacaattcttagttgttatgatctttttgtgctatgtattgtatcaagtgcttcttgtgtatagtgatttagttttcgagaattttttgtttccgcagatattagtatttcaaaaacgtattgatatccattatttcacccctaatttatataatcaaaaattcaattaaaaaaaatatggtgtgtaccgccaacgtaaaatttcaatatgtataatattacagtctttttttccgcacataatattacagtttctacttaagttaatgatatgaattatttaggtatttatataaaatatttaattatatttttacacactaaaaacaaataatgttaattattaattattattatattaatctttaaatgatacatgaataaacgagacaatgagtaaataatatattttggaaaattgagacaaaaagggacaggacaaaaggaagctgtgcaccgccaactggaccgtggctgtagtcttctaccttccactgtcatagaaacagaataatactctttgttctttgcttcttccatggaaactctccacttactagaaataaataaacctacttttcgttaataacttaggccaaaacaaagattaattatatcaaaattttactagttaattaactttaaaatatacttttttaattaggttaaaacgttctttagttgaaatttgcaagtgattagttatattagcttcaactaatggaaacatctcacaatttgtcaaaaactcgtttagaaaacaaattgaagtctagtagccttattttacgtggaatagactttatatatggtaataaaaattataaatattcttgcaatgaattttattttttctgttgactttctcaaatttgagtactgatttgatttgttgcacaaaaaaaaaagagtacttatttctgaattttgaaatcatcttagaatgcataattgtattattaaagttcttgagtttttttgcgaaaataaagcttttgaagtaattgcgatcatacatgtatctatgtgtaatcttaaaactatctaat

SEQ ID NO: 33578 - DNA, 12218 bp, Arabidopsis thaliana landsberg
ttttcgcaatccttgatcatcgttggccagaagtatccgtggcgttttatcttgatggcagggctcttcctccggagtgattcccacatgagcctttgtggattactttcatgattttgtaggctgcttccttttccacgcaggtcattaaaggtccggatagacgccattcgaatagcttctcttcgaccaaaatgaagcctacggcctgagctttccatttgtcggagggcactttcccctcggatatgtaacttctgatgggttttatccactcagagtcgcaacctaaatatcagttatcattcaaatccgaaatatccttgcaatctgtggtattctgcacggagaaggcgtgctcttctttttcaagctcgatgctaggtttctcgatgaatttgactgggatgactctcctcaggtacgggtcagacgtcgaggccagagcagccagggcatcagccgatttgttttcgcctcggggaatccttgatagttcagactcgtcgaactgtttcgcctgatcttggctgtgagtgagataagcccccattctttcgtcctgagccgtgtactccccgttgaactgattggcgacaagtgaagaatcacaaaaagctctgatcttggcgatttttaacccttgagctagcttcagcccgaccacgagtgcttcgtactcggctacattgtttgttgcttcgaaatttagcttgaaagattattcgagaacctcgcttgtgggtgaagtgaggcggatgccacacccaaaccttgtttggaggatgagccgtcgacatgtaggagccaagttgtgtcgagtgggttttcccgagcttcctttggtgggtaattcgacgataaaatcagctaggacttgcgatttcgcgcatgttttgttccgatattcgatgtcgtattcactgagctcgattgcccacttagctagacgtcctgattggcttggactgtgtaagatggcgcggagtggcatggatcccattactacgatggaatgggattgaaaatagggtcgtagcttccgagccgacattacgaccgctaaagcaagtttctccatttgtggatagcgagattccgcgccggtgaaagtctgtgagacgtagaaaatcggcttatgttcgcctttgtcttctcggactagcactccgctgactgcagtctctgatacggcaatatacaaatataatggctctccgattacggagttggcgaggatgggtggtgttgctaagtatttcttgagttcttgaaaaggttcttcacatcggatcgtccactcgaactttttgtttccccgtagcacatcgtaaaaggctaagcatttgtctgttgatcaagagatgaaacggttgagggccgcaactcttccggttaaacgctgcacctctcgcttgttttgatgcgatgccattcccaacaatgcctcgatttgctttggattcgcctcgatgccgcggtgggtgaccaggtacccgaggaactcgccggatcttactccgaagcgacactttgtggggttgagtttgacgttgtataagtttagttgtttgaaacattcgcgcaggtgggctatgtggtctttctcttccatggattttaccaacatgtcgtcgatgtagacttccatcgtcttcccgatctgtaaggcgaaaattttgttaacgaagcgttgataggtcgccccggcgttcttgggtccgaagggcatcactcgatagcaaaaaattccttgctctgtgtaaaaagcggttttttcttgatctttggggttcatcatgatctggttgtaacaagcgaaagcatccatgaacgacagtagcttgtttccagaggttgattctacgaggcgatcgatgtgtggtaatgggaaactgtcctttgggcaagctttgtttaagtccgtgaaatctacgcagactctccatttgccgtttttcttttttaccacgactgggtttgcgatccagtcagggtacttcgcctcggtgatggatccgatcttcaataatttttctacctcggcctttacggcttctgctcgttcccgacccaattttctcctcttctgcttgatgggtttaaaagttggatcgatgttgagctcgtgtgatacgatgttaacacttactccgggcaaatcctctggggaccacgcgaaagtattgacgttctctttgaggaaagcggtgagttcagctgttagttcttctcctagatctccgccgatttctacgcatcgctcgggctttgcatcgtcaaggcaaattgagatgaccggatcgggagttggtatcttagattcccgagcttctttgatctttaattgctataactgctcggagatcgacttttcttcggctccgccaagtttggcctacttatgattcgcgtcgaccgtcgattcagtgacggggttcctaagcttgtgcgctgccatgaagcagatgcgagcatttttctggtttccccagatggttttcacgccgtcgtttgtgggaaattttaggcataggtgatacgtcgaggcgacagctcggaactgatttagccatggggtgccgaaaatcgcgttgtacacggttggttggtcggtaatagaaaaatcgacgatttttgttactcctttggctcggactggtagtttgatggttccgagagtcatagtggtttcacctgagaacccgagcacaggtcgtggagttggcacgatttgcgtcatatcgatcttcatttctcgcagagttgtaaggaaaatgatgtccagtgtgcttcccgtgtcgactaggactcgttcgacgttgaaatcaccgatggttaatgtaatgactaagggatcgttgtgtggacggtctaaaccgttggtatcgctttcgtgaaaggttacttcgtcatttggtccattaaatggccgcgtccaattacgattcgcgtcggctttcctttgatatgccttgattgatgctgccgtatcttgacagaaagctgaatcccctaaaattgtgaagatccttccccgagcagcttctggttcatcgtcatctttttcgcgattaccccggcctcttttaggtccttcggggttcgccgcgggggcggtctgctcgggattggccacagcgttgacctgctcggttttacccttttctgcctctaagtcctcgatggtcaagcctccaccaatttctccggccaggaattttgctgccaatcacgctccgaggctacgacatctggacgtgtgatggccgtaactcttgtgcaactcgcaatattcttgctcttttcctgcgggttgatcctttgtccatgtgtaggattctcgaccgcgtcctcgtccgcggcctcgccctcggcctcgggtggctttgcctcggggtgtatcgacctggtaattatgggctctggagaaatttcgtccttcatggtgaacgaacgtaccaccttgggcgcctttcttgtggttcggagcgccggtctgaggtttatcgctgcgaggcgtttgcttggttggttcgtgtctgctagctagtagctccatctcttcttcatgggatacgtaatccgaggctcggtgcagggcgtctcggattgtcggtggtttggacaagtttagttcctttcgaaattcggacttgtaccacagtgctttcttcagagccgaaagagccgccacatcgttgattccttctactttggctagggtagatcggaattttgcgaggaaatctcgaagtggctcaataggctgctaagataatgaccaaagatcagcgtctgacgttcctggatcgattagcaccgaatattgcttgaggaagagcgtcgatagctcctgaaaactgtcaacggaaattccctcgagtcttgagaaccaatccagggctggtcctttcaagtgttcgaagaacaggtgacagagaccggcgtccctttcgtcgggtctgaatttatctcgggccacagaaattatgaaggacttcaaatgccctttcgggtcggaagatccattgaagtactcgatccttagctttcttgggtctgaaattatcgcgttgaagattctacgagtgaaaggagtgttatgggactcctccagaatgcggttgatgtttggggccgaggagactgcgttatgcatttgggatctcacgagcttcatctcagtttctgccttggctaaggaaagcttgataacgcttatttcttgttctctgggatatttctcagcccatcgaacgttctcttcagagtcttcatcgtctgagatcccgattcgatcggcctcggcaacttctgctcgagaaagagggagctgcgaaccgtttccttctgctcggttcatcgtgtcctggtttcccaaagctgccggttctgctcggtcccttctaatttcggcgcggttcgggggatgggcctcgttgtgttgccaggcgtgtggaacacgagtcgtgttgggttgagatctggtgctgctcgtcgatcctgaagatgttgtgcgacaaaacgagtagtcctgatctatccttgggaggtagttgcttcaagctgttgcgccaaagacctattcacctgttcttgatcgtttaccttcttctggagttgagccatcatgctccttaattctgctaggaccgcgggagcggtggcttcaggagcgtctgtctggtttggaaggatcaggtttccctctgcgtcaattgtgttaccagggatctgattgttgaccattgtggaatggttggttggttctttgttttaggagtaagataaatctcaaatcggcctccttctagcgccaaattgtgagagtcgaaactcgcacaatagaaattgtattaaggattccttcaaagaacggatctctgtgagattctcaaagaataacagaattgttgattaccgcgcacggtgttcttgattatattattgagataatgatgatttgattgtacaagtgtttagacatatgaaatataagtgttttgccttcaaaatcagagcgtttttgatagcctcaagttgagagcgttttagtgcgtatcctctttttgtttgtgcttagaggttctttatatagggctttggcagttcgctcgcgatattctcggaagatctctctttatctttaagttggcgaaggagattgtccttatcttccgaagattctgggaacttctatattcggtgacatctttgaagattctctaatatctcttccgcggttttcggaaatggtatgtttgatcttatattggttaagtcccttttttttggaaggttttcttacctagtccgaagttcttccgagccggaatttagctgaccttgggtcgtgctcgggcggctcggaccgtgatattcgaaaatgcgttcccgaggcgtcttggaacccgcctcgggatgatttgctaggtttatgtccgaggcgtttcgaggtcgggtcgggggaccattttgcaataatgctctgaggcgttctcgatgtcgcctcggtatggattcttgatgtgatctccgaggtgttttgtggcccgtttacctgggtggaatccgatccccaacaagggtttgggatttagggtgtagggtttaggtttagtgtttaggagcaaatattatataatactttaagaaggttggttagtgttttggagtcgaatatgacttgttgtcatgtgtatgattgagtataacaacttaaaccgcaactcgattttaaaagtttaagtattgtatccttgttagaagatacaaagccaaagactcatacggacttcggctacaccatcaaagctttgagaagcaagaagaagcttggttagtgttttggagtcgaatatgatttgatgtgatgtgtatgattctacactactctaacccatcctcagaaacctattcactactcagacatcataacagaaagcataaacgttgaacaggttgaagacatgataacaacagtgtaacagtagtgtgataacagaatgaacaacagtaaacgaaaatcaagaaccaaagctaaatactgaatagataaagagaaatctggattacaaaaagtctagaacacaaggtttgcggaaataaaactaggtaaaaacttcttttctgcgaaaatgagaagtacatgctacttatagccaaatatcccgaaaccctaatactcaaaacgacgaagtatttggacgggttaagaactgtactcgacccatgtggtcgagtgagaggtcgagtgaatagctggagtcttcttttcttccttgtgctcgagtgtctggttgagtgcggaatgaagaaggctctgaagcttgtcatcgagtatgcaatcgagtggtggtgatggaggtactcgacatccaggtggaatgatgaggtcgagtagaggtctggcaatgggatgaagtcactcgacctgggggtcgagtgacgtgatcgagtggtggtcagaagatggagatgaagtcactcgacctgggggtcgagtgatgtgatcgagtggtggtcaagagatggagttgaagacactcgacctgggggtcgagtgttgtggtagagtggcggtgtcttctacttgacctgggggtcgagtggtctcttgagatcttgaagctcctactcgacctctaggtcgagtggtttgtcatgatcaggtccgcttcttccagttagctcgtcgacagctccaaatcacctgaaaacaacacaaatatgcaacatgcatgcaaaactatcctaaacatgcaaagtgatgacaaatgatgtgaaatggtataaaacagtgatgatatgatgctaaagtgatgacaaatggatgctcaaaacattcaaaatacacacttatcaactcccccaaacttagtctttgcttgccctcaagcaaacaatcaagaacaagctggaggtgaggttttaaagcggggactcagagccaaagcaccagataaccagatgaaatcaatgtttaagttgaaagttctaagctgcaagatcgaattctacttaaaaacgttagccatgcctcattatcaatcaatccgactcatatgctcgacctacacatgttttcaaatctaccaatccctttaacattcattagttctggaacgtgaatcaagcaatgcatcatcaaagaactcatttggctaaggtaaaaggtcaagagacaaagatggtcccttacagaataggcttcagtaacaggggatctctcaaaaaatgattaagctttagtagaatgctaaaggtaagtcccaagctatgcatacaaagataagatcccatctacccagagtacatcaaatgaagctctaatggtaatcccatctccaatcccaatacaagaactaaactctaccctttgcattcatgaatcttttaaaccctttttctaatcattcttttcttttctcttaactctaggagaaactttctcaacactttgatacatctagcggatttggatttctttaacaactaaggttcctgtttttaacatcttaaaaccaagggcttttgcccatcttcaatagctaacaagaactctttcttttctttacaaatcccaaaacctttactagactttttctgcttatttagcctacttcacctagagtcttttaccttttcttgtcaatgaatcaagcccttttttttttttttttttaaacacatcccaacccaaagtataagcgcccacctagtcctatctagtccgaaaaatgcgaactagaactacatgagacactatctatgtcgttacgaacctaacactttctaccaagttaatcggaataagacctctcaaacactcacaagtgatatagggcttgaaagaaagtctaggtttgggttcaggttaactgctctaataaggagagtcagctacttggattaacaagagtggtcaaaatgagtaagaaaatccaagtattttagggtatccatgagttcaaattcgatgccaagacatgataattctaaatcagattcaagttcaaattgatagggaatggtatcagatcctaacaatgtggtcgagtagagcaatctaggcatggtgcagttttacttcaatttcaatgactacgcatcagacaactaacaacgagggcactgagcttatcaggtgaacgaaaatgcttacaaggctatctcatcattatcccctatgcatatgcaactacatgaacactctatttttgtgaaatcattctctgaaatttttcaatttttttggttttttctatgccttagatgaatgcagactcaagattatatacaatgcaacacacacttcctgagccttcctccaaactgtgtgaccaaatttggaagagagtactcaggacaaaacacatcacagaaacaaaataaaaacaagagatggtatattacaatggtggagtgaggtgcataccttaatggaagaaggagcggagttggtcgtcaatagctgcctgtgattgctcccaggccatcgaagaatctccctgttgtgtctcagcttccccttgggggtactcgacctctgctccttcgtcgcggccagcaccgctctgatgatactcgacctctcttcttctgctgcggccagcaccgcggtcgagtgaattactgacatggagaagttgtgactgcatcatttgctatactcgaccacatcgtcattcggtccctgtagggtgtggtcgagtgatttcctagggtgaaagccagaacaatgtcgattttgattgctctgtggtcgagtatattgttgctccttcaaagccagaatctttttccctcagctcttcatacttatctcctgaaaacactaacaagatgcatcaaaaacaataaggaaaattaaagatatgtacaaagataggcttgagacttcctcccaagtgagcttgttttaaagtctctagcttgactcctcacactcattaagaagaaaatgggtgatagagaggatctgcatagccctctctgatctcatcatcatattcaacatcctctcttgagagatgagtagcagaatactcaattcttctctcctcgaaataggcctctttctcttctggtggataatctatctcctcagaccatcttgaagtaaactttttcctcgggatagaatcaatcccgcattttgattgagctttctcttgcatctgatccagtttactcttaagttcctcaactgtctaagctagcttctctatggtttcttcttgctcatcagatttctttttgagatctcgcaagtcaggtgtagaggttgtgcttggcctggtgattgaatccgaaggttgaggttgagccctgatcttttcttctacaaccgtcctttgcgaagtttcgttgatgtcaaactgcagcttgatgtgcttcccaaggttgagacttattctcccgtctttgacatctatcatcgctcccacgtaggctaaaaaaggtcttcctaggattaaaggatccttaggttctgcttccatctcaagcacaacgaaatctgtaggtacttccactccattaatcattactgcagatcttgtagcaggccaaagggtttccttgaagacctatcagcaaggatcaaggtcaggtcgcaaggcctatactgagtgaattccagcttccttgccacggagagtggcattaagcttactgaagctcccaaatcacatagacaattgctaaaaatcaattgctcaatggaacatggtagagtgaaagttcaaggatcttccagtttttcttgaacactcctcttaatagtggctctagacggattaacatcacagtcgtcttctgaatcttgatacatcttatcctttccagaattgaatttctcacatctttgtgaggatccaggatcacgttgagaacttctattagaggcatcaccgcttccatttcatcaagctgcttttctgcatgagaattgtatctttctatccatgctttcctgaatttccatggaagagcacgtgaaggtaatggtgctggcttgaatcgttttaccatcctctcaatgatggctgctttctcgtctaggttggactgagtttgaaaacgggatccagctaaatggtagagtccaacaacagaaatttcaatctgagtagaagtgtgagacccgaccctggacgtctcggcgtccggcaaccttggactcacgttcgcgcctcttcctggccaaacctcttaatttttcgcgattcaacatagaattgcctttacgaggctaaattcaataatcactttcttactacacagcggaagtcttctaaccttggtttaattctaaccaactcttgtaccggtttcatcatctttgtcccttagacttagatcgatcctttactcggtcaagacatgcatattgttcgctaaccattctaggcctaacaatcgcatattcctttatcccattttcacggtcaattcccaaacgtctatcctaactagtaagctagattgttacataccttggccaatatgcagatttgattccttagcccgtttgtagccttattctattcgttcaacgattcgtattcgatcttgcattgatgaaccaatccctatcgttacttagccatacaaccaaccaaccccactggtctaagtacaacgatagagattggggatcgtacgattcccttggttcacgatggccgaatcaagctcttggcttattggtccatccgttctccaaacgtactcccctccggctacatggtggacgattgagccctcggcttatcgaaccatccatgtttccgatccggtcgtttaacactacgaccgcccttgggttactaaccgtttacctgtccgatccatggtggtcgggaaagctttcggcttaatgatccatccatgcggtccgaacgatatcctttatcacacccaagggtccgtggattcatccaccggatcatcgtaggctagcccataaaatccttcttccgcggcctaggtttgctcacgggtccaacatccgttttgtccatcggttcccaccgtggacttttccgttggttatccgtcgagtcaccctttggtcttaccaatctccgattggtttcaccatggctgaggagatagatacacgaaggaagccgcgatatagatcctatatggtgaatcacgttccttacccattcttggtgctttttccctttaccggtaagattgcatccatgggcgacccttgggtgtgttcggatgcacttatccttgtgcttcctcgaacacttttctcgatccatcccatccgacgatcggtctgtccgatccgttccgtccgacgatctgcctgtcccatccgacccgtccgacgatcggtctgtccgatccaatccgtgtggctgatccgttccgtccgatgatcggtctggccgatccgatccgacgatcggtctaccagatccgattcatctctaagacgaacggtctaccgtctccatcctctacactccatcgaaccgttggactgggaggtagcatgcgcatcagttcgctcgagttatactcgccaagccgcaccccttttccgaccaacaactttaggatgtgttgggactgttttgagaatgttttgtggtgtctggatgttgtatgagaagccctaaaggccttgggcgacctcccttatatagggggtgaatggatgcttcccgaagaatcacatccgttcattgcacctttccgaaaggtcacatccgttccttgcatcttatgggcgatgcaaccgttcgttggtacccgttcgaccttacgcttttggccgagacacctcttcacccgtgagctaccacagtttaccagctcgagtgtcagctgaccggaccatccaactgggtcagtactcgatcagctcaccgagcttagtcgagctgtcggtcagctcacctagttgagttagctagtcttccagctggtttagctcacatagcttagctagctagttcatccagcttgtccagctcacctagcttgtttagcttgaactttctcgttcttcctacttagtattttggtccgttccccaaccatgatctagttttctcctaaaacaaaccggcgtctttattaacgcgggacacggtcgttataagtctacccccttaaactgaattcgtcctcgaattcagcgggtgtaagatcttgtttactccttcacgctttcccatcttagt

SEQ ID NO: 33579 - DNA, 208 bp, Arabidopsis thaliana landsberg
atctcggaacaagtcaatatcatctaaaaatattggagaaatcgagtctcttaattgttttgggcttttggggcattagaagatcttttgtaaatgttttaaacttacccattagacatcattgcgggatttttgaaacaaatctgaaagtttttggggttttttttgaattaacacactaatataggcactttaagttatttttttt

SEQ ID NO: 33580 - DNA, 1594 bp, Arabidopsis thaliana landsberg
aattaaagtaaaaatatataacatatatatgatatatagatatacttgtatttgtatttgagcacttaaataaataatgttatatatgtatataagatatacatatgtgcactaatacaaatatgtggtttattctcgtatagaaagtcacgttgcatggattgggcttgacccattgactttatatgcattaggttacgtgaacctattataaaagtgatgcattatgacttttgagatgcagccgtttttgataaaaccctaaaaacaaagagacaaattgtttttctaagttttgagattatatctcaaaggaactagcattccggggttgatccagtttgtatgcgtgtggataccagtagaggcacaacactttgggtgctaaaacaacttcgaattaacatggttcatacttccgctgcagaatattcaggtatattcaaactctatgatctagatttaattttttgtttacacagttcctggcaattaaattctttgttagtatttataaatcgttataaaacagtacgaattccttcaaataatcttgcaaatgattcggccagctgaggaagaaggtatgtttggagggtttagaaatcaattgctctgtgtttttgatgatgtgatgagatgtaaatttaaagagtatatataggttctacacgattaggtcaatcatatcttgatggccaaggggaatttattgctactttaactaattcgaataaaatctctctaatcggattttattaggaatatgctacaaatatggttgttaatattatttattagtttctataaaaccgaatgtatgaatatttggtcaataataatttgaaagattatttcgagacttttaactaattggaatcaaatatctgtaatcgaattttatttaggaatatgctacaaatatggttattaatagtatttattagtttctataaaatcaaatgtatgaatatttggtcaagaatatttgaaagcttatttcgagacttttgaaaagatttagtcgagatttttgggaaatattctaggaacaaaatgtataccaatatctttatttaattttgcaaatcttaagaattttaaaaaattatttttcaaatcttaggaaatattctaatcaagtaattataaatattgttagttacgattgtgtattgaattttactaattaggaattaatcactaatgaatttcgtcgagatttaaggaagtgattatgcaatagtttttagtatacttaataatatccatttttagtaagaaattaatgcaatatttgaattgttgatgaaaaatttgttcattgtcctaatgagaatatcttgtctaattaaatttgtaaggactaaacatataattaggaagttgattaaggatttttcaatccataatccttactaaaaatgtatatatagataactaaatttaaatacatcttgcttcaatatattgtcttattttcacatttttataaaaaatattaatataagactcgtaaaagtttaaaaatatcattcaatgagataggtatggtgattaactgactatcgtacttagaagatgaagtactaat

SEQ ID NO: 33581 - DNA, 923 bp, Arabidopsis thaliana landsberg
atttagagcgatttcgcagggagaatgcagtaggctatgaggaatagcgatgtgaatggatactttccaacgttgaagtaagccactctctgcaaaaactacatccttctggttgcaaaaattgcattgttccttgagaagaagatctcaacagatcctgttgcccatctcataacctggtgaagtctatccgttagattgatcggagctgttccacggaaagcgtctctatttgtcacgcagtatattgatctccatcctctggtgtgcattcaatatcccgtgactacatcttcagtcactgatccatagaatccatccaactcttttaccccattcatttttgtcctcatagaagcaagatatcacactgattgcttcagctacagtgctgcatcaagtgttcacgtggacagcaagtgagccagctggtctactgttcttgcctttgccttgcaagtcttgtatgagtctcccttggtattcagcaactgggattgaagcaacgaaagagtttgagttaccaaatctctttgggagaagcagagattcaatatctccatcatcattctcttcttcgttgtattctccatttataggcaaagaaacttcatcgtctttcttcatcatggcttttggtctcctcagcgatatcttgacttttcttcttccaagccagccatgatgttcagttgctcttggcgggctaaatccataaagagctgttctccgaaagatgcagccagttcccacatacattggaccttgaagtccatccaaagctctcatactaacatcaaagaagacagtgttgtggtttgcataacgatcatttgggtcaataccttcaaacctctgagggaactgaacatagcagattctatcgccaccacgatcaagcatgaagcacattccttctctca

SEQ ID NO: 33582 - DNA, 635 bp, Arabidopsis thaliana landsberg
ggggaatgtatctgggggtgctgacccccccaacattccatattcaaaacgggagtcagtgtggtggtggggttatattgcactctcaatgaacctagaaaaagaaccagacaagtggatgcgtgctcacgaaccgtacaatctgggccttagtccaaaggccaatcatctctgtgaatacctcaaaagatagttcaccaaagtttcatctgacaaatactcctgaatgcagggcggactgcgacaccctgctcgtcgatcagatgtagatcatactgatgtacaggaatcttaccaactggtcggattgactgttttcgaacaggcacctgaacgtttgcagcatactcacacagttccgtcactgaaaagaaaaaagtacgaattagtccaatcaaagagccggaaaagaaaggttttctagcttcagattccatattgacatagtttgaaatcattaccgatttcgtaagtgttgctctcgtttgcaacagcagtcaacatctcaagcttcaactttttgacatatgatggttcattgtactggcagtagaaatgcttatagtctgcagcaaagatgaatggcgcacgaacaaccaaaagatgaaggtggctcaagattgcatacgattgct

SEQ ID NO: 33583 - DNA, 2291 bp, Arabidopsis thaliana landsberg
agccacatcgacatgcgttgtcagaaaacatttggcatttttttttttaacaaggaactccagatttagttagaagtggatatccaatacatcaaactcacatattgccaaaatcttcaacccctctattcattcgtttgtagccgtggggttacattcattcctgttgtttgtcgaaaaattgagatttggcaatatcggataaaatggattgaatatatgataccacagatgattgctaacaatcgaagtttcggttatgtgaatagctttagagaaaacctactcttatttttgtaaattaccaactaaacaaaattaaatcaaattcacaaacaagaagtcatctaatgaaattaaaacaaattcacaaggataagaagttagccacacgccgccataaagacgaaaacggtgccaaatagaaagccgaacaaatctacaactgaaagcagatgatttcggacggttagccagccaaaaagacgttaatttgaaatcgttgttgccggaaagttttgctcaccgctttttctctctaaaaacctaaaaagtgaagaaagagaaaatgtcaaaagaagtatgaatgtgtatgaagaatttaaactaaaagactcttttactcaaatataattatgaaaaaaattgcatacctccttcccttagatcatgacaaaaaaaaaaactaaaaatcttttggtgttatgaataaagatggatgcccattataaggcccatcatctaagcccatcatctagatgtttctagggttttaccctttccttgcactcctatataaaaaaccttttatctcaatggaataacacactcatttcttctatctctttctctgtctataacacgttatcagcacgctctaaaaggtagatatagagattcttacattttttttaagaaccatgtttacttatcgactcatggttcataatacttattttctattattgaaacaaaacaatatgagccgatcgatgattatagtatagatcggtaaaagcatgttttcaatgattcaataaagaagagaatcatgcttatcatttgtttctataattactatcgcatgattcaatgattctacaaagaaaatcgttaaagaagagaatcatgcttgttaattgttaatttttgtgatttactattacaatattgaatatataaattaccaattttataattatataactaattttgtaactattcataacccggtggtgggtgatgcaagcacgtattaatgttttaacattccagttttgaataattgcatctatattcaatatcattttataaatattatattgtctaaaatccatttatgattgatatgatatcccttatttaactcctttgattaaaacgttatacatatcttatcacttttagatattgacttttccatattaattatttgatttccatatatttgattgtgttattattatttttactacaaacgttgcaagataatttttctttttataagattccatatatctaaatctttgtgttattattatctaaatctttttataagattttcatatatttgattgtgttattattatttttactaaaaacgttgcaagataatttttctttttataagattttttttctctaaatctttgtggtatctaaaaaaaaaaaaaaaaaattgttcatggttttgccctaattttgcacgaaattattttacctaaatcttgcacgaattcatattaccctaaataaaagttttgtcaagatatatgtaaaatccagattttgcacaaaatagttttattctgattggttttacaatattgcattaaaattgtattagtatataatacttgattattttatgaaataaattgattgataaataacttaatttaaaggtataatcacttatagaaattttcatgaatgactagtttaatgtattttaaaaagatatcatatttttgatggtcaaagttttttcaaaaacttaaattatcaccagaagttgagaaaataaatataaaaaaagaaaaaaaaatttctaacgatgaaataatctagtatatcaagtagtataaaatcttattaaaagattctagaagagtatatacattgttttctatgggaatacaaaattaaaatcatcgatgcggtatagttctccaaatctcaaagttaatatgataagatataaatacattatgattctagagtggaattcaatacgagatggatgaacttgaagtttcatcatctcgagaaggagaagtaatgaatggggt

SEQ ID NO: 33584 - DNA, 1716 bp, Arabidopsis thaliana landsberg
cgcgaggaatacacgtggaagctgttaggtgagagactgatagtttcttgttaactttggcttcgtctctttttgtctgatgcatctatcgtatttattacactaaaccggtttggtttgaacgaaagaatttacaaaaccagtttaactaatttggcacgtgtgatcgatcgtgtggtgaagaacgagcccattaacggcccaatgaagagcgcgtgtggctttaaaactttatatgcaccgaatctctctttttttttttctggtcttgcaacttctaattcttctaacggtcttatatctctctagaaaatctctctctctctctctacaatttttttcttcttcttctgtgaagtgtgcttcttcaattggtaattcgaatttgggttttttgagatggttgtgaaatcggtttctggagattcgtcggaacgggaaaactgggaaacgattttcaagagtttggtcaagattttacagacgaaacaggaccagcttgagtcgctactcaaagacaagaagattcttgaaagtgagatcaagactaataacgaaaattggctctctgatgttcgaaattacgaggatcaactctctctggtaaaaaccccctttttgattccttgtttcagataaagttaggttttttagggtttcgctctctcctaaacaattttgaagtgtaatgctcttaattcctctgaatttttcaattgttttcagatgatgaaagaaattgaaacgactaagatgtttcagttactggagacctataaaagcaatctcttgtgtggcttaaaggagaaagatcgttctctttgcaatttgaaactaggtgagtggcttatttggtaacagattataataaagtttgttcctttcgttttctacaacatgtgagggttcgggaaaccaatttggaaactgcagagcattcgctggatgagttaaaagacttcaaggcttggtttgatttcctcactctgaatacaaatgtaagtgaaagtttcaatttttgtaagctcttctgtgttttcttgttttaggatctcatacaatgcttgttggttttatataaaatgtgcaggtggagagtgtaagtggcaattcagaaggtacggcttttaagtcattggaagcaaaaatcagaaaactgaaacttgagtatgagaagcttgcttctgaaaagaaatgtgaggtatctgatcttttacgagaaaacgggtttgcgtggaatcagttcaaatgtatcgagagtgaattcactgataagttaaagaggaaagatgatgagatccttcaagcgaatacgaaaatttccagtcttatatcttatcaagagcagcttcagtcatctaatcaagagaaggatgagactatctcaaggttaaaggctaagatggctgaaatggagaccaattctactaagaaagatgaggaaatctcaaaactcacaagggatctagagtctgcaaagaagtctcgtgggttcacaccggttttaactcgatgcaccaaacttgaaaagcgtagcaatggaaatacggtgggatctcatatatctactaagaaagacaagtctgctgcatcaacaacaaatgaaaaggtatagatttgaatatgcttgaggtctgtgtgtttttaaattcttaggagccgagagaacagaaggattatatacattggttaattaatttcgatcatcttacagca

SEQ ID NO: 33585 - DNA, 1847 bp, Arabidopsis thaliana landsberg
ccaattttgctgacttttctttgcagggtctgcacggtccaaataataccatcagctaatgacattaagaccctatcatcaaagaaaaacactgaatgcaactgaccaaacgagaaaagattgaggctattgctcgggagatacttctagacaagtatccgctcttcttccttctagacaaaacccgagaagtctaactagatttcgatgctgaaactttgcaagtagagtaccctcgttcctgatgattttgccaacctcttcaactccactgaaaagtgtagcatacaaatacaacaaagtgcatcaacatcatcatcacgcaaaatggaggagatatactattatttagctccacctcatatgatctgctggaaagagatattgcgctttttggcatgagccctgcaaagtctcccatcacgcactttgtatgcaaactagctcggtgatctttacacgtgtagaaccatgtactcggattcgtttctttctcacaaatgtcacaccagtatttgccacttgccttttctccatagcatagtgagagaggatgagcgtctactctatgctttaccacttgtggtagcctagcacaatcgaagcataagaaatatccacaaccactttcaatgcacgtaagcacaagagatgaccaattgtcgcaaccattgcattgtttttcttcctctggtggaatgtaatataaaggatgatgggggtggcttggatggacaaacggttcagaaattgaaccgcacagtacatcgaatgtcgcggttgcatgctggcacctgaaaccattggacaatctatcacaagctttacacctaaaaactgtggtctccttagtaactaaagtaagacgctcattgagtagaacatgccatttctttctaagaaatccagcgcaatgttggtggagaataaagtcacaatccatacagccgtaaaaggattggagacagatgggataagtgcatgccctgcaccgcttgttgtcgtcacaaagaaaaccattatcgcggagtcttaggtaatgctttttgaggctgaaatgctgtattgcattttcatctattaccttatatggctctatatcttctatatcttcaggtactccttcgagttcttgaccgttccatacatcttttctagtagcacatttcgaatgagcgacatagtcggggcacctatgacaagaaaaacccccacaagtccagtccaccttttgacgacatactccacagacagagttcacgacaccaagaacagaagtgcgagcaacacggtgatcatgcccattgatgtttatgaggcgtggaaggccaatacaatcttgatggatcatgaaaccacattgaacacatatgtaagggcttcgatctcccttcagcccgcaagcattacatgtaaaagagtcgagtcttgggagaagggtgagttcgtgatcatgaactttcaaatccataacaaattgtggtggtggatttataacacaacgcatatctaagctgaagttgcaagaagaacaatgataaaacaatccctcaatctttcttgtgcaaagacgacatttttcatcagaatagtctggtggttgacttgtgtgtagcttaagagggtgtaaggggtgggaagaaatgtttacctctgattggttttttgcctccggtgggttccatacgcaatccatatcgaacattaaatgacattctagacatttgtaaggaaactcataaaacttcttaccacatttagcaatacagtagaactcggtccacttcttgatatgagtgagcttgtggtgatgcgtctcggaaatgtctataacaactggtggtggg

SEQ ID NO: 33586 - DNA, 816 bp, Arabidopsis thaliana landsberg
cctgatacaaaaaatatgtatagtaattaagtggtttattgtgtttatacatataatgtcaatacattctatgacttttatcaatatgaataaacaaaatacctcttttgcgatacattatgtttatgtgcttaaaatattatttaaaattacataaaaaaatatgaatgtaactctagttgataaggaatattaatctttcaacgtggttgaagaaaataattttagatatgtcgtattacggtattcgtaacatgcacaatgtcaatgcagtaaagtctcataatgtgagcaagtggtgctcagtaatattttggcaatcacaaaagctcggtagaggtaagccatcttattgtctcacgcgtcagagtaagatcctctatatggccgagctacactgcgagcatctgtatacgttaactaggagtagactcatactatagtgacaattgtaggaaaatatggaacctgttggtaataaaagaaagtatgggaaattttttcgcttattgtagtttgtgatccgattacatttagctggccaagtaaattcacaatctacagttgaagaagactctataacagattcacagcttcaataaggctcaagcttaacatcttccatgtcaagtccggcgtcatcaagatcatcatcatgaggtgcaattagagtagagacgatggttccactgttatagccatcaataagaagctcagaaatcttagatctccattctgatgtcggtttttgggtcttcctgtcgtggtagactctatcgcggtagtttagcatcgtccctagtcccgtgtgtgcaa

SEQ ID NO: 33587 - DNA, 428 bp, Arabidopsis thaliana landsberg
ccaccaatacattcaaagaaaaatatgtatctgcccaatgttttctgagcgtttactttagcaagcaaatcttgcaattcatcaaaatgaaaatgagttcttgtaatcattataataatataaaatatctaacttattttccaaattttgtcacttaacaattaacattgccaccacttattataattataatttacattgttgtaaagaaatttcaataacaaaatatttaagaatattatccaagttttatttatttatctatatattctaattataaaactccaaataaaataaacatttaaaataattaaaatactatggcatagtattagagtgagtcgatttctagtataatcaattatatacttttattgtcaaaatatataatttactcctacaatgggaatttattattggattttctt

SEQ ID NO: 33588 - DNA, 623 bp, Arabidopsis thaliana landsberg
ctcaacgaatctgattatagatgtcgtttacaccaactcttctgcgacctcttttgatttatgagtagaaatgttatcaagtagtgaaatagtatcctcgtaaaatatttttagtttaattatatcatattaaaaatgatcaacttaggctaacaaatcatttgattttagtctaacaaatgattaatgacaatcgattttcatggacgacttttgacaattaaatccgcactaccaaaatttactttagataatttttgtgtgcatcacacaatgacaactttactctttatgctaaaaaaaatctatagacttgttctattaatctaccataaattctagtaatcaaaccctggatctaatatagaaatattagttaatccttaattttcgaaaaatatttatactttaattttgagactatcaatctgccataattcgtaattttctagtaatcaaaccttagttccgatatacaaatataaattaaccctaattttgaaatatatatatactttaattctctaaaaaaaatctctcaattcaaagtaaaagttaaatttcaccattctttttctattagtacacacacacttggaataaaaaaagtaattcaaactatt

SEQ ID NO: 33589 - DNA, 772 bp, Arabidopsis thaliana landsberg
aacgtattttcttctttaaaattcagttatttgcaaataatggtcccggctcgatttcttggaataaaggagctaataagagtatcatgttctccttcatgttaccatttcacgtttgcacgtttttttttttttttattatgaacaagattacgatcacacgttcggtttgttgtttagtcgttccaagtgtataggagttttatccacacaaaaaaaaatttgataggaatgtgtaattccataaagatttccatcgttacacactaaagttttatcttacgcgccacgccgtttgtggagtaaccgagtaactaatttactactagtcttgatgttggtaggattaaataaaagaatcatggagataggatacgattgtgtttgaataattcaatatgtttatatctggaaagatctacaaatttgatatgatcactaagattgtgggaatttattcaaatccaaaacacatagttacaaatcatatataaatatggaaaataaataatgtctaataacatttgtgtaacatcatctttaatgcgagtcatttagaaatgtaactttttttctttctgatatgtttatttctggaaatatatacaaaattgacctgatcactaagattgtgggaataattccaaaccaatatagaaagtgataatttattaaaaactgaacatttgtgtaatctttttttttttttttaatgtaatgtcaaattatattcaaaaaaaacatatacttttttacaacttgtgcttcatgg

SEQ ID NO: 33590 - DNA, 898 bp, Arabidopsis thaliana landsberg
  unsure (1)..(898): unsure at all n locations
catcgatttcaatgacaatctatgattagtatgcgcaagcaagagacttgaaggtctcatattatgatccagaaacagaaattaactctaaagcttagcaaatcgaaaccaaagcacaaagctttaattcaaattaacactaatcagtatcaaaaggattcaagaacagatctttattcaatttctacaaccatcaaaccaaaagctcaagcctttgattcgtaccaaacacaaaatctgactctagatcaagaaacacagatcaaaacctctaaaagatgcaaactttatgaaaccaatttgaaatctcttcactctgaatcaattctggggctaaaaattggggaaaaaaatcgaaactttagtgaaaagagagaaaagtacgaacctctagggtcaaatatgagaagcgatcatcaacaatttagaagaaagatgcaagtttttattgggtgtgaaaagaacaagtgatgatggaatctgaaaaagtgtgtagagagagttggttttgataaaagaggaggttccaattgttgtttaatatatagcaaagcaattatcttttaaccagagaagcttaactatggttaactctatttcagtctttcaggtttttttgattaaccatggttactttatatcatcaattgtacttgcttgcattttcttattccattatgattatatttattactttatacactgccaaaatgataataatccatgttgctttaaggagagatattaatacgtagggtctttttattgtttatatatgtaatgcttggcactatcttcgttaaagctattagttttgatagtttggaaaatgagaatttactagngatattaactcctggttgcaacatatatatttttttatactaacctttagata

SEQ ID NO: 33591 - DNA, 558 bp, Arabidopsis thaliana landsberg
gacagcagaggcaggtctcggacgtttcctcccactttcaacctctattaaatgttgaggctcaactggaggttcaggttcattctcattttgcagctcttcagtcatctacacattaccagcaaagcttataccattagctcaaacaaaatgaccataaaaattaaactagcaataaacaaactatgcaactcacatgataacatttcacgatggcattagagaagaaattacaaaaaaaaccgaacctcttaatttctggatgataagtggaatccgaaacactaattctcaatatcgacgatttgaagagatttagggtttctaatcccacttatattcaggtattatgagtcggaaaaagatctcattatattgaattaggcaagtaactatcaagaagaaaacgaagaactaacctcttcaaacttttgagaactttgagaaattttttcggtttgacgaggctaagaacgaagatccacaccagaacagaagagtcaagagtggattagatcacgctgagatgaatagagaagaaaggtgaacggatgagga

SEQ ID NO: 33592 - DNA, 2752 bp, Arabidopsis thaliana landsberg
cgttgccacctctagtcactcgctcaatcaccaccactcaaccccatggttgagtcccaccatcatcgttcacttgataaatcattctgccaccaagtcgagttccaccatcatccaccactcgacatcatactcgactgccagcagagtcagaacaaaccttttgttccctacaatcaaggctttgctcccgaacagcaatttcaggagaactaccagcaaacaccacccaggtttgccccacagcaacaccaaggtccttctgcacctgatgctgacatgaaacaaatgctacaacagctgctccaaggacaagcatctggctccatggagattgctaagaagatatctgaattacaccataagcgacattgtagctacaatgatctgaatgcaaaagtggaggccttgaattccaaagtccgatacttggagggctaatcaacatctacctctactcccaaagttacaggactttcagggaggtcaatacagaatccaaaggagtatgtcacaactcatgttatccctatctgccatgatcgagagctgccaactcgacatatccctacctccatcactgaggacagttaaattcaagaaggggaggatttttgtcagaatgaagctttagttgaaaacgcaacagacaagcccccactcgaccacactactcgatcactagctcctgttgaagaaccagatgttgctaataatatggaaaaagtcttcattcctcatccttacaagcccccacttccatttcttgtttgacacaagaaatagttagaagataagtacagagctatgtttggcaagaacataaaacaagttgaagccaggatacctcttgttgatgctctcacgcgtatcccggattcccaaaaattcctgaaagacttgatcatggagagaattcaagaggttcagaaaacaacagttatgagccatgagtgcaatgcattcatacaggagaaagatgaaccagagaagctaggagaccctggttcatatactctaccatgttccctaggttcatagacattcaataaatgcctttgtgacctaggagcatcagttagactaatcccactctcagtagctaagaggttgggttttaacaaatataaatattgcaatatctccttgattttggctgatgggtctgttagacaacctcatgggttattagaagatttgcctatcaagattggaaatgtggaggtgcctacagacttcatagtgttgaacatggatgttgaaccaaaagatcccttgatcttaggaaggccctttttggctacatctggagcaatcatagatgttaagcaaggaaagattgatcttaatatggggaaggattttaaaatgaagtttgacatcaatgatgctatgaagaagccgacaatagaaggacagaccttcttagttgaggaaaaggatctgctagttgatgaacttctagtggaacttaaagaagcaaataactcaaaaactgttttgaccaagagtggtaaagctggatatcttcctagtgaaactttgagttctgagaagtcattagactcacacaaggcaacagttggctcaaaggttgggtcaaaggtttacaagggcttgatggggtctgacacaaaggttatgaaagctaatgaagtaagttcaacacatgctcgaccaactgattccaccaacaactcgaagaagcctccaacttgccctgaaagctcatgctcgaccaaacaactcatggcaagcacccagacgtcagatgattggttagaactcaaggagagatctaaatggcaggacaaagccatacaagagctaacacatattgtgaaaaagctgaaggatcaaaacaaggagctcaatggaaaagccaaccaagtaccactcaatatcaaggacgcccttgacgatggagccactattcttgtcaacaaagaaggatgtgaattcacatcggaatggtgtagaggagaagactatcttgataaaaaaagaagcttactatgaggacatggcctctgagtacccaattgcagacctgtcaagaaaccctaatgagtatgatgatcactctactcaagaaggagaggagaccacatttcctctctgcaacccaccctgagcctaatgagtatgagaagtcaagcttagagacttaaaacaagctcacttgggaggaaatcccatgtctatctttgtacatatctttatttttccttgttgattttgatgcatttggttagtgtcttcaggagataagtataaagagccgagtgaaatggattctgactctgcgagtaaagcagtatactcgacctcaaagcaatgaataatactcgaccatgttttagcttatccacgccaggagatcactcgaccgcggtgctggccgcataagaagaagggaggtctagtatactcagggcgttgctggccgcaatagagctgatgaggtcgagtacccacctactggagctgataccgaacagggcggctcgtctatggcctgggatcaatcacaggcagccattgacgaccaactacgttcattcttcgactgaggtaagcgcctcacttcaccattgtattatatcatctgttgtgatttgtttcttcattttgtttctgtgattggatttgtcctgagtactctcttccaagtttattcgcacagtggactgtgtgatttaagtttgggggagggctcaggaagtgtgtgttgcattgtgtatatttttga

SEQ ID NO: 33593 - DNA, 1280 bp, Arabidopsis thaliana landsberg
  unsure (1)..(1280): unsure at all n locations
tcatccttctaattaagtggtccgaatttaggtatttatataaacactttataaatcaacacatcggagatatagacaagtataggatgtatgtggtaataaagagaaacactaggatcctttcgaaaagccataccatacccctttcctctgaagttgttggtaacaagtatcaaaacaacaatatctcgaaatttcaagttcattctgcgaacatttaaggacataaagaacgaattagattcatcggaccggatgacgaggtcatggttggtcgccgggtcatgactcatgagttgttataatcaccgaaactaggtgatgaatacatagaggaggcaaatcagcaataataataaaaaaaaaggatacttataaattatgagggaaaactagtacgcaactagtgattatgttgtcagccaacaaactcccataaaatatcaaattcctatcgctctcaaatattgtatgttttatctcgataattcttctttaaatttgacttctgtactttaaccccaaaaaccaaacattgacgtccatgataattaaaacaaaaacaaaaaactgttgacaaaccattttaaacgatttttttactatttagcaaataactaatcacaatggaggctttcgcaaatatcgtcccgatatattcaattttattgatatagatacataaaagagaaaaaaatangtgattagctttagttntgaacagttttgatcgtacgtcgttgtaggaatcttatcatctcatctgctatatatacactcctccgagtacataacccaatgtctcagccttcaaagctatcaaattcatttaaattctatcaaacaaggaaatatatcaatggcggtattgtctaaaccggtagcagtaccaaaatccggattctctctaatcccggttatagatatgtctgacccagaatccaaacatgccctcgtgaaagcatgcgaagacttcggcttcttcaaggtgatcaaccatggcgtttccgcagagctattctctgttttagaacacgagaccgtcgatttcttctcgttgcccaagtcagagaaaacccaagtcgcaggttatcccttcggatacaggaacagtaagattggtcggaatggtgacgtgggttggagttgagtacttgttgatgaacgctaatcttgattccgggtctggtccactatttgcaagtcttttcaaaagcccgggaactttcagggttttaaatgtccctagctttgttacacacctttcattctcagactct

SEQ ID NO: 33594 - DNA, 1105 bp, Arabidopsis thaliana landsberg
  unsure (1)..(1105): unsure at all n locations
agctttgaggaggcaatcggagttatctgagttagaaaaccagtctttaggaaacaagccataaaggagagtaacgggatacaggaactgtctaaggaagttagttgtctcaagggtgaacgtgatggagctatggaagagtgtgagaagctcaggttgcagaatagtagagatgaggctgatgctgaaagcagattgagatgcatcagcgaagattcgagtaatatgattgaggagattagagatgaactgagttgtgagaaggatttgacgagtaaccttaagttgcagttgcagaggacacaagagtcaaactctaatttgattcttgctgtgagggatctcaatgagatgttggagnnnnnnnnnnnnnnnnnnnnnnnnnnnnnnagcttattagaggaggctaagaagcttgaagagcataaaggaatggattctggaaacaatgagatagatacgctaaagccccagctcgaagatttagattgggagttagactctcacacgaaaaagaacgaagaacaagagatactattagatgagcatactcaagaatatgagtccttgaaagaggaaaacgacacaaacgttaactgaaaattagagcagcaagaatgctcaaatgcagaagacgaatacttggattccaaggatattatagacgaattgaaatctcagatagagatattggaaggcaaactgaagcagcaatcgttggagtattcggagtgcttgattacagttaatgaacttgagagtcaggtgaaagagttaaagaaagaactggaggatcaggcacaggcttatgatgaagatatcgacacaatgatgcgggaaaaaactgaacaagagcaaagagccatcaaagcagaggagaacctgaggaaaacaagatggaataacgctataactgcagagcggcttcaagagaaatgcaagaggctttctctagaaatggaatcgaagctgagcgagcatgagaatctgacgaaaaaaacattggctgaagccaacaaccttcgtctgcaaaacaaaactcttaaggaaatgcaagagaaaacacataccgagattacacaagagaaagaacaaaggaagcacg

SEQ ID NO: 33595 - DNA, 2496 bp, Arabidopsis thaliana landsberg
ttgatagttgcacatattcttcttataagaacgtttatgatgtcctgtaaatccctgtttcatgtgtcttttgtgtttatcaatatgttttgtgtggattagtgactagttctttttcttcacaacgttttatatagtaagagtcatgtttttcacaatatggaagttagagttggagctttatatgtggcaggaacatccagagttctcctatgtgatcttttgtgcttcaccatcacaaagctctaatactaaggtaaacatgttacatatctctgttttgtaatgttttttactttagaaaatctagctaaagtcaagtgttttgtaatgtttttgacatgttacatatctctgttttgcaatgttcaagtcaagagtttaagtttcagttcaactcttgacaaatgcgacaagatttgacatgatattgttggtgtctcacaggaaaagtcaccaagcagtctgtaacttgaaaaacgaatttaaaatcaagaagcaagactctgagatctatgctgctaaggtaaacatgtcacatatatatgttttgtactgttttagaatttctgttttaagtacttttgacttaaatgttttaagtacttcaagctaatacataacgtttcacaatattccttgaagctaacacttcatagaaacaaggtacaacttcgtcaatcaaccaaacataagttcttctgcctctaaagaccgtgggccggtctgtctaactgttgggctttgcggggcgggttaggactcacttttcaagaccgcggtcgtctgcggtccggttcgtcgcggatcaatggaaaagcgagcatgttgcggtcggtccgttcggtcgcgggcaggcccgtctaccatctctaaagttatgtaaaccaaaattcaattcttttgtttcacaattactactcaaactacattttccatagtttttttttaataaaactcggtgttattagttatactatttgtaaatatcttgtaatcttaaggttatggaactaataaaacctcatataaattaataatcaataaattaatacccgataaattaatacactttttctgtcctaaattttgtttttggatcaattgataaattaaaaaaataccatagtctcatctatattaaattattaatttatggaagttttactgtgtatagttttaggaaaaatataaaaataataacaattttcttaatttcacaaaaaattactaaaattcacgtttagttggaaatttacgaaccgaagtattgggccttaatgctcttgggccaacatcaatctctcgccgtcaaggttacatttatcgccgccgctgagaccgccacctaaggccgtctcctccgcaatctctaaccgaaactctctcatctcctggtaagctcgattttcttatcaattcgatctcatatgatgttgatctgtttctactgaagcttaatcttgcgaaatcgatctctgttttgttctgagatttatggtttcacgaatttgtgttctagggttttctcgattaatcatttctattgttatttgttcttattggttcttatgcttttgggtacagaaagatatcgactttttgttgactctgtatgcaaatttgtcaaaagacaaaactttgtaacagtttactctctttcgtgcttgtgtttatgtatgaacaatagcttcgctattcggtttgttgatttcaccacacttgattaagtatgtacatactattgaaaatgttatatttcgttaaaatctgcaatcttcgaatttctctagcgtccattgttcatgttgatatactcacccacacacacatcagtgatatgcattgtacataatgcattttgttgttgtctctttaagattttagctattgaggatcgattaggggaagtagctcttttcctttccttttctggtgaatactaatgatgcaaagcttgaatctacgccctgtattattttgtgctgcagagacagatagctaatttgattgaaattggtaacttgcaagtgcaaatatgtcggtcacagcgggagtgagtgaatctgcaattgctgtaagggagaaactaaaaggtggtattggacagactaaagtaagaaggtattggccaggaaaagctccggagtgggctgaggaagctgaagaagatgatgatgttaggatgcagaagttttctgttttggatagagcttttccaaagaatgatgatttgggtgttgctaggaaggatgatccaaggctgcggcgtttagctcagactaaagttgaaaaccgtgacgaagttagagctgatcatcggcgtattagacaggctgagattatatctacggaagaagaagaatcgaggaatcaagagaatagagacgaggatgatgatgaagatgccttggaagaaagaagaagaagaattaaggagaaaaatcttagtcgagcacaagaggaggctgctttacttcctttagaagaagaaga

SEQ ID NO: 33596 - DNA, 1111 bp, Arabidopsis thaliana landsberg
ttaaaaactcacacatgtgtataactctgaacttaacaaagcaaaacaagtgttaaggtttttgattcggattagttcgactctaatttgggttaacaattgttcgaaccatagtatagtagtgaaaatagccactcctatgagtgagtctatgacggtggaagcttattattatgttttggtaggtcatcattgttgtattgttgataattttcgaaaatataattattatttcaaccattatgtctctcaaaggacgacaaggcgtccataaataaatatggtagcagtgtgagtaaagcaaaagccatattcaatcttcgttatctgattcattggagaatttggattcctttctaagcaattggataatgtttcttctttttatttttctatattacaaacaaacggaaaaacttggatcacgtaaataatattgtcactcacggtgacaattttggtaagaaacaaaaaattgagatattttataatccaatttctcaccagtattttatctatatagtaaggaattgatgtaaaattatacagtttttgttaatacaactaaccaaatctaaataattaaattgtatacatgttatccctgaggcattttgtgggctttctaaggcctaaacttgccccatgttctggttacgatccattttaatagttctgaacttctgagaatatcctattgacctcaaaatgagaatcccattctcatacatccttcctacgtagatgcccaaaatgaacatatcctattgaagtcaaaatgtcgaaaaacaagaaatcattcacattagtaaaatgcactttttttgaattttttctatttgccttgaagaatttcccaggaatgcaatcttctatgatctggtaaaaataattaacaaagagatattgaatgaatgttttgtctctaaaattagctcaaagcccttaaatcttgtctcaccatctgacttgatacaccattgtttaccattccactaaatttcgagtgagcatactcacgacgaaactgatcatcagccttcaaactctgttcagcttccttcccactcctaatccaagcagtattgttcaggtcatttgatatagagat

SEQ ID NO: 33597 - DNA, 1848 bp, Arabidopsis thaliana landsberg
gtcgttgccaggtgaaccttttttaataaccaaaatccgaccttgttcaagaacaaacgcggagtaccccttgctgggcttaggacctgtcccaagcacaataggactaaacctacaacacaaagtgtttctatctttaagaattcttctgacatgcaagtacaattcttgtcacagaatttaaagaatctacataacattcacgcgcaccagttgttactgattttgtcataaatctgaaccccaatggaaaaattgttcctttcatgatttccaccgatcaaaaactgcaaaagataaacctcagtcagataattatcagccagcttaaacagatttggatcaaaacattaagtggacttactattcgatcgccgacatcgactgttatctcagtgttctctggttcagatttcacacagacaccattggagtgtccgttctccggatgatccactaatactgctggtgcttctccctaataacaacaaacaaatgtgagaaatctatgaacaaagaagagcaacgaagtgaatcgcgccaaaaaactgctcaccatagagattttataagcctgcaagaagacacaacacagcctgagcaatggcacacaaataagagatcaaaataaacaaacaacaacattaacttactttttctctaaatctcatatcaaacaaaaaaaaggttgaaccttttttctgcagaaaacagtcaaacaaatgcagcagattcatcaaaataaaaacacaaaactttagaaagatgaacaacagatctccgcacaaagcaaagcccttttttcctacctcgaatatgaacaccggaaaacgctgaagaaagctgagagctttaggatcgaatttgggtaattagcggaggagaagaagcgtatttatatccgcagattgtgagaaaaagggccaaaggagagaattgagaaacaagttttgtgagagctctttttcaacaacaagattcagtttttatgcaattgaatttgattatctctctggaaatttctggttcggctaggagaagaatatataaatatactatgtgtgcatcgtcgacgagtcccaagacaacttggagacaagcggccgtgacggtgtgtgaggaaagctacctctaggaaatctcggaggttctttataggttaatacaattatttaattcttaatataatgtttattttcaatagaaaacaatataataaaaacgaataatttaagtagaaaactttaatttatgggatgaaattcacatatatttctttgtatggaagagaagataataacaaataaatgaaaaacatcattttattaaatacaataaaacatcaatatttatggaacccagaaatttactcagtcaacacttttttagttttttctcttaaaattaaaaatagatttgttattttacttttaagtcaatgatagctcagttatttatttattttaaccaataactttaattattaatattatagaattaactaaatgaaaataatatttcattatttgtataaattttaaataaaaatgataatattcaactaatagcataacataatcaatccaaatatttttatattcgatgattaaaaatataaatatgtaaaaaaaaattacattatctaatatttaagatttttatgaaattttcaccacgtcaatctcagttttgttttaataaataaaacaaactgaaatttaggtggtgctaacttcaagaaaaatcatcgtatctttctctttatttttgttaattttgatgcattacaataattttaattaaaaagaaaattaattttgatttgtccgtaaattatggtaattatta

SEQ ID NO: 33598 - DNA, 415 bp, Arabidopsis thaliana landsberg
atacgcggtggtgttatttttatcctgcatgcggcttggtgtgactaagaacttgatttgatattggtcaacactcattgtctcgttctccttttatatctaaattgcatacctggatcttgcagcatgtgcccaagagcaacgcatgaaacatttgccgaatagatgtatcaaacgttcaaagatcacaagcactttagtaagccaaaattgtgtcgtaccgacttcacaatttgccactatgctggtgatgtgagtatacgcttgcttcgatgtttgaatagtataatgcaataatgccctaaaaaacttggtgatcataccctaatatgtaagtactaaattatatattcaggtcacttatcagactgaacagttgctggaaaagaacatagattatgttgttgccgagcat

SEQ ID NO: 33599 - DNA, 727 bp, Arabidopsis thaliana landsberg
agaaaattcataaaactcagaaatcattataaacttagcaaaagatagatttcaatgagataaacaagtttgcagaagaaatcaaatccaaattctcaacacaacaactagaaaatgcaaaagaaaatcaaggaaccctaatatccagcggacaaaacgaagatcccttgggcaaaaacataagaggtctatttataggcaatctaggttgccctaattgggaataagacaaaaaagataagtcggcgcaggagcgctcggccctaggccgagtagaaaagccgagtggcttgctcttggtcacacagctcggctctaggccgagtggcttggtcgagtagcttctcttcatccttaagtgcacaactcggcctccagccgagtgccttggtcgagtaggctccttgttcttcacgtgtgctccactcggcctccagccgagtacataggccagagtatacttcaaatccttccttaggtcccccgaactcgagtctgtctatcccttgtgctagaaacctccaagttgagtccaaaagtacctgattcatctgcaaaacactccaaatgcaagtatgctatgcaatgcaatgcaaaatgtgcaaaagaaggaaaagagactaagaatgcataaaaagagacttgaaactaagctaaatgcatgaaaaacaagggtttaaaaaggttaaaatctagtgttatcaacacccccaaactaagctctttg

SEQ ID NO: 33600 - DNA, 1233 bp, Arabidopsis thaliana landsberg
gagcgccggtgacccttacttctactacacgtggaacgtaacctacggaaccgccgcgcctctcggaattcctcaacaggtgattctcatcaacggacagttccctggtcctaacctaaactcaacctccaacaacaatgtcgtcatcaatgtcttcaacaacctcgacgagcctttcctcttgacctggtttgtaactaatctgtaaacttattcctttcgtcagaacttgtcattcaattgttttcgtgatttttgttttacattaaaattgttgtttttgaaaacaaatctttttttttgtatcaaccatttgcatttggagttagacttttgcaatcacattttttaaaagatttttaaagatttgctttgcattagattcggttatatggccacacctatatataactagtcttcattgtatctttgaatacttagtcctgacaatggttttgggtgacatggcaggagtggactccagcacaggaagaactcatggcaagatggtgtgactgggacctcatgcccaatcccagcaggcaccaacttcacttaccatttccagcctaaggaccagatcggtagctacttctactacccatccaccgctctccaccgcttcgccggtggtttcggtggcctccgtgtcaacagccgtctcctcatcccagtcccatacgctgaccccgaagacgaccgcaccatcctcatcaacgactggtacgccaagagccacaccgccctcaagaacttccttgacagcggacgtactctaggatcccccgacggtgttctcatcaatgggaaatctggtaaactaggcggaaacaacgctcctctcttcaccatgaagcccggaaagacttacaagtacaggatctgcaatgttggattcaaatccactcttaacttcaggatccaaggacacaagatgaagcttgttgagatggaaggctcccacgttctccagaacgactacgactctcttgatgtccacgttggacagtgcttcgccgttctagtgaccgctgaccaagtggccaagaactactacatggttgcatccactaggttcctcaagaaggaagtgagcactgttggtgtgatgagctacgaaggaagcaacgttcaggcttcaagcgatatccccaaggctcccgtcggctgggaatggtctctcaatcagttcagatccttcagatggaacttacccgccagtgctgctagacc

SEQ ID NO: 33601 - DNA, 4529 bp, Arabidopsis thaliana landsberg
atataagccaacacaacaaatatttgaagaagattgacaagaaaatcctccttaaggtcagaacagtgaagcccggatatgataaatatatgtgttcggtacttactctggaagactctcataagacgttagaactttccaaacttcacaaacaggagctttaactgttatactagcaacggcgcatcggtgaacacctccattttccttcatccaagaaaaaaaccactgactcataaacacaaaagatgggaaaacttttttttttcatagtatatagagtaagttttgagccaaactacttaccaatagaccatcaaatctacgaagatgaacttcatccacggtgcaaggtttatcaagcttgcaggcttttccatacactccccaattgttgttcaattcatttgaatgagctaatgatccaacactggaggcaacagatctctccgtagcaagactatcgaactcaataccattagaaggggctggctgtgaagatattatacccaacaaatcttctattattgacggctttccgcaatctttataaattttctcagcttggcgagctacggcccggagatttacaggaagatctgatctgattatcctctctaagaaaatggcagggaagttaaatcttgggattacgtttacttcgtatgacaagacagttcctacggacctggagaaagagaaaaacaaatgtttggaacatagatggttccaaaatgatccgtggttagaaatgcataacagactgtttacagaaagaatttctctgatacacatttatagaggatttaatttaaatgatgataggatgagcacacaaacttcttacggggattaatgagtgtacctgataccagatttcacagaccactttccctcaaactttttgaaatcaccatctaccatagagaagtgaagctcacgaccatttggctaataagataataggaaaaactacattaatagagatgtatggattgagaaacaaatgtaatataagaactcaagagtaaagattaactaattaaccaaacaacaaaactacttgttacaaataacatcttgttgtaccctaagtaaccaatgcaatgagtgcaaagcaggctgaaagagaactcattagaaccatggatattttcaagagtaaacctcactatgattgttttttctagaactaataagaggttaggaataaggatctagagaaagtgggaagcaggcaactccttatcaaccatgattacagatcatccagtgtaaaggaaacctcttgattcttaacaaaagctaagatatgcataaaaaaagagaccacagaatccggaagagtttgcaggttttagactcaatcccaatcattcagcaagagaaaagtaaaggcttaagagtgctcacagaatctagacactcatggagatcaaggacaacacgagcctcaatatgccaatacaaggctctttgaaggcctcgttgctccagccatatacgtcctggatgtggacaaggaattcttccactacaagttgaaacaatataccatcaacaaagagaggtaactaagcatggagattcagcattctcttggagacgtatagtcattgtattcagtataaacaatttcaatggcatgaaccagataacataaaaattgaatctttagagattattcagaagaattctgtagataaacacaaacaaaatgataagaatctgaaagaaaaaagtggtattactgagggaagtacctccaaacgagattgggtatgaaatcagcaagtcgttcataatcagtaagaacattccaaacagattgagaatcagaatcgacccagatttcgcctcttatcctccgttctctccacgagatcacatcaacctcacaacgcacttttctctctcctctctcgtcgaaacctaatccactatctctcctcaacccgttatcacctctaccaccggcgccgctatgtctcgttccatggcacttggcgaccccgccgccgatcccggaggtggaaatggacgagaatactcgaatccgagagggagatgggagcaacacacttaaaaacactggttcattgaggaaattgatagtgtgaacgccatgagagagatgtggaaacttgctcactgacattagcgaaaggtgttcgacgaaatgtgtcagtgtagaggaagaagatactgttgcagagtgttacattaccgttaaatattctcagccaccggattttttcttattttatatatttgatgtatggttgaaattcaccttttgttcttcaatagacattatattcgaaaccatgatttaaactttattgttcctctgaagttttgtatttgcattttcatgttacaaaaaatattataacaaggaaacacaaacataaacaccaacaaacaacaacaacaacaacagacaacaacaacaacaacaacaaagacttagaagacaaatgcaacaagactcttaaaccaatatgatggatgatgatccaacacagagaggagaaagagaaacaaaggagactcttaaacacaaaacaacacaagagaagctaaaacaccaaacgaaaccagcatcaatcactgatgagacttatcctttactcatcactcactctcactccgattttccaaggtcttcaggagctgctgccacttgaggagaaggatgatagtccagggggaaaaagcacatcttgcactgtttatcaacccagctgttctcaaacgtgcacctatcacagaaccagcgactgcctggttcattctcgtaaccatcagccttcacttcaggcttaccatcttccagttccttgatgaatccatcgaagtggttaccagtgcatgttgtactgatttccaacttgtgcttatagttagtgaaatcttcaggtgagagggctagatgtatcaactcatcaagcttcccttcgtgcatacaaagcattgtgctcgccagagctcggaggtgtttcaggtactgcttcttcgtgctttcgtactcgattatagagtaatcaaatacgcaactccatttcagtacctgcctgcactgaacactaagcatccctgcttctcttactgtcctaatgtccagctcggtcgctccgcagttctcgatcagtttcggaatgattttttcctctaaggctctcagcttggacttagccttcttcaatgcttcatgacctgcctcccacagattcaggtggagaatctgtgagaattcaacggtagaaggacccgcagctggaacagcgactggagaacaattccagttcccctgatgctgttcctccgtgcgcaagcagatccaacagaagttattactgatgatgcataacagtcaagaaaacatagtaatgagtttaaagatataatattttgcacatgttttaaagctcagaaagaaacaaacctgcagatacaattaatgagtctgtaattaggatcaccattctgctgcacaggaatcttgcacttgggacaacttttggtgtttgtatggatccaagaaatgcttcttgactgatccaacaggtacgtccaccaaattgatgcctttttgcaagacaccggacggtgtgactcgagcccgcatgtccaacagaaggtatggccgcacaacagaccacacttgatgacattatcttcattaccatcctcctgaagctcgacggcgtattcacaaccccgagcaggacaccatttgatcgttgccttgtggcactccatgaaggattcgagaatataattctcgtacatctccttcactggctctgtgagttgctcgatcgtatcgggtccaacagaggcgacacagtcttggctaaggcaagagatgagtcctctctgctccttgttcttcttcagagcatcgctgagatattcactccagcaagttgttgaaaacttgtgtgagcaaaagggcgtggagactaagtaatctccatcacccgtctcacgatcagctgaagaagagttggaattgagaactcgagccaaccctaacttcgccagaaacttctccttgttgtcaccaagaagatctgaagccttaaacgagttccatccgagacgaattaggatgacggttgcatccgattttgacaccaagaagacttccgagatctgttcaatttctttcatcatcttctcacggacttgtgttttcgcaagcacagagtatttctgaccatcggcttccatgactgcagaacataaagattcagttttaaacctaaaagttaacgaaagaagataaagaatggataaattttgttaatcgatggacgggattttgtagttttacttacctgcggattgaacgggaagagtaaggtttacggtagcttagggatcaaggtaacaaaatcaacacaagaaagaaaactctggtgatgagtacatgagagactgcaagacagcaacaagtatttatatacaaaattgaaaaatattacctcataaagaatcgaggtaaatatcagctattttag

SEQ ID NO: 33602 - DNA, 1327 bp, Arabidopsis thaliana landsberg
cctagactccgcctctaagagtagctccaccaccactgaaccatgctgaatttgaagctgcttatcctcaccttgcaacagctacgaatgaacaaaacaggtatgttggggaatccagcactgtctgacaaacttgtcttcggatttgaacaccctaatgccaagaagagagccacagttcttatatgatagaatgcactttgaagtcagtcaatcttcaaaaagacatgaagttcaagatttaagaaggggtacagaggggatgagaaatcaacctcaacatgattacgcgcaaagaactggagggattctaaacctccgaagaaacgctaagcactcaactaacttctgtcagaattttttggtttgaagactacgggttacaatgaaagcagcttaaaggtttgaataagacttattagatgagtatggtttttggttaggacatactcctacttatgtttatgattcagtttcgtctttcaatttcagtaatgttgtagtttctgtttcagcaatgttttagttatagttgccttatgtttgtaagtggaaagtccactgatcaactttttgtaagaacacagtggtatcaatgaaaggcaacatttcagtgaaaaaaaaaaaaaagactcccataagaataattgtctaaattatttatatagagaacaaattaatctaagtttcataatttaaaataaatataaatgtaaataatactatagagataactgtaaataatctatacttaagtatgataatatttgatatatatttcaattttttttaatttccatattctctggaaattcattttgaccatcgattttgatagatctctccgaataataatatcatagacggtcaaattaacttaagtcgattgtaaaaaataagcaaatcgttccataataaaacaaagaaatgtggtgatcgcattatatatacacagagtttaaccaaccaaaacattacaaaaacattaaagacaaaatactgtaaaataaaaaacaatcttcaaaacatagatatgctcatgcctagacagagggaacctcaaaaaaaaaattatttagcgtagtagccgccgattcacagccggaggtggcggtggctgagcttgaaccggagtagcttgacgaggtgcacctccacctcccccaccattactctcccaaggcttaacagtaaacaccacaattaaaaccacaataatgagcaatagcaaaatggcaaagcaagtccacttccgtgtgttcttctgataaaaccgtgccttaacaagccggtccgcaccagaccgaacaagcgagttagctcgttt

SEQ ID NO: 33603 - DNA, 2269 bp, Arabidopsis thaliana landsberg
tgaagtaaataacactcaaaggtataagcttacaattattcatttgatttaatcttcaaaaactagtataatgcgaaaggagcaaagtaccggggatcttattgattgtaacccgagctcgctctgcacgcttgaggtttacatgtccccctcttccagcactataccggttctcatcctaaaaccaaataaagaatttttagaatacatttttctttcatgagttttttgttttaaggttctcataccagattatactcttccagccaattttcttcttcacatgcagagagccaacggtcaattctgtccatgatatcttttcgactctgtgcttcgtctttaattttgtttatttgcatttcaatatttgcaagaagctctgaagggtccactaatcctgaagaaacataaggaagctaggcttaaaaacaagtggaagtggcaagaataaaccaactattcaaaaaaaccaaacctcaatcacatataccagaatctattaatgcagttgatttctcagcggaagtgcttgtgtcaggttgaatgtgagttagtctgcaaagatcctctaactcggatcttcgtttcattacaagctccttcattctgcttgctttcagtttactgagactgtccacttccgtagatacctattgtaaaaccaaaacaaagactcaaatcaagaacgaggttaaagatgtagatgtagaattatataagtgcttctactgaacctgttcaattgtttcggtcgaaaggattcccggctcagtgatattagcttcagatgatcttacaacataagtaactttcccaaatttagttctgtcttcctgtggtgtgtccattagattccatagctcgaagagtgaagccactacatcctttagctgcagatttagaagtattattgagaacacaaaaatgacaagtcaataaatgaatatgacatagaagaatagtattgttcaaacaagtatataaatacaagtctaccttttgaaatcgggattttctttcagttttaagcttttgaatcatgtactcaagaccctctaatgtgctatcactaatgtttgtagattgctcttggtctgttctatgcaagcttggatgaacttcactaactgtttgactaaagtcaactccaagaacaccgcatagtgcgtggacttcgttgacataacccaacactttgttgagacgatcagactgcataaaaggaacataatcatgtttataagaaaacagaaatgatggatatttgttgttcattgctcttaccttttccttttgaagtgtgcggagatgtgtttgatactcgttaaggttcctcaaagtcaagtcttgttcttcaagagtcaatgaaatgttcatggccttgttgagatggtcactgtatcctgagatttccccactaatcttctcaatttgcgcctttatatcggaaaactgcttcattctctcctctttttgaattctcaattcctcaactagaggtgtcacagctgcaagcttttctttcaatgattttgaacctttatccagtttaatctgaacatcaaaatgcaagaaaacacacaaattttttagcaatagttgttaagctaaaacacacaatctaaatcgatctatcatgaagatagctatgtaccggtgagttgatgtttaacacaccaagggcagccattaaagaagcaacttcagcttctattgatgcaacagactgatgaagctttgccttagaatttgcagcctcatcaacttttctttgatagatttgaagacattctctctctaattccataagcattctatctttctcagtctcagtctcaccaatttcaacccatattttctgtttcatacacccaaaaaaaaaaccattaaactcatgaaatcaatcacaatacaacacaaaaacagagattttctagtacaagagcttatgcatgaaattaaaaccaaagaacatcaacacatgaagaccaaaaaaaaagtaaagaaatttccagaaactgacatgttttagtcaaaattcacaggaacccttttgacctaagagaagaaaagataatgaaaacaaaagactaaaaattcagttaaattgtctctaccaaactcattatgagtccaatcctttaacccttgaaagttaaaaaaaaacaaagacttttttttttatcaacaaccgaaatcgtcaagaaaccaacaaatcaaaaagagaggaagaaaaacaaacctgaagctcacgaaaaagattata

SEQ ID NO: 33604 - DNA, 1754 bp, Arabidopsis thaliana landsberg
acaagtcatattctaaatagtcaaaggacacataacctgaaaaaaaggaaacctcctcccttatttatgtccattacttatcttcgacatctttcttctaacctattagtttcaaaaaaacaaaaatatgtagagagatgatagaggtggttattacaaaggtatctcatatctctctcaagtttcccaaaaaagaaaagagttgaaggtttttgtgaatatactatgttggtgggtaacacttcctcatgagggtgggaagtcataccaaatgatcttgtgcgacaagatggtaattctaaattaaaaagtattctttggatttaatctattaataattcataagtcaattgtttttttaggatacaatgattgatgccatttgtccgtatttctaccctggatatgacgtccctagagttttcgataaaggaggttggtttttcttggaaaacatacatctgatcaaatcagccgtcggtagaaaacgtcccttaaccgataataagttgagaatcaagtttcttcaaactaccaaactgtctcatgtggatagattggttccaagtaacttttttcgatttgttgccttcttcatgatcgaaaatgagactattgattcttcaattgtccatggtaactttcttatctagattttttaaaaatattaagtctgttgatttggaaacatatatctttcatgtaatcgtcttttattgtaaatgcttatggtgttgtcgtgagagttgggaatataagaagaccggattatgttcctcaatattccgaaattccttgactttctcaatttctcgagtttgagcttaaaaatacttggttagtattttccactatatagttcgacatatttttggttatatattttaatgtagaaacatagtaagcaatgttatctttataggtggcttaatttatagaacttagatgttagagagaaataattaagatattcttattaggggaaaaactcttacatgtgttgcaagtggatatacttgtgatttgtttgtgcgtttgtggagggaacttggtctacaccttggttatcagtggaccttcggtatgaatcctataacatgcgtgcttcgattttggaacgttgctgatcatgaaggtaaatttaactctcttctcatcatatgtttttttttatagctaatgcatataataaaaacataaatattttaggtcgtcaatgtctaatcacacataatggtgcttcaagaattacattcaattaaagttacccagagattaacatggatcgcatcacgtaagaacgtttatatttacattatcccttaattgtttattgtatatttaaaaattttggtcttggttatttttaatttttctattttcctactgtttcagaactcaattccttcaacgaatgcaaacacctgagctagatgaagttgtggacgagaactgaaaatgcaacaccagacccctatctatcgttttgtttaaaaacttatctacatatgttttaaagttgtacttttaaagactttgtttattttttattgactttcttatgattatttctgttaaactttaactttattataactctttttatttaatgcttactaaataactatataaccgtaaacttagatcaaattataactgcttttagattggccaattattaggttattttgacttaaataatgttgatattttattgattctaataaaatgtatttggattgcaaactttgatt

SEQ ID NO: 33605 - DNA, 865 bp, Arabidopsis thaliana landsberg
ctgtattacaaattatgaaagatttctgtagtattccctttagtattcaaattatgtggtatttataatcttttgggtgtcaaaacatacttcattctctgaatgacataaaactatggcgactacaaattacaacaaaatttagaattataagttcttacataaggtgatctgaaacagatagtctaaaatatcatgatacccatacagtaataagactccacaaaatagatagacaaatattccatgagtttgcatttgaaaaaacaaaaaaagagaacatacgtatctaagaatgatgaaagatcattagtcacctaatttttgaaattcaacattatttacttaaattttcatttttactcttccatggttactcaatgcaattacttaaatatacaatctcgatattatatgaaaaacatatcattcaacataaattacccgccgaaatatggtagtaatttcttctcaaataaaaaggtatcttcaatatacaagtggtccctaaaatactctttcttctgtttctccttgtttctttgaatagtgaatacaaaagcaattccttatataaaccacttcaagtccttaatcttctctcacaaagaaaaaacactatctctatcgacaaagataagagaactcagaagcttctactcttaaaatggcaactttctcttatttccaaaactaccctcattcccttcttgatcctcttctcttccctacacctcactcctccattaatctcactagtctcatcgatcaaaaccatctctatccactaccaaacatttccacagttgaagacatttcctttcttgaatataatgttgacggaactgaaaactcaaattcaaaa

SEQ ID NO: 33606 - DNA, 1569 bp, Arabidopsis thaliana landsberg
atccgaaaacaacagaggaattcaatagagatcatttaccagataaacatcagttccaattacaaatagagtaagaccagttcgcgaattcgtacctgcttgataaacatagcgaaacctcgctaaggtactcgcacctgtcaaaatcaacagaaatcccagagattattaggtcaggcgaagtagataagcgattgattagactcaaatagcaatcaaacctcctaattgaactcaaagtagaaacgaaagaggtgattacgaagttgaattctagggtttgctttgatagatccaagagaaaacgtagaagaagtaataggaagaagaagagactctacaaaaacttaccagattaggtttgttcacagagaaagatcgagctgagaaaaaatggaggcaaagtagaagaaaaatgaccgggaaattaaaattcagccaaaaataactagaactgaaaatgaaatggtagtagctaataacattttggtctaacggagcaagataaaatagagtctgtgtatttcaggattgggtctttttccgatcaggcccatatttatttattttaacggatgaggtaaaatgtcagaacaaaggtttctataattaagttaagttggttgcttcactcttgaagtatataagaaacgaaacgttcaatctctctttctttcataggtatgaaagatctattctaatataacaaatatcgaagatcgaatgggaaatgaagtctttgttggacaaggtgaacttgtattagtatggaaatccgctccgcagcaacattatcactagctcatgtcgtcaggctcattctccattttatcacaatacatatagaagattcagtcaatcggttaccaaaattacgaagttaattattgttctttattaagaaacgaaagtactggttttgttttaattagacaagctttttgaaaaatatcattagaaattgtaattctaacataatgtataatgtctgaacaaaatatatgtattcaaattttaaaatatctgttatttagctactaaataaatatggatgtgtttttagtcaagcagttaagtccatttaactgtcttttccaccaaaatttgaatttactaaatcttgttatcttccataatagtagaaattggttatgaatgggacattgtcaatccaaagatgtcaaaaactactaaacaaacaaaattcatcatattttactatattagatatgttatcaataaaataaatataatataatatatttaatatctttgtttttttctaaaataattctaattacgtccataccacaaagcatcatctagtacgttaatatatatcattgcaagctatctaaagactaaagtcatgccttgtattatatcaccgtaactggagaccaaaggaaaagtgtgcgagaagccacacataccgaagcgcgagaaggaaccgaaaacggaaaaacggccaaggaaaaccccaaaacaagaacccaccgaggcaacaggaaaggagcaaatcacaagccaaaagacggacaaagaagagaaaacaccatcctaggacaa

SEQ ID NO: 33607 - DNA, 1822 bp, Arabidopsis thaliana landsberg
agcatggccatcaaattaccactgaaatttcacatagcatgagcataagctaattcgaggggagaagataccttcgattctcaaatggcatagaattgtcatgtcctgcaaatttgaattccgtcggtaataagaaaagaaagaaatacagaacaaacagttgacagagacttttgactctgcctaatcgacaacagaactccataaacccaaagctgtagatcttaccactaaacctttgtacccgtcttccacttctgtctaaggaaggtctccgctctggagaaaactgtctaccaagtctatctcttaagtcactatccatattgtgacgtctatctcttaagtcactatccatattgtgacgtcttcctgcagtagacgaaacagactttgcagtaaagcatacttgtgctacagatgtgaactccatttcaaacaatcagaatcatgccagtcaaccacacttggataagatcacagacaactactagtaacataaagaaaaacgtaatggtgattacttcccagttcaaagagaccacaatataatgtcctcttcttaccagcagttggaaagaaaccacaattgggcactaaataagtggagtcactgaatctcattgataaatcataggttgagaaggcttcagattatgttggacgagagaaaataagaaccaatcttgaagttccatttaattacacaatcaaaatccaccaaatttgatatactgacaatcaaacccccataaactgcatatttcttgatccaagaaaccgcttgaaagaccattgaagatataaataatcacagaaaataccacgtgctccacatacataactggaagtatgaaaatgccagaagtaataacaacaggcattgataaatcctaataacaagcattgcttgcaaccaaatctcgggagtctgaaaaccatagttgtcgaagaataagtaccccgcaaaacccatgatagattttcttcataaagaatgtgctttcaagagcaataagaaaaccaagataaatttcaccacaaaaaaacccagcagattccactccaataagaaaaccaatataaattgcagccagaaagaccagtagattccattcccggataaaaaataatactaagcctgtgagtagctatctttctgcatattccagaatgattccgcaggacaaaactagtcagtaaaagttgatatggagaaaaccaaatccaaagcaaagtataatactgataccattaccatgtgtttatcaaacagaacactgtaggctgaaacgttttacacaatctcataaaatatggaataatactcacaaagcaaatgcattgaaccacaaaacttcagaagaaaaatacttcacagaatcatcaaagtataatataaaaatcttgcaaagtctaagcaaaagagacttaattaaataaaaacttttctattttactctaataaaaagaagcactcataaattcatcaatccttccaccattaacaaacttaaaccagaataaatagcctattcaaatgcataaacgaaaacattacctgtaaaagaagattcgccaggacgacgaagctcagcatttccatgagcaaaagtacaattcggcctcgaacaatcaccagtcttattgaacagaatacaaagcttcgtcttatacatactcgacccagacatgatgtataaaccaattacaacgaaacctcttttcttcagatcaaaacttcaaaagtcaagccaacctcaaaaagtcaagcaaacctccataaccatagattaacaccaccgtctcgttcctacatacg

SEQ ID NO: 33608 - DNA, 1574 bp, Arabidopsis thaliana landsberg
aatggtctttattgctaaagatccacatagaagcatgggatcctttataatgcactaaatgtctatttgttcacaaggaaattgttaacccataacttttgtaaaacccatcacttttatttatatattcaaattttcacagagaaaaggtgtatcaaatttgctcgttcttttaataagtgctttgtctttttgaatataaattgacattttcttaaaagaacaaataaataagtgctttgtgttcgtatattcatacaaacccaaaagaaaccatgtgtatttattgaaatgactaaatacgactagatttttaatgtgattttcttataaacaatagtgtacctcagtacctatatctagctacgtaatatacacatgcactatgtaaaacatgagtctttaccgtggaagagttttgatactacatatagattaatacataagtatatgttactttggtttccatgtatgtttgtttgtgaaatcgtgtacataacaaacatgcaccaaaaatagatgcatcatctcttcaaaggttaaagaaaccagcattagctaaaacgaaatttgatttgtgtccgcatagaaactggaggaatacattgtgaaaaataatatgaaaaaatctaaactgtagtatgcctaaaatatcatttcgtttcattactcgaggccggtccaatgtttccaaaagaattttggatgtttcatccacaactataagttttgttcttatgttataatgtgattctctaagcgatggcttcttgtgtctaactgtaataacccgctctgtgggacccgcacatgtggccactctctgtcatgtgccatcctgctggctctacagcgcatcgaccctaacccctcaccttgggccaccaaaacccacaagtaggttattggtgcgcttggcgttcctcgaacccaagacctcaccctttaacaactttcgcacatgacaagatgtcaccaattaacgcgctgcagcgctaactagacgccacgtggcggagagtgtccatgtggacgggtggtgacagggatattaccaacaaaacaatctcttaaagtaaccatcggtcctatatgcgataacagtccaccagcaggtttattctcgaaacctctgaaaaaccatctcatcaatattgcaacccccccccccccccataaagcatgtacaaaagatacattgtacatttacttcacctcaattataaattcttcacccccaccccccccaccccaccccacccaccataaagcatgtacaaaagatacattgtacatttacttcacctcaattataaattcttcaattgattaaactgtagtgatatgtaagccaaggagttttaagtttttttcatccaaaatgttgtctttagttttcttcaaacttagtttcacacaataaactcccctagatatttatgcgcacatgggaaggaaattaaaacatcaacatcttcttgaataagagatgacacacctagaatctcgtatgccgatacttgaatatactgataatcgacatcacggggatcctctagagtcgacctgcagac

SEQ ID NO: 33609 - DNA, 527 bp, Arabidopsis thaliana landsberg
atttctttcctttcatgataactaatagtgatgagtggcagggaggagaatgaggagttatcaaacaaatggtgagatcgatgcaggcccatctttcagtggcagaggtggtggtcgcattccataagctctctctttcctcttcttcattatctcttcacatttcaactttcctctttaagttctttatgttatattctgcaatctccttgaattgttgatgtaatcttcccacagtggtttcaaattaagtgattggtcgttgagtaccaaatccacatcagaatcatatggagcgagacaaagatgaataacaaggatcagaaaatcaagaaatatatgacattttgatttcaagttcttatggaaaatggcacaaaaataaattaaaaaaaggtaaaaactcaaagagtttgagaatcaagagtgaaacaaaaagaaagcaagtagagatgctcactatatgaaactctctaaaaccttataatcattcgaggatcgtcccaataactccagcaccaacagtc

SEQ ID NO: 33610 - DNA, 1798 bp, Arabidopsis thaliana landsberg
agtcataccgtaatccaaacccatttgtctcatccaaagaagttgagtgcagcagcttccaagtgcgatgtactccgactgagtcgatgataaggacacacaattctgctttttactgtgccatgaaatgagattacttcctaaaaagaacactcctcctgtggtacttcgacgatcatcaagattccctccccagtcagcgtcacagtagcctacaagtactaaccttgtatctctggtgtagttgagtccatagtttatagttccactcacgtacttaatgatccgcttcacagctaggagatgagatgcctttggattcgattgataccttgcacacaaacctacactgaggcatagatcaggtctggttgcagtcaaataaagtagacttcctatcattcctcgatacaacttctcatccacttttactcctttttcatccttgaacaatttcgtggtagtgctcataggagttggagcaggcttgctgaacacataccgaaccgtttcaccagattctgtgcataggtgctttgcgagatagtaatcccttcatcagtctgattgatttgcaaacccagaaaatacttaagttcgcctaccatactcattctgaactcagtcgtcattgtcttcacaaacgttttgaccaacttgtcggatgtgcctccaatcctcacataaacatgatttatcacataacatgctgtactgatagcctctgtccagaatttttcaggaactccatgtccatgaatcatggctctggccatctcttgaaaagtctggttctttctctcaacaacacctacaactctcttgtgttggactctaatctgtttaccttgattgtaggcatcatacacaattttctctatgtgtttcagctcttgtactcctctaaccatttctttgctcactatttctgacatgctcctcgcattcatgtgaccaagacgttgatgccataccactggatcctctttttcagctataagacactctttaggttcttcccacatgtagcaattgttcccagttctaactccagttagagtgttttggttcttctcgtttgtagcccagcattttacactattgaaactcacagtcagcccttcatcacatagctgactcacactaataagatttgcagtaagcccttcgacaaagtacacatttgtaagctgaggcttttctgctttagtcaaatcaccttttcccttgatttttcctttatccccacctccaaaagtaactttactttccttgacagaggtgtaattttcaagattggattgacttcttgtcatatgtctggatgctccactgtcaaaataccatggtttctttattccttcttcaatcgaggtgtatgctacatgacaatagagatcctcccttctgacatacatcttggaggttcttccttgatatggatatagttttccttgtctcttcagcttattcaacctagcagcatacctgtagcaatatctctgaatatgaccatgtcttccacagtagtaacattcgtaacctgtcacagttctccgggaatgatagtgatcgtgattctggtacacacgtcttgctggaacagcatcatagttgcttcgaaaacctgtttgactttttgttggagcagcagcttcgcttcgtacaaaattcgtctttgcacctgatccaacaccattgcatcctaaaccaaaatttgatttaaccacacttccagcagcaagtatactatccaaatcttttgtcccacacttcagcatgtggatcatcttgcgac

SEQ ID NO: 33611 - DNA, 3852 bp, Arabidopsis thaliana landsberg
aatgaccaatgcccaaccccattttatttactctttcaataacaactccaacaactacatcacctaagaataagatatagtcttggcttgcaatttgcctgtaatgtgaaatcaaatgatcgattatatggtataataatataatgataacatattaattccctcatatggtatgaatagtgaattggttttgtctatatccataagaatgaaaataaagaaataatttccttaaaacaaaaaaataaccaaactatatgctataatggacccggagaatctaagtcgtgcgagaataatgattttgtttaccattaaaaacaaataattgttcatgctcattccatttccaaattattctgaacaaacaagatagagagagtgcaagttgtaagaagcagattttttttggtttttctctaaaaccaaactaaggagatctctaagttgtggcagagagaaagcttcttaggtaaactcacaaactctccactttttccaatagcttattgactcatattgcatttgctttcaagttctgataaatctctaaaaggtttatgacttttagaattactctttttgagatttaagcacattgttcgtatgataatgcagatccagatcattgttttttttttccagcttttgaaactaaacattcacaaatccaaccctacatcatattccttgtgataacattgttttttttgttgtctatatgtttttcaagtaatacaagtataaaaaagctttatctacaatattttcatcctcaagaagccaaaagcaaatttgtttcaacattcttgataaaataacacgtcattagagaattaacaaagttttgaagcagagggaggaatgttcaatactagaaaattaagaccaaaaagtcaacatcacttttataagagaaaaaaacgagtacaactgtaacatttacttcgactttatctacgagagtattgaacaagtgggatgcaattgacaacctaaatcatggctcatagttacaaattatatatgactaatcattttccttttctcttaaagttgtttatagtttagacaataattataggagatgaagagaatgtgatgctactaactcttatttaaatgaggaatataaacaagatctggtcctgacattgttatgaatcttcaaactcaggacacaaaccaagatctcgtgtagaggaaaaaaacctttcctccatgtttaagttttgagcttctggttggtttcaagtcctgtggagaaaaatgtcaccatttatgaagttctttctctttctctatgattatctttcaccttcctctttctttctggtaaatcatttcatctctctctgttttacatactcttgatgattcttgatttcacaatttatttaatcctttttttttcttggttttgtggggtttaaggtccaaagaaataccttaggagcatcattagatactacagatggggttgtgagaagtggcataattggagagattatatacatttggaagcagacaagaatctttgtctttataccaatcttgaaatgcttagtgacaatatgtttggtaatgtaccttttgttgttcatagaaagagtttatatgagcatagtagtagtgtttgtgaaattacttagacgaacacctgagaaagtacacaagtgggaacctataaacgatgatgaccttgagcttgccaatacaaactacccaatggttctcattcagatcccaatgtacaatgaaaaagaggtaattatgattttgttgtaaccaagaatttttttaatgaatatacatatattatacaatactaatgaaggaatcaaattcttgttgttgtcacaggtttgtcagttatctataggagcagcctgtaggctttcttggccattggatcgatgatagttcaagtacttgatgattccacagatccagctagtaaggtcctttgttcaattttttttccccccaaaaatctttggtttatatgtatgattggttcctcaactatatatggaacgtttttgacatatgaaatgatttggaaaagacaggaattggtgaatgcggaatgtgataaatgggcgaggaaaggtataaacataatgtcagagattagagacaacagaattggatacaaagcaggagcattaaaggcaggaatgatgcacaactatgtgaaacaatgcgaattcgtcgccattttcgatgctgattttcagcctgatcctgactttcttgaacgaaccattccttttcttattcacaaccatgaaatctcccttgttcaatgccgttggaagtttggtaaagtcatatctttttgaaaaataatagttattattttgttaagtcaaattggctaatggagagaatgtgttacatgtagtgaatgcaaacgagtgcttaatgacaagaatgcaagagatgtcactaaactaccattttgttgctgaacaagaatctggatcttcaatacatgctttctttggattcaatggaaccgcgggtgtatggagaatcgcagctttaaacgaagctggaggatggaaagatcgaacaaccgtagaagatatggatttagcagtaagagcttgtcttcatggttggaaatttgtctatgtccatgacgtcgaggtactactactataacccttttaaactctagcaaaacataacaagatttcaatctagacattattaagtaatctaacatttcaggtgaaaaatgaattgccaagtacattcaaagcatacaggtttcagcaacatagatggtcttgtggaccagctaatctatggaggaagatgacaatggaaatcttacagaacaagaaagtgtcggcctggaagaaattgtatctcatatacaatttcttcttcataaggaagattgtagtacacatcttcacatttgtcttctactgtctgatattaccaacaactgtgctattccctgagctccaagttcctaaatgggcaactgtttattttcctactacaatcactatccttaacgcaatcgctacacctcggtaacaacatctctactgttcaagtaaaactctgttttctcatttcctagtatgataaaaagtttgacatatattgtctactgcagatcactccatcttcttgtcttttggatcttattcgagaatgtaatgtcgatgcatcgcacaaaagcgacattcatcgggttactagaggcaggacgggttaacgaatgggttgttactgaaaaattaggtgacactctcaagtctaagttaataggtaaagctacaactaagctttataccagatttggacaaaggtactcttaacttaaaaacacacacacaattacaatttttaagcattttgaaatgttgtaactaattttagttaacattttgcagactcaactggagagaactcgttgttggattatatatattcttctgcggatgttacgatttcgcatatggaggatcatacttttatgtttatctgtttttacagtcttgtgcattttttgttgctggagttggttatattggcacatttgttccaactgtttagattagacttttgtatttgagagcaaatgtgtttttgctatttgattagaccaaattagagattggatcttggttacttaaaccaagttaactcttccaatattaatactcaaaatgtaatttttaaaagggggttatgatcttaaaattggttatcgatcattttcatacgtaacattttatgaatttgtatttgccaattgtgttctagaaagaaaattgagagaaacatacaaaaaaaacaagttaacgttaatgatttaagatgttg

SEQ ID NO: 33612 - DNA, 679 bp, Arabidopsis thaliana landsberg
acatataatatcgtaataaggcgatgaatgtcttaaaagcacaaatgttacctaaattatataatggtatccaaatctttgtgcttcatttttccttctttcttagaaccagacctgcaagaaacagagaagattctgaattagccttagaccatgatggcgactaaacgacccaaatatggactggatcagaaggaagcaaattttggtagcaaactttcgacttacagtaacagttctcatacaactaccagcaaagaagctttttagcaatgcagtttctttgtatgtgatcataaataaaatccgaacccgcaaagtagagattcatacatcatcaatgatggaaattttgtcccttgagaatagtccatgaccagaaggaacaatcgtttcacctgtaaagctgttccatcagtaccacaagagctatctcatgattcaggaccatggaggaaagtctaatggtcagattagctcgcttcctcacttgtcttccatgtccataagctacacctatatacaaaacaatatccgtgaagctccctgaaaatagagatagccactttatggacatctaagtttttagttgatttcctgttgagagcttgagaccaaaacaattttagtcaacgcatgttttttgtttttttcttttacggaaaaaaatggaatagta

SEQ ID NO: 33613 - DNA, 1309 bp, Arabidopsis thaliana landsberg
acactattttaatcataaagcatggccgaaaattttgtactctaataactaacatatatgaccacaactccggtaatacaaatcatgaattttgatcaaagattagattcccattaatactaagaaatccataaaagacttaccaagaaatccataaaatatggcatcgagaaggagacatgtagcccaatatacatcattatccttcttcaaaacaagaggaagggctatcttataatgattgtaataaaggtagtcagtgacctttttatgccctgcattagatgcccgcacaaccggtatagctagcccatatcgaactgaattattatgagcaagcggctggttgagatggggttcacacagttgcttaaccctcgtcaaattgccattcccggcagcaatatcgagcgctaaactttgacaataagcatcgttttccatttggccacgactcgtcatttcgtccaatagtagcttattgacgatctccaattgacgtcgactacatgtttttgccatgttatctcaaatgcgtccatcaaggcagtaattgtctctgtctgcaggttcaagaagtttcttttcacgcgctccaaattatcgttgctaattttctctgatagtgataaatattcacaaatttcacctaaaactgcaacaggaaaataacataaccaattagatagaaattatccataaacaaaattacatataaatataatgtgctgaatctcgagcatctaattctgcatcaagcagcctgatacatatataaacaaacataacctatcttggaaaacacgttctgagaactacgacgtaccctatgtagaccgttcgaagttacctataatctcctcccaatctagaacatccgatcaggaatcgaagtaaacttaactgtggaccaaacagggcgctgtctttcacctctacaatgacgatttgccacaagttataagtcgtaatccagcgccatggtgaaatgcgcaatctagattacctcgcatttcgtccgtagaccctggcattcctatgtgaagaacttggcacctttcctgaagaacttgccattctcatgaacctgatggagacattggagttctactctcaatagtcttctcaacatcaatctcttctgtgatttgcgatttgatgaaatgttggcacaggagcttacttaactagactttttttcgtttaaagttcattatgcgcaattaactttcacatcatcacattctcttactttcttcatacgtcatcgcattcttactacaagttttttatcctctcgtctagagtc

SEQ ID NO: 33614 - DNA, 595 bp, Arabidopsis thaliana landsberg
  unsure (1)..(595): unsure at all n locations
ttagaaactgttgtattgagatttcaagaggaatcaataatattgtactactagggttttatttcaattaggtgggaatcttggatcattgtgacgaataaattatctatttgtcgattttctacaaaaagcacacatgaattagattcaacgtggccaattcatctaacatatgttactaaaacaagcgcaatagacgagttggcgtaattttattttatactatctataaagtaacgtatgattcgtctatcaccaattatcttgtaaatgatggtaaaatgtctaaattcgtttgtcgcttaataatgatgatgatatacgtgactttaattaaaaaaagcgaattttcgatagatactctattaactaagcatgcacatatcacgttgtgattgatttatgcctagtaaataaaatttatctccagcaagaataattgaaacttcataactaattttgaatgctaaaatgttaaattgatatatgggaaacacgttatgatactcaagacgtcaccaatatctagtattggaatcgctgtggtgtntcgtagtagatatttttcttcatttagcaatgtattacattatga

SEQ ID NO: 33615 - DNA, 1195 bp, Arabidopsis thaliana landsberg
ataaccattcatcttcattgatagtttgcagcttaatgaaaagaaacacccaattctagaatcaattactttagttttttaatcaacacagaaatagtatactacttgaataaaatcattactatttgtgatgacatatgagttagtatacatcgtcggctataattttcagtttatagaggagacgatatttctccacgtagtaatgacgactcaaagtatttctccgtatagtatttttccgcatagtaatgatgactcaaagtcaacaagtctccaattttacgggttgtgagagtggaagaggagtggtggtggtgagagtgatgaggagatggaggctagttgtgaggtctttgtctcttttttgttcaacaaaggttgttttttttgtaatatatctctataagatttttaattgctttttatagaaaactaaatcctaagatagtgtataaggaacccaaacaacaaattttataaattttatgatgaatttttggttataatttgtaaaattaatgaaattatcattaatggtgagattccagaaaatatgtttataggttatgaaataacaaagagcaatgttacgttttatgctcaattcacaacacaagatctttacaaacttttctaaactcaacaatcgaaactcaaatcagctcaagaaagagatcgaaacagagaacgaaagaaaacaacacaagagatttgattacccagttcaacaagatcggtatgatcaagcctacgtatggggccgaatcagttcggcaatccactagaacagaatgagaattacagagtacaagcagagctcaataatggagtctcaagcttttcttttgttgttacagatgaaacacggataatgaagaagaagaaataaaggccttttatactaagtcgcaaatagaaacagaagaccctctctcgcgaaaagaaggttttttttagcctcttcaatccggattaaaacactccatctaaccggtcctcaattcctcttaaccacaacacctaaaccggtcacttaaagttgaatcagaagtatccacaacactccaccttgattcaatgtttcaacattttcagtaatttgcactacttgaacttaaccttcggcaatcatatgtccaagtatcacctgagaagattagatgatctaaagctgcttcaaacttgtgcacag

SEQ ID NO: 33616 - DNA, 1455 bp, Arabidopsis thaliana landsberg
gagagagttgtttctctcatcatagatattatgatagctagaaagactaaagagtgattcacttagccaaaattcttatacagtttccccccttcatctcaactataatttccttcgtataaaccaatgttcgttttcaagaacttacagtgttcccacagccaagaggcattgaatagggtcaaaggcaagaagagacgccgtcgaaggtatcccagagtgggtgataatatgaggatccaaatcttctgccatcaaacatccctgcaaagattcatactaaatgtgaacgtctaaagcaaaaaaaaaaaaaagcattcctagaacggagctatcttaggtgaagatggaattaaaacacttattgttaaccaatgtatttgtgatgcataatttggtaagtagcatgcgttcaatcctaaacgagatatctctctctgaagcatctcaatgatcgaaaattgaagttttgtcaagtacatttcttttcctgaatttctcgtctccaacaagttctcaatcctagattcctagctataaatttaaaatgagaacaaactattcatcgcaaagaaaatatttgtaaattcaataacttggggaacattataggcatcaatcaaattccacagaaaaatagagctgagcccagcctaagctagtatactaagagtgaaactccaagcgggagaatggtctagaagcatcaaaaatggaacttttattcctcgaggatagtagaataaaaagagatgaggctagaatacccgaggcggaggagctataggaggaggaggattctgaccgccggaggatttccgcagaccttttctgacgaacatcgagctaaatcaagacaaatgagagccgattgctcactcctccggtggaataccaaacgagaatggaattttcaatcgagaagatgcatcggacggaaaaatcagcggaatcaagagaattttgttcgttcggaatttgatcgtagaataaaactaaaagcttcagattcgatttgagagagtcagagaggatgaccgatgatttgaatttttcactgaagccgtccaagttttgtgttttcttaaaccggtttcgggtttaaccatcaaattcggttcagttcgtatcctccaatggatcgctccatttttgtgtaaattggaaccggttcgcaagagttatgtggtaagactcaagaggattacgatgtttaaagttgtttatcatttgtgaggttaaaatgttatatttttttttccactcacattgcttctatttccttttgagaataattatattctctcaaccgaatgatttgcactggcttcttaaatattgttaagaagaaaaagttggaatgtgaaatatgtgaatgaatgtgttttttttccgctattttcaaatcctcgagtattgcgatttcatagaaattcgacttaagcttgcgccatc

SEQ ID NO: 33617 - DNA, 864 bp, Arabidopsis thaliana landsberg
gattcctcaaacaccagctagtggtgaagaggctacttgtgttgatataagagaggtttcggtggactctgctaataccgagtctgctcaagaaacagttgatggtattactctcggggttccaactacatgctcacataaagagacagatagcaaaatccaaacagagattgatcttgaatctactgaagaaatagacccgaagctatcaaaagctgtttttataccaatagaggaagaggaggattgtcccatatgtttggaaggtaaaagtttgtttgcctttcccacatctcaaaaacatataaacataatcgtaccttacatgactgcgagaatgggttatttattatattgtctgtgcttttgattcagaatatgatatcgagaacccgaaacttgtagccaaatgtgatcaccattttcaccttgcatgcattctagaatggatggagagaagtgaagtttgtcccttttgttccaaggtttttatatatctaacacacatctacggttgtgtctattcccgtcttgctcgccttatttatatccatttctatgacttttgaagtttcggaaggtaaattgggtttgatttatgtttttgatttttacagacaatgcttttcttggagggtgaagaaattacacagcaggtggagttattataataagagatatcatcatattcttttctgcggctacaatttctattctttaaccataaaaaaaaatcgagtgtttggaagattgtgatcaaattctttttgccttcttacctgaaaaatgatcaattaatttcattgtggggtttatgagacatatattatattatttgtgatataactcattttggacttattt

SEQ ID NO: 33618 - DNA, 913 bp, Arabidopsis thaliana landsberg
atggcatagaagaagaactggtatttttcaagaagaaccacagtttaatggaagaaagaagcatggaacagaagaaagatgtgtttaaacatgaagaaaccaaaaccaaattatgattatttttttgcttatcttatataaagatttattgttcatgtaaaatatttaattaaatcttgataaaattttagtagatattccaacgagtaattatccacaatgatctgttattttaaaaaaaaagaaataaataaaataattattcaaaatattaataacattgtattaataattatatatatatattagttaaatcagttatttaaaccgaaacaaatactaacatcacttaaataaattgatgtaaacattacatcatttttagtaactgatacaatattgatatcaattacaataatcggtgtaattattttgattatttacatcggttactaattaactgatgcaaattatttgcatcaacaatatttaagtcacttatttaagtgatacaaaattcttttacatcaattttaactaatgcaaatatttataataaatgatgtaaaacaacctttttttgtagtgttctcctcaagctctgcaaagatatcagaatcccgtgatgggccggcataaaaatatctggtgctttggttaaggctacctaaccctatcacacgacctcggtttggtggaatttcctttatataaaactgttagtaaaacaaatttagattatacaaaaaatgtatgttatgaaacaaaccttacctcaagaaccatgcgattgatttttttctcgggtttggacgttggatggtgaggaaccatcatcattttaaagaagttgtgtctcaacgagacctgcgatgtaactgtcttgaattaatccagctttcatgttagtgtc

SEQ ID NO: 33619 - DNA, 4157 bp, Arabidopsis thaliana landsberg
aacaataatccaatctttttctttaacaatctcaaatctttttttgactttttctaacttctttagcgtacttgttctaaaatactttgggctttggttgtaaacaatgaattcaaccctttttctcttttaaactcttcccaacccatataataagtacccacctagtcctatctagtccggataacgcgaattagaactacatgagatactatctttgtcgttacaaacctaacactttctaccaagcttaatcgaaataagacctcacaaacactcacaagtgatatatggcttgaaagaaggcttaggttagggtatggagaaactgctctaaaggtgagagacagctatttggatcaacaagagtggtgaaatgaataacaagatccaaatattttaagggtaaccatgagtttaacaaacaatgcatagtatgataattaaaagtcaaattatgattcaaattaatagggaatagcttcaaatcacagcaagtttcgactaaggaaagatcaaatatatgaattcaaaagatggtgcggttttactttaagatcaatcggttaagcactagacaactaacaacaagggcattgaaactgtctagtgaacattgcaaatttacaaggctatgatcatcattatcccctatgcaagtgcaaaatgcaacaacctatatgataacattctaaaaacagccctattaatgcaaatgcaaactacataacactctattttttttggaatcattttcgaaaattttcaaatttttttgggttttctatgccttagatgatgcaaaaatttgaatgagaaaacatgaaacaatgttagatacatcttgaaccctcccccaaacttaaattacacagtcccttgtgtaataaaaattcaaaaaagaattcaagagaaataaccacacaaagcaagaaataaaagaaatgcaatgatatatacagtgaaatggagtgataccgcaatttttagctgaagtatatgcgggcgaactcgtccatgctctcttgagtgtaagctggaacgtttgatggaggcgggttgtactcgtttggcacgtcgagttgctcggccgagtacctctccgaagtgctctgctcggcctgggggggcgttccttctcttggtcttcaccttcttccggtgcttagtagcggatgcctcccgtggctcataagaggaggctcggcagggctcaaatgacgttccttggctaggctcacccaggttcccacttcgctcaaatctatccgccatgctcgtagaatcacttcgacggacaactcggtctctttcacttgaagggggaggagacttgtgcttcctttggagttctttgatttggagtctcatcttcttcaccgcgtgcgtgagagattccactttcttggtgaggcctttaataaccttcccgtggaactttgccaacccttgaagcattccgaccctttggtgagctgctctctcgctccttgattgcctagtggcgaagtatgggtcaaagtggaaccgctccgggaagtactcgctagcttcatcttgcggttgctcatcggtctcgtcgtaaccggggtgtagaggctcttggcgaggtggcggtatgttctccggagcatcatagagtgcatggataggagggtagaaattaatgttctcaccgttcctaatggtggtgtagttggcgcaaggtaggagcagcctagagctcccctcatcggggtggttgaacaagtaggtatgcacaccggagggggttgtcttgtccaagatgttcttctttctcaaataggcaatgtcaattcattccggcgacctatccggtcctcctaagtcaatacccgcagctactaacataggtgtaatcatacctccaatcccaattgatcccttgcgtttcatcttgtggagctgagccgcatagtcctttaaccccatcaagtagtccaagaacaacaccgtaagagatgtgttagcccgatctccttccatcactctctcgttctttgtcttccttagaaccaacttgagagcttcatccatcatttggagctcgctatcattgataggacccgtcaccttcttcgcgtaaaaagtatgagctatgcattgatggaagtaccttagcaccgggctgcgaatcgatgaactcttgcaccgtgatgagtggaaatcgcccggagccgctattgtgttccaaaactgcgtaagctcaagcttgtcaaaatctggttcaagaccctctttcgacgggaaaccgtagaggttgtctaactccttgatggtgagagagtagtctcgtcctcccacggtgaaagtagcgtaaccgaaacctctacccgcctcttcttctccttgagctgaaaagaaatgaacttccaaggttgctagcagctcgcatgtgtagttttggtaactctcgaaagcgtaggtcatgtatcttgttaaaccgcacatatcaaacaagaactccacgtcttctcggattcccaaaacatccatagtctcgccatgcggatgcttagttctctcaaagcttagctccttgaggtattggatgaacttcttggtagatggagtcttcttccccctcttagaaacagctttcgggattggaacatcctcctcttccatcatctcttcttctacaacttgttcttcttcacccggctcttcatacataggctcatccacatgaacctcttcttcttccaccacaacacgttttccacgagctatctcagctcttctccgatcatgcgcttcattttggtgctgttcctccacactcggctggggtactcggcgtgctgatcgagtctgagctgctcgctctgttctttgcctgctcgagcggcgaatgagaggcggagggtcttcgggggtctgctgagtcaactcgggcgagtggtggtggtgttcggccgagtgttgttgttcttcagcttccattggggctggttcatttcgggatgaattccggtaagctaacgcaaagccttgtgcacagatttttgccttgcgtctcctctcttcatccaccttgggtgatcttggaaacatgatcaaagaacaacaaagagcttaaagagagtttgatacaaaaacagaacgaatatcaaacttgaaaaccaaatgagagctttgttttgttgcttttaaagatgaaatgagaaagataaggcttgagagcttagagcaaaatcgaaatgggagcaaaggagaggaaaatggagcttaaaattgttgagaatgaagtgtgagagagaagaggaagaagcttagcccttttaaagagagaatttcgacttcatttgaggccattggatgagtatcttcatttctagcctttggatgagtcaaggggacaaactccaatcaattttgcaacttcccatgtttggcttgtgatttccgacgtgtgggacctccttgttgcacccaaggattcaaatttcaaaatttgaattgggttgactccacacgtgtgatactcggccgacatactcggcgtgcatgtcaagtgtgggctttttggcttcttgggcttcaatttactcgagctaaaggcgagtgaaggttaatgggcttgggcttctactcggctttgggccgagtgacatggccgagtggcttaatgggcttttgcctagagactttactcggcccatctcaaacaagtgggctggccgagtatggttaatgggcctcttctgttcatcctgaaagtcaaaaacactaaagaaaacacatcaaaagtaacaagaaagacaattatgtacaaggataaccatgggacttcctcccaagtgagcttgtttaaagtctttaccttgactttcatactcatttcaagctgtttgaggttcctgaaggtagactgttgatccctcgggaatgatgttgtccgctaggtacttcttgagtctttgcccattaactttaaactcattaccctctcttgaaactatctcaactgcaccaaagggaagtacctctttaatagtgaaagggcctgaccatcttgatttgagttttcccggaaacagtctgaacctcgagttgaatagtaacacttgatcaccagctttaaaatctttaggcagaatcttcttgtcatgaaaagctttggtcctctcttt

SEQ ID NO: 33620 - DNA, 1238 bp, Arabidopsis thaliana landsberg
  unsure (1)..(1238): unsure at all n locations
tgtctgcttcttctaatagcccggctctccctagcagatctaccattatagagtaatgtttcaattgagggtttaggttgaatctagacttcatctgagagaaataatcacggcctgtttggatcattccaccatggcaacatgctgataatagtcctatgaaannnnnnnnnnnnnnnnnnnnnnnnnnnnnnatcatttcgttgaagtatgatatagcagtggatgcatctccatgaagggctaaacctccgattatcgctgtgtatgtaagcgagtttcttgtttgaattccgtgaaaaacactgagagcttctgagatgttaccacatttggcgtacatgtcaaccaatgaagttcctagcgcaacattgagactaagactgtatttctcgatgtaacgatgaatccaaatgccaacatcaagagcaccaagctgagaacaagcagataggcaatgtatcatggtgatttcgtcaggcttagtgttacttgtttgcatctcctggaacaatgccaaagcgtcttgaccacgcttggcttggactgatccaccgatcattgcattccacagtacaacatctttttcttccatatcatcaaaaagcttccttgaaacatcaagcaaaccacatctagcatatcctgaaatcattgtagtccacgacacaattgttctcttttccaagttatcaaatatccttcgtgcctcgtgaatatctccgcatttcgagaacatatccatcaaagcatttacaagaggaatcgtcattctcagtccattttcttttacgtattcataaaactctttcccacgattcaaatctcccaacattgaacacgaagaaaccaacccaatcatcgtcacatcatccggcttaactccttcagattccattagcttatatacatatatcgccttctccgcctcaccaatcttcttatacccactaatcaaacaattcgaagaaaccaaatccctcacaggactttcatcgaacaccttcctcgcattttccatatcaccgggagaagcaaacatatgaatcgacgcattatgcacatgactaaccaattccaatcttagcttaagaacatgcccaagaatcatatgacctaaactactcaacctaagatcagcacacaccttaaacaaaacagggtaagtgaaatgatccggtctggactcacaacaaccatgtctaagcatctgcttatagagcaaaaacgattcttta

SEQ ID NO: 33621 - DNA, 1036 bp, Arabidopsis thaliana landsberg
tgtaaacatctacgtttgtatcgctgctagttttatttttataacataaagaaatctctaatccagtgcgtgctatttaggaaagaaaaatgtgtttcatttgtgggcttggaatattcactgccgtttgttccttatgtgattgcaggaagctttgaggacgttcttgttgcataagcttgataatctttcaaaggatgataaatgccaaataacgatgatatcaacatgggcaactgagctatatctggacaaggtttagcttttgctgtctctggtctcacttctcattaaacatagatttggaaaacatctattattcccttaattcctctcattgatttcgtccccgatttactttctgagttgttatatcttgttactctgtctcatattccttgaatgcgaatatagataaatcggctgcttttggaagatgacactgctatagaaaatcgtgactcggagtatcactcagtcattcaagaattccgtgctttcatgagcgattgcaaggatgaattggacgaggcaaccacagtgaaaattctggagaggtaaattccacaagtatcccaggcgatctattaaattctatctttcagtcagtgagcacactgaccttcatgatgatgtgtattgatttctgggataaaatgttctcttaaatactgttttcagaacatctcataggataccttgcttgcggtaaacactttcttcttatctatctctttaatgttctcttgtagttatggctcgggttgaggaattggcatattttgcaaacttgaaggagcagtatgaaattgtagttctccattatattcaggtgaatggcatgaaatttttttcttttcttgattgcatccatatagatacaacaatatcttacacagagttgatcagtttacattataagcttactcgtttgccattagcaaggggaagcaaagaaagcattggacgtgctccaaaaatcttcagtttcagttgaactccaggtgcgtaaaaattaacattgtgatcttgtgaa

SEQ ID NO: 33622 - DNA, 1779 bp, Arabidopsis thaliana landsberg
tctccagttagaactctgagttgttagaccaaattagttgagaagaaagagttgttctcttcttgttgtggagaccaaatgtaaaaaatgatgttagctcttggatatttggtgaagaatttgttgttaatacaaatttgatagatgactaagacttataattgttgagagtggtgatagctgatgttcttggattgtcttatgtatgtgaattgtggcagatctatttgtttgtttgttttcgattttgctaatggagtgttgttgtttcttttctgttataaagggtccagaaatccgaaccgggttcttgaaagatgggaaaccaatccagctgaaacaaggacaagagatcactatttcgactgactatgacttgaagggtgacgagaacacgatttgcatgagctacaaaaagttggctgttgatgtgaacccaggaatggtcattctttgtgctgatggtacaatctccttactggttctctcttgtgacaaagagaacggtacagtccgttgccggtgtgagaactctgcgatgctcggtgagagaaagaacgttaatctcccaggtgttgttgtggatctcccaactctaactgagaaagacaaagaagacatcatgcaatggggagtcccgaatcaaatcgacatgattgctctgtcttttgtcaggaaaggttcagacttggttcaagtccggaaacttctaggaaagcacgccaaaaacattcttctcatgtctaaggtatgttaaatcaaagctctctttttagttccggaaactacaggatcaaatctttaggttgtgatggttttgtgctatcttctttttgattgattaggtcgagaaccaagaaggtgtggcaaattttgatgacattttggtcaattcagacgctttcatgattgctagaggagatctgggcatggaaatcccgattgagaagatcttcttagctcagaaggtgatgatctacaaatgcaacatccagggaaaacctgtggtcacagcaactcagatgctcgagtccatgatcaaatctcctagacccacaagagccgaagctacggatgtagcaaacgcagtccttgatggtacagactgtgtcatgctcagtggtgaaactgcagctggagcataccctgaactagccgtccgtacaatggctaagatctgcgtggaagccgagagcacccttgactacagtgatgtcttcaagaggatcatgctgtactctccagttccaatgagtccactcgagtcacttgcatcttcagctgtcagaactgctaactcagctagagccactctcatcatgtccgtaaccataggagcaaccacagcaagacttgtcgctaagtacagaccaggactgcctattctagccgtcgttgctcctgagatcaaaacctgacttctttgactggtcttgcagcgatgaatcccccgcgagacacagccttatcttccgtggtctgatcccagtgctctacgctggatccgcaagagcctcactcgatgaatcaacagaagaagctatcgagtttgctactcagtacgggaaagagaaagagctatgcaagactggagattccgttgttgctctactccgagtcggtaatgcttccgtgatcaagatcttgaccgtcaagtgatgattccactcaaaaattcacgtttttggcgtttggggaacgctactttaaacgttttattatgaaactattcaagattgtgattaaaatcttgagatagaaaacgcaagtctcttttat

SEQ ID NO: 33623 - DNA, 4102 bp, Arabidopsis thaliana landsberg
gcttgtgatattagtgcacataagttgttcgataatatgtctcttagaaacaagttcaaagaagtagttttatatttttaactatgtttctgaattgtgcaggtggctgaagcaccatgagttgtcatataatagaatagcgaagatcatatgcatgtcaaaaggaaatctcgactccataaggatcatgatcgagtggctgaagagcattcatgcgaagggtgaattcattgcagttgcgttcttgagatctggggataatatattgcaacgtaaccgtgaggaactaaacgaaattgttgagtatctagagagcaatggtgtgaggagggattggatgggttatgtggttggaagatgtcctgagttgctgtctttcagcatggaagaagtgaaaagccgtgttgatttcttcttgaaaatgggtatgaatcagaatgactttggcactatggtctatgattatccaaagataattggcttcttctcattccaagtgatggagaaaaaggtactgaaagctctttttaatactccagcgttaagattgtcgtttaagttcataattgtgttgcttgtattaaaccagatcaattacctgaaagagtttggccttagcacagaagaagttgggagactattagcctacaagccacacctaatgggatgcagtattgaagaaagatggaagcctctagtcaaatatttctactaccttggaatccccaaagaaggaatgaaaagaatccttgtcgtgaaaccaattctttactgcattgatttggaaaagacgatcgccccaaaggtagttgaacttcgttataacgtatgaactccctataccatacacacagcagattccattaactcagcttctctcttgtgtttttaaaggtaagatttttgcaggagatgggtatccctaatgaagccattggaaacatgttagtaaagtttccttctttacttacaaacagcctctacaagaaaatccgacctgtggttagtaattacttcctctatgaaacaaagatgttccatcgaatgttgttatgttagtgttgttactcataacatatgatgatttcagaagctgcatctgatattgtacaagttgtggttgtacaggtgatttttctcttaaccagagccggagtaacccaaaaggatatcggtaaagttatagcaatggatccagctctccttggatgcagcatagggacgaagctagaacccaacatgagatactatatatcattgggaattcgattttatcaactaggcgaaatgattgctgatttcccgatgctgcttcggtataacgttgataatctgcgcccaaaataccgttacttgcgaagaacaatgatccgtccgcttcaagatctcatagagtttcccaggtaccagaaaaagaattgataaaaataatcccttcaaagtgtagcttttgagtaaccatggcacttgtaacagattttttagctactcactagagcgtcggataatcccaaggcacaccattatggttgagaacagagttaacttcaagctcagatacatgttggcttgtacggatgaagagtttgagaggagagtgagagataaagtggagagaagagagagattcgaagctggcctcgactctgaggattctcaaccgtcggatgagaacatctccgatcaggagattgctttctcagacgaagcggaagaagaagaggatttgacagaatgaagaggatttagcataatgaatagttctgtacagtttaacacaattataaacgaacgaatgtgtgaatgagtctatatttataaatactaaaatgagaatacttgttctttcatgtcctaagaattcgaaaaagcacttttacagtttgtgaaaccaaacgctcaatcgcctcctccgccatcttttctcttccggtgctcttgattctctcaactccgccgtatatatttcaaataaagagagagtcggtttagggttaaccagaagtgagtgtataattgatagattagagagtattgggacttttttaatctatagcgataacttcgggtccttaagttgaaaataatttttcttcagctattgactgaaatgacatcgttttagtatgattctcagttttcggctatttgcatgggagtgccacgtggcatgtggagaagttgccagtgaacgagttattctctctacctcaacgtcactaaaaccgaatgcgaaaaggaaaaaaaatagcaaaagcaaaaaactaaaacagaggattctcagagatcacgagagcaagaaaacgatgaggaagatgaagcacttgtcctccattgcaaacgatgtcgttcagagatgctcacagtatttcttttctccttgtctatatacttatttgcagatctatgttttgattaatagaaattatagtgtactggatcataatcaaaatcatggaagtcaaacaattttatgggatttcttttccttgatggtaaagccaaaagaatagcaaaccggttacacccggtttagcatcgttttaatctatgaattttgtgatgattgatgttgtagggaactagagacaaccattgatgatttagtgaaagaatttgaatgtcaatggaagccaggaagcacgggaggtacttactcgaagaagtttgtggaattttgcaactcaaaggtgacgagtcgggtttgtgaaaacatacttgagagaataaaagatggttcctttacacgtctcacgttcgatatgatgcttgcgtggcaacaacctgacgcagatgataatgagtcttataaggtatatacctaactgtaacttgatatgatcacttaaagtttcttggttctcaagtcatgtttttacttgtgttcaaaggaagcagtaggtaaagagagtgaagacaagaggattcaagcaactttatccccagagcaagatgacatctcgcttttttattcagacatgatgccgcttctcgtaagcaatgtttgtttttcgaactgtgacatcggattaacttttataaatagtagtttatagtacctctcaacttttatatatcatgtgaaggttgatcatgaaccaagtgtgggtgaagatgcttttgtctatttaggctcaatcattcctcttcccgtggatatcatcaacggaagatacacatttgagactctaactgctccgaccggtcaccaacttcacttcccagcttatgatatgtttgtcaaagaaatacacaagtaattattcttatacatagcatagttggtttctaggctcaatacatatgatgtcttcttttctttctaattgatttaatttcgtattatttaccatgtatcaatcaaggtgtatgaagcatttgcaaaagcaatcgacgcctaaagggatcgaattagcggatgatgaaattatattgcacgttgaaggaacaatggcttcacagagagtgattcgccacattaaagaaacaagctgggcaggtttagtttcattattgtttccttatgttatgtatgtctcaagtttgatgaaaaaaaaatgtcttgaattttgtaggtaggcttactttgacaatctatgcactatacttcgaagccgcgggaattataaactatgaagatgctataaagatagatctttctaaggacaatgaaaagtctacaaagcctatgtccactggtccattgggtgctcctctttttgacaaggccattgtctacgagtctccagatttgtaagaattcatcaatttatggaacatgttggcttatttgtgtatgaattataacataaattttttcttttgatgcatttttagtgaggagggaatagtcatagagtttccggagatgacaagctcttcgagacgagatcattggcttatgcttgtaaaagaaataacattaatgcacaagttcttgaggaaattcaatgttgagtctcccttgcaatcatgggaaatccattcaagaacaatccctgggacccatacggttgcacgcagtccacaggatgtaaagattttctcctccggatccaaaaaactttttaatatttagtctgtttgagataattccaaaggc

SEQ ID NO: 33624 - DNA, 980 bp, Arabidopsis thaliana landsberg
aaatttctttggtttctttttctttcgttctttcttttccaatatgtaaaatttccattactaatgtgggggtttgactggtgtaactcttttcttcttcgaatgtaatataaatgcgttttaaatttgggaaaatatttttattaggattatgtaagaaaaataacatcttgcatggatgctgttaatgactatggtaatggaacaaaataacatttgcatagatgttaatggtacaaaagaagtttcaacgtaacaaagattggttacgaaaaaaaaaaaaaagtaacaaattggttaaaaaaagcaatagtatattgggctgagtatgaagccaaaaagcccaataggcttaaaaccgccataaacacgaaatagaatctaccaaacgcaacgctattttcgagtatgcgattgcaaacgcgataaaaaacttgaaatcaaattttggaaagttaacaagatttttatcttcgttgtctccgtttaacgaactggcgaataacaaagagaggatgaattgttcaatcggaaactggaaacacactgttctctacttaaccctaatcgtatctcttctctacttcatcgaatccctaatctcacacaaattacacatcaactacaacaaaatccgcctgaaaagatctccgaatcttcctctacgattccgtgacgatggcacattcaaaatcctccaggtcatgatttgtttcatcctctatcatcataaattgtgcaattcgctgctcattgatatgattaatttgatatctaacaggtcgcggatatgcatttcggaatggggatgattactcgatgtaaagatgtgttggattcagaattcgaatattgttctgatctcaacactactcggtttcttcgtaggatgattgaatctgagagaccctgattgattgctttcactggtaaaaattcatgaactaattgatatgttcagagaaaggttaaagactaaa

SEQ ID NO: 33625 - DNA, 3017 bp, Arabidopsis thaliana landsberg
cttaaatgttggaactttacttgagtcggcgatgttgttctgcattttattgagttctcttgatgcaagttgatggctttttaatgttgtcttgtgtctttttattcttaagttgatggcttttcttgttagattatctcaagtcatctacttgttgttttatatttcgaaagtggtgtgcaaaaagcagaccttttttctattactgaccagagattctgcaatgttgcggcttatcactttgattgactatgaatgtggtttgcaaagttgtgattttttctactggtatgtgtctttcaggtacattcttttggatcggttccattgaaaacgtatcttcctgatggagacattgatctcactgcttttggtgggctgtatcatgaggaagaactggctgccaaagtttttgctgtacttgagagggaagagcataacttgtcctcccaatttgtggttaaggatgtgcagttaataccggctgaggtttgtttacataatctctgtgttattcaaattccagaaactagagtctgcagtgaccaatgagtattccaagtatgtatatggtgtttatgcatgcttatcattttgattgttatctcctcaagtacctaaatttcttttcttttgcaggtcaagcttgttaaatgtctggtgcaaaacatcgtggttgatatctctttcaatcagattggtgggatttgctccctctgctttctcgagaaggtaatctgccctcttcagtatgactaattgaccatgctgtgtcaaaaaatttaactaatttttttaaaaggtaaatacagtttaggcttagtttatctgtttaatatatgaaagcagaagttgaatatcactaacctgccataatgacattggttccacctaactgcctgatgggtttctggtaactcaatagattttcttgaatattgcaaatcgtttgcaatatcacatacatgcaataatatgtttgaggcgcatttatctagaagaatattcatattagcaattttcgaagtacgcgtttgtagaagacaaagatttacttctggaaaattgatgttgactatatgattacgcagattgatcacctcattggaaaggaccatctctttaagcgaagtatcatactaattaaagcttggtgctactatgagagccgtattctcggggctttccatggattaatatcaacatatgctttggagacattggtcttatatatcttccatctgttccactcatcattgaatggaccactagcagtaagggtcttcagcaattatgagggatgcttcatgttttagtctcatcttgattcacttaactttttttatcccataggttctatacaaatttttggactacttcagcaagtttgactgggatagctattgcattagcctgaatggtcctgtctgcctttcctctctaccagatattgttggtaaggatttcctgtagtatacagaaaatttagttctttttgcgatttcagtatctgcaatttctttctttaatttctgtagttgagactccgcaaaatggaggggaagatcttctgctgaccagtgagttcctcaaggaatgtctggagatgtactctgtaccatcacgaggatttgagacaaacccacgcgggtttcaatcaaagcatcttaatatagtcgatccgcttaaagaaactaacaatcttggacgcagcgtaagcaaaggttgactgccttcttcaaccatcacagtttttattgtcctactgctatctctctctttatggatttagatgtttgagtctttaagaggcctaagacagtagcttttgacctgtccctgtccagagtattagcgttatagaatatttatggtgggtttacctgaaattcttgggctagggtatgtaggttttaagcgcaggctaaaataaagattgtgatattctggtatgtattttcaccctggaaatgaaccaatgtattaacatgagataaaaaaacctctaaattttagtttgctctggtaatcccgtgaattttatggtctagatgactctctttattggtaaatttttaaagactatggattttactttcttcttacacaggtaacttttatcgtatacgaagtgcattcacatatggtgctcggaagcttgggcaaatgtttttgcagtcagatgaagccataagttctgagcttcgtaagttcttctctaacatgctactcaggcatgggagtggccagaggcccgatgtccatgatgctattccatttttaaggtacaacaggtacaatgccatattgccagcttccaaccatttccaagaaggccaagtggttaatgaatcagaatcctccagttcgtctggtgctactggaaatggtagacatgaccaagaagactcgttggatgcaggagtaagtataccgagtacaactgggcctgatttaagtggatcacctggtgaaacagtgccttcggtttcagaggaacgattttcgggagacgcaaaagacttggctactttgaggatccaaaagttagagatttccgatgatgcaatgaaatctccgtgccttagtgataaggaaagtgtctctcctttgaatggtaagcatcattcttttaatcagatgagaaatggagaagttttaaatggaaacggggtggggaaacaacaagagaattcctggcatactggttccagaagagttaaagatatacatattaatgagaatgagaatgagcatgttggttatgaagacctgccattcgcaggagcagtaccttggccaccggaggacatgcatctccactactcaggtcattgtgtatctggcactacgaatatgctgtctgacctctcacgtgattacgagagtcagcttaacagtttgcgatttgggcgctggtggtttgattatgtccaaaatggtcctatgtctccactatcacctcctgggctgcctcaactgccgaacaacaattcatgggaagtaatgcggcatgc

SEQ ID NO: 33626 - DNA, 1160 bp, Arabidopsis thaliana landsberg
cataacttatgttcttagtaactttatactatatacaagagatttaatttgtcttttggttagccaatcaagttaaccttcaagtccttaatttctaagtcttatcttccctccgtctctatttaaattcctcccacactctctcttttgttcaacatgcgaacattctcaaagagaagaaaagaaggaagtagaaaaaatggcggaatcgacaaagcaacacatcgatctaatccgggagactaagttctcaattggcagagcttataatcctttgacggaggatcttcatcaggctgtgaagaatctctccgctgagctctagtccaaggatgttcacttcctcatggaacttatccaagtaagtatatatctctttaacccacatttatctttgtttttatgtgcatatactatttgtgagtccgtgttttcctctataatgtttggttagatatgtttgcatgtgaatatatacgtgtagttgagtttctgatgttctttatgcaagtctaatattcgagaccatatatatcctctacagtcagtagatatcaaaaacaaggaatcaagctgatcttaattatggaaaatgttatgcttgttatgcttgttatgcttggtttcatgtactccagcgttttcatatgtgtttccaatcataatcatgtttgctcttagcaccgcaattgcaaccttggctacattgttcctgagtgggttgagaaacgtccttctctggtcgatattcaaaagattaatggttttggttctgctattccgaccacaacaataatcatgcctttgaaaagtgacaaagtaaagccagtgaaagaacaactctccaatgttcatcctgaggttctgttgtttctttcaaagatcaagcgcctctctatcaaagatccactaccaagataaggtcagcattgttaactcacacgggattgttagcgagactaatttggtgtcaaggaagagcattgatgcctgagtcgtacatgatacatcttttagcttgtggaaaaacattcagttagttactaccatgtggaagcaaaagttaacggtgaaaaatgacaacccgtgtgggaaggagaggccaacttgatgaattgtcgacaacgttggtgtttctactcggagaccgtcttgccctt

SEQ ID NO: 33627 - DNA, 277 bp, Arabidopsis thaliana landsberg
gatgcctgtcgaccgaaatgtgctggatgcggatacccgtcaggcggaaggcgatctccgactacggcacgccgccgagaattatatactgccgccgagttgctggaagggcgatgtttcagcatcgtgaagccaagcttcgacgggccgaaacgcttggccttttcgcggatcgacttgcgactgcgccaccaccatgactgatgcacgaacggcccgtgcgcctggtccatcagccccacgaccgcgtggtcgatgtggcacgggaaatcgtcgg

SEQ ID NO: 33628 - DNA, 703 bp, Arabidopsis thaliana landsberg
agtcagaatcgctaagatcaaaattcaagtgagagcagatgctggcgaggatgtggagaaagaagaacactcctccattgttggtgggattgcaagcttgtacaaccactctgggagtcagtctgtcagttcctcaaaaaattggacatactactactggagaatcctccaatacatctcttgggcatatatccagaagatgtcccaactggtaagaaggacacatgccccactatgttcatagcagccttattcgtaatagccagaaattggaaagagcccagatgccccttaacagaggaatggatacagaaaatgtggtacacagcgcctgccccaatccaatcgcgcggaacctgagactgtggtacatagggaagcaggctacccaggcctgatctggggcacaagtcccttctgctcgactcgagccccgggctaccttgccagcagagtcttgcccaacacccgcaagggcccacacgggactccccacgggatcctaagacctctggtgagtggaacacaacgcctgccccaatccaatcgcgcggaacctgagactactgtacatagggaagcaggctacccgggcttgatatggggcacaaaccccttccactacactcgagcctcgggctaccttgccagtggagaaaccagacacccacaaggacccacacaggattccacaggagatcct

SEQ ID NO: 33629 - DNA, 1847 bp, Arabidopsis thaliana landsberg
caaatagttgaagttatgatccacgaaccaattgctaattgaaacaatttctgtagtataatttataaccatgataggttttccttacctaacaatccgttgacgaaaccaaccacgtagaacaatcacgaccacaacgtgacgtcaactccggtatcacaacgatgatgatggctgggattgagatgagagatagggaagtgatggtgatgaagaagacgtgagaaaaagctgcgtggaaagggagatatatacatatgtacatacacacgcttaggttttgtgtgttatttgggttggttgggcccctcttgggcttggacaaagagatggacgagccgtggagtcaagggacaagcttatagttaactagaaggaattgtcttattgacaagctgacagtggacgaaaaagagcaatcagattgacgagctgacagttgacgagaaaaaacagtcagattgacgagctgacagtttaggagaaggaactgttggattgacgagctgacagtcgacgaccaggaactgttagattgacgagctgtcagttgacgagaaggaaccgttggattgacgagctgatagttgacgagaagggactgttggattgacgatttaacagtcgacaagaaggaaccgtcggattgataagcaagaattctcgggttgatgacctgacgattgacgagcaggaattatcgaattgacgagcaggaactatcaaattgacgagctgacagttgacgagaaggaactgtcaaatagacgagctgacagttgtcaagaagaatagttggtattgacgagaatacagtcaatgagcaggaactgtcggattgatgagctgacatttgacgagtagaaactgtcagattgactagctgactgttgacgagcacaaaatatctaattgatgagctaatagttgatgagtaggaactgtcttgattgacgagctggccttttacgataaggaactgtcggattgacgaggtaatagttgacgagcgggaactgcggattgccgagcaggaactgtctgattgccgagcaggaacttttggattgatgagctaacagttgaaaagcacaacttgtctgattgacgagctaacaatggacgcgcaggatctatctggattgacgacctcaagtgtgagatggactaggttgaagctcgggaattaggccgtttagagatgagctaggagctaggcgacgagctgacgaactgtgcaataaggaggcgagctggtagataggtgaagagctggacgaacagtgcaataagaagtcgagctggcaaatcggcgacgaactaaacaactaatgtattaggcgacaaactaaacaactaatgtattttggtagataaacttcttcaccgtgtcactgatattcctagttggcgcaactagtgtattttgataggaaatgtttagcgagaatgctcgctaatggataattcgaagatggtggatgttctagtgcattgggtcatcgaccgcccttggaacggattatgttgtggcatctttttgtcttttcgccgagcagcctactggtgcatccactagacatcttaagtgggtcaatgtgattttaaaagacctgttctgagaaaatgattgcgtaaggtttgtcgatcttttgtgaattagggctaacgagtagggtccaggatggttcaaatgagcttgttggggtaaaccccttggttgcagcttcattgggattgaaaagtccgtctcggcagccttgggaggaaaacatcatctgcaggtgagcaactgggtcggcttgaggggtgtgcttgattccctacactataaaatgttccattga

SEQ ID NO: 33630 - DNA, 794 bp, Arabidopsis thaliana landsberg
aaattaacagagactttttagttttgcaaaggcgatatacagatataagattcatctgtatattaagcacacacaatattttatcaaaaagtaaagatcgagtttgattacaaatgagagtggaactcgtatgagagatggtcatgttcgacccatccgcaatcatgacatcatcaccaccattgtatggctggtgaagagctaagttgttgagatcagatgttagatggtgtgttgcacttgagtcaaggagccacgggttggtcgcgtacgatgaaccaacagcgagattggcacgtggttgccaaggcttgaacggattggtaagagacagagacgacatgactgaagtgattggagctgggggcatcgcctagcattgtggcctcaaaactgacatttgcctaagaacggcttcgatacacgggtgtcagaacgactgttgttttgggactgagatggttgccagttggagttgttgttgttgttagagcgtcttccattgttgttgtagcggttgttattgttgttgtgttgagcaacatgagcagagattggaaaattggttggttgtgcagcagcagtgaggagtctcccttcatgatttagtaatctctcatgaacttctgtaactgatgatctctgccttcaatttgatcaatcacagtcttgtattcttctagcagcccgataaggatcttctcaatgatatcttcatggtatgcaggtctgctaagtaaggccatctcatcctatcgtatcgtgagaccattcatgtactcatcaattttttt

SEQ ID NO: 33631 - DNA, 5576 bp, Arabidopsis thaliana landsberg
gtcgaatcccaccataattactccattgcctcacatgtacgtcatcaaagacctagtcgtcgacctcactaatttttaccaacaatacaagtaagtgaagctagctaccttctttaatcccatataaagtttctcacactttcaacattatggatgtcgaacaagtatatatgatggtttcatgcaaaattgaggaaaagaaacataaaacttgatttaagtgaatacttgcagcatagcttaactttgtgaaatcacaaagtgtttgaatcatattcatgtggaactaactattgtgatgtgctgtatttggaataaaagatcaatggagccatggttaaagacgaggaagcctccaaaagacggacgcgaacaccggcaatcaccaaaagacaggaagaaactagacgggctatacgaatgcatattggcgcgtgttgtaccacatcatgtccttcttattggtggaaccccgaggagtttccaggacctgcggctttactacaagcgtaccgttggatcagcgataggtaaaaaaaaggtgaagattaaaagccagtctctcaaaaacttggttttcactgttcatttttattttggtttgacgcagccgcgatgaatacagagaagagaggctacaggcaataactgagagtgaaaccaaagtatatagatgcagagcaatcaagaactgtacggccacttgtcctaaaggacttaacccagctagtgccattttgaaaatgaagtctaagcatttgctctccgatccgttagtgagaacagagagtgtctagcttcaacatgacttggaccggtcatatatattatgtaaaagctctctctctctctggatactcattgcaataagaatcaatgtttaaaacttttaatacgtgtctctctctactccttttattgatataactttctagaaaagatcatcaaacacgttttgttacataaaaagggaactacgtgctctccataaaatcatctaaatatagagtcaattggagaaaaacaccgattaatttaaggacaaatcgcccactttctttctaaatattcgttcttctctcttacacgaccgagtcagcacgcaacaaccataataatttttagaaaaattaaaatcaaataaccaaaaacaagaaaaagtaagagctgacaaagagaacagagaaatagaggtgattaactaaccagtaatgcattggcaccaactttcaaactcaccaccaactcattttgacgtcgaataacaataacaaaattacataaacatataatttccaatcgtttttcgtctttccttttttttcacctaaactattagtcgcttatttttcatttccgtagtaaaaaccaaaaatcataatgacacaatatataaaattaatgacaccaatacaaaacacgaaacggaagaatcttcgttcctctttaccgtccggccgagaaaagcctaatcacatctttctcctctattcttctttttaaaacatgagatctctctctcttctcatcaccattgatctctggttttcataatctattctttgattcttattctatctctgaattttgatttgttcttcgggggagatagggttttacaattctcaggccggttcttgagatggaggagaacacggcggtggctgcggcggagagaagatcaggttgtggtttattgagtgtaatgtttggtagacgtggcttgtggtccaagaaatctaccgctgtcgaaaacggtagccagaaaagcacatctacggctgcgaccgcaacaagcaacattcaattcactaaatctccgggcaccgagttaaagaagccgcgtgatgatcagaaagtttccgctgagccaatccagaataacaagatccagaacaaccaaaatcacaaccagagatccgtagttccatcaaaaccctcgtcaaatcagtaccctaataaccatcaattagggacttacgagaatcaccaacgaagtagttataacaacaatagtaatagtgttgatccatatcgaggaggaggaggacagaggaaagtgccaagagaagccattggtttatcgggtgagcttgaaagcatgatcacggatcatcagaaagcaaaaggaaccaatggattggttcgtgcatcttctagcaatataatgttatatggtaatcttggcaatttgaatcagactggacctgtaactgcgggtgtaaattacggtaataacaatggatatggcgtgaagaggacgacaatgggggctgcaacggcgacgacaacaaagagtcaagatcaatcaggatctttgtgtagagcaatctcaacaagaatggatccggaaactttgaagatcatggggaatgaagattacaagatatgggaatttcgcagaggctttagcattgtatgaagcaaccattgcaattgatccaaacaaagctgcttaccgtagcaacaagagcgcggctttgaccgccctagggagaatccttgacgcggtttttgaatgcagagaagcaatcagaattgagcctcattaccacagagcacatcataggttgggtaacttgtacctcaggtaatctcaaaacctcacaattattactttttcttaaaaaacgttattaagaatctcacaaatttcgataggttaggagaagtggagaaatcgatatatcatttcaaacattcgggtcccgaagctgatcgtgaagacattgcaaaggcgaaaacggtacagacacatctcaacaaatgcacagaagctaagagattacgagattggaatggtttgattacggagacaacaaacacaatctcttcaggagctgatgcagcccctcaggtctatgcattgcaagcagaagctttgttgaagacacatagacatcaagaagctgatgatgctttgtctagatgtccggttttcgatattgatgctagtactaggtactacggaccggtcggttatgctggtttcttggtcgtccgtgctcaggttcacttagcgtctggcaggtttgttttgttctgttcttctttacaattcttggtttattacagtaaccggtattcaatttgataattccggtttcacatcccaaaacctggtatctcaaatttgatttaccgggttcatgttacattttttggttttcttgtttatataacatggtaaaaactagagttatactgaaaattcggtctgtattggttttattgtttgaaactcggtatagagttatgaactggtttttaatttgaaaattccggtttaatttgattttatcagattcgacgaggcggtggaggcgatccaacgcgccgggaagctggacgggaataaccgagaggtgattatgatttcacgacgggcacaagcggtgactgaagctcggtttaaaggaaacgagctgtttaaatctggacggttccaagaggcgtgcgccgcttatggtgagggattagatcacgatccacgaaactctgttttgctctgtaaccgcgcggcttgtcggtcaaaattgggtcaatttgataaatctatagaggattgcacggcggctctctccgtccggccgggatatggtaaggctcgcctcagaagagccgattgtaacgccaaggtaacaataaaaactagtggggtcgatataaaattttgagaaaatttgggacttgtttgtaattattaattaattgcggatgcagatcgaaaagtgggaattagcggtgggtgactacgagatattgaaaaaggattcgccggaggatgagcaagttatcagaggattatcagaggctcaacaacaactcatgaaacgtagtggacaagactcttgagaatttttccggtgaataaaaaccagtaaacaaccgtgagggatatatggattgagaaaagaaaacagccggaatattccatgtttgattttcttttttgggctggcaaaaatgacaaatcgtgtgaattctctaatttttatttttgggttttgaatgattaaattgtttgtataggaatgagattgtgggaatactgtatcttagcattttcaaaaaccaaaatttgtccatgaaaaaaaatatcaaaattttccgatgtcgagaaatatatacgtcggagtagtagagtacctttgggcaagtggctacggccacctatgccggtctttgcattcggagcttgctactccaaaatcttggcttagtgggttttaaaatacactggacctcgaccaatatacccctacaaaaaataattagttgggcccgttaaggcccatatcatttgttaagaataataacatttcatagatgtttcactatttcattctcaaaacactccatagatgttttgatcttaactctctccatgttcttttataatattatacattgatcactcgaatatgaagcagtgtaatacaatgataacacagttgttttcattttcattattcgagaaaaaaaaaacacaaattctcaatcacacacgtaaacatgacatttgacacataaataatctcccactacatcgtgggaataacgactcgccgattcttgaccaagtccgagcaatgatttctaatcgccgacagctcatacggtgaagcatcacgagccagccattgctccacttcaaacttctcctgtgaacaacttctccgacggctctcactcatggtcacttccacgtaattacaataccaaccgtgatgatcaccagagccatcggatgtcaaattcattgcacaaaccggacctgagaggcaagaacctaaaccactgaaaatgtcgagattgcccctctcgaaatagtcatgaaatggacccattaaacctccccatgacaccaaatcggagataaccgcgtcttgaccgtaactgtcgtaaagacggaggctcatgacggagtctgtaccggctttccatgccgtaccggttcgtatgtaaaccgtgaacacgcacttgtcttcatcattgtccaactaattaaataacattcttatcattaaagatgtcgcaatttatttgtagtatacggtttgtaggtgtatttgcattttgcaaggaagtgacttactggtagagcgattgcgacggtggtgaggaggaggagacggaggaggatcgcggagctaccgcgtgacatctttgtctgaaatgactctttttagttagtagagccaaattttatgaaatcgaagaatgttgaaaactttgaaatttattgtactcctctgcttgttcgcttaggcgaagattaataaaataagattttaagatatactaattttttgtcttgagagattacaataataatgcagctattaatagtcaatagtttatgtggaattgtggatattccggtgctgtagcctatatccgttggaactaatgacttgtttgattttttccaacagatatgtttttttttttgtcaactgctgcatcatcccatgttcgttatcgggattagaatttttcaattgggcttgggtttgggcttatataaaccagatcagaagttgagttttgttttgaacttacgagattattaa

SEQ ID NO: 33632 - DNA, 5929 bp, Arabidopsis thaliana landsberg
caaatgtgtatatcttatcgagttcattgagagaatacatgaaatgatagaaatgtcaggtttttgacaaacaaagaaatagccgcactgccaaacactttgatgatctgttgttgttgacgtgtaagtatcataatcaacatcaatattgaagtaggatgaattctcttgagtcattcttattgcaatctttttcgaagattgaatacattcgttgattttctattatactcttttcaaaaaaagttcatcctcatttttcatcaaactcttgttagattcttgttcatttacatcatcctcttttaagaaatctatctcatatgcatgaacaatctgataatatattgtcattcatagtgtaatgactatcaaatatgtatcttgtttcgaagatctttgagatagaaatggatgacaaaaacaatccatgtaggtagaggacaaaattgtacttatgaaatatatcctgtgaataagtgcttctcggcacgtgactcataatccctcgcacgtgacttgcttcgtcactttcgtaaaaccccttgactgtgtttttgcttcttccgccatcaaaatcaaaactttcaaaacctccaaaatccaatttttatctcatgaatctctgttgcaaatctctatgcatatacgtacacatactctatatgtgtgtacgtttagctctttgttgcttgatcatggcaatcttcagatctctcttctgtctttctcttgtttcgcagtgcgatttaagcagattgattgctggattttggaattggaaggacgtttatctgctttctgtgagttttttcataaacccttattcttcttttgctctttagccttttcttatatgattttagaccgtttggtttatgggttcttgtgtgtttgaatccatcgaagttggtgggattttattttgaaatgggttttgaaatctatgcaggaatttgaaattttgcaaccgaggacttgaaaatgggagctaagtgttgcagaggtcaccgaggatcagtggtggaatcaaatggttccgtgatcttgtcgtaagttctgaggctgaattattgaagtgaatctcttctataagtatcgaaaagtccaacactttgaataagttttgtagccagtctttgagaattgtctactagttaaatgctttgataaggaatatatggaatgcaacttagtatgtcactgaaacatttatttctgcaacagtatatccgagtctatatttacttaaccattctgcttttgcctatgtaggttagctgacctagaggtccaagctactggtaagcgaagtttgattcttaatattttggtacctacgttattcgtcttttcttgagtgaaacctatgggctaaggagacactcttgtgattttagaccttagggagatgactgtggtagaggcaagagatgctgctggaccatcagaaccaagacctccaagtcctaccttgaggccttcagaagttgaggagacatccgagcctgtatgtcagggatcactagtagaaacctctaatactgatgatgctggaccatcagaaccaaatccaccaagtcctaccttgaggccttcagaagttgagaagatatacgtgcctgtatgtcagggatcactagcagaaacctctaatcttgatcaagatggggtgtcaagttatgaagcatcgaatattttttggagtactgggtccttatcagacccgatcccaagtggtttttacactgtgatcccggtaagctatctttaggttggtattatctttgtccaataatatttcagttagctttattaatgcttggttacgtgctgctgtttgtcaacaatcattttcttatcttattatgttgttgaatttttcaacaggttgagagattgatgcattttaaaagcattcctacattggaagaaattaatgcgctgggggaagatcgtcttaaggctgatgcgatttttgtagatcttaagaacgatatacagcttgttttgataaaggagtttgtcatcaaacttgtcacaggattggactccgataaagttattaagaaaattgctggactggtaagaatgggcgagcatctttttatcatctcattttctagtgaactaactttggcgacaatgcatgtcattttgttactttatcttatcgctgcatgcaataaatatttggttctgaataagaaaacaaataactgtaatcccatttattagactcttaaggcacatcacattatttcagcaacctcattatattcttttagattatcgggaaatctgaattggatttttccttcttatggcaggtggcaaatatatataaaagaaaaactctgcagagtccggcaagaacgctgcaatattttgacgttcaagggtttaccctgctaggacaaatcaagcatggttcttgtcgtgcacgagcaatcctctttaaagttctagctgatgctgttggtcttgacagtaagcttgtaatggtatgtactgtataaaaacgtgatcagtggctttggttataactccaatttcctcatgtcattgattggttctgataacttggcatttcggttaaatttcttgatcagggtttccctactgatctgagattttctgctagcatcgactcatataatcatatctctgctgtggttgagctcaataatgttgaaatgctagtcgaccttaagcgatgtcctggtcagcttaaacccttctcacccaaggcagtttatatggctcatatctcaatggcatggcagcctgattttgtagacaataacccttgtgcttcaccattggagccaaacagtcccatggaacggtctggtccaccatctgcattacaatccggtttaaggtgataagcatacttgtttagttttcttgattatgtttgtatatttgctaccatatatatcttatgtttctctatagggcaagcaaaagcgttatgcacgtataaaagtaacttttgttgtttcctcagtcgttcactaggcgagccaaacatagctactgaagttttgcggagaaaggtcatcaaggaaccgccacctgctgatttcaggttaaattgttagtcaatatatatttcctttcaacagtggtgtagttttgataaactttttcaatgctaagtagttgtatatagattccatgctacttctctcttaaaacttgggtgtcgtcatgttccctcaaattctgtcaattatctttattgataaaaggtgaaatatggtaaccattaaagtccattctagtcaactacaatgcaagagctatgagttacgttgtgagagtattgggcttaactatcagatgaggtgaattcaatatgtactgcaattgatgagtttgcttcaaaagcatatatgatttttgtagctgcaaaagttcatggcattttcttagtcattattgtctggcttacaagaacgttttggctgaaaaaaatggttgtaatgcataaagaaggctgatgttttcattttttaatgtgcagtggtaactcaggagcagcggaatcggaaagtaagagaacaaatggaaggtgtatgaatactcctgatctaaacaatgacattgccaggcaagtgtttgttttataagacaaaaaaacatgtgttcacagtcatccttatgttaccaaatgaggttgctgtcatttcgttttttattgtgaacattggcctacataactggcggtacaatctcttatggaaattatataaaaatttgacaataggcaaagatcttgcgttattatctttcataaatcttgagcaccacataatataactaaactagcatttgcttgcatcatgtacagacttccacatatggtagtgagagtttgtagcatttgtatcggctgttgttgtcactaatatttgaatggttttatcaattatcttttgtttaaagtaaacttaacaatctgtttcagggcaacaatgatgcagagtgacctcttgaaagagcgaggtgttgatgattcatctccttactctccagatgaaaagaatgtatgtaacagttttcctgaattctcatattgatatataaaggcgtcttgatatatgcgtcattgaaatacttatggtatgtttggcagctatgcgaactacagaacactttctgtatcttttctcttcgcctaagttgaaatgacagttcatgaaattagaaagaggaattttagggaaagtgctggtgttgtgattctttgtttgagaaaacaaaagcagaacatccatttcctgtttcaataagtcgcaataaaaaatggaaaattgttctatgctgttataagaaaatatttgtgagaagagtatggatatctcagaattttttactaaatttccttataagggcttatttctgcttctaggtctctggtttccagcttgattcccatgacctagtgtctggtgaatgttcgacagtatatccgcggaagtcaatatcattgccgtcatctccgcgaagctatcaaattcaattatctgaaagaagtgaacattcacctcaagaaataagccacatttggaatgaagtgctggagtctccaatgttccagaataaacctttgttaccatttgaagaatggaacatagatttctccaagttgaaagttggggcttctgttgggagtggtaagaataagaatcgtttttatatcaagacgtgtggagtgttttcgaattccatctatctgttgtgttaggcatatatcttcagcaagaaaacttggatatggtctgtgagcataagtatacattttcctttgaaaccctattaactcttttttgttgttatatgtcattcaggaacttctggagtagtatgtcgtggcgtctggaataaaactgaagttgcgatcaagatatttcttggacaacagcttacagctgagaacatgaaagttttctgcaatgagatatctattcttaggtatgtgtcctttaattttttctgtgcctttgcaacttatcttctcacctttcttcctgtcatctcttctgtgcagccgtcttcaacatcacaatggtaaacatcatctatttctttttttgctttgattacttgtccaacgatcctcaagcggtcaatttgtaagattttaaaaccatttttcaagtaacgaggcatgtcatgacatcttgtagttattctgctccttggagcatgcacaaagcctcctcagttatcactggtcacagagtatatgagtacggggtccttgtatgatgtgatccgtaccagaaaaaaggagttgagctggcaaaggaaactaaagattctggctgaaatttgcaggtgtttcatttctacactaaatactttccgttaatattttcgccacatttagagctttctagagacactccatagatttgatcaccaagttctcataaggatcaagattcacaccgtctccttttaacataacaaaacttagaaatagtgccaggaagctctcataatcatttgtatttttttgtttcacaggggtttgatgtacatacacaagatggggatagtccaccgtgatctaaccagtgcgaactgcctgttaaacaagtcgatagtcaagatctgtgattttgggctctcgagaaggatgacaggtacggcagtgaaagatactgaagctgcaggaactcctgagtggatggctcctgaacttatccgcaatgaacccgtcgcagaaaaaagcgacatctttagctttggtgttataatgtgggaacttagcactctatccaagccctggaaaggagtcccaaaagaaaaagtatgttcgttgaacgtgaaaaacacttggtaactaaataaaaacatagaatctaaacccggctcttggtatttttgctttcaggtcattcatatcgtgcaa

SEQ ID NO: 33633 - DNA, 1695 bp, Arabidopsis thaliana landsberg
ataaataatatatagtgtcgctcttcatctctaaaaccaaattcttatgaaggatcggttctccgctatcaccaatcttcatggagatcataaacaggtaatttcaaacttcaaattcatttttcaatttaggtttagaattgaatcgaattggagattttgattcaattgattagcaattacagctcaaattagggtttatcatgtgagatctacattgattggattaataagctatctaaaattaggattcttcatgatgttgtttggggaaaattgaaattctaaatagaattagaagttctacagaatcatttgatacaattgtatagttattgatgaatctctatgtattgtgtattctaaacgttgttttgctttgtgataatttgcaggcaatatttggagtctatgttggtcatggaggagttaaagcggctgagtttgcagctaagaacttagataagaacattgtagaagaagtagttggtaaaagacacgagttggagatagctgaagcggtggaaacgtagttacttgactacagacgcaacgtttcttaaggaggaaggttttaagggtggttcatcctgtgtcacggctttggttagcgaagggagccttgttgtgtcaaacgccggtgactgtcgtgctgttatgagtgtaggaggtgtagctaaagttttattttctgatcattgtccgtctagagatgatgaacggaaaagaattgaaaccacgggaggatatgttgatacgtttcacgttgtggagaatccagggatccttagttgtgccaagaggaatcggagatgctcaacttaagaaatgggttatagctgaaccagagacaaagatttcgagaatcgagcatgaccatgagtttttgatcttggcatctgatggtttatgggataaagtgagtaaccaagaagcagtagacattgctcgtcctctctgcttaggaaccgagaagccattgttgttagctgcctgtaagaagcttgtcgatttatctgcttcacgaggctcgtctgatgatatcagtgtgatgttgatccctttacgccagttcatatagaaaagagaggcatcttagaagattttagatatatgataaacgttagaaatttggaggttttatatgatttagttcttttgtttaacttgatccattcatttatttattctttctaacttagtgaacaaagctaaactcattgtggcttatgattacttgtatgattcgagcattggccgaaattaatctaataatcggttcgttatatatcttgtcatatgtttcaagatcctgcaaatttctctacagtacaataccaacacagtgcttggaagagattgactcaatctgaatcaaagattccttgttttgatgaatttcaattcacaactccaacatacatgaagttcatattgagatgcaacgtgaaagaaatcgacatgacaagtgatcctggtcaaagagtcacacggccaatattgttttaaagtggaacgaaggtacaagagaagttgatcgagaaaacaagttcaaccataaagagagttttcttaggaaaaaggagaaaaacaaacaaagtcctcaagtttgacaggctaacataaacaaatgggccgaacacaaacccgaatagcccaaaatatattatttgttcacatgtgtagtttaattag

SEQ ID NO: 33634 - DNA, 2624 bp, Arabidopsis thaliana landsberg
ccagcatcctctagacccatagctttcgtcgtctcagacaacaacccttgttcgctttctttctctcggttgcttttgtcggctctgtttcagttcagttctttggattgtttcaatcaagaactgaaagaaacaaagcatttttgattacacgtggcacttgatattacagtgagttaatacaaaattcgagggtacacattaaagaagaaacttggggcacatagggaccgtaccataatggcgcaaaaaaaaaaaaaagggaccgaaccacaaaaaaatcattttgagtatgaccatgaaaagttgataactgctaggagacatcatcatctgtacagaggaaccattcttgtttattttttttgctaagctttgaaattgtcctttgctgttcttataataacccagagcttctgcttcatctgctcttcttatcgaatactacctatcccaagttgcatttgtttatgtgatcttttaaatcatattaacaacaacagtttgaatatagacatagctaacaatcatttcttttaggaattgatcactaattatcttagttgttgttgattcagctggtacgtcattcattcttgataacataatacgaggggatggtgtggaaaacaactgtacatgtggttccaaaaccaataaaataaaaaggaatatgaagaagagaacatttgataataacgaatgatatggtggttccacacgaacggaaagtcaaaaggggtttattaataatttatttcaacacgagaataagtgaatgtgatgatgatgatggtataacgataatcaaatgcccaaaataattaaaatcctacgaataatgaagagcttctgacttggtacacatactcaaattctcttacaaccgaaaaccaaaataatttaaaaagcaaaagcgctgactccaccctggctctctaaaccaattacatcccatatataatcaaacgtcctttggtgatcaatcatatatataactctcatatctcaaaaataacaaacgcattccttgacgacggtccaatgggggacaaaaataaggacgatagctctagccaaagcaaagcagtgcgtaaggaaaaaagagcgttccttttcaggaaatggacccgggttgatgtaatgagagtttcggctgttggggctgtgcatctattgtgtctattggctccgtttaactacacatgggaagctttccggtttgctgctatggtcggtatatcgactaatctcagcattacattttcataccataggaacttgactcaccgaagctttaagcttcctaaatggcttgaatatccattcgcttactctgcccttttcgcgcttcaggtaaatatatattgttttcaccgaaaataccactataaccaatatgtatcctcaattatctttgtatttttttctcccagggtcatccaatagattgggtgagtacacataggttccatcaccagttcacagattcggaccgtgacccacatagtcctatcgaaggattttggttcagtcacgtcttttggatattcgacaccagttacatcagagaaaaggtaacaaaatgtttaaagcctttacaaacccaacatatgtgaatcgaagttatcatgagattttaatattagaagatctgtgagtaactaaagacgactatgtacgatgttgcaataatgtaacagtgtggaggacgtgacaacgtgatggacttgaagcaacaatggttctataggtttctaaaaaagacgttggttctccacatcttagcattttggatcctcgtctacttatggggtggtctaccttacctaacttggactgtggtaaactttcaatttactttttactattactttgtttatatcaaatggaaatcggattatacatgatcaattttatactactttttgaatgtacgtagcgaaatatcacgatttttcactattgaagaaaatttcattaattgataaattaaaacgttttgtgatttacactgctgctaacaaaaacttatttaattttcattttcaattatttcattattcctctatttcactacgttggaaaacagggttttggaggagtaattggttaccatgggacttggctcgtaaattcggcatgccatatttgtggttcgcaagcgtggcaaaccaatgacacctcacgtaacgtttggtattttatataccctctctattctttatagaccaataaaccttgatcgaaatagataaaccttaaccgaaactaaaattgagtgaatgtggaatggagcaggtggctagcgctattgactatgggagagagctggcacaacaaccaccatgcctttgagacgtcggctaggcacggactagaatggtatcagttagacataacttggtacctcatttggttcttccaggctctcggtttagccaccaatgtcaaattacctaccgatgctcagaaacgcaagatggctatccgtcgttaatctcagctctaattcgatctatttcgttacttatatgtactcatcattcactcttttgctatttatgtaaaactgttaagaataatctgttctcatgaacttgtaaaccagttgatccaacacc

SEQ ID NO: 33635 - DNA, 1785 bp, Arabidopsis thaliana landsberg
gcaggtcgactctagaggatccctgttggtgatggccgcgattttctctgggttggcctcgatgccttgttcggagacgatgaaccctaggagcatgcctcgggggactccgaagacacacttctcgggattgagttttatgcccttcgctcttaggcacctgaatatcacctcaaggtcagagaggaggttggaggcttccttgttttgataacgatatcatcgacgtaagcctcgaccgttctgccgatgtgctctccgaacacatggttcatgtacctttggtatgttgcacctgcattcctcaagccaaatggcatagtggtataacaatacatgccaaaaggtgtgacaaaagaagtcgcgagctggtcggattctttcatcttgatttggtgataactgaataggcatcaatgaaagacagggtttcacaccagcagtggagtcacaatttgatcgatgcgaggcagagggtagggcacctttggacatgctttatttaaccagtgtagtctcgcacatcctccatttcccaccttttttctttacaagcacagggttagctaaccattctggatggaatacctctttgatgaaccctgcagccattagcttgtggacctcctcgcctatggcctacgcttttcttcatcaaaacggtgcaggtgctgcttcacgggtcgggcaccggctcagatgtccagcgagtgctcagcgacatccctcagtatgtcgggcatgtccgaggaactccacgcaaaaatttcagcatttgcgcggagaaagtcgacgagcattgcttcctatttggggtcgagctcggagccgatcctgactttcttgccggtgtcgttgctggggtcgagagagacggatttaactgcctcggctggttcgaagttgccagcgtggcgcttcgcatcaggcgcctccttggagaggcaatccaggtcggcgatgagggccttggactcggcgatggtctcagcgtagagctgtgagtcgccacgagcgtcgaggcgccgaacccctagttcgatggtgatgcgcaacccatttaccaaggcctcgtattcggccacattgtttgacgccagaaaatggaggcatattacataacgcacatgtttttcgaggggtgagacgaagagcaagccagcgcctgctctggttttcataagcgacccaacgaagtacatggtccaaagttcggcctggattggagctgttggtaattgggtgtcggtccattcagccaggaagtcagccaagacttaggattttatggccttccgaggggcaaatgaaagtgtttccccatgagttccactacccatttcgctatcctacccgaggcctctcgggactggatgatctctcccagaggaaaggatgacaccacagtcaccggggagactcgaagtagtgtcgcagttccgccatgttaggatcactgcgtagagcagcttctggatctgcgggtagcgaactttggtctcggatagcacttcgctgatgaagtagactggcctctggatgagcactgcatgcccttcttctcgtctctcgactacgaccgcggcgctgaccacctgagtggttgcggctacgtagatcaagagggcttctcccgcagcgggggcaccaagatgggtgcatttgtaaggagtgccttcaagttcctgagggcttctttggcctcgggggtccaagtgaagcgctcggtcttctttaagaggcggtacatgggcaatcctttttgccaaggcgtgagatgaaacg

SEQ ID NO: 33636 - DNA, 2322 bp, Arabidopsis thaliana landsberg
aaagtaagcaattcttctttgttcttcgtttaggctggttttccctctttgtgattcaaatgtttctcgtcattcaagtttccgactttattgtgccattgactctattgttggccttgttagatcgagaagaaaataatctactgcagtgattaaaatcactactgcctcattatatctgatgtgagtgaatcgatttgaaaaaaaggtaaatgatgaacgcaccataatcttaggactctgtttttttttttcctttttctttcttttttactcaagtcaagttatcatctctttctgaagttttagaagtgctaaaaattatagtattttaccattgatgttgtagaaagatgattttaaatttttttcttactgaagatgtaaaaatatcataatctccacagaaatattgggtgatttttgtggagaaaattccatctcttcccctcatttaacaaaactcatagacaagacgaagggctcaccttatggtttgccacggaccaccttagctctcctcgataaaggcctctgctttctctctgttttctcctatgtattggttcatattttagtctaatttttatattagttttcagctaaagaaccacattcattggaaaaaaataaaattcgtcaaaaatcataatttaataaaaaaatagaattttagaaaagtttttatgtttgtactatatcactaattcaaattatactaagggtatatatgtaaatttcatataaatttttgtaacaaaaccctaatttcaagatgataaaagttatatcgccgccacaacatcatgattcaattactaaggatatatctgtatatttcatatggatttgcatagaaaaaccctaatttcaagatcataaaagtttgtacgcagccaaaacaccaaatcagattctaaaaggggtttacataagaatctaggttataagagtatgaaacacccatattcttatgaaatttagagtcaaattcatttaaaagaaaaagcaatggatcattttacaaggtaataaggaagaagatgggtcatgggccatatagtattgtaataggcttaaaccaagtttagctgtgttagattagggtacttaagtcattaaccctcatagtcgaatcttggtgactgttgttgatgcctcccaattttatacgcttcacagacggaccttgagtgttggcgatatctttgaatgagtttaacagtggagatttctccggttgaggcacttgatcattgttgttgcttacaagctccatactcgttgaaacagggtattcttgaaagtaatcgatctctttggatgagtttaacggtggagacttctccggttgaggcacttgatcaatgttgttgcttacaagctccatgctcgttgaaacagggtattcttgaaagtaatcgatctctttggatgagtttaacggtgtagatttctccggttgaggcacttgatcactgttgttgcttacaagctccatgctcgttgaaatagggtattcttgaaagtaaacgatctctttgaatgagttaaacggtgtagatttctccggttaaagcacgtgatcgtcgttgttgatcccaaacttgacgctcgtcgaaacaggggaatctagaaagttatcgatatctatggatgagtttaaaggtgaagatatatcggtttgaagcacttgatcgttgttgggattagggttagggttaggttcaacgaagatctggatatgagagtggttgaggatcacacattgtttgatatcaagatgatcttgaagaacaacaaaatggaagattagggtttgtctgtaaacaaggatacgttgatacttctcgatcttctgtttgatttctaacactgtatcccagtaacccaattcaatctcgaacttgtagctgaagacaaaatcaatccttttaagttttcattgatagtttgcttaactttacaagaggagattgttcttgcttaaatacaaagactgagacttagctaaaccctaaggagacaagacatgtgtcatcatcaagttgagttctcacaatcaagggctagaaactgattctccagcttgagggtaaatgtctttaccgtactgccagctccgtttatgtcattacttgggaagcttccagactcttgaacatttgaagctgatgaccgttgcctccatatttgtgtcttgggcttatgttctgcgaagcccattttcatttgtttctttgctgcattagatgaaacgaaaagtgtattgacatttgccagagaaaccttctactctgttggaggcttatctaaactgtg

SEQ ID NO: 33637 - DNA, 3578 bp, Arabidopsis thaliana landsberg
caaacagaaaatgatgaagctgtgttgttgattttcatttgtgatctggtaatagacaatccggtagaaagcttaaacccaatcatactcgattacaatgtcggagatgctgaacaagaagatgaattccgatgtaatttatcgtcttcagtcgaagatgatgaagagtactaaatgtgtgctttatatgtatatttatttgaaaaatgctgtttaagaatatatcatataatgtttaattatttgaataaatattacataaaccttataattttcatgaatatttataagtattattaatttgttgggctgtcaacatcccaagcccaagcccaaacccaataaacttaacgacgaaaatacgactaacagacgacagacgtttaattatattgggctttcaaatttcgagcccaaacccaaaagaattaacgactaacgtgcgacaaacgttttattagttgggctattaaattccaaagcccaaacctaataatgttaacgacgatagtacgactaacatgcgacacactattaatttgtcgggcttttaaattctgaagcccaagcccaataaaaatgaacgagtatccaacgactattcggcgacacttgtctttattgttgggctttcatatttcgcggcccaaacccaataatgctaacgacgaaaatacgactaaattgcgactacctgtataaagaaaaccctaattcgatcgattcacttctcatttcatccaaacaaaacctcttcgatcttcttcttcaacttcttcttcgatccattttgaattgacttctccttcttctatctgttattcgatctgttcttcgtctcatctctacataaacccaatcgagttcttcttcttcttcttagatctcattcgattcgaatcatcttcgatctcttcgctttcttctactctttgatctcttcgctttcttcagttcttcgatctcttcgtctctcttcatcgatgcctaacgccggtcgtggaggttcacgaaagcgggagataacccccaacgttactcagagagccggagggtcaacaccgcttggaagacccgcttcgttgcctcagcagtacgacttcactccggtgtcggcgcctcaatttcctcagacgcagccgccagagcctcaacgtcagccccccactaccgcaactatctggcgctgcatcaactattccagagctccaccactccgtgtgtagatccgccgccgccgcgatctgaagaggtgcagtttaatccaccgccagaagctcctctaaaccaagatcaaccggagtctccaattgccaactctcaggcacacaaccatccatcttctcaaggcaacaactttcaagagggagctcctcaattgttgtcggagctacaagaagactcggggagggctctcaatgacatacttatggttctcggagggaaatgtggaccactatattgtctcctattcccaagccgaagactgaatggtatgtgctcttcctcaaccctattagattttttagattgtctattagcttgtgttaggttgcagcaatgattagcttgtgttaggttgtgtcttgattagcttgtgttaggttgtgtcttgattagcttgtgttagattgtggtggattgctcttgtgtccgcttcgttaatttgttgtgaacatagattgtgtcttgattttcttgtattagattgtttcattggattggcttcttgctctcttgtgttcgcttgctatcttgtgtgtttgacctattttgtgtgaacatagatcttgtcttgattagcttgtgtaagattatggttgcttgctatcttgtgtgaacatagtggtcatgtctagaaccgcttgtgttctgttgtggtggcttgctatcttgtgttctattgtggtggcttgctctcttgtgttcgcttgctatcttgtgttctgttgtggtggcttgctctcttgtgaacgcttgctatcttctgtgaagtggtcatgtctagcaatacttgtgttctgttgtggtggcttgctgatgagtgttttatttcatttcagtcttttacctaaaagaccacacgactactacaagtgcacagtatatcggagtagtattttaggatcgaatccacaaggagagaaggagttcagagaaatccttaagaagagagtgaagctaggaccaaaataaagagagggggttgatgtatgctatgagtaactaaactaaaagactactaactaaactaaacgataaactataagagagaagcgttacgtcatcgggggtttctccggatgttcatggttcaataataaggtatagatctcaatctaggtgataacatggctaggtttgtttacttccaaattcccgaacatacgaaactctatcaaaactagttaaccctaacggctaataggtgaaaactggctattatcactagtatattgcgtactcagttgccctatcggctataggtgctaacatggtttcaaaatacaagatcaaagcattaagttcaaattcgattctagttcataagtccctatcactcggcgggcgtgcaacagttatagttctttattcagttgagttaggtcaagcatttaaacgagattttgccaaagaatgaaatacctaagggcaagtactaggtggcgttccggacatacaagcattaagaataaactcaactagaaggaatagtgtaaacaatcaaacaaagccatagaaaccaccaacctagatgtttgatctatttgtccccatgaattctcctttgaaaaccccctcaaacccaactagagaactactcgctatggcaaaggggctaatcaaagttgggttgagtaaaccataactaaaagatgaataaaacttaaaaggggtttagagattacttctttgaatgtagaatacaagaggcaaagctccaccttgagtcttacacgaaaccgagaaagagaaagagagagatggtgttcttcaagcttcaagaggtacggcagcaaggaggcagctcttggtgacggctagggtttgctggtgatgaaggcacacctagggttagggctaaggacaagtatttatacttgaggcctaagaattaggtttaggggtaagaacgtcattccgctggataagtaagtgatcgggccgagaagtgggcttcaaggcaagagcctaaaggtggcgacgcaaagagggaaagacttgggtgtgacctaatggtcggtggtgagctactaggagctgcccgagttcaagtctcatcggccagatgtgttttggactttttatttccaaacagccggttcttgacatgtcttcactcttcgggccatatcttccgaacggcttcatggattgcttcgattctacttcgacgtgaatcttgactcttctagatttccatccataccgaattatcttcatgccgagtccggcaaaaccttggccggatgctaaacttccgaagcactagaatgatcgtccccggatccctttagcttcaaaactattaaaacataattggaacctagaataggtgtttctcctcctattggctc

SEQ ID NO: 33638 - DNA, 626 bp, Arabidopsis thaliana landsberg
gtctaaaaaaaatcgatcgaaagctcaaaaactccatcttctttccccggggaactcacagaccctagatgaattgttaatcatcaatcatcgatttcaagatttagtctcgaaaggttttattttttttgtgcttgcgtcttaaatggagaatcgtaaaggaggaaactttagcgtacctagctccgaagctttgaccacgacgcttcgtaatgcgatccaagctttgggtcgtggtttcgatgttacatctgatgttcggcttctttattgcaaaggagctcctgggtcaagacttgttcgtatagaagaaggacaaaacagagatcttgagttgtctcatgggtttcttcttcctaatgtccctgctgatattgactgttcaccctgcaacagtggcacacaaagaatctctgtttgcagcttccatgaggtgaccccctaattttctacttctgatgttgaaatgccattcttagattcaacccctttttgtctttgtcttgattacgtatctacagttagatgatgtctgctctgtgtatttgtgaaaccactagttcataggacccctatctactttggacatgtctaaatttagaagctttacattgagctttaacttg

SEQ ID NO: 33639 - DNA, 628 bp, Arabidopsis thaliana landsberg
caagaaacattttcattacaaactctccaaatgctgtcagtatgtttttagtttcttgattctccttcctttcacttagcaacagatatttcttataactagattcagcattttcaagaatatctatgactgcctccaaactccgttcccattcattcgatggcgaaaacagttcacccaatttactaatgcgatcatcaagaaacacgttgaggagatcatcattccccctttcgtctatccccattcggactcggtttccgactaaaacaatattgccaagtccgtaagtagaatgttctgttgaagaagattccttaaatagcgccaagagccttgatgcaactgctactacagccgtgtttgtaggagtgcacacaactgttttgcaacttaggctgagaagagcaaacagaagagtagcgactgtctttgtgttaccggtaccagggggtccccatatcagtttcacactagtcttgtcgcggatttctcttgtctcaaggcaagccaaaattgcagattcttgagaagagttcaaattcgctgatcgaataatatctaacacatgattcccccaattcctagaagaaacagattgctctgtatcctgaaatattacaagaaa

SEQ ID NO: 33640 - DNA, 757 bp, Arabidopsis thaliana landsberg
gagctggattctacctcttggtaagagctcatgagatagccacatgatagaagctcctggtgttacaaagaattgaacaatataaccacaagatccggtttgaagttgacttggtgaacaatctcatcgtcgatcatcattccggcggttgtatattgagtatatgtggttgctctcccgatttcatgatcaaaacgttggatcaaacaaatcaagctgaatcgcctttggtatcgtcgacggagaaaccaaacaaaagagaaagctgagaagaaattcattttgtttaaaacaaacaatctatcataattagccacgtatgcgtttctaatgagtttccaaaaacctaattttaggaacgttcctaaaattcttgttgaatttttatttaatttaggcccattattctcttagagaccaactaagaaacccactaaaaactatcgatgaacttggtctaagtctttttgtcttacgtatagataaaaaaattgatatgtattgatgcaatctgaaaaaagatatccatgaaccatgatgctttaaaaaaagagttttctgcaaagaaaacattgtttggattagtccgaggaaaccatgaaatttgcatagattatttgctgacttcactcaagtttttgcttcctccaattttttcttctatgcgtttaagtaaaccagtcagatccaatggtaaacaataaaatggtcgacagtataaatgggcttttaagcagagtctttgggtttagaaatc

SEQ ID NO: 33641 - DNA, 583 bp, Arabidopsis thaliana landsberg
tattaaaaacactatgatacatattaattaccattataatttgttatgaaaataaaaacggagcaattttgtcataggttttttttttgtcaaccacacaaaaatggtttacaaattacaatgtaactttaaaaaatggtatacaactaccactaacaaccataggtcacaagaaaccacacttgctattttttctagatccaaatttcacaatttaaaaccacacaaattttctagaaggaatcaatatttggaatgccatttaataaaactttaactgttatttttaaatatattgaatttaaaacgaactttgaatgtttgtgtagttttagacgaacaactaatttgtgaagttagctaggtgatcaagatagaaaaaagttcgtgtgaatcatattttgttcatgaaaatttggtgtagtttatggttatgaggttatctcatatctatgtataaaattagaatgtagaattttgtctgacatacttgtttaaaacttaaaattatgatacatatatcacctattctttttaattcttaactttataatccaaaactgcaagatcatttaggcccatt

SEQ ID NO: 33642 - DNA, 532 bp, Arabidopsis thaliana landsberg
aagagccggtgaccagtcgaagttcacggaactgtcggccgtcaccgcgggcgtcaaggacgtacgggccgccgtcgaacaggcgcgccgcgatctgggcatgtacaaccgccagaccgtcctgttcgtcgacgaggtgcaccgcttcagcaagacccagcaggacgcgctgctgcccgccgtcgagaaccggtgggtgagcttcatcggcgccaccaccgagaacccctcgttcgagctcaactccgcgctgctctcacgctgccgtgtgcacgtgctggagtcgctgtcggtggacgacatcgtgcaggcgctgcgccgcgccctggccgaccgcgagcgcgggctgggcgagctggagctggacgtgcccgacgcctcgctgcggatgatcgcccaggctgccgacggtgacgtgcgccgcgcgctcaccctgctggaaatcgccgccgagctcgccgacggcggcagcatcggcgaggccacgctggagcaggtgctggccgaccgtacccgccgcttcgacaagaac

SEQ ID NO: 33643 - DNA, 608 bp, Arabidopsis thaliana landsberg
ggattgtgagggatcgtcttatgcagacattgcttctactgttactccaaactttgtcaactagtattgcagcgatcaaaccttttcttctttccatggcgatcaaaaccctaacctctcgtctccgtcttttgatcaggactgttactcctctctctatcagatctgtggagaatcatcttcacaagttgcttcttttgatcaaaaccctagctccgagatccaaggatttgaaacagaggaagagaataaccaaatcaatctactactacaagaaacacaaacagaggccaatgtcaatttggatgatgagatctgcttttggaatgatctatccaacgatgatgtgtttggtctaaacagctacttctgtctcgataccaccaatgcaagattccgactttagacgtcatgtctgatatgatgtggttgtaatctttagaacttgttctgattttgtctcattgtaaacagagattcttgatccaatttaatttttgtaaacctttttttccctttatgtggaccctttcgaagttgaatgtaattctgttaaatcagtttgccattctacttactagtttgttgatggtaaattcaagttagtg

SEQ ID NO: 33644 - DNA, 823 bp, Arabidopsis thaliana landsberg
aacctacacatctctttaaaaaaacaaaaatatatgagaaatgatgcaaaatttaatgaaacaagatttaaatataaagaagcaattgaaataatatttcatcattcatattcgttttttttgtcatgtcatgtttaattcagaaactatacagtcaacaaaaatacacctcagcagctctaatgaaccaattactaataaaaacccttagccgaaaagaacatcgaatccacatatcttgaaaaacgttggcccaaaataatattgatggagattcttttggtacaaacccttcttcatcaccaactctcgctgtcgtttctatcctctgaagttctatcgctccagttgacaaaatcaagttcataaaaataaaattcaatttggaggtatggtaaaagtaaaacataaatcataaatttagcagtcacaatttcccaaaaaaacatctaattattttaacaattaagttaattaacaaatatacagtcagcaactacttttttgggaaaaatgcctacaaaaaaaaccatgaacatgcctacactaataaaacacaaacttttcatcgtcaactctccccatcatctctaacctctgaagttgtatcgcttcagattcctaataaataaaaaaccaaaatcgccactgttaccaaacctccacttcctcaacattatcccctccgcatctttactcccgagacatctacttcaatggccactatcttcattctacatctctttgggtttcattataaaacaaaatctccctcaacacacagagaaaaaaaaaaaaaacgacctctcaatacaatcaaagt

SEQ ID NO: 33645 - DNA, 674 bp, Arabidopsis thaliana landsberg
ttgaatattatccggtatcatgttagtcattaattattgctccccctttagggggttagggggctaaagcacccccttagtgcttggtaaaaccatgttatttacatcgcgccttacggccattttaatggctttggcaaaggctttgaatattgcttcaattttatgatgctcgttctgcccttccgctttaatattcaggttgcacttagcggcatcactgaatgacttgaagaaatggtagaacatctctgtaggcatttcaccaattttttcgcgattaaattcagcctcccacactatccagttacggcccccgaaatcaatggctacctgtgcttccgcttcatccataggcaggcagaacccgtagcgctcaatgccccgcttatcagtgagcgctttggcaaatgcttcacccagggcaatgcctgtatcttctatggtatggtgttcatctatatgcaggtcgccttttgcttcaatggtcatatcgatcttaccatgccttgacacctggtcgagcatgtggtcgaaaaagcctatgccggtgctgatctgtgaacggccgcttccatccagtactagttcaatatgtatcagagtttcgttggtattgcggtcatgcactacggaccttgttcccagtgtgaggaaggtgtaaatatcctgcc

SEQ ID NO: 33646 - DNA, 6981 bp, Arabidopsis thaliana landsberg
acacggttgttcagtctctagaacgagggaatacattcaacaaaagcctcaaagattaaccgggcacggttggtaagagaactgcgatgaatagtcaaaggaatattcgattttctgtggaagcgattagtctttacagaagacttttcaagtcaagctttaatttatttcgaaaatatggagacaatccaatgatcaattcgtttcacagaaaataaataaaaaccaatcaaagaaaaaacgttctatggcaagatgataacaataatatggagcttgtgtttaatcttctgcctttcaaactcaatacttgttattgctaaagacttgtgtcttccagaccagagggatgctcttttggagttcaagaacgagttctctatcccaagccccgattctgatttgatgctgattcttcagacgacagcgaagtggaggaacaacactgattgctgttcttggggtggtatctcttgtgatcctaagacgggagtggtggttgagttagacctcggaaacagtgatctcaatggccgtctgagatctaatagcagcctgtttagactacaacatcttcagagcctagatctttcctacaatgatctttcgtgtaccctaccagattccatcggcaacttcaaatacttcagagttttgaacctccttggttgcaatctctttggagagattcctacatcacttagaagtctttcttacctcactgatcttgatctttcttataatgatgatctcaccggtgagatactggattcgatgggcaatctcaaacatttgagggttttgagtcttactagttgcaaattcaccggaaagattccttcttcactcggaaatcttacttatctcactgatcttgatctttcttggaattatttcactggtgagttaccagattcgatgggcaatctcaaatctttgagggttttgaatcttcatcgttgcaatttctttggaaagattcctacttcactcggaagtctttctaatctcactgatcttgatatttctaaaaatgagttcaccagtgaaggaccagattcgatgagcagcctaaaccgactaacagattttcaacttatgctactcaacttgagctcactcaccaatgtcgaccttagttctaaccagttcaaagctatgctcccatctaacatgagtagccctttcaaactggaggcttttgatattagtggaaattcattttctggaaccatcccctcttctcttttcatgatcccttcgttgattaaacttgacctgggaacaaacgacttcagcggtccacttaagattgggaatatctcttcaccatctaaccttcaagaattatacattggagaaaacaatatcaatgggccaattccaagatctatattgaaactagtcgggctctcggctcttagcctctctttctgggacacaggaggcattgttgatttcagcatcttcttgcagctcaagtctcttaggtcacttgatctttcagggattaatttgaatatcagttcatcgcaccatcttccctcacatatgatgcacttgattttatcatcctgcaatatttctcagtttcctaagtttctggaaaaccaaaccagtttgtatcatttagacatctctgccaatcaaattgaaggccaagtaccagagtggttatggagactaccagagttgcggtatgtaaacatttctcataattctttcaatggttttgaaggaccagcagatgttattcaagaacgtggagaactacatatgcttgacataagttcaaacacattccaggatccattccctttgttaccagtagactctatgattttcttgttcagctccaataatcgattttcgggagagattcctagaacaatatgcgaattggataatcttgtgatgcttgttttgtcaaacaacaacttcagcggttctattccaaggtgttttgagaatttaactctttcggtcttgcatcttcggaataacagcctctctggtatttttccagaggaagctatcagtcatcgcttgcaatcatttgatgttggtcacaaccttttctcaggagaacttcccaaatcattgatcaactgcagtgcactcgagtttctgaacgtggaagataaccgaatcaatgacacgtttccatcctggttgagattgttgcccaatctacaaatgcttgtccttcgttctaacgagttccatgggccaatatcttctcctcgagattctgtaagcttccccaagctgcgaatctttgacatttcagaaaatcatttcaatggagttttgtcatcagattactttgatggttggactacaatgttatcagtcgtagtagactttgtagttgaggtgtatatacttgggagaagttatcctaagtcggtggatttaacaaacaaaggattaaagatggagcttgttgggagtggtttcaaaatctacaaaaccatcgatgtctcgggaaacagactcgaaggagacatccccgagtccatcagtcttctcaaggaactgattgtgctcaacatgtcaaacaacgctttcacaggccatattccaccatctctatcaaacttgagcaatctccaatcgttggatctatctcaaaacagattatccggcagtatcccaccagagctcgggaaactcacatttctagcacggatgaacttctcgcacaacaggcttgaaggtccaataccacaaggcactcagattcaaacccaggatagttcttctttcacagagaatcccagtctatgccgtgctcctctcaaaaaaaaatgcgccgagaagaagatgaagaagcaacgaagcaagaacaagatgaagacaaggaagaggaagataaagtatttagctggatagcagctgcaataggctatgtacctggtttgttttgtggactcgccatcgcccacattctcacttcatataaacgtgactggttcatgagaatcttttctgcttttcttctctgctgaaaaaatgatcaataataagtgtcttctacttttctcattacctatatctattgtgtcgctgaaaccttcaagatcttgtttctattatatatactccttattttccttctagtatctaccacctcatcttccatctcttgagagatattcttacgtactctacgcttattaggctccatttatggtaactattcggtctatgtggttaaaacttatgattgctttgcttttgactgaggctgactggctgagactctgggagttagtcatactatacttagtagtcatgtgagaaaagattcctctggttgtggcgaacctaaagtcgaaaacatctctattcaaaagtcgaaaacattctacactagtgctttaatgtgttttcagtttcagtttttttgtttccttgttgtgatctaagtcctttctttcaagtgttttgttcctgatttgctttgattcgagcctcttgtgtggagaagtttcctctatttatcagtgtattgtgctttgtgtttctaagatttgttcatgaaagagtttgaaaagagttttctcaagtcttttacatcggtattccaagtttaaatcaacgtactaagaagagcttaccatggagcccattaggttccacagagacttataagccgagagtgagtactgattaaatggactagcaatagcaactagatacaatgttcatatctattttgcaaatcctctaagagatgcatctagtatactagatttatatcatcattttaattactaactcttggggttataggctaatctctaagcttcctccttcacgttattagccactgacagcatcagaaaggttctctagaactctagaacctaagcaaatgtcacaatgctctccattatcttattactcaccaaagataagctccagttttttgaactagttaaatgtattataattagaacgatgtgagacttttgcttcaaggtcgttgaatgtgagaaatggttttctttgatgttacctggtaaagatgccatgaagcataagcatccgttgttgtttatgctcctttgacctcccaattcaagcctaattctgtttggcttcaggagctgtaaagtaacagtttttaaagcgaaatataaccacattcccaaagttctaaatggaaagaaaaaaacaagctttgaaatcaacaagataaggtggataatgggtacctctttgcaatcaagtgtctcagttagcgaggcacggccccatttttctgaatcaaggtttttgtgggctaaacgtaaaagatcttcgacatctttgatggatacaccattgtcatggaaaagcttaacaaagtcacagtcaattcaaacaccacatataagaactaagttaagtatgagcatatccatacttaactacagaataatattgtccaacatgaactttgatcacttcaaaaccttaacaagtcaatagtcaatgtatagatttcttagctacagaatcagtagctaagtatggatatgctcatatactaggttgttgtatcagaattgtaaaatttcttggcctggtttataaagtggtatgtgtttaaaagaaaaataaaagaagtaaaatgttatattcaagattcatggggcacattgtgaccagtaaaggactcgataaactcaacaattttgagggctttgggtgtggtcaaccgagtgaaactgtgcaaggaagcacgctcatgcaacttgaagttttaatgtatgtcttgttcgttttgtaattttaaatctctgttggctgcggtgtggtgtgtctccgtttagatgcagttttggttccggtgtgtcatgatgtagtgctaacctttaaccttctttataatcaggatatgtagcaatgctcctccattagctctaactcaccaaagacaaactttgtgcagccagttccacgtaaaaagtggggtttgtttgtattattacctgatgaaatataatcggttgctgcttatttaacagaggatgcatgggcctcctagtttccgaacctgatgatgttcggtttcaagagctgaaattgaattgtaacagaatgatcaatatagttagaccagttgtcactattgttctgtagactcactatcggccacatatatacaaaggactagattctaagcatcactataaaaaaaacaataaactttcagagggtttctaataaactaaaagatttcaccataacagtggcggctggtgccacagctcacacgcctgtcttcatcaactcaggttccagtttcattctcacacggcatttcaatctctagaacgagggaacacatgcaacaaaagcctcagagattaacctccaccacacggcaagagaactgcgatgaatagtcaaaggaatattcgactttctgtggaagcgattagtcattacagaagactttccaagtcaagctttaatttatttcgaaaatatggagacagtccaatgatcaattcggttcacagaaaattaattaagaaccaatcaaacaaaaaacgttctatggcaagatgataacaataatatggagcttgtgtttaatcttctgcctttcagacacaatacttgttattgctaaagacttgtgtcttcccgaccagagggatgctctttgggagttcaagaacgagttctatgtccaagagttcgatccctctgcgaatggtggtacagatatagagaagtggaggaacaacactgattgctgttcctgggatggtgtctcttgtgatcccaagacgggagtggtggttgagttagacctcgagttcaatggtctcaatggccctttgagatctaatagcagcctgtttagactacaacatcttcagaagctgtatcttggttgtaatacttataatgatgatttgaagggtggtgagctaccggattccatcggcaacctcaaaaatttgaggtttttgagttttcaggattgcaatctctatggaaagattccttcttcactcggaaatctttcttatctcgctcgtcttttacttcctcataacgatttcaccagtgaaccaacagattcggtgggcaaccctaaaccgactaacagattttcaacttatgctactcaacttgagcttgttcaccaatgtcgaccttagttctaaccagttcaaagctatgctcccatctaacatgagtagcctttccaaactggaggcttttgatattagtggaaattcattttctggaaccatcccctcttctctcttcatgatcccttcgttgattaaacttgacctgggaacaaacgacttcagcggtccacttaagattgggaatatctcttcaccatctaaccttcaagaattatacattggagaaaacaatatcaatgggccaattccaagatctatattgaaactagtcgggctctcggctcttagcctctctttctgggacacaggaggcattgttgatttcagcatcttcttgcagctcaagtctcttaggtcacttgatctttcagggattaatttgaatatcagttcatcgcaccatcttccctcacatatgatgcacttgattttatcatcctgcaatatttctcagtttcctaagtttctggaaaaccaaaccagtttgtatcatttagacatctctgccaatcaaattgaaggccaagtaccagaatggttatggagactaccaacgttgaggtatgtaaacattgctcagaatgccttcagtggagaactaactatgttaccaaatcctatctatagctttatagcctctgataataagttttcaggagagattcctagagcagtatgcgaaattgggacacttgttttgtccaacaacaacttcagcggttctattcccccgtgttttgagatttccaataaaactctttcgatcttgcatcttcgaaataacagtctctctggtgttattccagaggaatctctg

SEQ ID NO: 33647 - DNA, 5117 bp, Arabidopsis thaliana landsberg
gtgttacttcagtattaacagaagtgtatactatttgagtatctaatactccaattcgaaagagcaaataataactcgagaaatctctaactgcaaccaaatcaaaatttaacctttagaaacgaacaactttgacatagtaaggtcaaaacgctgttgtgttgcctagatttcccgaagcccaagtttcagtcaaaagtcgtaaacagaaagataattcaatcaaaacgaaaaacttttaaacagataaacgatgtttacttgggattaaggcaagggagggtatcgagagcgcagttttcgacattgctgacgtcaaccggagctctcatccatggaacaaccgaatccatctctgtcttatcttctttatctctccccataccaccagctttaatcgttttctctctgacgacggcgacgaggacgagaggaagcacaagttgtgacggtgagtggtgagacaaaagcttctctccggcaagggtgtaccaatagggttttacatttacttgttaattgttaaccatgaaccgattgcttgaaccggtaggttccggttcattattattgattaaactacgccgtttgtgtttggtcttattgagagttgttatgtttttgctattaccaagttaccattttgtcactgttctttagtgttagaatgtgttatgttacttatgtttggtactttgtagatgttgtcgtaccctgatcttggctctcctccttggattctccaattgttggatgatgcagttgactgttatataaaaagacattcttattctgaaaacttgatatttctctcaaatagtttctgtgactcatttatacaaacacatccacagtttaaggaagtagaatatatactatttattaagagggttaacttcaaaatgtggattttgttgagtttttttacatacaactctcgggtttaagacacctctaaacgagctgaacaacagcagccactctcagagcaccgttctggagaagttccgagagctcatcaaagagcagtgcggtgcgccatccccaccctttgggagctttaggcagaagagttcctctctgtttaaagctcccaaacaacatcacttctcttttcgacgggcagataagctacaagaacaatgaaaatgatataacttatgaggaaaccatgactagatgcatcaaaacaagggcttagaaatggaatcttatatgaatttcaacgagaacttgcaaatagatatttgtaacatacctggtaacgtgcagtcactttgtcacgaggatctatgtaaacatggacctgaatgtggcagaagagattgttatttcacaagacatgacaatttaagtagctctaaacagctcttttataacaatagaccacagaaaactaaccttccttactgaatccactatctctgctttgcggcggtgaagaaataatcctgtagatattgattatcaaagttatgtatactatgacagaccaatctaacgtgaggaaaacatgtgatcttgtcattgtgttaactcgggttaccgatagttcggcgtccttgaggatcttcatcattgaaagcctgtatgctaatctggatatggtattaaaacatcttatcaaaacccatatttcattcttagaaagcaagaacagctccaagagaaagcttgacgacttagttgtgagtttctgataccttccacagagaaccagcatagaagaattcaggagaatgctctacatgaccgttagcgagtctgtggacatcttcaaattcaactctgcagcaatgaaaaagacacatctgagaggaactatttgccaaacaggacaaatcaaggagtcaccgcaattggaataaaccaagagtgttgtttacaagtaaataaggctggaaacgttacccaaaacgaaagggaggaaagtgacacaaaggtgtctttgtatcaagtgatatggtacaacttgcgttctcccactcagtacctactgaaggttccttaggttctgacattccaacagtagctccactgccacgccctccctcagtttgttctccacgaggattgttaccaacaccgcttgtcccttggctcaacccaacaagagctgtcagcccatcttttgaaatttctccactctgatcaattctaccttcagaaccatcactagcaatagattgctgaccatttctgttaatagggacacgagagtacacaaaaggagtaggaggccaagcaggtggtggtacaaatgtagcttcgcatccaatgccggcaagtccatcaatatgttgtcctctgacactgatcctgacaggcttaaagatgcctatcccatcgccttgagaagattccggcacatatacgttatccatgtctcccatcatattgttctgcacgttgtcttggcaataataattgttgaaggttgcaccatgtgaaaccccaaatccttgtttacacgcacatgcaatactgataaggcaacaccttttgcatgtgttggcagcaacttcctgcaccctttgactgagaagcatctgaaatgtagtcaaacacataaacattattgcatttattaacaatattattgcatttgtaatctaacatgaaacactagactagaattgctcatgtaaatgccttaagtcaaatgtatcaacgctaagcacatcaaccatcccaacatttctacaactggctgaatgagaaagcaaagcaagtttaaggacaacgaacctgcaaccagaggccatcattcacggctttacaagggaaacccaactcttcaagttcttttcttgcgttcaatagtatttcaaaagacatattgcaatacagaagtgaaccaccttcaaaagtgttgacaaatgcactgtattcttcctcagtaaatccatattttcctttaacagagcctctaccctgtcttgtccccacaacccgtccaccccaggttagagcagaaacaccacagttaccccactcattgacaacgaaaccatcagaggaagaacctaaagtaggagaatttctagagtctgctcctgataaccaactatcattactcaaatggtatgcttcttcagaaggtccttcaattgccaccacactgccttctgtcttatcaacaacactggtgcaaggacgaccaaaattcgtttgtgagttagaagattgctgaaacacgaggtttgaacctgaaacacctctttggaaatcaataacaccttctgtgagtggaacaatcacatcatcactagcatctcgtaggtcggcttctatatctaaatgacctaacttacagtccaaactcctgaaagagaaatcatccatcacatttttcccctttgatatagcagaatccaaaggaaagcttgtctctctctcaaatctggaatcttgattggaatgatctgagttggagagagcactatttgctatgaaggcgtacaatgccagttcaaacctttttgacatggaaagaaacggtttatagaaatttctagatgcaaatacagtatgaaaccataatacagttagagtatgcaattcactataccgtttttcttcactaggcacccatagttcatcagatgtcagcaatgcacatagagtctgtgctgagagtttcggcagcatctgaccataaaatgtgataaaataactaaataagtagcaattcagaactagaatacttttttattctaactaaacactaggttgaacactcttcgttttcattatcagatgctttcgagatagaatgacatataggatggaagacgttcaagacataggtagaacggcatatttctaaaatggggatacttttgcttttttgacatacacccaaaagaaacgaggccatcactaactacataaaaatcataatgtcagtctaaagcatagacattatattacctctctcagttccacggcaccactttgacagagataaccccagcaagcattccttacacgttctccatgaatgccatagtcttggctctcagcaaatacctaagtcacaagtcgaagaagctctgtatactcaagaatcacggagaccaatgaggctaaaataaacacatgactgagattctcaaacctgatatgccaggaagtttgaagtcctcagctcagaaataataaaatcagtgcatatcgcacacaaatcctgtcagacaaaagccactagttattagatcaattgatccaaaagaaactatcttttgatgcaatcataagaattaatcatacctgaaggtcaagaaaagaagcagcagctaaaacacgaaaggcattatcatcatccagcttaggatgatacccatacagataagctaaagcaacagaaattgcgtctccattaacatttttatcatccacaagtaagttcacaacaggagagctagcttctttccatggaccttgcagcatagtccttaagcaaaattgcatagtttaaaacaaattgcaaaacctgaatatcaaaatcctcccacagaaattcaatattcaaaaaattcacctgaagtaggagctgcgagatagaatcaagcggtggagatggtaactggatcccatagctttaacaacaacgtcagaaaacgcaccagagccgaaaccttcggattgaatatgatcgcataaagaagtaagattacaatcgagagaacgaagctccgaggtactctgatcactttcagcatgaggaagaaccggtggcgatggttgaggagacggtggtggtggaaccgtcattctcatttgatgatgatgttggtggtgcgtcaccgtcgttctagagtttcgatactcttggtccatcaaaaatgacgccggattcacaatcaatttgttctagggaatagattcaatttcaattggggaaaagagaaaagccattgaagacggagaatagcttagctctcactcgcgtgtggcgcaaaagtgataacttagacgctgtcgtttcttaaaagttctgaaacgacgtcgtgtgaattgaacaataaaccagataaccgaatctaattcatgtaaaccgaaccgatgcttgtgaccgttggagaaaaaaccttaccaacggtcttttgcttttt

SEQ ID NO: 33648 - DNA, 1753 bp, Arabidopsis thaliana landsberg
actttcgttgacactgatccctgaaaatcttacattacgtaaagatttgttatctatcctcttctgaagagtctctggaactaagcgatttagattcttgtttccactcatgtttctgcaaatgacaaatatgaatctttgagaacagcacacaaagagcagagcgaccaagaacaaagataaacatattagtcattcagaagctcacatgagtgtcaaattcgtcatatcagaaaaaaaaaatggaatatctcctgataaatcattgtttgataaatctctgcgcattaaaggaaaaaaacaaattgttaaacacaataaaccatatcatatactttaagtttattagtgcgtgacagtttcggattcttacagttctctcaacagtgttagcttgcatatatcagatgttatagaacctgtcaactcgctcccattcaagttcctaaagtttgtgaaacaagaaaagtatccatacttgctagaattttgtgaaagaaccaaaactagagaaccttgtgataaagaatacgtaacatacaaggatatgattcttgatccctcggagtccggataactacaatttaaaccttcccaccgataaagctgaggagcacacggatctccttgccagcttatctttttgattaaaccatatgtttctttgatgttcatcatagcagaaactgatcatcacattgaaaactattcacaaaaaccaaaaagaaaagttttaaaaagacagtactatttcttttaaagaaagaccacacttgccttcatctttgtttgtctctagctgtagaatgtctacgactgtataaatctcgagggcgttgagaaggggaggcagagttgagttacccgtcattgcgaatgtgaaattaaatatcccatttgaagaactcactgcccttggattaaagatcgttgaaatgctgagattaggaggcctcaaatagctgaaccaacgtagaccaccattgtaagtaatgttgaattctctggtttcatttgctgtaagattctggacttcggcgaaatgcatatatacatatgattgtgcggtgttctcatcaagagtccaccataagagccatggctcactagcatttttagggacagcagctgtcttcatcacggattgaggcatgtcataggagttacttgtatcgatcgggaggtctgtacttatccagacggtttcatcatctgtgaatgaattccaaacacggtcatgtatgtcctcatcatacctaaagagatgatcttttagttaacttataacacacacaaaggacaagaagtataaaacttttcgttgcctacaaatattacctaatgaaagatgatgaactggatggaaagtatactctggcgaacaacatcaatgatccactttgcgtgagataactttcattgttcaatggacgaacctctagcgacgaaatgaatggtgtcgtcggtccagtcttaacaagacaaacttcaagactatcttgtggtacgacatggattatctcatgcatagaagtatttgttactcctagtattttaacagacgaccatttgttaggaccgatatgaagatcaaaacttgggaactgattcaggccatcataattcccatacacaaaggttcctctgatcaaatatttgttgtttgccgtgaggttgacattgtaacagtttctttgacctacagggaagcttctcacggcccaaacctgttgctaaactgagttttgtatgc

SEQ ID NO: 33649 - DNA, 279 bp, Arabidopsis thaliana landsberg
tcagattctccttttttaagacgggtacgtctgcttttggattcttcttgcacattgtccttttcatatcttgaaggttttttactgtaatgcatcagaagtttatccatcatcttctcctcactgtctttctcatccttgtcaattaagacttgaaggcctttccttgagttttcccttctttggctacttatgtgatcatcacctcccgattctacattgtgctctcttctgatagttcgccgtctcagagatgcattgattatgttattcacttca

SEQ ID NO: 33650 - DNA, 2393 bp, Arabidopsis thaliana landsberg
gtcgactctagtctatagggcttccgctatcccaggtggtgattgagtcatggggcagattcttctcccagatgtgtgctttgtctcccaaggagaatggaaacaaacggagcttgaatccgtcttcactgacaccattgatctttgttaggttgcagagcctatcgaattcatcaaggtggtcgagtggatccttcattggcaaaccatggaatttgttcccctgaatcatcgagatgagcccactcttaatctcaaaattgttgttctggatagcaggaggtgcaattcccttcatatgacggtgatcacgtggtgcatctccaacaccaatgttggcagggccattttgttgattctggtcgtcagccatttcgagtggttgctgaggtacagggttgactgtggttctcctttttctgagttcgcgagctgtgcggttgatgttgtcgttgaaaaggaggttctggttgcctgttgatcgagttcgcatacagtagagctgtacctggatcaagaagacaacaagaaaaacacacaattagtaactgcaaagaaaattgaaaaagaacttgatctaagcaagtctgaaatcttaaatgtaacaaacaaacacccaattggcaacggcgccaaattgataataggtttttaagtcaattatcctaaaacaccaatcatatcattgtagtattttaggttttcaatccaaatgggtgtgatactaacaatcaagatgtgatcagaagtcactaagtcaagccaagcaataacaggttttggtgtgttctagcagttctaagtgaacatgcagaaaatagaaattcaagcagaaacaataaaacactcgaccaacacagctctttgcaaagcactgggtgaggtcgagtgacaggtcgagtaacagaaagaaaataaaacacagatactcgactgcacagtctgttgccagacaactgggtggtcgagtacgaggtcgagtaacaagaaagaattgcagaaattaagcgacagataacaggatgcagtaaacaacaatagagtaaacaaagaattcaatcagataaagaattcccaaggatggggtaattgagtagtttcgtttcctcagtttacaggtgattgacatgctcaataaattaaccctagacaacaagttcattaaccaaatctaagtgccaccgcaacagagactctcaagttaacctagtcccagactcaatcaccattgacgagagctaacctaacaggcattacgaatcaacaagttaaagccaaaacgctccctgcaaccaataccttggtacagggtcacgaatctctggaattagttgttcagacattttatcgaacatcttttgggcgcggaaatgtctgggctcaaattccagttgattagaaagcaataggcattaagaacaactaatccagaagggatctatcaaccaatactcaatcacctagcatactgagaattctacactactctaacccatactcagaaacctattcattactgagacatcataacaatgagcataaacgttgaacaggttgaaaacatgatagcaacagtgtaacagcaggatgataacagaatgaataacagtaaccgaaatcaagaacaaaagctgaatactgaatactgaatagataaagagaaatccggattacaaaaggtctagaacaaaaggtctgcgggataaaactagataaaaacttcttgtcttcgaaaatgtgaagtacatgctacttatagccaaatattccgaaaccctaatactcaaaacgacaaagtattgggacggattaagaactgtactcgaccgaagtggtcgagtgggaggtcgagtgaatagctggagtcttcttttcttccttgtgctcgagtgtctggttgagtgcggaatgaagaagactctcaagcttgccatcgagggtgtagtcgagtggtggtgaaagtgatactcgacttccaggtggagtgatgaggtcgagtggtggtctgatgatggagatgagggcactcgacctcggggtcgagtgatgtgatcgagtgatggtctggtgatggagatgagggcactcgacctcgtggtcgagtggtgaggtgaagtggtggtgtcctctactcgaccagggggtcgagtggtctgcttaggttgtgaatcgtcatactcgacctggaggtcgagtggttttgcatgatcaggtccgcttcttccaattagctcgtctacagctttgaatcacctcaaaacaacacaaatatgcaacatgcatgaaaaactatcctaaacatgctaaagtgatgacaaatgatcagaaatggtataaaacagttatgatatgatgataaagtgatgacaaatggatgctcaaaacaggcaaag

SEQ ID NO: 33651 - DNA, 1240 bp, Arabidopsis thaliana landsberg
gaaagcttcgcggaagaattaaacactcgtatggctgctcctccattaaaagactttaattgagcaaaattttactttaaaagacacaaacttgctttaagccaaagaaaaaatagactttcatttttcttgcatcttccgctctctacgcatctatcacgctgactaaagttgtaacaagcagcacaagaagatgacgaggcacgacgacaactctcgctcacagattatttgatccgatatttatattccctctgcccttgctatccaatctatcctggaatttgagctctagaaagtatgatcctgggagtacttcatctccaacggtttccttttacttaccgaagcagtctacagaacgtgtggatttcattcttccgatgaatttgaagtcctattgtctcatatatgttctttttccaaatagagaagataatctgattcagactttttcatgcttctgttacgctgatttcaatttcttgttggtttgattgctgctacggttttagctgaaatcgtctctgttttctatgttttcctttctgaaattcattcatattgttaatgttttgttgcaggcaatttgaagatcttgtgggtcacgacacaaacttataagcaagagcttagcattttcatcatctgctgaagaacgtatgggagaaagtaatcatcttcctccctttttatctctttcgattcatattagtcctcaaaaggtatgtgctttgttagttcttgttactagaatagaggatcatctaaatctcacaactaagttgttgactagctggaagtgattgttcaccaacagtcaaagatcataaatttttgttttaggaacaagggggcatggtcttgagatgagataacattaagttaactctgtaccttctcatgatgtccaagtagagtcctctttggattaaatcttatctgttatttgcagctgttaaagagcgtggtgatggaagtgcagagctggttaaatccgtagctgataagcatgccggtctcgtgagaccagttgctaaatattactctgcagttaaaggtactactaccactattctccacaagccttctctttaaaagatttgttcatgtgtggaactcctgcactttgatttttgcaccttttccataagctaatacacattggctttgtatgatagatgctatggtgtgtgggaaggaagatatacgcttgtaaaagacgtagacgaggtggaaa

SEQ ID NO: 33652 - DNA, 1559 bp, Arabidopsis thaliana landsberg
tcagcaatagattcttcccaaaaaagatacttctccagccataagaaggacgtgatcctaatttactttcaaagaaagttgtttttctgtaatatcgactcttgaaaaaccttgaaaacagacaattaggttcatgtaataacctccatgcttgctttgctaacaatgcttgattaaacaattcaagatcccgaaatccaaaaccaccagcagactttggcattgttaacttgtcatgactaatccaatgaatcttctgttgtgactgagtagtattccaccaataatccatcatagcactcgttaaggctctagtagtgcttttaggaagcttaaaacaagacatggcatatacaggtaaagccatagccacagactttaatagaatctcctttcctccttgagaaacattcttagcataccatccaaacaactttgactataatctttcttgtataaaccctaaaagttgttgttttgatctactaagacattcaggtaaccctaaatattttcctctaccaccctctaaatcaatgcatgtctgaattttaattcagttcttgatgtcatctgctactttagaaccaaaactaatagcatatgttcctcttattaatctgttggccagacatctgttcatatttatcaaggcaaagaagaacctcatcacattgagcgattgacactcgacagatgaacaaactatcatcagcaaagagtagatgattgatagctggaccagagggatgatgttgaataccaaaaattgtacctttctcgtgagcttgattaaaaagatgaatcaaagcttcagtggacagaacaaaaagaaaaggagatataggatctccctgtcggatacctctttcaggttttacgaagccataaggctgaccattaatcaatactgaaaaagttactgaagttacacaccccattatccatactgaagaaaaaaaccattgcttataaaattccttgtagaaaggtccattccaacatatcataggcctttaacatgtctgtcttgagtaacatagaaaatgctgaaatatccggatgagaattcaagctgtgaacaatctcatgagcaatcaaaatattatctgaaatcatcctttctgaaacaaaggctgcttgagttggagatataatggacggcaaatggatctttaatttgttaacaaggattttggacactattttataaagcacagagcaaagactaattggtcgaagatcagtcatttgattaggcgcttcaatcttaggaattaggcacatattcgtatggttccatcattgagccatttttctgtgcttttttgtctccaaaacacctcttcttctcagaaagcaacaacaagttcattcttcaattgtcttattctagcaaaacagggagaagaagattcatcatgtaatttcaatgcctctctgagtcttctgatacatcgttctgagttagtccaatacttttgcttccatacatgaataactttcttacaagtttcagctttatgaataaaagaagaagatgacattaagactctgta

SEQ ID NO: 33653 - DNA, 1612 bp, Arabidopsis thaliana landsberg
tttttcggttataaagttaagtattcatcaagtatttcgaaatatttgttttggttttaattctttcggttttaaaatttagtatccactcggttattatatttttaatattttcgaatagttcgattattttggaagattttcggtcatttttggatattttcagttattttcggatagttcgattattttaaatattttataaatattttcaactatttttaattatttaatctagaaagaaataataattttgaaaatgtgtttatatttcggatatttttaatacgtagccattcgatttcagtttttcgattatagaatttagtatccttgggctttagaaaccatgggctttttaagtaaacgggctcctgaggcccataggttatttagttaacctaatttgagaagcatatatataaaactcacatcgccgctgataattccgcctctgagaaattgcgttcgattacagctccacagaggttagtgtcgtcgagtctcttctctccactcatcatctatcgatttatcgtcgttaatcattgaatctgggttgttgatctgcaggattcggaaatggttgagtcaaaggttgtggttccagaggcggtgttgaagaagagatagagagaggaggaatgggctttggagaagaagcagactgttgaagccgccaagaagaagaacgccgagaacaggtagcttatcttcaaaagagccgagcaatactccaaggaatatgccgagaaggtaaacatttttatcctccattgtacaaatgcttggaaactgtagttgatgttctcttttatccttgataggagcccgagctcatgtcgttgtaacgcgaggccaagcttaagggaggtttctatgttgaccctgaagctaagctcttgttcatcatccgtatccgtgggtatgttatactgttgttgtttgtcttataagcatttctaaagccagtgtctatgttgttgtcttatctgttgttctttttaatattgcagtatcaatgccattgaccctaagactaagaagattctccagctcttgcgtttgagacaggttcgtgtattattgtgtttgtgtagattagtcttttgatgaattggcataaactgctaggttgtttcaatacaatgttgtcattagtcttaggttaggtcttgaaagttggaatctttccatgtaatttgttgataatcagttggtttgataatgtcacatttcatggcaaagactagtatatgaaatgattctatcagtgttgtatactgattgattttggcattgtgtaatgcagattttcaatggtgttttccttaaagtcaacaaggctacgatgaacatgcttcgccgtgttgagccctatgtcacttacgggtatgtatatacactctcatcctaaaccctttaatctgatgctatgagataacaagagtcttgaagagtgtgacttttctcttctgtttttcagattccctaacttgaagagtgtcaaggaattgatctacaagagaggttacggaaagcttaaccaccagaggatagctttgactgacaactctattgtagagcaggtttgagatcggtctctctgtgg

SEQ ID NO: 33654 - DNA, 1118 bp, Arabidopsis thaliana landsberg
tgttactgtattgtgttgaaggacgaaggtaatgaggagaacagtcggcaatgcaacatatttttatagtgaattataattcgcaatgttcaggtcctctcagagtcatccacaactatacgagttatggatgtgaatacaagttatgtatagatggtcacagatctctattataagaatatgtcttttggttagcaacatagtttttcaaaaggtgtggccgacgatgctttgtcctgttttggccgacgtgacgatgtttaactttcatgatttgtttgtttcagttcttatgttgtgttgtagcttctatgacaagttaggtgtcatgtttcagtacttgttgatggataatgcgttacttattggcccaattgtatagttgttgaataggtctttaaagttttcttaagaagagagaaaaggataaacttacgcaggcccaaagttttcaacaaagatagcacattttataaaggttaacaagttcattagccgatagtaccacaattaggcggcaggtcggcatagtctcatgtaggggtgtcagacgggcgagtccgcggctaaacgggcacttcgtgacggacctcccttctcttcattccgcggcagttcggtccgccaaggaccgcaggcgacaaaacgaagcccatatccgccccgcattgcccattggtctaacgggctggcctgcgggccatgatcttcagctgcattgttaataacgaatctcatgacgattattttttaattaggatatacagttacaaacttacaatttacaaacctcatttaaaagatgcaaaaaaaaaaaaaactcatttaaaagatttattttagtcattgttttgaatattttacttttacgttatcaatttatttgaacctctttcacttgtactttttgatctgactagaaaatttcaggtttgagacgaatgttacaaattggtagtatattcagggccggacttaacaaaaccggttttgacccaagcaatttgtaattcaatgatatggttatagacactttccttatccaacctaaaatgtttctgttgatttcattaataagaaaatatacaacggttatacactttccttatctaacctat

SEQ ID NO: 33655 - DNA, 863 bp, Arabidopsis thaliana landsberg
tggagatatctacactttcaaactgatcaaaagaggaggaactcttgttctacgtttgttacccaaaggggcagagtcttgttcactagatccctcttgttttgtggctaatgttgcgccttcgactctacgctatgacacactggtattcgactcttaatttgaatcccaaaagaaactctcatactagtgtctgaaatatattaaacttattttgtattgttccagtatcttccaaagcgttttatgagggaaaatggtgtagacaaaagacgtggagagatgattctgatgaatgaaaagggcaaatcatggactttagatttgaaactaaagaaatcatgcggaacttccctcatcagacgaggatggagaagtttctgtagtgccaatggactaagagctggaagtatcattactttcaaactgattaagaaaagtggaactcttgttctatgtttgctctccaacgagccagaagaagaagtgtgctcagaagctaatgaagtagagtctctttcgacagatcaagaaagccatgaagagagtatccacaacgagaaaatctcaagaagaaagtctttactatccgaaaaccgatttgtaacattagctctaacaccttatgcaatccaaagttctctactggtacgtttcatcattccaagccattgtcttttatcagtctatagaatgagaatcttttgtgtgaatatatgtttcagcgtcttccggttcctttcactaggatgaatggtatcaatgaagaaactaaaatgactctgttggataaacatgagaagaaaagtggttaacgactctgcggttcgaggacgacaaaagaaaaagactacgaatggtag

SEQ ID NO: 33656 - DNA, 1795 bp, Arabidopsis thaliana landsberg
  unsure (1)..(1795): unsure at all n locations
acctttattttgcgatgcccagtcgtacatcagctatttattttatgtcatatttgttgacaatatttattgctcatgtgattgattactgggagttcaattttgtagtaatctggcctctgcacatttaccaccagaagcatcctgttaacctgatcctccttgccctcttcactgtttcattgagtttcactgttggtgtcagttgtgctatgacagaaggttgttatctcgttccctttcatatcatctgattctaaccaataatatgtgatttggttgctgttccagccgcttcttaactcaccttattgtcacaaagaacaaaatttgcctgaaacttggaatagcaaagcctgtaaaagttgtgtgtttactaacaatctattgttctttcttctacgtgttttaccaggacgaattgtgctacaagccttgatattgactctgtctgtggtcggatctctaaccgcatacactttctgggctgcaaagaagggaaaagacttcagcttccttggacccattctcttcaccagcctcatcattcttgtagtgacnnnnnnnnnnnnnnnnnnnntctcagaatcctccctcctcacctatatcaccaaacacccaatagttccacacatacataaaacaaagccttaaatttggtttgctgtcgtaatattgcagatgttcttccctcttggcccgacttctgttgccgtatacggaggattcagtgccttggtattctgcggatacatagtctatgataccgacaacctcatcaagcgtttcacatatgacgaatacatcctagcatcagtagctctctacttggacatcctcaatctcttcttgaccatattgcgtatactgaggcaaggcgacaactgaaaggcataaaacgatgcttcagtgatgtgatccagtttataactataagagaatccaaaagcctttatgtgtgtatatctgatttctgtttggagaattaagtatatgatgctatgtggttaaacgattgatataaacaaaatcaagcaatgtcgattttcaacttcaaataaatttgttaattttggcggaattttgatgccttttgtcgtatccatttcgatattctgattgcttaagagcaaaagcaaacattgataccaaacgtttgaagatttatttaccatcatcgataaattgtttttactttgctctcctttttttttaaactcaaccatacacaaaaaaagcgacctcatcttacccaccgatccgccattacagacgaagaagaatttcaactgcaatctctctctgaaccatgagaggtcacgatcggattaacaattgtttgccggaggaacttatcctcgagatattccggcgacttgaatcgaaaccgaatcgcgacgcatgctccctcgtctgcaagcgatggttatctctcgagcgatttagccgcaccacgcttcgtatcggcgcttcgttttctcccgacgacttcatctccctcctatctcgtcgctttctctatattacctctatccatgtcgacgaacgtatctccgtctcccttccttccctctctccttccccagtatgtttctctcatcgaaatttttctgttgaatttgtgatcggatcgagcagtttttgtgtagtatcatgaattcgattgaaatgttaaattttgtatcgatctggatttgagcttagttgagattagcgttatttgattctgaattgtatctggacatgtgagttatggtttacacttatcaataatatttgcagaaaagaaaacgtg

SEQ ID NO: 33657 - DNA, 677 bp, Arabidopsis thaliana landsberg
  unsure (1)..(677): unsure at all n locations
ataaattatactactatgaaccgtcgaagaactatctacatatatcatactagccattttattactttaccaacaacaaaaaatacgaagaagtaattgcgaaacataagatagaaacatacagtttctctctagccgctcactatcctttgtggcctgataatggagtcattccttcctgcaccatgcgtgctcgacgattctatgtaaagagttttactattagcaaacaaatgcttcgacaaatattaagtcattttcttcaaatctttagacttgaagaaaaaacactcacctcgatgcctctcaagctcttaatagagatcttatacccacttccgacagatctctgagaaactgaggaagaaggaaacattaacaccaaagagaataaaacccagtttcaggcctaacaccagtattttaagcacgagctaactcaccaacggctatggtttactcccttcttggtcgactcgttgacttgagttnnnnnnnnnnnnnnnnnnatcactctgcttgtgttcagtgtacgtttggagcttttgagtgggctgggcatagcatcactgattgctgagagtcgtctactcggaagtccgtttgggggtcttgcttatacttgggaaggttgggaaaatggagatattggtgtcttcaagtgcaccttgggggat

SEQ ID NO: 33658 - DNA, 489 bp, Arabidopsis thaliana landsberg
aaattaccatgactcccatcaggattgcatcatacatacattaattcaataggatcacatcttgttatcaaaagagatcatgatgatttcacattgtggcatgatcgccttggtcacccaggcaccacgatgatgcaaaaaattataaaaagctcacatggacattcaatgaaaccctaagagttttatcaagaaaataaaaggacatgtgttacgttttctcttggaaaattgattataaggccatcgacaagcaaaatcgataaagaattaccaaaattccttgaacgagtcaaatgcgacatttgtgaacctatacacccaccatgtataccattatattatttcatggtaatgatagacatgtctagtagatggtcacatgtttgtttgttatcatcttgaaatgtggtatttgcgagatttctaactcagataatcaaaactaagagctgagttttccttgattatccaatcaaaggaggttag

SEQ ID NO: 33659 - DNA, 2255 bp, Arabidopsis thaliana landsberg
taggaaaataaaaaaaaaatctcctgtaatatacatttcaaaatctgccaaacccatataatgcacgcgctattaaaaggattaccttcatactctccaaacatataaaaatatccaattacaaaacatcaatcacttatctaattaaactgaatcacactaatctacatgtcattagcacattcattattacctctatagctttctaatatcattgctataatttacacaacactatttcaaaattaatttaaaacaaacatgatacacataacatttcaataacctcgctaataacacttacactaaacacttaactgagtgattggtttgtttatcaaacaaggctgatttctatatgttgtgactttatgataaagtctttatcataatcatttgcttactgtattattttgtttgtaaaatcatttgtaagttgattatgcagccggatcataacaaaacaagagttcaagaatcaatggatcaatggatcaagaagtttgttttggtgctctgaattatttgtttaaacagggagaactcgaagacttcaatgttgaagaaagctcttcttttattcaatcaaaaaccaagtctctaaagagacattacatatatttttatatagctaagtcacaatcgactttagccttaccaaaaccctaattgaaaagtaaagttcaacaaagaaaagaaaatcaaacaagaaacagaagaagtaataaagcttatgtcttgcacaaaaagtaataaggatgacgatacatcagttgatgtatcatcaaatggcacacgcatgattattttaatatgtatatatgcccgttttgtttaattctgattatatctaaatacattaaaagaaaattttaaaaaataaactgaactgtgaaaaatattctgattatacctaaatatgacatttttactcagtctcatcaagtaagccgagcactaaacctataagcccaactaccgagccaaacgatgaccatgtatgtatcagtggaacgttaaatgttttcaccttcttcacacaatcgtcttctcttccaattatcagattggatggtttaaatgttctcggatcttcttgacaaacttggttaaatattaaaattatgtcaaattttctgaagtcataagtgtatttgtctaggtcgaattgacatggaattttagaacactatatggctgttttgcttggtacaatttctctaattttcttatgaagtctcatgttcatgagtccaaagaatagagggtaaaaggctgatttatcttttaaagtcatgctcatgttcacggctattgttttttttttttttctaaatcaaaattgatcacataataaaggtacaaaaattatgatccatcaagcagaaaacatttcaaacaacaaaccctcacaagagtaaacccccttaaaccctcctttacagtcaaagtgtctttgccacaaaactgaaattatgcctttttttgcgcaaacatattctcatacttaaactctttatccctctctctctgcttgtttcaccaggaatctgtacattgccaaaagccaaatagaaacagcctttggcgattttagttctcagcttccagaaataggctgagttccacatacctctcctgtgtagacgatcccgagtctctccgacctcttaagctcaatccctcatcagtttgtgaagagtttggtgcaagtaacagagcaccactgcgttcttcggtcacagccgtatccccatcatctgtgtctcttagacctctcagggccatggaatctgaaaccgggaagtagacaagcaagcagatggataccacgcaaaagcagaagagggagaggaaggccaagaaagaaagggcttcgaatataatcttgtctgctgctgtgagaaccgacaaacagagcataacaatccttaatggaaggaaactcgagaccgagaatatcaaagtgtatactctcttctgtaaacgcttgttaatgacaagtttcagtatctgccttccaagccagaacaagtaagctgttaggacggctgcaaacacaccaagaagaatggtactcagtagaggatatgtgcataaggccacctcgtcgtgatcaataataactcgggaatacgttcttgtgaagtcgtgtggcagctttacataagagccactaccaccatttaggcgtgactcggacaacacaaccgcaagttgaagagcaagcatcgggagacaataaagaataatat

SEQ ID NO: 33660 - DNA, 1324 bp, Arabidopsis thaliana landsberg
  unsure (1)..(1324): unsure at all n locations
tcatcatcagtggtagaagacctttttaagagaagggaaccaatgcctggcatggacgctatctactttatccaaccttccaaagagaagtaccatcatccttatctcttctccttccatccatggactatgtatactactatcaagaactcatcatgtgtctctctcctttttatcttgcagcattgtcatgtttctatccgacatgtctggccgggaacccttgtacaggaagtaaatacaacatgcctctttccttttatatttttttctctatatcatcaatcatcatcattatcatcttttctttctctttttttttcttcagggcatttatctttttcagttccactatccccaaagaattggtcaatcacatcaaaagtgattctagcgttttaccacgcattggtgctttacgcgaggtttttctcttctatgctatcatcccttccctttttacctactcttttatcgctttttggttcctaaattttttactactttctattcagatgaacatggagtatttccccatagataatcaggtataggttctattccctttactttctggagcgctaccatcttggagttggatttaatttgaaccattatgtttttcctcgaatattaatagacaatgcaaaataggccttcccctgatgatcttacctctttcccaagggatttctaactgatcatgagcaagcattggaaacgctctatgctgaagatgctgagaattcacgccactttcatatttgtttgaatattatggctactagaattgctaccgtatttgcttccctcaaggtaaataccttctgcacaattcaccaaaggctgactcactacgtcttcctttcatagtcgtaaggaatttcggatttgctggcaagctgttctttataaggactctctcagccaaattaatgttatacggttttttaggaaacttaagcttttcccatttatctctcttttctgtgtttttaggaactaccctttgttcggtatcgagctgctaagtccactgcttcgagggacttggttccatcaaagcttgctgctgcaatttgggactgtatctcaaaatataaagccattcccaacttcccccagaccgaaacatgtgagctgctcattgtggatagatcagtggatcaggttttaaggctcatctactacatttactcctcaagtccatattgatagtttatttctctaaacgattgaggtgtaactgtagatcgctcctatcatacacgaatggacctatgatgctatgtgccatgattngcttgacatcgaggggaataaa

SEQ ID NO: 33661 - DNA, 1423 bp, Arabidopsis thaliana landsberg
acatactatcagaaccctagttcgatctggtataatttttgttgtatgagtccatgggattcctttttgtggaagaaaagaagcttcaacttaaaaataccacctacttgtttgtggttcggatgactgatgatgcgaggataaaaaagcataattttttttttttttttgatgaaatgaggtataattgaaaatgaataaagtatatttaaattttgattgaaaattagttagaaagtaaataattggtttctgcgtgttgtccgtgttggatatgacaagaatctagcgaatgtaaaccacaaacaattaaccggccacgtggaaattcttaatcctcataagccatacccgataattatcttataatcatattaacatgaaattccttatttatattcccataattgcaatccatggaacaggcgtttccggtcgcactcagactcaaacaaccatatcttcgagattcatgtaaacgttccctgtggaaaaactaaacaacatcgtcttttaaataaaaaagtgtctataaaatcagcagatgaatcgatttttgtttaaatacatgcacggattaaaacgagacacatgtctacgtgatgtctaaccattattagaatattgttgaaatcatgtaacatatgtaccacacgctactacgctaacaacgtatatatagaatcatagatacagctgtaatacaaggtgtgttttaaaattatgattatagaaaaacagttaactttgtccatatacacttttgtgaagatatgtggatatgaataatttaggttcacatgtgttttttaatcaaagaattaagtatcaatacacatctaaatagcaacattattctttaccatttttgggtttggtctatcgagctcggtgctattataacgctagcatctacgtcgagaatcgtttgtgcgtacacgcaagagggacacctacttgtatttgcacaatccatctatatcctcgtaggcccttcgattcgatatacatatcctcgataaattataaatagtggattatgaataggaagtatcaataatggtcctctctaaaaaaaaaaggtatcaataatgggagcaaatcatgttagaaatcaaatcaacataaatattgatttgtaaatttattatatgatataaaccgttaacttgattactaattaaatggagtaagttttttagtttagctataaaaagactgacctatgttttttatatatcatttaaatttgttctcagttctaatgtgatatatgtaaaaaggaaaataaaatgattcaacaaaaccggtacaacgcatagaaaatatggtattgtcatctatttacatatcactgtgtcttaccaaaaacagaccattatttgtttttgtaccactatttctcactactatatctcttacc

SEQ ID NO: 33662 - DNA, 1484 bp, Arabidopsis thaliana landsberg
attaccaggataaatttattttagtcagctggtccaataagtaaaacgcattaagcggtttttcgttaaaatcttaatctgatttgactctttgatctctccctcttactaattttttttttggtgagatataaatctctctaccctcgtgaccctcgtcgtctatatattgaaaacaaaatccagttttctttcttgaaacgtataacaaaaatagaacatcatggttatgtacaaagaggtatgtcttaatctttctcttttttcaattacgagttagctcttttgtcatgcaaagctctttgctttgtatctaaaaacgaagattcatgatacaattattgttttaagcttatataaaaatttggggtttcgtttgtcgttgtttaggattatgtttcgaactcacgagggatacaacttttcacgtgttcatggaaacaagaggagcagcaagaaccaaaggctttaatctttctctgtcatggctacgccatggaatcaagcatcaccatgagcagttccgtcttttaaaatcatgattatgatataatcgtcaatatatatacattcatgattacattttaattgatattaaaacatattcatcaggcgcagccacgaggttagccaatgccggttttgccgtatatggaatggactatgaaggacatggaaaatctgagggtctaaatggttacatcagtaactttgatgatctcgttgatgatgtctctaatcattattctacaatttgtggtaattctcttagaaaccccttaatttgatatgtgtttagattttcattaatatactaaaagaaatggtacaaataatttgtagagagggaagagaacaaggggaagatgaggttcctacttggagaatccatgggaggagcagttgtgttgctcttagccagaaagaagcctgatttttgggacggtgccgttttggtcgcacccatgtgtaaggttagtaatctcttttttcagttaaaaagtctcaatcaaaaacgaaaatatattcttaaagtgggactaatccatatttttcaataatgttctctacgtattggattagtaataattgcctttagataatacagaaaaatggttcaatcactcttcattagtcatttgtctcatagtttctatatatacacaactacttgttacagccaaataccagtatatatactactaattaaacaagtaattaaaactgaattatcgaaatgattatatcaactaccgaaagtccaacagagataatcaaaatgtattgtttatcaactataatacaatgaatgttgttatggacagttagcagacgagataaagccacatccagtagtgatctcaatccttatcaagctagccaagtttattccgacgtggaaaatagttccaggaaatgatattattgacattgcaattaaagaacctcacatcagaaatcaggtgagtgattatgatctaaga

SEQ ID NO: 33663 - DNA, 1970 bp, Arabidopsis thaliana landsberg
agaacccctatcatgacacgcaaccattgcgtgtgcacatgggattctaattgtttgaaactcctagcaagagcaagactgctgttacaaagagatgtgaaactgctcaccgtcctttgcaacaactttgaaatcccaactgccaacagccgaaacagacatccccaaagcacctttaaaccgcttcataagttccctttcaacagcaatgggtatgtcgccaaccgttctagatatttttttcttcctagattcaaaccacctagcaagcattttcctaatgaattcaagcaatgcaacaacggggcttcccctagctggtagtaacgcattgtttaaagactccgcaatgttactagacatcaaattatatctctctcccgtaaaatgaaccgtactccaattcgcaacacccattccttcaatgtaattccaacaggacatactccttttttttatcctgtcacgaacattattaaaatctttgagacggaatgcgttaccagcttgccacactaaagctcgaaggccactcttctttccataccttcctttatcattccttcttatgtggaccaaacaagctctatggtgtgcttgagggaacacaagactcacagacttaatattggttgatttcgatcatatacaaaggtcaattcagggccatctttgattatttcaaaaagcttattcatgaaccatgtccatgattcatttgtctcgctgtccactacagcaaaagctattggaaaaatctggaagttagcatcctggcaactagcggtaagaagacagccaagatacttaccaaagaggtgtgtaccatcaacgacaacaaccctccgaatatatttcaacccttttacactagcccccaatgacaagaaaacatacttgaatcggtcatccccaatatcatccaactctgtttccaaatgataaactgtgccagggtttgcaagttgtaagacatgaagataaaccggcaataaagagaaagagctctcatcagtgccttgagctgtctcaacagccaattctttggctttccaacatttccagtacgtcatccgaacattgtgctccctcagaagagagtcgggtaaatctcttgctcttggaccacagaaggccttggcatacttagcccttaggagagcagctacaaccttggacgtagcatgttttgaaaagcggctcctagtcagaaccttacacacatgttccaactttgccagcctcacttcatattcttcgctgtcgcctccaacttggtgtggtctaactctccaatcacagttttttttgtcataacattcagcaaccaagtaatgtttctcatacctagtaaatttgtagcggaaaatacggttaatggcataaatggacaaggcaatcctgaaatcttccctcgatgcaaaggtccttccaacaaacatattgtcatcctcttttgtcaaatcaacgtaagctgcttttgcatcaatatcatcgtccccaaacatcggctcgagatcttcgtacccatacacttgatcaatgcttatacctttctgacaagtttccaaaagctctgtcatagcaccagggttggtattttgaagcaaaactttctttttgggggggctgctcaatgaaatcatcatccccgatgtcttcatgtacaacaatctctttatcagattggagagtgttttcatggagggtatcgtcgtcgaactcagaaacttctaagtcactacctgtactaagagaggaagattcgtcagattctgctaaagactctgaatcatcacctgaatcaggtacttctgccggtagggatgtatccacccctgcagcggtgacaaaagctccagacttctccactgcttctagggcttctaacagagttcatcgtttatgtcccattgactggataaatcacaaacggttgtactctgaacaaaagcagagtgattgttggg

SEQ ID NO: 33664 - DNA, 1130 bp, Arabidopsis thaliana landsberg
  unsure (1)..(1130): unsure at all n locations
cacaaacatctaacaaaaaaaactatcatttgaaggtcaatatgtttttgttttaaatagaaacataaaataaaggagggaaacttaattcagaagcaacataaaccatcaacaaatgagttttttagtgcatcctttcattgttttctaggtgatttaatcgccatattcaaactaacgaagataacttaatcttactgcaagtaaagaaaaaaattaacaacaaaaaatagttttagaaagttttaaacaactaaagaagaaaacccagaactagaaaatcataacacacaaaagaacattcaataataattaaagagataacaaattatcaataatagagagaaacaatgacaaaaacaattagagaacaaattacggaaacaaagaaatatacgaaaatttagagacgtgaaaaagatagatggaactaatgaaagatatataaaaactaaaactaaaaatggtaaattgaaaatgttaaattttttataaaatccaaataatttggatggaatagattctacgatcataaagaaaaagaagaaaattaaaatgttgagaaaagaaagtgagattaaaaaatttttctttacttacacatgttataggtttttttaacgactgatgacagcatatttattttggcatagtcaatgaatgcttatgtttcaaatatttatcaacgtttaattcatgttttaaataactgcagatgaagttgatgtttaaaatagctaaaatttaaaagttgactaacagagtcgttaaacgggtgataatgtgcattagaggttccgactaataatgacatgtttattttgtcatgatcaacgaatatttatgtctcaaacgttaattaatatttatttcatgttttaaatgaccacatatgaaattactgtataaaatggccacaatttaaaagttgggggagtaaatgaccgcatcctctagtttgatatttttatgatcgccatgaactgcttaaataatttaatatatatatctaggaaatctcaattttctttttgttagcagcactcttggagtgaaatgatatatgtcgaacaaatatttaacaatgtgaaatccaatatntatatatacatatatatatatatatatat

SEQ ID NO: 33665 - DNA, 2567 bp, Arabidopsis thaliana landsberg
tatatgcaactgttctgagctcccatttcctagaataaaagagtcaatggggcattcccagaatcgaagtcgggacctgttgttgataatatataactcaatgcacaactgtcgttgttgaacttggataccagttttaagctgtgttcttttttcacttcctgcagttatctcttggataaattggcaacattcagctagtgatgttcttggttcattctgacatcgagaaactgttttcttgctgcacaatgtgatcaagtcaatggacgtgaaagccaaggtgcgttgtgattctcatttatttgttgcatttcagcagtttataccaaacatgcgtaatgggaaatagttttctaatttaaacattctagaaattgtgagaaaatgcactatagaacatattttgccatgatagctcttagctggtatccaaaaaggtcaaggggcattccgagaatcgaaccccggccctctcgcacccaaagcgagaatcataccactagaccaggggccctgttgttttgtatacaattgaagcattatacctgcagtactacaagcataatattgagatctgtttgaatctactgtatgagtttagtgtgattcttcgttgcttttgtaagtcagatttcctgctgaatctaatgcaatatctataaatgaaattcgataggagttaacttcatgccgtaaaatcatgcatcttgcatttctcttgttgtaagctctatgccaaaggttttctgttgtatgtcaagctatctattccttttatcaagtgacagagagatgcataagcataactatccttttctggagagtgttactttcttatctgcccttggttctctaatgcagcatctctctagtgtaatttctgtcacaggaattcttactgacaaaaaacaccttttcctgaggaagtggaagatgcgtttaatgcacccttgaatatgttcctcccatttccttgtcaaaggtagttgtgtttttatttcctctgaaagcatcagtaccttaaacgtacttgtccaggatgataaatgcatatctcaggagagactagagcggtgaaaagtatttgatccaattctttagcttgcgttcaggagataaggattagttattgtattatagttgccggaatctgatcagagccacatctgttatttatcaaaataccatctgctttcattgagcagggcctatgttatttgtatccaacaattttcgtttgtaaactggccaagttggcattccgtgaatcaaactcggggttctctcgcactgtcatttatatcttgttaggttaatgcattttatttgggtttccaccagctccgaaatttttttgtcgacctggtttagtcgctcaaagtgtagtaagtttcctagtgaactgaatttaatttatatgtgatatgttcatggccgaccattggaatgtacctgaggtggctcagtggttaaagaagttcatgtaatgtttttagtactcttgttttgctttgtaggctatatggtggagcttgaagctgaagttgcaaagatagaaagaagagaggaaaagttactaaggaagccggtaatgaccgaccacaaagacatctgctcatatgttacattcatctctgttagttttagagtgtatctcttctcgtgttttgcaggcaatatgtaggaattacagaagaatcaggtagctcttattccatcttacactatttttctaccatacaaaactttatttaaacggcttatgcgacttaaacctgtcgtagtttctactggtggaaattacctgcaacctgagaattgaatcctccccatttagaatgtctttgggtaaagatctgctcgtaatgagttcatagatctatgatttaagctttgtttgacaccaagaaatccgctcttaccctctaaagtgcactttgtttgacaccaaaactgctctcaccaatcttattgtacgcaacttcaacgcttacagcttattaactccatcgttttttggtgggtttatacaacaggagatggagatgatgaatcttcaaggaagccaacataaaagctgtggaagatactgtcaaatatagatcatgctcatacttggtttctatagataaatcattctaattataatgtttagttgaactgtgttctcatcttttatcaaattgtaacctctctctctatacatatatacaggatcatcagaatctctttgcttagatattgctaaagcttaacctagacgcagatgtcaaagtcactcttctcattatgtttgtttcatcataaacatgaaggacaactctttgagatgaagaatttgacatagtcctccctcatcattatgtgtgtttcagataccaagaactaactgacttacaaatatgaaaaacttctactactgtcaaaagatgggaaaaaacatactgagtggtgtgactcacacaagcgttagcttagtctttttctgggaccgtattctttgcagaacggattgcacattgcggtgatcagaagcagaagcatagcctttagctgcatcacta

SEQ ID NO: 33666 - DNA, 677 bp, Arabidopsis thaliana landsberg
  unsure (1)..(677): unsure at all n locations
ggtatgtgcatcaatgcatctaggtgaggaatgagagcttctaaaactggtatcagaagctgcatggagggtgtattattagtgcacataaagtgtgtattcattgggttgtgtcatgtggattcaaaagtcttggcagagggatttagcacatttatagtcgaatcaatgtttatcatgtgtgagggtataatggccacacaatatgctattctagtattagagagtccaattagtagtaaaagaatacccaaaaatgtagagtttgtcaaccaaggtgtttttattcacacatttcgagctaatactcacaaatacatgaagaatttgcatttaggatggaattattttccccaatccatttatgaacttggtttagtgagagaataatagtagaatcaaaagcaaagtgagtacacaagcagctaaattagcttcacgagtattacccaacattcaacatactctctagtctctacattatgaattaattccatgaggtatttgtttgttggttaactccaacaaacactctcagctntctagcttcaaaacaactataaacttgacatctaagtatatacaactcttaggtaaataaaaaaaaacttgggagagacattatggcaattaggcggtgcacatcaggttggtacttcaagcaccaatctactact

SEQ ID NO: 33667 - DNA, 2583 bp, Arabidopsis thaliana landsberg
  unsure (1)..(2583): unsure at all n locations
ggtactattatttcgctttccccgcacaacaaaaaccgccgcggttaccatccgaaccttcaggctagcttgtttattgttttaagataagttagcgttcttctggatcctctcttgtttacaacaacaatgtttatggtgttggtttctgactttcttcgatattgaagactactgaaacatgtttcttctatagtactccagtcttatggtggtatcacatatannnnnnnnnnnnnnnnnnnnnnnnnnnnnnnnnccatatacaaaacatacatagtaacaaattacgagagcttaggatctgtaaagttttttatcacatatacttcttttcaacaagcttcttgagttgttcgattttggcgatgagctcaggatgcataaggtcttttgcttccttcactagactcccttctctgctgaaatgatacgcttccaacaccgttttcatcaagctctgcaaatgctcaggcgtcctacagagtttccatttgtacacacaccttaaggttccatatctacataaatgtgtatatataagatgaccaggtctagttttctcattcttacgtgtataagtagtctacatcagtcccttcgagctcgtccccaggggtaaaagcatcttgtagagcgcttatctgttcttggggatcctctattgatagtagatacttaagtattctcacctctttcggcatcagcctctgcagattccctcttgctgttacgtacaagtgatacaatatgtcttttacctgtcaagaaccaacaccagaatggatcaaagaagctatgtagtgggttctaaggactaagtagattcctaagttgtatgaattcaatgttatacaacgataatgttaacgattcctaagataacggttttatgagtttagtacctcttctttcatcatgttggattccttagcagccgaccaagctttagtgatcataagaaccaacgcagaatcaagttgattcttctcagccaaactatcaatctttctacaggcagcatnnnnnnnnnnnnnnnnnnnnnnnnnnnnnnnnnnnnnnnccgcagcatttagcgcatcaatgctttctgttgaagtgtcataagcttgtacagcagctatagacaacttcccaagtgacgcaagagcttaccaataagaaaagttatcattgaacaatatcagtattgttcaatcccttaacttatttcactgacagggcatataaagttttaccattttgctcatccggattgtcatagtaggattcagcaacagtatgcaaatgctcaaaaaactcgtttgtgaaatctttacgacgcctagcaacaagttcaccaatttcagctggtggtgtcctcttgataacattgagaagctcattatgcctttgaatatcttcatcaacctgatttcaaaccaatgtcaaaatcaaatgacaaatacataaagagagagagcaagcaacatgaataaactcacctccttgagcttccttgcaagtcgatgaaccttatgcttcatctcagggttatcctcagaatcagctcgttcctgacaccgtttatagaaatgtggccgtatactatcccattctttgctaaaagctaacaatcttctccaatcagatggtgtaggcttatcaaccataaaaacctcaataagcttatcacaaactttgatcattctctggttatctacaacaacctcttcagaaccatctttcttctcctctttagctacaacacttttatcatccacaacagctgagataacaaatctctgaggtctttcactcttgaggttcaataaacttcctgagacatttcacagtagttataacaatatcaaaccagtaaatctaatggaaactataactacctgatactgcaataagatatagtttggactcttaagcaagttaagagattttcaatagcatttgacgaaagacagaaactttgagataaatagttccatttgtaagcaactaaagcaagacttagtcttaatcctctaaaatcaacaacaccatagaccatgtagaagcaagtaaagtcacaaactttcgaaggatttaacatagaccatgtagaagcaagtaaagtcacaaactttcgaaggatttaacatagaccatgtagaagcaagtaaagtcacaaactttcgaaggctttaacatagaccatatagtagcaagcaagtcacaaagcttaaaagttttgaaagtctttaccttttccgattggaagactaccggaagtgacatgaacatgattgccgacgaaatacagaggagagactaaacgggctccgaattttacagagcgaaagctagaaagtgaacaggaacatgaagattggaataacactgaaaccattttctttgaagaagatgaagctttcgcatagatgatagaagaaagggttttagccggagaaattcttcttcttctgagttgtgagggagatgaagccccaatggcacttttgtaatttttcttcataaaaagggcttttcagtagtaggccctttaacacggcccaactagaacctagcaaggtttagcaactcgtcttt

SEQ ID NO: 33668 - DNA, 3002 bp, Arabidopsis thaliana landsberg
aagattacagagagctcgtgaaaataagagcaaacaagctttcaaagaagcactctcgttgtatggctgatggcaacgagtttcttgggttccacggtacaactctttcttgcactctcggtttcagtaacagctcttcaaacctctgtttctcggatcactgtgaagtttgtcatattctaagacatggtttcagtcctaaaacaagaccagatgggataaaaggagttctcacagcatcaactagctctacagctcttgaatctatcgaaaccgatcaaggaagaaatagaggttcattgatagctgttgtgctatgtagagtgattgcagggagggttcataaacctatgcagacgtttgaaaattctttagggttttctgagtttgattcactagctttgaaagttggacaaaattcaagaattgaagagctttacctgttgagtacaaaagctttgttaccttgctttgtgataatcttcaagccatgaaacaatcccgtatatgcaaaatttattctttaggtttttgtatagttttctcatcttcttttttcttgcaaaatttggtgggcctgtaataggttaaaaatgttgggctttccccaaaattgaaagatggaaaacttgctggacaagtctatgcccagcctctatatttaaagggtgaagaagactgtaactgttagtgctaccattttcttcaattagggtttctttgactagctcttcgctaagaacactcatgtctcctctgcttctgagccggccttcagtgttctccctccggaaacctctgtttgtaagatactattctcttctctccccaatcacactttgttcttttttaaattttttgatgatgttttgctgatgtgagatcactacaattatactcagagacgccctagtgttgggtgcttgtcatctcgacgctgaaccttgcggattgggtatgggaaaactcatgattgcaattagtagtgataattcgatgtgggttttggagaagaaggcccctgtggagttggtggaaggaggaaagggaattgtaggagcatcccatgggtgggtagctactttgaaagacggagtagtgtgtctccaagatgatctaaacccaagcacatcgaattcagacccgaaacgcatctcattgcctagtctagtaactctacctcattgccaaacccaagttgtcaccaacatggccatgtcttgctcatctcctgaggaaaatgactgtgttgtggctataagtcttaggaccacaactcagcttatgtagacccgctcaaagtaaccctgagtggatcaacatcgagattcagaactcaagcttcttctcttcccctgtcatgttttccaagagagttgagatgttctgcataccttcttctggaggtcacgttactggatcgtgggatctccacaaacacaagttgcagagggtgcgatttcgaaaccttgctaagttgacaaagaaggaatggaagcttttggcttcgtgtagcaggagcgaacatttggtggagtcagcagaaaatgaaactttcttggttaagtggtacaggaagaaaagcaaagatttgaagagaatgatgacaacaaaggctgtaatggtgttcaagcttgacaaagaaggaaatgcttaaaaaaaaaaaaaaggaaaaaaaaaaaggaggaaacgcggtttacactcaagatattggagatctctgcatttttctttcaaagtctgaacctttttgtgtccttgctagctcttttcccggactgtgccctaacaatgtcatactctttgactgtgacgaaggcggctttttcgatctggatgattccaccatcattactgatgtgatgcctacatcattcaaaagcaattaccttatgccaccccaaaaactagattagtaccgtagtttggaactgagtcttttcttttcttctcctatattattaccatggtcatcattggtaatggtcactagttttatcttggaacggaaccctttgtttagttccatcctaatctctatttgcttagttacatcatgagtctgcttttggttttcaacaggttcttttctactacctttgtgtgtctctctatagcatatctagtaaccactcaacatccttcacaagcatcattctttcaggaaatatcagaaaatccccattattttgatgtctctgtttcatcatgtccctcacataacaatggccggcacatgcattgtaaaaaataatcaagagcataacaaaaaaagaaaaactgatgcaagatcataaagaagccacattgagtattctggcaccttaccttcaaacaaatcaacacgtttctaaccaacacaaatctgattcaacaaaaatgatccggagaaacgacttcacaacacattgagatctaagagcatctccaatggatccaatggactctctccatttttttatgattaattcttaaaaatagttacatggaaacttttaattttgttttttagtgtttgatattccaatggtagtttctcttacaaggttctctggaaaaaaaatattattatttaaaattatttatttcatacaacttaataataactattacaaattataaaatattaaacataaattattttgaaacattttaaaatagatgtgcgatatttttttggaaaaacgatcaactgatttgttgattgttgcgaaattttttggtacatgctcgcataatatttaaaaccgagcttacaatacttgatctgttttcgattgtttgatggacgatggttttgtggtttaagaagacgaacaattatgagttttgttgattgttttactttgagatatatgagagaagaggcttgcattcataatatattgttgtaacaagagcattttgtaacttaaacaagagcgttcattatataaaagttagaagctcatcaatagaaaataaatgacgtgtttgttacaaaacatcccttcttcttaaag

SEQ ID NO: 33669 - DNA, 908 bp, Arabidopsis thaliana landsberg
taatattaattcccttaaaacaaagtctacactaatctttggaactgtgaaagtaaaactcgagtattctcgtcatttaaatttttgttaacatatacaattccaattcttttttggaaaaactcaaacaatgatctccgatcctaaccttaaatgaatctttcaacgtaaccctaggctatatatatgaatatatcatgcatgaatgagtttcaacgaagtttacaatggcaataataacggggtttaattacaatgatgacattcgacgagctaatttgacaaacaaatcaccctcaatgatcgtcagcaggcagcaaaacaagtactttatatcaactttttcaaatctaccaagcaaatgggtgtaagtggtcactgacgaaatgattaaaccagaaacaaaataaaaaatagtttcgaataactcatgtatatgttcaatgaatccgtataccgtgttgattactgatcttgtccttatttgctagttggaaataaaatatattactctgtgaaaggaattaacaaatggggcaagtagatgttcatgtctctagacttagcggtcaaaatacaactacacttcagggtaatattatgtggcatatatttcttgtcccccccacaatttgttatcatgattttcttttatactcgatccgaataatacacgtacgaaagcttgagaagaatcgattccccagatagaagaaccattcgcttcttcattattttggagtaaaattcatttacttacgaatatatttccgttaacaccatctattgaataattgaatcacaaacaggtctataatcgttaatacaattatacaacgaaagaaaaaatgatttttaagaactagttttttgttctgttcttgttccttaaggtgaataggtaatga

SEQ ID NO: 33670 - DNA, 619 bp, Arabidopsis thaliana landsberg
ctaactatgaaccatagcactataacccaacatctttgccagttgtctaacaagaagaatctaagaccacggtaccatcgcttcaacgggttgcggttaaacgtaggcttaagcctctgactcatcatatgactcagattctttctctccccagtacttgttatcacagactgtgttgccgcttgcaaaagcagagtctcaagactctccaactgtttcaagattcaccacaaatgcttcaagtctcaaacataatatggcaaatcgtcaagacagctgataattacttaccatgatgtatcctatattgtctggatccaactcttccatgatcaatgctgcatattcatcagctctcttctgtattgtagatagattattcgcagaagcactaagactgataatctgtaaacacacaacaacaagaccaaaacagagttaacactgaaacagagcagatataacttataacactctgtatttcttacctctctaacttcgtcttctgtaagtctaccatcagcatctttatccaccctgcattatcatcactttcagattcacattctagagaaagaaaaagtaaaagaaacaaaaatcagtaaccgaaaaccataca

SEQ ID NO: 33671 - DNA, 261 bp, Arabidopsis thaliana landsberg
acggaacttcatgttgtggtcgaccggattggctctactaaaaatttttttactcttatatacaaaagctctgtctatgaatttgctaacttggaaatgccgagaaagttggttaaacacagctcttgcaatggtagtcttaccaatccctgaggaaccccatataccaaccattctcacttcctcagtttccaatttcaacaatacactcatatttgcaatatgaactttgatgcctacaaaattttcatagtccttgtg

SEQ ID NO: 33672 - DNA, 6234 bp, Arabidopsis thaliana landsberg
  unsure (1)..(6234): unsure at all n locations
ccctcctaagtattgtactcgatcacatttttggctgctactcagagacggatacgatgtcggctccgccgacgaccatggatatgtcatcttcttcaaatgcagctttagcttttcctaactctctccacgatgttgctggtttgtttcatgaggagattcctttagtggttcaggatggcaatgctaattcgaggtcaaattttttctcacccaagagacctgatgtagcgcatcttctcttatcaaacacacttgagctttacgtgtttgatattggtctatctttcttatttttgtttgggctttttacttgggctttggtgttatttcttatttactttttgttctttgacggtgttgctttctagggttttaagtcttatttaaggttacttctatggatttgtaaatgcagcttttggtttatgaataaaacatagaagttcttctcttctaaagtctttgaattctatgttcttttgaaccattgatacaaaagaacaagaaatcttagctatgaatctgctctttagaatccattgatatttaaagttcttttcatatttgatcctgtattacacgacctacaatgaaggacagctatatcactgtcttgatacgcttatggactctgcctcctacaacgagcaccacgtatcaagacccaacaattcaagatattatgagacatatggttatgcaaacacatagaatcatcaatatccttactcagcacaaactcccaacaataaacctttacgcataagaatctataagatcacatatgcaacttagtaccatcacaccattaatcaatactcatataattcacaaaatcattcaactaatgcaagagtatatgaacatgcaactaaacaagcaaaccatcacccaaataaataccaaaacctatcatgtgccatatcacacgcttcgagacccacatagatttggctgaaggtttaaggttagcttcaacggttctcggacatctcacgacttctccacatcattttcatcttgatctagcttctttctaagtaacctccctcattcttgagttttcacacaaatcggcagatcaaatcttttaaaagaagtcttgattcgactcaacaagattcacannnnnnnnnnnnnnnnntctcggtcgccgacatggatatcttatccacgaacaggttctcttgatcatggacatgaattctttagttaagggcaaaggatcttgatcacgggcaaagtttctcaatcgcgggtaagttttctctcggttacgggcgatctctcgataatttggcatcatttcggttctttctcctttctcccatcaaatggctcgagtttggccaagcatttataggtggagcaaattgggctccaagcaagcgcatgtcatctggtggtgacaccttgcgggacacatgtcgcccgcccgtgaagacacgaatgttgcagaaatgggacgatgacacgtggaaggggaaacttcggcaccaatcctcataaatttggctccaagcaaattttcttgggctccaattaagccagcccacttgtccatggcatgatcaaacggcgtcaacacccggcggggcaaacttcgtccgcggcacgcctgtgttgcccaaacttgctcattcttgcccatctttgcccttctttgcccaaatagttatttcatttttgcttttatggtttatcaccttttgggcacatatgggcaatcagccatgtatttggggcaacttcctctcgttttggcttcgcccggatgacccaattttgaactagaattggccaagttcatttttaccttgcccatctctttggatttcgtccctttactatttctttcttttctgttcttcctcggtcgttcctcgatgtttttttgcttggccgcttaccccttagcgagggtcattacaatgcgtgtttgattttgcctcaggcttgttcttgaaagaccacatgactagtgcaagtgtacagtatagcggagttgtattttaggatcgaatccacaaggataaaagtagctcagagagatccttaagaagagagtgaagctaggaccaaaattaagagagagggggttgttgtatgcattaagtaacccaaactaaagacaagtaactaaagtaaacggtaagcaataagagagaagtgttaggtctttgggggtttctccggatgtcatggttctaggtgtagatctcaatctaggtgataacatggctaggtttgtttacttccaaattcttagacatacaaaactctatcaagaccagctaacccctatgctaataggttaaaaccggctttactcactaatatcttgcatactcagttgccctaacggctagtaggtgctaacatggtttcaaaatacaagatcaaagcattaagttcaaattctattctagtccataagttctttattcagttgagctagttcaggcaattatacaagattctaccaagtataaaatacctaagatcatgtactaggtggcgttccagacatacatgcattaagattaaactcaactagaaagaatagtgtaaacgatcaaacaaaaccatagaaaccaccaacctaaatcagatctaaagtccccatgaattcccctttgaaaccccctcaaacccaactagagatctactcgctcatggcgaaggagctaatcaaaagttgggttgaggaaactataataaaaagacaaataaaacttaaaaagggtttagagattacttctttgaatgcagaacacaagaggcaaacctccaccttagagagtcttataccaaacgaaagagaaagagagagagatgctgatcttcgagctcatgaggtgcagtggcgagttggcagctcttggcgacggctaggattcgcttgtgatgaaggcacacctagggttagggcttagaaaaagtatttatacttgagggccaagaattaggtttaggggtaagaacgttaatccgctggttgaataagtgatcgggccgagtcgtgggcttcagggaaggaacctaatgacggtggcacaatgagggaaggacttgggtgtgacctaatggtcggtggtaagcttcttggaggtgcccgggttcaagtctccttggccggatgtgttttggatttattatttccaaacggccggttcttgacatgtcttcactcttcgggtcatatcttccaaacggcttcatggattgcttcgattcgactttgacgttaatcttgactcttctagctctccaatttaaccaagagaccctcaggccgtggtggggaagaccttggccggatgtgaaacatctgaaatacaaaaactgtcttaaaacggattttggtcgacttctactcctttttgcatgaaaaattaataattcttctttgaagctcaagtacttgaaatatgccttgaagtgtcctttaactcttgatttctccatggaaaatctaataaaaatatagtaaaagtgggcaaaaatacgatgttatcaactcccccagacttagactttgttgtcctcaagcaaacaacaaagccaagctggtggagagattttgaaaaaagcagaagtctcttactatcagagaccatgtcctaaaagatatcatgtggacgcgtaaagacaaagacttcacgttagaacattctcactatagaatcaaaacattcactatccttatccatccgtctcggacctacaagagaactcaagaatctcatcagttaaccctcttcatttattaaaagtagcgtgagatttctcactagagggtgtcattcggggtagacggcacttggtatgaaaggggatttttggtgtttaagtggtggagttaaagtgtttagagttaccgtatagtctcgaatgcaggatatgttgcaaaaccgcaagagctaacagattggttgaggtccacagtttccaaccacgtcttctattaaacacctctttctcctttacttctttcttactttcggttcccctagacttaggtttttctgagggggccctctactgcaattggctcatctctcctttaagtttccatgtcttattcttcgaactatgccactagactctcttggttggaatgtttcctttccttcctttccttttttattcttttcattttttctttatttctatggaaggggaaaacaaaacttcgaaacaccgagtctaatgagcataccttttgaattggttccaaggaagaataagctcttaggccatttggtttcaatctcttcttttacttccttcttcagtctttgtggcggaaaactgtgttgttcctttctcgctgacgtttttgcacatatctgctaaatgaaaaagaaaacgagaattcatgaggcttaaaaagaggatagggtttaagggtaggaaccattaaaagtgagtggccattgaggatcaggagagagtggtaaaaagggataagaagtcctgaatgtatatgctcgtttccccgatctaacaccccttcatgagaaagaattaagttctggttaatcgtccaatatagggtagagttgacgtcggatccaacattaatttccgcggggttaaacttttgggggacggtccgggtgtagtgttcaggattggccgttcctttcgaccttgtaagtgttccttaagatataattctcaacacataatggtcaataatcatcatataacaagatcacggttccctactggttttgactcaataaaacattactcgatattaaagaaaaaccttttgctttgttagaacatatcggtgttaaaagtggaaaaatgtttcaagtcaacaaaatagagagtaccattagtagtaatggattcattaatcccccagacttacttcacaccgtccctcgtgtgagaataagcatagggattaatccgtgagaaagacaggttaagaacaaagtcaccttgtttgtggtgactaaccggatgatctctctccttgcttaacagcggccttacacgatttagtatggttgaattccatgatattaatctccattcccatcttccttgaaacaaaaacctaaaaccaccaatagctttaacaaaataaaataaataaaaacatatctaagagagaattgatcttgtttttgtcaatatggccacgaataaaatcaaattcgtggtgacggatggtgtcaatggatggctggccaggtgctgtgcttcgccgaaagggtggagtgggtgagaaataagcggctgggtgttggttggggtcgccggccattgggatgcgcagaatggtcatgggtcaaacgaatccattgtcgggccgatcggccgtggcggtgcaacttcacttatccattcacgtgttggccatcattggccgagtcttggctggctaagttttgggtcggccgaacaggcgggcgtgatagtatgttgcccaggtcgtcgggcttgctctgctgccaggtagggcagctccggccaaagtgtggcacagccgggcgccctccgaccaaaggttggagcgcatgggcgggctactgncaaaaattggcacgaccgggccggcttctcatgccgtgccagttactcgaatcagtagatgggcctgttgtcacggtgcctagtgacgggtccaagtgacccttcttccttctcttctttttgggtttttctgttttctatttttctagttttgtttattttataaaatctgaaacaaatactagaaaggttaaaaccaaaagcaaaataaaaatcccaagggaaaagtagctacctaaagggttgcctcccacttagcgcgcttgtttaacgtcgttggctcgacggttgggtcttactaggcgtggtaagacgggttgtttcgccctaggcgacctttctttgattgaaactccttgggaggttcttccgtgctctcgccatttgacctccttctcctttttgagcccggggtaaacggcaccatcttgtggaacacttcatcatcgatgttggcgaagaatactgtttgattaagccaatccattatagtgcccgctgtggctaggaacccgcctcctagtatgagttgagagggtcttcctttctcgacctttatgacatggaaattggtcggcacattgcaccttccaacctgaacatagacgttgcagactatcccttcgggaaccatgaaagacgagtctgcaagtccaattcgcacatccaaagggt

SEQ ID NO: 33673 - DNA, 1230 bp, Arabidopsis thaliana landsberg
tcaattagaattcagctgataccatgtgttaagcagtcctgatgcattggtggtatctatttccagtgaagggtgtttggacagagacaaagatgacaagggcgacgtaaaatccctttctacacctcgtgaaagcagcgttaacaattatgcgatagattgccttgaatctctcaaattcacatacaaggtgtagagaaaaacatttagtcttacacccagttgcagcgtagtgacatattacagtgctaacatctatctgtaaaagatcttaactattttccttttaaggtgccgtggccgcttgagcttattgcgaacagcgaggccattaagaagtataaccaggtaaccctttctcatccagctatttttttggggaaacagtgtgatgttctatgtgttaattgtttaaatgaaaacaggtgatgggatttttgttgaaggtcaagcgagcaaaatatgtgcttgataaggcacgaaggttgatgtggaaggtctttgatatctctcaaaccatttctttccatttagactgcttcatttgacatccgaatccaatctcagatagcctgagtagtcttttgatatacgtaatgtactgaggagtcataatgatgtggtttagtttgataaacttaatgactttggtgtttatgtattatagggtaaaggctctgcaacaaaaatccgcaagcaccactgtttactggaacaaaagctcctcaattttgtggatgcttttcatcaatacgtaatggatagggtaatgtctaatactggataattggttctaattaccgacaaccgtattagtttccgtagttataagtatgtgcaagtgttgttgcaaaattggaagttgatgttatggcttcactgggttttacaaacaggtatatcacactgcttggcgtgagctgtgcgaagctatggtaaaagcagggtctctagatgaggtcatagatgtacacgagacgtacttgttatcgattcagaggcaatgttttgtggttcaagaaaagctggtaattgaccatttgtatatgcataataagtattcggatttgtagctataaaaccaagtatctggtgggttctgtacacagtgggcaatcatcgcaagtcggatcaacatgattctcggtttagctctagaattctactcaatacaacagacgctgagcagcggtggagcagtttcagctatcaaggctagatgggagatgg

SEQ ID NO: 33674 - DNA, 1629 bp, Arabidopsis thaliana landsberg
  unsure (1)..(1629): unsure at all n locations
aaagaatcatattataatatacttacattaatatatgacctccataaaaaatatttgtggctccgccactgctagtgggtgttctcaaacctgtctgagttgcttttgatgtgtcatgctctggattggtagccagagacagtttctttggttgttcattggtgctcacatgtcgtcggttccgtttttacatttagtttctggagaagctgaagtgtccttttgctatgaggtttgaggactgattcacataggatatgctggtggttctcgtttgtgttttttgttttatcattttttcatagtttttgatttttttttttaatttcttttcgtttttcatgtatattttgcaacatctaaatttagtataaatctacatatacatttttgcagccattttgtgaaataaatcgtgtagttggaatttatttacaattgctgccactaaattttaatgtttgtttttgataattagaaaaaaatattcaaattaaatatttgacatttaacaatctttccaaaatctctcccaattaactacacgattagttactaaattaaaacttccaaaatatttaatatcatttaattactacaaaattatcatttttaatattgcttttctccatgactataacaattcgattataatcatcaaagcgtagaaatataatttgatagcatttaattactacaaaattataaaatatttagacaatgattcataaacatatcataaataagataacattaataaaataaatgggtttttttacgggacgggtttggcaggacgttacttaataacatttgtaaactataaaataaaatattttatagatagatacaatttgtaaacttttatatatactaactttaaaaaataaattgtttatgcggtacaccgcgggttaaaatctagttagaatgtatatcgcgaactggtagagaataatatcctttttcgcgcaagggaaagtcagttaccggtggaaggaggaagatatacaatatggtcggttaaattttataatatgattcgactgaaatgtgaaagagttatatagggttggctacctatttggacgtttaggaagtaaaaaaaggctacagcttaaactagcatatatgtacatgactattttgatgtacatagtaacatataggtcaacacggtcgagtacgatattattgtgtgttccgacttccgaccatctcataaatcaatgaaaaatgtactcagccatatctcgctcattcgataccacgtgtgtaagactacatagtgctttactgtagtttctaattttaaaagaaatggatcatggatgggataatgagcagaattttcaatacttgaattcaaatttccccgtaaatactgtatgatttctacctagatattccattgggaatccaccaaaattaataatggaatcgttaaccaacaagatggatttgcttccctttgacccaacaaaaaagtcactggttcctcattgtctctntaaaacgcacatgactcgacagtgtcggtccttcatgcgaacttatactactattttaataaattctaaaagtaaaaccgtccggnggatggcttatattatatagtctagtttatag

SEQ ID NO: 33675 - DNA, 2381 bp, Arabidopsis thaliana landsberg
  unsure (1)..(2381): unsure at all n locations
tcataatgaccttccaaagtatgaaatgctgtcttcgctataacgtcttcccgtatttcatgatagcttgcttgcagatcaatcttagagacaattacggnnnnnnnnnnnnnnnnnnnnnnnnnnnnnntgacagggatagggaacttgtcaagaatagtagccctgttaagagccctgtaatccacacaaaatctccaagaagcgtccttcttttttaccaaaagaacaggactggaaaaagggttgttacttggcctgatgatacccgcagctaacatgtcctcaaccatcttctccatgataactttagttgcatgagggcaacgataagtcttgacagtaatggcatgtactcctggttgaagagtaatagtgtgctcatgtccttggacaggaggtaaaccaaccggaagcttaaacactaatgcaaacttctgcaaaaccaatgctatcgcttgtgtgtgatgagtaatcaccgtgttattcaccaaaggagtaaccacatcatccggtgaaaaagactccacaacaggcaatggtgctttcacaactcttaacgatagaggaggagtgtgtaaaagctgatctccaaccaaatgcacagccttcccgttataagtaaaccaccactcttgtaatttccaatccacttcacacttacccaatgtgactaaccattgcatacccaaaataatatccacacctcctaaatccagagcaatgaaatcactttgaaaatccacaccactcagttgaaactgtaccgctttacaaatgctagagccatgcactgaaacaccatttccaagcatgccatctaaccctctagccttgtacaattgcaacttaagtttggcagccacagtaggagtgataaaattgtgagaagctcctgaatccaacaatatcactactctgctcttgccaaatacgccaacaagttttgttgtgcgtggtgagtgtaatcccaaaaaggagttcaaagataaggattgacaagctggtggttcttgaacttccataagttcagtgtcaacaaccagcatctcatcgtccaaaacttccaattccaaaccatccacaattgtaagaatctgcaattctttaagaggacacacatagcctctagtgtacttccctttacacttgaaacagatacccttagcacgcataacatccaactcctcagatgtatctcgctgtcatgttggtaacagcgatcgcaatcccactggttgtgaacctcccggagtagatccactggttagcaacagaggtttgttctgcggaaacacagtagcttgccttggtgcaaaggacttcacaggaccaacctgtaaaaaaaaatctcactgataagttgaaagaaagagctggcttccatcctcaacattgctgccttctgatgaggtaaacccgcgactccttcatcttaagcacctctttcatctcctgcttcaacccattataaaagattctctccaaatgaaagtcatgaaaactaggtacttgaggtgataaatcctcaagttaagtcacatactcagccactgtgccatgttgtgtaatcgcaaatacccgatttcccggatcatcttcattagatttaccaaaacacaagaacaaacgttgacggaactcaacccaagaacaaaactcacaccgatcaacctcccaattaaaccatttcaaaacatcaccctccaaactcaacgccaccaaatcaagcttctcatgatcggcgtaacgacccacacgaaagaaacgctccaccttagaaaaccactcatacggctgagatccatcaaacacaggcatctctattttgcgcagcaagctagcacgattatccaacacaaaattattctcaccagatccgcgttgttgaaacgctgagttaatcacactctgtggggaattttgagaaggatctggtcgatcagtttgttttccagcacggatctccatcctttccaacgttgcagccaccgttttcaacaatatgtccatcgattccagcttctcaccttgagccagctgcatttcattcatacgtttgtatccacccttcaaaaacgatagatcgttctcaacacccacaccgccatagctgtcttcctcatacagctccgatccttcacctacaaccatcgcgacttacaacgaaccgagatcatcgcaccaatgatagatttaagatgatcgaccaactcaaaactcaacaaaatgatgaataaagagatattagcttttatcgaaagtatgatttgaaaactgagataaatttgatcgattatcaacgagataatcgatttgttaaagagaaatacaatcgttcaccactctcaccagtaacgattacacagagctcaacatag

SEQ ID NO: 33676 - DNA, 429 bp, Arabidopsis thaliana landsberg
aatggtttggtagtttagaaaagttgtactagtgttgtttttgtttgcttcaattaggaagtttagaggcatcaaagtgattatttgaatacgttttctttctgtcgactagttgaaccggtttctaaggctaaatgttctggttttggggtatattgcagtcacaaattaatgacctaatgagcgattctacgtgtacagagttgcatcactcgaattttacattagataaggttaaaataaagcagaggcggtggttcggatagagtaagagggccaggccttctctaattagtcgaagcggtttttggcaattttacttaattagatcaaatcagcgattctagggtttcttggtctggttttgttcggcgattacttgagtttcacgtttttggttaggatttgttacgggagattcaacaagtt

SEQ ID NO: 33677 - DNA, 735 bp, Arabidopsis thaliana landsberg
ctctctttctctctctatctatcttctctttctctctctatctctatcactgaaacccaaagagatccaccatttgttcttttttccttcacacagagaactgttttcttccacacttcctttttactaggcagtgttaaccaattgagagagaaaaatgatggttgatgaaaatgtggaaaccaatgcctctactttagtggcaagtgttgatcatgggtttggatccgggtcgggtcatgatcatcatgggttatcggcgtctgcgcctcttcttggtgttaactggaagaagagaaggatgccttaacagagaccatcttcttcttcctttaaccttctctctttccctcctcctatgccttctatttcccacgtgccaactcctctccccgcacgtgtaagctcttcactctttttactaattttccctctctctctctctaaatattattaattcaaaactattttttgttatttttataagatctgtgaggatccaaataaaaatagatttagagttttgtatatttttctattggattggttttattaaaaagattcaatgtatattgtgatgatgtcagaaaattgacccaagaaaggtaagattcctcttccaaaaggaactcaagaacagtgacgtcagctctctccgacgtatgatactcccgaaggtgatctttgattatatatgatcatgatgatgattaatgatgttggtggtgatatgat

SEQ ID NO: 33678 - DNA, 2007 bp, Arabidopsis thaliana landsberg
ttgatactgatttggttaatccttgaagcctaaccaaaaccaaaaacacatcttagaatccgaagtagaaagccgtaacaagattgtgtgtgtgttttttttgccttttttacctgcgagcaaaggcatcaagttcggcttttctgagttcagttagaggaggagattcagattcaacaatggagcttttaagtctctctgaatctccaaagagtaataccaatttaccaagatactcttcttcttcctcggataggtttgcagcttcgatctggtctttaaggatcaaaaacggattcagaaaccaatcaaaaaacgcatcttttgggcggtttctggtagttatctccgttacaccgtcacctaaacaaaaacacagaaacggttttgtttgtttcttgatgatgttcaaatagttactagataatgcggttatgaaaattgacagaaaactgttgaaacataccgagtaataaaccggtggagttagatttgatagagcgtaaaagctcgtgaagaagagaataagcaggtaagccaaagctgatcacttgactgcctttgctagatttagcttcttcaatgtcttttgaatttataatccctttcgttaccataatctctccgtgccgcctacattccacaaatagagcctccaaaagctgcaaagatcaaaagaataggcttcaggtttaaatacaaagataaccaaaagaagagtgtgactagtgagtacatcaagcggtttcaggtcaatcattgggcctttgtttgatcctcctcttgatggagttgtcttgaaggagttcggtcttgaaagaccaccagaaaatgccgtactagcgccctcttcgtttcttcgatatattggcctgttacaaaaccataaaaccactgttttagaatgaaaagaaagagagagaggtaaagattgctagataagccaatggagacaaacctgggaaagcaagaaccttcaggcatatcaagaacatcgttgctatactcatcgtaaatagaaacagaagcaacaacatagcagagaccgaagaagaacgatgactcctgtgttatgacaagagaaaccaattcagtatcatcagcattcacattttcctcaaaaaaaaaagtcattgtttaataacctgatatgagactacaccgccataagcaccaaggaagacactagagaccacggatcctaaaactgctgcacaacagctaatggccagagtaagatcgcgaggcctgctatggggacacacattgtctccaagaaaggaccttcacgtccaatgagatcatgaaacaaacggtgccaccctttgaacaacatgtacgggcttttacacaatgctaagagtgaaatcactgggaaatcaacaagaattccgagaaccgcaacaatcacagcacctggaatttgaagtaacctgagaaatataagtgaaaactgcaagaaagcactgttaagtaatcaatacacacaatttactgaaattttctgaagaccttatttcataatagtgacggttcgcagtagatgttcgaagatcatccataagtgagaagtatgaatgaaagcaaacatctttaaaatcccgaacaacggtgaagctgcgttgcatggtgctccaagttccatcataaaagcaatggaaaaactggtaaggcttgccttcaccaacagcatcaaaggtggcgaaaattggggagaagaaaccatataaagctcctcccaaaacacttcctaaaataccaacaataggccagagaatgatggcagcaggaagacataagcatagaaagatcttcaagattggtcctacttgtttggcactgcatgttagaggaaccaaaataagatcatctttataagatcatctttaacgtcataaagatagagccaaggggttgaggaattagttacctcacgattgaatagaaagtccaaacgatgtggactggtagaagactcagtatgaccgcggagttgcctatagtcac

SEQ ID NO: 33679 - DNA, 724 bp, Arabidopsis thaliana landsberg
  unsure (1)..(724): unsure at all n locations
ttaatttatcattttaagagaaagaaaaaaaaccaatctaacatgtagctctctctttgtgtgacacttttatgatctgcatgctttgttcatgttctttttaatcggtttattaggactgagttagcttaggaaatctagaaagaaacatcgcattaccctttgactcacaatagagaaacatattaaaaacgtatttactgcaatctaaacatcaagcggttccatggtctagcggttaggacactagactctgaatctagtaacccgagttcaagtctcggtggaacctatttttatttttgttacattttccatctgtttctcttcttaaaacttttgttttccccaggcgataacggtttatgttagtttgaacactaaaaatggtgtgcacgaacatcatagtgtttcctcttgttcacaagcaatgaatcagctgtgttttgttgttcttgagcaattccgtgaccaatccataacacttatctgacttgtcgattaaacacttcaccaaatccaacacataggacatatcacaatgaataaagactgattcatgagctagtctacgactttaacagatacaacattatcgntaattacttaattcccagctttgtccactgtagaacgagtaaatgattatgtctactcttgtcaataaaacttctagaatcctagcttggaggattcttacaggtatataaccaataaaaggtaa

SEQ ID NO: 33680 - DNA, 718 bp, Arabidopsis thaliana landsberg
tttctatgattagaagtttcctttttatatcgtattttatggttataacacttttggattattggagagggtggcttgggttatgatacctgggttttgctttatatgatcactacattgagtcttacatgttacattggttggttacatctgcagtgtttagtgttgttaacttttcttagaaatcgctctttgttaaatctatagtatctcttatgttcttatacctcctgggttatctttggttagctgggaagggtgagataccctttctatataaatccattttttcccatctcggcgtttccaggttgcacgagcgtttacaacagtgtgacggtgatgaggctcctcaaagcagaagctggtgctaaagttcaaaagtttactgaatgggcactcaaatgtgtaggttttcactcccgatgccagggccctagagataaagctaaccaagactcatctgctgagatccaactccagctttctgctttcaagatgttcttagatcttgcaggacaccatctatcaggaaaggatttcacagaagcctttgatgcagcttgcttgccgcttacgctgttctctacctcgtttaatcctggctgggcttctggaatttcagctactgtcatacatggattgctcagcatgctggtggaaggaggcgcagataatgtaaatcagtgcttccttgaagcttctcgttatgggagca

SEQ ID NO: 33681 - DNA, 1085 bp, Arabidopsis thaliana landsberg
gcccctgaggtgttatgtactaactttcagcacttttaaaggcaaagaatattaaatgttctgtagatcctggttggaaaataagattgtaaggaattcaagaactgctaatacgtttttaaaaaggaaggaaatctaacaaatgctatacgtatatatagacttcatttgcagaatcttctttatttatgatgtatataagagatatgcctttaatgttgtctactgcattgtgttggatttgctggcaggttttgtcggacaaaggctatgacggtgcagcagcagatgtctggtcttgtggtgtcattctctttgtgcttatggctggttacttgccttttgatgagccgaatctcatgacattatacaaacgtgtacgtgtaaattatctctccctctgcttcttgatcttctgcagtacttttctagtctcatctttggcgtttaatatatactttagatatgcaaggctgagtttagctgcccaccatggttctcgcaaggtgccaagagagtcatcaagcgtattctcgaacccaaccctattaccgaaagggcctgggacattttgaaatagttggggaattgtgaacatgacatgctgccaaccatagattgtgcaagagcttaagtatgtacttatttctgaaatgcagagaataagtattgcagagttgctcgaagatgaatggttcaagaaagggtacaagccgccatcatttgaccaagatgacgaggacataaccatagatgatgttgatgctgcttttagtaactccaaggtaaacaccgccatttccaaattctccatctggttgtgtatatcatagttcggtttaagtaaaccaatgtattgttaccaactaatatcactctttttgtgctgctactctaggaatgtcttgtaactgagaagaaggagaaacctgtatccatgaacgctttcgaacttatctctagctcaagcgagttcagtcttgaaaacttgttcgagaagcaagcggtaagaacttttttctacttacagtttgtcttgattttctaaaatcatgcataggttttatctaactaaatctgatttg

SEQ ID NO: 33682 - DNA, 166 bp, Arabidopsis thaliana landsberg
aagccaaaacgaaaaatgtgcatgtcatagcgctttcgctccgagctgtgttacagtccggaaccccgccaggacccgacggggctgcagtgaacccaccctgacctgcaactacgatgaaaatctgtcactatctatgtgtgctaactacgatgctagaggaatg

SEQ ID NO: 33683 - DNA, 2820 bp, Arabidopsis thaliana landsberg
aaaattataaagtttatgctcgcgtctcagacactgaattcgagacatcagtcgagtatacgtgatgtttaaatccaaaattttaaaaaaacatcactgtactcgaccaacaggagctacagagacttgcaaggatttcttgcagtttacagtagatcttttgcagatttttttcagtcaacagagtgtggaccacgcgctgaggataagctggagagagaatctaaaactcaacctagacaactcattttgaaacatcactcgacttcacaaaatccactcgacctacctctttttatttcaccaccgacactctaatctctctacaccacgaatcgctgtccaaagagatactcggtcctgacaatatcactcggcctccgagagttactcgacatccgcgccgccgtcaccagatcatatcttccgtcactcgacctccgggaaccactcgacctctgcgcttccgtaatcgaccgtcgaagtctccgtgaccactcgattacgaccaagctactcgaccacaaactatcactcgacctcgactattcactcgacctctgcagcagcaactcgccccttgttcttgaaagcaatagagccctgcagaactgtcagagtgtttactcgacctctaggcttcactgcctgaactctagctccacaagctactcgacctactaaagcattccaactcgaattcggagaagatactcgatccaattcgtctaaggggaactcaagaacagctcagtctactcgagtacagaattgtactcgatcaatagggtctatttcattgcatattgataacaattttggtttcattgctatctttgagactaacctattgacatttgagctttgagttctaaatttttacaggggaatcatgagcaattacagtggcagttcttctgttgatcctgactacaacatggatgagacagagtcgtcatcttcaaggcctgagagagaacaaagagaatatgaaaggttcagaagaaaagctgagatagcccgagggaagagagcgatgacagagaggtatgagcttctagacgaagatctggaagacgagtacatgcctgagcatactcgcacagctaccaaacttctgcacaaacccgacgtattgcctgctgaggaatatattcgcctcttcaagttgaatgagttctgtagcacgaggtatccttgctcgaccacacttgcacaactcggattgttggaggatgttcaacacctgtaccagagttgccatctggacactctgatggcttatccgtatatagcatatgaagatgagacaattcaattcctctccacgctgcaagtggagctctaccaaagtatgacctctgatgagttgaattgtgaaggattgggattcttgagattctctgtgtatcgtcatgagtataggttatcaatcaagcgcttggaaggattgtttggtttccccagtggaatgggaactaagcccaagtatgacagagaagagttgaaagacttgtggatcaccattggcagctctgtaccgctgaattatgccaggtcaaagagcaatcagatacgtagccctctcatcaggtacttccagcattctatagccaatgtactctactcccgagagatcacagggacagttactaattctgatatggagatgatcgctatggctctcaagggaactcttggccaaactaagaacgacatgtctctgcaaggtgaaatcaatgacacaccctctctttgtacttcttctgatccatctgtgtggatacaagagctgggctgtcagcaataaccacaagagagcgctaggcgctttgtgcataggtggtgttatgacaccgattttgatagcttgtggagtcccaatcatttctgatggactcgagccgcgagcaatggatatcgagcacctacgtcactgagaattcctggagtttgcaatggttgacgacttgcacaggttcaggtttgagcactctacagacaagagagctaacatccttctccctagccctaaggttacacggataatagagggagataacattgattttcagcctgaggttggacgcctctactatgagaacgctccgccattggatgaggaggatcttctagaagaagctgtttcggttgggatggatgacgattgcgcagtggagggcgacactagcatgtatcactttggtgaacatgtacctccagcgaggcagagcaagagcttgaccgaagctcataagaacaacagtaaattgcagaagtggtgcaagaagcaggacaagctgctcaccaagtgtttcaaggctatcaagcttctgacagataagctgagttgttcctcctccaccacagctattccacagggactgcctcctctggagatgccagcgaggagatttgatgagcctgagtactctcttccaagtttattcacacagtggactgtgtgatttaagtttgggggagggctcaggaagtgtgtgttgcattgtatatatttttgagtctgcattcatctaaggcatagaaaaaccaaaaaaaatttgaaaaatttcagaaaatgatttcacaaaaaaagagtgttcatgtagtttcattacatttaggatcaagtctagagtgtttcatttaagattgttgcatatgcataggggatgatgatgagatagtcttgtaagcattttgattcaccggataaactcagtgccctcgttgctagttggctgttgcgtagtcaatgaatttgaaataaaactggaccatgcctagattgctctacgcgaccacacgtgtcatgatctg

SEQ ID NO: 33684 - DNA, 971 bp, Arabidopsis thaliana landsberg
  unsure (1)..(971): unsure at all n locations
atgcttattacctgggggtccgtagtaaaccatggtaccatagtgatcatttgacatttcattcttgattattccacatattaagggtaatgggggagctatgaatatttttgcttctgttaatggtaattataaaaggccctacaatgaagaaaaaaacaacacagaacgaaattatataatttaagtccaagaagaagatcttctaagaggagggttcatatgttactcttcttccattgagatcattccnnnnnnnnnnnnnnnnnnnnnnnnnnnnttggcgaccaaatagccagcgattgaccatgtctgagatttcctagcctgtttttcgatgaatcttacagactttccgtcgtagtactccggccaaccatccttcaacagccgtgcttccgccaggtctatggcccgtcttgctatttgtggccgtcccgtctttatgcaggcagctgttaatagccacaacaatactgcttttttccaaacaaaggtgaaatgctccatatgattagccgtgcataagtaaagagtattttgactaacaaaaacactttccgtaaagaggatttttttcttaatgattttgtttccaactttataaagcctaaaagtaatttagataggtaatacatttctttttaacgataaattcacgcctttagatcccaaaaggttatttaaaaagatataaaatacttattttgtcactattaaaaaattggttttgttcaaaatatagtttcaagaaagtatagaacagaaattcacctggccaagaaccaccgttatggtaactccaacgagtattcttagggtcgcaaccggtaacaatcctccactcatggctctcgattgccggataacaaatcttaaccggcatctctccgaccaactcctcccaccgttcctctatcaagtccatgattgaagccgactgctcaggcgtggctaaagaagcgaggatc

SEQ ID NO: 33685 - DNA, 731 bp, Arabidopsis thaliana landsberg
gatttgaccagtcttctcatcgaccttgatttgaacttcatcacatcaccacaagcgggacgtcctacgagtcccgtaccaacgttgggatcattcttatcgaaagacccaacgttgcggggattatcgtagtggtcgatgacgttctcatgggtaggttcgggacggtagcgctagaccacgggtgttgattgacgtgacgtaagccctagagccgtcttcgcagcttgcttgagcatcatcgtgttttttttagggtttcggaagtaactttttctccgtttattttggtaatgagaaatgagaggggactttggctttaatggttgtgagaagaagtcggtttgctttcagacagagagataagcgaggggacacgtggacggtttagatggatctgagatatttgctatttcttttttcttttctttttttcctttgattttttcttttagtattagctaacttgagacgctaacctaaactttagattgagattttgataagttgactttttcttttcaattatattcatgatatccttcaaatgttatagctgataagacctatcgctcataaatcgtacttttcaagtttacaattgaatcggaacatacttcttttacgcaaacaatagtcatgatgatttagtatgtgtatagaaagttctcaaatttcaagtgatgaaacagtctatttaaaattaaccttaattcattaacgtatagtta

SEQ ID NO: 33686 - DNA, 555 bp, Arabidopsis thaliana landsberg
  unsure (1)..(555): unsure at all n locations
tgataattttatggcattatcataaaatatctcccatattttaatattcgttaaagtatatcgacattaccaaggaaggttacaatagtgtgtacatggttgcaaatagttggattatataagtttataaagatttgaatatggtatgtgtattttttaaccggtttagctcaaaaacaaaactttatttaacttgaagaaatacagtcaccgtgaatggcctcaatgttacacactcacatgtaaaagaggnnnnnnnnnnnnnnnnnnnnnnnnnnnntctcaacgtccaagtatgttgtaactaacaacttgcaacgaaaatgttttcacgtatgtacgtctacgtgttaaagagttgttgaaaagttaatgtcacctctaaagataactggacatgatggattgtgaatacagttattacgcacccattgtggactgtgaataaatttgcataaatattttttcttaaccatatgttgctgtcctttataatattagccaccttctgaaataaaataaatttagctatttatttctcctagccaaaaaatg

SEQ ID NO: 33687 - DNA, 567 bp, Arabidopsis thaliana landsberg
  unsure (1)..(567): unsure at all n locations
tacagacggacacatccaatctttttatttgtctaaggatcagttaagtatgatgaggaatggactggtcgtaagtcacgggtcatacggtctgtaaaagaggctaaagagttcctttcaagaagaagtggtgagaaagagcttactcaggaaccttctcagatgatagcccaagatagtgttgaaatcttctcaaagcagagcgacgaagagcgtggtgtagctagaaaacacgaattggnnnnnnnnnnnnnnnnnnnnnnnnnnnnnnnnnnnnnnnnnnnnnaatctgcacttgagtctacttcttctgaaccgttggggaaggatgctgattgtcaaccccaaaagaatgattaccaaaaactctcagaacctgngaatgcagttaagggatcgagcaagcaaataaattcttcaaataaaatcgaagagcacaattttaaanttgccaaaagttcttctggtggtactgaacatatagagagggaagaaccatcagggaaggggaattggatagaaaataactaccatgaattttgagccctgtcgttgaaaaaatgagag

SEQ ID NO: 33688 - DNA, 1793 bp, Arabidopsis thaliana landsberg
cttccttgtccacaacaaggctcgaaaacaggttctgtttttggttaatgtttttctaatacatctatcaaccatatcaaagcacaacaatacttacacatgtaagtaggaccaccgtgatcaagataaagctggaacaatcaagtcaagcaaatttgggttgacatttcaataactaacataaacttaagacaatgattatataaataacaaacaataaatattttacttaagacaatgatttttgaagctggaacaatcaagtcaaataaatattttcttactcggattagtagcagatgttgatgctttctcgatgtctggttgtcaattttgtatatgagaaaactatgttgatgatcatgttgtttgtttttggttgcttctacatgaataaggatgactaagttctttccttgtaagaaataaaaaatttagttttagattagtcatgattatatttaacaaagttctacaatacataaagatatagaactaaaaccaacatattcagtaactaacatgtgttcctcgtatatgtagtagctggtgtcatcgatgcatctctatatcggggagatccgtggagtttgtttgtggggaggtcataaaatggaatggtagattttgtttgatgttgccgcgagttttctttgtacatcgaggtaagtcatgatctttctaatgaacctgtgattagtcaaagttttagtaaataactttggcagcctcttgatgtcttgtaaaagctgataaaatataaaagatggatcctgttaaggttgaaaatgacgttaccatataaatatggtatagaatttgcaaacccaaaaggctgagtagaagtagttgcttcattattatcatcacaacagaatggcaaattagtgatatctttgaaaactctgttgaaggctgatctaagatgaacataaccaataggaacaccaccaatagtattagtaaaaaagaaaatgttaatctaccatacgccgtagcaatcaaatacattgacaaaataaacaaataagaaaacatgatgtatagttccctacaaacttaccagtaacgtcctgaacacgcatatatagttccctacaaactcaaggtaaatagggaaaataatgtctatacaatcatatttctttatttctaacataggccaaacggaggtatcccacttaaacttgatatgtagagggttccaagtatatttgactgtgttggtggagcaaatgacacaaaaatgagagatgtgataccagaaaccctctttgagaacacgcctaaaattgtaaagatagttatcttttggaacggtagcagtgattctctgatgttgctaagtagcccaaggaaaaaccaaagatcagagcagataaaaactggtagaagaatccacatgcacattaagaaagaatcgatgataaagaactctacttcatatcataaaaatcttttcatcaaccaaaatcattgttgtaacatcatcataaaatgttggaggatgatcccagatacataggagtttcacgtaaacactccaatgagtcgagttcacattcaaatctatgagtttgtgaataggcgccataagttacccacaagagaatttttaggtttaggagaaaaacaatggttaagtgtatatatatatatatatatatatacatataaggtgagtaatatctcaaaagatgcaatgatggcagtttatttaaaaagggaaatataaatcgtttcaaggttaaaaataataataaaaaatatagtatgattatcgaaaaatgatg

SEQ ID NO: 33689 - DNA, 808 bp, Arabidopsis thaliana landsberg
tgacagaaggggaccaaaatacatgatacttccatccttgcactgaaacattatttttggtgaatcgcataatctcaataaaagatgataccggtttgagttatagaggagataaagtaataggaaaacattcccaaagcttcttcacaaaagtttatgagagtaatagtcgacaattttctacaatagactttgcgggcttaaaagctacagtcaccaaacaaatgaacgatgacctcacaaaggaattcagcgacaacgaaatctttgaggcaataaaccaaattggagatgataaatcacctggaccagatgggttaactactagattctataaattttgttgggacatagttggacaagacgtgatgtaggaggtaaaaaattacgttagaacttcatacatgaaacagtcaatgaaccacactaatatatgtatgataccaaaaatcaataatcctataacactatctgattatcggcccatagctttatgtaccatactataaaggataatttcagaatgtataggtgcagagactaaaaaatcatgttgatgcaaaaggcttctattgtcaagcagcggtcatttcacgaagactggtcactgattttgacacgatcgcacacgaaatgatgcattctttgacgtggaggaaaaaagtatataagtactctatggttgagataacgcaagagagcaaggcatacgataaggtatagtggcactggattgtagacaataaggactactatttgcctttagtaagaaacggattcactggataatgggcactgtgagatcagt

SEQ ID NO: 33690 - DNA, 3182 bp, Arabidopsis thaliana landsberg
tatcccaagaagtggcagggcaaggcaatgaatctttgctactatggaactcttgcattgtctaaaacactagttcaataaacgaactaatctccagaccatagtagatccatcaagagacaagagatgtttattcagtcacctgtaattccaatcaagtaaaaaaaccagtcatgatatatcgatattgcattattcacttggaaggaatcaaaaaccattcttgatccacaaagaaaaagcaacaaacaacagatctaagagaaagaaaccatagagcagatccaattattaccatactaaaatagaaagtaaagattcagactttgagaattaacggattttgattacaaattagatataaaaaaaacagagaaagcacaaacatgcaattccactaactagagaagggaaaataaaaccaaccttggaacagtattgatccaaacaacaagcgagaaaacagaacataactaaaaaagaagaaacaaacaaaatatatttagatttttttctcacctatcacccaaaaatggttttatttttcttctcaaagcagagtacaagtagtcaaatatagcgaccaaatttaccaaaaaatcagagggagagagaatctatggatttggtgaagatgtagaaaaaaatcataaaaggatgagatgatgcatgtctccttcctcaaaacatggcttctttcttcttctttttttctctttttatcaatttcagcatttcactgtctctgcaaaattgagtagtattattggctatggctaaaaagcttcacctaacctttttttttttttttctcccagtagtaccaacttttttgccaccactaattcaccatgaacactacctttttacctggacattaattattattattcgttgtttacattatgattgtgaaccactcttgtcttcttcctttttttttttttctgtccttattaattactactagtaacaaataatgagtactccattttatcaactagaaaaaatagtaaactttaacattaaaacagaaaaagtgggtacaactatgtataaaggcttacggtgagatcagattctgatgaagtgaaaatgtcccattaaagaaacaaacagagacacacattctgtgtaccttgcttgatatctttgtattcacagccgccacatcgctgttccgaaatccacgcgcgcgtgatattcacgtccggtgtttggatgatgaaaccacgtcgtcacaacataaggacacacttgcctttttgtttgaccggacttttggtttttctcgcatgaaataaatcagtaattgcataacgatgagttttgatagattcttaaagagcattacaattacaagtaaggtattgtagttgaatattcgttgttttcttgtctcatttcggtatccatactgaaaagaaagaaacaaacttagcaaattcatcggtttttctatcatagcggatgaccgtaaaatatgttagttggtttcgtgaaaagttgttgaaaatacatcgaaaacatgattcgcaattgaactaagtgattataaggtaaattctagatgaagattggtgacccaacatcattcgtaagtgtcaagctcaagccacggttaaaatctccactttaaagcaaaaacaataaatgttgagagagactcgtaaaaaagtaaaaaataaacaactcaatgcagtcacctaacctaataatatatgcgactggtaaaactaggtttgattccattttatttttttcttgaggaatcttaaaacatgtatgtgttgcccaccaaatcatatacaccgagtcatatcgatcatcatgataataatcgcgagacaactacttatagtaacgtttaacgacttattgaaaaaagcatgccctacaacaacaccaaaaatgactagttctgcctgctttgaaatcgttgttactcttcttttcttttcatctaaaccgcatcctttttggattttagataacaaaatcacccagaaatttagcacaacacacacaaaaaaatatgcagacgacgaagtaaaagacgcatgagagcaacctacactctaaattttatatctctgatacagccaaaaaaaaaggagagagtgcactcagtactacagacttcagatagatcgttttttttctttctttttgttttcaacacgaaataccaaaatcagtaggcgaatctaaaaaagagaagaaaatggtttcagtgattgggtaagggagagtggataaaaccagagaggggttcgtacacttccttcacaaaaaaaaaaaacatcatcaccatcgggtagtagtagttattactctcgtcctttattatgatatggcatgtcctgcaaaacacacacatacagagatgagatttcagcatccaaaagttttaactcttcgaccatgtagaagaaaaataaaaaaagaacaaaaagagggaatctactattagcaaaaataataacctgcgggtaaggaggaggatgcatgtaataaactggcctaggatgctgctgaccaggtatcatttgctgctgctgctgaccaggtatcatttgctgctgtgggtactacatcacaattccaatcaccattagacttttgatgtttttttttttttttttgtgtatgtgtgtgggaatagtaattcaatagggcttgtgtgttactgtcaaacctgaggttgtccatttggatgataataggcttgaggatgatacatcatctgtggttggttgccaggatatggcgggagctgccaattttcacatggtgagttttgaaaacataactcggttgggtttatataatatataacaaacggaacttactccgtaattaacaggcggcattccaggcatctgctgaacaggaacatgactaggaccagggtagtagaatgaggcatctgcgattggagattgaggtggtgcagcagctgactgcaatggtttgaaactcttagcctttggattgagtttgaattcctgatcagacccaacgacccataattagtaaaaacacacacacagttaacactttatcaagtttgaacatcaaacaaaatacctttgcattcggattcagtgtggacttttaagataaggccatagaaccaattgacgagctcggtgatagcccaggaccacttgatgttaagg

SEQ ID NO: 33691 - DNA, 500 bp, Arabidopsis thaliana landsberg
tctcgcggcatctcctagtcctggaacaatataaccattgtcatccaactgatcatcgatatttccgcaccagagattcagctgctctccaatggaagactccagatagtcaatcccctgcttactggcgatcgctgcaataatataggttttggctggttttcccagatgttccaaggcttttattgttttagccagagaagttcccgtcgcaagcattggatcagaaataatcaaaatccggtcctggattgacggactgctgacataatctaaaacaatatcaaaactgccatcctcattgtgctttctgtaagcagaaacaaaagtattgtctgccttatcaaaataattaagcaccccttgatgcatggacagacctgctcttaaaatagtcgctataactggctgatcttttaataccttgctggaatgcacccccaaaggtgtctgtacctcacgggtaacccaagccagctccttactgatctcataagcgg

SEQ ID NO: 33692 - DNA, 220 bp, Arabidopsis thaliana landsberg
gtcctttacgagtgagcgaaacgcgctgatagctctagtgtaagttatataagaagactgcaatacttaactggttttttgataacattgactgttatctgatttgtaagcaaacatgatgcagaatgaagctgctgttgctgcaactagttattctgatgaacttgatttccagccttcatcagggaattcccataattggatggtgttatcggttaat

SEQ ID NO: 33693 - DNA, 1070 bp, Arabidopsis thaliana landsberg
ctgttctctttaatcgaccaaaggttcgaacaaaatatcattgttggttttctgatatagagaaaactaatttagaaacctcgttttgaaaaattccaactacaatatgagatttgattctacaggagtttggaatatgggaaagggaatttacaaaagtgattgttgaaacattaccgattgttaaatggtaatagacagctgaagctgcacaatgacatatggtaaggagctgggagcaaaagactaaggaccgaaacgatgcagatcatctcgcaaaagaagcttttcctcatattgatcactgttgtgtgttgtgaaatatcctttctgtttatggcctcgtcaaaggtaatgctgattctagtttattcgttattgaaatgaacttgatttagcttagctgtttacagaagttaaaaagaaaagaggacaaagggttatagtgttgaagacaaacttattttagcttctttctatatagctttttatcccaaatcccttaattctcggattaacatgaaaaaaaccactgccatacctcctatgtccacagaaactcatggtgaatgggtgtttttctcactgacaacagaccaaatacgatcacctcaaagacaaagggacgtctaacaacaaaccaacattgataacagagcgtggtaaataagtaatcaacataaacttactgatgtcaacttacattctcacgtttgtgataaactctctgagtttacctcgtgaataaaaacagtgcacagaagaaatatgaggacataatcaataaccatcccaacccaattgctatagagaaaaaatgaatactgagatctcttccattaaagcatgtgagtcaatagtgtgtacaactcttgataacaataacattggggtcctaacgaaaagagagaaacacacctttcagtgttactgaccactcatatttacacatgaatccgaataaatggtgcactagaatgccctgaatctccaggcaacaaagcaacgcaactgagttgagaatagatgaaagcaagtccttttggtaaataggaaaataccaaaatacg

SEQ ID NO: 33694 - DNA, 987 bp, Arabidopsis thaliana landsberg
  unsure (1)..(987): unsure at all n locations
ggtttttgtttaacacgaccagggtttgacttttctacccccctgctcttaggacccacggttgcacatgtatgcccgggattatgtgtcaatttgtttaagacttctatgctatatgcaagtagaaatgaatttcacactatggagtgactgactcaaaaaaatattgcagtacataaaataggttaagtctaacggacttcaaacatgcaaataaatcaaacaagacagtacaagaggtttaagcctataaaacttcaatcatgcgaatgaatcaaccctgacattaaaagaggtttaaatctataaaactttgcacatgcccatgaatcaaacaagacaatttacaggtgtacgtgtaaaaaactttgaaacgaaatagtagtaaacataagcaaaattatctcttccttgaaggttaacctcgtgcatgtcaaacgattgtggtctacttgattgcaattcccacaagcatgttgttttattggctgcgggttatccataacaatcttcattgcagatttgactcttgatctctttggtcttccgggttgttgtcgagattctggtggtaaacatatggtcgtcacaacttgttcgggaactagtatagcaaaatccctgggcatgatggcgttagcatatgatgaacatacataattcttgtgatagtaaggatgacacattgatattcgagagacttttcttttttcaccctccgcaattgcgtgagcacgtgatttcttttctagatcaaatatacaacacaaacattttctatccttcaaattaataacatggagagatgctccaaacctcacttgtacctgatgtgcatctatatattgcaaacttagcaacttggcatactatacacgactctacaaaacaattcctaagactgttattagtgaacaatgtttacatagatgtgttgttcacatagctttagattagaaattcttacttgcanaatcttttctactc

SEQ ID NO: 33695 - DNA, 8322 bp, Arabidopsis thaliana landsberg
  unsure (1)..(8322): unsure at all n locations
taaagaaattttgtttgattagtaactgtggcatttgttccatgtcaggtggaggtatgactgatcgaggaggttgcagttttacaaacataaattttataacgactctcttgactatgttcatgtcttttatttacactgttttgtgatatatgcgtatgtcaatttctaagaaatctataaattatgttttggattaaatatcatccttcctgaatatagttttcgtatgtgggggttcaataaatatatttgttaagattattttatcaattaaattcaaaatgtcttttagtaaacaatactactaggctctcaaaagtcagattaacgaccaacaaaatttgaacattacacttttcgattgttttttaattacacctcttggttcttggataaagagatgaaagacatttattacagttgatattattgcaccaccactttttgttttgtaggtgaggccgttaatctcccttgattcaccattaatttcattgtaaaccactgtatttatgaaaaatttaaagtaaaccccttaaaacaatgagttttcgaaagatatacctggaaaagttaatctaataccaaattaatgactgacagagggacaattcgattacatttatttaataaaacactaaatttgaaaaccgagataaagaaagggcctgttatcaaaagaaaaaagataatgaaagggcctattcgtataatcgaagaagtagaagggttcatcgtaagaaaattaaacttgctaattttgaatatccactccccccaattcaaatctgagcttcaaggccaactacaacagctctcgaaacttcaaaagctctgggtaagcattaatttcatcctcaagtttctgggcaagtttcttattgttccagtatgagcaaactaagcgtttgaattcgaatcgtcttcttattcttcccggttggtgaaagagaccacaagctacttctcgatctaccatgtcccgaaacgttccgagaatagagatgccggaatcggaagaaaacgagttcgcgagcttgtctttgttttcgccttcaagacctcctctgaattcgataccggatccaagtcaaattcagaaggcgaatcatctaccccatttcgatttggttcagaaattggaaggtacaagagcgcagcatcaacgaacacttggtccagagaagaaatttgtagttttggaaggtagagctggaaattcgagtgattcgaaccctaagattgttaatcgtaatggaaaatctcggtcggagccaaactctgcgcagagtacgcccactaggaacggtgctagggtttctcttggtggtggttgtgctaccggcgcaagatttcttcagtctttcggtggaagaggaaggattccgaggggagtttctattgctgagtctgttagcttcgcggaaacaactccacattttgaactcaatgaagatcattcgttttggaaagaccacaatgtgcaggttggtgcattgtttagaagttttttttttttttttggtgcaaaatttagaagtttctttataaattcgttttctttcttttaaagttactaatttaggcctctttctgtatggtataggttttgataaggctgagaccattaagcacaatggaaagggctaatcaaggatatggtaagtgtttaaaacaagagagtccacaaacattggtctggttaggccatccagaggccagattcacctttgaccacgttgccagtgagacaatatctcaggtaagcctcattttaaaattcatgtagttatctgaatacagtggtgatttatagtgttgattttcaggaaaaactgtttcgcgttgctggactgcccatggtggagaattgcttatctggttacaacagctgtgtgtttgcctacggtcaggtgagatcgtaaatgatgataagtgtttgcttattagaatttctatggtgcaagactaagaaacttagcatcctctcatatagactggtagtggcaagtcttattctatgatgggagagatatctgaggcagagggaagccttggtgaagactgcggagttactgctcgtatttttgagtatctgttctcaagaattaaaatggtagttgcctaacttcctttcgaggaatcacttcaagccaatatatttcagtactgaaaaagtccttttattacaggaagaagaggaaaggagagatgaaaatttgaagttcagttgcaaatgttcttttcttgagatatataacgagcagataaccgacctcttggaaccatcgtcaaccaatttgcaagtaattcaattatttttcctccatcacttggttattatccagactggtgcttttttttttttttcttttgagattggacgtaaccttgaattccatattttagcttagagaagacttggggaaaggagtatatgttgaaaatcttgtagaacataatgtgagaactgttagtgacgttctaaagcttctactacaggcaagacttccatacccaaacactctgttaagagtttaagtgttcaagtatttaactttatatgttttccttaactttatatgttttcagggagcaactaaccggaagattgnnnnnnnnnnnnnnnnnnnnnnnnnnnnnnnnnnnnnnnnnnnnnnnncttgtacaattgagagtctctgggagaaagattctctaactcgttcaagatttgccagactaaacttggtcgatttggctggttctgaaaggtagcttgtacttcttactgtgtttacttttgcatctttgactgctgaaattatttttgatacatatacaggcagaaaagctcaggtgcggaaggggatcgcctaaaagaagcagcaaacattaacaaatccttatcaactttggggtaattctaacagacagctgtttacgtgtcagtttgtctgccctctgcttttttttgtcatgaactgttttctgttgtacatttccaagcgtctcaattctcaggtaaaaataatatgcatacatgtgatggagaaaatttgtgaagaaactgaaaatatgcaaagtatgcaaggatggcgatagttgtatagctttgaggtctttccaacttaaaaatgctaatgaactttgagattaataatcttatgacaagataagatgccaacaatttcttatactttctactgtgctctacgtttacgttcttgtaacaaaatctttgtagctactaacacttttccattcatctgtcaatttagcttggtgataatgtctctggtggatttggcacatgggaaacatagacatgttccctatagagattctcgacttacctttttactgcaggtatgactgttagagcacttaaaccttcatttatatttctgttgcagttgcatacccactaacctcagatatggtttcaggattctctaggggaaaactccaaaacaatgataatagctaatgtcagcccatctctttggtttgtaccaatagctattcttgtttattgggcataccttgtcttgtgtatttctgattgttattgtcttattgcagctctacaaacgaaaccctcagcaccctgaagttcgcgcaacgggcaaaactaatccagaataatgtacttgtaattcttcattgattaagagctccgttatgaatgtttgacctgatgtaaggttgctccactctgattttccaggctaaagtaaatgaagatgcctctggggatgttacagcactccaacaggaaataagaaagttaaaggtatttactactgacaaattgcatcaaacagaaaactttcctcgtttcatacgtagtcatgtgaggtgatatcaaaaccttttcatttattcaaacaggtccaactgacttctcttctgaagaaccatgactcttgtggggctctttcagactgcatatcttctcttgaagaatccagatactctggtacatgtaaagtagcaggagaaacaagacaagacaagtgtcactgtcaggtgcataattcactgagagtgaaggtatttttgcaacaaatttgtggatatcttgcgactctattattgaactggcttaataactgtataacaggtgaaaaatatgaacgataatatgattggtgctctcagaagggaaaagattgctgaatctgcccttcagaagtccgaggctgagattgagcgtatagattgcttggttagtttgttacaaggacagttcattttcgtattttgaaaggatatatcctagacagagacatctcgagatgcaaacgaaataggttacattttagttcatcttatattttgaccttttactacaggttagagacatggaagaagatgctaagcgcattaaaataatgcttaatcttagggaagagaaagttggagagatggaattctgtacgtctggttcattgatgacgaaagagtgtctcattgaagaaaataaaactctaaaaggagagatcaagcttcttcgcgacagcattgacaagaatccagagttgacacgttcagccttggagaacaccaagctccgggagcagctacaacggtaaattacctattaactgttttggaagagtctttattttttaattaaaaaaacgtcttatactctgatcttactatctttacagatatcagaaattttatgagcatggggaacgagaggcattacttgctgaggtgacaggactacgtgaccaggtttgagaatgcctttaccaaataaaatttcagccaataattcaagctgaacttttgtcacttgtcatgcagcttcttgatgttcttgaagcaaaagatgaatccttttctaaacacgttatgaaggtttggggaaaatatgctatttattatttttaatcttcttggaaactgttgttgctggtttctaatgcgtgaactttgataacactgtaggagaacgaaatggaaaaggaattcgaagactgcagaaacatgaactctagtttgatcaggtaatatcaaaattatatgaaaattcaattatcttttgtgaaggattgacatcgcatgaaaatcatttaccctgttgcatttttctgttttgttgtgggatgtagaatgattgaatgaaccaactttttagttctctgctgtataattatcttacactttcatcctattcttggagtgtttcaacatacgtccataaccctgttgtagcacaattctgctatggcttgtgtttgttaatactataaccttgaacctgaaactttttaattatacacattggacataatatgcttaatttgactaaattggaaaagaagcctgctatggtactgtctcttatgttttggtgttgcttttccatgcagagaactagatgaaatacaagcaggacttggaagatacttgaatttcgatcaaatacaatccaacgttgtaagaattcagagtgacagagaaatgattgttataaatttttctttgctggtggttttatctgtgttgtaccttttgcaggttgcgtcttccaccagaggagctgagcaggttaatcaagctcataaacatttaatggtttgatgattgaatatatgtaccataagaatcatagtctgaatagttatacttactagtattgaacattgttttgcatacttaaaattgctttatagggaagattgtttaacgcctctttccattgaaacaggcagaaacaatgccaactataagtgaaatccaagaggaggtggctatttcacatagtaaaaactatgatagaggtgcactagtgaagacagatgaggggatagaccggtcaatcctgcagttcaagttagggaagttaatgaaggacctcgaggaggccagaacactcaattgtaaatatgaaaaagatcataagtcgcagttatctcaacaagaagacattgaagtagtccgtgagcaagtcgagacagaaactgctagaaccattcttgagttgcaggaagaggtgattgctctccagtctgaatttcaaagaagaatctgtaacttgaccgaggaaaatcagtcgataaaagatactataactgctagagagtcagaaataagagcacttaaccaagactgggaaaaggctaccttagaactgactaatttcatcgtcgatgggtccaaatccatcaaaaatgcctctacacagattgaaagtatcatctgttcatttccacaagtgaatgcgtggataggtgattatgttgagaaggctgcaaaaaattgtataaaaaaggaagaaacaattttacttttacagaaaagcttggaagatgcaaggatattagtagcagagatgaatttgaagctgaattctttaaagggcgcaacaattgctctcaacgaatttcaactgggtggcaatgctgcaacgactgaagaggctttcaacttgaataatgatgtagacaggatgagcgatgaggtagacacgcttgagagtaactttaaagcaaatcaatattctattctgaaaacagaacgacatgccgaagctgctttagctgttacaaaatggctttctgattctagagatcaacaccaaatgatggaaaaagtacaagatcaatcagttaaagaatttggtacattaagttcaatctctgcttctcttagtgcggaagggaatgctgatattagtttgtcaagggatggacatctaagtgacgcaacatatccaaagggtgatgagctttcaacatcaagctctgacttttcaaactgtagatggcaacatgattgtgcactgaacgtaaaatgtcaaggagtttcaagttctgaatctgacgctcaagaaagtaataacaagattacatcagcagctttaattgctaagaatggttctgcacattctgtttactgtggaggtatacttttgcttgttttctcttattcaccatcctaaatttaagatctgaaacgagtaatcttgaatgactaaaccaccagttttattttatatgtaaataaagaagctacagattttgtttcatgcagaggggaggcagtcagttgagaagccattgaccattatgatggggagagaagaaacagaatacaaatgcagtaaaccggtaagcttttattagcatcgtttcattttgtgaaggtatataaagaaattggttacatgtcagtgacaaagtaaaccactgaacttatatctatgcagctttcttctggggtatatatgggtcttatgcagagaatggatcctgttagaactttcttcgatcgatttgaggaagtcaatgctaccatgaaagaagctgatctcacaatatgtgaattagtaaaggccaatgaaaaatcaaatagtgttactgaaatgtggcttcaaacccatgaagagttaataagtaaggaaaaaaatttgatggatgatcttgaacaggtcaagtctatactatctgcttgtgaagaagaaaaacaagtcttgctaaatcaaacacacaccactttggcggacatggaaaattcagtgtctttgcttgaagaatattttcaggaaatgaaaagaggagtagaagaaacagtagaggctttgttttcccatgcccgtttagctggaaaagagcttctccaattgatttccaactcaagaccatcacttgaacagattgcatctgaattcatggagagagagttcaccatgtatgcaacataccaatgccacattgggaaactgatcgatcaaattttggatcagagaaaacaggttatcactcccaacctttcaggccaagaaaccaatcagtcagtgaagattaatgccattgggtataatgccgaagatgaagtcactaaaaagcaaaacagagaagagattgtcacaggcttagaaaatgatgaagttgttcagtcacatgaaagcctattatatgagaacttgtatctgaaaaaggagcttgagagaaaagaagctttgtttgaaggcttgctttttgattttaggctacttcaggaatcagcatcaaataaaagagatatcaagaatgaaatggatgagctgtttgacgcattatgcaaagtacagctagagctggaactgaaagcaagtcaagttcatgagctttttgttcataacgagaatcttgaaaattgctccattgacttgaaaacggcgttgttcacgtcacagtcagatctagagcaggctaaagagaggatacaaattcttgcggagcagaatgatgagttaagggcccttgttagtgatctctgtaaggaaaaggctgcagctgaggagggattggacgaacaaagggatctctgagagccaga

SEQ ID NO: 33696 - DNA, 3387 bp, Arabidopsis thaliana landsberg
ctcaagcgcctaacccaattctcccactacgactctcatcatttatttcagcagaaaagttttagtaaagccaccaaatttgatcacaatagtactaattaagaataataatataaactgtttacttttaaagcgttatttgctcatgtgaaactggaacaagggaatattcaaaatcaaaaccacacttttcttcgctaaaaaaaatctacacaataatcaactaagagttacccgaacctaatcaaagaacacaaaaaaaaaaaaaaaagactgtgtaagaaaaataaaagttacaaaaataataagttgtctacatcttccaatcttttatttatcttttctttggctcgttgccccatgttttgctcctccttatctgcgtcccattgtctcactcaaataatctcccaatattctatatatataaaatatgggagaagaaagggtttcttggcttgtaatgttggcatcatcattccttaaatcatgctactccctagttgtacttacatactctaagctttttttagtttgttccatgagacactctcttagtatcctttcttccttctccctctacaattgactctttctcggggctttcataaccgaaagcttataacccgagtagaatgtagtaaaccagcgtgatcggaagcgctataagcattccaaatattaccctgaaaagtcattcaagttatcacaatgttaaatgttattgaaaggtttgcattagtaatcatatatgctaatggaataattatcataaaatctttgacttaccctgtacttaaaatagcaggatgaacattgtactccttcgcaaacacaaagggcacaattccttgaggtaatgcggcctaaaaaaccataccaaaacattttcacatttttcatattacaccaaaaatagttttaaccaaaaaaagagagagaaaattttacctgaactatagcgacacgcagtaaatcaccacgtaatccgatggctatagcagcaaccgccatcacggccggacccgtaaggaacctaaccgccatggcaaacgttgccactgaattcccacaagcgattaatttgggttgcaacgccatgaacaacccttcacgattatttcacataaagtttaatttcaaaatcaggtaatcaataaaattttatatatctagaataaatccaataaagtcccataaaaatggggaccatgacgactatcaacaacacgagaccatgccgtccaccattaccatttatctaataagacactcacaacatagccccacctgtcggatggtccatccccaattttttgtttttcataatataaatcacaatgacaaaaacagcatataaatttatgaactacctaatttaattccattgttatgtaaatgagttaatatgtcaacgaaatatgcaaaatttagaaattttccgtgacaagtaagacgtttggtatgaatcatatttattcatttaaatggcttcaaaactaaaatttcgagaggaataaaaacagagtacgaagaaagacttacccaaactaaacattgccattccaagaccagcatcagatagaatggagatagattgttgaatgattttgggcattggccacgtgccaccttcaattcaaaaaccggaataaatttcccgataaccggttggttcgagttaagaaaacaattaattttgattaagttacctgaaagcaacaagagcccaaatgagaccaatgagactagagtaagtgtttgggttccttatgagtttcctccacaccattatcaatatcagccgagtcatcacactcgctggtggcatatgttttacaggtacagtttcacccgtttctatagcttctttagggtttagctctgctgtggagttacaccgaagcttgtgtagtccgttaggcacttcctttaccctctccgactcttcttccccgccatagtccccgttcatcggaccagctacaaatttaagcaaatacagtttgagatttgtgtccatatgttacaaaaaaaaatacaatttaaaagctaaaaacctttgttttcaccattttgagtatgatcagagatcaacattcgaatctcttttgcaccgccttgatcggattttccgacttgttcattggctccaatatcaacttgaagaccagctcggtccgaaacgggtgatccgttggatccccaaacaaacatatgaagctccttagcatcattactatttgattttcctacatgatgatgattctcttttggagctttactaccggttttattaccggtagaaaactccggattaggagctgggtacgacccgggagctcctcccgggtaatacccgaatcttggcgaagaagccatagcacaactctcctcaaaattcgaaggtctaggagtaggtcctctcgaggactgaacagagtacatatccgccggaccaaagttcgaaagccggccaccgggaaaccccatcatagagtaaaaatcagaatgattgaagttagatcctcttggagtagtgttaagactataaatctcagctccggtgagattagacggacgaggagtcatattagtaccaccaccaccgtaaaaagatctccgagaagcgtttgattttctcaccgtaacatgaagcttaccatcgtcaccgatttgagcatcagtttcaagaaaatcatgtccatctaaagaaacaacatcggactcgactttgaatgatacaatcgaagcaccagtctctggaaactgttccatgatcaagatcttagctcctctgtattcgaaaagaaagagaagaagcgtgtaccagattatacactgaagaacaacgatctgaaccatgagtgagccggaatattcgccgtacatggcgatcaagagaggtattcccataacgagagtgttgggaagtgttgaaagagagaagattgtgatgctccattcaagactaccggagcgagtgaagttagcccagatgattaggagagtgagcatgattagtttttggagtgtatcggctgcgatgaatcggagattcattgcgtaaggattgtttgaggagatgaagtggaaagagagaagagggacggcgaaaatagcgacgaagcggtttatgccggaacattggtctggtgagaagattttccaccaccggacagagccgtaagcgaggatcatggctacgtagagtggtatcaccgccgtgaggacggtgtagaggtcgtgccatgtgatcatattgttgttcgctggagtggcaaaagtgtaattttgagtgtggaaaccgttaggaagtgagttagtgtcagtctctgttctctatgtgatgacggaagcttttaacagagaagctagtgagtgtgt

SEQ ID NO: 33697 - DNA, 861 bp, Arabidopsis thaliana landsberg
aggcgcaaactccgtctattggattgatatcaattgtaacgtgaattcgcatgcttaaaatttttattcaaacccatgattttaaagggctaagtacgtacatgatgattatggcaaaacgaaaacgaaaaacagaattctaaatcaaatccatataagcttaaaacttaatttggtcaataacattaaaaccaaaacggaaaaaaaaaaagagaggaagaaggaaagagcaaaacctaatcgatcaaaatagttatgtttaaataaaactaacaaaccatactctcatcaaaggttttctctaagtattcgaaccctagctagtcattaagatacgatcgcactataacgatcgacgacgtcactcagaacgaacgagtttcttcaacttaaacaaaaacttacgagctattgattcttgacgatgtagatctctatcagatttggcttgttttaacttgtagctcattagatagacacaacgacgtcgtttataatcatcttcttgactcgataaaaagtcagcactcaatttctctgaagttacctctaaatcacatgttgacgacttctttggatttccttctctatcccatactgtttcatagatccaattctcgctttccaacgtcatcttcttcttctaaaactgaaatatgttaatctttttcttctgtctctctctttttctaatagtaaaggttttgttactactaaaccgaggatctgtgaaaactgagggattcaatagtgttatagggtctacttatatagccttttatgtttccttttttttcttgattaagaatgtttccttttaatttgttaaagggataatgtaaaggtttctatttttttctg

SEQ ID NO: 33698 - DNA, 893 bp, Arabidopsis thaliana landsberg
gaaatatttaatgaaaggtttggcaaaacgggtaaaaaaaaagttcattatgggtttgaatgtgattaaatacggtgtttaaatataattatggtttgcgttaatttactgtaaactcttttcttatcttctttaactcttttctatctaattgggtaatcaagcaaatatagttgaattataatttgaaatttttgttgacaacaaaatattaatatggtttgcgtttgtgttctacgagtaatggaattatggaagtttttaaaacaaaaatgtagtattttttgaaaattttgatgacgtatattagaaaacactagaaaacaaaaccttctagtggttaaagttgctaggagaataactataagagaggtggcctgatcgatattacttatttcggcataatacatattcctttctaacgtattttaaacaaagaaaatcgttgagtttttttcagcttggtttggcttcgaaaataaaaaaagtttgttcactcacaaaattattatcaagtaatgtttattcatatttgttatggtttggtaaaagtagattaaatttggtagaacatccatcaattggcgtttggaaccgcatgaatcatttatatttgaaattgaatagtgtttaaaggcgcacgtgacacaactggtgaggtctttgagttttgattggtcaaagtgtcagagtttttatgagtagacgactcgtgaccttccccttaacagtttcaagtttctctaatgaaacattgcacctaacttttttagccattttaggcttttttctttatacacagtccctacacttcacactctctttgactcatcaaggaaactacagtctccgttatcataaagcggagtctctaatggtctttatatcctcat

SEQ ID NO: 33699 - DNA, 1154 bp, Arabidopsis thaliana landsberg
tcaaaagaggagagaaatccaaattcagataatcagaatttggctggtccacagtaacctgcaactttttggattgctgcatctgtaaatcatcaatcttgtcctcatttatcgggagagaaatagtagatttagaaagggggaaaattgttccttgatcatcaacacctttctgcttctctttaaacctcaccaactcctttatctctttgtctaacagagcttctttaacctcaaatcccatagagggatgaatattttgatcactcgtcatcttctctgaagccaacttctttgagactgcatacgggatttgaccattaccttgaagacgactggggcagtccgctctgtcatgagtaagacgttgacaaatattcatccattcatccctccgtgggatgaatattttgatcactcgtcatcttctctgaagacaacttcttggagactgcatccgggatttgaccactaccttgaagacgactagggcagtccgctctgtcatgagtaagacgttgacaaagaaaacatctctttcaaatacgcttgtaatcaaaagtaactgaacacacttcacctgtaggcacctgaacatccttggaatttcgcaacggatttcgaacatcaaaaagaacttgaactcgcacataatcttgagcttgagatttatccaaatctaattcaacctttaacacttcacccagacattcgacaacttccttaattgtctcttttgtgtaataattaactgggatattacgaagacgaatccaaatcggaaggaacatcaagtactcctcaggtggcttctctacccactgatccattacaacacaccactcatcttgagtccaaacacctgttttaaaaatttcaagcaaatcatcctctgacttgaagaaaagctgaaatctctcttgaaatagagcaaccccataaacccgggagtagatccgccatattcgaggcatatctaatatccaattagagatacgttggtgagaagggttcagaaattgtcgaataatactacaactattaaaatctataggaactgagctttggttgataggataaaactagaggaccatcattcttgatcgacatctcaaaaatagctttgtctaacctcatattcatgacgagaaatc

SEQ ID NO: 33700 - DNA, 9062 bp, Arabidopsis thaliana landsberg
attaattaattataaaataataaaatgcttttctccaagtatggccagtgtatttatgtatatatattaaagagaatatatattcagtattatttttaaatggattttggttagatctcataactaatttttttttattaagaaaatattatattttaaactatattattgttttcttgtgtataaatttaataaaaatagccaaatctttacgtgtaacttatcaaattttcaatatgcataatattcattttaatagttgtgtaggctgttcaaatacaacaattaaggtcactatttacaaattagaagatatgtatattatttgtattcgtggattcatctatgatctttgttatttgttgttaaaataattttttttcttctcaatattaaatgttcaagtctaaaacataaaattttataacatttgttattgtagacttcaaagcattatttttatttatattaaattgtttaaacttttttttaaaaataaataaaaattaaaacaaaaaattaataaatattagttaaaactataaattaataaatattaattagtagatcccacaatacggtatcatggtccctatattattatatattaatttgaagatgttttaatagtacttatttcatcatggtagaaagaatgtataataaatgaaaaaactgttaaaagtgatttattttattttatattccacatatgtataagtaatacttgagaatgataagatgtttcattaattgtttggtgcatttgtgttaagtgttagaccttgaatcaggagtaagggccacgattaggtgactttgatggtagtcaaaaattatttgtaacaccacgactgcccctactagtcaacacccacgtcctctctcatgttcattgggcccacttctgtctgaaggtcggtccgctacgtctgggagcggattgaccttaacctaagtccttcacccaagtccgaaagagaggaggaaactcttaagcctctaggagctcgagaaggaagtcccaacaaagtgtatcaaatgctttccttataccccctttcaacagagagctcttgggacaacatgcagaattatagcccctaacaagttcagatgctagtaagaccttttttacctagggaacgccctttaagaacgcaacttgattgcgagagatacaaccctgaaaaataggctttaggctgtttggaatgatcttgattacgagagatacaaccccgaagaataggcttcagacggtttgtgatgcgtgttttattttgcctctggcttttacctgaaagaccacacaactactgcaagtgcacagtatatcggaatagtattttaggatcgaatccccaaagagagaagtagttcagagaaatccttaagaagagagtgaggcaaggaccaaaataaaagagagggggttgttgtaagcaatgagtaaccaaaacaaaaggcaagtaactaaactaaacgacaagcaataagagagaagcgtttggtattcaggggtttctccaaatgtcatggttcaataaataagttgtagatctcaatctaggtcataacatggctaggtttgtttacttccaaattctcggacatacgaaactctatcaaaactagctaaccttaacggttagttgatgaaaaccggctattatcaatagtattatgtgtactcagttgccctgtcggctagtaggtgctaacatggtttcaaaatacaagatcaggcattaagttcaagtttgattctagttcataagtctctatcactttgcgggtgtgcaacggttatagttctttattcagttgagcattcaaacaagattttgccaaggaatgaaatacctaaggtcaaatactaggtggcattccggacatacaagcattaagatttaactcaactagaaagaatagtggaaacgatcaaacaaaaccatagaaacagccaacctaaatcagatctaaagtccccatgaataccctttgaaacccccctaaaacctaactagagatctactcacacatactcacaaaacacgacatcatatgaataagaaattgcataaaagagagtatgaatatagaaaagggtttagagatcttctcaggaaatccaaagcttgataaatcttcttccttttacaagaagagaatagagaattgaagagaaaaagagagatttaaagaagaacaagaggaggacgactttttggggcggtgagaggcgcaggaggtagcctatttcgtgggtgtcttctagggtttcccttagacttgtatttataggtcttcattaggtcaaatggtagaaacgtatttccgtttattagtaagtgatgggtcaagcttctgggcttttagggttgctggaagtcgacggcaagaggaagggaaggagtggttgtgcgtcctagtggttggtgaaagactcgaggggacgcccgggttcaagtcaccttggccggcggttttaaattgaacattttcaaaaccccgattttaggacatgtctttactctttgcgccataacttctgaacggattcatggattgcttcgattcgacttcgacattaatcttgacttttcgagattttcaatgacaccaagataccttcatgccaaggtcggtaagacctttgccagatgtgaaacatctgaggcaccgaaactgttctgaaccggattttgggtgacttctactcgtttttgcatgaaaactcataattcttctttgaagctcaaatactcgaaatatggggggaagcgcgggggaacttttgatatctccatggaaaacctaataaaaacatagtaaaagtgggctaaaatacgatgttatcacgctaccagatgaaaaacttgagcgaactctgaatgctgcaaagatggagcaaagattgtgaagtttcttgctggcttgaatgaatcatactcaacgactcacagtgaaatgatgatgaagaaaacaattccagaccttgttgagatatataatcgtcttgaggaagatcacatccaacgccacattattacagtttcaagtaacgctaaaacggtgttccttggatgagctttccaagcttggaatgaaattcacgattatagtggcttggcacaaacctacgcctaatgagaagcttcaacccttcccatgtctcaataggatactctccattatgctgccttgtagtgacgatttgatcccaccaactaagagcatagtcgtagaattcgattgcggcaaccttcacgcggttaacgtcggcgtagttttttgacaattgaacacaagttccattttcttttcccaatccaaataggcatccggatcattcttcccatgaaaaggtaaaccttcatcttatagccaccaagattctcaaccataagatctctttcttctctcacacatcttggtctccagttactccggtgaggtgagtgaccatggttgtagtattcttgagcgtttgggtcaactaggtcctttcttgggtccttgattcgactatccatctcttttcgagattgctctccttccgagatgataacttgttcaccgggtgctttcccttcgccttaagctgatcattgattggcttaagcttggcatcaattattttctccatttgtaacgtgatagcatcaatgatggcttgcttgttaacactcttatccgaacttgattcggtcgtcaccattttctacaaacaaacaacactaaactagtcactagttcaaggagaatactaaacgttttactaagaatagagtaagaagaccgaacagaataaattatcaaatcatgctcaaaaattccagaaacgattttataaaatactagacttgtcctagattcagatgcaattgatttcgcaattttatcgcaagcaaagtatttattaaaattaaaacaaaatgacagcgaagatgaaaagacaattgagaagatgaacggacaaaatgaaacgaggtgatgaaatgatgaatagaatgaaacaaaatgatgaagtgatgaaaggatagagtactcaaatttagaatgtgctctgttaccacttaatatgaattccctaagatcgacactcttgaggttgagtagaggatagactttgcatctaagagatcatgagatcactcaaaccaaaggatgtggagcgaatggtcacacaaagcatgcggatggcctttgatttacctttgatctagcttaaaagagtttgagattaaaaagatagatgagtttacaataaggaaatacgagagtttaaatagagaagcagagaaggggaaaagttagtcttagaacaaactataagacaactcgtaaaaggagaaatcataaatgaaagtttgaacaaaaatagacccttggccttttaaattcgtggttgtcttagtgggcctgggccggattgataatgggggatttggaagtgttactcaagcctcattaaaaacctactaaggaaaacccattggggcaaaatcttataagggaaaaagagtacctaagtaacacttagcccattaccaattgtcttgagctgctatcgagttccaaacggtttgtatgacttcatttggatgcttgcccaagtggttaagaagtccggtaacggcttggtggagaagtctaatcttcgaacgagtcataggaccgattggttcccccaaagcttcctccgctacaagctgctcctccggtacaagctgctcctcggctacaagctgctccattggttcaagttccaattcttgtctgataatagtcaagcaaaagctaagtctgggggagttgatataaccctatttttactgcttttagctatgatttaggtataggttttagaatctatttgttatttttagagtcttttctagttcttttcaggtctttacatgcttgggattatttggagataatggatcattctggattaaaacagagaatttatgctgctgaagaaatctggaaactaaaaagcgcgtaggtgtcgagcgacaccaatacctgacggcaattgaaagatgcaacttattgaagttttgaagatttccaaattcggcccagaactttctcctatgtttaatgaaggcccagcacgtttttaagacgtatatatatagtttttaggtcaatgtttagaccctaagctggaagaggctaatctccttatctcttttgtatttgggagcaaaaccctgtggagactccctttagagaagatatttcttactctattctcttctgatattcattattgatttcttatttagactatgttttgttctttgataatcatgtctgagtaattcgcttgttgggtttagggattctcaattagggatttagatgaattagtagatcgaaaaccctgttaggataatatatttagaattcttcatctttgattgttcttattgctagttctagagtaattaactagaacttgattttaggttaataggtatacccaccataggtatctattactggaactatcttagatgagcctagtatttagatgcgtgctagcgttgattacttaggtgaacttatgaaacctgattataatgcttgcttagttctagggatttacaagagagttgggatcaatactattaagcatagcaagtagcacggcacaccaccggttactttatattagtgatttgtgttttcgaatggttcgataatatctcctaatttactgctagatctactattctgatatctcctgagaatttctctaaacccgacgttttaatcatctgaaccttcaatctcatttattgctttcttgtcttgtcttttattttataatctatttgtttagcttaattcaaaaccttaggtttgaatgaaaagaatggccccctggatcagctccatcccgcgacctttcacttcttttctggcttttgacgccgacttagccaactcggcatctcgaagcttggcgattgcttcgtacttggccttaagttcggtgaactgattgttcaagttgtaagcagccgattcggactcggaaagcctatctcgggcaactgtgcccgagagttcatcctggagtttgtcatttctttggtactgatcttgcaactcgcctttcgatttcaggagctctgaagagagatggtcgactcggtcctcaaatttttgcttagaaacggagagggagcggaggtcagtttcgagggaagagcacttgcccttccaagtgtccatgtcctgctccctagtaagcagcaatctttcgtagtgctcaaccatgtcattaagttcgttgtttgcctgacattgagtataagcccgtgaaagtaagttagcacgtaaaggaatagcgagatcagaaaaatggaaatgaaactaacccgcgatgaatgataagcatggagtaaaaagcgttcacggactgcggaatgccatttgtcaaaagttggcaagatcgcgtctttccgggtcttgaagcaccgaaaaacattaccctctgtttccatggctgtaaggagatgtgggataaaaaggtacgttattcagggtgcggacggcgcagaagtcagtaaaagaaagtcatttgtcgaacctgaaaacgatatggtctgaggaacaagaacggttttagactttggagaagtaattcgaggctcgacatcctcctgtcgaggagtcgcacttcggtcagccctctcgccactaggccgggaagagggagatgtgacaacaagaggaggaggacccatcgatcgggatgaaggagacgatcgaggagaacggtcagtctggacctttgatttgtcccttcatggagctgccacggggagaacggtcagtccgggcctttgatctgtctctcttcttgcgaactaaatcggcaatgggttcgctgctcagtccacctcggggagaagagcaaggagagtcatgacggggagatcgttttcttcgaggagaacgacctctatggcgttcacgacggggtgttgacctaaacgcgtcagccgatctggcccctttggcactaccatcgtcaactagcagggttttgctgtattccttcttatcaatggcgctcgccaggaacgctttgttcacctcgcaagcctcagccatcggcttggataatacctttcgccgggaagcaagagtccgggctgatgttccttgaggtaggggaggaggtggcggaagttgatgaagctgtccgggagggctcattttgaccttatgattggcctctataaatcggtcgagggtgaaagaatttcagagggtttccccttcgaggacgattttgaaaaattcaatgaattcgtcagacgggagagtctgagcgatgaaagctgcgaagtgaaacaacagatttggtcagataagccaagaaataaaataaagttcatatgcatgacctaacatctaccaggcttagtagtccacttaggggagcaaatccgaaagatttccaatcgaagcagggctctttttgactaaaaaccacgggtgatgctagttctcgtctttgttagggaggtgcgagatgaggtttctgttggcgtttggataagccgagaagtatccgactttcttcaaagaactcctcacactaagaagttcattcagttcgagaaccccgatgacatacccggcttccgccgcaatagtaataatccccagaatagtccagaggagattgggggttagttggggcaaagcgatttcaagggctgccaggtatcgaacgagggcttcgggaagaggaaaagtcaggccgcaacccttgaaatagatctcggacacgcagaagaaccctgggcggtggtcctccggcgattcggtaggctccgatatctgcaagtccttcattacttcagtcggaatccgacagagctctcccaatcgattaagagattggagagtgcatgtggattgatagtggggaccggcgatatcatttggccgggtgcaaaggttgttactagagccgcctttcattttcagaattcatcataaaaatgggtggtctgagggttcgccagagagagagtacagagaggaagaagaaaggagctttgttttaaaataaaaattaaaatgaagcgtgaaaagatataagtaaagtgaacttaccttacgcaagctagtgatgatgacggaaccgccttggaagtcgtggagaatgtggaagagtttttcccgcttaaatagtaaataattggtatgcggtcataactctgacagatgtcacgagagtaattatgggtgattccgtaataaaagcaataacgtgattttggtgggaaatcagagagtcacttaacgcaatctttgccccttagagcattaaagtattccgaattggagtatcacttcgaaagacttggggggctaattgttggtgtcggatcccgcaccatgggctcgggaccggtcaaacattgccatgtaagtaggagaggcccaaaagaggaaaggcccacgggtttccttgagcaaggatataagtgaggtggttaactcgcgagatgaatgtgacatccaagtcaaagccagccggattggagagtcaagtgggccaaaaggtgaagcccaggaagtccggaatcaattcaaattcgaacgtttgaatagttaattcgaagactgaaacggatacattttttttttttgctaagaatgtaaatatctcattaaaaatgaaaagttattaggagttacacaaggtagatcctaaagtttagtcccatggcaaaaaaaggataaaaaaacatggaagcaaaaacaatcagtccatcgacatcgacaaaatcagtgatttcagaatcaaagaagggataaaacgattttgaagtatccaaagtgatgacacctcaaagtagtagctttatgctgtcaaacggcaaagatcgagacataagaaccaaacgattggaagcctttcactggtagcccaagaacttgagcgtcaacggcacagaacaaggagcaaacaaacaccaactccttcagcgtcctgtgagaggtactctttgaaa

SEQ ID NO: 33701 - DNA, 3610 bp, Arabidopsis thaliana landsberg
  unsure (1)..(3610): unsure at all n locations
tggaacaaccggatattgtatgattattcgtcctcctcgggacctctttcttccttggagtttagagaaccacctttctcactgtatcaaccactgctttcacattgagcaccctatccaaagctaagtcttcataagattctaaagcttttttcaaaccattacttcttgaatcagagaacttttttgttgagtattggcacgaccctcaatataagcagttgcaccaatttgcttcctcaattcctctccctgtatgcacaaagtcataagattgagaaaagttttcaagttttaaagattcattttcaaaacagaacaaatagcgaggttacccatatatacctgagtagaggtaatgacattggtgtgatccgcgaggtatcccttgtcatcccggagatctaaacaacaccaagacgtaatggattagccaagagaaatttcaaaacagaatctgcaaaacaaaacttacctagctttgtaccaacaagaactatgggaacatttggcgcaaaccgacgaagttcaggcatccactgtcaaaaacaacaatcatatcagaactcatatacacatttcaacatccaccacattcactatccaaatctgttccagtacaagattcaaaacatttttaccttcttgagtacattttcgtaactcgccttgctaataagcgaaaaggctaagacgaagatatcagctcctctataactcaatggtcttaacctactgtaatcttcttgacctaaagacaccaacagaacaagaaacccacaaataaatgtatgaaatgagagcttcaaaagctagaaaactctgaatcatcaatttcagttcttagcttatcggtttcaaaattagacattttgaatttacctgcagtgtcccatagccctaaattaacgatttgttcatccacagctacattggcactgaaattgtcgaacacagtcggtatataatcctgccagacatgaaaaaaccagcaagaatcatgaatcatacatcagagtaaaccctagatactcgaaatcaactttaagctaaacccatttgtgaactccaagaacacagatgtatcttttaaggtaaacccagtaagcaaaatcaaagctttacaatgaaaaatgaaagctttagagtcataaaggaacgatttttaaagaaaactcacagtaggaaacttgttgctagtgtaacagataagcatacatgtcttcccaacagccccatctccaacagttacacattttatgaactccgaagcactcattctcttagtccaagaacaaaactcaaaacccagaaagtttaaggaactaaagaagaagaagaagaagagtggtgaagaagactctaaatgagcttaccagagacgcttgcagcgagtatcaactgcggagacaacataaagaagtgtaaatctcaaaatattttctcaaaaaccaaagagaagccaattggcatgtgtgttttctagagagtcgagacagagaaagagttaaatgtgtcggattttcaggttcgttcaagtcaaagtcttaaaaagggtaactttattgtccctctcaataaatttcaaaaaacttattagcaaaatgaaattacaaaaacccactcttctatctaaaagttggatttatcaacggttaagttgaaacacgtatcgaccgttgtcagagacgacaccgtttcgacttttgtcatcttttctgatgtccagctatgtgtttttggtgttttgtcttgggagtctcatgtttcttctcctttcctttggatgtatatcttgagcccttcaagaaaatttatatttgagccattgttattttaaaaaagacaactaaatacatatcatacgcaaatttcattcaaatttgaatgtgttgacaatgaagagtcaatatattattgtgggccaattttaaatgacattttgggttatatacatgaaagttattcatagtgtatacatttggattatacgtaggctatgactagggtccatatcaaacaacaggcccattcttgtttcatacagtatcaaaaaacaggcccattattggttcaacaaaagctttcgaaggttcagaaagtcatataaagtatccataaaccctcgtacacttgattttgtaagctattatgaaattttgagaaggtgattgccttcaagaagtcttcttaagtgtggtatttcagaaaacaaaactagttgtattttactattttaagtctcgtagtgtaacatttgtatcggttttaaactcgagtattctttttacgaaaacaattagaagaataaagtactcgaacctacacaaaaagtgttttggtttcctagaaaatcataaccagtttcttagaattgtgctcatgtaacgttttaaaagtcttcttgcaaccgctttctaattttcgtcagagactctntcaacgactttctaaaattcgagaggagtactactgatatattattgaatactccttaccacatcataaaactgatgtatatgtttaacattgaagtacgtacgtcattatttggtttagacacatatctaatcgtgtcacacacataatacatcttacttttcccgttacatgctcttaatccacactctttagtcttaatccacatttatcattctgattgaatcttgctttcgtgtggaggcaacaaagcaacgaacttaacgagaatatcgacggagttttctgcggcgaggctgctgaatatgctggcctcgttggagacgtcggagccgccgccagcgagatcggagagggcacggatgacgatgaaagggaggttttgctggtgggaaatgagagccacggcggcgctctccatttcaacggcggtggcgttaaacttggagttgaggaaagtccggtaagctgcgttgtcgatgaaaacacttgcactcataccacgtttaacgatggtgaccttcggtggtcgaggaaggcatgtggtgttaacacactgcggtagcttcgtgtcctgttttggttggatgtttccacattcgaaagacacaatataattgcattaattaaacataaaccaaataattaaactttatttcttttctaatcgcctttgactctaagaattgagctttattttgatactgatcatgagtatataatatatcagaaatctgccgagaaaacaaaatatttgatcagctataagatatataagtgtagtacgtatactacattttcgagtttctatatgcatgatttcgtgtagaatttttaaaattgttaagcttgaggaaattaaatttgttagttttaacaaaaaaattacttttttttgtgtcatttaatacactttatgtttactgactttaaattttttatcaatactggaatttgtactatttgtttgtcaacaatttgtactaatattttcaaagggaatataattttcctgtatagttctaagattaaaatctagtatattaatattaataattaataatcattgaacttttttagtcaaatatattgatacgtaatggactaattaacgtgttatgaatattcggcgaaactaaattcaacccgtatgcaaaaatatattactatc

SEQ ID NO: 33702 - DNA, 1116 bp, Arabidopsis thaliana landsberg
aaaacgaacatcaaactgatcaaagttataggtttcttttcctatgttccttttcaagtttgaggtttgtggattcgttaaggacaggagtataggctttctataaacgaatatattggtcctacccttattacagctaaacacaataaatattttgctaacttaattacattaatacgttgaaaactagtaatacgtacatcgaatgtgaagttgtgaaccaataaaaagaaaaaacatgagagaagaagttgtgaaccatatacagattgaatcatataagatgatatatcactcccaaattgaagttttgagacaacttttatcgtatattatggagaatgcataaatccattgaatttttttaatcaagattttgattttcagtaatgtttttgtagggtataagaaattatgacaataattgacgttctattggtggattgggcttcacgagattctaatggcccccgactaaggtacttctttgattaccgttgattaatgaataagcggcttatacagtgtatcatttacacaacattcacaatttgtttttgtaattagttaccaaagatagaaatatacttcaaagtatttatcgtccattaatccttaataaatgtctaaaaataaaaaacaaaacattccaagtaaaaaccatttctttctccaaaatcccttacctcccaaaactaaacaaacacaacaaagcaccctaaatttaaaaacctgttttcttaaattaaacctctcccttcaccaatataatctctttctcataaccccattccaaaagaaaagtagaaaccccaagaaaaaataaaaaaaaataatgggtcatcgaacaagaatgatccttgtcctaaccctagttgtaatgtccatatggggttcggacgcatcagcaatgcaaaagacgaaattcgacgccccacttttgactgaaaaaatcgcgacaaatagatcgataattgtagatatcgaaggcaaaggagactacacttcggttcagaaagccatcgatgctgtccctgttggtaactctaattggattattgtccatgtccgtaaaggaatctacaagtacgtatacttttaagaggtttaaccatt

SEQ ID NO: 33703 - DNA, 730 bp, Arabidopsis thaliana landsberg
atgaacccagacattcccgcgctcaaaaggtgttcgatagaatgtcagatctattaattccagagatattcgcctctaccccaagggaaggtattggctttaataagttgattcgatattgcctgcttagttagagatcgctaatgggaattaggtcagtgtctagctttgcttgaggatttctatcacgggagtgaattaatctgttgttgaacttgttgtctagggatagcttctgtgaagttttgtcaaccgcctgaatagattaaggagaccacactattcgattaccccatccttaggaatcgtttatccatttgactgcctgttattatttctgctttgttattcacctgcctgttattgccatttcttcttttagtttcatttcatttatgtcattgcatactaggacagttagaaccaaccaactctctacttggcttgacttagagctttcaatcatatctcatctgtttgcatcacaccggattggattgataacctaaaatactacaacgacacgatagtgttttaggattaattgagtaaaatcctactatcagagaatccgaagagaatccaaagcgatcgaagggcaatcgacgcagaaccaagtggaacccgatagaggatttttaccataatgggtggatcagcgtattgcctccacaccttagctgcaagcaaagcttatcagaaacgagtccgatcaagtagcaactggtcg

SEQ ID NO: 33704 - DNA, 196 bp, Arabidopsis thaliana landsberg
gccggaatcctcttgaagaaggggtgccttcgaactcgcacaggtgggctggtgcgtagctcgtgccgagggttgggtagtccgaacgagcgcaacctcggtttagtgtcaccgtgagtttgaaccctgacagactgccgtgataagccggagaaggtgaggatgacgtcaagtcatcatgccccttatgccctgg

SEQ ID NO: 33705 - DNA, 1922 bp, Arabidopsis thaliana landsberg
agcgatggatcttttatatactatccaccttaggttctgtacaaatatcataactcttgcatcttgtacaatattatgttccaaaatagcatcagaaaatttatatttcatatcattgcaaagtttaatatcacttcatacaacataggcaatagacacttatctgaaacattttccaccatatttcatataaatgtctacccttaactataattcatatccttctataccaaaataaatacctactacctatggttattatactccatagtgcaaaagataatttttataggaattagttacccataaccaacaaacggaaacctattctccatacttttaaaccaaatataatagggttacccatggtctaattttcaacttctgcattcaataaatttattcgccttcttctttctccctccccttcatcaaccaagagggttggaaaatgtcaccctattgtgtcctagccctctgcatcttccacacttgtttggctgcttcgatttgttttttctctacaacagtaacacggcataattatagttactcttctttattacaatttgcaattctggagcacacaacaaaaggtctgacctcatattctcctgctgaatgtatctggagtttaggtggtcttcctgctggtctccttgtttttggaggtgatattagtcaaattaccctaatgactactctctcaaaataaagaggttgttatagcacttagggatcgaattccacaaagttctcggatcacacaatagattaacagttttgaataaagctaaacataaaatattataaaagtaaaagacaagaaagcaattaaaagttggttttagattcagatgattaagatgtcgggtttaggaaaactctcaggagatatcagaatagtagatttagcagtaaattaggaatattatcgaaccattctagaacataaatcactaatataaagtaaccggtggtgtgtcgtgctactcactatgcttaatagtattgattccaactctcttgtaaatctcaagaactaagcaagcattataatcaggtttgataagttcacctaagtaatggacgctagcacgcatctaaatactaggctcatctaagatagttccagtaatagatacctatggtgggtatacctattatcctaaaatcaagttttagttagttactctaaaactaacattaagaacaatcatgaagaattctaaatatattatcctaacagggtttttgacctactaattcaaccaaatccctaatgagcatccctaaacccaacaagagaactagtcaagcatgatcatagaaaaacgagacatgattgaataagaaatcaatgatgaaattaagaagagaaaatagtgtaaaagaatattctctaaagggagtctccataggggtttgccccaaagtacagaatagagaataatacttagatctaagcaatgcccataaaaaacaatagattagttcccattccttgatgggccttcttagaaataaggaaaagttctgggccaaatttagaaacatcaataaattgcgcaattgaattgccgtcaggtattggtgtcgctcgacaccaggggttgtgtcgatcgacacctacgtcaattttcgtctctggattgctgttgcaggttaagttgtctattttgctccagaatgctccataatcttcaaatgcatcctaaacatgtaaacacctgaaaaagactagaaaagactctacaaataacaaaagactctaaaaactatacctaattcatagctaaaagtagtgaaaatcgaggtatatcaactcccccagacttagtttgtacttgccctcaagcaaaacacaaaagctgaacccgtggaagaggtttgaaaaaatcatctacagctgcttttgtttt

SEQ ID NO: 33706 - DNA, 372 bp, Arabidopsis thaliana landsberg
gagctgaaggtcaagtgtgttctatttctctacttctatcttgttctctctacattttgcctctctcttatgtttttggttaatacggtcaggctgtgtgcacggaggcgggaatgtttgctctgcgtgagaggagagtacacgtgacacaagaagactttgagatggcggtggccaaggtaatgaagaaagacacggagaagaacatgtctctgcgtaagctgtggaagtaggaatctctcatggaaagactttctttactttactgtttgttgtttgattctgaaaccttttttcgggtgtctcattaaaacattttagaacaaagtttttacggatctaaacacgagtttatctagtatgcgatttgag

SEQ ID NO: 33707 - DNA, 2047 bp, Arabidopsis thaliana landsberg
aaaaaatctttactactagacaaaaattcttttggaatcaagctaattgctttttatggggcggggcttaaacgttggtgccatacatcatatcaacctttgacacttgtgctcacaactgctgccaactccatacttttaaacaaaaaacttccattctctcttttaccaactccagtcaccgtcctcgtaatgcggtcctgtatcacaagaaagtgatcagcaagctgcacaacacagtaattctcatccatcatctgtccaacagagatcaaatctgaagtcaattccttgacatagaaaacggatttcagaaccaaactggaaccaaggcgcactgttccttcactcacagcaactcgcttattcccatcagccaatataatcaaaaccggagagatcttgcgcatatcagtcaacagatgtaactttccagtcatatggtgagctgcacctatatctaggatccaagaagagaaattagaacacgtacccgttagagtctcatgtccttgttcgttgggtttgatgttggcttcatcactttttccagcgttcaagagcttgagtacaccacgccactgctcatctgtaagaccactcaccgcatctcgatctctatcagtgataactcgattagcccgttccacagtggttaagccagttgtgacatcattcacataagaggttggagtgcgattttgtcctccattaaagcctagaccgggtttgcctctgcctcgaccagattgtcctcgcggtctatcgccccaccactctgggtatccaatgatcacaaagcagttctccggcgagtgaccgccacgattgcagtgcttacaaacgttcttgttggggaactttgcagaactaggatcaatctgtggacgagactgagtagcaaaagcagtgacatctagcttttcttccttagagtatctattgctcaacatgtcctcttcttgtctcacaatgttgtagacttcttcgagtccaggaagaggaacacgtgatgttaagctagaccgaattgtatgaaattgagtttcatcaagtccatacagaaattgttgaaccatgtcatcttctctacctttctcctgctcagcttcaagattacacacacatcttccacatttgcaggttcgaagaggacgatagttgttgatattatcccaaatcttgttgagttttccataatatccttcaacagtcataccctcttgtttacaagtagcaagatctgccttcatcttctgattctttggaccactagaaacagagaagcgtttacgagtgtgttcccaaagatctctagccacgtcacggtgggagatattcgtcaagagcgccgggtcaatcgtcatcttcatccaagacactagcaaagcattaatcattaaccagtcctcgaggtccagagattctgacggcggttgtggaatggagccgtcaagaaaaccaaacttcttccgtgagcgcagtgctgttttgaagccacatgcccattcatcataattagtcgacttcaagatcgggtgggagatcacagctccagagttatcagcgaccgttaagtcatacggcgagattgttcgccgaacttcagttacaagaggaattaccggaggagcagccattactccaaaagaaactcaaactttatcgatttcaaatgaaaaaccccagctttagctctgataccatgacaaaatcaagagacaagagataaagataaggttttgtcttgatagcagcttaagtgtttctcagacacttatacaaagagatagcgtttcagacctaaagggacaagaagggaaaagaccaaaaggggttacaaacagtacataaagcaacattaagcttaagagcaactaattgatgtgctctaaataagataagtagcaatatcttcaacagagagatctttgcttcgttttgttaatctttttgttgggtttgatttggtctttggttagttgcagagtgggaataagctccgcgtgttttggtgtcaacttgttgtcctagtttttagttttgt

SEQ ID NO: 33708 - DNA, 374 bp, Arabidopsis thaliana landsberg
attaaatatgttttgattcttaattcaacttgagagacttttactttacttcaggtttttgacctcctcgggggaggatatcaatatcttcttcaccattttgcacaattcactccatgcaaacaacacaaaaatgaaatatcaatgtctctcaagattttaactaatctttcaatcaatagaaatagaaaggaaactcacggccatggatcgtctccaacaagcatctcatacccgtcactatctgtgaaagctattttccattggttgcgagtttgtaattggcctttgatatcaaagagcttctccaattctagtattagctgatcatatccattaagaacacttaaatccacagctcttcctattgttac

SEQ ID NO: 33709 - DNA, 1103 bp, Arabidopsis thaliana landsberg
cgatgcttggtaaggattcccacaacaatatctcaaattttattttttaaaatggctccctaatcacgcgatgggcatcgtttcatatgctacagcagactcaattcatgtttcaagatatatacccaatgaatgttttaattttcttagactgaatgcttcaaatatgtaaattctgtacaaatagttaacaactgcagcatctaccaatacacataatggccgttctgtgacaatataattaaatatctttaatccttacagctttagcaaaacacttacacaattgaagataattggggcttcaagtcctgtaaacaaaggaatgcgaagcaaaaaaggtataagagttattactaaaaaacaatgaaatgatcttagagccaaaaaaaagaaaaagaaacctttacgtatagcttacctatctcgagatcatgccatgggtgtgcatctactgatctgagactcatggacgaaagtattctctcattaacagtaggaagtgaaacatgttttcaacgtagcttttggtagaaacctcaatcggtggcgccattgctgcaaaacattgcacattacgattcataaacagaacaacaaccataatatatgcatctctgaaaagcaacaaacacaaaatatgggctcaaactttacaaatgttttagttcccctagatcatggaagataaaaccatattttcatgaattatactaaagatctctgtgcataaaataagttaaatatataaataacaatcttcaacacctggggaaatcaattgaatacacacaacgcaatggtggacacagagacacaagatacaaaatctaataaagagaaagttacagaaacgtccaagaaacgcataatttttgcagcagttcacgaatccataaatgtctccaccgacaaaaccgttcccacatgtgtataaagcgagcaaaagatcaaaaatttatttatacaaaaaaacagggcactctcttgaaatcatcttcagataaaaagcaatgggccttaagagaaacgagcaaagattttctttttaatggagtttgataatctaaaaatgtagatatacatcacaaagattgaatatt

SEQ ID NO: 33710 - DNA, 1236 bp, Arabidopsis thaliana landsberg
actgtcatcatcttgagacactagtatggattatcttatgtattctaataacaaaggctcatacacatcttgctgaaatatgttttcataatcatttttttctactatttcttaaaaaaatgaataaagtgctaaaatatcaaccaatgaaacggctatcataatcaatatctaacaaatttagtgagaattatcatgatcgattatattatatatatataatatatatatttataaagttttaaaacttataactctatattcattattcattattgctttacatattttgatctgaaattttaaattcagaatcggttccttattttaagatttttgtccatataataaaattttaaaatacaaactatatacatctgattagatctatattaagtattcataatacacaaaactttatttttagaaaatttccattggttaaaaatatcctagtatgaatctatatatcttgctcttgattcctttttacaggaatcttaatatcaactttgatccctccacttctttcttaaatgaacatgagcaaaactaaactgattgtgtgttgaaaccattattaccaagtaaaatcgttggcaatcatcgaaagtattcgaaagcatctgagggtaaataaggcaatcagcaatccatcgcactgtcatcgcgaggtgagaagggctcactggtggtctctcctatgcaacattattcaatcagcaaagtaagatttatactctactcaacttgtatttggaaaacaaaaaacaatgcaccacaagtcagtcactcttagttacctttaactactctagtaatagaacaaatcacatccaaaaggcgacaaaatgtttcatcaactcgaacctgaaaagtttgcatcggatggctggtaactgtaccgcgtgcagccaaaattatgaacaaagaaaaaagcaccactggacagcgacatcatgtagaatttgaaagaaaatggagctcgacgtttgtaccctgaaaaagagaaattgactggtataataacaaatatatattcagcatgtgaccgaggagactagtttattatacctccttcggtgatcgatttatgtttgttcaacatatcctcttatttaaagcagggatgtaaattagggatcagaataaaaccgcctgtgtaattattttagcctctgatgtgtgacatggtcagtactcagtagtgccagatgacccaaaccattgagcgag

SEQ ID NO: 33711 - DNA, 1509 bp, Arabidopsis thaliana landsberg
aaacaaatcaaataatcagttcatgtaaaattataaagacgaataaaaataaaatattttactccaattcccctgaaaatgacttaatacaaactaataattttgaaagggaatggaagaatgaatttataacttttcacagtgctttaatttcttttattacggaaaaaaataagacaatggaaataaacgaaataaaactaggaaattgacagaaaaaattgtgtttatttctttatcggaaaaacaagttgacaaaaataaatgaaaggaataaatattgggctaaataacttaagagagaaagataagtgggaatgactatgagggtgatggggagtgtacttactgacacacatgcgatcgaaaaacactaaaagcctatagggtatattcgtaaattttattagactgtacacttggttgagtagttgcaatgggaaacatttatttgaaatttgattccatctttgccttaccatatcgatacgtcatctttttatgtgtgcattgtcattatttgatgatcaagaatatggtaccaaatacattatatatcagaaaagttcgtatgactacgggtatttaattaaaaatacagtacatgcatggtcggtgtgtataatggagaagtagttagaaagagaatttgtggtaatgacaaaaaaatggaaaacaataattgattgtgtcctaaaccagtgaaccgtgcgatatttcgtgcctttaaatttgatgttgcatgtcgtagaacgatgttttgataatttcttctcttgggaaggtaaaagaaaaaattatggattcaatgcagattggctcgatgagtaggaaacgcacttacaaaaaacataaatctcctatctacaatcacatatttcttcttatatctctcttgaaatctctacatgaatcacacctaaaatgttcatatttaatcgcataccatacttgtattagtatgtcaaatgctcgggattttcttgttaacaaaaaagaaaaaaaaaactgattgagttaccaaattacgtatatatacacatttttatctttgtttaaaggaaattcaagttaattttaaactaaaactatgtacaagtatgtatctctattattttcgttttccatctgaaactttactacgtttggttaattaaaagtgggattgacgaacagtggagttcgagaacagatagtggaaaggagcatagacaatggttgattatagggatactgtcgaatcctacggatactggtgatgcattttacagggtgtaacctctaaaaccaatacaatttgattcgatgaaaataatactttatttgtttaaaataataccatcaatattagtttataccgcccaattattagtgtctccaactctccaacagatctaaaagctttactttttagtttttattagtataaaagaaatcttcttgattgtctttttttccaacacccaaaacctttactacctcaaaagttctgtataatattttttacac

SEQ ID NO: 33712 - DNA, 2086 bp, Arabidopsis thaliana landsberg
  unsure (1)..(2086): unsure at all n locations
ttaacatttactaccatttgcagaggctaacccgtggaagaaagtaatcgaaagcaatgggatcttgttatccatagaccgatagatgaatgcgttgtgcgatcttgtcatttgtctctgtgttctttgaggtatttcatacgtacaagttactggcatgtagaagaagaactttggacacattgttcatcgagagaaaggattattggtctctttgttttgcaataaacatgtcttctgagtcaagggtcaggcagaagatccattagtattaatgatgatgtgcttagtctagtttaaattagaaatgatatgtaccaaattgcaattaaaacattgattattagaaaacttgaagctacaataagatttaagttgtaatttttttttttctcaacttaaattagggttagtagtgtctttaaattacatgttagcattactggaaaaaagtcttaatacaaataacagtttcaataaggtacaagtgaatgcaacagaactgtttacatatttttttcttcataaacatttatgcatattcttgagataaatgtttactaaaaaactttagatgattttcaatctgatccgggtgttttctccaagctgccaggatgcctttaaaacaaagcattaaaagtggttagtgattatcaaatgaataccgataatggtaactantggtatatttntcgagatttcgaaaagtttaagaattatgagtttttgagttcaaaattagttgttgatgaataaattagtccatgccatgtattgtattatggaaccatgatgaattgagaatagtccatcagatcaaccaagcttgaaccatcatttataaaacatgaaaaattatattcataatccgttaataatgaatgaagggattattgttaattttgccattttttatcaaaatcttttgaaattgtcatttttaattaaatcttacgaatatgccatttctaacacttaatagaagtatttaagtttttcttttggtaaaaatacttacaatataccacaaaaatcatatttttttgcataaaaaggaaaaacttcacaaactattcaaaaaaaggtaaattttacaaacgacataaaaaaatggcaaatccataattaatttatattttaattatcttactgaaagaatgtaaaatttcaagccttattagagatagtctaaaagacaactttacttagggaatactcctcaatccaaaaaatttgatcatcatcatacggtcttattaacgaattatggcattttcacttttaataaatccaccgcatcaacgactaatccactactctaagaattttacacaaccaacacttcgacgacttacattcatccacgtcatcaaataccccgacactactgttacttacataagtaacggcttctctacttcggctcgtacaagaaaaacaccacttcacgcgcctcaatcattacgtttgttttcacatttaaacgacacttaagtgcccactggccacttccattgacacccattattactctgtctgtgtcctctcttttaaaacctaatcctctgtgaaacttttccagttaaaatcttttgcaatgtctaaagcagttctattggtcgctctctgctttttaccggctctagccatcgcggctagaccgaacaagaaccctttcgtcgtgcgaggccgtgtctattgcgacacttgcctcgctggtttcgaaactccagcctctacttacatctccggtacgttcataaacatccaagatctactttaatcgtatttacaaattcagttatggatcttgatatgttcacatttttgccaataatgttcttatggacttgtggatctatagagttatgaatatgatctacgttttcgggttttgtactaaagtagatttgagatctttaaggtgattaggctaattgattatatactatactatgaataatataggtgcagtggttagattggaatgtaaagacaggagaacaatggagttaacgtatagccacgaggcgagaactgactcgacaggatcatacaagatcttggttaacgaggatcatga

SEQ ID NO: 33713 - DNA, 495 bp, Arabidopsis thaliana landsberg
cagaagaatcacgtggctagatgagagatcgcgataccgggttttttttcgctgcattataaaaacaggattacaaggaatagcattaacgtcgatacaagatgtgaatggaatggatgtacatggtaacagaaatattgctacagaagcaataagatactttactgaacttttctctaccaattcccctactacaatatccaaagctctgcgtaacatacatccagtggttactcctacaatgaatgatcaattactgaaggatgtgtctgaagatgagatacgagatgcgctattctccattggaggttcacgggcacctggaccggatgggtttaatgcggtttattaccaaacctattgggatattgtgggctcatccattgttgctgaagtcaaaacgttcttcaatactggaacaatggataaggtgtagaatcatactaatctgtgcttaataccaaagattgagaagcccgtaacgatgaaagactc

SEQ ID NO: 33714 - DNA, 2880 bp, Arabidopsis thaliana landsberg
gaatttcgttttatgtattgtgtgagactgtgagctgtttttgtttatattggtccagtacatatatcagcttttgtatggatatatacacattctttttgaccactaaagcttaaaacagtaaatgatgatgagcaagttatatctgaaagaatgggaattcaatgagattattaatggtgattttatttcatctatccttcgacattattataaggtttttagtcgtcaaaccggttcaaaattgacaaaaatcggttcaagtttaattctctgctctcctgagactgcttaaacttttgagtggtccttgctgctcagaccatggaggtcgtttgttgttttcctgaaatataacacagtttattataaatgattcatcagatgattacttactcggatctcaaaatgtatcaactcttccaagtatgatttggacatggagcacaaaaccatctgtgaatacatacactgatatctgtgacagaattgcaggaggaacatctaacagctggagctccataaggatacatcagtagcagtttgcaattgttgcaattcacctgaccaacctggttagctgcaaacaaagaacgacaagtccagaaccgataagagaagaaggctatttcatcaataatgaggccaagtgattcacaagctaagaagaacaatcttggtcttaagatcacacaatttccccaagagtagtaagagtaaaggataaagaccacataaatggtctacaaaggagacattatgatggagtagagaccaaaaggctcacaaaagcttaagagaagaatcctaaccaaagatcattcttgtgtcagttaagaactaaactcatttggtctcaggaagcttacattttgagattctcaaaagaacatagatatatcattcacacatgctaagtaaaactagactgagagagcattccaagattgttccattaagagtttcaagtgactgagattatcaacaaaagcttttcaagtaatgaataagagataaaaaagccatggaagaacgaaccttcaagaacgagattaacagtctgacaagaggagcacttaacatgtttggatcctcttagataagaaagcaaacgcctgcaagatccacataccatttgggccttttctgcaacaaccccaaaaacaaagaagatttgcagaaaaaaaacactaatcaattctcggaatcgaaaatgggttatctctaaaagtctacaaactccactaaaaatctctaatttgatcagactgtagcaagaaatggaagcaaatcgataaaccctaaaatagacaagactacaagaataccgggaatttctacggtggtgggattggggtttacggcggcggtgatggtgacgattggaggaggaagaactgcagattcccatcccggaggcggaccttcctcttcctcctcttcttcttcacggtgcttttgttcttccttctgcgtttgttgttgtatctcttccatcacgccttccgtctcggctccggcgaagatgtccaaagttaactctcagattattattacttttacctttttaactttccagtaacgttgacaaatagttgactttcttaataaatgtaaggtaaaattcaatacaagaacaaacaaaaaagatttagaaagaaaatcaaaacaaatgatagtagataaattcgttattgcatcggtgaatcaatgaacaatgttaacataactctcttatcaatcagatggtagtaacaacagcatgcactacagctaaatattactagctcatccttggctttatatacatcgtcaaaccattctagtatcccccaaatctctccatccttgcgtttttcaatcgtaatttccgcacaccaaatttttctcacgttaccccactccttagcactccacgtacaccaccaccatttttccaccataatatgccaatttaacattaccataaactttaggcaatctttccaaccccttcatagttgtccatgatcctttttccgagtcataccaatcgatcataccgttatcacttctattgcaacagtagaacacgttctttatcacacaaaaagatgatgagcaacgccatccattattcatcgctaagtctgccgctatccatctacctttatgcagcttgtaagtcacattatgaaaatacgaccttacatagacagttccttcatacactatgctctcacacttatagcctgtgcatatcttctcctcactcgggaattgcaaaaactcccaagtttgggttttcgtatcaaaaacctccatccatttcgttgaatcgagagttccgcggcctcctgttacatatattttcccatcaaggacgcaagtagattggaacacacgggaaacctgcatgctaggggcctcacaccatgtgtgagtacgacaatccatgaccatgacgctagacgaaggtttagttctattattactgaatcccccaatagcgtagatattaggaccaacagccactacactatccgaccatgatgcagatttaggatatgaaattgggattaaaatcttttttgagctatttgggttgcggcaaagagtgaaccaaattaattgtgggttagaagcgtcatatgtaatctgcgttaagcacgcgtaaagacaactctcggttcggcctaagaggattcgggtttggtaaagctccgttgaagcaagaagagagcgaaatgttttggagactaatgagagagttggataatgtaatcttgagatgcgagctaagcagtttaataccaaatcatcaggaagcattagaaaacttcttctagttctttaataggggggctttctccatattccatggttgttgatcactttttt

SEQ ID NO: 33715 - DNA, 2283 bp, Arabidopsis thaliana landsberg
tactggacggaatcgcgtgttacccatcgttaatcgttatactcgctttcattgttttgacgacactcggattttgaaataatatgaaaaagtgtttgatttgtgctaatcattgatgtatcctgggatttattatatgttcaaagagttactttttaggtccggtatatatgcttgtaatctaaactcttgctagtacttttaggtaccctgaagattcaagttcccttctactatagtatagtacctacactgtttagaatcttgatgtagccaatccactttcatagacagttgggttacttgtgtatccatgaaatcattcacacaagttagctagtccagcttttgttttgtgtattgacccagcttattagctatcaagtgcaataactctagatattaagtgctgttacagattatgtggtgttcttgttgatatattactaatctatgtggtgtggtttctcactgtgcatgatatgatgaatacatttttcagatttggtgattttttaagtgctgttacagattatgtggtgttcttgttgatatattactaatctatgtggtgtggtttctcactgtgcatgatatgatgaatacatttttcagatttggtgatttttttcttgtgttttttgttttgagatgccaggtcgttatgctgggtctggatgcggctggcaaaacaacgatactgtacaagctccacataggagaagttctgtctactgttcccacaatcggtaggtcagattgcttaagcatatttattttttttgcgttttctcatttatcttacaacgggtttactgaggattttaaatttcttacacaggtttcaatgttgagaaagttcagtacaagaatgtcatcttcacagtttgggatgttggtggccaagagaagctgaggcccttgtggaggcattacttcaataataccgatggacttgtaagtctctacttatttttcacgctgcctctagttagatagttaactcatagagtctcttctcttcatgacagatgatttctcatgttttgtaaggaattttcctgattgatattggtcgatgcatttgcagatatacgtggtagactccttggaccgagagaggattggtaaagcgaagcaagaatttcaggtaccttagaaaatttgcacaaaactttgggtcaaattagtttctgcagtgtttctataacctctgcttattgatttcttcaggatatcataagggacccattcatgctcaacagtgtcattctagtgtttgcaaacaaacaagacatggtaaaagttcataggctctagctttccttatttcatattttttcgttctcatttaccaaaattcgtctgaactctttatgaatttcagagaggagccatgtctcctcgagaagtatgtgaagggcttggcttacttgatctcaagaacaggaaatggcatatacaaggcacatgtgctcttcaaggagatgggctctatgaaggcttagactggttatgcgctacacgcgaagaggttaaagccgctggttactggtcagttggtccctcgttttagcacccctaccatttgcaaagaaaaaatccctgactagctaaattgacatacgaaagtaccaaatcaagctcatggtgtctcctgtctactcaccattatatactttacatccatggccacacccttcttcgtggccactgatatggtaatatcacaaaactaatgaaaatctctcaagactttgtaatggaagtgtttttgtttttctttcgtcttcacatggctctgcttcttaaagctaatgttagtatcaattaggctcctttttgcataatatgactttggagctttattgtaaattctgatggatacaaaatgtataaatctgacaaaaattgcaaaattctcatgagattattaaagtctcccttatagctatgatagatgattgatctttttacgtccctgtcttcccctgttgagctcgggcactataaatttggtaactaccgagtttgtctcttttgagttcatataaaatacagctaaatcgagtttttttttaaagccatgaagaaattacgaatgagatgaaaagaaatagaaaaaaaaaattacaaaaaaaaaaaagaaaaatacaataaccgaaggaaacataagaattatcaatatttttcaaagagagaaggaaatgatttcaaaaatttgttttaaacttttagtgaaaatcaatattattttttaaaaatagcttaagagtcaaaatc

SEQ ID NO: 33716 - DNA, 1701 bp, Arabidopsis thaliana landsberg
attgattaaacttttctgaaccttgaagtcacacacaccttattttgtgtagtgtttgaagttaattgtggaaggtttgagtcaatcttggctttctgatactacttaaaagtatgttggatgttaattcagtgtcttttgtgcttattatttcagataaggttctcaggatttaggttgcttctatgagaaggacacgttgcagttggtgcttcatgtctaggtaatgaaggctttatgtgatagatttgttcctcaacaatgttcttcatcaagcaagagtgatacgcatgataaatcccctttagtttcagattctggacctagtgataataagtccaagtttaccttatggtcaaacgtgtttacgtcttcttcctcagtttctcaaccgtatagggagtcttcaacttctgggcataagcaagtttgcaccactcgtaatggttggacagcatttgtaaaaagagtctctatggctagtggagcaattaggagatttcaggagcgtgttttagggcctaataggaccggtcttccgagcacaactagtgacgtatggctcttgcgtgtctgctattaaatatctgcggatgagaactcaggggaaaccgatactggcactgtattggctgcattgcaactagatttttcatccaaaatactgatgacatatcgtaaaggtttgtaaactcaactacagattaaagccaaaataaagttttttacataaaatttaccatttacgaattgtattttacaggttttgaaccctttagagacacaacttataccagcgatgtgaactggggttgcatgattcgaagtagccagatgctttttgctcaggtgtgaggaagagtatttcttttggcatgagattttgaagtttataacatattctgacaaaccaaatattatcaggcgttgcttttccataggctggggagggcttggactaagaaatctgaggtaagctcaatgtagcaacactaggaacagaaacccggtttcttgcattgagatagtggaaacctcatgcttgtttgatttaaaaatgcagcttcctgaacaggaatacttagagaccttggaaccttttggtgattccgagccttcagctttctccatccacaatcttataatagctggagcgtcctatggtctcgctgctgggtcatgggtaggaccgtatgccatttgtcgagcgtgggagtcattagcgtgcaagaagagaaaacaaactgattctaaaaaccagacgcttcctatggctgttcatatcgtttctggcagcgaagatggagagagaggtggggctccaattctctgtatagaagatgctaccaaatcttgtctagaattctcaaaaggacagtctgagtggacaccgattatccttttggttccactggttcttgggcttgacagtgtgaatcccaggtttgcaactgtgaaattgattccattatctctgttatgctcgactcgtatttgtacttgacctttctgacgtattgctataatctgatgacaggtacattccatctctcgtagccacattcacttttcctcagagcgtggggattttgggtggcaaaccaggtgcctcaacttacatagttggtgttcaagaagacaaaagtttaaaccttgatccgcatgaagttcaacaggtttcatttcgtgcgtcttgttttt

SEQ ID NO: 33717 - DNA, 2308 bp, Arabidopsis thaliana landsberg
cactaaacagtattgctgattaggtgtctcccaaggatcgcaataaccaataatgagttattactttagaagcattaatttcataatgaacagttgaacaccgaagatatgagccaatagagtgtgagatttgggacaccgaagtggcaagagcacaagttgctgtgtgtttccgacacaccatgcccatacttatactactatttctttttcaattacttattacgttgtcttattcttcgtgacctcttagtcgctgaaataaatttaatttatcctttcctattctcacggttgtgatgtgcctttattcacggttttgtttttcaaattgtggtcatcttttattattcaaaatatgtataaaaggatcatacaaaccatatgcaatgaaaacggtaaatccagactaaacttttctaaaaaatcaaattaaacactatatatattgactaaaacattaatattcaaccagaaaaagattcttacaagggtaactaaacaaattaaacagtatgtattgactaaaacattaatactcaaccagaaaagattcgatctatacttgttctaacattgtatataattgattatccgcaaaatttgttccacatccatttactctgctcaaaggatgcaatagtacaaaaaaattactcctctattataaatattcccatatctacatctatataagaaatgattcgtgcaattccacttcaccggccacatgtatgtaagaaaaaagaaccaaaaataaaatcttttttaaaaaagaaccaacaataaagatcgttaaggaatttagaatggtgtgacatctcgtacaagccaagttaatttgtttacctgtcaagtgggaaacaaaaagttctgttagaaaaaaagaaaactaattgcaaaacagattgcttcagatataaaccaacatttttctttcttacgatgaaaacctaacataataaaacgaaattcaagtaactaattatatgattaacaaagtcgaattataatcaaatctatttaactgcacataaaaaagtctcttaagaaccaggacccacatagtgacaactgtcttccaacactttctaaccatttacatatccaaaatggcaggttagttcactcatcaaatctctcaacttgtcttctcctcaaattaaatgtaaatttaaatataaaaccaattctttatatctaaatatgtttggtttcgaaatattcatatatattaaagaaaaatgatatttccttgatagagtaaagaaaattcacgaagagagctctactcattatctttatcataccattatcattgcctctctatataaacataacacgcaaacttcactctcacaagtctttcatcacatttccatttttctctcttccataaaacccaaaagaaactaggaagaggaaggacaatcgttcccaaaaaaacctctcttctctctcctcactgtaacaaatttttagatctagatctgcttttctcggtgcctttgatcttcatctctttggctttgctttgaaatttcaggggtgaacaagatgccttctccgttggcagtggtgtggtttttctctccttcgatgtagttgtggatccgatgtgttggaagtagagagttgctacgattcccttcggttgtggacgccggttggtgtagcgatttcttctcgtggctcagccgtcgtgtcggcctctgcaactacggcggaagtcgatcgagagaaggtgggtagtgccaattcgccatggaggttaacggtggatcttcctagatttgttggctgtcgcggattcagtgtgtttgggtgtttcgcttgagccttggcctcaaacaccaccgtgacttgcttcctcttggccggttgaaggttttttgttcggtaaatcggagattcgttggattgggaaagaggggttatgtttgattgtcggcttgctaggtacgggagctaatatacggcgtgccgtgatgtcggagggttgaccatgccgagagatttgtggtggaaacggttggtcgcgggaaaaggaatagtagcggaagtcggatgcttcctctctgtttactagatacttcgatctgctgcaacgctgtggttctcgcatccgtcggtgctaatggtcggcttctctgcgtcacggtgtcactagggcaagatcctcttttccggtcccgacaaattttttcgtttttcctttgtctctggttttctttgtaaaccaaagcccagcccaattttgtgggttctataactaataaaaggccgttttaaaaaaaaaaaaaaaaaa

SEQ ID NO: 33718 - DNA, 1602 bp, Arabidopsis thaliana landsberg
tggatggaccgcctcggcttgagagatttttgtgttcatgtgtggtggataacgtggtctaaaccggtagttccagagcccgatcaaaaacatgtagagaaacattgttggtaagatcagttctgggagacaaacaagcatcaaaaacagaacatgaacaagaacggtcgtgatcgggtttcgccacgagcaaatgtccgagaaccattttccaaccgcgataacaccggagaaaactgtcatcatccggaagaaattagctttgctcttacgcatactccacaaatgcgaatccgtgtccgacataaactcaatgatctctttcctcaggggaggctctgctctacctaaccgcgcagccactatattcaccgcttgatgtcgaagcatgtcctgctgcattactgaaaacggtctaacataatgcattttaggcaaaagtggttttgagtattggtaaagcatgtttgcgaacgagatgcatgtgaacctcacggccatatgtagctcgcccattttcttcaccccagtagggtgaagaacaagtagcgggtaagaatgtgtgtagatccgtccagtctctaaagtagataaccttatacgaatcttcccaatcttcacatctctatttcctttttcacctagctgtccgttatcaaacacaccaacggttaaaaccgtcgctgggtcaaagacttcccatgtatactgctcgttatacttgggacacaagttatccaccattgtccttgttctaacccacttttgtccatatttcccaacgcaaaaagtgtcagaggttcctctgccttctctagttttcattgggtgaagtccaacagcgtttaagatcccgagctcaagaactccgatcggttgtctccagagtggtctagcggatgggcggagatcgctgctgtaatgagttgactcatccaaaacatggtatcctccttcaagacaaactcgcagatgaatcctcatagagaatttttctctcttgagctgatccacatctacaataaccggtctctccagattatacctatcaaaacacatttctatcaaaacctttaagttttatatattatgaatctagtatcataagtagaagcagtaccatcgcgcatgtatcatatgatcatcagctcgcttctctaccgtgttcaaaggaatgtaagtacggccaactatctcgtcctttcctggagcaacccggtcctcgacggtgagaactaaatggtcttcaaatggctccgcaacaacaaacaaaaagtcttcgttccatgcgggaggaggggttcgagcttggcatgggcccgcccccatgacttggtttcctagctgcgccttgacgtaaacatcagggaacctagctttgtctgtcggaatcaagtcttgtgcttcgatcacgttcacacggacgtaccatagacgaggcgcatgatagacctatttaaaacaaaacacaataaagaatcaaattatttgcttaaagcaacgagacatcaataaataatatctttaacatattttacatctaatatttacaagaaaaaaaaggagcgtggctatattttcatacaagaaaatatctaacat

SEQ ID NO: 33719 - DNA, 1782 bp, Arabidopsis thaliana landsberg
agattattaacctgctgaaatttgttgaaaagagtcgccatttttagttttctttcctctgaaacgattctccacgctctttgtttataaggattgcaagaaattactgaagaacatcaggaatcgcgagagcttggggcgaatcaaaaacctccattgatgaagaagactgcatctagtactttacttactcggtagcacacctccatgggcaggctccagcaccatggttgggcccatttcttattaatgggcctaaaatagagcttctagggcctctatatattttgtcttttctcttccgtttaggcgttttgctaactttcttacgtatatgaatgtgaattatagttagttaactttagaactgttgagcggccaatgccacgtcctttgtacgtaaattatgttattcatgctattatttatgtaccaattttctatgctaatatatattctaagttttttttgtatcaatactaagtatttatacaatttttgcacattttgacagaaagatagtacaaataatatgaaagaccaaaactccataaaccccaaaaaattccaacacaaacagaaaacggaaagaaaactcaatcgaaaactctacaagtagagaccttaaaagaaacttagattccaaaccacaaagctcaaatatttgtgtggtttcctcaacttaaaagatttcaaatacttatagttgttgccactagcaatccaaacctaggccagttttcaaaatctctaaaaaagagcttaccattccaaacttaggacaatcctcataatattttaaattttatgacattttttagttttttcttaccgaacatagagatacaacgaataacacaaaataccaaattttactaaacaaacaattactgcacaaatgaaaaagtaatcaacaacatgagctcatttcacgaaaaaagaagcgaaaaagccaacggtcttgccacaaataagtatattgcaaattacaaatcctaaaaaaaattcacagatatattcatcaattataccttttgattatcttgcaaataaatcttccaattcatattacctacgtcaaaatttagccatctacccttattatcccattatgaaaatttcaaaatcgataagatgacagacacccaacaacgaattatcattttatatactataggtattagatacctacaatttatttggtttattgggaatatacgattcataaattccctcataaaaatataaagcaaacgtggacggaagcaaaaaaactaaatatagaatggagagaaattgtattattaacttaggttacccatcgccaacaacctctcatttcctttcctaaactatttcacaattttggtcaaaaacacaatctaaacccaaaaaagattcgacctttgaaattcccaaaaccagaagcaaaacccccaaaagaaccctacttatagtgaaagaaaagtaacataataatatatatacacgagaaccaagagccacttgaatataaagttcacagtttttgtctgctcaccaaatcaaaccaatttctcctgatagccaaagtttttgtccccaacaagaaactcatgcaacattcttcacccactagctaactaacgacttccattcttattaatctctctcaattcttcatttctgagattcatcgctctctcttctctttgtcacaatgaatttcaattcttcttacaatctcactttcaatgacgttttcttctcttcttcttcctccagggaccctctggtttcacg

SEQ ID NO: 33720 - DNA, 1397 bp, Arabidopsis thaliana landsberg
tgttgttttgtgatgatgatgcattgaatccctgatgaaaacaaaggaaccaaattatcagtttgaagaatcaagaatccaaaaatctgtatagtttcaaatgaggaagcttacacgaagaacagatatgcagtttccaggatttgatccgtttgtgatatgagcaacttcttgaacagagtttccatttgacagaacgtcccactataaaacggaagaaaatgccacatgatttaatcagttttaaaacaccaaatgattcttgtttttatggtaatgttaaatcattgtagtacctgaggccgagttctttcatctttgaggaaattgaagacgttttgtggagaaattgggagccagaaactggtggctgcacatagaaccattccatttggttcatgtcggctcttatgcgaagtcacacggattccgaattcatccagtcccgagacaaccgttgagcaagtgttgttagatgtgcaacactcaagcagaagttgctaccattctgtgagcaagtctcattatacttctctttttctctggcgatggaatcactgaatttatttgaaatgagttacttatggtttacttagctgatcaattacgatttcaaaaaaatgtctttatttacctcctccaagatcaagggatgatgttgcaggttccaatagattcgtgaatctctcacacattctttggagagtagcaatccaacgttcagctccaaaagctaatcctttatgaacaatatctttaaacatctcatggatcggttcttgctcctcgaattcaccgtgttcgacccaagtaacctgttgttttacattcaaaagatacaatcaaatgattcaagaagctaaaagaatgaaacaaacaggacagttacacacctttgaatagccattggacatatcttggatcaagcaaccagaaggaaatctatatgaccgagattgagatataaactgaggaaactcatatgagacatttactattgcccaagttccatgttcgatttgctgacaatatcttagcacacagaactcacgcgttgttaccaatggtgaaagcacttgaagctcttcaatcatctaacacaagcaaaagcaaagtaaatcaaaagtttcacacacacacacacacacacatggttttaatagtagtggttgtttttaccaaatgcaatgcatctccatggtttccacgcaatcccgatgaaatcactgcaagggttttagatgatgcaacgatcgagggaaaaagctctgttaatttgacctgcaaattcatgaaaaactatatcagccaaacccagaaaaccaactgtggaaacaaaaacatcgattcgggttattgcttacagagttcataagcatgtccagaagtgtcctagc

SEQ ID NO: 33721 - DNA, 3569 bp, Arabidopsis thaliana landsberg
  unsure (1)..(3569): unsure at all n locations
ctctcctcgaagaaggtcaagatctatttcacgttctcctttgcctcgaaatgagagggaatacaagtctagaaactgtagaagtcctagagaggagagggtgcttactccaatcaggtctcgatgtctgtcaaggtcccgttctcgatccttaaggtaaataaatagctgcattgttatttaatctaaatgcctctctagatcaaggactagagctagcgccattgacatttagtttgattcactcacatccaactctatctctattaacatctgtgatgactgatgatgaatggtgttttgttgcagtcgttgataaataagaagaaggaatggctttctataatactattttggctttgaagtaggcaacttccttagtgaaacataagaggaatctgaagttttactataaatatttttgctctttttgttttgtttgtttgtttcattttagataacccaacttaagttccattctctgttttgtaacaaaccttcaatgtttcaccaatatccacaagcataaccacaagatcatagcaagacatcctagctgttggatatggttctctaacagtttttagtcacaaaattactagtatactgtcaagtatggtagaatataagcagataaaaacaattgttccattctgtgctgattagtgaaccatcgaacaataaaactgagtcatttagttgtctttggaactcactacgaaagcatctgagaggaaataaatgggatgacaacaaacaagagatggagagagtaaagctcattcaaaaatgaacattttgctttattatgagatacaaatcaaaacatgacaagaacttgtgattctcatttcaagggacacactttctcgaaggcttcttgctctttcctacacagatcaaactcgtttgtgtagtaatacatacacccaacataatcatccatctccttttggcacttctggtgaagatccttcagcctgcataattcatacaacaaatttaatgctttaccgaagaaataacataatatctgcatgtggacccaacattattaatctacgatctcgatgatgctgaaagtcttcttatattgatattattagaggattacatcatactaaacaacttctgcacatccaactaagtcttagaccaacatttttagggaagcaaatggcttcttaatggcttataagttggggaaaaaacaatgagaagttgtggtatgaaactgtttctacttggccaacatctgagagcaaggatatatgaaacaacccgatttctacaaagattgtaatatgtctgagtgtaatagatagttcctccatgaaatacagtctgaactctaaagcatatacaaaaccagagctcaatgaaaaacgatttgatggctgatctaagctcacctatgacttccataactacttaagtgtgctttttttatggtctcatgcccattgctaagatgattccacgatattgtcacagctatagtcagatactttggctcacttagtttagcacaaaagaagtgatcaaagtccctacagttcctaatttcttgaaatccagagacccaatcgtttcttcattcaagtctcatttctgaatcccaggcttacactctatgattagaatcctaaatcaaccatttgatactcgaggcttcctaaccaaaaccaaagccaaaactactaaacttgcaaagtagaaggaaaatataatgagctaaagatacgtacaagccaagcacgcagcgagtgacgtcacgacctttgtcgagacacttctctgggtttggatcattcttcttgcatttgaggaacgcaacattctccggcatacacctcatacctatatgcttcgctgacgccgttaaaaccgccgaagtagggatcgggtttcccgtagcgtccaccgcactcgacatcgcacagcaaattcgaaattcctaaaccagaatccgaaatggagaaactaaaattaatccaatctaacgcaatcccccaaaaaatcggaatcgaaatccatgaatctaaactaagagaagctgacaggaagataaagactgagagagcagagaacgaacatcgtcgtaccttttcaacggatcgatttggatcttcttcttcttctccactgagtccgacggaaatagaaaagagagagagaaaagagaacaacaaaaccaggtgagagtagctaaaagaatattgggcctattcagatttaatgggccgaatgaaaatttagtgtcttgtctctttttaatgacagtgttcctacttccttggtctcattcccgtttcatctccgccgccgtatcaccaccgtgttgtcgccttttgccatcggtaagtttctttagtttctgatgctttcagctctgtgtttgagcatctgtgagtattttttcttgttgaagttgcatttcggtgaattctaatgtttcattttgttattagcgcaagtttttttgcccattttggattgaatgatctaggattacgtttttgcatctttttgtttattttctgtaatctttcgaatggtaatgttcctaatgttctcagttctctgctttcaaaatctaaaaaaaaaagtttcgtgattgcactttggtctttagtttgtctaggtttttatgtcgcttgatgcacatattgaactgagatttgatcgttaatgatctcctctctatggtgtagtcaagtgagaaaatgggggacaagaggaagaagacgttcatgttcatccgtcttgtctcagctgctggaactggtttcttctatgtcaagaggaagagtaccaagggacttcttgagaagctcgagttccgtaagtacgatcctcgagtcaaccgtcatgtcctcttcactgagcagaagatgaagtgataagacaaaagaagcttgcttttgcctgttatggctatcatagatcaaataaacgtttcaatttagagttctatcgaaactctttgtaggattctctaaaacttaagtgcagattgattgtattgtgatcaatttcgacacccttgttgatttccaaatgaatgtactgtgagtgttaaatcgaattactcatgcgttcatctaatctaggtacttgaaaactgatcacaagttagattgatcagcaagcgatatgtagcgagcacgatagatactataagtttcttacccgacgagctaaccactcttatggtttgcctaaaagaagaaccaaacaaaagcctaacaattggagatctttgtctttttctacaaaacttaaccatctctcaattgtttggtcttcccaaggaaagctaaaaattggctttaattagatagcctagatcgacccaccatatttatgtaaagcatgactttgagtatagatgagtaagccaaatctttgatatcaaatcgaatttttattccatttaagaagattcagtgaacacacacttctcttgngttggtagttatatgatgatgattgtgacatatgatactatgaccagtgtctactgtcccattgcgtttggtaattgatagtgatacgagtgggacacg

SEQ ID NO: 33722 - DNA, 2455 bp, Arabidopsis thaliana landsberg
gagtttcctcacggtgtggctgaaacaggggatcgtctctctcctcagtaacctccttgaaacagaggccattgttgtcgactaaaacggagtaaccgaagtttgaagagacaagagagtgaagaaaagtttagaggaggagtgattggtgaggtggagaagaaagcaatcatataaatggatgagaaaacgagacaaatacattgcatcatcatccattaccattggtgttaagaatataataatacaagttgcttgttggaactatgtgagaaaagtaattgtggatttgtggtaagtgaagtgttcttgtcagagttttattcgtactcgtggaatgatcaaacttacagtcaacttcttacacctgtttctagtaaatttttaacttcttttcttatacagtttacttttctatcggtcaaggaatcttcgtgctttgttgaaaagtatttgacaaatggaaccatttttctgatggtttttggtggctgtgtctcaattccattaggatttaggcgaggttggtgacactgacacgtttaaaataccattacaatacctaaccggttaagcggtgatagaccatcttaatttgggtttatataggttctcgtttaccaatatccatgttaaacatctttgatctgtaataaacatgttaaacatcataatttgcaaataattctcctttggaacttcttccttgtttacaaatattgcattaagagggcacatagataaacacattgcacacatacatgtagtagatcaacaatagaactatagaagcaactaaggacaaggccagaaaccagaggacttgatgtcttgtttttacttagcttctggacttgaaggggatggctctgatgacaaccacatggtaaagagcagcaagtgcagctccaatgaaggggccaacccaaaacacccactggaatgacgacaaaaaaaaacgaaattgtcagggaaaaatgctcgaaaccgagtttggaatgcgatttggtatatagtgtgtggaaactcacgtggtcatcccaggaatggtctttgttgtagatgattgcagctccaaggcttctagctgggttgatgcctgtgccagtgattgggatggttgccaagtgaaccaagaaaaccgcaaacccgattgggagtggtgcgggaatgggcacaattattacaaaactcaagccggtaagcaacaaatccaatattgagaatcagtctttagtgcacactaatggcagcttcaagttcactcatttcaattgtttctagcaattgttacatggactggttacttacggggacatgagagtcacactaaaggcagcttaaaagttcactcatttcaattgtttcaagaagctattagcagatatgttacaaggagtggtaacttacagggacatgagagtcacgagcatttctcttggcgtcagttgctgagaagactgtgtatacaagaacgaatgtgccaatgatctcagctccaagacccacttccttggtgtaaccatgagccacagtgttagctcctcctcctagagcctggtattgcttaggctggaaccctttaaccactccagcaccacagatagctcccaagcactgcatcactatgtagtacagagctctagtaagcgacagcttccgggctaagaacagaccaaaagtaaccgctgggttgatgtgtccacctgagagttacatataaaaaaaatgcattccaagattaggctaaaggacacaattcatattagaaaactgcaaattccaccaagattgtagctttctgagatttcttgaatcagatacaaatggaacaagttcaggctaagaagctataaatctaaacacaattttctcaagattatagctttatcgtcttctttcacaacccaaacactcggaaacctaattacagtaaaaaggcgtatacttggagaagtagagtgacttaccggagataccagcggtacagtagactaaggcaaatatcataccaccgaaagcccaagcgattccttggattccgacggaagcacacatgttcggtgaccttttcactcccataacagtcaagacagtgatgtagagaaagagaaaagtagcgatgaactcagcgatcccagctctccaaaaagaccatgaagaaagctcaccaggttcgaaaaacggagctggtggtggttccttgtagtccttgtcactctgagctgatgttccgattggttgtctctccgggaacttgttagctccaactctaacgtcttcttccttgccttccatatcttcgatctctgtagagagaaattgtaaagctctggtttttttcttcttcttcttctctgagtgtgggatttgagaaagtagagtggttaattatatagttggaagatgtaatgcaaagaaagttgagaaataaaaaataaagacgatgatgaca

SEQ ID NO: 33723 - DNA, 504 bp, Arabidopsis thaliana landsberg
cgatggttgaccagagtcctcgccgtgttgtcgtggcggcgctcctattgtttgtggttctgtgcgatctttcgaattctgcgggagctgcgaattctgtgtcagctttcgttcagaacgccatcttgtccaacaagattgtcatcttctccaaatcctactgcccgtaattaaatttcactctttctcctaatttgaaatttgcaatttaggcaactttccaagttttggttcatatctagctttccttattcattggcacgatggcggaattcgaaattccaagactttgtgttgaaagttgtgaattttgttttggatgtgttaggtattgtttgcggtcgaaacgtatattcagccaacttaaggaagagccatttgttgtggagcttgatcagagaggtatcactttctttctcacccaactgtttatgagaattgaactgtttcttaaaacttctgagagatttgtttttgcagaggacggagatcaaatccagtatg

SEQ ID NO: 33724 - DNA, 266 bp, Arabidopsis thaliana landsberg
cttaaatataatctctaacatcctgatcaaaaaatcaaacttgaaactagatacaccaaaaggctcataggacgaaaagatcatttttgagtgccttatactcaatctacctagcattgagtagactgggtatatcccctatcaatatctcaaatcaacgatgggttctatgaattccctacctaacgggggactctaataggacctaaagccaggcatgggtcctccaactaattcctaaaaaaaaggcaaggagtaagacatcc

SEQ ID NO: 33725 - DNA, 937 bp, Arabidopsis thaliana landsberg
ccaagttctatgatgcagtaagatgccttcatcatttttctaccaacacctctttcacctcattctccttgcaatctttattaaccagcaagatgcaagccttaaatctcgaggctgtagaaagaggccttcgattcaaatttactctcaaggaacttccatttttagttcgatgagtgaagtacactggcacctctctaccgggtaagactgtaaactttgttgtaacctggatgatgagttcctttgcttctttattcagtttgaggcagttaacaaacccaagagatatctttggattatgaaatgagcaatcaagtctctccagtgactcacagtttactacctttaggtatgataaggaatccggaagctgtgggagtgataccagcttcttacatccgttgagtataagtgtctgaagcctagagattttcttgacccacaaaggaatttcttgcatttctatatcgttaaagtacatcgtcgtgatgatatcaagagcatgcatgaatcctttgaggttttgattgtatgacaattccaaatcgcgaagacgaggccatgacttaattgacgaagggacttcttttattgtagttcttaagagcttgagaactttaatgtttgtagagatctcaggaaaacttttgatcagtaagcaatcagtgagatcaaggtaagtgagagattccaagttgatattggttggaagttcctctagctttgagcatccttgcaatcctaaccttttcaatttataaaggcttcccatagaggagggaagctccaccaagctagtgcacatttcaagattcaaattcctgagattggtagcatttccaatagaggaggggagttccggcaaacttgagcatttagtcagattccaatcttcaaggttagaggccgtctcagagatcaggtaacactttta

SEQ ID NO: 33726 - DNA, 586 bp, Arabidopsis thaliana landsberg
ctgtatagctcctgccattcacatattatatatattagataatcttatatcaaattttttgggaaacaagtcttatttttggttagactagttataggtgaatatagagtgatataatatcaaacagatattaaggcaactaatggaactttatcacaaagctcatgataaaactttacaaaatgagtatacaagttacctaaacaaatcattattatttgtaaatgtcaaatgtcaacatgtgagaaagaatcttacagaaacccaaccccattatgtctcacattctcacataacactcaaatatttctacatgaaattacttttttcctttcttaacggatatattcttttcctatttttctatagctactaatccccagagggacaaaagtttttgttataacagaactgatacttaattacatatatacagagaaacgtaccagaaagattctactaataattttcatttgccttagaaaaatcgttaatgaatgattaatcattacatggctcataattcactacaaatttcattatattagttacgttaaaaacttggaaaacaaaaactgatgattga

SEQ ID NO: 33727 - DNA, 6645 bp, Arabidopsis thaliana landsberg
gtaacaattcatttgagataccaatacccctgtgagaaaaaaatgaagctttcttgtggtacaagtttcgcgttcttacttctgtttcttcttgcggcacaatctgtgcatgtctatgcgggtaacttccacaaagacgttcagatacattggggtgatggccgcggaaagattcacgacagagatggaaaacttctttctctctcgctcgacaaatcctctggatccggttttcagtctaaccaggagtttctctatggcaaagccgaggttcaaatgaaacttgttcctggtaattcagctggaacagtgacaacattctatgtaagttacatacaattttcaaaccgattttgtcatcttttgctattcctagactacaaatatttaggcctacatttattgagtatgtttgtgtttatgatgactttgtgtagctaaaatctccgggaactacgtgggatgagatcgatttcgagtttttgggaaacataagtggtcatccatatactctccatactaatgtttacacaaaaggcacaggagacaaagaacaacaatttcatctatggttcgacccaaccgttaactttcacacttattgtatcacatggaatcctcaaaggattatgtaagcgtaatctttgatccttagtaacattgtataatcttatatgttttgaggctatgcgctcatgaacttacgttctcttctgtttttgcccctcttacagttttacggttgatggaattcctattagagagttcaagaactccgaggcgattggagtcccgttcccaactagacaaccaatgagactctacgcgagtctttgggaagccgagcattgggcaacaagaggaggattagagaaaacagactggtcaaaagctccttttactgctttctacagaaactacaatgtcgatggatgtgtatgggctaatggaaaatcatcttgttccgcgaattccccatggttcactcaaaaactcgattcgaacggccagacaagaatgaaaggtgtgcaaagtaaatacatgatctacaactattgcaccgataaaagaaggtttcctcgaggagttcctgccgagtgcacttaaattcttgattctttgatacgtgaatatgttacttggcattgcctttgtaactcaatcaagtttttatttatttttatcatttatttgttgctcatatatacagtatgtggtgtttgtgtaagatgttttaagattgaagtaataaaaataaattatggaaaaagctttcatttgttaacgtaattaaatttaactggccggcttcactagacttttaaaaaagttaaaaacataggtagaggagttcattaattctacaataatgctttggaagaacataaatcataggcttactaatatgaagaactgatctatctgatatgaaggtactttaatactctccccagtaagaacactatattctttcatgtacttgcactgatttactagttttttggtaaacaatatatgttctattgtatctaaaattgatacattgttctggtgatcaatatacattgtattctcaatttctcatcttccagttataataacaatactatatggttcttggtacataatcttttacttaacaaaaataataataatatatgagttcggagaatttgctttacctgagttctcgagagtggttaagacgctgcacacagggtatgcacaccccaaccccaacttgcagtattcactaacagtatcaccttgagtcaaaaataaaaaatacatacaacttgcatcaaaaataaaatcttgctctattttgtaataaataacaataatacagcataatagaatgaaatcaatttaccttctgttttgggaatgacatgatgatatcccacagaacatggccctggaccgactttgcatccagtcattgattcacaataactcctgatatagacatcagacgacagactttatattcaagttgagcttgttcggactacttgaatttgtgccatgaaaagactcattatgattttacagtcttgccttccattttttaactgatttacctgtttgatgataaaatgtatgtagaggaaaaccttataatttataagctcttattgatgaaatggtgatgaaactaaacttacatatatactacaaaaaaaaaaaaaaaaattctaccacacatttcatctatttaatgtttaacagagtctagctaacacaatggctgccacatgcttcgatgaccaatgacccactcttaagtgctcaaactattacacctactgatacgctccagcaatctttctaactaataatggcgatctagagaattcctttgtgtttccacgtgttctgattttataactccagtcccatgcaactgaacggaacatatataaatactctgaattttatcatgttacgttcagttcacgtgcatgatgcgcaataggtgcctcggtgcagaaagtaagaacttgtcacggcatttagatcaaaggctcgtgtgtttcatatcttcttagtcaactcgaatattctttagttctgttggtgtctccaaactacgagatatttgagttgtaacaagggtgtaacgcagcttttgtgtgtgctcaccttgcaatgaataacacctttgactgtcttagaaaaaataatttaattttgcttcatggagctctgacactagattcaatagtacacaaattgactgaacacccaagaatataatccttctatccatagaacgtctcaaaagcaacttttttcacaggacacaagatgattaaactttgcttcttgacactagtagtacccaataacaaattgactaagcacccaaaaatattatccttctatcctgagaacgtctcacaggataacagacaaagaaatgagaccatctttttttttttattgtagtcttagctttgattttcattgccaaaaccttcataagaccgattcgaaggaacgaaagcagaaggttgtttagttacagcagtcaagatctctccatagcccacaactccaacaagaacatcatctgaatcagcctctgtaacccaaacatgagtagccctgtgagacagcatctgagccataacagcagctaatgagctcgatgttttgcaagttagcggcgcacttcttcctctgtacatgctcctaccgatgctcaatcttgtcgggcttgtcggattaaaaccgatgctcctgctgctgaacttcttggcatttgttgctgttccgttctgttctcctcctggaaatgaagtttggaggaagtcgctgaatgatcttgatgacatgttgtcctcaactcccatcacaaattgtcctgcatagagattagctagagcccaagctgcagctagataatcacatttccagagctttgaagctgagatttctcctattatcttgaactgttgttcgttttcggtttgttccaacacggcgatcgcactagggtcacacagtggcctacgagtggcttcaatggctggaagagaggcttcaatgaagttatagttttgattgatgattcccagagtggagattgatgtgagtggtaaaggagctaatgctccaaggacacctataaggaagcggatcacgtcttccctagagagacaacaaaacttgtcccggcttgaagtcatggacgtagtaggcctgttggtggagtcagcagagagaccactgctactactagagttttcactgttcttcagccattttccattgtaaagaatggagaacctcttgctcatacctctccaaacaacgctttttggaaccagaagtcgtctcactccttgtttcatcatctccaaagcatctatcaaccttgcattatatttgataaaagaaaatcatcatcatacgtttgtcaattaataaaagcttacgtaacaaggtatatacacaaacaaatcgggatctttcacgtcgtcatttttccattatatggagctacctaactttttgaactcgtacaaaaatgaaaattcacttattcacactagtccaaaaaccatatgcaaaatccatcactacttgaaaaaacttggaaatcaaatacgagttcttgctatatttgtttcacaaaaagttataaacttgatcccaataataatttaatttatctttatcttatacattgatttgaaatggttaagtttttacctttgaccaaaaaaatgatcaagatattacttctatcgcaagcaaagcaaaaaatatctagtgattttacctttagaaatagaagggcccttgagccagagctctcccgtttggttaattcccatgaaccgaccagtattcggatccacgatcctcacctccacattttacggcaacaacccaaccgcaccgtatttcagactctcctccacagattccgtcgaagctcctgaaccgtgcgattcactcaacgcatatccttgaaaaatatcaaccgttggatacttctctaggaagctatccgtgacctccttgcttaacggtgctccaccacacctaacctttctcagggaggtccaatcgtacttggccttgagctgatctgcaccgttaatcatagctaccaaaaccggtggagccaaactcagaatcgtggctttgtacttctccaccgcttgcatcatatcgtcgagcccgaatctccggagaatcaccaccgttgaacccgatgctacggagcccattgcgaacgccaataacccgaaggagtggaacatcggcacggtacatacgaatatctcgtctcgtttccatttatcgtcgatgtatttcgcaacgtaagctgttaaattccggtgagacgagatcactcctttgctcgtccctgtggttcccgacgagtaaagcatcatcgccgtgtcgtcctggttgactcggtctctgactcgttgaccactcgtttctttcttcatcatctcgctcaaaatcccaacgactctgactccactagtgagctccactcgcttctcgtcttcttcgtcggtgaggacgacggagattgcggctgcgagtttgggtgccagctggctcgtggtgaagacgagagttggattactttgggcgatctgtttggagatttcgccggaggtgttgagagtgttggcggtggtgacgacggcgccgagagacatgacggagaggcgaacgacgggaatgtagattgaatttggagagaggatgaggacgacgtcgcctcttcgtattccgacttcatgatatagacagtcagcgacgcgatcaacgactctccagagatcggagaaggttaagcggtggcccgtggaggcgtcgatgaaggcggtggtgccgcgttgcggttgagatgatatgaaagttgtgacgtcaagcgacggatttggcgggagacataatgggtttcgcttgctatagaatgtagagtttgatttgcagaaaccgcttctaggatcaacaatgagatctctctcaggatacgccgttttttctctatgcgagtgcaccagatccagagcatgaatttaaagagtggttaaatacaaatttatttttgtttcttttcccgaagagtgctaaaatgcatgtcgagtagataaagagtcgtttattttgatgaaaacagctatcactgaaaacttcacatagtaatgaaaacgataaacccttttacccggaaaattaaatagctatcaatcaaaaccacgatataaaattcgcaagtaatgccaaaaaaaggaagagatagacgtcgaatttcgactcacgacacagtgcagctttgtgaagacttagcccaaattggaattgttagcacatatcaaaactagtctaaaaactactttaaatgaaatattggtgagttttcacatatcaaaactactctaaaattactttaaatgatatattggtgggttttctaaaactcgttgataaattttactttttgtttttgttatgtttcacaagaaataccattttcatataaaatagtaaagttaaaaaatattgaaccttttttcacaataaacaaaactcaagttataattactgccataatcaatctgagttagaacttaggataatttgaccaatttgatcagaaacatgttttgaacatatactctattacataaaccatataatggccatttatgtgtgtaatcttctgtgttttgggaccacatggtcatatttcaacatggatgcatagtatcagatttttctacaggtctacagcacaaacaataaataatacatggagattgactctcataataatttcaaagcttggagttggaagttgctatcttgatgagatctttgcgtagaatcttgcctgaagggttctttggtattgaagatacgaaagcaacttttcgtatcctcttgtatggtgctacttgtttcgctacaaactccattattgtcttctctgataagctgctcccagttttccttacgacgtatgccattggaaattgccccacttctttgtccggaaacctgccaatcaccaaaacattaaaaactcatagactgtttctgatacaaaaacgagtgagtgttgtagtgacttacgggatcactgcagcatcagtgatttcagga

SEQ ID NO: 33728 - DNA, 852 bp, Arabidopsis thaliana landsberg
aaattctggctccgctcaccctatattctaatagagaaaatatagtatgaaatgatacatttaaagcataaattttaattacagggtcatatatatttaaatatttatgatatatttaaagtataaaatgatttttgatagagaaaaactccatatgttattggacaaaaacaaaagatttttttagtgctatggaatgcataaatcccacaaaattataatgtatatatatatatatatatatatatatatatatatatatatctgttcccctatctatcgttcaatatattcccttatgaaaatgtgtataaacaaccatacgaaaaagaaggccaaacaaaagatggcactgttcttggagaatctatgagcaaatatatgttcttaggattcacataggagccacgtcgaatccaccatctgaaagttatttttttcgatgctaagagttaaattgcgaaattgactattgtaacctattgttaaactgaaattggctatataatggaaaacacgttaaactgattaaacgtctcatcaataaaatagcttattgacatgacactttggagatagaggatttcttcgtgatacaactttagttaagatgtggaggatatgaggaaagagttaaccagacattatttaaatgtcatctttcactataaacgtgggtcttatctctaatctcatcggctctgtaattagatatctttggaaaaaaatcacgtttttgaaattcgtaagcggacaaagaagttcatttgtgatatctcacatggactttcgtgagccatcagatatttcaaggcatactatatctgatttcaaggcttggaaggaagctca

SEQ ID NO: 33729 - DNA, 2564 bp, Arabidopsis thaliana landsberg
accacaacggcctgatatcacactgaccacatatactcttttcgagtatctacaataagctttgtatctattcagaagctaagattttgaagcgagcatatcatttgaaactgaaatttttattcaaagtaaaaggtaaaaaaaggttacattctacaaggcatacagatagtggttgtgtcagtaaacaaaaacatcatcaacacctgacaaaagtcaaagatgcaaaactaagtatactaaagtttagattttggaatcgaagctttactctcgtgaagcaaaagggcatcgtaatgaccaaaaccatggtataggactcggattgggtcgtctttaccgtattcttgaccatattctgcaatacttatcagtcctccagctttatcgtctttcatatacactgtgattggcatcctatgatcacaatttcggagtttgttagatttcaatctagattgtgtatgagaaactgaaatcatgaacgttaaggaaccaaaaagaacagagaggatgaggttatttactggagaacgtgtgaagccatgaagagttcaggttcacctccccacacgtgtggatcccgaatttgtctgacgtaggtgtcgaaatctccttccacgaacctgatgagaatcatcagaatgagtagatgcaaagaaaaagctgctagtagttcgtaattaataagagatcaacaaatgtgatgtataagtttaagagtagtccatagccagtgaatgaagttgaaaattggtctgaaagcatgaaaaactcaccattctgtttcctgtcttctttggataaactcatcagcaacctatcacattcaaagataacacatagataggaactttgatagatgaaattaagacctaggctttgctgaagcagagagaaaaagtactaacgatgccatatgaatccaattcaacagttactttgatctttggtggcaaagtatgacagataaaaactcttaaccatagatacttaccctggtacgtaattcgtcagcgagttctctctgcatcttctcgcctggagctagtttcccagagcgtaagcagaatccgtgagctacagaacgaaacaaacatctgccatcccccggaatacctaaaaaaccattgtcattttctgatcaaacaacggtcgacataagactaagatgagcaacaatattattggacacttaccaatgatagagtaatcagtataaactcttttcccattgtggaatttaccatcagacgaatgatgatgcacgttgttagcatctttatcccttgaagaatctgcgtacgctgattgggaagtcgaagaataacaaacaagcaagctaacaatcacacctgtatatgcaaatcttgaataacaatagagattgctcatgttagattctatcttcgagcatttcatattagcctcaggggacaagaaagaaacttcaagcttttccttaggagcaacagttggtcgattgatcaatactgacccaaaaagtcctttatcgtgccaactagaaggtctattagagaccgatacacgaaaaccggtataatgtcttcttgaaagtcctgataaaagactgtagcaggagaatttagatgatccgtgagccacaacgccgtagaggcgagagcctaaatgcctcttgatactgatagcattcctagaacatgttgtaattggagagtaacaaatcatcatatcttttataataagagtcccccaatttcagatacctacacaaagaacaacaacgcaatttccaagtcttttacattgatagatccaatgaggcaatggtatagtaaacaaaatcataactagataacaaaatataccttaaggatcgctaaaagagcaagctatctagttaagaactgcaaatttgcaggtaatgtttcaactaaatttctaatatcagaaaaatgaaaccaacacacaatccaaacgtattgaaatcgaagaaacgaagaaggaaagataaaattgcgtacgggtatcagagaattatcaagagagaaacacgtgaagagagtgaatggaggattaccaaggtggacaagcaaagaatgtcgtgaagggtgtttattatactcaactctgatttcccgacaaacgcaagaaataaaccgttgttttggactctgtccggggtgaggtgagaattgaacaaaacaaagccgaaactgttcttctagcgcaaggtcttgttggaccgacgaagctacgaaacaataacaagtcgagaagcttcgactgttgcaccgtgaaatcgctttactcaatctaattagcaaacgctgccgttttaagttcgcagcaaactttagctttattgggccgtataagcgggcatcattttgggctggagttttgtttcaggttacccaacccgtttttatgtttgccagttattttgcatgagaaatgttttttttttttaaactagtacatatttgatcgtattcacatttcgcacttttttcacttaagaatactgaaatggttagttactacatacgataattttcgaaatgaattatttatgggtt

SEQ ID NO: 33730 - DNA, 961 bp, Arabidopsis thaliana landsberg
atacccattttcgcccaaaagaggctaaaacaaccaaaactttgcttatttacagtaaacagttccgttagtatttggatgggcaaaatgtttcacaatccaatgcatttgactaattataagagttagaaatggattaggagagtttagacaacacctatacccattttctcctaaaagaggctaaaaccaacaaaaagttgcttagaagcagtaaacagctttgttagtgtttttatagtcaaaatgtgtcataatcaaattcatttgactaattataaaagttaaaggtggattaggaggtttaagacaacacttatacccagtttctctcaaaagtggctaaaaccaacaaaaatttgcttagaagcagtcaattgctttgttagtgtttctatggtcaaaatctgtcacaatccaatgcatttgactaattataagagttatagatggattaggagtgtttagacaacacttatatccattttctcttaaaagaggctaaaaaccaacaaaaaaatgcttataaacattaaatagctttgttagtgtttctatggtcaaaatttgtcacaatccaaagcatttgactaattatatgagttagagatggattaggagtgtttagactattcatatacccattttctttcaaaagaggctaaaacaatcaaaaaattgcttagaagcagtcaatagctttgttggtgtttctatggtcaaaatttgtcacaatccaaagcatttgactaattatatgagataaagatggattaggagtgtttagacaacacctatacccattttttcccaaaagaggcttaaaccaacgaaactgtgcttagatgtagtaaataactttgttagtgtttctattgtcaaaatttaacagaatccaaagtatttgactaattatatgagttagaaatggagtaggaatgtttagataacacggataccc

SEQ ID NO: 33731 - DNA, 2171 bp, Arabidopsis thaliana landsberg
  unsure (1)..(2171): unsure at all n locations
gattgctccggcgtaatgttttttggttttaggaaacttctgctccttgaagaagattgggtcctgtattaaatacaccacaacagcatcagtaaaaacgctaattcattcttgttttcagggttctataagctttcttttcccacacacacacacacacacacacacaaaaaaaaaaaaaaagactaattgctaaagcaatcacctttttcacgctcttcatcccctagcttaggatcgaaatattgcttctgttcccactctttctttgctctttccgcatcgttaagtctcttcaacgtatcagggttacggtgctctgtaagagccttctggaaagcttcaatggcaggttcatagtctttcgagcatttggccatcttagtcaaagcagtcccttttctagtcaaagctctagctaccatcttgtaatctgacctaagctctctacccctttccacagccttgttacaatcctcaatgcactcattgtactgaatcaaaacacaatgacattaaaaactaatcaccattgtagcacataacaagcaaatcatcattctaggcttctagcctatcagcaaataaagggacaaaacaaaagagcattacacatatgaaaatcatacctttcccatctcaagataaacagcagcacgatttgtgaggtacgagatgtctccatcatcaatctcaatagcaggagaataatgctgaatagcaggttcaaagtccttctttttatacgcagcattcccaagctctttctcctttgtagctttctccttcctctctttcttctccttctcctctgtcacctgcggttccggttcaggctccgggtctctctccttctcaacctcaggctcattactagaactctgacccatatcagactcaggaacctcagcctcatctccctgaggcggcggtggcctcaacttaacattcaataacactccaagagattgcatcactctctgatccttcaaatacatattaagactgctaggattcttctgaatctcctgcatcatgttaacaaaatccggctgctgcaaaaagcctctagtcgaaggatcagacgtaagcttcgtccacatctccggtccttgaaaagcatcaccaaacggattcggtgcagctcgtgacctagcaacagacgcctccgcatcagccaatccagatttcaacgcctcgttagtcggatcgacatctaaacctttcttataagcagtgacggctaactcaaactggtttaaccctaaatgagcagcaccgagacggctataacctttaggccaatacggtttgagtttaatcgtctctttcgcatcggagagagcttcggcgtattgatgaagcgacgcgtgagcagcggaacggtttgagaagaggacgtgattggttggagcaagagctatggcttcggtgaagtggttatagccgtggtgaagtcaccggaagagaaagcagcgtttcctttagctttagcttcttctgccattgtttgaatctgagatttttgcaagtctctgcagcttcttgggagactactctctataagaaaagaacacttgtttggggttttgagaaattgagggactgtttggatatgaggatagaatttgttagtggatatttgtccgggtttataattatcctcgttacgtttaataataaagaatcttataaaacgatgtcgttttgtgttgtcgtggaaatcccggttatcagcagacccacgatttattcaccggttccattgtttagagtttcatttctccggttcgattttgtttttgtattcacttgttcttcagttcatttaagaaatagtgaaagctcctgaactgatctcacttctaagtgagaactgttgnnnnnnnnnnnnnnnnnnnnnnnnacccatttcttgttaccagtctcatagcatttttcatcattatgatacatttcttacttgtgattttctttgctaaggagacatgcatgtttttagtaatatggaatcatagttacaagcacctggattaaagaagacaagaaaatcttgaggtcaagttttctttagctaaatacgttcggtgaagtttgtctattacaaaaacaatgtgaaatactttaacagactccaatcaaattggtcataagacttgtaatactataca

SEQ ID NO: 33732 - DNA, 1651 bp, Arabidopsis thaliana landsberg
agaggatccgaaaataacgccctttctgtgttctagtctaatcttactgccaaaacagtggaaaagtaaccatcaaagaactcgtttggtagagaattacccaaatccagttccgctcactaagtttatatgaagtttggcaacagaatctgaaagagatcggaaaactgaagtactgtatacaaggacaccgagaggcgagagggatctttgagaaagaaaaaaaaagattgttatgcatataaaccgggtttgaggaagcggttttttaaaaccagtacggctcatttttagggatcggttcggatgatttcggtattgtaacaaacgttggaagtgcgagatctaattgagcctcctatagtgtttgcgagcacatatccgtacacgaaggaccgatccgatctccgtcgccggcgatcatcgccgccatttgctcttgttcttcctcatttacgcgttctctctttcatactcgtgagcttcttcgattttgcttttagaccatttataattcttattgttcccgactgattgtagaacttttttgacacccaattaaatcggaactagggatctaatggttgcgtcgacttgatctctgtgacgtagaagctcttatatatggggctatgttctcattagtatgaagaaagtgtccctgatctttgttttgcagatttttcatttcgagtgatttttggttttatcatacaaattacaagccatggataagtcgagtgctttagagtatatcaaccagatgttcccaacaggtaatgagacacttgttgaacaatcatactctttgtacttcgattatggtttagagttgatttttgttgctgctgttattaggacctgtagttcagctgctgattagctgatagtttctgcatatgtgactgcgtttaccatgattttcaaatgtgtgttttcctttacagaggcatcgctaactggcgttgagccacttatgcaaaagattcagggtgaaattcggcgggtcgatgctagcatactctctgctgttcgtcaacaggtgggcttttttagtctacattaacgctagaatatattgtgtacgtgtaatctgtgcttctgaatcatattcatgggctggcaatcatactccagagtaattcgggaactaaagctaaagaagatcttgctgatgctacgcgtgctgtggaggttagtttctcataggttgatatgttctcttttccttcagtcaatatatcatatccttttttcgtttctcctatcagttcccttttaattcattcgcaagagattttgatcttctttttgatttatcacaggaactctctcataagattcaagagataaaatccaaagctgagcaaagtgaagcaatggttcaagaaatatgccgtgacattaagaagttagattttgcaaagaagaacataaccacgacaatcactgcccttcaccgcctcacaatgttaggtcagttagcaatagtttactctgtttaattacttcattattttaatcatggttacctgaaatcagaataatagctcaagtgtaacgaagccatgtataaatagtgatacgatgcttgtggcccaagcacatcatcaacgcaataatgaatttcgctaccacgctaaggcagtct

SEQ ID NO: 33733 - DNA, 1492 bp, Arabidopsis thaliana landsberg
caaaaaaagtacataatgtagtgattaagcttggaaactctatcagaactattggagttggaaaagtaagttatgtcctaaaacaatgtttttttatacgtttaaaccatactctatttttgtcctctttgaaaaacaaattgctaaataaaaagaaagataagaaaccatactccattttatagtgatgcatctaagatttcagcaatatgttaattacaataatttgtggaccagggagataaatgcggtatttatggcgccaatagtcctgaatggattataagcatggaggtaataatataagagtgacatcatattgattagcataattatatatggtgatgaaatgatgtaccattgttcttcacattcactaattttaatcattttatagtaattatcaaattttcatgtttcaggcttgcaatgctcatggactctactgtgtacctttatatgacactctaggtgtgtaccatttgtctactccattgattgtttttttggttacaatcatattcatgtatgtataatagtttggctgatgcatttgtttaggtgctggagcaatagaattcatcatttgtcatgctgaggtctcacttgcttttgctgagtagaacaagatttgtgaggtatttcttatcagacaaatgtgtacaagagaaagataaatgagcatatgtcaaatctcttgagttgatcattagctgaattttatgcttctatgagattccaattcatgactaagttcacaataagtggattaattaacgtcttttttatactatcgcacttcacatttgggagtttctaaccactaaagcaaggcggttttttatgtttcagttattgaagacagctccaaaatcaactaaatatttgaagtgtaagcaagctcttcatgtgtttgattctttgataaaagtccaacgaatgatttttattttctgtttgcaatagatattgtgagctttggtgaagttacaaataatcagagagtagaagctgagaggcacagattaacaatatattcatgggaccaattcttgaagctagtaagaaaatcatatttttattctactttaacatcagaattatcaaaatcatgaatatatattacttaatttgaagggcgagggtaaacattatgaattaccagagaagagaagaagcgatgtttgcaccataatgtatacaagtggcacaactggtgatcctaaaggagtattgcttacaaatgagagcattattcatctccttgaaggtgttaaaaaattgcttaaaactattgatgaagaggtataacttattcttgtttacatcatcactagctactaggtcactataataacttataatttgttttcattgtgaaaaatgttacagttaaccagtaccgatgtatatctctcatatctacctatggctcatatcttcgatcgtgtgattgaggagctgtgtatttatgaagcagcgtctataacat

SEQ ID NO: 33734 - DNA, 744 bp, Arabidopsis thaliana landsberg
actaagaccactgagacacagagagtgagtggaacagcaaattaggacgatttgatagagtgagtggcttatgatgcacataacgattctgggaaaatctgacagacctggttggaggatcttctgttgagtcttcattctgtaatcttacagcactccattgcttagcaggttcaaaatcaacttggtccataaagaggtttgcttttgtatggttctcaatgcaagcctctaaaaatgtcgtctcctggtgtcccagacatcaacagcacatgagcttgtattttgattttacaaccaatacaaacaaataaatacaggttaaactacacagacagcagaaaagggcggaacagtgaatcctgtttagtgtcacaaaaccacttgttcaagatattgtggacgaggattataagattacttagtgaggaccagaacagaagtaatcaattttccaggggatcattgacgaataataagtcaagaaaagagatccaattctaatgacatggcggtataactgccaatcatgatatttagaaaaacctcccatctatgatccatgtaaaacaccaaattaaaaggtacaaggaaaaaaactaaagcttctaaagaagcactcacagagtgaagtggagattctcgaacctacctttacaactcgaacctgcatatcagaaatagcaacaattagaccagcataaagagaggactgaaaacaaatgacaaataaaaatgctgata

SEQ ID NO: 33735 - DNA, 1996 bp, Arabidopsis thaliana landsberg
agcttcaatcaaatccccaacatcccaaaacccttgtatcatcgtcctataagtaatctcatcaggtttaataaactccttcagcttaataaaaacaaacttagcttcttcaacaagcttctccttacacagagtctccactcctctattcatcgtttccacattatacaaatacccaaaaccgttcatcaaatggaaatagtttacacatttcttcaactctctagcagaagcaagtgttttcaacacaatccgaaatgtcttatcgttaaccaatccacgttttccgatctcttgagctaattcccagaaaagatccatgtttcttgagttcccgatgattgctagcatcttattagaggtagtggaagtgtgggtgaaatcagggtggtgagtttgagaatagaggaagaaacggtgtacaggacgccacgagagtgggaaattgttgcagacttggaggaagaactcgtgagttagttgaaatttggtggaggagagtttagagacgagacgtgaatcaggtgagttctgttgctggtagagaattgtacagactcggagaagatggtcttggtttatcggtgtgattgtggttggagttagctcggtggagaagaagcggtggttgagaatgaagcatcgccgaattgagtttccgatgttaatcatcctccgagaagtcacgacggccacagccataagtttcccggccaatggagaaaacaaaagacaagaactaaattaaataaaaaaaattagggtaaaattataagaggctacaaagaagcccatctaagcctatgtctaaaaatgagtgggaaaatggagatgcgggggatcgaaccccgtgcctctcgcatgcaaagcgagcgctctaccatttgagctacatccccgttgatgtttaaatacgtaaccaaaagaatatataggattagataaaacggtgtcgttagggagcgaaaagttcgttaagttagttagaaagaatagcgaggaaaaacccaggaatttcgcagacacagaggtgtgttcggatctcaaggttgagattcagtcttcttccgccatttgcgaaccatcttcgaaactctttttatatttctctctttccctcccatctctttcgattattttatttatctcaccaaggaaaacaaaacacaaaacaaacaaacaaacaaacccataaatcaagatctctgttttcagacagattattatcggaacaaaatgtcatcatcaggatccgacaaagagagagagacttttgtctatatggctaagctctccgaacaagccgagcgatacgacggtaacataatctctttattattttcgattttaattgcgagaatttatagaaaggatttggtaatgaatgtgcagagatggtggagacgatgaagaaagtggcgagggttaatagcgagctgactgtggaagagaggaatctgttgtcggttggttacaagaacgtgatcggagcaagaagagcttcgtggaggataatgtcgtccatcgagcagaaagaagagtctaaaggcaatgaatcaaacgtgaaacaaatcaagggttatcgccaaaaggtagaagatgagctcgctaacatttgccaagacattctcaccatcattgatcagcatctcatccctcacgctaccacaggggaagctaccgtcttctactacaagatgtgataacagaaaaacactcttctttttgaatcatcatctgcaaatgaaactcaatttgatctggaatttgtaggaaaggagattattaccgttacttggctgagtttaagaccgagcaagagaggaaggaagctgctgaacagtctctcaaaggctatgaggtattaaatttgtttctttagtcaaatactacagaattatgagaagtttggtctgatgcatctgtattttgattaggctgcaacacaagctgcaagcacaaagcctcccaaaaaccatccaattcgtcttggcca

SEQ ID NO: 33736 - DNA, 777 bp, Arabidopsis thaliana landsberg
acgccttttaaataatagttttgatttaggaagtataatttcatattcgatttacaataacagttatggtattatatgtgaatactaaatcaatcatattaaatacacttaaatagatcaaatcaaataagctacgaaaatacattttgtatatttaaattatagatcattgtcaaaccggaaattaatagatgctatcaaaattgatattaaaataaatcgctgctatcaaaatttaaattcattaatttaattaagtgaaattaatatcaaaacaaaaatttaattaattatttttaaatgtttaaacatcaaacataaaagatattttaattataagtttttatagttatttaaataaatttaaaatatttaagctaatttcgaattcaaacatattaattcaatatttataatgttatatgtataaaaataaagtagatttgttagatttgattaggaaatgtttttaaaatatctgattagattagtaatcttttagaatataataaatattataaattcttatgatattttgggctatgagatttcttaggaaagttaaagcttgattggttcaaaattttggttttaagtttttttggagttgtaccataaagatacagcctaaccaatcaccccctatagaagtataattatgaatagtattgaataagagaataaattaattagaaataaataaagattttctcctaaaaagtcttgctgtaggatttgattttatggggtaaatcacggctactattaaatatatgg

SEQ ID NO: 33737 - DNA, 787 bp, Arabidopsis thaliana landsberg
gagagaccgatctattattttccttgctcaattttaattgctttatacaaaatgttttttttatataacatagctcacaagaaaaggtcagcatgcactactatataggataagtgatcgtctgaaggaagattatgatctttagggagactggtaggttgggtaacgccgtaagagtctcattcattacacaattgccatctaagttatacggctatataccattaaatttgtttttttttgtaatattttgtattattacgtacagttttgtgtgtagtttagtttctatatcaataatcatttatttatctcaactttgaatcttaaatttctatttttgaccaaaatttgttttgcttatgtgttgcctacttttttcatattgtttctttaattttgctaatttgttttatatttaataattctaatacattaatactgttgtaatgaaaataatttatcttaaaattacccttttttggacagttctttgttaaatttaatgatttggttccatggcagattttcggcattaataagtaataacgatggtttctacaaactgagttgaaatgactaacaagagagtatcagacaaaaattttagtttgcaagaaaagaccaagtcatcaaactattttggataagtcatctttcattaaaaagaaaataaaatctaataaaaaagttgttattgtgttgctcaaaactcaaaattcaaattcacaacaggaagaatatgattctttttgggaatttggtaggttggggttgggacattttt

SEQ ID NO: 33738 - DNA, 4476 bp, Arabidopsis thaliana landsberg
  unsure (1)..(4476): unsure at all n locations
aatctctgggtgaaatattatctcacagtccttattctctttgatcgttccatcttgtctccatagacagtgttaagaatttgttttcttattgtctttgatttttttcttacagtcaggtcaagaaaggaggactttcaaagtattataaaggcaaatctcaatcattcacatctctagcaaatgtcacaagtctacaggatcttgtgaagagaggatcaagaacgaagtcatgctgcaaaagggattatttctatggaccaaaggcaacaatctccatgaaagccacgagaacatcctcaaaacattcaaattcaagattaacctttaaaccatttcatgattcacccaaatcagttcaatgacatgacaaaacaaccttctgggttcagtttaacattgtattcatttgtatacaagtttgccccaagctaaatgagaacagagagaatttagggccaaataacgccttttacactaattgtgcagaaaaattgtcaaaacgaattaaaaacattttcctttgggtcgtttacttgtgatgtgatcaaatcttgtaaaccggagtgattccaagaaggtggaagcatttccgcatgactatggccgttgcttcacaaagtaggagacggcttgtctcctcgggtgaaccattgacctgtaaaagatcatgttttaagtgagatcaacattatagtggttgattatgcagctatgcagtctaatatcacaatatcaaatgagaaatgtagagtcttgtgaattgcacacctgacaattggagtagaatctggtaaagtgttcagataaattgtagaggtactcgcacagaacactcggtaataagttggtacaagcttcctccaccgtctgcaaattgttcacacatgagttgcaagttcatcttgttgccgagaaaaagaagccaaatatgaaagaagtatctaaagagagcatgtgttacctcagcaaatcgaagcaagtgaagccccagtgctcgttcatctgcatgatccaatgctaattttcctgtctgcaatgaataagatgttgaaacataagaattactctttattgtactgcgtatggtaggaactaataacagacttcgtaggtgttcgacgatccatatcttatgaaaatgtgaaagatagcacaaccaagaaactaaaaaggacaaaaaggcccagggtgtatacaaaatgaatcttgagactccaaaaaattaaatgctcactatagacactggcattaacttaaaagtttaaacacttctgaaaattgttaagctttcaattcaaactaaatagtttataacgtcgcatttccttgatagagacaatgggaaagtttcaggggcagccaagaggaacaaagaataaanttcagcgattcatgttcatgcagctaaagtacctttttcagctcatctatgtctttgccagactttctgatgattgaacagatccgagcatgggcataaagaaggtaaacggctgtatttccctgctcatgacatatgatcaataaggttgtgtaggtgactgcaaaatgcaaatttgtaaactaggtggcaaatttcagtaccttgtcattaagcatttgatcaaagctgaaagtataatttgttaatctgttgttcttcaggtcagcataccttgaaagaatattaaacaaaaccgcacattagcttgtagccatgaatataaaccaactgtcaaaacatctggcaaatcattcatcataattgagcagccttaattataaaacgtcaccgaaaaccggaagatactgaatagaattcactattatcagcagtagaatagagatgatacttacttgaccgcaccatatccaactgcctcagctgtttggtccagttcttccggtgtccattctttgtccttacctaaacagagaaaaaacatgtaaggattaatagaccaaataataactcaacaagtgatggttcaacatttcaaaacgtagagagttttaagacaaagttagataccgcgctcaataagggcaagtttactgcgagtcttggcctcatctagcaaatcaactaggcggactacatctgttgcccgagttctaaatcgcttgccatcttccccaaggacgagaccaaaaccaacatggttaactctagggtaagttttatcattgtctggaagccaacctgcttttctggcagcctaattcacagtaacatgataaccacagttacgactgacagtttcaatcaatagaaaatatttcacaagacgtcaaaaacaataaaatattcatcaaacctactttgaagaacatattaaagtgctgctgctggccaacatcggtcacatatatgatccactcagctttctcttcattgagccggtacctgggccaggcaaaatttagcaccagcagacaatccattgaacaatatgcaagttcagatcaaacttcagtaagtacagacacggaaagtcataacatgtgagatctattttcaaaagatcactactaaaatccggatttcatgaaataactaacgtaaagataacccaccaaagagcagtcagatctgttgaggcatagttaaaaccaccatcactctttacaaccatgagtgggatgtcgaagccttcaaggaaaatcacacgagcaccttcactttcttcaaccaaccccttgctattcaattcctcaattactttagcaatatgagggttgtaaaagctttctccctgtcatgaattaaatcaatgcatttttcattacccatccatgtatctctttttccattatatctcaaataatgttgtacaggtccagctattactttaccttttcttcaagctcaactcgaaggcgttggtaaaccttggcaaactcagttcggctgatgtcacagatcttagcccaagccttacggtaaacaggatcaccaccctgcgccatagaaaggaatatattaagacttgtgagtaatttagatcttgcaaccaaaggcagctgcaaattgagacactgcaaaacagaataacacactagtgattatttacctgttgacggaccacagcctgttgtgctttttccttaaaggcctcggccaaatcaaatttatgttttgatgccttgtaaaacacctatcaaacgacatctaaggttagaaactatattgctctggttcttcacatgcaagcatattatgccaatattgctacataataaaactgtaaagcttgagagggcatattatagaaggcagctgacctgaagatctccaattgctgtctcggtcacactatctgtatcaggaaatttctcaaagaggtactcaattagcatgccaaactgcagaataaaagcagcttttatttcgctgataaatattggaacacaacaattacaaaaaaagaaccaaggtcaaaaaaccatttgaagagcagaaaagtagctacctgtgttccccagtcaccaacatggtttctgcgtagaacttcaacatgtgagtactcgagcatgcgagctagagtgtcaccaatgatagttgatcttagatgaccaacatgcatttcttttgcaatgttgggagaggaaaaatcaactacagctctcttaaccgaaagagtaggtgcccatgtgtcaactccatcgatgagcatattttcaatactctgcaaatagattaaaaaacaattatgctaaacacacattttatttacatgagcactagaaaaggactacacaattacaacaggagcaccttagccatccacttagctgatagtacaacattaataaagccaggtccagctacagagcatgattctaccatctcagaagtagggagactcttaacaagggcctatgtgaaaaaaggatcagaataaaagttaaagaacataccaaaagcaatgaaattataaagaccaaacaaacgaacctgtccaacagctggaggacccttgaactgagtaccctttcctttaattatggaccatagtcccattgcgttgttactgcagacaacaatatgatgtaagaatataatttgacaaagagaaaacaacttaattagaactataatttcactgaaccaagtgagagggggagcaccattggtaatctccaaattttccaagagcggaggcagccaccaagggctcaacactaggttcatcaggaaccgttaattttagagaaacatcaaagagcttcgcgagttgacgtttcagatttcccgtaaattcttcattctgtcaaaaagaaattagtcatgaaacagggaaataagaatgttataaactttctcctggatttaaaaaaaaaactgctgacttacagctgccattgctaccacggacttagctctggatgagaaagcaaatctccaagccgttgctctcaatttttctgtctaggttacaaaaccccaaagcgaaatcagtacatccaaattgcaattaaaaaaaaaaaacc

SEQ ID NO: 33739 - DNA, 2912 bp, Arabidopsis thaliana landsberg
ccaacgatttatgtctttgaagaactcctttctgtcgtaccctgacagattcggaagctcttcaccacatgccaagtagttgacataatcagcataccacgaaagtttctcctctactcaagtatctcatcccaaaactggctgcttttgaattttttgttcacttcccggatggccataagctgttcctcaagcatggtgtcgttaatagggactgcatcttcaattctcattcccgataagtaatcagctacaccattttcaatcgcctttttatccactatctccatatcgaattcttggagcagcaaaatccatctcagcaaccttggcttggtatctttctttgcatagatttgccttagagcaacatgatcagtgtaaactatcactttagagcctaccaggtagctcctaaatttttcgaatgcaaataccacggccaatagttctttctccgtagtggcataccttacttgtgcatcatccatcgttctgctagcgtagtagatgaggtgcaacttcttatcaatcttttgtcctagaaccgctcccacagcgtaatccgaagcatcacacatgatttcaaaagggtgatcgcaattaggtgcttggactattggggcaaagatcagtgcttctttgatcgatttgaaagcaaccagacattcttcatcaaacgtgaactcaccctctttgcatagcagcctggtgagtggcctagccaacttagagaaatccttgatgaatctcatgtagaaccaagcatgtccgagaaaacttttgatatctttcacagtttttggtggttgcaattgcaccatgacatcaacttttgccctatcaacttctatccctttttcttatattttgtgccccaagacgattccttctctgaccatgaattgacatttttcccaattcagcaccaggtttgtctcttcgcatctcttgagtaccctgcacagattaagcaaacaggaggagaaagaagagccatacacagaaaaatcattcatgaatacctctaccatctcctttatcaaatcggagaaaatagaagtcatgtatcgctggaaagtggcaggcgcattacaaagcccaaaaggcattcgtttataagcaaaagtcccacagggacacgtgaatgtagttttctcttggtcatttgggtggatagggatttgaaaaaatccgctataaccatctagaaaacagtaataggggtgattggctaatctttttagcatttggtcaatgaaaggtaaggggaagagatctttactagtggctgcattaagcttcttatagtcaatacatatcctgtgtcctgttatggtccttgtgggtagtagttcatctttagaatatttaataactgtcatacctccttttataggaacacaatgaactggagatacccaagtgctatcagatatagggtagattacacctgcatctaatagtttaagtatctctttttttacaacttctttcaagtttggatttaatctcctctgaggttcaatgctagaatatgattcattttctagatggattctatgagtgcacaaagtgggtgaaatccccttgatgtcatctagtgaataacctatggtttttctatactttttcaattcaattataagcaaattcacttgttcagtatctatttcatcattcactatcactggataggtggaattgattccaagaaaaacataccttagcccttttggaagcggtttcaggtcaaccttgggtgccttgagctcagaccaatcgttaggtggtgattcagtatcagagatggaatcgtgatcgagtgaagcgatcgagtgatgtagctcgccttgcgatcgagtgacgtgatcgagtgggttattcgtgcggtcgagtggtctcaactcctcaaagtcttctgagtcatcgacttccctgctcatatccatcagcttctggtatccaaagtttccacatgtaagtctttttctctactgtctttggtcagggcgctctgtaagtggtcgtcctctgctagttcttctaaaagctcgtcagttaggaattctgtctcttctgtccagaaaactttaccctctattgtgggctttttcatcatgttggtgatgtcgaaagtcatccgaagatctttcccgaggttgaggtcgatctttcctttcttgacatcgatgatggctcctgctgtagttaaaactggtcttcccagaatcaatgggtctttcggctcttcgtccatatccagcaccacaaagtcggtaggtacttctattagaacctatcttgacaggtaagtcttccaacaggccatgaggtatcctgatggatttgtccgccagaattagcgaaatgttgcaagttttatatttatcaaaaccaagtttcttggctactgagagaggcatcagactgaccgaagcacctagattgcataagcatcttgtgaatgttaaagggcctagtgagcatggtagagtgaatgagcctggatctcccaatttcctaggtatgaccttctgttggataattgcactgcactcatgacttaacaccaccattcctttgacttctttgatcctttctgtgatcaggtctttcacgtagttgtgagagtcaggtatcagcgcgaaatagtctaccaagggcatagtgacatcaagatcctttatctgtttttccaaaagagcacggtatttcgcaatcaaaacttttttaaaacgaccagagaatggaagcggtagtttgtagggcgatggtacgaagactgtggctttggtttttgcagctaccagtttttcaacagagggagtagctggtgggacttgtggttgagtgggttgactcgtaagagtaggctcttcgattgttttgtcagccaaaacatcatcttg

SEQ ID NO: 33740 - DNA, 2459 bp, Arabidopsis thaliana landsberg
ctctatatttggcaatccagattcaatcccattaccaccctcactaatttcttgctctctcacaacaagccctgaactctcagtagcatctgatttcacaccagaaacatcttttccaagcaaaacagccttctctgattcgaccagttccattaaatgcgaccttttgcttctccagaacaataaactcccatatgcatcttccagatatcgaccaatctcaaaaaggggaagataaacaacgaacaatgaattacaaatgaaagtgatcaagaacggagaaacaccagcttccaccacagactggactacaaaactagccgcaatccaaatcgtggcaacggcaaataggtatatcagccctaacacccatctccataactttgttgacatacctcttcgaatctcaattacaaaacacagaacttgagctcaccgatctcactgattaagatcaatcatacattttaacacgaatgcttcaacacccatgaatcaaagatctctcttgcaacgtaaaatttctcaaggataacaaaaagcgtaaacgagaaacgatcggaacaaaccaattgatcggaaaaacaggacactaccttcacagcgacagaaatctagatcggcgtcaaattgttcaaccaatggcgattcaaaagcgaaatcagatatttatttaccaaagaaaaaacaaaaaggtatcgaattcagataaacagcgccaatgagagagcgagagagaagagagattggcggatgtgagtatgaatatgggctttattatcggcccaatatcgttaaaaacatttgtagcccaattttgtttaatacacaagacgaaagaaaccctataacctgaatgtcgtattaaaggactttcttgttcttctatttagacttcttgtagttttgctgagtattagtcaagactcaagagacacgaactctctctagtctcttcaatattgatcatgcagcctcgtcaaaacatagatccggcaaatgattggaacagtcttcgacaggctctagacatacaaggaacccagttcgacgaaacttgattaatttattaccaacagtcaaccgagctaaagataaagatactagagtcaattcctggagtagatattgctcggtgttcttgcgttgtactggcttcagagtttcggaatctggcttcatgtactatattgtggaagcaaatgtgcttggaagattttgctaattctgtgattgaacaaactgaatatatatatattttttttttgttggttggaagcctacgtttgttgaatgaattcatgaagatatgtatagatttatgtgttggtaagctatggtattgctatttagcccctctctgtacaaccagagataaaattatgaattattttgactaaacacaaaattaattaattgtacaaaacaactatcaatttataatgttaagctcgagaccaagaataagaacagattgaattctcgagctatgaaaactcagctggaatatacacattcaaacaaaacagaacataattaacaaagagagaaacggtaacaaattctatatcactatctttctgaaactgaaattgaaagccaaaaaacgtaaaaagtaaacaacgaccaaaccaaaaataaaaatcaacaagacaaaaaaagatgtaaaaaataaaaatcaagaagcacttgggttccgggaatgtgctcttgaagcaactccccactccattgcctcagccacggctctttcccgttcttccgctgccactgaatcctccacggacgtttcatccgacggctgaggaggatcatcgtagtgtggaacagagattgagccgtcaggagcggttcctaagaaaccgagagcggttacaacgtcactcatgagtggccgtaccgttgcctcttcttgtaaacacattgctgccactgccaccgcttgattcagagctttctccgggaacactccctccagactcggatccgctaactctgggaatctactcggttctttgaacaccggttgagcctaaaccaaagtacaaaagtttagatcttttaaacaattgaagccaaaaggttttcatgttagctgaaaaagagaaactcacccaagttactagattctgttcatctttgggtctggtagtatcaataactcttcgtccagttatcaactgcaacaacacaactccgaagctataaacatcggattttgtagttaactgaccggttctctgatactctggagcacaatatccgtgagttcccataactctggaagacacatgttgtttgtccccgacagggcctagctttgccagaccgaaatcggataacttggcattgaattcaccgtctagaaggatattagctgccttgagatctctgtagatcactggaggatttgccttgtcatgcaagtattcaagacccattgcggcgcccagagcgat

SEQ ID NO: 33741 - DNA, 183 bp, Arabidopsis thaliana landsberg
gcatgaatatgatgtaccaaaaaatttgcttttcctaattgaataggtaacaaagctactgggccacccagggctaataactcaacgcccccacaacacaaactggtgctcgctgtttcaccaggggctgttacaccaagtgctaaagcatgggtattttgtatccattgagcaaagactggt

SEQ ID NO: 33742 - DNA, 1134 bp, Arabidopsis thaliana landsberg
ttaaaataataacgacacgatgtcaatttgtgttttgacacgaatcaaagctagtgagacacttcaataacattaaaacatacactcttatctgctaatgcgagcctcttgtttgtagtctttcaaattaagtctcaaacagttgcgtacgagcttagctggtgacaatgttagtcgatataccttctagcaaataagcaaaacaataacgagagttccacaggttgtattatgatgttttgcaaaaataatcaaaactatttatataacactattttaaaaaaaacattaataaaataacataactttccagaaatatctacataaaatcttctcctacactactacaataatatccctctacaagctacaacttacgcaatcgataatgcaggggtgcatgtgtaaaatttctgttaacagtgttgggtgcaaaattaacaagtcttcggagcatatccaatgatattatcctatttttaactcacccctaattttatgcaactttatttccgtctaaattcttctattatattatataattaaagaatacagcgtaaaaatactattttaatacattaaactgatggaaaataaagatatcttcagaaactaaatccaaacaaggaaaacataaaaatataacgggtcatacttctcaaaagacaaaacaaaaagcatcaactaaaagcaagaactctaaagaaaatattggctcacttaaattcctcaaaaccaggatgatcaaagtcactaactaacaacgcaagcaacaaaacctcctattatgaatcaaaactacctctcaaaaacaacttgagcccagacttctattccggcaagaaagaaccaacacaaagtaatatagtttcaaatttaatccgaaagaggcgatgtcgaaaaacaacttttgaacgcctaagtagaaacctttgacctgaccaaacatcaatcaagttttgaatgtaaaaataaggagcgaaatcaacctcaaaatcggatgacaccattctcagaaaaacacagcacaatactacttttaaaccctttttaaaatttactttttgtagttacataaattatatcaaatagtgtagcaccggtttttccccactttgtatgttgtttttaaaa

SEQ ID NO: 33743 - DNA, 961 bp, Arabidopsis thaliana landsberg
aaattataaaataaactaaattgcatgtaccatacttaacccgtaattgtaaatttgatcaactctataaatggagacaaaaacacacacaatgatcaaaacattaacattctaagccatgaagaaccaaagcagcttctccattgttgctcttcttctcattttcttttcctcatctgtctttgctcagctgcagacaaatttttaccggaagtcatgtcctaacgtggaaactattgtccgcaatgccgtccgccaaaagttccagcagacttttgttacggctccggccaccctccgccttttcttccatgattgcttggtccgtgtaagttttttttaaatcgatatattagtttacattttgtaaacgataatgggtaaaaaaagcatattgaacgtgtttttaatgtaaatataaatattaaataagtaaataaacaacatcaatatgaatatatttgttttaaataaagtgttattggtaatttcatttgcaaaaaaaaaaaaattaaatagattttatttctttttgtctatggattctataatgattttgtagttctatgaattttgaatgttgttaaaataaagattctaaatttataaactaaaaactaaacattcaaaatactacgaagttatcataatgttttaaaaacttatgaaaaaataaagaaatctctcctgtatattagtataatgtttggcccgtgttcaaaaaaaaaagtatatattgtttgactatttaacgttatatacagggatgtgatgcttcgatatggctggcatcaccatctgagaaggatcgccctgatgacaagtcactagccggagacgggtttgatacggtggcaaaggcaaagcaggcccttgatagggaccccaactgccgtaacaaagtctcatgcgctgacattttggctctcgccactcgtgacgtggtcgaaaaggtacaaaa

SEQ ID NO: 33744 - DNA, 1000 bp, Arabidopsis thaliana landsberg
gaccggaggatttggttgtggagatactcactagggttccggtggtttctctgaaacaattgcgatcaacacccaaagggtggaacgctcttatcaaagatggactctgcttagacacaacggcagtctcctctggttatcaagttgattgattatagggtttaattagtgagtctcgatctccatggaattgtgacaaggtgtcttggagaaggcaaaaaggtaagtaccagaccagagctagtgtcttgaaacagttgaaagtcacaacaaatagttgtgtaatgttggttttcttttgtgaaggaagcatacatatttcttttataacaccatgaccagtgaaacacttggtgggtctatgaatgatcctaattatcacattggctttgcgtcttttgtgtaatttgatatggttatagagttgcatgtcacataggtttcattgactcggaagatgatattttctggataggttttggatcctggcctcatttacattttgatcaaaattcttggttttcaaggatatactagtttgtaaaatttcataaggccaattttattttacaagtgccttgggactataggtagatagattcaggtacattagcaaatgcaaaatgagaattgatttatcaaacttttagtgaaatacacattttaatttattagtctattaaatatgtaagtatgatgacttcatgaaaaattaaaggagtagggcagagatatataatgttcaaagatataaccccacaagccaattattacttagaagcattttgagttatacaatagaaatatattaagtatatatatatatatatgatcttcccatatttattgagtaagtaaaaagaaaaaaaatgatcttcccatatttatataaaattatttacatttaattttaattgaatatgcttttaatgttacaaaattataaccacagaaaaagaaaaaattaataatgataaataaatgttgagaaaaaagaaag

SEQ ID NO: 33745 - DNA, 1029 bp, Arabidopsis thaliana landsberg
catcatcaatgaactcatttggttaaggtgaaggtcaagagacaaagatggtcccttacagaataggcttaagtaacaggggatccctcaagaatgattgaactttagtagaatgctaaaggtaagtcccaagttatgcatacagagataagatcccatctacccagagtataacaatgaagttctaatggtgatcccaactcctgtcccaacttaactctaccctttgcactcatgaatctttcaaactcttttttttcatatcattcttttcttttctcttaactctaggagaagctttctcaacgctctgatacatctagcgggtttggatttctttaacaactaaggttcctgtttttttttttttctttaaaaccaaaggcttttaacccttcttctttagctaacaagaacctcattcttttctttaacattcccaaaacctttactagatttttttttctaacttctttagcttactccccctagaattctttccctttcttcatcaacaatggattccctcttttcttttaaacacatcccaacccatgatataagcgcccacctagtcttatctagtccaaaaaacgcgaattagaactacatgagacacggtcgagtaaaccggtcgagtacgttgaaattgtggctacgagttttgcggttttgcggtcgagtgaaagtgaatgagagacggtaacggcgtggtcgagtgaatggtggcgaggcttgtttggtggattgcagttgcagtttggtcgagtaaacggtgaatgaagagaagacggtggcagtttgatgagagatggcaacgatgaggacgagtggttgagagggggcttgaacggtgaggagggagaggcgagttccttggtggccaagtcaagcttgcggtgagtgaatggcgtgaggtcgttgagtaaacggaggcgacgaaagcccggtgaccggcgagaatctccggcgaagatgttaaagcgaaaaagtgaagtggtcgagtgaaggagagatgatgagcggtga

SEQ ID NO: 33746 - DNA, 1126 bp, Arabidopsis thaliana landsberg
  unsure (1)..(1126): unsure at all n locations
aacgttctcatccattttagtatattattagcgtaacgaaaataaaccattgatcttcacacgaaaacaggggctcttacttaaatgtcaataaaaaaatttgtcctcaaagaaatatcacattttcaatgatcctaggaccacaaaatagtttaagctgacaataaaaaaacaacacattatttcaaacttcttcacaagaaacaaagagcaagaaaaattaacaacgtgaagtggacacatactgtatatgcatatggaagaggatttgtaaatgagcaacggaatttgattgggcagctatttattacttttattgaggttttacccgactgaacatcagtttcaatttgattctagatatttcaaattgttttatttccaacaaggttgtaagtagtactagtaaggtcttcgaaatatttttaaataagtcttttctagtttgctacatatttgacacacatagttttttaaataaataaacaaatgagaattttgcatatatatatatatatataatatgtagccaaactacaaaagaattaatatgatttaatttctatttttcaagttagctactatagatttttaccttatttatcagtatttgtttgttttttttagaagtcaagtggttttaacaccaaatttgttttcctctcacttagtgatgataatcgaacccaccaaatagtttttggtgacactgaggatttaacctggcaaataaactctagttaatctatcaagttgattagatttattttattgcagataattattattaatatattggagccataggactcggcttctctgcttccagaactgttattctagcttctaagcatgctctagtttggctgagagagatcctataagttctggtattcgttttttatattcagttattaaaaccttagattatcgcaatattgtttactttttatttcttttagtcattctttgcgactttatttgtatatagatatannnnnnnnnnnnnnnnnnnnnnnnnnnnntccccactgcatgtgaccacatacgtaaatttattcttgttcatagtaactaacatttacgttatcacaatacaatccgaacataacccttcgtacattcg

SEQ ID NO: 33747 - DNA, 997 bp, Arabidopsis thaliana landsberg
aggcatcaaatctaatctacgtggaccaaccggttttatctggtttcagttacacatcggaccaaagggatcggcgacatgacgaggatggtgtcagtaacgacctttatgacttcttacaggttcggtttcaattctttcctctgtttcatcacattaaaaacatgttcgtgacacattttctttgcaggcgtttttcaaagagcatccacaatttgtgaagaatgatttttacattacaggtgaatcctacgctggacattacatcccggcattggcttcacgtgttcaccgtggaaacaagaacaaagaaggaactcacattaaccttaaggtaagtgatcacaatggttttgtttttggggggaataaaccaaattttcttgtttaatctcgattgaaatcagggttttgcgattggtaacggtttaaccaacccggagatccaatatggtgcgtatggggattatgcactgcaaatgaagttgatttcagagtctgaccacgagagcctcaagcaagattacgttgagtgtcaaaatataaccaaaaaatgcagtaatttcaataaaaagctctttcttctttattttcgttagatacatattgttcgggttaaaagataagaaacttatattttgttaatatcaggtcttggtggtggtttagtttgtgattctgcttttgaagtttgcaccagtatcttcaacaagatagtggcaaaaaaaactggcctaaatgtaagcctaaaaaacctgaaactgattgtgttttctcaataattttttttttgtttacgagacttcctcgatttgtttgaagtattatgacattaggaagaaatgtgtggggagcttgtgttatgacttttcgaggatggaaatattcttgaacaaagaaaatgtacgaaaagccttaggagttggagatatcacgtttgtgtcttgtagtagtacagcttatgatgcaatgctagaggactggatgcagaatcttg

SEQ ID NO: 33748 - DNA, 1209 bp, Arabidopsis thaliana landsberg
ttatgacaataatataataataatagtgtattgaagttatgtttttagttgataagtgaataatttttattttctgttttaaggcagacaacacaagaagaaaggatcgtatctttcagtttcccaccacttttgtttattgaatgtgtacaattactcttgagcgaaaaaaaaaaaaaaaaaaatcaacctcatctcatcaccacctaacttgtgattcacagagagggcatgtggatttgattttcagccatttgtctatacattgcgaatgaaatacgtgtgagcattcaagtttccttagtcctactcctttttcctctccatatttccccaagcatatgcaacaactctgcacacaccatcaaaccatgaaaattaaacaacaacaacaaaaaaaaaatgctatttaaaacagagtaattaatgtgatatgaaattattactcacatcatcatggctcggtttcttgaaaacaaatctacctcctataccttcccttacagaatctacatcatttgatttcaacttatccacatcatagatatgagaaaaaaatgttccaaactctagtgaacattaatcgaaaaaaatacctgcgcataatagtaatgcatatgcaaatctaatgcaactgaaagcaatgaagactacacataacctgccaaaacataatcaagaagacaaaagttagtactgattagttagggtttaactaaatctctactgtgacatgattgtgagtcaaacctgtagagcttaggagtatcagaagaagatgagtgtccataacaaatccatagaatccccataactaaccacacaacaaagaaacattcattccccatcttcaaagcatccattaccctatccgttctgccaccaacaacggttcggtttgatttagctaattaaactcttaatgttaagtgaaacaagtgttgtttattatacctcgtttttgagtaaacaccaattcggttgtatttgcggacacacgagaggagaataaggagcgtaatggtaatacagccacaagtgtaaccgatgacccatgttaacaaaagtgcttgttgatgttcatcttttgccagagttaaaactattaatgatgcaacaatctgaaccaaatggactactatttgcagtatattctagagactaccacagcctctcgtagatgaacttgcaccttcatctgacgaatcg

SEQ ID NO: 33749 - DNA, 1007 bp, Arabidopsis thaliana landsberg
tagaacggatcttttccttttttttggttcctccatcatttttttttttgtttcctccatcatctgagatgattgatctctggatggttttagcaacaacaacaaaataattaaaattaaatttggccaagtataaaacaaggaaataatacgactcagatgaacatttaaactagatcaatttacatggttttatcaatttagcatttcaccgactctgctagaagtagtgtaattttgtaatatatcacctttgtagaaaatgaacattttaacactttctaaacataaatgaattattaattcttttggtcagtaccatagatatctcattttgaccatctaaaagaagtttaacataaactttaatcacaacctcagagttaagagagaatcaaagctctggaacccttacttctcatacattatgaatcatatacttgcaagaaaaccctaaacatatgagccagttggcagtacattgggcttcttgtgagacaatatatgggcttcttatgaatgctttaataaagagatgagttaaatgatccagtaactagctaactagaacttcaaaatctcaccgaaaacgatgattttcttttctaggtaagaggccgaccaaacgggtaagggtaaggtacaccacgtttcggaataattacaatagtactccgaaccgtctctctaaggcacgagatatgagcttgctatagaagcgttcctagtttgcccgtgagcgtaaaattgtagacaaaggttacttgttcttcaagaaactccaaaaatctgtaacacttacattatattgaacttgtcgcgacgaatcttcgtctcaataaaatatagcagagagagaagcacgaaaagaagatttctagaacaagaagtagccactctatctctagtgatcaagtcataagctaacagtttaatatcttacactattgaaatgaattttagggtactctccaacaaattcaattgcctagctatatgaaatataa

SEQ ID NO: 33750 - DNA, 1013 bp, Arabidopsis thaliana landsberg
gattggaaatcaattgtatccttttggtggttgctcgacatgaaattcacatctaattgttcggtgttccagtacacttagttttcatgcatatgataatatatgaacaaacataaatatatgattttttatttttattttagactaaagggtggtgatttgaagttttacgcacaagcgtaagtatcagacttcacacctgaatatcacgtcctcgataaatatatatcatcagacgcaaacattagaactagcattttcggaactagcttatgcctttggtgttttttgagaggtgttttcaaatcattgttttgtttgaggatagttttgcaaatttccttgttatcgtaaccaaccaaattctcaatattctaccaagtttctttaggccgaacatacaaaagtctgattttattcaagtttgcactttgtagttttcggccattataagttggcccatattactaaagcattaaggccttactctaattgcaactgtcccttctctcactcgatttttacaagtctagaagttagaaactactctttatgactacaaaaaaaaactaaaacattaagacccttcactagctgcaatgtttggtcttccactctttccttccgacctctacgagttgggaaaaatggcgacgaaggcgagaacaacgaaaccatcattggaagaagaagaagggagtccactcagaggcattttatgtgtgaaaaccagacgagacatgaagagatttgaaaaaacagaggattgcttcatcctcgatttcaatccttttgattcgtttgacgttaaaaggctctcattttcccttgataaagatttggaaatcatccatgagtcaggccaggtttgagttttaaaattaaggctataattagggttttatatatgattttccttctccttttttggggtcaaatgggtttacacatgatataatcatgacaaaatgtgatgaaatatattgagcaggtggcctgtagagattacccac

SEQ ID NO: 33751 - DNA, 1005 bp, Arabidopsis thaliana landsberg
  unsure (1)..(1005): unsure at all n locations
aaactgaaacaattcgctccatatcccacgtccgtgtagactgtagtttgaaatcgtctaattgaatggtaaaatattaaaatctaatgcgattaattgtagattttatttggattttgtgggtttttggtctcaatgtgaccaaacaagaaatcatatatttttacgtgaagacaaaatctcatgagatatcttttgacccttatagtttgatgtgtttttcaaacacataataataatattttttttaatgaatttgaattcattaataaagtatgagagagtttgtagaatataccaccaaaaaaaagatatttaaaaaaaaaaacaagaaagagctaatgcaacaacaaactgatttggttttctcgattaaactttaggtttatagaagaaaaaaaaccaattttgatctctgtggactttcgttttaaagctttagttttctcatttttcaaaaaataaacaagattgattaataatatctttataagactctagaaaactgattaagaaaatctgaaagtaacaactgtaaagctacctttattcacatatatatcaaataatcttatagaaaactttagttctttatctcaattttccagaacttatagtactagagtgtatgatataagttattctacacttattgtatcatttaaaatcgcacgatcatagtagtataagttcaattcacgtatagatacaatatcgtattttacaatcaatcattactagaattttcaagaactttaaaagtatatagaatacaaaattagaagaaccgtgacgaaagatgagatatttgtatttggtgcgagtcataattacaaattaaacgcttgcatggtcgccatgtgggtctcttgatactctagcaaataatttccccctaaagttataactatgcctcactatctatggtatttaaatgtactatatgaaatgcattgcaaacgtaactttagagcagatgcgccgatctatnccccgggggggggg

SEQ ID NO: 33752 - DNA, 568 bp, Arabidopsis thaliana landsberg
ggacaaagggggcccagacactctcaagcctaccagttcgattaccccagatttgtcttccccgacttatccatgcgtgcttttcaccgggcatctggaactggtatggtgctgcgaaagatggttgattctccagactccaactctttagcaccccatgggactaacagtggtcgagccgcgcgtccccacgtaaaacatcggctccccgaagggcttggcaccagaccgaaccatttgccgcttactagatgccgaaactctctcgcacggctttccgctgagacagtacagtgcttgtatggtgtgacggctaagactataggccggaattccctccttccatggaacgctatgggcccctttgcgggagcacgccttgtggctgtcggggcgttccagaatgctaccctctctgtactgcataccctttcccttcggaagtatcgtacgagtccgagaacactatgactgttcgaaccagaataatggcctagattgaggatctcctctggccttttcgacctagggcattcccaatgaggctaatggatattctccggtctcc

SEQ ID NO: 33753 - DNA, 1068 bp, Arabidopsis thaliana landsberg
aattatttgcttcttgacaaaaaaaaaattaaaacacaataaatttttattgtaaaatttctcttctcctcgtcttcccttctcttctccggcgaatccaaacgcttctccggtggatccaatctcttctcccctcctttatcatcgaaacccttgttctctcctccttgctcaaacccaaatcgcagccgtaatctcttcttctcttctcctcgtcttcccttctcttctccggcgaatccaaacgcttctccggtggatccaatctcttctcccctcctttatcatcgaaacccttgttctctcctccttgctcaaacccaaatcgcagccgtttcctaacgaaaccctaatctctccttctcttctccgacgaatcccttctattctccagcgaatccaaacgctttcaacatagatctgaggtttctccactcaatcgacatttttctcaacccaatcgaaagatttgaaaggtaataacttcttcggttcaaatccttcttctttggtttataggttcttgtctgaatgtgtatttcgatttgttgttttctttgtctaatccgatttatgtttttgttgaagatgtttgggggaaacgattatacccgatggctctctctgacaagtggttcaaatcttgtgggtggtgatgctacttctccaggtaacacatcggcggtctaagataatcgccaagcccactctcgccattcccgtcgacactccggttcgcctgctatgtccacccgttcgcctgctatgtccaccggttcgcctgctcaatccaccggttctcctgccatatccaccggttcaccagttcttttcagtggttctccgtcgtcaccaggcacgggatcttctgctacaccagccagtggttcacattcttcactggccaatcaatacggatagccaccatctttacggatcaacaatctaaccttggatgagctcctcgttagtcctggtcgagagcattgaactaaactgcattcaaagcgttcttcaggcgctctttgggtagctgataacttctatcattagtgactgcagcccaca

SEQ ID NO: 33754 - DNA, 481 bp, Arabidopsis thaliana landsberg
ccgctatcattgccaaggaagctcaaaagctactcacggtttcgctcaaattcggcttcactggcgcatctgtcatcaaatggaaccaactggacctcattcgcactccaccttcttccgatgctacttatgccacctccaagcctccgctttctgcctccttcgacttttcaatgcacagaattttcccactcgtatccctcagccctatcaaacctaaggctactgaaactgcgaaataaacagactcaatgttgtcgtgaatcgagatcggcttgatatgccctcatctagggaggttgaatagagaatactgcgacgcaaaaatcttcccgcttatctgttcttaacttgggctcatatgggctctagcccaacggaatcaatgatacactgcgtttctgcggaccagaacctcatcagtgggctgtactactcaaaggggcgggaacaggaggaaagatcacatgttgcgcctttt

SEQ ID NO: 33755 - DNA, 791 bp, Arabidopsis thaliana landsberg
aaaccgcatgtttttatttggggtgggatgactaatgtatccacattttatgggatatgttcatttcatttgaagcaaaatggctctagtgactaatttggcaatgtgttcaccaacaaagaaaataatatagtatactatcaatcccaaaatattagtcttttcgaacgaaaaagttagtcaaatcttaagaggccgtaattaaatttgaagaactttacaagacttgcttttagttcgatatataataccatttttattaattaaaatgattacttttatcacttattaggatagtggataaaagaatatgttatgcaaccaaatggccgacaaatgtattctttgttggtggattttcaccattgtatatagagtttggtgacgtgactaagccacagacatatgataatactttcctcgaacaatataatcatttatatggttggttagagatcaatttaagggtccaatgtatacctattattcattgtttattaagttactgtagaatgcagacaataacttctccctataaaaactcactcgaacaagtatcttctccattaaatcacttatcttccaaagttctcttattcttcccaatatcacactctcttaattaatagttaatatcataggagattcctgctcggaaacaatctagtccaagttttttcgagggattggtcgtggtgtaaagtctcaccaactttttagtatttccgagacactccttgttatatcacatgaattcttagggccacaaaaaaatatggaaagcatcatga

SEQ ID NO: 33756 - DNA, 3037 bp, Arabidopsis thaliana landsberg
cggagccgaagctcatatcactcatccatcgtatattctccctcgtcatgtctatgaattcaacgtcgaagacttttatttccctttgccctcaagtacaagtcattctgaaggagggaaaatttcatgtgattgaacaaggcttatggagcaggaatcaaaagtgggacgacctactgagcgacgacgactcaactgaagcacgagaagtctcctggagaaagaataaatgggactgtctcccttttaactgggagaagttcatattacctaaagaagaaggtacccatttcctctgccgaggttgctacggcgagaaccatgaagataatagcaaggctccggtcgagatcaaacaccctcttcatcctaaacattctctccagcttgccttgttcaatgatgacaaaaccaggcaatgctattgctgtcacgaacttctccgtgacgataccgcaagtatgttttatttttgctctccttgcgattttgggctcaagtttacatgtgccaagaaatcaccagtcttgtctattgaccaacccaagtggcataagcatacacttgctctgtttccaagtctggatccccaaacttgcagcctctgtgccttgaaacattcaaatttgcttttctatatatgtcccccttgctactttatcgcccatcaaagctgtttcagcttacctcatgtcatacggatttctcgccacctccattttatcttttttacccattctttcccaaaaggagattggatttgtggtatttgccgccggaagattaacaatgattacggggggtatcattgcatcaagaaaggttgtctttatgcggttcattcaaaatgtgccactcaaccaaatgtttgggatggtatagaacgtgaaggagagtcagaagaagaagtggaagaacttgagccattcgaaacgataagcgatggaatcatacaacatttcagtcatgaagatcatcatttgacacttgatgagaacattgacagagattacaacgagaataagttgtgtcgtgaaggcagctccactccaatatattccggtactttccattacgtatgcaatgtgatttcattcttcatgaagaatgtgcaaaactgtctcgcaaaatacatcacccagtacatccacatctgcttactctagtgggaagatctgaccttgttatggatgctacgaaatcatgttcaatttgttcttggaggtgcacaactggtttcttctatgagtgcagtgaaagagaatgtcgttttaaggtacatgtgcagtgtgccacaatttccgagcctttacttcatgcaagtcatatggatcctttgttcttaacatcgaaaccaaatgaggaacgaagatgttcggtttgcaaagagttaggacattgttccacaaatgaaacattcaattgcattgagtgcgactttgctttgtgtttcaagtgtgctactttacctcaaaaggtgaggtataagcacgataagcatatgcttactctttcttatggagaggaaacaagtaccatgacgtattggtgtgaagtttgcgagaaaaaaataaatccagaaggagcggttttatatgtgtgatgagtattgttgtgtcacccttcacattacatgtatgcttggggtggacctatacatgaagtctggttcattttggctctattgcagtagcaaggtaagcgttttacccaataatcaccatatgtccagacctatttgctccttttgtaagaagcgttgtccacacaacatagttttccaatgtttaggattaatatcgtgttccacttcttgtattcgcgttaaggattctaaaaagatgaccatgtaacttggcttgacggacatcggttgagcaacaagatattattgaaattttatggggtatatacttattttgaaagaattcttaaaatggtctacatttggaaaaaattattcagtaaaaacccttttaatttaataatattggaattttgattttcttataatgtgtattgtaccggataatgaatagttgtagccgattgtagttggagatattgagcaacgcgataagctggtccaccccatttcattttcttttaaagtttaatctcttcatacaaatttattaaattttgcaatcactaaaacacacataaattttagcatgtgctatcagttgagaaatttgtaaaacctacaaaaattatctgagaaaatgaaattgtgattttggatgaatgtttcattctacgtaaaaccatagacgtatatggtatagagaaaaaaatccatttgatgtgttctatattttgtaagttaaacaaaaataatctgtattacaacacctaaatctaaactctaaagctaaaattttaaatcaatccaaaataataaggtataaaccgtaacatctttatttgaattcaactgaatccttcttcgaccttcgagtgctcgacctatcaattaaacctgagctcttcttacttttaccccgccttccaaactctctagttcgtttgatgtcgctcgaagactcgttcatttgattttggtccatgtgacaatctttgggtggatctgatcatagagttcgatcgggatcgacaccaacaatcaccttttgctaattatagccgaaagtaattgattgaattaaatctttgttcaccgcaatttaatcatttactaaatactcgtattactatctcatatctctcttttctcatgattcttatcatatatttgtttctgattttaacttttgatttgaaataaagaatgtaacaagttaccttatttttaatataattatatcataaattttttgacaaaaataaataaattatatcataatttccaatttttgaatttagatgtttatagaatttctttagataaccaaaagtttaaactttgtaagaaaacaagacaatttgtacaatactataatatacataccatagcttaataaaaatatgtcacattttgttttcttaccgcaaaaataataatctgactaaaata

SEQ ID NO: 33757 - DNA, 1081 bp, Arabidopsis thaliana landsberg
  unsure (1)..(1081): unsure at all n locations
ccaaccgccattagcatccatatagcaatcccaagccgtacttagagcagtttcatttgatttctgagatgacaatcaaaatctctaaagatgtcaacatatgcaaataatgcaatatacaattaaatttctgtagaaaataaagaatgtgaaccttcttatcgagcaaatccatctcaagttcacccagtcttgattttattcgatttgtgagattcaaaactacctcagtactgaagggggtactaggaacatttcctaaattgtaatggaaaaaaatgttctggatggtagaatctctttcattcttcagcagcatatgagcctatgaaaaatataaagaaaacatgttaaatcaaatagagcagagaactcataatattttactatgtggtggctttttcagatttacttcagcttctgtttgtagcttgctgatctccagcatatagttagtttttgcattgtgaagcgaagaaattgttttttctgtgtcaaccatctctctctccatttttggaattttggtccccaaaagagcaagtctttcttcaaacttgcttttccattctttcaattcttcaatagtatctgaacaacaaatattacaagcaccaacaaatttaatctacgtgaagaaataacaaaatgtgagatacctttacagaaaggcaaaagtaaattcatacaaatgcagggactcaatctgtaaaacggacagactactaaaaggcagaaaggaccttaacattgtgatagtaaaagagaaaaccttcattttcctcaggtaatgctgcatactgtctctgctgctccttaaacaaggtgctcctttccgcagtttttattgatacttggtcctggagctttctcagatcttttaacatcatttccttattatgaacttcagcatcaactttctgaacactnnnnnnnnnnnnnnnnntctgaacttttgaagattctgtcctttcttgatcttgagcaatgctctcacgaagctgtataggaattatcatggcataagaatagcccacacaacctaagaaatgcataccatatgtatacaatactctataat

SEQ ID NO: 33758 - DNA, 1085 bp, Arabidopsis thaliana landsberg
gggttatttatgttgcctttccgagtgtccatcactttttcaaaaagtattttaagatgtagcttgacttgttgtcaaattgctattcatatatttaaaataaacactctgtccaatggttaaaacttataagtacaaaagagtgaccaaaaaagtatgcaaaaagaaagagagttattgatagaaaacttactaaaatcatagtattaagaaataggtaaagcaaaggatgagtgggtttaggtttagggagtgtaggggacaaaacagcaatccctgatggtggggaaccctcacgtgaccacaccgagcctcactcattctcacctaccctatttctccactctcatgattcttacctttattttactttaaactctcttttttcactccaatttgattgaattaaaatcccaaattgtttttttttctttaactctttttctcttattacttatcagcattttggtcatgtcaaatattgaattacgattagtttattacttttttcgaaaaactttggtcatgttttactgtaataagtttagttatacctgaaaaaataaaaatacaaattaataagtaatctatgcaaagttgtcagtatggatttttatcgtagagagagaaaaaatgttttatttaccggcacatgacatacattgaaatatttattctaatacgtattaatgttacttttgaaaaatttaatcaattaagcaaagttcatagaataattagcgcaccacatgccattattaccagtactcaaagaaataaggagaataagaccatatgagtcttaaacggcgcagtttttataaataaagaaataagaagtgttgccttgtttcaagggtctttgcctcgagagactctccttgtgcgaatctctccatgtttttgtttattttcccaaaatgttcttttttctttttaacattaccacttacttactccctcaatttaaatttttatgctaattaaacattatacttaactttctgtttaagattatataattgtgtccttcgtattttgaaaatcgacacgtactaattaactattcaaggaatcaatcaaac

SEQ ID NO: 33759 - DNA, 1332 bp, Arabidopsis thaliana landsberg
aatcgagatttgcagggttaaagggtgctgattctactgcatcttcgacaacctcgtcttcgaagctttatcaagagacttctatagatggccatagctcccctgcttcttcatctgctcaaagcaagcagcagttcttctcaccagatcccttaccacaaactgctcagcggtctaaagaaaacgtcacagtgacagttcgctttcgcccactcaggttcttggtgatatgtttacatacgcttgcaaaaattaggttgatgtttgttctgcgaatttgacataccttatcctcgatgtagtccaagggaaattcgccaaggggaggaggttgcatggtatgcagatggggaaactatcgtgcgaaatgagcataatccgacaatagcttatgcctatggttagtcttgacagtttgattagtgttcatgacttcatgagtttctgtaaccatcataaatcttgttctgtggaatggattgaagtttcatgcatcatgaatcaagacctaaattaaactagatatcaaggtccaatctgccatattttttcttgaaatttctgttgtcctttcttgcagatcgtgttttctggcctactactactacacgcaatgtctatgatgttgctgctcaacatgtcttaaacggtgctatggcgggggtcaatggtatggactaaacacttattattgccctctctagttaagactttattcttagaacagaaaaagatatttttagtatcaagcttacccgagctacagtaccatgaacagttgcatgaccattcatttagaaaatgagatctttgagttgccaaactctatctagtgcttgttctagtctctagaacaacctttaagttagattttcttgccaatttgattttattgtagtgactttgagtgttaattcaaccacagggaccattttcgcatatggagtgacaagcagtgggaaaactcatactatgcatgtaagattcactaatcatgttatttcttgcttttcatcttattataatagaacgtattaggttactaccttgtacaatgtacttcaatgtgtcatcccagacaatgcttatctgtcagagagtcatttacctcttccttcttttctggctaaatcactgagtagttcaggaacaaagtttctctcctttagtagccataatgattagcaatagaactcgatgtttgaatcctaagatatatcgtttatattagatatttggctattccttctagttagggtttctttgttgaccctataaagccttttcttttactaaatttagcatatggctgcactctttaagttagttgtt

SEQ ID NO: 33760 - DNA, 882 bp, Arabidopsis thaliana landsberg
cagcttgttcttgatcgtttgcttgagggcaagcaaagactaagtttgggggagttgataagtgtatattttgcatgttgagcatccatttgtcatcattttagcatcatatcatcactgttttataccatttcacatcatttgtaatcactttgcatgtttaggatagtttttgcatgcttgttgcatatttgtgttgttttcaggtgatttggagctgtcgacgagctaactggaagaagcggacctgatcatgacaaaccactcgacccaggggtcgagtaggagcttcaagatctcaagagaccactcgacccccaggtcgagtagaagacaccgccactctaccacatcactcgacccccaggtcgagtgtcttcatctccatctcttgaccaccactctatcacatcactcgacccccaggtcgagtgacttcatctccatcttctgaccaccactcgatcacatcactcgaccacgagaacgagtgtctttacctccattacgagaccactactcgaccacaccactcaaccttgaagtcgagtatcaccatcaccaccactcgactacatactcgattgcaagcttcagagtcttcttcattttgcacgcaaccagacactcgagcacaaggaagaaaagaagactccagcgattcactcgacctcccactcgaccagatgggtcgagtacagttcttaatccgtcccgatacttcgtcgttttcagtattagggtttcggaatatttggctataagtagcatgtacttcacattttcgcagacaagaagttttttatctagttttatttccgcaaaccttgtgttctagaccttgtgttctagaccttttgtaatccggatttttctttatct

SEQ ID NO: 33761 - DNA, 3247 bp, Arabidopsis thaliana landsberg
acctcttcgattacatgtttaacttaaactcgatttttgatgatagaatcttacatgtttaattcaattgaatcaacctctttaattcaaaatcaaattgaaaatttacatgtttgagattggtgatgatagagactagaccctttgtggcttcccttctcccttttgattttcaaaatcgaaataaagatgcaaatatggtagcggtgattttctttccggatttgcagtgatgaggaaataaattctgaaatttgaaattcatcttcatgaatttatttccgtttgtatatgatagaaaataagaaatacagaggctcatatgaatttaatgttgggttgggtttaggaaaattaagggtaaaatagtcataacgtagaacgtagaaatacctaatttggtgagtaatttgagatgtttctaaattcacaaagacacggagtttattgtgtcaatcccataattgatcctaaaattatgagggtacaaaattttttaccaccagaatactataccgattgattctagttacgtattagaatcagttgaggtgattttgaaatctcgtagtcgaagtttttgtatatattaaaacagtatatactacaagaaaatagtcaatttgcaaggcagtattgcgtgggaagacattttcgctaatttgcgaggttattgcgagtaaattgctacaaacctggcgctcgttgcaactccgtttcaaactttgcgaggaaagtacaagtactttgcaaagaaaaatatcctccgtcgcaaatctcaagcagatacttcgcaaatctttaccctaaaccctaaaatacataaaagtgttttgcgatctttgattttcatttataaatgttgatatggttcaaattacctagaactactctctcaaataagagatcaattgcagtattttaggatcgaattcacggagttcttttcttcaaacagtgagttgaatgtcgagattaagctagcagggtatgagtgatatagcaagaaaacaaagtaagaaaacagcaagattgattgtgttgtaaacgattttataaaaagctatgaacagggtattctcaggaaactattggttggtagatctaatgaaagctaggttgttatcgaacgattcttaaactcaaactctaattatggaataaccggtgggcatgccgcaaaactccctatatctctagctaataataaccagagaagcaaagaaactatcaacctaaatatgcattcttaacgagttcaattgttcatcttagtaaataggccgattcttattacacacctattaaataggccgattcttattacacacccagactcatcaaataataaatccaactacagatacctatggattcaagatctagttaattactctaaatctagcattaagcacaattaaagatgaagaattctatagataacctagcaaatggggtaatctactaaaccatatgaatccctaatgagaaaccctattcctaacaggcatattactcagacatattggatgaagcaaacaacatatttgagtgtgaaagcttaaacacagtaaatagagaaggggaaagaagggatctcttcactgtatataaatctgaatgaaactctgaaaacaaatcgatgaatagcttatgtctctcaaaatagggttttgcaaagaacttgatatatgaaacttaggtctaaaaacaatttaaaaaccctataaaacgtctagggactaataatgcaaataaaaaagtcttctgaggtaaattcctcttttgtaaactcgaaagcatctaagaattttgctgggctgaaactggtgtcgattgactccaagagtgtgtcgatcgacactcctcgctgattcctgaatccaaaatcgtccttagcttccttttctttagctcttgctccaaaatgtctccttatctccattgttgtcccattgcatagtatacctgaaaagacactagaaagactagagaaatattataaagactcaagatcatatacctaaaacatagataaaatcaatgaaaatatggatatatcaactaaatatgatacggttcaaattaccctaagagctactctctcaaataagagatcaattgcagtatttaaggattgatttccacaaagttcttttgttcactcaatgaattcaatgtcaagattaagctagcaggatatgattgaaaaaataagaaaacaacgtaagaaaacagcagattgattggttgtaaacgattaattaaagagctaggaacatggtattcttaggaaactattggttagtagatctaatgaaagtgaggttgttatcgaaccattcttaaactcaaattctaattatggaagaaccggtggtgttccgcgaaactccctatgtttatagctaagaataaccggagaagccgagagatctttaacctaaacatgcatttaaacgagttcaattgttcaccttattagataggccgattcttattacacacctataaaccaggctcatcaaataataggtccaactaaagatatggtggacatatctattgtttggattcaagatctagttaattactctagatctagcattaagaataatcaaagatgaagagttctatagataacctagcaaagggggcaatctactaaaccatatgaatccctaatgagaaacactactcctaacaagcagactactcagacatattggatgaagcaaacaacatgattaagtgagcaaacataaacacagtaaatagagaaggagaaagaagggatcttttcactgtatatagatctgaatgaaactctgaataataatgaatgaatagctttatgtctcttataatagggtttgcaaagaatttgataaaagacttgataaacaaaacttaggtctaaaaacaatatatatagaccctaaaaacgtccagggactaataatgcaaatagggaagtcttatggggcaaacttgagcttctgaaaacttgaaagcgtctagggtttttgttgggccgaaacttgtgtcgatcgacaccaagagtgtgtcggtcgacactcctcgctgattcctgagccaaaatcgtccttagcttcctttaccttagcttttcctctaaaatgtctccttatctccattgttgtcccattgcatagaattcttgaaaagacactaaaaagactcgagaaataacataaagacttaaaatcctatacctaaaacatag

SEQ ID NO: 33762 - DNA, 525 bp, Arabidopsis thaliana landsberg
tgtgcacgagcatgctgatggcacagtggatggtgctcagctagacgacggcgagtgattgagcgagctttctgttctactgcgttcagtagcgaggcaggtgggggatgttttgggtcatacaccagagacactttcctcgtcggaaacctccgcaactttacatccaaatgcggaagtgcgcgtctggctgcagcaatatgctactcacttgcagctcctgtggacattaatgtcctttgccttttattgcaatcagctgagtcgcggaaacgatagtaaggatctcgcatcctgggatggggtgcgggtcagcgatgctggcgaacttcttcatgcactattggcggggcgttatcacagttacgatggtgatgcaactgcttgaggtgtttaggtgcgagaactatcagacgcaacccttctactgctagcacacattggaggaatggaactgacacaagagagtggtactcaattgcggcggagcatttcttgtttggatcatgcgggctgattgtgccc

SEQ ID NO: 33763 - DNA, 3711 bp, Arabidopsis thaliana landsberg
aagaagacaacctctctgtttttctctctctttctctttctctctctttctctcttatttcctttttgtgattttcagttatatgcctaaaattggcgcctgtgttttcaaatttcgaaacttatcagatagagaaaaaaatagcaactcaagttaattcgatgaacaacaccatggaatcggcgaaatttatacacaaattttcggtttttttttgttagtgccgttgtttattttttacattaaaagttcaaattgtgattcaaaaagcccatgctatattaatattttttatggtcataataaaagataacgtagtgtaaaagaataataatatgttttaaaaaataaggtgaaccagtgagatatgggtttatttttagaatgacctatgaagagcaccatataaatgataagagagtcttttataaccacaagataaacaataagtcattacgtgttacgtacatgtgataaggtatcgtgatgtgataaagttcgaggaagtcactttttcgatcattttattcgtaaatgtttctttctttctaatgctaaacgatttctcctttatcacgtttaaacatgcataagagattagagatcataagattaaacacttgtgattgtgtgtggtattttacaagatatcgtttggttatgtaggtcgaagccgatgtgtgtgtgcgtgtgtgtgttttgtcactctttttttcctaaaattcacatgaagacgatgaattcgaaaaatggtattttatctaaaacaaatttggaaaaaccaagttgggatacaagtgttatgatggatagactctaaactgaaatgtccctaaactttgattcccgttgtgaaacactttaccattagaaaattcacgtgacaatttatatgattagtcaagctagataatgttaaggtattataggagattgagtgcattcagttaggtcagaagtaattagttaactaattttatgttctaatgggatatttgttatatcatcgattgtgcattaaccgacctttgctttggctgttctctctctctttgttttgtggactccttttcaagttataaacaagataacataacccttttttttttggttatgcatatatcttgatttaaatatttcaaatgtcaatggtttatagtggaaagcctaatgcattttttttataagttatataagcatatggttggtaatcacaaatagtccaaaaattcacaaaaaaatatgaatatgtttagttagtggtcttcttccttcttcaatacttgacccctaattagtttctcgacatatttgacccctaattggtttctggaattgtctcaattatttattattccacatgtatttgtttaacaataataagagttttaactttaaagatgattgttaaatttaccactttcgtcattatgttttgtgccaccaaaatgatcaatatctgaaacattctcactcaaaactagaatgatacgaccaccagtcataatcactttttttttttttagtttatcacctgaaactggtcggaactgccacagtttcaggtttcatccccagatatttcggcctttttggcaactctggttatgaaaattacgttcttgaattatacccattaaccgataactatacctcacataccaattgatcctctgaaactgataattgtatatatcatgatattgattagttttcactgtatattgtcatagaacattgtatgttttaccagggtacagatttttaaacagtcttttctagtttattcaaagatgttgagctctccaatcaacagcagaatcctcgtcatcctcctcatcgctgggcgattcttcttctgtcttcttcggctttttaacagacccctcagaggttttactgcgcttcgctaatcttgccgctttaagttccattttcttcctcttcagaatctctactttctctttgtatgatctgcagaataagattaaaaggagaagccaagtgtttacttaatcttaaacaagtctcaacatttccatcttcttgctataacaaagtaatgaatcaaattacctttgctctcgttgttcctcctcttctatagtttccgcagcatcaacctgacaattagagtgcgagaaaagcgattttaagtttaagaaagagcttatgatactgtcagcaatttatcatagtgacagaaagttatctgacctcttcttcttccatgcggctatccactacctgcaaatcatcttgtatcaacttctcaaattctttatattcatccctgtaagaagatccatgtttatataagttcacgaagagaattcttaggtacaaacccataagatcatatgaaccattcaaattgagaatgtaggaaagtaactggatcacaaggtccacaacaatgaggtttcactttgattttctgcatctggaaaagtaaaagcaacaaaaaaaaaaagagaagaaactcgcttgatatctggtttgacgagcttgattccatgggcaagcaggtcagcttctttattatcaaaaaaaccggttggaaggtttccattcaccattggttttgtttctggaccagtggtctgtgtctgactctgtttaggttcactggtggttttggtatttgaagaatcagttttctgattatcaaagaatccggctggaagaggtccctttgacttatttgtttcagatcctatagcgagctttgattgctctaaattcttggattttgctggttctacttctgctgcacatatatttgatcaataagttttttttttcgattgacgaatgaaactatcatcaatctttcaaaaaacctaagactagagcctttaagcatgtcatccacataactagcacctaaaccaaaagccttctactaagaaatttattcgaaaaagataagatcaagaagaggaaagcgccaattacctctagcaggctcacgattttcgaagaaatttgggggaagaccagatgatgtcagagatttggatgatttagccaaaacttcagttttcgttggccgagtttcaacaggtttgctaccccgttgggttcccgctgcactagcctttagattatcgattgcctatcccaacataattttaccaaagctaagttaatgagattaaagaacataaaacagagactctaaagccagctactaaatgattcagtagcattccataatccctataagagcatgaaatctacctatcttcaatgtatgttgtttatcaaatatcccattgttgttacccatgttataagagaatgtgaagtaaagcttatggagcagaagacactaagtttacctcgtggtgcttacgagaagcttgatgtacatcccagagtgattcagatttcaagacgacattgcaaactcgacacacaggctggtctgattcgttgtacctacaaatccaaagaacaaactcttcatcccaacttgtaatcacctacaactacagctcaagcccaatcccagaacccacaaattttaagccggattcgttcagttagaggtttttagaattgcaggaacccagaagtgacatcaacaaaaagagaaagaagctaaaaacggtttacctaacgagaggagactctatgcgggtgtctttcttttggcgttgagattagagcgaaacatggccttcttttcgcttgagcatgcatcac

SEQ ID NO: 33764 - DNA, 1955 bp, Arabidopsis thaliana landsberg
agtgtgcattttatacgttttgaacatccatttgtcatcactttgcatgtctaggatagttttgcatgcatattgcatatttgtgttgttttcaggtgatttggaactgttggtgagctaattggaagaagtggacctgatcaaatcaacattctcgaccacaagctcgagttcagtcatcctcgagttcctgaagtactcagccacaacctctacaacaaatcactcgaccgcgacactctatcattcactcgaccaataactctaccaacatggccgagtctcaccatcatcattcactcgaccaatcactctaccaacaggtcgagtatcaccatcatcattcactcgaccaatcactctaccaacatggccgactcccaccatcatcattcactcgaccaatcactctaccaacaggtcgagtatcaccatcatcatccattcgatcaatcgctctaccactaagccgagtaccaccatctctatcactcaacatcatactcgactgtcagcttcagagtcttcttcattctgcactcaaccagacactcgagcacaaggaagaatagaagactccagcatatcactccacctctcactcgaccatctgggtcgagtacaattcttagtccgtcccaatactgcgtcttctctgaaatattttgagtattaggattttgaagtattttgctatagttttgtaatccggatttctcgttatctattcagtatttagtattcagtatttgttcttaattttgtttactgttgttcatcctgttatcgttttgctattacactgttgttattatgttttcatcctgttcaacgtttatgttctttgcaatgatgtctaagtagtgaataggtttctgaggatgggttagagtagtgtagaattctcagtatgttaggtggttgagtattgattgatagatcccttttggattagttgttcttaatgcctattgctttctgatcaactggaatttgagcccaaacatttctgcgcccaaaaggtgttcgatgaaatgtctgaaccactaatttcagagtttcatggccctgtaccaaggtattggttgcaggaagcgttttggctttaacttgttgattcgtaatgcctgtcaagttagctctcgtcaatggtgattgagactgggactaggttaacttgagggtctctgttgcggtggcacttagatttggttaatgaacttgttgtttagggataatttattgagcatgtcattcacctgtaaacttaggaaacaaaactactcaattaccccatcctcgggaattctttatctgatttattttattgtttactctactgttgtttactgcatcttgtcatctgttgcttagtttctgcaattctttactgttactcgacctgatactcgaccacccagttgtctggcaacagactgtgcagtcgagtatccctgttatactttctgtctgttactcggcctcacctagtgctctgcaaagagctgtgttggtcgagtgttttactgtttctgtttgattttctttttctgcatattcacttaggactgctagaacacaccaaaacctgttatgcttggcttgacttagtgacttctgatcacatcttgattgttagcatcacacccatttggattgacaacctaaaatactacaacgacatgattggtgttttaggataattgactaaaaaactattatcaataatggacatggaactttggtttctatacataatcaattcacatggtgttatgatttttcagtaactaatcttcagttggtttgtgaactttgttttgtagtttagtggctacaactaatcttcatggataacaactttcggcattttcaggtacctttctgacttactcgcagagcatcactagcttcctccatatttgcctgtgcttccacatatttgctggctcatg

SEQ ID NO: 33765 - DNA, 2322 bp, Arabidopsis thaliana landsberg
aaaaaaagggggggcccccaaaaaaaaagaaaggttttttacccggggggggggccaagaaaattttttaaggaaaaaaaaccccccaaaaaaccccccatagaaaatattgtggggccttctcaatgggggggaatcaaatttttttttcacacaaaaatttgttttctctcaaaaaaaaaggttgttagttttcaattccaggcatttgtgttgcaaaagaaaggggatatcgcggaaattctggatcccaggctggaaggaatgttcgatgtgatggaggcagagagaatgataaaggtttcacttttatgcgccaacaagtcttcgacattacggccaaacatgtcgcaagttgtgaagatgcttgaaggggagactgagatagaacagatcatatcagaccctggagtgtatagtgataacttgcacttcaagccatcgtctttgtcgtctgattatatcttgtcgattccttcatcatctgaatctgcttatgatctgtacccactcagccccgagtccattgtctttactatacagtagcctgaaccctctgattatctctacgctagggttgttgttgtaggctacttcgggctcgagaaaagattgtaattagggctaatatcgctagttgtacttggaaaagaatttattttgttttagaagaaaaatcatacttaaattgaaattcgttataaaattaaaactatagagaaaattccaaaatgaaatccaaaaggtccttgtcctagcctttagccgtttactttgactcttcatccaagaaagtaaagacatggctttatatgctttcatttttagtacaaatacaagtggtcagtggtgtgtgtaatctataacgagtggtcagtggtgtgtgtaatctatgtatattgtctgatgtgattatcatttgggaaagtaaaattttatttattttggttctgtttggtaggataattgatatttaattcacttcccaccaataaaaaggatgaagcataaatgaaattatgtattcctcatttacttccattggtttgtacgtacatctaatcatttatcaatcaaaatttcaactagtctagattttagtgagcagaaaatcagtcatataattcgtttgattaaaatatcgagttaatcaaaagttgcaatatgatttaaggtaaccggaaattagctagtcgtacggggaactagagttcaagtgtttctaatcattacttaatgtggatatatggtcgtacggattggccgtagtttagtcaccaagtgttagctttctattagtactaatttgctgataacatggtaaatattttgattttgaaaacatgcacaagagcattttaaagaagttatacatcataaggttctatactcgctttgatatataaataagaataaagcatagcattttgaggaaattatacaaggtttatagtatgatgaataacattcaattggagaagttagatgcaagaattgttcaacttcctccacagagtgttaattagttgaggttctaaaattaatcaaccaatacataaggagacatgaaacatcaagcattcattaacctctctattcaccactattaacatcgacatcaatgtttactttggtgaattggtcaatatatacctctactctctactcaccgacaacctaagaaaaccctataaatttgcttgttggtgatgactttgtgatctgccaaacaaattaaacacatatatacaaagaatcactaaatataacttatatatacatatgtcaaccatcctctggagttttttcctgttctttaccattatcttaagttccctcacaaatataacaacattggcttgtgtgccagctcttcatccagatgaatgtatgagaagaatcgccattttcttaaaaaaatatatatatcataatcagaatccgtatatactttatatacttttttttatatgtttttttttttttttggcttatattaatgcagtgaatgcactaaaggagatagctactacacttggtataaagagattgaacctaagggatgaagatccttgcagttcaaaaactctaaagatcatacaagaagttgattttgttccgaatctagatatcaacaacaccattggttgtgattgtagcttcaacaacaacacgatatgtcatattacagaattgtgagtgttagtttaaatgtcttctcttcgtttaatctttttattttctcttcgtttgaaataagttttttgcatttattatatataaatacagagctctcaagaccatgagtcttcgagggaaact

SEQ ID NO: 33766 - DNA, 2448 bp, Arabidopsis thaliana landsberg
  unsure (1)..(2448): unsure at all n locations
tacatcttctatcctttcttttgctaaaaggcaaatacgaattcatattagtcaagaatgatattaaagttgtgctgcctaatataatgttggttgacttatgttgacttgaaagccttattctccgggtcagtagattatgagatcgttggattctggatgaaccgactgatgactttgactcatgctaacaaagactagcactgtgttactatcaatgatcgttaaattcatcatgctttnttttttttttttttttttttcttcgatatagacattgcatggagtttttgcttactaggtgacattttggtattgattactacgtgatgactagactattagtgtactgtgcctgtcatgctctcttttgcttatcccctttttttttcttgttacaacccaacaataacaggctaaaaaggtaagaccaatctatccgttgaagttcacaaatccaaaacctagaactaagcccacactttaacaagtctgaaagttatgctaacgtgggataaaacaaacgctaaagaagacaacagttcttggagctctcaaaactcatagacgtccgttgcgaaagcaatcatagaaactaaatccaaaaaatgtgttatactcgtggtacttactagttagtcttccccgttttttttttatctagcgtttttgatctctatgaaaagttgttctttcttgtattgcaaagctacaatttgtattgctggattcataaatatttttcatattttagtaggcagctcgtgaactctttaaattataaattcagtagagaatttcttttgaagaaaaaaactaatctagtcgcttctaaagaagagatttcgatttgacaagtttgaagaattctgaaagaaaaaaaatgcgacaattggctctaatgcatggaattcaaaagaaaaagcgacgatagcaaagttagtcgtgagctgaccattttatattatgattatgaataataacataattagtaaaataccatcataagtattagttccttcattgcatagtagtttataacattcctctacacttgagagttgagacacgaaactaaaacagaaaaccacatatactttaaaattcgaacacagagtaactcaaactcaaagtactatggagattgatcagaaacaggaatattagttcctggaggacgactacgtctgcatggtcggcctgtcgtccacttggaagaagcaaatactgatgctggagaacctccacatgaatttgagtgtggagtccacacgataggatttccccaaaacgctgcagtattaacgttaaactaatttaatgagatgtttgatttcaagttcgttagtcttttcaaaactttatagtactaaatgtataaatttgggaatttgttataaagacacttaccaagtttgcgccctgtagattccacgacttcaacttgagaggaaagagtgtaaagtataagaagtagtggtaacacaagtgcgacaatatttggtgactttgaacccatttttttcttcgtcatgtttttggtcatcggaattggcaagtgctagatatataaaagaagcgtaacgtcatatttgtttgcttttgctatttaactttatttgcaaattttcactagtgaacgcggtttctacatcagctacaagcctataagattagataaacgaatggctagaaatatttgaatttaagagataagtgttttgtcccttcttttgggaaaaaaaataaatcaaagacgacttcgttgccatttcatattagtagagaggaatattcaatataagttgactaattaataatggccgttgactttgtgtataataactactcgttcaccctatcttcagtgtcactatatatgagattgttgaattttatatgaacaaatatatgccactatcaatgattgttgaattggtctaattttttgttccttttatagagcacggactttttgcttgctacggaggtgataatgtttgttatttcttgtagaatgaaatttccactattagtgtttaattttaggctcccagtagtatgcttacatgaaaaaatagcaaatttctggtacttcagacaggaacaagattgttagcataacaaaaattacaaagtgaaattgaacgaacaaaaagaagaaaagagttgtgggcgtaataaaacctaatgaaactaaaagcaaaaatgggccaactctcggggttctaaatccacacagtatgttataaatttatatcaaaataaaattatagagatcaatttcacagaaacatacaatttacgaatgttatcactgcaactatcaccactaataaaatctgatttaaaagtctagtgaactacgctacaaaaaaatattaattccttttataaaaaattttattattaaaattacgaatatgtcatgagaagttacagagagta

SEQ ID NO: 33767 - DNA, 3219 bp, Arabidopsis thaliana landsberg
aacccgatcacatatctttgtattcttctatcgaattataatttaattttttttttaagcgaaaagaaaaactggcgacgcggtctgtcatgaaaacttatgagagttttaagaagtcaagccacgtgaaatttttcgtagcatcctataaagacaatttaaatgtccacatgatacaaaatcatgttagtacgttaccctatcatttatctctttaaatttaaataaaaatagtaaagctttccaaaatagcaaaaaacttcaattttacccacataactcatacatcctcttgttatattcttaaataacatgtttcttttctttgcattggaatatgcaactaggtatgtggaaacgttcctgcttatgatatattcaaatttccattacttcatttgctatgctcactatatcacaatttagtctgaacaaagacaccaagaaagacagaaattacattatttaattctcgaatccagggaccgcgtaaagaaatataagcccatgtctctttttttttctttcttaagttttgttttgtatgacttttttgagtttcaagaactcaagccacgcgaaagccgtcattctttacaacttgtgtgactatataacaaagccacaaggaattgatgattcacatgcgaaagcaaaatatccattgcaatattctaaaaactttcacacttatccatccaaatgtcaaatttgcgtttgcgtttactttctctcgtgtccatcctctactgcatcgctgctctccgatgtcgtccagaccaaaccgaaaccattaaacgtttcaaaaacgagtttgcgttctccagcatctgcagaaatgacaccaacttctttagcggtgtggtctgcgataacacgaccggtgcggtcacggttctagaactccccggtggatgtttacgtggcactctcagaccaaacagtagcctctttgagctaagtcatctccgttacctaaacctctctttcaacaacttcgattcttctcccttgtcctctgcttttggtcagctcaacaatctagaggtcttgcttctatcctctaatggcttcactggccaagttccttcttctatacgtaacctaaccaaacttacccaattaaatcttccccacaacaagctcaccggtgatttaccctcacttgtacagaatctaaccaagcttttagctttagacctttcttataatcaattctctggaaccataccttcttcttttttcaccatgcctttcttgtcttatcttgatttaagtgagaatcatctcactggctcattggaaatctctaattcatcgtctaaacttgagaacttaaatcttgggaataaccattttgaaacagagatcatagatcctgttttgaggttagttaatctcaggtatctaagcctctctttcctaaacacaagccacccaattgacttatcaattttctctcctctccagtctttgacacaccttgatctttacggcaacagtttaacactaacgagtgtgtattcagacattgactttccaaagaatatggagatcttgctcttgtctggatgcaacatcagtgaattccccagattcttaaagtccttaaagaagttatggtatttagatctttccagcaacagaatcaaaggaaacgttcctgattggatatggagtcttcctcttttagtctctctggatcttagtaacaattcattcaccggtttcaacggttcattggatcatgttttagccaactcatcggtccaagtactagatattgctttaaactctttcaaaggatcattccctaatccaccggtctctatcatcaacttgtctgcttggaacaatagtttcacaggagacattcctctctcggtctgtaacagaacctctcttgatgttcttgatctgtcctacaacaacttcactggctctattcctccatgtatgggtaatttcaccatagtgaatctccggaagaacaagttggaaggaaacattccagacgagttttatagcggtgctttgacgcagacacttgatgttggatacaatcaactaaccggagaacttccaagatctctcctgaattgctcattcataaggtttcttagtgtggatcacaacagaatcaatgattcatttcccttgtggctcaaggcattgcccaatttgaaagtccttactctccgttcaaacagtttccatggtcctatgtctccaccagatgatcaaagtcctcttgcatttcccaagctccagatacttgaaatatcgcataacagatttacgggaagcttaccaacgaattactttgcgaattggagtgtaaaatctctcaagatgtatgatgaagagaggctatatatgggagactattcgagtgatcggtttgtttatgaagatactttggatttgcaatacaaaggtctatacatggagcaaggcaaggttcttactttctactccgccattgatttctctggcaacaagcttgaaggagagattccagaatctattggtcttttgaaaacattgattgctctcaacttatcaaacaactcattcactggacatattccgatgtctttcgctaatgtgacagagctcgagtcattggacttgtcagggaacaaactctcaggagaaattccacaagaactcggaagactatcgtatttagcgtacatagatgtctctgataatcaactcactggtaaaataccacaaggaacacaaatcatagggcagcctaaatcctcatttgaagggaattcagggttatgtggtcttcctcttgaagaaagctgtttaagagaagacgcaccatctacacaagagcccgaagaagaagaagaagaaatattggagtggagagcagcggcaatagggtatggaccaggggtgttgtttggattggtaattggacatgttgttgctttgtacaagccagggtggttcatcaagaataatggtcagaataggcttagaggcatcagacacccttaggattaaaattgttctgtttcattttttttgtaaattgatcaatgagtaagtcaagttactcaaaaacagaattatggcatgttctgtttacatttaaactatgatcttataacagaagagccgaaactattaaattagtttcgtccatatcaaacaacgtattcataactacttcattttattatggaaacataagaacag

SEQ ID NO: 33768 - DNA, 826 bp, Arabidopsis thaliana landsberg
aataacaacacaaggtcatccaaaaaagataagtaaacttgataaaaaccctttgtgccttaaatcttagtaagcccatcacaacggggataacaatttcactaaaaaagtatctacttggctccattaatggccatctttcttcttttgtcagtcttcttcagtgcaaactctcactacaaaacacgaaattgccaacttctcaagacagctactttttctctttgaacgtttcctttactctttctttctctctctaatatggtactgctctttctttttcttccttaccttccgaatttcaaagttagtctttttttagatgttcttctgatcttctcttcggtgacctattttgatttcttcctgaattttgtgttactgctgatgtttagcttctagggtatgtttgattctctggtatttattcggctagggcttactttcttacatttgcctaaaatcttactctgtttggtcggttttggctatggagaatgtgttttgtttctgaagaacgttgtgttttagatctaagagcttgtttcctgcatttacccattttgtttttctcttgtaatcggatttgcaggttcactgtgttaaggttttgttgctgttgttgttactgttgaagccattacttgttgcgatggagaagacttgtgttgaggatgagttaacactcactgtcactagactcaacagtgagtctaagagacggaaaatctgtaagtctttggagaaatacaaagctgattcagctgggatattgaggagtgtacaggaccatcttgatatgcttgaaaccgatatcgaaaagaag

SEQ ID NO: 33769 - DNA, 2288 bp, Arabidopsis thaliana landsberg
  unsure (1)..(2288): unsure at all n locations
ccatctgtcctgatagaattcaacacgcatttaagatttgtcacgaaataagggaaccgggtgacatggtgagtaatcataaatgatctacaacaaccaccaaaaacaagaaaagtatcaggataaaataaacttatagaggataaagtaaaacaataaatatagcaaattcaacaaacgttacctcaagagtagatgcagcgatggtcatatttttgacacgagagatggcgacaagaaaatgaagaatcatatttctctttgacagatcattcggattaaactttttccccacacaaaagttaaactcaaccttgatatttgcctctacaagggaactcgatttatttattatgaaacttgaagttacttgatgagagagcttgaggatctcaagctttggggcatcaatagtaaccactagatctttaaaatgaagatcacgggaactagggccataatagttgaagctcaatagagactgagatctcacacgtaaaacgtttacattgtctaatgaacatttgcaaaatcttaaacgtttaattagtcttaaccagatcttttgttggaatgttgaggagaacttgaaagaacaacgattctggcaaatttcttcgtacccaatcaccttcatcaccaaatcttttgtcggatgattcaggagaagatgatcgtttggtaagaacatgtttctctccgtcttcgtccatgtaccttcaaaattgcgaagaaagcggcaagactagatgaaaatgaaacgataactattaaacctaaacctaacagttccactttaacggcttctaagaaagataacggagaaccaaaacgccgttaacgtgttaaaatatctcagattcttgactatttatttaaatggcaaaatagtttttttaataattttactaaacatatttatttttaacatctgttttatctaattattatcttggaacatatgtaatcataaaaaaacaaaaagaacaaaggatccctgaaatatatctgaacctttttttttctttcttgtttgcagtaaagtctttagactcttagttatcctataataaaagaaagaaagaaaattttacattaaaaaaggagaaacaaatttaaatattaaagagtttagattttcttctataagatgtacctgtaaataagctaacatagcgtcacccacataaggattctcaaatctaatggaaacttttaaaaaaccgtcaacaggaagtataaggaaagtagggtctattggcatcgttctatctataagtagcgaagtcttaagacaccgtacctcatctcttatccttcgatagagatggaaaacatcacgaataactccgagcgatccctcgaccgaccaaagaggcaaagacctgtctccatggagaatgttggaggaacggcgagtggaagtgaggtggnnnnnnnnnnnnnnnnnnnnnnnnnnnnnnnnnnnnnntgtcccatttgctaccacaaacttggggctcctatctatcaggtctctctcttcctttcctggtttataacttttcttctagggaaactaaaaacaattagtggcactgacgagtcctttaatttgttgatatgagacttttaggataacaatcatcaatttgcttgaaattcatgtatttcaaatgttactttgatgaatttacgaatttctcgatttctcaaatgtaatcttgactgccacattgagttgataagatgttattctttttcatttttttgattagatatttttataagttacactagactagttcataaaactttgataattaactaagtctgagttttgaatttcagtgtgacaatggacatatagcatgttcttcttgctgtaaaaaggtgaagtacaaatgcccttactgtagtttgcggattggtttttttcgatctagaatactggaaaaaatcgtagaagcagtcgttgtgtcatgcccaaacgccaaatatggctgcaccgagaagattccatatgacaatgaatcagaatcagcccatgagagggtatgcgagttcactctttgctactgccctgaaccagagtgcaagtacaccgncgtgtacacagatctctaccgtcattaccatgctgaacacaagactgatcactcatggttcaagtgtggcgagtacaataacgcgtggttacacgtcaccggtgaaaaattaagctttttagtccttcaagatatgaagatggtccatttggttgttgtcaatgttcgatggagtctcatggatatgtgtgactgtgaact

SEQ ID NO: 33770 - DNA, 662 bp, Arabidopsis thaliana landsberg
aagggaaattatgttcagtactgttcgaatctttttgtactagatgctaggttctcctatgattgggcggctaattatgtttagcttaaaaccccaccacccttgaaatacctctcaagagctaaatcaatgagttatctaaatgcctcccttgataaaaataaacaaatatattttaatttctcgtgtctactactttataacagaatttgatttaagaaagatggtggcacccacagagattaaatttgaggaagaatggtccaacatacagaaaggttttaccaagctgataagaatgatagaaggagagtctgaaccaacatttaatcctcaggaaattatgatgatgatgcacacgtgcgtaggtcgtcttatgtaatgtttggagtcttatataatgtttgtaattaccacaactatttcttatgtgattcacagggctacttaccgtatatgcgcctacaagaaccctcaacagctttatgataagtatcgtgaattaattgagaattatgcaatccaaacggtgagtaccaatgtgtgaagaagacacattgttttttgacataaaacaaaaaaagagttaatataatatatttttttaatctgtggttaaggtgttgccatctttaagggaaaagcatgatgaatgtatgcct

SEQ ID NO: 33771 - DNA, 3855 bp, Arabidopsis thaliana landsberg
  unsure (1)..(3855): unsure at all n locations
aaagtaccaatgagcacaaaatcagcatcttccataccattactcattctcaagtactaagttaagcacttgagaaattcacgccactaatgaaatcggtaccacgatctaagcaccattctaattcttaagctaaagccattacaggttaactaatccagattcacaagatctcaccaaatcaaatgagctaaacactaaagcaacttacgtttcgcaagcttcgatagcttctgcgacgtttgattaatagctaaaccaatatgagaagctctcttgttgaactcggatttgttgataagatcctctcttctnnnnnnnnnnnnnnnnnnnnnnnnnnnnnnnncattattcgccgccggagccggagcaatcgatctcctcagagtctccacaattttgaagaattcgtcactccgatctcgatacgacgattgcccatgccttgccgacattattcttcctccaattccttggatctggactctctcagaagctaaaatcaagcaaaaaacgttgagattcaaacgaaaatggatgcgaaggtgtgcttaatcttagagatgaagaaagaaaaaacgaaatcggaagaaaagagctaaaaaccgatcaacgcgttggcatgatatttatcattttgtcctttgtgtttctaaaatgttacattttgaccttttactttttattgtttaaatggtaaatttagatcgggaaaaatgtcaaaatttttttgcaaactttcaaatttgggacagaaaaacatgaatttttaaaatgttaataaaattttaaattttggtttgactttataataaaatagtaagtttcgttgattgaatcattataggcatatcgataaatttccgttaacaaaaagacgacagagttaatttttcgttacgtttgggaaataaataaatcttatatacatatatgatgtcattaaagagtaaaaccatcacaacgtaggatatcagaatgcttataatgtatctttctaaatacatataaggtatcgttctaaacccaaacgttacggaaaattccgtaatgtcgccaaacgagaatccaagtaagattcctcttcatgtctttgatgtatttgtccttttagaaattgatcaaggtatataagtaccttcggactcttaggtttatcgagttgggtgacatttctcggttcatgcagagacatgacgcgttaaaggctctaaacctttttcggagaaaagaaggaagatgagacaatcaggataagtagcccacttctccaagaatggattgtaagtgatccaaacttatatatttctcacaagttttaggtgataacgtattctctatgattaaaaatgtttggtacgtataagcttgaagaggaaggcttcctaatcgagttatgattaaagaagataagttcaagagaagataagctcaaataatattaggtacatgcgttaaagcaagagaaacacctcttaatatggcaatgaaaaacatgggatgaatccgaggcggagactgcatgccgcaaaaacaatattccaaaatgttgcggatctggctcgtcgtggtaacggtcaacctcgtcgtgggaatcgtgttggcgctactattccttccaagctcgtgcttatatatatataaataaaataaaccttcgctatgttcactttttaaaagggtttgaactatctatacatacttttctatatataccaactataatcataagtccacgcattcatagcacatttttagtattgaaacgtgaaattttttaatattaggtaatagaatttatgaagtcttttaaattataatctagttaaactttcaaaattcaaattgaatttaagataagagtaactaatttattcaatttgttctaaatcaccaatctaaacttttctgatgcaatttcgtttttagtgactacacatctttcaatatttaataattactacgagaatttaaataattaagaaaaaacagattgataaaatataagcaaaaatcaaacaaaaaataagcaaaacataagtaatatattttttaaactcagaaagaataaatttgcggattcaaagttgacattctaaacaaatagaaacacaaatatataaggccataattttgtgtttggcataagttactacattaagctaataaattaatttcatatcaaaataacttaataatctacattggtttcttatagaattctgaaactgaagttgttgaacaagcggaggtggcaaaaactgtgttccttacctctaggaacaggcctcggtatccaccaaaggaggaaatcggatttcgaaagccgagagccgtgtggtggattcttgtgatcgctttggaagtgatcttcattgttggccccgttgtagtgacggcttgtgcggcaagcatctcaagttttcggcgtaagaccttgtggagctttcccatatgggaattggcactgacatgcgggataaccgtagcttcgaggctcatcgcttgctacttggtgaggatcatcgaagtggtgataaggtggatcttcagatccatgcagctgacggtttatgttctccatggccttcaacacgcggcatgggtgtggatgactatggtgtttatcatcacaccttggtttattatcctctcgaataaggcgacaaaggagcaaaaggtggtgcttctcgtgttgctccaggtcatcacggcggttctgataatctccaccttgtggttcacgaaggcaatcatcacaacgtgttgttcagcgtggttccacttgacgacctatcaagagcggatcgaggagtctcttttcagttggtacgtcatcgaagcactttcgggtcatccttggagcaaaatacgtcatctgtttgacccaaagaggacatcggcttgggacatgaagaagattatcatggaccaaaaacacattggcttaggcgtaaagatccgggatgaatccgaggcggagactgccgcaaaaacaatattccgaaagtagccaagcgagaagccaagtaagattctgcttcatgtctttgatatttttccttttagaataaatactctcggacccattattatatatgtaatataatattaattaaaatgaaatcgttaactttcgaatgaaatatcaacccgtggtgtaccgcggatcaatctctagttgataaacatattacgaaagtcctggactagaaaagtttttaactttacaatgccttgcatactataaatttttcatgtatgacagaagaaactgttgagaaactttttcatcgaatgcacttttcatccatgacttataatgtatttttcatattaaatgggatattcagaatgtacttctcatcatggataattttgtaacatacaatagttttaattaacatttaatcatctttagcatagactgttgagacacaatttagcatagaatacataaataatatttttctctttaatttgtttaacgaacaattacatcaacattcacattttcaagaataatataatctaacgggttttaataagttggtttatgtaatttaaatcccacggttagtagtagtagttttgctggtgcttcctccaatgtgcatctcctcgctgcttgaagaggatgggtcaagcccgtactcgcttgtggcaccgtattcgctacttgccccgtaatcccgactttccaatgtcactttccgaaacttcctcatctcagcaccatatgtgcccatctcatagtctgagctgccttcacctccgcttgaactctgaatcggtttcacaccatcgtctaagtcatccagcgaggcatcaccctccaacgtcctaacaatctag

SEQ ID NO: 33772 - DNA, 2898 bp, Arabidopsis thaliana landsberg
caatttctgagatcccaagaacaactggaggacaggtagattcaatattctttatcatttcaggtttttacttattcttttagttgaaaatgacttgctttaatttccattaatgattgatataacttacatagttcaataagaatacttgttaacatagtggaatctcgtctctatactttgattatttttcccatggaagcatgtgtatattgtttcaaagaaagcatgtgtctattgtattaccgtggcacgtgcatcaccctttcttaaaatttctgtgaaagtttttcttacttgatatgtcttcctgggaatcttttatggatttaaagctctatgttttgattttaacttcccattgtaattgtttccaggtttattgttattaccctttctcagctctttcagaccccccaaagttatacaacgatcttagatggaatatcacgaggccccaaggttttgaggctgtcatgcgagtcagatgcagtcaggtagtgttttgtggcagagagctctgtccaagtcaaatttcagcttgaggttatttgataaataccacttttgtcgattattgtagggtattcaagtgcaaaaatactcaggggttttctgtaagcgcattccaactgacatcaatctacctgcggtgggtgcattttacttaaaatttacgattaattgtctctgatgcgttgcatgtatgtgtttattgtgtcaataccaaaaatggatatttctcgtttttggtttcggggctacattatgttcatgttgctttgttacctaaaacgtataatattagtcaagagggaaacacatgtttttgctgcaagtttaccttggagaagcactttggtataaatttacttcttttttgacgagccttgagtgccatgtagattgactgtgacaaagctataatggtgacattaaagcatgatgacaaactacaagatggagctgaatgtggttttcaggtatactttgtactcatgtcaattggccattcgaaatagttttggcaagaccctactttgctgaaatgttggtacactgtctcattttataaaatgtttacgtttgttttatgatttttctttggttttcagtgtccccttctgtataccaccatatctggagaaagaagaattagggttcttaacttatcaatcccttgtacaaacatgctcagtaacttgttccgctcagctgacctagattccccaattggcttgtatgctgaaacaaggtaggtttctttatttagtctctgattctactgctagccatgtaatgatattagcgcaaaaaaccattcagtgtaatatataatgtatacttatgatatttttcttatgtagcggctaatgagatcccttcgaaggcacttccgttggtaaaggagcaagcaactaatgattgcatcaccatactacattcctatcgtaaattctgcgctacagttacatcaactggacaacttattctacctgaagcactcaagcttttgccattatatactctcggtatttccttgtcccttttaatccatttaaaacaagaattttacaccacttttaggttggttttctccttgtgtgcaaggcactttctatgccttgtcttgaatcaaaagctagctaattcttgccttggatttttttgggatattaatatacaataaaaaagatgtgtgtttgcattaaaagcgtttaggtactgctgtgctccttttctactaatttttgagacgttgttacatgcttgatactggtcaatggtcatatgcgagagcaagtgagacattatttttcattaagatgtatttgtttttttcacatttcattaagatgtaatttaatcctttgttccttgatttacggctactattgttgttttgtccatttttcattgcaacttgtgatctcattatttttgcttttcagccttaaccaaaggtgtggggttacgaatggacgggagaattgatgaccgatcattttggataaaccatgtgtcttcattgtccactcctttggctattccgctagtttatccaaggatgattgccgttcatgaccttgatgcaaacgtatggagctaaacttttagctcaggcattgttattacttaatttactatttctcaaaagttgtgatgattgttctttaatctatcaggataatgaagaaaacgtggttccttgttcaatcccattacaaagtgaacaccttagcgatgagggagtctattttcttgagaacggtgaagatggtttgatatatattggagaatcagtaaattcagatatcctacagaagctctttaatgttcgctcggctgctgaacttccaagtcaggtaaactgatcatcatcttagcacatggtatataaattctgtaggatctgtctgttacctgattggttgaccaagccaatgatgcttagcttacattatgtaagaaacacttttatatgtgatatttgatattgccgagttttgcctaaacttgcccgcccataccggcttccaactaaaaccatacgggattaagtggaacggaattgacctctccgattcaaatcggaccatagttcctgacctaacagatcatgaattacttgctcattccatgttacacgctcgaaaatgattgtttctacatatttacttaagttagtgaaacctgcttaaaatgatactctttgtgttttacttccttcacagtatgtgctgcaaaagtatgataatcagctatcaaagaagttcaatgacgtggtgaatgaaataaggaggcaaagaagttcttacctacggtatcaaacaaaatctcactatctatcttctttttttttgtctcctggaatgattaccgttctaaccttataaa

SEQ ID NO: 33773 - DNA, 595 bp, Arabidopsis thaliana landsberg
atggatctttctgcaaaaaggtcaactctaatcgtaaaacaaagcaggactgctcttgtccagattttcacaaaatcttacagacaaaccagaatcacaaatcactcaatagaagatgttttttacctggacagataagtatgggaagaaccacaaaaaggaggggcacccaattgctcgactctctttaagaaaatgagaaaactggtcaatagatcctttcaacgttggagtctctgggatcggcataggcactgtgtaagaaatgaagaacattatgattggcttttaacttcatcaacaccatacaagaatatacagaaccaatcacatagtttgcacaaccatagagcgatgtctgtcaattattgtttcacatgtaaacgagttccatgactaacattgaaacaactaaacctagtagaaaggtcatgactttggtatcaataaagaaactgcaaattataaaaactacttataaagtagagaaataatactaacacttcggtagcagctctgaaatggtcttcaatttcttgagttgaagtatgagtaaaggcaataaagctattctaacaccaacctgggaagatgc

SEQ ID NO: 33774 - DNA, 580 bp, Arabidopsis thaliana landsberg
actttgtccgagtattaccaatcattagcacagacttaccatatgatccagtctcatcccgttttattacaatcaacagttggcgaccaagagccctcatgtgtatatcgatacgagcttcctcaatatgttcagggggacaagacatgaacggaatagcaggttgaggcttaaattcctggcacaaagaattaaaacaaaaaaaagagttagtaaattttttggtatgaaattgtgacaagtatcaataagcatgagacaagacagaccattcctttggtgacacacatcccaatcaactgtttgcagaactcttggggtaaaccacggtcaatccgagtagagaaacttacgcaagtccaagaagtgacttttgctccattaaccattttctggaccatatcacagccaaaaggaggtaagagccccaaaatttggtaacacacattaaaccacaatagaagcattaaacacaaatgttcatcactaactacttcttccgcatccacacgcaaagcagtaaagtatagtataatttatcattataagagaaatagaagcatatttcgttttaagtttc

SEQ ID NO: 33775 - DNA, 578 bp, Arabidopsis thaliana landsberg
  unsure (1)..(578): unsure at all n locations
aaacttcttaaatataaacaattagtcaatagtaattttaaatattaactactaagatttgttaacttcttaatataccatgcatcatataccattatttgctaaatcttcaagaaatgttttaacatatctatttttccaaaatttaaattttaatgagaagaaagattttacaaagaaatgagaattgttttagtagtaattttctcaaaacaaatttcaaaaaagaataaagcgcacattagaacaatggataatacttatactgaggtatactatagtttcataaaaaaatacattagttgtagaagaaaaacaaattcctgtaaaaaaataataaatatatgttatagcatggaaaactatgaattgtagtcgggataaatgatgatcatgtcatgcaccaaaccaaacttttttgtttttcgctgcttaaatatgaaagttatgtagtttgaaagcaatgcgatttaagaaaatttgttagcaagtaatatgtttcaaaagccataacattatcttctatggtcaatttaaaaacaatttgtaactattngaaaaataaaattgtaaaatat

SEQ ID NO: 33776 - DNA, 1040 bp, Arabidopsis thaliana landsberg
taataatattttaaataaggcatgggataaaaagaaatttgttttaatattttcttaccaaaacctcaacataatatagtaaaaagccaataatacaagactttgtaccgtcagtttttttatgatttataagacctagatttataatataattcaataccactgttatttactatagctttgattgataatttatttgggggagaaactttgacaagagaattggcacgaggttatgaagatttttggagaaaaaacattgacaagacgaaaaagttgttgctaagatacagcttccaaaatgcgatttatgccatcagaaatgagcgaaacaaaaaaaaaagacatggagagcaaacttcccatctggagatgctagcaaagataatagataaacatgtttgaaaccgtctaagtaccatgaagtgtgttagagtagaaatgcatacaagcaaaatttaagtctggtttgcgtctatgcactagtgaaagaagttgtgtctcatttaaaatgtttcaagtaattggtaattatttgtaaaatgtgtatttttttgaatataatttaacactaaattcaaaaaagtaaaaaataatttggggtatacctcttagcatcttatagtgataagttttttttcttaacaatatgcattatacagatttaaattgatgtagtagcacgaatgacttcattagtaaaaacctaaaaactacttcattatagaggttgaattcctcagtgctgtataatgttattatttacacactatcattaggtttgctgttcagacttgatttgattcgaatgcgagttgtctcggtttgtggatccaacagtgtcttgattgttaaagaaaactcattatgcttataggtcaaccggcagagctttggcccacctcgaataagatcattataataataataccggaatctgctaattaattagaattcgtaatgcatctttgattccttatatctcttttactgttagatcatctaaaacatgccgatgatcagatcttcccataacattg

SEQ ID NO: 33777 - DNA, 7258 bp, Arabidopsis thaliana landsberg
attattagcctattccgggtttttcgatctttggtatgcttttggtttgatttggttcaaccgtccaattaagatttttctctttttaaaccgtgttataagaagtacttgaccggaaacaaaaaaaaaatcctaagagaaattgtcattacacaagtcgcggttaagcaccctaaaaagaagacacatatcttacgactaatgactacaacgaatttagactctggactaatgcatatccttatattgcttgtttttttatacaattatgtttgttgaaagcctgttaattgaatgtgattctacttagatatcacttaataaaatgtagtctagttggtgttttagatgagaaattgtagggtaattataacaaatctatgcagtatcagctcactgctcgtcctacatcatctttgcaggcttcaggatcaaggtctgtctccaaagaatatcttgcaactaagaaaggcactggcgcagtatttcgaatcaaattcattcaggctaggaaggaatgggtcggagttagctgagccggtttctgtcgtgataccatctaaaagctcgagaaaccagcacgagagttatcaattagcgatgtggaaactaagggatcatgtctgtctctctccctcttcatcctcctctttctatctttcagacttgtgaattatccatacatgtgcacattcatccacatgaacacgctcaagaactagtgttcgggtttatcacaggttttgtcttctaaatctacgtccttttcaagaccagtctccgaacgcgaatggctgaaaaactcagcaaagatatgggagatggtgaagaattctccgatcattgcggagtaaggtaggacgcttcaaagttccggtatgtttcggaggtagaagaccttaacttatagtcagtgtcttcatattgtagacttgctcatttgttggtcaaaccagacttgcctttactgaattcgttgaacttgagatttcaagttcttaaagaatagtgtcatgaatatttttaattacagcaaaatctctctgttgcttacattctccctctgaatacagcaaattgcgtttaagttttctcttcgaaagatgaagaaatcattcagacttgaggtggtaaaatcaaaaaatcataaggcattatgtaaccttaatttaccgaattgtaacatgaagcatttcgtcgaacatcttcaatgcattatggtaacagaattatatcaatcgatttctgatattccacaaattctgaattctggaacaaacaaaataatccaatctacggatttgtgttaagagagacactctctctagatgttccttacatacttatctatcatcacttgtcgaattcccaaatgactcctccatcttctttgacttttttgttgatccaagcttcaataaccataccagcaccgatcccaccaaggatgaaacttccatagtaggcaagagcccttggccatggctttcgcgggaggaagtaagcttcgtacttgtcttcaagtcccctcggtatttgtttcctcgctctcgtcaccgttttcacaccacttgttgttggcttcttcgtcttctcattctcagttccccactcttctcctttccatggatcctttgctccctcacttgccattttgaatcgcccaacgaattgccgtaagaaatctcaatttcagtttcaactggatcaaagtggtgatcttagtctttgatgatggtcaattagggcagtgtcaccacctcttcagaaattttatcaaaaaatgaaaatttgacatatattgggcccaataaaagatcctttaagcccactaaagctgatcttagcccaataagtttagtttgtggaaggaaaaagtctcgctcacatattcgtagacgcatctcgtctgaacaaaatctgagaatcttcatcgatcgcgaaataaacacactggtcaacaaaatctggttcgaatctattttatcttctcgtttctttaaatcaactattgctgatcatatttctttttttctggctaaattcttaaactgatggagtgattgtagatttcagcaataattaggaatggaatcagagttaatatttcatgaaggtggatgtcattgtgggaaaatcaaatggagagttaaagcagcaagaagtgtgattgcttggagctgcaactgctcagattgttcaatgagaggcaatgttcactttattgttccttcaagcaactttgagtttcttgatgactcaaaggacttcattactacttacacttttgggactcacacggccaaacataccttctgcaaggtttgtgggatcacatcgttttatatcccgaggtctaaccctgatggagtcgctgtcacagttaagtgtgtcaagtcggggacactggctcacatcgaggtcaaaagctatgatggtcagaactgggaaatgtcgcacaaaaagactggtattgcctcgttttccaaggagtgatatgacaagatcaactcaagatggtaatggctaagaaaggaaaaaaaagaagaagattctgaagcagtcatagatatctcacctttagaatcacagggagaaacaatttggaaataagaaagcttttcctgcctaaacccatttgagaataatgctcagggttttgagtctttaagtcttgttcaaatctacacctgcagatacctgtgttgatgataagtttttatgatatcatttcttcttgttacctgcatcggttccagctagtttttttctctgttgatgctctgcgactttgtaatcaatgacctctctgaaaaggtttgcgtccaataagcagtttgcgcttccatacacagcagcttgaacgcttgccatcaatttcgcgatttctctacccgaaaacccttttgttttggcggcagcttctttcaggagatcctcagtaacgccttttatctcaattgtctgctgctcttttttgaaaaggctttggagcaaacccggcttttttagattcgtcttagatatgtacttctctaggtagaggtttagaagcttgaagcgctcttcttctccaggcaaggggaattcaagagtctcatcgatacggtcagccactgctgagtctagatcaccaggtctgtttgtggcaagcgctaggactatgtctttggactggtcacccgtacggaagaggagggcatttagtgcactcctttgggcttcgctcatgtatgttttgttccgcctgtcaaatttgcaatcaaatcaacacattaataactcaaacgccggagttaagtttaattatcatcagcatctgatttgcgacttactcgcacagaaatgcatcggcttcatcgatgaagagcaacaagcctctcttagattttttggaccagtcaaacagttggtgtatctttgttacagcctgagctccaagtggagcaacatctccacccgtcatcaatgcataatctagaccctgaatggtaacagatcaaagtacgtaagtgattattgaagtaacaagcctgagactctacaattttaatgcccatgtataacctagaactaagatcttgatctgaaaaatgcattactcttcatacatgatataataactgtaagcatcagaaatgtagggaatacatacagatcttcgagccagctctcgggcagccattgtcttccctgttcctggtggaccgtagaaaagtatatttcggaaaggtgcttggtgggcttttgtgttggcagttgcattagctagctgttcgattctcttttcaagagcagggcgcaagataacatcaccaaacccttttccagttttggaagtagactccttaccaccaccccgcaatgtggacaagacacgagaagcagaaccagaccaagggtactttcctctcgatgattctctaattagagaaggttgtcctaatattctatctacgtagctccagataaccttggcaccttctctgcaacaagcaatctataagatgactgagttcctcaacctttaacgacaagaactcatgagtggcactttttctcaaccatttttagtctttacctcgttgtgtagatcccagctgcaagagcggttagacctccaacagcaacaattagcttattttgatctgttagaatggtacgcaacccccctaggaaaacgggtaaagagtcaatcatttatttaaaagtgtagtcatagaagtatttaagagagtcacatgcctattataaatacttctagactctaattactaccagggtaaactgccacaggaaagcttctacaatgaatgaaaaaaaacgatagagagatactgtttatcactaatgtctgacctccaatatgatcgaaggtagtattgatggcagaaacccatttctctctttctgcatttgcacgatcaacaagcattctcctgttgacatcctcagaaagctttgattcacgagctctcccttcagcttctgccatagctttgaccctgattgtctcacgttcaatctcagctttctccctctctgtctgtcgtctctgggcttgaatctcttcctcagtagctcgtcgagctacttcccgcctaattgctgattcttcttgcattttcacaagttcttggtttcttgtcctctgggcttcattctcagcctgtaacaagatacacagcataagttgttggagagaataaaatttcccaatgttaaataaataaataaaaagtatatgtagaatcgcatgcctgcatcctttttcttgctaactcatcttcatagcgggccatctgtgattttgtttgtgcttggtgctgagcaagtttcttctgttcctcatatatcaccctttgcctctcctgcgaaatggaaaatgtcaggaacataactttacaaaacaagaatcttcaaagtaaaataatgaatgatgcaacaaaaatgtaacagcaacggatatagttacaatgtcgctgcaaagttgattctggtaggttctacgaaagaacacctatacgatataagtaactaaaacacaaagatagatagctttaaactcacagcttcagcttgggattgcatagctttaaactcctgcgccttagcggtaaactcagcctgcctcgtctcttctcgagtcttaatactttcaaatacctatcagaaaccaaatcatcaatcgtgaggccaagcatgactgataaacacaggaaaaaaaaattgacatccatcccagaatactactagagaaaacttaatagctcgaacttatcttccattggctacaccatacacaactcttatctacttgagaatctctagtcggaagtatctatgtatagcttctataaataacagaattgggttagttcttaagacctttttggcatgagctgagttgttgatccctttcaaggcctttgctcctcgctccaacgcttccggatcaaacccagctgaagttgttctcggattattgttccgaatccgaggaggagcatcagattcttcgccagcaacagacggttctttcccagattccgacgccggcggagtagaaccttgctgctgaggaatcgaagcagacggagaagtggagaagccagagaaagtgaaaggtccatctgcagcagcgaatttcgacggcgcgagagaagcggaggcagctagggctgagatcacaccaatcgcaattttctgagccatttgtctcctcgaaagggaatgagaaatgaagagagaatagactagggttcttaccgattttaaggggattttaaaaattggtgtaaagaggatttaagaggacgaaattggcttgatgaacaagaaattcgaatccatagaaatggaggcagagaaagttgccaaaggttttagtagggtttctctgcgaaaggaaaggaaaacaaaagactttagatcttgggtcggttttacccaattgtctggatacttgacccgaatacccgactcatttgatagacgttttaaataattttgtttcttgtttttaacaaaagttataatttcattttagaaaaataagttatcattttataaagttcaaatttttttagtgtataatttgtgtgatttatttttaaatataatattgttttattaatatataccataatagatagtatcatgtaaaacttgtaagcataagtttattatttatatctaaccaggccgagtacaatgaaagggttgtcagacaaataattttggaggaaagtctctaaagaaatattataaaggaaatttaaaaactaaactcataatttaactgattgttacaataaggttcatcgttttttttcttttacatgtatatagtaaatataaactataacaagagagtactattacacacaatgacacaacgtaactaagtgttatatgtggtatgtgcagtattatacttcacatgccgatcaaactcgctaataatccaaacaaaggaataacgatcgaagtcagcattttcacgtcatggatgctaggagaatctgattttggctggctaatcggactgctgactggaggaggagcggtaagagtatgatcagcaggacgagaactattttgatcactattgttatgactattttggtcactattgttgtgactgctagggcaagaaatgaagggtaatgtgtgattatttcgaggagaatcgtcgtcgacagtacttggagattgtagtataccgtcgattccatgacatttgatagagcctaagctacatatgttgcggcttataatcttgacgttattgagaaagtagtttgatcttccaccattggagatctcgagggtgtaatgtggtaaagaggaaggaacaatggagccattggggatgagattaaggtgctcgaaaagaagagaagaagggattgagtggcgaagcaagaactcggtaaccgaatcttgttgattaataatgtttgatgtagaaagggttttgtcctttggcatcaagaatgtgacattggctaagaatcgaggatttacggatggtaacatgttgatgagcatcacaaaagagaagtaatttgctttctccatttcttcgatggcgatagaaagttcatggttgttaggcacatgaggactcttttgggctcttgttgatgatgttacgatgatgactaacatgcagaaggttatcacatgagtttgaatagctctcatttttgtaacaagaaactttcttgttcttttttgggttttttggagatag

SEQ ID NO: 33778 - DNA, 1405 bp, Arabidopsis thaliana landsberg
  unsure (1)..(1405): unsure at all n locations
taaacaccaaccatgtgtagataccaacgtacctggcttattgaatgtggaagaggagaggatacatgacagctgccgtcgagattcccctgtgaacatgattactgttaaagtgtatctatgtctctcaagttattgcacgtgggaatnnnnnnnnnnnnnnnnnnnnnnnnnnnnctgctgtctgcatgctcatcatgactaaagacaagatccttgagttcctcaagaacatgatccttatctatttgtttggggttctgtacgtctggatggttctcagagaaaccaggatgataagcagcagcagaggagtcagattctccgccagaactgagtgacacttccaagctacccactggttcattctcagaaggcttaacctcatcactgttctctttcttttcacttgatgaaatcaagcgaaagatctgtcttgtgtttggtgtattcatgggtggtttaggtttcacagcaaaagatgttagcagacatgtcaacttccttgtttggaaatgatcaagctcaaaccaaaaatggtgagaactgtagtaattatctgcaattgcaggtttgaatttttcctcggaaagtggttcacactgtaacctaacactgattggaacctgcgaaaccgtaaaagaccactgcttatttcatgaaatttatactgcttatggaaaaggttggcaagggataatgcctcctgaaaaccatatgtaatccaatgaactcatagaaacacatattcatgaaagtgatcaaatgtcactctggtacctgtgcaggatatgaggttctctcagaaccatcagaggtccagccataagggtcaatattgagctgaccacaaccagcagcctcaaaaatgccatgaagtgtacgatcagaatagttgaaaagaaacaatggcaaaccaatatcaatcttctgcacgtatggatagtggttagagggtaaacctgtcaaaaccatcagcggattcaagaagcatatacatacaaacattgcgaaatagagtttagaaacaaaaaaatgcaacagcatacgacaatgagcaagcaaagaatcaaagtagacagcaaacaaacagctacattcagcagaagcaaaaacaagcatgggaaaagaataagctattcaagaagactcactaaacaactgtttcgacatacattctttgatggtattcttagtgcagccaaagacaacaccacctagttgacttttcgtcaggtttctgaaggaaaactttcccctcctttgagccatcctgacattgattgggtaaaaggaaagaatatcaaaggatttacagtgtaacaacaaatctagtcctctcaatgtttaaaacgggtcttagtgctcaagcatgtaatcaagacaagcacagtctccagatttt

SEQ ID NO: 33779 - DNA, 2518 bp, Arabidopsis thaliana landsberg
  unsure (1)..(2518): unsure at all n locations
ccagaaaattaaataaacatatgtgttgaaatcccatggttggataaaccatatatgatgcatgtgtttactagacacatccacacaagtctagtgttacataggataagctatgaaacacgataaatccttcatgataaatcagcataataacaaagataagagaaatatagcaaacttacaatatgaagttcaagaggagactccgaccgtagagactcatccggcagagagttttctatcatacattccggttctctaacttcaggacataaagcaggaaccaagtcttgaacttctgctagcactggaggtggtgaaggttgcctaatgagattgttctcattaacgctttctggctcttcgaaagaaatcatggaagaaagctcttcagtgtaatttttctggattttttcattagatgcaacactgggttccacaattggcttttcaggttcatcgttactgccattcgttatcattggtttgctgtccacaagttgttggaagctgttttccataaatagatataatacataggcgtgagatagtcgagcaaaagaagttggagggagagagtggaatatgtaagaaataaagcgcataatattgagatgcagcataaaaatatacattttgcatcaaagcagctagatgatctaaccttgggattacaacaggcgaaaaatctatattgcttggatattgaacctggataatatgacgaaaagagcatcagcttagtgtgaagaagtgggtaataaagacaaaaaaaaacgaagcatcctatgatacctttgtatcatactttggtggctgccactgtgcagagagtccacctggacccaagatagaatgcttggaaagggtttcttcatttggtcggaagttcaccgacctagataaatcatgcagttaacaaaatctatgaggcaggaccatgggacaagaaacacagtgaaagatacaacgaaggtctttcattgaggaatggacgatctttcatgaaataaaactaaagacatacatctttcggaaacgctcttcaagtggtgcagcgttcaaaaattgctgacccctggaacccatgtagccagaattatgtccaggaggatttcttacctatgtcgaacaaaaaaaaacatggaaaaggtacagggtatgcttatctactgcagcttgaaagtaatatcataatttcatctaccaattaatgaaacaagagcggagaacaatgcaaactgatttcaaatatgtacgcatggcatatgggacaaacaagagttaagcattaggcacacctttgcatgatcatagctattaaatgacggtttcacggcagaagaccagcctagggaaccatttgctggatgagcttgaacgttatatcgaggtttgagcttgggatacagttcatcaatcctttgctgtacaactggtttcaacttctccagctccgtcaagacatctagtagtctctagaacagataaaagctcacatcaaactactgactgacagacagacaaaaaaaagatcataaggatattatgttcacttaccattctcaaatactctttattgctttttagagatgttctgtaatctcgatgggacggtatagtctcgagagccaagctagagaaaaccaaaaacaaagctaatttcagaaaaagcaaaaggatctaactaattctctctacagagagtatttgagttggcagctttttgaccttgaaaaccgcagaagcatgacatataaatcaataacattcttctctgcccgaaatatgttggcctacaaaacattatgcagatgattaggaaatttaaccaagtgattttagtcttaaagggatcactttcaaggaaacaaaaggccaacaactaaatatcaagttagagacatttgggaagattttgcacggcatacccaatttgatgcgaccaccatgatcactgcaaacttcaaatcgcagctgatagcgaagactaagggaagaacatattccaatttcacagacacaacaatcaatatcactcaacaacaatcaaacttaaacaaaatggtgcaaacgtgatgatactcgaaaaattgaactctggttaggaaacaataatttcatcaaagagagatataaatagttggagaggatcatttcacaataattaggccaaacacgaatctcctaaacaaagatactttgataaatcaaaattcaaagtcaagtatgaagaagagacctgtttgaggatattatcagcgatcctgaagtaaaatttgannnnnnnnnnnnnnnnnnnnnnnnnnntccgagcactggtagcaatatcgatggtctcaaaagacgaccccatagttgctccgatcaaaagcaacttttctaactaatggaagagcatcaaattgaagagcagatctcggagctatacgtcaatcgatgatggaattttcaaggggtggaggaaacctccggttcaaagagacggcgaggggtgagaagaggcacgcgataataa

SEQ ID NO: 33780 - DNA, 515 bp, Arabidopsis thaliana landsberg
ttccgcccgcatcattgatggcagggaacgggggattccgtcgatcatgctggccgggcccggcgcccggtgcggtccgttcgtcattgaactgtgctcccgcccaagaagcaacacagggctagtcaccaccctgtcacctagtagaaccggatcgtacatcctttttgccggaatagtaaggatttaacgagtccgaacgccccgtggttcctgccgccccgccccgcccggcgcgccggtggctgccctgccgcgcgcgaaccggtcaccctctcctccccggcggtccggcctcgttactcaccgactgataaaggggccggccgtgttttgcgcaaagtgataaaaggctcgcgcgagtccggcctgtttagcactcactgataaacccggaactgggcttctagcattcactgataaagtctcttccgggcccgggatttctcatgatttctgctcttcggccgtttgccggcaggtttcgcgcaggtaacgtactcgtcagtagcaac

SEQ ID NO: 33781 - DNA, 774 bp, Arabidopsis thaliana landsberg
aatgaaataaaaaaaataaagatatataaaaaaatacaaaaaatttgttagaaacataagataaataagaccataaaaagatgaataaatatagaaacctcaaaaaagattaaaagagttaagcagggtacatcatagaagatctaggttccggtgtcaaccaatgggccattaaaaaatacggtgaagagtcaacacctgtagtaggaacccaaatcgaagcatttaagggtcaccacaagtggccttggacaatcaccagacggcaatttgccaacaatactacacgctctggctcaagtcataaccttcacagttcttccactagaccttgcatttaacgaccctgtgtttcatggctttgtgtgcacatttgcgttttgcataatgtttagcaagcaattccatgcttgggcacatgaaaccaatatcaagcttccacctctcgtggtggcgttgtaggacctggggttgcttgtttcatggagacatcacgcggaacatcatcgagcaccatataacaacaattagtgcatcgtgagtgggcatggaacaatggtttcgatgagagcaatgtctctgaggcattggagatggtgttttatatttcgagcttggggtgagacctcagtcatggcgtgaaccaaacaacagaagaaacagagatctatctccaagaaaccaagcataattatctttttaacaaggtggtctctgaaacaaacaattcttgatacatatgcactagaatttaagtaatatactaaacaaatt

SEQ ID NO: 33782 - DNA, 962 bp, Arabidopsis thaliana landsberg
gaaggttctcaggtatattctttatgctcttaattttctgaaaactcatagatgaaaacatttttaggaaaaagagagatggcaatcttttggcttcttttttgtagatgtaacacatgatgtcatacagcgttttatgatctattcaaaactgtttcgacattcttctgataaatttacattcttacattatttcaggttttgggatatgatgcaaggaatgtcaaagccctatacagaaggggtcaagcttacagagatttgggcttgtttgaagtgagttcttctgttgcttatggaactttcttgagattccttgtcgatatatatgtttgtactgtagatatgtcctgactatatgtttgctcaatgctcattcactctcttaaactataaggatgccgtctctgatctaagcaaggcccatgaagtttccccagaagatgagacaattgccgatgtgctaaggtatggatttttatattcattactggtaatgtcatacttttcagttctgcttatctcagaggttttgatgttaacattcacttaatagcttttgacgtgaagtattatcctttctgaggcatcacatgtttagaatagattgcactgtggaggagcctggcaaggcatcaagaggtataatattattcgttatgatttattccaaaggattcagtgtgttatgtcagaccagacgtttctttactacaccaatcatacgcttcgtccatgaatatggaaacgacctgacaaatgtcatgttgtttggtcatcaggcgtggtgattgtaggcataactgaagttaataatgttacttccggagagaataaacaaccgtctaaagaggctaatggtcatgctcagggcgtaaagacttatgctaatggatagcaagctcccatagataatccaaaagcaatcaggtagggcacctttccaatcattagtgtttgat

SEQ ID NO: 33783 - DNA, 2232 bp, Arabidopsis thaliana landsberg
ttcatgataaaacaaggatatgtttggaaggtcacatacatgatgtcatatattcagattaacagtggtgctggtgcacatacttgaccctttcacaattcacatggtgactgtaacttttggaactagtaaaaaattccaaatacttaaatggtgtcggacgagagagcgagtctctctcacattgaggcctgataaaaaaggttaaattatatggatttggatgcacataggacccgacagcgacaaaccgagaaaattgacctttttccccatttctctttaattaaattgttttttacttttcgagtagatgaggttactattaactacgttttctgccgtccaaatagttttggccagagtcttaagcctaaaatgctagttaatgatcatataaaactttattctatctcacaaatatgattcatacataattaagaatatctacttattaaaaatatttgaagactaaaaacactgcataagaaagaaaaacaaattggtaaacaagaagaaaaataataagataaaaaaaagttaacacaaactttcatgtaagaaggagatcacgtgggctgacatgcaaattcaatgtaataaaagtataactacttatacagttctatgtacgcccccaactaactatttctctttttggttgaggtttggttgtacgttttttactataagtatcaaaaaatgtcatttaaaaaaatgtcttgaatttaatacgaagaattcaaaaaaaattctagccattttaaaacacataaagtacatatttatatacgagattggttattgtcatgggatcctaaaaacataggattcactgtgcaagtggcattctcgcaagtctttagtttcacacggttaaacgaatttaaaaacagcattagcaattaaaatattcatgcaaaattttgttatcaaactaatccatgtgtgttacaacaatagctcttatgactggtttagttactgcattaatattggggagattatttcaattgttttcaaattattatttagtatttacaattactttctacgttattgctcaactcgtaaacaattcactttacaaaaaaatcaaactcccacttcagatgtgtacaaagaagacagaatgacaatgacatgagataagtttctactgcttgcatagtagcattttcagaatcgaataattaaatgctaacaattatttcatgttttagatgtgatggtagaaatgaaaaaaaggcaaagaaacaatacctaacaagtaacaactgttctaccatttgtattatactgtctactgatagatatatgtccaatggttttgtccctacatataaaaatatgtctaaagcatcattgttaagtgaatcgattcaaagcctctcacaaaagatatcatcaatacagagaaatgctccatactgtttttgttttctccagtctgtttacaaatactacaaagagtccaaaaacgatttatctattcaaggcttctgacgaccttgagacggtgacgttttaaccacatgtctcacagacaagagtatcaatcaagattcctattcccacaacttcagtaaagcggtactgttacaatccatcaagggctcttaccataccaagagcaagtgaatcaaaactgactctattgttgcaggtgcatttaaattttgaccaatacagcacaacaaaatctaaagaggggataaaactagttctctgaccagatagtaatacatcaaaaccggaaccatcaatgcatcggaattgtgatcttaggaaaaccatttagaagaggtatgaaagtaccatgagagtgctgtatcagtatcatcttcctcttgatagtgcctcctctaactcctcaaccgatgaaggaaacaattctatgtaacggctgccaagcgtcttcctatccttaaccattgcagctcgtgaatcttctgcattcctaaactccacaaaagcttccccagtgggtctcccttcaccattaacagtaacatgaacaaagtcttcagacagctcgaaatctttgaagaagtcaagtatgtcttcctttcctgctgagaacggtaatcctctaagtctcaagatacctgtatgttcaatatcctctttcccatcatcactcgatctagccctctgcacgtgtctgcgaggtgaacttccaccacttattcgacctccaccgccaccacctccacctccacctccacttcc

SEQ ID NO: 33784 - DNA, 1018 bp, Arabidopsis thaliana landsberg
  unsure (1)..(1018): unsure at all n locations
cacaggttaaaaaatggctttattcttgtttttctcaaacattaagatactttttaaatacaatcagccgaaaaaaatacaagaaaaacaattatatatataaatcctcgaagagaattacaaaatccttttagcagacaacagtagctgctccggaagacacagggcttgcaacatcaagcatcatgggattccacttcatcaccactttatcaccgcatcttccatctgatgaaactccggcaaattgcatctgatctgcttcaacagaagacggatttggtacctccaatgtcaacttcttctcagctacagacttgagtctccgcctctctgctcttgacccaatcacctgtcccaaaactgatgctgctatggtgaataccatagctgttttaggcatcaacactgactttctcagtattcctatgaatgnnnnnnnnnnnnnnnnnnnnnnnnnncaagatgccgaaaacttttcagtgtgctctctccagacccctaaaggcacatttaacgccatgcccagcatcccgatcactagtactttagctggtaaaggttgtggacggaggttcttggcgaaaggtgtttttgatatcgctgctcgagctgtgactattgcttgagggcatttaaatttcatgcctggagggggttgcaggatctttgccacaagtggtgccacaccacttacagctcgatatgattttgctattgggcagtttcctgttttaagccattcgtcgcccatggcttcgtggtttcctccctgaaagagaaacaacaattaagcggtgctctaagagaaaagaaatatcatgattttctatctcataagccaacacattgcatactacttaagcaatcttagaagcttaactatttccttagacacatttctttacctatgcacatcagttttaaaagataaatgttgagcaagaaactcataaaacctttaccttatttttggatgaatctgactcttcttttgaatttaaacatgtcagaaaat

SEQ ID NO: 33785 - DNA, 567 bp, Arabidopsis thaliana landsberg
  unsure (1)..(567): unsure at all n locations
tggcctttacgcacaaatatggcgcgtggaagtaagttttccgacgagggtcatttacttaattcttaaactctacagatggatgtttacgtcccaaaccgacagagccacgcgttcctctctcagcttctttcttttgcttccatcataactcacatgcctcttttcacctttttccttgtcctaatttcactttcaagttaagtatcatcacacttattcattcagtcattcacacattatttcctctcaccaaaattacataattcttgtgaacattggcttaaaaccaaaaaagaaataaagaaagagtaataagaggaagtagaagccaaggccgagccgagtcgagtcgagaggtgaaaacatgcaaagtcagcaacaattataaaatttggtgtggtccccataaccagcctggttcgaaaagtcggaaaacccaaaactacacaacatagacaacacaaccaaactcatctctttgtctttaacacttncacttgccatcgccgacactttaagaaaaattaaagaaaagaaagtacactctctcaccaaacaaaataa

SEQ ID NO: 33786 - DNA, 719 bp, Arabidopsis thaliana landsberg
tttgcaaatgacaaggcactcagtgcctctgagcatgaagcaccgtcaagggcgcgttgcacacacaggacggtccatgctcgacctcctatcagccgcatgacatggaaacaaaagtcatgatacatgttattcatgaatgtggccatcatacataaagttcactaaccgatacaggtttggagaccctgtatacctagcagatcctgtatggtccatgagaactctgcgaagcaccagagactctcacatctccacaagatgagagcgacctgattctatgttgagctgctcttaagctgctgcactgatctacaaagcgatctactatatcacttcctgccagatccaccaaatgaagattaccgtatagcacggaaccggtctttaaatctttaccgcgaacgtgaacagtgacaatgctgcataagaaaacatatagattcagtgtaaaaacctggagggctgttgaaaacacatatttgttttggttctagaggatgaatatgaaggagaacctatgtgaacgactacttctttcattcaaggcagtagaaccaacggctcgattctgtagtccaatgtccatcaatgtaatcacatctgaagttgatgtcacaggatacatgcttgcgtcaggcacagccaggccattttggtgagttgtagaaaggatccctagtgttgtgtgaaggtcaagaaaacaaaaaggaatgggt

SEQ ID NO: 33787 - DNA, 566 bp, Arabidopsis thaliana landsberg
tgtcaccattatcctgaaaccagattgcatgtcaatagtggtcacaacagccatagctctaaagagattgttgatatagagatatctcctaagaagccaaaattagcagataagacaaatggtgagtaagtaacttttgctgatacctcgtttagtttttcccaaaccaaatcaggctgattcaggtaaccttgatctgtagccaaaagataaagttcaccttcatactgaaaatatgacagcaacaagaagaatttagttgggattaacctgttgcaattcaaagatggaaataaccgcaaactaaacaaaccttgaacatggtgcagaaatgattgttccggaaaaaaacacagagttcacgttctttgaggccttcttgcaagcgaaagagtctgtaagatatgatcaataatcaatgtaagataatacatgagcagtcaatttaaaatataacttcctaactatgaataagatcacgcacccacaaaaggctaaatcgacttgcactattctttataaagttcctgattaggtcacctggaaaaactcatgaacacctattt

SEQ ID NO: 33788 - DNA, 1472 bp, Arabidopsis thaliana landsberg
ggagttcagagggatgccttcaagacgagcgtaggaaaattctttttgaccacaaggagtcgcatcaaaaggatcgcatgatcacttgattaaataaagtagcagttgaacaaaaggggccatgtaagcggttacaatgtgattgtacgtgcaccggagtaatggatctaagatatcaatgtgacagtaggtgaggtatatgaccaaggcaacccaatgtgtgtctccccaattcataggggtgtgtaaattgtatcaatatctgcatactagacagtctttttagtgcgatcaccaactgtaccctcaacgcagctttgtaaaagaggatcccaaagataagcctctggattagttgcttgtaaaaaccgagagtactcggacgttagaagctttgtaagcaagctgtccaaaacgacaatcttgtgtgtagaaaggtaaaaaccctgtgacatccatatgctacatgaatagtaaatgttcagtgtatggtaaaagtttactttactcagtccaacagagagaaggaaaaataacagaataaaccaaaggcattcagagaagttagaaatagtgttcaagatatagcctaataacatatagatgcagtagtgtaacagaaactcacaattctgccaaccaaggtgtagagggtgtaaatgtctgaaagaaaattgacggttgaggaacattgaaaaaggatatttagttcaaacattacgtacgtaatattatttaccgcatcagtattctcaacggcaagtatcgtagaggatacgacagacattacgtacgtaatattatttaccgcttcagtattcttaaaggcaagtatgctatatggttgaaacgtcttcagctacaatagaatatctatgtcccttaccaaaaattatgagacatcagcagctctaggtacatacgccaaaagctgtggaactgactggaaaatgaacaatttaaagggctactggaaaaccatgcatcacaagagaacgttgcttcagtttctttgtaatgtcaaactggttgcgtacattttccccaacttttaccatccttaatgtcctctcaaatgaatgtctaccccacaggtagctcaagaagaagtccaaaactcttaacaatctcaacaatcgggactgatgggcggataggttacgtcccacatattataataccttccataataacaattaacacaagtcgcgacctacgccaccccaggatctgcctatcagatttcaaaagcttgacaatatgcttaatagtgaagttcttatgatgactgagcaacatttccaaatacatagaaccactccgcggagacgattggtttttacatatggatttctatcagggaaagggccatagtagagacctgtaacttgtttaaactcgtctagcgaaaatcgcaacagctggcctccaaatgtaaaccaaagctcatgtgagttagccgtgatgagtta

SEQ ID NO: 33789 - DNA, 7536 bp, Arabidopsis thaliana landsberg
  unsure (1)..(7536): unsure at all n locations
tcagcttgttgaatcttgggatgcacaccagtcgcctatccaggcagtgataaggctgccatctggtgagctcgtttcaggtacatcatccagctaaagctgtcatttgatgcatttgtttctgtttctttgttgttttcttgctgccatggacttccttattcgattgtattttctagtatgatcgttttgcaagcttaggttaaatgattttttggttgttcttaagatgcacatacttctttttgattaggcttgacggcataattttcactgatgttacttgtacttaccaggttcaagtgacgccagtctcaaactctggaagggtaaaacgagtctgcaaactctttcagggcatacaggtgaatttcattactctctcccaaatttcgtatctctcaaaatttccttgtcaatatgagaaactgcataccggaaataagatagaatctgatactagctgctctaagatatcttatcttgtgaagtgccaagacactggcctgttgtcagggattccttgttattggagaaactattgtcttatacaagtatttttattttgcaatgcagatactgttagagggttagctgtgatgcctgatttaggatttctttccgcatcacatgatgggtaagttatttgcttccaacaaactcatgccttactgaatttcattgtccaagtgaatccttatgtgcttaactcgaattgtgttgtattttgcatgacctggataagttttgtgatccggggataatatgatacttgagttttcttttatttatcctttcatgtgtttgtacacagcaaaggttgtaaatcactattttattttttctaacagttcaatcaggttatgggcactaagtggcgaagttcttcttgagatggttggccacacctcccttgtttattcagttgacgcacattcgtctggccttattgttagtgccagtgaagatcgtcatgccaagatatggaaaggtgattacgggttccttagtttctattgatgccttggctgttcttcacttatgtttcacagttttctaggttatatgaggtctgagatgtttaaatttggaaaatatgtctccacttttcagtatgttgctcgctcttaaagttttctttcaataataaagatgtctatatatcatatttttgtggaagacgtgttataaatttgatcacttagttgcaacctatggaaagttagttgttagtatgtcagacagtaatcaactgatcagaannnnnnnnnnnnnnnnnnnnnnnnnnnnnnnnnaatagctgttataatagatatcacttgcgaaaagagactgacattttggtttaaagcatgtttagatcttataggttgatccattgttctcactttgttgtttttgttttggtacagatggagtctgcgttcagagtttggaacacccaggctgtgtctgggatgccaagtttttggaaagcggagatattgtgacagcatgttcagatggagtggttcgtgtttggacagtacgtcatgatgcgattgcagatcagatggagattgatgcctatgattccccaatttctcaatacaaactaagcaggtaatctgatcatttatggtgatctctattcttatcgactaaattctatgtccattgagttttttttcttcacgtggcaatgcatattgtatgacctgctgagggggtatgctttcttgtcttttatgctcaaaatataactgcaaagtatatgcgtgctgttctttatctcaggaaaaaggttggcggattgaaacttgacgagctgccagggcttgattctttgacgtcaccaggtaccacttattatccaattaattgtaatattaatgtttcgtacgggagaaaggctaaattttaaagaatctctcgagaacacaaagataattgatagtgtctggcgatcaaatttgaatagattaagctggcattcttgtaacatcatcctctcttatttgatatatgttctcaggtaccagtgatggccagacaaaagtagtaagggaaggagacaatggtgttgcttatgcatggaatatgaaagaacagagatgggacaaagtaagtaaacagaatgaacttttatctttttttttgtttgtcgactgcatttcgtttttgctcttgacctgaatgcggctttgctatatattagatcgcatgcatgaatatacagataacttccctttgaaacaattaccttgaggaatatttgttactttgttcatcgaaaagttgccatcggattagggcttgtaatttccaggaatgagcatgctgtctggtcataaattgatagcatgtactgccagcaatttgcctttagcgaggattttatttaatgtggcaacccatacctgttaggaaaatttcatctgattttgacttctgatccttcttcgaagtagcaatctcttaagtagatagcaagtaaatgagatagatttctctctaacatttgtttgcatatgaaggattaaacattggctttttagtgtggtagaatgttttgagttctcactgcatgccttttttcagattggtgaggttgttgatggcccagatggtgtggctgatcgtccaattcacgagggcgttcaatatgattttggttagattttgacctattatggaaacttgagaatctctcaaaatcgaagaacaaaattcttagcccttttttttctctagttttcgatgttgacattggtgatggggaacctatccggaagctaccttacaatcgatcaggtacctgaatgctcttactggccttgttttattacaagtgcaaccacaagaaactgcttcagtttttgatacttcaaatcttttcttgtttggcagacaatccttatgatgcagctgacaagtggcttctaaaagagaatctcccctttgcatatcggcagcaaattgttgaatttatattacaaaattctgggcagaaagacttcaactttaatccatcttttcgtgatcccttcaccggcggtataaaatttttgaaaataattggtctgaaattttgtttttaggattttattttaattntgtgttttgccttttattgtgtaccagcaaatgcttatgtgcctgggcaaacatctcgtacagctggtatgaatacactgtctgtgtcattttcacataatactttcaatttcttcatttcntgtattgttcttttgctgcctcatgctctgactcttttctgttgcagcaactccggcaaaacctttatacaagcacattccaaaagtacgctggttctctttctttattagttattactgtttaatgtttctagctttttgatccttttttcttccataactctctccagagaggtgtgctagttttcgatgctgctcaatatgacgggattctgaaaaagatgacagagttcaatactactttacgatctgacgcagtaagctttcagtatcaacttttgtcacacaaaatgattaaatggttattttacttatactattgttggtatttatgtttctacaaattttccatcttatgaaggaaaacaatgacaagtccctgaccgaacttgaagtatccagagtacgcgcaatcgttaatatactgaaggacacatcacactaccactctaccaattttgctgacatggatattgctttgcttttgaaagtgctacatgcatggccaccggcaatgatgtttcctggttggtcttctcttgtcaatcaattagtcaaacagaactgtttattacatattgaacttttgatggtagccatatgtttctcaatattatgaagccacagcaaagtcagttttttccgagatgcttgttaaacaaatctaaaatgagatatgttttggtttatttggatgttattcttggtctccttgtgtttcttttgatgtttcttgcaggccataaagcattttgcctttcgatggccactttatttttgtcttttgttggatatagccttatgtttatcttgtgtcaagctcttatacctatggttttgaatatgcagctactgatatagtcaggatgctcgttttgcatcctcatggagcaagtctacttatcaagcatgtggaaaacaacaatggtaatcatctaattcgtgaagttatgctttctcaacattaatgaaagtactagctagtaggtaatgtcctttattaactggtatctctctgttactatatatcaatcagacctgcttttggatttgataaagaaagttacagaagattctgctcttcctgcaaatcttttaacgactgttcgtgtccttgttaatctattcaagaattcttcatttcattactggctacagacgcatcatagtcaagtaaggactctttcgtttctatgattttataccataacttggatgtgtgatgatctcgatgaacctactaattggtttagctgtgacttacaacctgaggagaaatttgtgggttttatgtctaatatacattgcttttttgcgtctgggcgtataaattaagtttctaattacatttaaacataagatagtgcctatacatgtgtgtgtttattataataatttgaagaagtggttttaattgctgtggatcaatgcagattcttgatgccttctcaaaccgttattcatcccccaataagaatctgcagttggcttattcgacgttgcttctcaagtaagatctctcttacattactttcttctagttggatttttgccaaattgtagctttattctattattaaactctctgtggagaaagatcaaaccgtaatctatgcttttgttcttcctcagttatgcagtgctattaatagaaaagaaggatcaagaaggtcaagctcaagtcctttcagcagctttgcaggtacgcctaaatttggttatttttaaccactgttgcatacatccaaatcctattcatcgtcaccgagttgaatctcatctgtttttatttttgtctctgtcacttacacaaatctctgagatcaaagtaatatgggagaagaccaatgtaccaaatagtttattatcattttttgctgctaaaaatatttaacttattactacaggtagcagaagaagaagctgcagatgttgattccaagttccggagtttggtagcaattggctcactggttagtttctgcaaacaactagagtaacataatccacttgttgttaattacataatttaatcagtgtgtgtctgtaacaacagatgcttgaaggtctcgtgaagaagatagcgatagattttgatgtagagagcatcgcaaaatcagcgaaggcgtcaaaggaagccaagattgcagaagttggggccgatatcgatcttgtaattcgtcagtaaccttaaaagagagtctgtgatcgaacccgggatttgaatttcgatgattccctcaagaattttcatatgattcaaaatcacttttccttgaaatgcaattcaacttttttgttttcagatttctgaatactaacatatgttaaaacttaaaagattatggcttatggcttccatttggagtagaatttttgatcaccccacattaacattctactaagcgaaaccctaactttcttcttctttaaatgccaatgtcttggccttatcctcttccccaagctaaacgcaaaatactgcgggaacttgttgagctcttcaagttctctttccatgtcgtaaaccagaaactcaaacttgggcctcaagttatcttcaacactgtatccgaatatcgccgggattctcccacagactctagctgcttcctcgtgttccaaacctatactcttcaagaatctcatctttgctcttagcttctcaactctcgtgttcagcacgtgcgcgttcgtcttgctcgctcggttcagattccgtacccctagctccttaaggtaaacaagcgtcggtctcaagcaatactcaacgtcggagaagaggatgttcgggcaatttacgattaagcccctggattcttctgcggaagctccaagctcgccggtgagaaaatcgaagacgggatcgagtttagagatgtcgaaagtgggcgagaagagctgtggacagaggaaaacgaggcgtgggaaatcttcgtcggagattcctttcgatttgaggagattcacggcggagaggataacggaaagatcattcgccggaggagcaagtcggggattctgaggaacaattccgagagaagaaaggtgtcttagattttcacggtgtgaggtttggaattttagatagagaggcttagagcttgaaggagaaggaggagacgagaaagacgagagaggttgaagatgatgaagtgaagcaataacagccatatcgatgattcttcacttcttacttctcatcccggttcgattttatttatatctgttaaataaaccagaaattagcttttgaagcggtttagtatgaggccggttctgttaactactatacttcatggaccttaatataaattgggctgagataacaaagcccatcattataaaacccctagaccagaagaatcttttcctctttgctctttagattctcaaaatccagagagagctcgttaggaaaaatgaaggcagtgatagggacagtggtgtcgaacaaaatgcagaagtcggtggtggtagccgtcgacagactcttccacaataatatctacaatcgatatgtcaagcgtacttccaagttcatggctcacgatgaaaaggactcctgtaacatcggcgatcgagtattttccccttcattttttgaatttgatatacatttgatcaagagctcgaaaatttagggaagctctaggaatatttgaactcaaccattggaagtagacttgcctgtttgttattaggctgctttggaaatgaaacttgatttggttgtttgaaatattaggtgaaattggatccttcaaggcctttgagcaagcataagcattggattgtttcagaaatcataaagaaagcacgcatttattctccacaagctgttgctgcggctctcaattcctcaacctccattgctgagcagccccctgtttcgtcttcctaaggtgatttaggtattgctctctaattttttgtatcagaatattttgtttcagtgtattgtcctttgatacctttagtggaactgcatgagaattgaactttgctgtttgacatttgagttttgatactgtttctaaaggtatgagaggctattgtgtggcaatatagcttgttaggcatcttgatgttccattcttaagttcttggaatccattttgtgctccctacattttctgtgtcatacccaccacgatttatagctagttaggcatcttgatgtgcatctaccgtaatctatttttcttacctttttggttggttaggcttagtaactgtacaagatcctcttccagcagatatgcagttctggccctaatgcaaaaacgaggtcatcccaacaaccataacagcttcg

SEQ ID NO: 33790 - DNA, 10321 bp, Arabidopsis thaliana landsberg
aataatcaaaatagtaaaatcctacgaaaatgtaatataatacaagaggattaatatacatatccacataaaaggaagattcggatacacatccaaactatagaaaacattagtaatgccataaataaataaaaatgctgtcaagacacaaaattcgttgaatgttatagtcttcacataaaactgtcataaatctggatacgttctaaaaataattgatctaatctaaatctataagtagtttcttattagtagaatccttatgaatcttaatttgatcaagacagaaacgcttttgtttacttttacctaatggtcgatggtgacgattctttcaagagacccggagctgtgccttttaagtgggagatccgacccggtgtacctaaaacccgacccggtgatgatgatccagctcttcttcaaccacctcctcctaacaaacttcctcctctcaaattaaaatcaactccgccgtcgaattcgccatctccgtcgtcttcttcttctttcttctctgaatccagaagccgaccagtctctcccttcgctcctcctccgtcgtctttcaagctgaaatcgccttcagattccgactccaactgttcagcatctccgactccatatttccgatcttcttctcctcgtgccggtggctcattgcctcggtgtttttttcccaagtcattatttgggttgaaaaagagtaagagcggcgatttaaaaaagaccggtcagcaggaaccatcatcaacaacatcggagtctgacaatttctatgaatcgggaacaacgctttctccgtcggaagaagattctagccagggatcgccggtatcttcgaggtggagttcgccgaaatcgtccttctcttctcgccgtggttcgccgctaaaacggactgattcggatttaagctcttatgagaaaaaaaccatgttaatgatagctcgttcccgccttggttaaatggttaggcttaaaaaaaaaaaacatcttagagattaatcaaataaaaatgattttgagtttttcattgcgacaagaacgaatatgttacatgtagatttgtaatgaaattgtctatatattatcgtcaaaatgaatcgagttaaaagacccctaatgtttgaagagtagagaaatggttgtgggaaagagagacattaagattggtgactgttttaattcacaatgatgatgatggtttgatactacaagacactaacttggaacaagactacggtctcaaagccaaataacttatctttaaaaataacaaggtgaaataaatatggatactgataagctaaataagctagagaaagatggatcttagtttaagcctaagccggaccctgagcctgaacctgtggaagacctaaccatcgggtgactaaacgaaggctggttgatcgatgctgctccagctgctgcagggttatttagttggttgttgccaaacatgacgtttggtgaagctgttgatcctgcattggtctgtattgcattgagaggtaatctcgggccaaacgagaaagcttgctgttgttgttgttgttgttgttgttgttgttgtcgtgccatgaaatgcatctgtgcttgaacttgcgggttgttgctgaatcctgggattatgcttggttgagaagttgcggaagcttgttgttgctgatgttgctgatgcatgagagaattgatgttgttaccacctgtggatagagacatgccttggagattattagtctgtggagagattcctccaggagatccaaatcttgctgagagcatacgagcccgttctgcagaaaatctctgacgggttttctctacttgttcgcattctttcatcaacagtgtttcaatttctgcgaactgctttaatttcagctccatcctcttcagctgcggtttttactcagatcagcaataaacactatacaacaaaataaatcaactacctacagtaattctcatcagcaactggttctgctattttacctggtgattaacgatattagcagaaagtctctggatttcgcgttcctcatgatcagcaaacaattttgcttttgttgctgcagctgatagaccggctctaaatgctgccataaccttatcctgtggcagtggagtctgcgcttctgctccgttttggcttgatgttttgtgtgctcctgagttttttttacaattaaagcatgttggtgtcgcagattaggttaaaacaaaagagcaaagaatcactgtaaagagaacaatcaaataacttccttaccatcttgctgttgattttctccatcaagcaagctggcttctttcccttgcattccctcagatttcatcctagatcaagaagtttcagaatagtccatagtattattaaactgaatcacactacagagaatttatattggatagagactatataatacactaacctatcgtcctcagataaaaccgagagggattcatgggcacaggacgcagcaactcgaggtccaacagctgatgccaaaaatgcaacctaaaatattttggtatcaggatcctcatatctccaaacttatgtgcaatacaggaccattctccactcaaaatatgcatacaattgagctctcagatataatcgattcatggatcagagatatctctaactggtgagatcataaggataataagaagcgcatatgaaatctgcatcggaaaaaagttcacaaaccaatgccataaccggattcggagacttcacaaatggaagcttgatctcagtgtcagaaccttgctcggaatatcctgcagacgcaagcggacaattagtatggcatgtcaaaggaaataactatggaaagtaattcattgctacaaattgaataaaacaaaatcaccaggtaaatccccatttgaatctgttcctttgtggtcatatccatttgtagggttttccgtattagttacaccagaaacctcaacattatctaatagaccatcctccacaggtaatcgaagaaaatgaagaatgcattgagcttttgacttggaaccaacatgatcagcaatttgaacccaattttcattgtagagttccacagcttcaagaagcaagagagtttcctgatcagtccaattgtctccatcttgatcgccataaaatttcattggatccactcttacaaagtcaagacaagaatgtccaacaacaaatcttccatggtgaaaacaatcacagcataagagtatatccccctgtaaagtagagatgaagatcctttagttagaagcggtccagtatccgagacagtaagcaagataaagcttggagtctattacatcactgggtgcaaaaaagaatcagataatgatacacaaagaacagtacgtaaggggaagcagcctaagaaccttcttttgcgattggaagtacacagttggaagcggtcgagaacaatggttgcaatgactatcacataggtgttcacgaattctgatgtccaagtcagggctgtcaccatccaaacttggcaaggatgaatagacttcaccccccttgtgtctacagttgggcttgtcaaatttgatcaaactatcaatagatgttaaagcagcagacggcacattgacctcgccatttgtgtcctccctcacatccgatacatctctcaaagggccaggatgtgactgggcagtggcacagtaattgattattccccagtgatcaagaaaacggaaaactcgtgcaaaatcttcaatgtcaacaccatctaccaatccttggcaatcagaaatcgtcagtgtctttttcagggttctctacatatttggaaacaatggcgttcctgaattccatataactttcgggtgtatgatttggcgatttcccagagaaaaactgtggcaccacttgcctttcaagtcgatctactgtgtttggtgcaaaccaatctgctcaaatgtaacagcaaaagtagaagaataaattcgagcattgggaacaaaaatatcagaaaataaaaataaaataagaggagaatctcgatatatttgagccataggactccaggaacaaaacccaaacgaattagaagaacatcacttgcatagtctattcaagttgtacttctgagataagacacctaaggctacttcaagccagcaggtactctaatttatcatgtacaaaagttataatacctcttcctttccatcagacagaacatgggaacatagagaaacatctgatatgaaattgagtcgcgttcagattaatgtaaactaagaaccaggcactagacaaaaggaagataagaacttatacgttaaggagataccggcatacaaacctgttttgactaattctcattccaatcacaagatatatactacaatactaccaaccagcaaaagctgatgctgcataaagcctaacctctaacataaatgcgcgtatcaagaggaagaaaaaacacacctgaatgcataggcaagacatgaaccagatccccaaaccgtttaacaactccttctccatccataataggtggtggagagataacataagccgaagacgatccatcactcctctcaagatcaagagaatcagcaggtacagtagataacgcttgcaattgcccaaacgaaatgttctccagagctggaagtgaaccttgccctctagtctcccctatcaaaccagctctctcagccgccacaacagccattacagacgcgtgtggccggatcacaacacgcttaaccactgccgggaaatcagagatgcgcgaaccagaatcttcaactacctcgccaataccaagtcccggatcgggagttgcgccgccgttttgctgaagctcatcggcattttcaacgtcatccatttcttcgttgttgttgttgttattctcttcgtcttcttcctccatatcttcctcctcttgtttcggtttcctcgccgccgataacccccctctcttcttccttttccatttccctcttctatctgcgacagaattgtaaaaagtgtaattcaattcacacgaattctcgaaatacccatcactacgatctatgtgggtaagtcaaatcccaatttaaatttggattttgagagagataaagatgtgaaacagcaatttaccttcagaagctggcatttttgtggatgaagatagagaaatagaggttttgggttctgtggaatcgaagcaagacccttagtaaaaagaattgctttctttgtcttctctcctccgagtcgttctgatttccagctctcgagctaaacaccaaacctttttctcgcaatttctttcaccatttccttcattaatctctatatattaattcattctccacgacgacctaaccttctcgacaaacaagagggttctgatttcgaaattcaagcttcgttgaccaatccaaattttggtttaacttcggttaaagtcaactttacttcggttttatttttcaattttgaatgagaaaaaccgaatcaattatttagttcggttcttaaagttcaaattggttaaaccggtttaaattgatacattagtcgaccgtcgcgcattaatactggtgtggtggttccgttaacgagcaacggcgatgaagagacctcgacctacatctcagccgtcgatctcttccaccgtcaaaccaccactgtctccgccggtcacaccgattctcaaacagaagctacacagaacaggaacacctaaatggttcccgttaaaactaacccacacggagctgacgttgccgttaacttttccgacgggtcaaacattccggtggaagaaaactggagcgattcagtatagcggaacgattgggcctcacttagtctctcttagacaacgtccaggagacgacgcagtttcctactgcgtccattgtagcacaagccctaaatccgcggagcttgcgttgctcgattttctcaatgctgagatctcgttagctgagctatggtctgatttctcgaaaaaagatcctcgtttcggagagctagcgagacatctccgtggcgctcgtgtgttgaggcaggatccgctcgagtgcttgatacagtttttgtgctcatcgaacaataacattgcgaggattacgaagatggtggattttgtttcgtctttagggttacatttgggtgacattgatggatttgagtttcatcagttcccatcattggatcgattatctagggtttctgaggaagagtttagaaaggctggttttggttacaggtgatttcatcactctctaatggttacattatgttgaattagacatttaggctaaaactttgcttgaagcttatacttttatttactctgtggctatacattcatagaattgaagctaatgtttggtctaagctagataatcattgtgtggccgtttctctgattggttctgatctcatttgaaaactctcattctggtttatcttgtggtgagcagagccaaatacataacaggtacagtgaatgctttgcaagcaaagccaggtggtggtaatgaatggcttctttctctgcgcaaagtcgaactccaagaggcagtttgttggttttagcctcttttgggacaaaatgggtaagtgttttctaaacactactactccatctctaactattatgattagtcaaatccattggattatgacacattttgaccatcgaaacattaacaaacctattgactgcttctaagcaatgttttgttggttgtagactcttttcggacaaaatgggtaagtgttttctaaacactcctactccatctttaactcttataattagtcaaatgcattggattgtgacacattttgaccaaagtgataagtgtgtattttgcatgtttgagcatccatttgtcatcactttagcatcatatcatcactgttttataccattttacatcatttgtcatcactttgcatgtttaggatagttttgcatgcatgttgcatatttgcgttgatttgaggtgatttggagctgttgtcgagctatctggaagaagcggacctgatcatgacaaaccactcgacccaggggtcgagtaggagcttcaagatctcaagagaccactcgaccaccaggtcgagtagaggacatcaccacttcacttcaccactcgaccacgaggtcgagtgccctcattttcatcagcagacaatcactcgatcacatcactcgacccccaagccgagtgccttcatcccattgccataccactactcgacctcatcactctatctggatgtcgagtatcaccatcaccaccactcgactgcatactcgatgacaagcttcagagccatcttcattccgcactcaaccagacactcgagcacaaggaagaaaagaagactccagctattcactcgacctctcactcgaccacgtgggtcgagtacagttcttaacccgtcccaatacttcgtcttttgagtattagggtttcggtatatttggctataagtagcatgtacttctcattttcgcagacaagagttttttacctagttttatttatgcagacattgtgttctagactttttgtaatccgaatttctctttatctattcagtattcagtattcagtttctgttcttcattttcgtttactgttgttcattctgttatcatactgctgttacactgttgttatcatgttttcaacttgttcaacgtttatgctttctgttattatgtctgagtagtgaataggtttctgaggatgggttagagtagtgtagaattctcagtatgctaggtgattgagtattggttgatagatcccttctggattagttgttcttaatgcctattgctttctgatcaactggaatttgagcccagacatttccgcacccaaaaggtgttccatgaaatgtctgaaccactaattccagagattcgtggccctctaccaaggtattggttgcagggagcgttttggctttaacttgttgattcgtaatacctgttaggttagctctcgtcaatggtgattgagtctgggactaggttaacttgagggtctctgttgcggtggcacttagatttggttaaaaaacttgttgtctagggataatttattgagcatgtcaatcacctgtaaactaaggaaacaaaattactcaattaccccatcctcaagaattctttatctgattgattttattgtttactctattgctgtgtacttcatcctgtcatctgttgcttagtttctgcaattctttactgttactcgacctgatactcgaccacccagttgtctggcaagagactgtgcagtcgaatatccctgttacattatttgtctgttactcgacctgtcagtcgaccacacccagtgctctgcaacgagctgtgttggtcgagtgtttatttgtttcagcttgattttctgttttctgcatgttcacttaggactgctagaacgcaccaaaacctgttattgcttggcttgacttagtgacttctgatcacatcttgattcttagcatcacacccatttggattgacaacctaaaatactacaacgatatgattgatgttttaggataattgactaaaaacgtattatcaatttgacgtcgttgccaattgggttttttgtttgttacatttgagatttcaaacttgcttagatcaagttctttttcaatattcaattcggttgctaactatgtgtttttcttgttgtcttcttgatccaagtacacctctgctgtatgcaaactcgaccaacaggcaatcagaacctcctttttaatgacaacatcgaccgcataactcgcgaactcagagaaaggagaaacacagtcaacctaataccacaacaaccactcgaaatggctgaagaacagaatcaacaaaatggccctgccaacattggtgctggagatgcaccacgtgatcaccgtcagcgggaaggaattgcacctcctgctatccagaacaacaactttgagattaagagtggtctcatcttgatgattcaggggaacaaattccatggtctgccaatggaggatccactcgaccaccttgatgaattcgataggctctacaacctaacaaagatcaatggtgtcagtgaagacagattcaagctccgtttgtttcctttctccttgggcgacaaagcacacatctgggagaagaatccgccccatgactcaatcaccacctgggatgattgcaagaaggcttttctatcaaagttcttctccaacgccagaactgtaagactcagaaatgagatctctggctttttatagaaggctggtgaaagcttctatgaagcatgggagcgtttcaagggttacaccaaccaatgccctcatcatggctttactaaagcctctctgctcagcactctttacagagtagtcctaccacgcatcagaatgcttctggataccgccagcaatgggaatttccagaacaaggatgttgaagaaggctgggaattggttgagaacttggctcaatcagatggtaattacaacgaggactgtgataggaccgtcagaggcacagctgactctgatgacaaacacaggaaggatatcaaagcgctgaatgacaagctggacaggattcttcttagccagcataagcatgtgcacttccttgttgatgacgagcagtatgaagtccaagatgaggaaagtaaccagttggaagaagtaagctacatcaacaacaaccagggtggctacaaaggatacaacaacttcaaaaccaacaatcccaacctctcctaccgcagcacaaacgttgctaatcctcaggatcaggtgtatcctccgcagcaacaacaaagtcagaacaaaccttttgttccctacaaccaaggtttcgttcccaagcagcaattccaggggaactaccagcaaccaccaccacctgggtttacacctcagcaaaaccaaggtcctgttgctcctgatgctgaaatgaaacagatggtccagcagcttctacagggacaagcatctagctcaatggaaattgctaagaaattatctaaattgcaccataagctggactgcagctacaatgacctgaatgccaaagtggaggcattgaataccaaagtcagatacttggaaggccaatcagcatctacctctgcaccaaaagttacaggacttccaggaaagtccatacagaatccaaaagagtatgcaaccgctcaccccatccccatctgtcatgatcgagagctgaaaactaaacctgtccctgatttcatcactggggacagtgatgttgaagaaggggag

SEQ ID NO: 33791 - DNA, 1381 bp, Arabidopsis thaliana landsberg
acacctaaactcctgcgagtcgatggttttcttatcaatttgtaacaaacaaacattctctactactgtaatcctcaaagtgtgtctaattgtgttaaaggttgtttgcaactctgcatcatacaaaaacatattattttctatgtatggttcttgctccaggctctgatctccctcggggacaacaggtttcctgaggacacagatcgaattgtaaccagaacagccgaatttcgattatccaacctctgcccaccagtagtaaacttgatctccttcaacgcatgaacggataaaaatctatatatgaagtatgaactagccattgctgatagtagattttccaaaaagttttgagtcttctttaaacgaatggaacaagagtttagactcatctaaagaagagagaatcgcagcagagtagccaaacagagaagtacagacagacaaaatggtcccaaaacagacaaagaaggaggaccctataattgcataatgagatctaacaaaacaagagcacaacacagactctgtatggtcttcacttgagagggataaacctggaagagtgggtagcaccaacaccaggcctaccgtgcttaacaggcttatatgagattgaaaactcagccaagtaatgtccaatcatctctggtttgatctcgacctggttaaaagtctttccattgtaaacaccgatgacgcttccaatcatttcaggcacaatgatcatgttccttaggtgggttctcactgctgctggcttctctccagctggtgcttcaattttctgctcatacagagagagtcacaacctttagcgttttaaagccatttgcttgcaaaaatcatatatagagaggcatgaatctgagaagacacaatctaagaagacacgttccagggcaaagatctagttagaacaaagaattattgatggagaagtttgagttttgtaccgctttccgcagtttcttgatcaaagccataggcttcctcgtcaatcctctagagaacctatttacataacaaaactgatcagtctaaaaaacaagagacgatctacgaaattgagacaaagctctctggttcaaagagtcctctaaccttctacggatacgggtagggaaaagcttgacaagatcatcagtagacatgtcgagaagagcatcaagatcgactcctctgaaggaaaactttttgaacgttctcttttttacgatttcagccgcagcaacctctggatccgcctacgtatttttccaatacgagaaattacaaacgtaacgacggaaattttgataaatgatctacactttttagagacaaagatttagaaacttaccattgtttgtttggaattgctgaaacctaaaaaaca

SEQ ID NO: 33792 - DNA, 1790 bp, Arabidopsis thaliana landsberg
tgcctcatcaggagtgactaattctataacaaccactttaccgttttgtggtagtgatttccaacaattcttaagaatcttgacacaatcttcgtcggtccaatcatgaagtatacgctgtaaaaacatatttaaacacataagtataaagttctagctagcatgtatacacttccaaaacatataagtaataagttctattgagcttactttcaagatcatagcatctccggttgggatatccacaaacatatctccggcaacatgctccacaccgggataagtgggtgcttgtgccaaggcacaagttagatcaaagttgatacccttaatattgggatatttagaagtaacaacaccaagagtgttaccaactccacctcccacatcaaccaacacattcacacctttgaagccttggtaaacttcaagagccttcttcaccaccgcgattgtgaatccagtctggttaaaaagcttgctgaatctctcatctgtacccatatagtcaaagagtttcatgccaccatgtgcacgcccaaacgcatctcctccttctagcaccacatctttcaattgtgccctgaaagtttcatatagataaagtaagttttaataataaggattctaacattgacgacaaacagatttgttacaaagaggaattgtgaaaattaccaggtatttaggaagacactgtcgaaattgacaatgacttgagaagcaagggatccaatatcctgaatgttattcttcaagaaaaacctgcaaattggctcggctcgatagaccctctccccctttcctacggagaccttctcacacttgaccatggaatagctagcgagtagacgaagcatgcggtccaacaagactggcgcctcagggttacgaggtgtagttggtagcttactcgctatttctgatggtgaaaggaacgagtcgctgcgagaggcttcagcatagagagtgtcaaagacaccgagctcgagggcggctttgagaaccatcggaaaggcagcagcattggctagtctcacggccatcaaacccaactcgttatcatcatcgataacaattggggttttagagttagagcttaaagtttcttctataaggtatcccatttttatttctttttgtttccttcttctccttcaaggcactctacgtgatcacactgatcagaagtgaggaaatatgtattgagacagagagatagagtgtgtttcttctttgtagtgttggggtgatgatttagtatgtttttgatgtatatccttgtttctccttttatagctaaagcttagatatttcttccctttttttaataaaattttcacataaatcattgtggctagcgttgccggtccagcttggttgctgaatagtctctattttatgtaccgtagaaaagtaagatgtggctgctaaaattctgtttgaagtaaagacgatatttaagtcaaaattcaaagcagagatttgatttaatttcctcacaattagacggaccaagtcggaccaattgaatatataaacatatcttcatgtacatatcatcaatgtcacaaaaatgatatgtacatgaagatatatttatatattcacttggtccgtctaatagtgaagaaagtaaattgaacccctattgttgaaaatattcacctttttagtaaacccccccactatttgaaacaagttttacagttctcataaacatagagagttggaaatctctttacataaatgattttgtaattacattcatacaaagatattagtaggtg

SEQ ID NO: 33793 - DNA, 3206 bp, Arabidopsis thaliana landsberg
atcagacaaccactcgacctcttcactctacctaaaggtcgagtatcgccatcacaccactcgactacatactcgatgaccagcttcagagccttcttcattccgccctcaaccagacactcgagcacaaggaagaaaagaagactccagccgttcactcgacctctcactcgaccacctaggtcgagtacggttcttaatccgttccaatacttcgtcgttttgagtattagggtttcgggatatttggctataagtagcatgtatttctcattttcgcaacaagaagtttttacctagtttttatttccgcagaccttgtgttctagactttttgtaatccggatttctctttatctattcagtattcagtattcagtttctgttcttgattttcgtttactgttgttcattatgttatcatactgctgttatcatgtcttcaacctgttcaacgtttatgctttctgtcatgatgtctgagtagtgaataggtttctgaggatgggttagagtagtgtagaattctcagtatgctaggtgattgagtattgattgatagatcccttctggattagttgttcttaatgcctattgctttctgatcaactggaatttgagcccagacatttccgcgcccaaaaggtgttcgatgaaatgtctgaaccactaattccagagattcgtgaccctgtaccaaggtattggttgcagggagcgttttggctttaacttgttgattcgtaatgcctgttaggttagctctcgtcaatggtgattgagtctgagactaggttagcttgagagtctctgttgcggtggcacttagatttggttaacgaacttgttgtctagggttaatttgttgagcatgtcaatcacctgtaaactgaggaaacgaaactactcaattaccccatccttaggaattctttgtctgattgattttattgtttactctactgctgtgtactgcatcctgtcatatgttgcttagtttctgcaattctttactgttactcgacctggtactcgaccacccagttgtctggcaacagactgtgtagtcgagtatagctgtttcatatcctgtctgttactcgacctgtcactcgacctcacccagtgctctggcatcagcctgtgttggtcgagtgattttactgtttctgtttgattttctgttttctgcatgttcgcttaggactgttagaaaccccaaaacctgtcattgcttggcttgacttagtgacttctcttcacatcttgatctgtttgcatcacacccatttggattgacaatctaaaatactacaacgatatgattggtgttttaggtttaattgacttaaaaacatattatcaacttatatgataaaaagatggatgtgatataacagagtttttcatgttgaaaactgaatttaaaacgcaagccaatacaatggttcttgaaaacataaaaagaattagactgttttcaaaactgtaatcatttattttggatattcaaaaaatctcttgaaaattaaattacataaaagacaaattggaagccataagttatatgaaatataaaagtgctcttcttatcccattcatcttccacacaagaacaaaaacgtttagagagaaatataaacacttttctgaaatgtcatatcttaagaccttctcagatgtgcatcctagaaagacgagatggtttgtctttgttaaattactccgtcttcggaattggcctccaaattatgatggagaagaatctattatgattttggctgatgagaaggtatggaagttatgtctaaagctatgccagatttataattgtggatttttaattatcactatacacattcatgcaagatttagtcaaatttacaaaacatttctcacggaaacaagatcgatgcaatttctcctctccatgcaaagaaagaagtgttgatttcaacacttaaagaagggcaatggtatctgctatcacactttgacgttgtcgtggctaatccactggacagattctctaaccatgtcttccaacttaagtttttaagaaagactacaatggaggaagtagctcctagaaaaagatgtcagtttattgattgctggcctttataccggatcaagcctgcttctactgttgagaagcaatttgttgttggtcagcacttgagtatttgtttttaactatgtttggactactatatggcttatagatataaatactaaattgtatgattcttggtttttatatatttacaaatgcaatgggaatcattgaaactgtgtctccaatcggcaaattatgtgggttaagagggagtttgaaggtgactatgaatctagctatctgactttcataattaaagataccacgtaagtttataatttggtatcatacattgtagttaggttgatggaacttttggataatggattcaatgcagtacatgttataggtcacagttaatgaaatgtgttgcaataggaaggtcttgtgatgagtttgaaaaaaaatggtagaagaaaataagcgagatcaaatttaagatggagcttgtgatgattattctccgtttttggaaaatgtctgagtttcaaggttattttcctatttcttcctactatgattgttctactaggatatctaagttatgaatctagaaatctaaattatgtttcatacacaggaaatccatgcttgataagcgtgggtggttgttcaaaggtttacattgatccaaatttcagaggattagacaagaacacctatctgtaagctacttacttattatatataaaagttccatattaactttgtctatttgttgtctatttttatagccgtaactttgctggatcagatgatgaagatgatgacattttcatggagactgtggagtccaagttctaagttatcgatatgccattttaaatcccagtgtactatgcttcatataactaggtttattttcttatgttctatgttggacttccttggagtactttatattatgaatgcttatgtctacttttatctgaatataagtagtgtaccaacttatattcagcataacatgttttacaggaaatgctaacttaaactactagagtaaaagaagaatcatattacctttatgcagtttgctatcttctccgacttcaaatgcctgaaattatagtgagagaacaaactt

SEQ ID NO: 33794 - DNA, 5590 bp, Arabidopsis thaliana landsberg
aaggcgatgtcgaactcctctttgttggacgaaagtaggagagaggttgtgtttaataatcggttgatcgatgagactgcagagaaaattcagttcatccgaggtaatatgaagaagctcaagatcaacagaaaaatgctaaccgaaagaggcgtgaagtggaattccaagaaggcaacatggtttatcttaaggtaatcgcgttataagggaaagatcgctttggaaaagttggaaagcttgcggtaagatttattggtccatacaaaattgagaagagaatcagagaagtagcttaccgtttgtatatgcgggaagaaatgagattacataaagtttttcatgtgtcgcaactacggaagcatgttccggatcctaatgctatcatacctgagccgatacaagagttgagaacaaatctcacctttcccgaaatccctcttggtactggtgaaagaagaatgcggagataaagaatagaaggattctacaaattcaagtgttctggggaaggcaaaatcgtaaggttattacttgggcaaatgaggaaaagttcctcggacaaaatatccacagtttttcaaaccacggaacgcagaggatgaagccggaccgtctaatccttctagaatttgggacgaattctattaagggggggggagaatgtagtgacccgcgtaaggacatcggccacaggcaagagtccaaattttagaaagttgcctgaatgcatggccaattgactttaagtgcccaaaacacaatacactatcaaaggaaaaatatgggcaagtttgggcaaaaatgggcacgaatgggcaagtttgggcaagatcgggcgtgctgcgggcaaagtttgccccaccgggcattgaccgatcgttgaccgcgccaaggacgtgtggctcggctcacatggggcccaagcaaagttgcttggagccgaattttagttgtgtggagccgaagtttgggtggccacgtgtagctcatccgctagagcagcgagtgtgtcatcactagcggatgacacgtggatcgctgactcacccaagcacttgacatgtggacctgcagactcgcccttttcccttgcctatataagctgaacaggaccccgattgttttgtgaagagaaagtgagtggaagtgagaggctaccgagttgaaaccgtccgtccgattcaagttaaggtcccatagccgaaaactttgcccgaatcgttgaaaactttttgttggttactgagtgagttctggataattgtttaagtttcatattcatattctcatgtattcttgattgattttgtgagttatatggatcgtgtgaatggttatattggaatgcatatgtgatctttagattcttatgctattatttatggttgggaggttgtgttgggatattgatgattctatgtgtttgatttaaccatatatttcataatatcttaaactttggggtcttggtacctggtgcttgtggtaggaggtaaagaccataagcgtgccaagatcatgatatgtctgaccttcatagtgaaccgtgttatcgtagggtcttgtaacgatttacttgatcgccatgtagtgcgaagaactcagagagacggggttagctaccttagtcgagtgtctacacgacggtgtagcgtttgttaatgatgctccggttgcatactttgtggttgtaatgcgggagatcacgggagtttgtgtgtttggtgttggattggaaggcagcatatctggccttttaatgcatgtgcatattttttgtagtttcttcggcaagctacctttcgttaccattctctgttgcgtgtttcatgttgtgtatttgggttggggtaaattaatgtctgttgcagggaatcttgagctcactgagtaatcttagattactcatgattgtacttgttttgcaggaaacccgtagtgtgaaatagagggtgtggtggacaataggaaacccggagtatgtttctattatgtaccatgattttgtaaaacaagtatgtttctattatgtaccatgcttttggcactaggccctggccataaaacttataaatgttaggtaacatgttgtgtaatatttatacttgtgaaataaatcgggtttcttgtacaaatttacgagtaatgactaataatgacttattccgagtcggcacaacacttaaatattataagggctggcaagcctaaacgatgttttaatttggagtgtggtcgtcaatatgccggccacgggttaggattagttcccgaacctcggttggatgttgatgatcaatctcaatgtggcgttttctaggcgctcgtgacttgtctggtcatagagcgtctcgagggtgttacagtttgtggtattagagtatggttaatgatgctagcaggactcgtgtttttcaaactgttttatcaagtaattgagtcgcaaaaggcatttaggataatccggtcagttcaccattgttaggtagatggattaagtttaccttggttgaatggatgcaaatgtttggtcaaagaacggagaggagcgagttgatgaatttctcaccagtttatgataactcgagtcagcacttcggggcggaaaactgggtaccgtatgttggaggagaaggggatgggggatactattatcctaatatgtatggagcgcctgattgggatgttcgcggaaccacaccggaatactccttaccaaggtttatgtactatagcacatccgaagggtcacactcagggataagatcacatgttcctgtgaatcaacccactgcacacccaaatccgtcgctgccaagagaagttaatgaaggaaatggggaaggtcgtaatgttcaaagtgtgtcggagactcaacagacgttgaggatgattcagaccttgatgagtcatataattcaacaatagcaacacgaacaacatattcaggaaagcctgcgtgctaaatctccttcggccaagttcttaaagctggttatgatgatgaaggatttaggtgtccggaagtttaaaggagagcagaatactgctttagcggataagtggtggtgtataagcttgtatttaggtgcttataatacccttcggcgcttaatgtgtcatctcgacaccaaaaccatccctaacctttgatcaacatataagtctgtattttgcatgctttgagcatccatttgtcatcattttagcatcatatcatcactgttttatacaatttctcatcatttgtcatcaccttgcatgtttaggatagttttgcatgcatgttgcatatttgtgttgatttcaagtgatttggagcttttgacgagctaattggaagaagcgtacctgatcatgtcaagccactcgagcccctggtcgagtagatgcttcacgacttcaacagaccactcgaccccttggtcgagtagaagacctcagcatttcacgtcaccactcgaccccctagttgagtaccgccaagagagtcactcgttcacatcactcgatcccctggtcgagtatcatcacctccaccacctgaccatcactcgatctctgtactcgaccccctggtcaagtatcaacacgtccaccacatcaccttcactcgatcacactactctaccacatggtcgactcccttatcatcattcactcgacgtccttactcgactgccagcttcagagtcatcttcattccgcactcaaccacacactcgagcacatggaagaaaagaagactccagcttgccactcgacctctcactcgaacacctgggtcgagtacagttcttaatccgtcccaatactgcgttgttttgagtattagggtttcagaatatttggctataagtagcatgtactttacattttcgtttatctaagttttattccacagacattgtgttcttgacattttgtaatccggatttctctaatctattcagcgttttgttcttgatttcgtttactattgttcatcctgttatcatcctgctattactctgtttgttatcatgttttcattctattcaacgtttatgttttctccaatgatgtctgagtagtgaataggtttctgaggatgggttagagtagtttagaattctcagtatcctaggtggttgagtttgattgatagatcccttctggattagttgttcttaatgcatattgttttctgatcaactggaatttgagcgcagacattttcgcgcccaaaaggtgttcgatgaactgtctgaaccactaattccagagattcatgaccctgtaccaaggtattggttgcagggagcgttttggctttaacttgttgattcgtaatgcctgttaggttagctctcgtcaatggtgattgagtctgagactaggttaacttgagagtctctgttgcggtggcacttagatttggttaatgaacttgttgtctagggttaatttattgagcatgtcaatgacctgtaaacttagaaaacaaaaccactcaattaccccatcctcgggaattctttatctgattgacttctttgtttactctactgtcgtttactgcatcctgttatctgtcgcttaatttctgcaattctttcttgttactcgacctcatactcgaccacccagttgtctggcaacagactgtgccgtcgagtataggtgttatactttctgtcagttactcgacctgtcactcgacctcacccagtgctctgcaaagagttgtgttagtcgagtgttttactatttctgtttgattttctgttttctgcatgttcacttaggactgctagaacacaccaaaaactgttattgcttggcttgactcagtgacttctgatcacatcttgattgttagcatcacacccatttggattgacaaccttcagtactacaatgacatgattgtgctttaggattaattgatcttaaaaacctattatcaatttggcgtcgttgccaattgggtgtttgtttgttacatttgagatttcaaacttgcttagatcaagttctttttcaattttcaatccggatgctaactgtgtgtttttcttgttgtcttcatgatccaggtacacctcagctgtatgcgaactcgatcaacaggcaatcagaacctccttttcaatgataacatcgatcgcataactcgcgaactcagagaaattagaaacacattcaaccttgtacctcagcaaccactcgaaatggctgacgaacggaatcaacaaaatggccctgtcaacattggtgctggagatgcaccacgtgatcaccgtcagaggaaagaaattgcacctcctgctatccagaacaacaacttcgagattaagagtggtctcatctcgatgattcaggggaacaaattccatggtctgccaatggaggatccactcgtcccccttgatgaattcgataggctctgcaacctaacaaagatcaatggtgtcagtgaagacgaattcaagctccgtttgttcccattctccttgggcgacaaagcacacatctgggagaagaatctgccccatgactcaatcaccacctgggatgattgcaagaaggcttttctatcaaagtt

SEQ ID NO: 33795 - DNA, 801 bp, Arabidopsis thaliana landsberg
taattattcagctaaaatttttgggcatgtttgaagcatgtcccccaaagttcatccattgcataatgtgacaatctagaaactaacaaaaagcctttggcctttggattgcgtaaagaggatttgtctgcaatatttatttaagaagggaagcaaaaatttaaaggacagagagatttagcgctagatgttttgtctatcttaagagtaacaaaaaacaatacatatgtacttacttacttgctcacattatattcaccacgtcgaccattaatgaagttagtacgttgttcaaccaaccaatcaacattgcttgatttaccgaccgcttttattaatagttatacatatgagtgtataatatacttatgtgccataggcgattgtattagtgactaaggagtataaacaaatgtgtatacatgtgcaggatgtgataattatgagtatgaatatacataaaaacaatctctttagctagcctataaagcttatttttttttttttgtgtgtgccaagactatatagattttgtatgaattttagaaatctagagaacaacttggaaaggttaggagaataaaagagattagcagtggaagtcacagaaatggaatggttattcaattattagagaccctataaacacaccaccgttaaaatggtgacaaaataaatagcttgtgaaaaagaggggagaaacagaaaaaaactaaagctgaaatgtcaatgattaaacaatttcatacaaattgattaggacaatgcataaaagttttgccctcctaaaatgtgtaacat

SEQ ID NO: 33796 - DNA, 455 bp, Arabidopsis thaliana landsberg
caagagattcaaactaccaagtgtcaacttcaattctaatctacttataccaaattaaagaaaatttttatttagtatttgagctttctacagttctagtgatggccatagccgaaacattatagccaacgaaaatttcacaaaaggaagaagaaaaggtcccagaggaagaaaaaatcgcaacttcaccataagatcaattcaggtaaagaaaactaagagagcccatcacggaatctatagcctatacgcattcaaaagacagagatcgatacattattccaaaatatagaaaagagcatacctgcaagagcagtagaagcatcaggagccatggcagatactaagccctacgcacgtaaaactaggagagggctatggatatctgagtgagttccgttgggggataccggcgtatgcttgaggatgcctggctgattatcacatatctgaaa

SEQ ID NO: 33797 - DNA, 831 bp, Arabidopsis thaliana landsberg
aaacgaaaatgaagaaattcaaaggcattgaagtcatcatacaaagcgatcacaaggttccccatctttgaataggatgaaagtaggaagtgcctcaatcttgtatttattagcaatactggggtatttttcggtatcaatcttcaccacctgtatcttgtctttcagggtttcactcacttcattgagtattggaaccatgaactggcaaggaccacacctgccaaacaaacagtacattctgattccaaatcatctgtttaacaaataaactcgataataagcaaacagactacactggatcccaacatagaccaagtatactcattcatgatgaataatagtcaactagaactggttgatgaccactcaactaacacatgttatcatttgacaccaaaacaaactcaccaggttgcataatagtcaactagaactggtttatcagagttcacaagcagatcctcaaatgagtcaaatgtctgcttcttggcttcaatctgaagtatgaacaagaatggtttgtcatttagttcaatctaaatcaagaagtagataaaggcactcactttaaatcaattccaaactctagagaaaatcagctatagaaactaaaataagaaaaatttcaaaataggaaagctatcatcagctctaccatcagaagaaagtttgaagcttgaattcaataattcatagggtaaaattaagtaagctagaattgaacaaaatataagctttggaaaaagatgtttaagcagagaaaggcgattacacgtcgaggagtgcattgagtcgttgaagataaagatggaaactttaagtcttcgg

SEQ ID NO: 33798 - DNA, 2691 bp, Arabidopsis thaliana landsberg
aaaatttttaatcaatattataacaaaaagttgcaataaatagacacagcaattgaaaaataaccctaaatatttttactgaaattgcgataaaaagacgctaacagaaaaattaactatatatcaaaaaattatgatgaaaagacacgaatgtaaaaaagtaaccgtctatattttaacaaacacaatttacgataaaaatacaattttacgaaaagttgcgataaaaagacactaatgaaaaaaaggaccgtcaatattaaccaaaaataaagataaaaagacacgaatgtaaacaaaaaataaccgtcaatattctaatagacacaactgtttacgataaaaagatatgaatggaaaaaaaaaataaccgtcaatattttaacaaacacaattgtttatgatgaaaatcagttttacgagaagttacgataaaaagacattaacgaaaaaaaataactttcaatgttaaccaaaaattacgataaaaagatatgaatgtaaaaaagtaaccgtctatcttttaacagacaactatttacgatgaaaagacacgaatgtagaaaataaatgttaatattttaatagacacaactgtttatgatgaaaagacacagttataaaaaaaataaccgtcaatattttaacagacacaactgtttatgatgaaaaaatacgaatgtaataaagtaaccatcaatattttaacagacacaaaaagacacgattgtaaaaaaatacccgccaatattttaacagatacaactgtttacgataaaaagacatgaatgcaaaaagtaatcgtcaatattttaatagacacaactgtttatgatgaaaagacgcgaatgtaaaaaaagtaaccgtcaattaaaagacacgaataaaaaaagtaatcgtcaatatgttaaccgacacaattgtttaagatgaaaagacacgaatgtaaaaaagtaatcgtcaacaatttaacagacgtaactgtttacgatgaaaagatatgaatgttaaaaataaccgtcaatgaaaagacatgagtgtaaaaagtaaccgttaatattttaaatttgttaatatttattgataattttctttttttaaaagcgtttaattttgttaagttctttgtcatttatgtaatttatgactactaaatttaatagatttttcacaaaatattaaaggatacatccaataaatagttttcaaaatgcatttagtgatagattttatcacattttagtattttacttcatacttgtacaaaatatcacgtagaacaaacattcacgagaaaatataattatcagaagaagaaaaaagtgattgaattaaagaaatttcaaactcaaacaaacagctcaccatcttggcagtatttcgccaaactcaaataaaaacactatacatgaaattaattcatcaacctcagattatgatacagaaaatagatcagataaaaaatataacaataacaataaaataaaatattgaatatatatgtggatgatttattttatatgataattttttcctcagaacttgaaaccgaggctgggccatttcttagcagaagactctttcttcggaggtcttgcatttggatcaatcagattctggagcgacttggctttgtagttccgcgaccgcccagcttccttcaaaagctcggccaaacgtttcttctcgtcttcgaaatccggattcgcagtcccaagcttttcctctctcagcttcagaacctgctctaatatctcaatcgcatcctctatcctgcaaattacatagccatcacaaagaaagactttaatgtttcattaaggatgtctaatctaatttaaccaatcatatagttttgttatgtcagatagttttctttaggacattaccgtcccatagcgtcataggtagcagctagattgctataaacaccgagagtgtcctgatcacacggtccacgttcttgttcaagaatacctcttgcttcttcaaacagctcacccgcttcatcaatcttgaaaagctgaacgcaggctagtcccatctggtttaatacaacaccgaagaaggcagatttctcacccgctgcccgtagctttgtcacagcgctctcaaacgcgtttcttgcgtcctcgtacctccccactgtgtaatacataactcccatccgtgcctctaaccctgcaagtatttacatacaaagccaaaactaatgtaaaggaagcttgtcgagaagattgacaatctcatgctgatatagctagagactcacatttatattcattttcttgtacgatcacaatctacttacctaaactacggctcagataactactcagatctcttatgtctagaattcttcgacaatatcactaacacacaataatagattagcgtcttgactaactctaaaataggtaggtcaaagcagcaaaacgagtaaagttactataagcggtttttccttacatgcttgacaatacaaaaataagtattttactttcaattcaacaccaaaatcgcagaatttcaactacactgcatagcaatccagctaaaggaacattcatggtatggacaaattacctgcaatggcgctctgctgtcctggcttatcctcaagcaatttcatagacttctgaagtagcttcaatgcttcctcaggttcatctacagactcataaatagcag

SEQ ID NO: 33799 - DNA, 2307 bp, Arabidopsis thaliana landsberg
gttcatcgtcgagtcaagtacattgaacctaacgaaatgagcagaaagcttgtgtctaaatctatataaatttccatttgacggcaatgaactctcgcgttggaggactaacctttggctcatggatctcatttttgctcatctccaaagctgcaagactctcaagagattgcagctgcaacgaatagaaaaggtcccaaacgaattgttcttaagagcatataattcccaagtattgcttctatagagacttaccagtatgactaaagccgcgtgttcataattcctaagagctgcactggatttttcgtctttctgcgctttgctcttttggtttttaagcttatgcagaacgtcctttgctatcctggtttacaccaacatttattttgtcacatttttatacatgaagattaaaaactcaaagatcaacttaagctaagaaaagagagctagtacagaaagatatatagataccaacctagctgagttttcaagataattctttgctttttctagtttggatagagcttcactgttatcagttcttctcatctgactagcctgaagcataaatgtctttgcgatgtgcagcaagtttccacctatctatcaatccaggagaggacataagatgaatatcactctatttccaatatatagatgaatgttttacacaagagagtgaacctggatatgtccttctggaagtaatttttttcgggcattgagacacctagcaggaagattgtcatagagttagttatatacatttggaatcatcatattactctgataacctaatcaagactttatgtacgcacttttcaaaaagttctagagcttctcccagcttcccagataatcgtaaagtgagagccaatgcttcagctgcagttattgcctccattgagttccatccctgtcatagattttagccattacgaagttataaactagaatcataaacataatggatgcaactagctacatctatgtaagtgatctcctcaacttatgactgatgtgaaatcagcagttcaaaagcataattaagctcgtttaagtaaaaaactatcgtcccaattatagacctgtataactgcacaatatctgaaagatttaaacttgtctattccaccatgcaaataccaggaagttagaacattttcctacagtactagattagaaagttagaatttgcaaggacgaaaagaggatgcagcaaaacacaaggattgtaagatgctaaatcaacgaaaaagattcttaaactcgacagcgaaaggaaagttatgtaagaaaaaaccacaccttcgataattccatcatgtgcaataatttcctttgaagcttttcagcctcggccagacgattggatcgtatatatatctgaaacaacagacgagaatgtaaaataacagaatttctgtggtttagttcattgcttcaaatcaatgcattgtaagaatagaaggcgacatcccaattacaagtatagtttaaggcaagaaaacctgagaaagatatctcagtctcctgatatatgccatggactctccttgaccaccttcctacatcagaagacgaaaaatacaataaagatgcatccaattgacaaaataaaacgtcaagatggcacaaatatcagtatttttaggataccgacatgcctcaagtattttaagagaatccagaataagagcttccgcatctgtattttttcctagcatatgtaatacctgtcgaatatcggatcatatgtaagaaggaagttgaaaatcatagattcaaatcagacttcatgacagcatggatgcgtcatattagatgcattttatcatatgtctgactgggcgagagctacttatcaagttcagggtgacaatatgtggctaatatgcatgaatctcaagaaaagaagtgttcttttcattatacgtttaaagagctcatggagattaacaaaatcaagaaaaatgagacatgaaagtaccgttccaagatgatacattgtctctgcataatccggatgattataccccaggactcgtcctttcaactagatgggaatcaaaagaaacattaagaagagaaatacatactaccaagtgctaagtgtgaattgaaaatcataaatagttatcaccacattcatacctttaaagcacgctgcacatggagcgatcagccaaaaaaaataaaaaaaaattattagcatcacagaatgtaaatcattcgactttggtgcgagtatatcaatagattaagaaaaacatatatacaggcaaacaacatgaatttaca

SEQ ID NO: 33800 - DNA, 2243 bp, Arabidopsis thaliana landsberg
catcctatcgtcgacaaatcttaaactaaagtaacttttactgttactttttaaatatgtcaaagtaaccaatatcttctacggaacttatatccaatttgcatacttttacagttttactcatactatacaaaatacaagcggatataaacaacaaaataagaaaactacactaatatctatagaaacttcaaattgaattgaatattatcgtgatatatatatatatatatatatatcgccgaatattccctggaaaaatacaaagactatactactctattggctataaatacacacacaaacccaacaaagctatttcattattcaaaaaccaatcacaaataacaaaacgaaaatgaagttttggtcacgaccattaacgtttcttataattattatctatctcataattcaacaagtcaactcatcaccaccgtcattatctataccggagcattttctccgatgcctcgacactcaaccatccgaccacggcagtcccaactcaagaaccgccgtgatcccaacaaactcatctttctcaacaaacctaatgaacggcgtcagaaacctccggttcgcttctgtctccacaagaaaaccagaagccataatcgccgccgtcaccgaaactcacataagagcaacaatctcttgctgcaaactcctaaacctagagctaagaatccgaagcggaggccacgactacgaaggcttctcatacacttctccggtacctttcgtaatcttagacatgtacaacttgaacaaaatcgatatcaacatgaaagacgaaaccgtttggatccaatccggggcttcactaggccagctttactacaacattgcaagtaaaagcaaagtccacgcttttcccgccggagtttgtcctaaagtcggcgccgaggacatttcagcggcggaggattcggtaacctcatgagaaaatacggtttatccattgatcatatcatcgacgctcaaatcatggacgccaacggtaaagtgtaccgtaaccgtcaagctatgggagaagacgtgttttgggctattcgcggcggaggcggcggaagctacggagtcattcttgcctggaagataaaactcgttagggttccggagaaagtcacagtttttaaactagaaagaacggttagagaaggtgccgttgatttagtccataaatggcaacaagtagctccggttatcgacagagatttatttatccggttagagattaaaccgataaaccggaaaatctctaaaggtaagacaattaaagtctcattcatcggaatgtttcttggtttaccggagagacttttaaacataacgaaacagagtttccctgagctacatttaacgaaagaagattgtatggtcaagaaatggatcgaatctagtgttttctgggcgaattatccagaaaaagcaccgatagagttacttctcaaaagagtatcaaccaacgaatactactggaaacgtacttcagattttgttcaagcaccaatctcaaaacagggtcttgcaaagatttttcagactatgatcgatcattcgccacttccacgacgagtttggatgcaatggaatccatggggagggaaaatggctgagatagcgtctgatgcgactgcgtttgtgcatagaggtggtaatgttttcatgattgagcatttcatgaattggtatagacctggagatgagcttgaagagaagttcttggcgattgcaagaagttttaaagaagctatggctccgtttgtttcgaagaatccgagagaagctttctttaattatagagatgttgatatcggaattactacgccggggtataatgcgacgtatgaaggagctaagatttatggggatagttatttcaaagggaattatttgagattggttaagattaaagcccggttcgaccggactaattttttccggtctcagcaagggattccggttcttgcttagtttggtgattggtgagtgtttgaattgattgtattgttgtgtgggaaggagtatactattaagttattaaaagttgaaatttgggatcatatccaatgaatctattgggtatgttccttagttgttcttagggggcatgggcagttgataattttgtgttaaataatggtttacttcaatctccaagagaagttatgtgctaaaaaattcaataataaccgtatcggagttgtatatctctaagagaattcaatgattatatc

SEQ ID NO: 33801 - DNA, 541 bp, Arabidopsis thaliana landsberg
gtaagttagattgggaaaagaaaagaaagttcattttactttgtgatcaactgataaaggcatggattctttgccgcggagtaaaaccactcttgaaccaccacagttagaaactatgatatgtgatgagcaaaccaaagcaacaacagcagttgatccgacggtctcagacgcaacagcctgaagaaccttatcagaagaaccaacaacggctctaccaatttttccttcaatctcaccatcgacagttagaaaacaactcgtgaagactttatcccactgcacctgcctaccctctcctgtattcctcttgcataattcgtcttttatacgttctatttcttcagccaaagcaaaatggagtctatctcggcaatagtcagcaacctacaagccattgtagatttaaaatctatgaattttaccagaacatctcaaagaggtgtataacaatatacaccgctaaaccaacttacataaaatgtgaatataaaatacaatatggcctccatgaccatcataaacaccgaaaaagtgaccg

SEQ ID NO: 33802 - DNA, 1797 bp, Arabidopsis thaliana landsberg
gaagcgtttatacatcactttcattgtgaagcagctgcggatgatttctacaaaggtgcattgcctgattggccgttagttgatgatctgaataatcaaaaacgattttacatggtaagattaattaagacattgatcatcgtttcttttggtttgctctagatcagttaagcagtgatctgtttttattgttgctttttgtaggtgaagaaatgcgagttgcaatccaatgattggatccgtctatatttggaacttgcagttggtgtacgttatcagcagacttcagaggtttttgtgtctcttttgcaaaacaatgacatacaatgatcagtgccattgttgttaacaataattaacaggtttggtttgcttcaaactgttgctgcatgcagagtgatctgtccaagttggagattgtgaaagtggcgatagaaactgctaccaaagatgaggagccgtctaatgagagactcaaagcctacagggcacatgtctacataacgtttaagggcttggcagagcctcgagcccatgagcgggtttttgagattggggagcatgttgaaccccgagctatagttagaagagtcatgggccatagaggagacttgactctcaagggtaagctttgtggtggtcaatatatcaaaaagcgttctctggctctcaagagtggaaaaaagtccccgaagtgtaaaaagcaaactcgcgtcggctaggcgtttgtatacatggccgtctgcgtaatgttaagatccatttgaaaatgtggatcagataataaactaagctattaattttgtgcgtttggattctttgattctttgataataaactaaagacttttaaatattattattctccaaaaagagcattcgagtgagttaggtgaggagaactctaacagtctcacgatgatctcccaagtcgccttctaaataattaagtcacgatgatctctcaagtcaaaaatttccttcaaaatcatatccaaccacattaaatggacattcagtaattggtatacaacacatgttcgaatgtctctaatatatgctaacaatttctatcagaaaagttggaattagtttcaaagaagaggtatgtgttgatcaagtaagacttgttataaatgcaaactacgacatgatccaatatccaaacacaatttgcaagtcgaaactgtaactgtagtaaatacatcattggttatgaattaaaatttctttcaaagtctctgagacaagagagacatattctacttcccattccaaacatctgatcttttgtacaaaaagaaaccccaagaaccttatataatcccaaaccccaaacaaagccgagagtatttatttcaagaaacggatgaaacaaattggaaggagaaagccggttttgctccatcaacggattggggaagacttgtctttcctttttagtcgggttgatgatgataaacactcaagtccttgtgctgaaaagacaatggctgatcggcacaacccgcgagggaagttgctgacttgtccttcctctaatacatattttccgttcagttttacccaatcctaatcgcatcacatgggatcttttgccataaacataaaaccatttgagtgctaactactaagtcactgaatccacatgcttagcgtatcctaatttgtgcatatattatgttgtgcatcatcaagcgctaaactgtggtctttcgtgtctctgcagataaatgtctttttttgagtgtttggtcaggggaataagcttcttctttgattgtgttaatatatatgg

SEQ ID NO: 33803 - DNA, 252 bp, Arabidopsis thaliana landsberg
ccaaagaaagtaaaatatattgacgagagcaccagcgcatgtaatgattcttgaaaggcaaacatactgaatcgagtgcggggttatgttcgttaattatatctggaacacccttactgtatctacaatgggcagacgggatctcctcactgagtacacttgttttactttcccctttttccttcttttctccaggttagtaagtttcaaaagttgcggttgaagttcgttcgttagtgaattttaaataaa

SEQ ID NO: 33804 - DNA, 7978 bp, Arabidopsis thaliana landsberg
tgaatgaatgtaaatcattagctgaaactagttagaaatttatacccccatagcatcattgccaatctttacttcgggttgtgcctccgacactgaatgcgatgctgcaagtatctccacaataacctgaatgttgaagtacacatgtagctggtttgaataaatataagaaatattgcctacaaattaagaagtatcaacaaaatcatgttcaataacacaagaaccacaacccataaaatgatacttgttgttactgcataccttataggatcaccgtcgatgttgacttctcgttgagtctctagcaatgaatgagatgctgcattgccctatggagaattgccctgtggagaattgtcctgtaaatgtttttttggacaaggactcagagatgaagcatctctctccagtgtccaataaatcaaggaactagttaaaaatgtatacctccatagggtcatcgggttgcggctccaccactgattgagatgctgcacccgcctccaaagtgacctgaatatcgaagtacactcctaagtatccacaaaatcctgtgcacaataactatgcacatgtgccattatttagtttaaggattgggatgcagcaaccatctccgatgtgttacatcaaattatatattagcttaccttcatcataggatcatcgtcaatgttttcttcgggttgtgtctccaacattgaatgagaagcttcaaccgtctccaaggtttcctgaattatgaattatagaggaagatggcgtaaggacaatgaaaatttggtttaaggactgggatgcagaaaccctctccgatgtgttccaacaaattatttattagcttacctcccgcataggatcatcgtcaatgttttcttcgggttgcgtctccaacactgaaagagaagcttcaaccgtctccaaggtgtcctgaataatgaattacaaacgaatatatcttcaggactgtgacaataatttggtttaagaatggactgaggagatttggactgacaataatttggtttatatattagcttacctccataatttggtttaagaatggactgaggagattgttttttgttgcttaggtttgcacttgaatcaaactgattgtaaagtacaatagtcaaatgtgtaagaatctataaaatgttaaataaaatgtttgatgtgttgtgtttgtatttataaaagtacctggatttttccctcatcatctgcatcattaccatttggatctttgacaccagtgtcaaaaattggattgccttcttttgcatcatccttataagaatcatgtgattcaagtggagtatgaaagacatccatggggtcatcagtaatcacctgaaaaaatatggtgatggccgccacgaaggagatgaggtcgagtacccacaaggcggagctgagacacaatagggagattcttcaatggcctgaagcaatcataggtagttattgacgaccaaatccgctcctttttcaactaaggtaagcacctcacttcaccattgtgttataccatctcctgtttttattttgattctgtgatgtgttttgtcctgagtactctcttccaaatttggtcacacagtggactgtgtgatttaagtttgggggagggctcaggaagtgtgtgttacattgtatagattcttgagtctgcattcatttaaggcatagaaaaaccaaaaaaatttgaaaaatttcagaaaataatttcacaaaaacagagtgttcatgtatttgcattacatttaggatcgagtctagagtgtttcatttaggattgttgcatatgcataggggataatgatgtgatagccttgtaagcattttggttcaccatataaactcaatgccctcgttgctagttgtctgatgcgtagtcaatgaaattgaagtaaaactgcaccatgcctagattgctctactcgaccacactgtcatgatttgataccattccctatcaatttgaacatgaatctgatttagaattatcatgtcttagcatcgaatttgaactcatggataccctaaaatacttgtattttcttactcattttgatcactcttgttagtccaagtagctgactctccttattagagtagttaacccgaacccaaacctaaactttctttcaagccctatatcacttgtgagtgtttgtgaggtcttatttcgattgagcttggtagaaagtgttaggttcgtaacgacagagatagtgtctcatgtagttctagttcacatttttcggactggataggactaggtgggcgcttatatcatgggttgggatgtgtttaaaagaaaagggtgaattcattgttgataaggaaagggaaagaattctaagggaagtaagctaaagaagttagaaaaaaaatctagtaaaggttttgggaatgttaaagaaaagaatgaggttcttgttagctaaagaagaagggttaaaagcctttggttttaaagattaaaaacaggaaccttagttgttaaagaaatccaaatccgctaggtgtatcagagtgttgagaaagcttctcctagagttaagagaaaagaaatgaatgatatgaaaaagagtttaaaagattcatgagtgcaaagggtagagttaagttcttgtattgggactggagttaggattaccattagagcttcatttgatatactctgggtagatgtgatcttatctctgtatgcatagcttgggacttacctttagcattctactaaagctcaatcattttttgagagatcccctgttactgaagcctattctgtaagggaccatctttgtctcttgacctttaccttagccaaatgagttcattgatgatgcattgcttgattcacgttccagagctaatgaatgttaaagggattggtagatttgaaagcatgtgtaggtcgagtataagagtcggattgattgataacaaggcatggctaacgtttttaagtaaaattcaatcttgcagcttagaactttcaacttggacattgattttattggctctatcatatgctttggttctgagtctccgctttcaaacctctccttcaactatgtcttcttatttgcttgagggcaagcaaagactaagtttgggggagttgataagtgtgtattttgcatgttttgagcatccatttgtcaccgttttagcatcatatcatcactgttttataccatttcacatcatttgtcatcactttgcatgtttaggatagttttgcatacatattgcatttctgagttgttttcaggtgatttggagctgtcgacgagcaaattggaagaagcggacctgatcatgacaaaccactcgacccagaggtcgagtaggagcttcaagatctcaagagaccactcgacccccaggtcgagtagaagacaccaccactctatcacatcactcgacccctaggtcgagtgacttcatctctatcttctgaccaccactcgatcacatcactcgacccccaggtcgagtgacttcatctccatctcctgaccaccactcgatcacatcactcgacccccaggtcaagtgtcttcatccctttgccagacaactactcgacctcatcactctaccaggaagtcgagtatcaccatcacaccacttgactgcatactctaccaggaagtcgagtatcaccatcacaccactctactgcatactcgatgacaagcttcagagccttcttcattccgcactcaactagacactcgagcacaaggaagaaaagaagactccagctattcactcgacctctcactcgaccacatgggtcgagtacagctcttaacccatcccaataattcgtcgttttgagtattagggtttcagaatatttggctataagtagcatgtacttcacattttcgcagacaagctttttatctagttttattccgcagacactttgtgttcttgacattttgtaatccggatttctctttatctattcagtattcagtattcagtttttgttcttgatttcgtttactgttgttcattctgttatcatcttgctattactctgttgctatcatgttttcattcttatcatcgtttatgatttctgttatgatgtctgagtagtgaataggtttctgaggatgggttagagtaatttagaattctcagtatgctaggtgattgagtattggttgatagatcccttctggattagttgttcttaatgcctattgctttctgatcaactggaatttgagcccagacatttccgcgcccaaaaggtgttcgatgaaatgtctgaaccactaattccagagatttgtgaccctgtaccaaggtattggttgcagggagcgttttggctttaacttgttgattcgtaatgcatgttaggttagctctcgtcaatggtgattgagtctgggactaggttaacttgagggtctctgttgcggtggcacttagatttggttatcgaacttgttgtctagggataatttattgagcatgtcaatcacttgtaaactgaggaaacaaaactactcaattaccccatccttggtaattctttatctgattgaatttctttatttactctctattgtttactgcatcttgtttcctgttgcttagtttttgctatttttgcctgttactcgacctaatactcgaccacccagttgtctggaaacagactgtgcagtcgagtatccttgttacattttctgtctgttactcgacctatcactcgaccacaccaagtgcttggcaacaagctgtgttggtcgattgtttattgtttctgcttgattttatgttttctgcatgttcacttaggactgctagaacacaccaaaacttgtttttgcttggcttgactctgtgaactctattcacatcttgattgttagcatcacacccatttggattgacaacttaaaatactacaacgacatgattggtgttttaggataattgactaaaaacctattataaatgactgccacataaaccttcgtgtacctcgctcataacgattttagacttctggcccaaaattgcaaagtaaataggaatcgcttacacctcgtctatgcaaagaatcctttgataaacaaattttgcgctaaagattctcatttttctagcctgccacttactctttgggagctcacctgtcacaatataatgttttattggctccctcaaatcagccccccaatctttagccagaatttggtcgatttcatgaaatatccgtgcttctggttcgggatgctcatttggttcgaggatgtctttgtcagcccatgtttccgtctcggcttcaacgatgttttctggaactgtatcttctattggtccgatattttcttcgaccctattttctttttgcgcggttggctttggtatggctgccccttttgattttcttcttttgacaggtggcaatttaatcgaaggttcaccgcgatcccgagctacagctcgagatcttgtaatcacgagtgtttctttttcttccttaacgatcctttccgaaatgcactctaccggaatgactctttttacttcggggtctgacgtcgacgctagagctgcaagtgcatccgcggttgtgttctctcctcgtggtatgcgaatgagttcgaacctcttgaaatttttagccaaatcttgaccacttcaagatatgcctccatccttgaatctttggcttcataatctccattgaactggttaacaaccagttgcgaatcacagtaggcaataaattcaccagctccaactccctgtgccaacatgagtccggcaattagagcttcatactctgcctcgttgttaaaagcactaaatagcaaacggaatggttgctcaaggattttcgacatgggagattccaacttgatccccactctggatccctgtttcgatgaagattcgtcaacatgcaactttcaagtttgataatctggttgctccggcgcgccaagcatcggtagtttggtcaggaaatctgccaaaacttgggccttcatgctaactcggcttttgtactctatatcatactcacttagctccaccgcccactttgccaatcttccgaactgacttggattatgaagtattgttcgaagtggctgattggttaacacctcgatcggatgagattggaagtatggacgcagctttcgggcagaggttaccaccgcaagtgcgagtttttccatcattgtatatctggtttctggatccgtcattgacttacttatgtaggaaatcggttgttgttctccgcgatcttcccgtatcaagactttgctaaccgcatggtttgatactgaaacgtacaaatagagcttctcatccacttcgggtttggacaacactggtggaatggttaggtacgccttaagctgtccaaatgcctcttcacatttctcatcccaaagaaatcctttggttctttttagaatttggtaaaaaggtaaagaattgtctgctgatcttcaaataaaacggttcataactgcgatccgaccagttatacgatgtacttctttgaagttttttggagatggcatgttcataaaggcgttgatttggttcggattgacttcaatttccctttttgtcacaatataaccaaggaatttcccggacgggactccaaacgtgcatttcgcagggttcaatttcatttggtattgattgagaatttcaaaacattcttttaaatgctagacgtgatcctttttcttcagcgacttcaccaacatatcatctatgtaaacttccattgtctttccaagatgctcgtggaacattttattgaccaatcactgataagtagtccctgcattttttaaaccaaaaggcattaccttgtagcagtaaatacctctatctgtgataaatgacgtcttctcctggtcttcgggattcatcattatttgattaaaacccgagaaggcgtccatgcaagttagtaactcattcccagcagtggattccacgagacgatctatatgcagaagcgggaaactatccttcgggcatgctttattgaggtgagtgaagtcgatgcatactctatcttttccattcttctttttgaccacaacggtgtttgccacccaatccgggtattgtactttccttatagaccttatccttaaaagtttgtccacttcgtcatttactgccttggctcgttccactccgagttttcttcttttttgttttaccggcttgaagcttggatccacgtttagctcgtggcagattatggttggatctatgccaggcatatccgctgctgaccacgcaaatgatgctttgttttttttcaaaagttctattatggcttcttttatttccccggttagagtagctccaattcgaactttccgatctggtttgtcctcctctaacattacttcgatcacgacatcgtccactttctgcccactaggaaatctcgggattgtttctttcttcgcaggcttcgttaattgctattggatcttcaaacgatggctagctagataacatgtccgcgaagcttcttgatctccccgaattgtttctactccgcttggaattggaaatttgatgcattgatgataagtagaggggactgccttcatttgataaatccaggcaatcccgaggatgatgttgtaggctgccggtttatcaaaaacgacaaagtccacgatttttgacatctttccggctagaaccggtagcttgattgttccaagagacatagccgactcgcttgtgaatgcctccaaaggagatggaggccccactatgtctgcccgactaattctcattctttccaaagttcctagaaagattaaatcaaccgaactgccagtatcgacaagaattctttacacttcgaagttagcaacgtccagcgtaatgtctagagagtcaccctcaggtctttctcatcaaa

SEQ ID NO: 33805 - DNA, 5909 bp, Arabidopsis thaliana landsberg
  unsure (1)..(5909): unsure at all n locations
acagaatgtgggagattagccgactctaagcctatacaccatagggttagtcaaaaatgaatgagttttgtatgtgagagaatttggaaataaacaaacctaactgtgttatcctttgacttaatcattgaatcccttgtgatctcttgaatacccaatggttctcttattcctttcatttgcttgatttactttcttccttgacttacttatttacttgcaacaaatcctcttttgtttattggtcctagctttactcttgatagttaggttttaacgcctaactaggttgtattcaatttctccttaaacactaacatgttgatgcagcaacatggggtgtcaatccatctcactaggtttgctaagcagtcaagatgtgtacaaaagcaactaagtcaagccagatgtataaagatggtgggtttctagtaacaatcctaaatcaagtttcaaacaataaaaatgagaactaagtgccctactcgatcacaggttcgagtagaaccaagcaaacgacagattcaaggacaaaaatgcaataataggtaactgaacagggtgaaggcaaataataggtgaaagaaatgcaataataggtgaatgtaaataagcaaataaatctaagaagaatagaagccctaaagatggattcattgataaaaggaattctagggtctatcaggtggttaacaagtgaaaggcaaataccctagacaaaatgttttaatacagatcaaagtagtctcgcatcaatgacctcaaacagagctaggtccagacttggtcttgtcaaaggaatctaactcagcaggcactaagcaccaaaaaatcaaagccaaaaagccctccaaagagccatgtctgggatagaggaaccaatctctggaattagtagatcagacattccatgtgaacatcttttggatgaagaatgccttagccgaattccaattgatcagaaagaaataagcattaagcccaactaatccaaaagggatctaacctaatcttaaccacctgaaaaaccctgaaattaccttaatgtaatccatcctcaagaaccctaatcactactctagcaacatgatcaagaacacaaacccagaaattactctaaacatatcaaaatgtagatctaagctagataaacaactttactcaaagaactaaatgcaaaaatgaaattgattaagagtaattaaggttcaaagattctaaaacacaaaaataaactaaaggataaaagcttggtcctttggacaaaccccaaagtgacctatttatagtaaaatcccaaaaaccctaggacacaagaagataaaagacttgagacggtttagtggatactcgacccttggggatcgagtgacaggatgctacaaagattgcgcctttgcctttatgctttgaatgatcgcttggtcgagtagttcttcttcctctccttttcttatgctcagttgtctggttgagtggggaaatgaggtagatcggaaggcactttgatcgatctttaggttaggtggaatccgttggctgtgatcgagtgattggtcaagtaaaggatcgagtatggggtcgagtggtgatgtatgtttatttcgcctcaggcttttacctaatagacaacacaactactgcaagagcacattatattggagtagtattttaggatcaaatccacaatgagagaagtagttcagagaaatccttaagaagagagtgaagctaggaccaaaataaaagagaggggttgttgtatgctacgaataactaaactaagagactactaactaaactaaacgataaactataagagagaagcgttaggtcatcgggggtttctccggatgttcacgattcaataataaggtatagatctcaatctaggtgataacatggctaggtttgtttacttccaaattcccgaacatacgaaactctatcaaaactagttaatcctaactgctagtaggtgaaaaccggctattatcactagtatattacgtactcagttgccctgtcggctagtaggtgctaacatggtttcaaaatacaagatcaggcattaagttcagattcaattctagttcataagtccctatcactcggcgggtgtgcaacggttatagttctttattcaatgagttaggtcaaacattcaaacgagattgtgccaaataatgaaatacctaaaggcaagtactaggtggcgttccggacatacaagcattaagaataaactcaactagaagaaatagtgtaaacgatcaaacaaagccatagaaaccgccaacctagatctttgatctattggtccccatgaatttccctttgaaacccccctcaaccccaactagagatctactcgctcatggcaaaggagctaatccaaagttgggttgagtaaaccataactaaaagatgaattaaacttaaaaggggtttagagattacttctttgaatgtagaatacaagaggcaaagctccaccttaaagagtcttacacgaaaacgagaaagagaaagagagagatggtgtttttcaagcttcaagaggtgcgacggctaagaggcagctcttggcgacggctagggttcgctggtgataaaggcacatttaaggttagggctaaggacaagtatttatacttgaggcccaagaattaggtttaggagtaagaacgtcattccgccggataagtaagtgatcgggccgagtagtgggcttcaggaaaagagcttaatggcggtggcgcaaaaagggaaagacttgggaatgacctaatggtcggtggtgagccactcggagctgcccgagttcaagtctcatcggccggatgtgttttggactttttatttccaaacagccggttcttgacatgttttcactctttggaccataacttctgaccgtcttcatggattgtttcgattcaacttcgacgttaattttgactcttctagctttccaatgacaccgagataccctcatgccgagatctgtaagaccttggctggatgtgaaacatctgatgcacacaaactgttctaaaacggatttttgttgacttctactcctttttgcatgaaaactcataattcttccttgaagcggaaatacttgaaatataccttgaagtgtcagatatggttcaaattacctagaactactctctcaaataagagatcaattgcagtattttaggatcgaattcacggagttcttttgttcaaacaatgagttaaatgtcgagattcagctagcatggtatcagtaaaaaaaaaaagagaacaaagtaaaaagacagcagattgactgtgttgtaaacgatttaataaagagctaggaacagggtattctcaggaaactattggttagtagatctaatgaaagctaggttgttctcgaaccattcttaaactcaaactctaattatggaataactggtgggcgtgccgcgaaactccctatatctatagctaataataaccggagaagccgagaaactatcaacctaaatatgcattctcaacgagttcaattgtacatcttagtaaataggccgattcttattacacacctataaaccagacccatcaaataatagatccaactatagatacctatggctggaatatctattgtctggattcaagatctagttaattactctagatctagcattaagcataattaaagatgatgaattctatggataacctagcaaagggggcaatctactaaaccatatgaatccctaatgagaaaccctatccctaacaagcagactactcagccatattgattgaagcaaacaacataattgagtatctgaaagcataaacacaacaaataagataagggaaagaagggatctcttcactgtattaagaactgaatgaatctatgaagaactgaatgaatctatgaagaatagaaacttaggtctaaacaatgtatataaaaccctataaaacgtctacggactaataatgcaaatatggaagtcttctagggcaaatttcctcttatgtaacttgaaagcgtcatagacttcgttaggccaaaactggtgacgatcgacaccaagagtgtgtcaatcgacactcctcttattctggaatagaaaatcatccttaggtttcttttccttagcgcttgctccaaaatgtctcctcatctccattgttgtcctactgcgtagaattccctgaaaagactcgaaaaataacataaagactcaaaatcctaaatctaaaacatagttaaaatcagtaaaaacagggttatatcagctaagaaggaattttcgctggttttgcagaaaaatatggtatcatctgcaaaaagaagatgattgatccttggacagccgagtgccactatgataccatgtagctgcccagtatcttacgccttcttgcacaaacctgagagaacctcgctgcatattatgaaaatatagggtgacaacaggtctccttggcgaatacctctcaaagggataaccaaacctttatgggagtgatttatcaaaaaagagtatgacatagtggaaatgcactgtatgtccaatcgttccaccttggatggaagctaggctttgaaacagcagcttcacaaagttcaacatggtcgtacgccttactcatgtccatcttaaccgccatggaacagtacttcttagcacctgacaccttgagaaaatgcagaacctcatgagtgattaacacattgtcagaaatagctcatcccggaatgaaagcggactgattttctgagaaaactgagtttagcagcggttgtaggcgcttcgatagtatctttgaaattatcttatcatagacactacacaaggcaattggtctataatctgccacctttttaggaccctcgatcttaggaataagccttatatgagtttcattaagcttgtcatgcatgatccatgttctgaacaaatcccgaatctccaaaacaatggctgtcccaaccgtagtccaattagtctagaaaaaacaggccaaaaatccatcaggcctcggggccttaccccgatagatattaaacaaagcttgtcttatttcctctgtagtaggttccttaatcaaggtctggttagactcctctgatatacaaggacttagggcttcaaggacaatatcttccatgccaacatgatccccacttggagatacaaacatcttgtgaaaataattggaaatcacctctacaatgccctgctcatcaaacacagccttgccattatcgtctttaataacaaagaacttattaatnnnnnnnnnnnnnnnnnnnnnnnnnnncagtgttcttatccccgagacaaagtcataactgacgactccggtgcttccaaaagctctcttcttccatataagccgactccaaatctgaattaatcctgaataggacttgtacatcatttacagggcttaccattacatgttctaactcctccttgaactgctcaatcagaagttgactattcctgaaacgttctctattctagagaataagcgcttgccttaccctagcaatcctctgattcacagagaggttaacatcttctagcaaagtttctcaataatcaccttggcttcttcattgtctttaagtttgcggtcatatctaaatcggccttgcttctcttttttctccaatgcaaaataagaaatcaagggtctgcgatccgaaccctcaaactgcaaatacttggatcttttattagggaacatttctgcccattcactgtttcccattgccctgtccaggctacatctgacaacatcattatgtcgcaccgcacgctaggagagtaaataaccagaatgccttacatcatatagattgcattcaaacataaagggacgtaactccacaa

SEQ ID NO: 33806 - DNA, 657 bp, Arabidopsis thaliana landsberg
  unsure (1)..(657): unsure at all n locations
agatttcttatctcatttaactctaaatgctaatcatgttactttgttaatttcaccactcacaacattgagaccagattagagaaattatttaaatggttggttctttaatatattttgcaggtgagccaaggtccgggtcaagtgactgtgattcgagagcataaattgggtgaagagtctgtcaagaagaaaagagctagtttcgtttacaggatgatacacagattagtcaagaaaattcaccaatgttattctatctcaagaacatgataacaatagatgagaccaagaacaccttttagtacttttccaaatttgtagaaatataagttatgtctatcttgttttgtaaactttgatcagattgtgtgacttcatgtatgtactctctctatataaaaagggtggatttgtgatacgaagttgttagagaagataaagttgtatgaattcaattaatacaactaccaaaatgttatgtctatccttttttgtgtaaaatttccctattttatgttggtccaatatataaaaacggtaaatttgtgatgagaagtccgagaagagaaagttggataattttcaattcatacacgatacaactaataaaatggtcactgtctttgacanaagatgaaaatgatcacaatcaac

SEQ ID NO: 33807 - DNA, 1075 bp, Arabidopsis thaliana landsberg
tttacagtatatgttatacgctaataggatattattcttgcaggctcatctagatcctattatttttccggattcctggatgaatcccgcggaagacttaacatggtcgaacgacaaagatgatgttagggtcgagaacatcgtgaagatggccgaggaaggcaagcctttttcgaatgaaatgtttggtggcgggtgtatcccaactgaggttgtcgttgcgtcgaaaaaacaaaagagaggtggtaaaaccaaggtagtccgtggtaggaaagcaccaactaatgctagatcagctactggtttgagaaggaaaaaccgaagtcccatcgaagaggaaggtgaagggtctggtgggatagatatccctgctttgtcctgcatgattgatgataaactgaaggcgcaaggtgagaagatcatcaaaggggtgattcattggtttacggaaaatttgagcgttgatgctggaaatcgaaaaggttcgatttctggggaacacggtactcaggctgaacagacggctgctgatgctgatggaaataccaacgatttatcctccccggatccccccaagaaaaatgctgaagcggatgttaatcctattccactgccgtgtcatcccgttcctatggagactgatttcacccttccatcgtttcagggtgaccaagcggtagcagccgtagatgacgtagtttctttctataactccgttgatgtaccgacctgctctccacgcggcggtaccaatgtaaatggaaagaacgatgttcaggatagcggataactttaatatatgctaatattggttgtagccgatatttttacaatttggatttattttggatattctctaattctcgccgatctgtagggcgaagcgttaatggatgatgattcaactaccgtcgaggatgagctggtattatgttagtgggtaccactgttataccttaactgttagattatctgttagattatgtgatactctgtatattacctactaactcattgccttcacacgttaatctatggaggtcaatgctgatgttcacgatcatattggcgagga

SEQ ID NO: 33808 - DNA, 2891 bp, Arabidopsis thaliana landsberg
tggttctaaactgttgttaacaaagggtcttcggagattagattcattgtattgaattcatttggtagttttgtgtccctagtagtacatttgtagagtagacatttagatcagttattgtatttggctgagtctgcttgttgtgcaaatgttttgtcagacgtttatatatgctgcttggttttatagtatttacgccgttatttggattgattgttgcagtgaattgttcatcatatgtatatggtttgatgtcaggtctgttcttaggtataacctgtactgatttctgacctttgtgtttgtgtctacttctgaaatctgatctcttgctagtcaaacatgtgaaagctaggctaatggtagttggtgtccctaattatatattgtagaagagattcagagtattggttattgtatttggttgagtttgcttgatggtaaactgattcaaatggtttatggcattgacgttatcacttggattgatatgttgcagtgaacgatccgtttgtgatgaaagcatggggaaaaacatacccagagaacaaacatgtgaagtttgtagctgatgggtctggagaatacacacaccttctcggacttgagcttgaccttaaggacaagggtcttggtgttaggtcaaggagatttgctctgttacttgatgatctcaaggtgactgtagccaatgtcgaatctggtggcgaattcacagtttccagcgccgatgatatcctcaaggctctctaagaaatgtaccacttgtgttgttatgttgtctatgtaaaccgctgtatgtgaagtagaggattctatagcctgttctcagacattaagcaaggttgtaataaagcggtttcattgttacttgtttggcataacaaagtatttggttttgttgtttttctatgcgttgattaatgaaagatgtgactcattgacgtgaacatttataccaaactttgccattgttgttctggactatggtagacacataccaaaaagttaggttacctgagtttctggtaagtatagttgctatattgcatttataatgtacataggcttctcacacattatcaaactttggtaagtttgtctctattttttttaccgctctatcttttagccttgctcatcggatatatatgtccgatgatgcttatcttgattgtgtaagcgtatgaccctttttttgttttgtgcggtatctaatgcttatcttgattgtgtaagcgtatgaccttctatttgttttgtgcggtattcaattcaacatgttgaatttgaaaataatagtaagagaagtacaaattgcaaattatactaaattgttataagattgcaattcaatttttgcatttagagagtgcttattgaaattagaaaagtataggatccgcgtgtttatcatatgggcggggtaggatcaactcgatcgaataacgaaatcaagtaactaatcaggtcttaaccttttacgatagatttaatcttaaccattcattttatttggtatgtaattaaaagctaatcaagggcatattctctctctattcgattatattctctacagatacaattttcatatatgttctaatcaaaatagcatatttgaatcaataatttgtttccgtaaataaggttacgaatatgatgcattaattttggatttaagaaatcttgcttgctcacaaagaaatcagactcaatttttattgtcatacaatgttttccaaaatatgtgtacatgttcttgcatatgagttaattagtgagggtttcctaaaaaagattgttgtatttttggaaaacaaagtttatttttggatattggttctgcattttacatctaatttgttttttaaatcataattttagaaaatctattactaaattaagaaatctatgaatggtttacttcattccgtaaaacactataaattgtcctaaactcatattcgctctcaagtcaaaactcttctattttcccctgtcttcatatccaacagagatctcttcatggctccaattactgtcggcgatgttgttagacggaactatctctttcttcgatgaaaatgatcagcttcagaccgtctctgttcactctatcgccgccggtaaaaaagtcattctctttggtgttcctggtgctttcactcccacatgcaggtacaaagtttcaaacgctttttcagatttatcctttgatgctaagctgatggattcttagattttgatttgagaattggcgtttttggtttttctgaggttagcatgacccatgtgcctggattcattgggaaagcagaggagctgaagtcaaagggtatcgatgagatcatttgctttagtggtaagtatgaatattgatatgttttggatctctactctgttcttgcctctatgagtttgtgtatagtgaccaaaaaatgttgaatgcatttgttgcagtgaatgatccatttgtgatgaaggcatggggaaagacataccaagagaacaagcatgtgaagtttgtagcagatgggtctggagaatacacacatcttcttggacttgagcttgatctcaaggacaagggtcttggtattaggtcaaggagatttgctctgttgcttgataaccttaaggtaactgtagccaatgtcgaaaatggtggcgagttcacggtttccagcgcagaggatatccttaaggctctctaagaaacattatcattcgcttgttgtattgtgaatctaaaccgctgtatgtgaagaagagaattatatagcctgatttcaatcaacaagcaagtgtattgacttgcttggcataataaagtatttggatttaatgtttttctttgcgttgattcatgacagatatgagtacttaaaatg

SEQ ID NO: 33809 - DNA, 1098 bp, Arabidopsis thaliana landsberg
gtgtcacaaatgtcatatgtcagagactataaaacattacatctgttgttgtaaaatctgtttttttttatcttcacatgcacatttcttagttccaagactcattaagatccacgtgtggaactttaggtgtcggtacgtggggaattttttgatttttgaagattctttttcacttactgaatgattattatgatcacgaatgtcaaggaacagttttgacccgaaacgtttcttgttgaaaaaatagttatatactttcttctttccattttttcatagattattgataagaggatactctgtttcatctgcctcattagtttgagcaacaatggcagcaatgttgactgttgagtttcaaaactgcttgatctttatcctcctctgcatccttttactcctatgttaccctctctttttcaagaaaccaaaggtctcacaagatggatttggtttgcctccaagccctctatctctgccaatcattggtcatcttcacctgcttttctctaatctaactcacaagtccttacagaaactctcctccaagtatggacctctcctctatctccgcatcttcaatgtcccgataatctttgtttcctcggcctcagtggcatatgagatcttcaggggacatgatgtgaacatctcttttcgagggaaccctcctatcgaggagtcccttttggtcggatcttttggatttttcaccgctccttatggagactattggaaattcatgaagaaggtcatggtcacgaaactgctcggaccgcaggcactacaaaggtctcgaggcatccgtgcagatgcgctagaacggttttacatgaacctgcttgataaggcgatgaagaaggaaagtgttgagattggtaaggaaacaatgaagctcatttacgacagcatctgcaagatgattatggggaggaatttttctgaggagaatggtgaggcggagagagtcagaggcttggtgaccgaatcgactgccttgacgaagaagatttttatggcaaacgtgttgcacaagccccttaagaagctcggaatctcattgttcaaaaaggagataatggatgtaaccaacag

SEQ ID NO: 33810 - DNA, 514 bp, Arabidopsis thaliana landsberg
ccgaaataaagaattaccttcttgatgaagtactcaacgttattgttccactcagactcaggcttattatgctcctccgtgttctccaccaaactaactttagcgatactaatcttcacaccctcctcttccttctctgctgcatacggagactctgacctaagaccagtcctcattttcttgcttccaaaactattcctcttaacacccaaatccttctctttcctcttcaccccttcctctttcctttccgattcagcttccaccgcaggcgtcacagaaacaacacttccgttctgatcttccattacactagaaacattaaagttggccggaagcgaacgacgagcagaaggaagacgagctcttgaattaggccgagaaggaagcgccggaggcatatctttaggccgatcacactcatctttctgacgaagagactcaagcatctcctctaacgaacttttcgctagtgtgttcggcgatgccgataacatcattcctcaatcacaga

SEQ ID NO: 33811 - DNA, 799 bp, Arabidopsis thaliana landsberg
tcttcatccgtaagaatgaagatttagacaaacttaaggatctgttcgatgagactacgttatatgacaaacaatggcaagctgcatggaaagagccagattcatcaacagtttcttcaaagaagtgaacaagttcttacaatctttcattttcctttttttgttatgcaataatctgtgaatcagtgaaagtttatctctactgaactactgatcttcagattttgtaatctttctgctttaaaaatctctatgaagtagtctcaaagataatgtatcgaaggtctttgacttgtaaagcagacctatttcgttttgacgcttgataatttaatcaataagagattttttttttaatatgcttaatactgttaatacatcatcaaatagtagcgtttccagatggatgtttgtgaaaagtcatcaagtaagtcatatttgtgaattaatcaaaaccgcacttcatcaaccaaccaaccaacctccaaagaatttgggcttcagtactaacgtcctttaagggtgtaacacattactgctctgctcttattgccgcaactaatttgactcaattttaagtacaaaatggaccattaaactgttgtcacttgtcaggaccaccggcccaaaattagtagggaccttaggacagtttgatattagtcttttaataaaaaaaaggttttttttggttatcttttagaaaaatccacatttttttttaataagatctttaattttcctaaaaatatcaaccaggctatggtttaatttttgggggccggaatttaaaaaaaaa

SEQ ID NO: 33812 - DNA, 1132 bp, Arabidopsis thaliana landsberg
agatatgtttatagacgttccaaaaggagatgcaatcttcatgagggtaagttatatacatatacatacgttatacatatacatacgtatcttgaatggaaaattttatgattactataatttacaaactaaaattgtttacgtagcggatattacgtgactggaacgacaaagattgtgtaaagatattaacaaattgttggaagagtcttccggaaaagggaaaagttataatagttgacatggttgcaccatcagaaccaaagagtgacgacattttctctaaggttgtttggtacggacatgttgatgttaacacaatgttcgggtggtaaagtgaggtcttttgctcagtttgaagctttagcctctgcttcaggttttcataaatgtgaagtaagtggtcttgcttatacatattctgttatcgaattccacaaatagatttggaatttaagaaagaaaagaaaccaatatatacgtaactttttctgttttgttaaatggcttttattgcatgtaatatagtttggtattggtttgagccttttcattgttcaagattatggttgttttagtattaataaacggtgtgtaagaaataaattcggataagtataaaagtgtgtattcgcattaggtttgtaaattactgcttgaagcttgatcacgggtttaacggtctgaccaggtcggtccggattttaaaacattgagtgaactcatttacactactattaaattcaacatatatcttttttcacaaattccataataacacataaattatgactaaactataggtacaaacattaatcagtacatgcaattgcattccaattcaatatatgtggatccttgttccctgaattcagcttcttgattgaaactatttcacagcatgtaggccagatggccctaggcttcgaccaggtgtttcacatggtggacttgtactcaacaagccgtagaattagtaacgggtatggtggctctcaccggaagaaagttgcttttttaaaatgttacttttttttttgtcgaataacgatttcattatagcctcaaagggaaaatatataatgttactttaattattgtctttccaacttatacataataggatgacaaa

SEQ ID NO: 33813 - DNA, 3770 bp, Arabidopsis thaliana landsberg
tgaaatcctctaacttttgtaggtaaaaacatttctgatttcgatctttctcgccaatttttattgagtctatctggctatttcggtcgttagaacgaatgattgcagcttatagttcagtgcttatgcattgctctttattgttttagagcctttttgtcgaactaatgatgtgaggcttggttattatgcatttctcttctatggtttgctgttctgtgttggattaagttctgaaactgttgatgttttgttggattaggttctggagcctcattccaggcgtgtggatgaaggttttagtgaagcacgtgttcttgcggaaatcactcttttgcctgacaagatccgtgttgcgtcagggagacgtgctgtggccatggccacaggtgttattgataggtactataaaaatggaactccccagaagcaggttgtggtcgttgttacctcaggttggtctgtgctctgctttgatcacaacctgaaaaagctgtgggaaacgaatctgcaggtttttatcttcttcgttctttgtctaacgttctgcataaaagtttgtcttggttcagtagtattgattctccttttgcttacctttgttggtggaatgacaggaggatttcccacataatgcacaccatagagagatagcaatttcgataagcaattacacattgaagcatggtgatacgggtttggttattgttggtggacggatggagatgcagccatatgtatgtaggatgaaaaattcctctgttgatttcctatgtatcttccatatgttaccaatagattattcttttcgttttagaatcacatggacccatttgaggaacttggcatgacagcacaaaatgctgatcaacacagaagaagtgctactgagaatcaggtacgactatatgataatttccttggactgtttcgtagctgtgtatatttatagtttccttatacattttctctagaactgaacaattctgaagaaagagctattcgtttgtagttatacatgttccaatgtgcataagaactttgtttggacagtttagaagaattttaagcttcctttcaggcctctgaagattctggagccataaacttgcgtcacttttctgtctatgcatttgctggcaagactggccttcttcgatggagtaaaaagactgatgtcagttatttattcttttctgctcacttctttatctacatattccttaactacattcgtacctgcaacaaatttggtggtcagattgatagatttttttcgttcttctcatctaggatgttgaagctcacacctcagatgcatcacaattaattccacaacacaattacaagcttgatgtgcatgctctaaatagccgtcacccaggagaggtaaaattaattcgttctccattgattattgagcgaaatagttaacctttccttcgttctttcggaagagatttctattgcactatcataatttgaaagctttgctggactgaagtttgagtgcagggaatttagagaatcaattcttagtgtcatgccccatcgctgggtaagtcttatgcctcctactacatgcttcgttagtgtaatatattagaaaaattgtttcaaagtacactgttgtctttgcatcaggaccgacgtgaagatacattattgaagcttgctcatttcaggcgacacaagaggaaaacattgaagaagcaggctggtagtaagtctacagcttatccgtttcacaaacctgaggaacacacacccgctggaaaggacttgtcaagaaagattccaaaattgattggaaaggctgcacgctatgctggctcggcaaaacccaagaaggtgaagctcttataaaacgtgaactacccgcatcaaaaataccaatatttgtttatgatagcaaagcaacatgttgatgcagggtatgcaatacattccgacgataactaattacacgaagctttggtgggttcctaatgttgttgtggctcatcaaaaggaaggaattgaagctattcatttgcctactggtcgaacactttgcaaggttggtcctagtggctgttccttcagatcatgaacaaggttactatttcacgtacctattacttacttagtcagcgtttataaattcttcctgttcgcagctttctctacttgaaggtggacttcacgccgacataaacggagatggtgttctcgatcatgtccaggtacacacatcaaacactactcccgcttttggttcattagccttctcatggatcttcaatttttacgaccataaatattctctatccaccttagactgtcggaggcaatgttggagagagaactgtagtgagcgggtcaatggaagtgttgaagccttgctgggcagtggcaacctcaggcgttcccatccgggaacagctctttaacgtctcgatctgccatcactccgcttttaacttcttgcactatggaggagattactcacgacacttcgcccaggcaagagacacctctactctggagatcgcaactcccattctcatccccagagatgatggacacaaacaccgcaaaggcagtcacggagatgtaatcttcttgacaaaccgtggagaggtacttttttcctttctatatatgccgatacaatctcttaatttcttcaactttgaatttcgtttaataatagctcatcactgctccgtatcaggtgacatcatacacgcctgatgtgcacggccacgacgcagtctggcaatggcagcttcagacagaagccacatggtcgaatctcccgtctccatcgggtttaactgaatcagggacggtggtcccaaccctgaaaccattctcgttgcgcattcatgataaccagcctatgatcctcgccgggggagatcaagcagcggtcatcatctctccgggaggaagcatattggcttccatcgaattaccgtctcaaccgactcatgcacttatcactgatgacttctcgaacgatggtctaacggatgtgattgtgatgacctcaaatggggtttacgggtttgttcaaaccagacagccaggggctctgttcttcagttcgttggtgggttgtctcttagtagttatggcagttattttcgttactcagcacttaaactccattcaaggtaagcctcgaccatcatctagcttttaatagaaatctcgtagagttttcttcctctctacggaagttaaaccggcaggtccgctttagcagcttcacccacatcggttttggtaaaccggaaatattactgatataccagtgtagattcagtgccttatttcctggtttcagctgtataactttatactttgtagaattcaagtaaaaaatggtagaggcaaatagaggactttatgtttttgtcaattttgatgttttaatggaattatgtgacatttaatttataaaaaaaaaaaaaaaaaaatacgttttctagaaatacttcgtagatatatatctcttcctcgatacaaagctacactttattcatgggactcatcgtacaatacgattttttgaacaaacaaaaaaagtactaaataggttaagtaaataaaataggcttagcttgccagtaataattgatgcagcgatgtggttaaaagttaagagttttttggaccacgctagtagtaataatataatcctcaattctcaaatgggaatgtgggaggcatgagtggtgtaatgatttacacataataatatacatactacaaaaccatcg

SEQ ID NO: 33814 - DNA, 1330 bp, Arabidopsis thaliana landsberg
aaataactgcacaaacgcattcaaagagagaatagtttaagcacacatattaaagaacaagtaccttgacgaagcgctcttcacttgattacacctatcaacatttctgtcagctgaagcagatgtactaggtgagttttctgaacccatgccattaaaagcctcatttgtgcaattcaagtcgttttgtgagacatgtccctaccatggagaagccaaaagaatattcattgggattcagatttttaaaaatacatgttcaaaatctaaggaaacatttaccctgtcaattggcatgttcatagccgactgaccaagaaactttgattgcccaaaatacccttggtttccgactggaacctgctccaatgtggttggcaaatgagaaactttttcttgacaagattcattagtgacatcaatattacccatgggatgatactgaaatttgcgacttgtcgagggcctactaccgacatgaccagattgtgtctcttttccaccaggcaacatagaaaaatcgcgggcatttaccatttcatttgttccagcattattcctcgcatatgactcaagaatctgactgccgtctctcgatttcagttgagggatagccttctccacagagttattatccaaatgctgttggatattgccctggacatcccgagaagcactagaatcgtttcctgcactggctattccaaatccatagcttgccctttgtggattttgtgtgaaatgattcttctgttcaatcagagcagctacatttggattggaagcagccttccaaataccaaatctatcttcaatgccctcattctgtcgaatagaacacaaattattctgttcatcaatacttgaagaatgaattatattaccagccatttgactaagttgagccataggcttctcaaacaggccatgatctgaaactttatttaccttgtcaggcaaatgttgaacagctgccccagtggaatcactgtggaatctctcacttagtggatttgaagcctttgcacccaaatcctgggctctactatcagtgtgcgaattcgcatgtgggacagtattgctgttaacccatccatgtacaccggcgtcatcgctggttgtttctgctacagcagattgcataagggcactccaactcccactttgcaaagaggggcatgcatcgaataggtcagaattactggacataagatttccttgcaagctcatatcagtgctgcttccaaatgcatcccacacattgtcatcagaaccaaacaaaatcttttcttcagtacgatctaatgctgacgacttcttgcatgcattc

SEQ ID NO: 33815 - DNA, 617 bp, Arabidopsis thaliana landsberg
gaagaatctcataagcaatctctgaaccaactccaaacaaatgcgtttcaagatccatttcgataccgataacctcatccatattaacccgagcccactttggaacttcttcaataacacctcgaatcagctcgtcttgtttagcagtcaatggctttaacaatccgcaggaaatgtttctttcttccaagtgttcgatcatggcatctactaggaaccctccggttagtccagggagattgattagattatcagaacgagctgcgtagatcatgagttcgtcgaagagttctggtccgatgaggtagttctcttgtgtagtagtggtaccaactaatagctcggtgtggataatgacttctctagcaattgtgaatctctgctgcgttaatatgagaccggtgttgcttaaacatcgcaggacgttcgagacatggctgacaaggctcgcgatcgcctgatagtgaccaccacttgctgaattcttgaatgatgtcaaggaatcttcaagaatgtcccaatcaggttctatagactctagaggtagcctcatttgtcctggaacttcaaaacgtaatatcagtttcaagtttcagattcaagaacttgtgtttatt

SEQ ID NO: 33816 - DNA, 17911 bp, Arabidopsis thaliana landsberg
  unsure (1)..(17911): unsure at all n locations
gattacgtctaaacgttttgacttcgttatgttaggccggaccggtccggtctgatttgaaccggagagggtggttatgtggattttaatctctttggcccctcaattttttaaaaaccctcacttattctcactaccgtcgctcattcctaacctatttgaaatacaattttacctttctcctttattttttttttattttctatttaatttttactaccaaataatttattaaaatcaaccaatcatatgcattctctctcttatctcattaatcacttaaatctacaaaaaaacgctggacaactgaaaccaataggcagaactatgttgatggacttctacgaaaacatataattacataccgtttttttttctttttgattttcaagttataatcaaaaagacttcagtcatacgcattgcttataatagatactattaaattttcttgtcgtatttatacaaattaatattttttgtttggtcaactaagtacaacccgcacaactaaggtctattcactttgctagttttctgaattttataaattatgaaaatttaaaaccaaattaagaaaacttaaataatgcatacacaaaatacacaacaactttttaacaaaaattcatatttttataagttaatgaaatttttatcacaaaattccacattcatacactaacaatcttatactttcatggttacttggtctatttgaactaaaaattttaaagtttcttaaatacttatatttttataaatataaatactccaatacattgtactgttattttgatgagacaataacgttccacccaaaactaataatttagagttgataacaactaaatttactaaattttcgagattgtacaattatgagcaaaaatgtgcaaccgaatacaactttacaattatgagcaatatatttttcagatatttatagatattttttagatatttgtagataatttataataaaaattagctttatttttttgtgataaaaatatttagtttttttttgtcatcaaaaatacttaattttatagttaaataaactattttttttcctttcaaacttttttttccttttcaaaacactgttgtttaataaaataaaatactaacattcataattttttgtgttttgttttggatcaaaatacgttgatgtgtagattcatatttatttgggagtttttttttgacaaaaaatcttaaattcatacataaacccggatacatagttgtacatgagcgtatcagttgtacctaaatacttagattcatatataaccttagagactaaaacccaaccctaataattgttcctaaaggcaaaacaccaacacaattgtatctaaaacaatgcaatatttaaatcaccaatctgcttctccttttcgagaaatttttttatctattactttacagcctacttataaatggaatctccccacaaaaaaaatacacaaaactttcatataaaaagtacaagtctttgataataattccaatcaaagcaaatcaaatttggcaaaaacataatcagatttttttgatgatataaggaacaacaagagaagggtatgaactattaatatgagataaccaatatctagagaacaaaaagtcaatctcataacaaacaaaaaaaaatccatttagactgatttgctctttatcgtttctaaactgttttcaattaaaaaagttatgttatagttatgacacaaggtcatacagttttagagagtgaaagggagaagattaaacatatatttggttacaaacatatgagaatatgagcgaaaatttatactaaaagaggaagagatgaggattagccaacgattcgaccacgacctctatgacaattttttcctcgtcctctaatcgtagtccattcattctcttgcaaattttgtgtaggtttgaccgtcggaccacgctagattatcaagatagatgcattcattaggtcttgatattgtacaaataggattattgataacaagaaagatgatgatattgatctcttttaaaaaatgattggggagagtcgcgaagagaaggaaaaaaaaattgatttcagaattataggcttaaaatcgattttggggataaaagatctgaaagtcatataggtttagatccaactgactggttgggtcgtaaataagtgaaaagcccttgtcttatttgtcttttcctattttctaacttaaaataaacaaacaaacatcttttcttaataacggcctaagtagagaatgattggaggacatgggacaggaagattaaaatccagatgtatgagagacattctagcccacttaatcaacaagtacacgagagagaaatgatctcataactccttttctgcaaacaacaaatctctaaagattttagtgtcattgagttgcctaacgaaatcaaccttgataatacttggaaattggtgaattacaaaacgaaatgtgagatagggaagaggttactggaaattgggagagaatgagagttacgatttctcattggaatggaactgttgatggtaagacgttttatttcaaaggtactattggaacaaaagaacttgctttcgcaccagactattggtttggggaacaacgttgtattacgatggagatgcaaagtgatgagatacaatgaggaagaatataacgtggccaagagagttttagttattttaactaattagtgggaatgtgttaacttgtccacgtttcacgtttcttagtagttactagtttgcttgtgtatttaaacatcgtttattgcataatctaatatgaagagaaaaattaagtaacttgttctaaaagtctttgcaaaccaaagtgttcttgtccttgttcttgatagagtaatcgtctggccagtcccttttgtcgaagacaaagccaataaatcctccctcaaaaaacattttttgttttaattttaaatctaaaatgacggatattactaatatatccccatccgaacgtaataattacccctaaaatcattgttcgtttccgaaccggagcacccgaaccacctttactcttaatttaaaaatcaaaaaacataaaccataatattttcagaaatttccgatcgaattcattcttcattttctaaccgttatcgatttctcttcccctattttctttaaattcaatagatcgattgtttcgttcttcttctttcttgtaaccaccattatttctgttatatttccgattcgaattcagtcaattcttctcgaatttcagtcggatttcttagagatgccgcttgagacgcgtggaggaggtcaacgaaaaagaaagagagaagtgccggcgaagaacgagaaagataaggtgctggcgaagaaagaggaatttaagatgccggcgaacaaagagaaagaaaaggtgtcggctgaggagaattgcccggctcgaacgactgcgacgacgacggttactatggctccaacgacagcgatagacgcgacggctccaaagacggctccaaggacggagaccccgatgcatgaggatgctacgttttatgatgctttagagaaaattaccgttgaagaaattcaagagaatgtgcaaagtgatgaggtgctggatgagaatgaaagagaagaagcaagtgaagaagaagaatcattgagtagtagccgaaccttgggctccaattccgatccagaggaaacggagacaaacgaggacctcgcgtgtgctaatcccgtggaggaggaggagagaggagaggagctccgagagagacgaggacgtcatagtgaaaaagtctctggaggagaggaccatagacgaggacatctcaatggaaaatgtggtaagtattccattttgtaataccgctttaattgggtaataatgcaattgtgaactgtggacaatactagtaacattgagaaatactaagttgatatctaggtaatatttgcggatgtgggtaatactttagagtaatacttcagttgtgcattgtggatagtactagtaacattaggaaatgctatgttgatatctaggtaatattggcggatgtgggtgatactacagagtaatactacaattgtgcccctgtggatagtactagtaacattgggaaatactacagatatgtcctggtttttactgatttataacattatttttagaatggtttttagagtcattatagtctttttcgtatgttttgagtcatttcaggtacacttacgcatgtgggagctatggagcataataaggaattttggaagcttttcagcaatgaagattatcaaagacgttttttcacgtgatggtgtcgatcgacactacgcatatgttgatcgacacccttatttcggctgagagaatttctgtcttctgccaagtctttgagaagccctgaagttttctttatttgcaaagtagtccctgcacgtttttagtcacttatatacctaattatttggtcattgttagacaaaagtttagttttattattttgagatacacttttggagagaagaatcgaatccctgtagagaggattttgaactctttttactcttattcttattcaatacaaactattcaaattacgatttgtgtttctgttatcatgtctgagtaatcaccttgttgggttttagggagtttcaatagggatttagatggattagtagctcgaaaaccccttagaattatttttagagttcttcatcttgattatttttattgctagttttagattgatcacctaaaacttgatattagataataggtatacccgccacaggtacttgttatttgaactattatatatgagcctaagcatttaagaaagaacaggtaggctcatagaagggctctggtttagatactaggtgaactaatcaagcttgataataatgcatgctttagcataggatttctcgacttctccggttatcttagctttaagtatagagagtttcgcggaacgccactggctactctagaatcatagtttgagttcgagaacggtgcgttaacaatcctaatattagctaaatctacaatttatctatctcccgagacaattccttagacctgacgctttaatcacttgaatctacgactcatttacttgcttatttgtctttaatattcaattacttcatctagcttattaaacaacatcataagtctattgtgtgaacatcgagagttcagtggaattcgacccttaagtgcgaacgacgatctcttatttgagagagtaaggttaaggcagtttaagctatatcaaatttggcgccgttgccgaagttctattttagttcaccattagactaggtgtcattttaagtgtagatactacttttctaccacctattaacgtgtttctttgtcttttggtctcttgtgtttcaggtaccttcagattgacaatcacgttcccatggcagactttcacggttgtgtcgaccgacactatcagggtgtcgatcgacaccctctgtagaaatagacggctacaataggcgatttagcagaactgacctcttctacacaaaccgatcagcattcaagttacctccttttgaaagagatgactntgctatacaccctgcctattatgatcttgtatctaaaggaaagtttagaggagctcccgatgaatcaccattggatcatttggaagtcttcgaagacatcgtttcctctattaaagcagaaggtataccggctgattaccttctttgcaaactcttcccccactctcttgcgaccagatgaacatcatggttgcgtcaactagaaccaggttccttaaccagttggactgatacaaagaatccattcatgattcacttcttcgatgaatccgtgacagaggcacttcgtttacaaatctattcgttcactcaggctccagccaagtcccttacagcagcttggctccgtttcaggtcttatcggcgagaatgtccccaacatggcttcgaagagagctaactcatcaatctattctacaaaggaatagccaagccataccggagtcaactcaatgaagcaagctactgtcacttcatgacaagaaccactagtgaagcattactcctcatcaccaatgctttaactagtctttcgacacaggaagttgacaccgaacgaagactttcagctgagattgccaccgcaagcaaagaggaccatgtttcagcaatctttgctcctacccaagcccccactccaccctccttagacaaccgactcgactccatgcatgcgcagattcttgcaagccaaacaaagctcgtggatgagtttaatagcaagtacacagatcttaatgggaaaatcaacaatccgcaatctcgtatccttgagccttctcctacatcagcatctatcaatgcagtcacacgacgtagcggaaagcagctcaatccaatacttcagagcgaacgttcagcttaaccttcatcttttccaattgaagaaaaagagtcagtgtcgatcgatacatcaaggtgtcgatcgataccaattactcttgacgtctctattttgcctttgtcgagtagaatcgataatttcacggaggaggaggaaattattcccgatggtgtcgatcgacaccctgttcgatcagacaatgtgcaaattccagctgcaaccaagtcagcaaatcggcgaattcccttccccaagagtcctaaaaagtcaagacaagccttagatgatgttagatgcaaggctatgattgataagctgattgttgagatgcctctagttgaagctattcatctatctcctacaatcataaggtatgttaagacaatggttactaagaatttgacgaaagaatgcagtgttattatgatttcagagcaaggcagcgacattattcaggaacgaatcccgaggaagctacctgatcctggaacttttgtacttagtgtcaccattaatcatgattccttcccaagagctttatgtgatctcggttctagtgtgaatctgatgcctcgttcagttgctatgcgtcttgggtattccaatcttgagcctacctttatcactcttgtgttggtagatcgttccacccgaattccagatggaattcttattgatgttcccatgatgaatgctgctaccaggaaagaccattttcccttaccatttatcgatcagatgttggagatgttagcaaatcataaatactattgtttccttgatggatactcaagattctttcagatcccgattcatcgagatgaccaggagaaaacgactttcacttgctcttatggtacatttgcttatcggagaatgtcattcggtctttgtaatgctcctgcaatatttcagagaggtatgatgtctatcttcacaaacatgattgaggatatcatggaagttttcatggatgatttttcagtttatggatcatcatttgaggattgcttagcgaatctctacatagtgttagcaagatgtgaggagaaacatctagttttaaattgggagaaatgtcactttatggtgcacgataggatagttctcggacacaggatttctgagcatggtatagaagttgatagagctaagattgaggttatgacaagtcttcaagcgcctgataatgttaaagtagtaaggagtttccttggacatgctgttttctacaggagattcatcaaagacttcgacagaatcgcaagaccattgactgctttactttgtaaagaagtcaaattcgagtttacacaagagtgtcatgatgcctttcagcagataaaacaagccttgatcagcgcaccaattgttcagccaccagattgggatttaccttttgaggtaatgtgtgatgcgagtgattttgcagttggagctgttctaggaaagagaaaggataagaaacttcatgcaatctactatgcaagtaaaactcttgatgatgctcaaaggaattatgcaactacagagaaagagttgttagctgtggtgtttgctttcgaaaaattcagatcttatctcgttggatccaaggttattgttcacacagatcatgctgccttgaagtatttgatgtataagaaggatgctaagccaagacttttgagatggattttccttcttcaagaatttgacatagaagttagagataagaaaggagttgagaatggtgtagctgatcatttgtcacgcattaggatcgatgatgatgtccctagaaatgatttcttgcctgaagagaacatttacattattgatacagctgaagacgatgactacaaacgtgacaggttgcaggatcgtgcttcagtgtcgatcgacactcccgttatgtcgatcgacactcacatttcagaggaagttgatattcgtagttgcgcgatggtgtcgatcgacacccttgcacctgttgatcgacacccttctgaatcgataagaaattggtcaccaactgagaatcgcgccgtcacatcggtcgagaaagattatccatggtatgctgacattgttaattacctagctgcagatgtggagcctgatagtttcacaaattacaacaagaaaagattcctaagagagattaggcgatatcattgggatgagccttatctctataagcatcgttttgatagaatttacaggagatgcattgctgcaacagaggttcctgatatactatcgcattgtcacagctctagctatggtggtcattttgcaactttcaaaacagtatccaaaattcttcaagcagacttttggtggcctacaatcttttgggatactcagaagttcatatcacattgtgacccttgtcagagaaggggaaagatcagcaagcgtaatgagatgcctcagaaatttatactcgaagtcaaagtcttcgattgttggggtatagattttgtgggaccattcccaccttccaacaagaatctctacatcctagtagctgttgattatttctccaaatgggtagaagctatagctagtccgaagaacgattcagcggttgtcatgaaactcttcaaatctatcatcttccctcgttttggagtgccacgcatagtcttagtgatagaggtaagcatttcattaacaagattcttgcaaaattgcttttacagtatggagtccagcatcgggttgctaccccctaccatccacaaacaagccgacaagttgaagtttctaacaggcaaatcaaagagattcttgagaaaaagtgggtaaagcgaaaaaggagtggtcttacaagttagataatgcactgtgggcctacagaacggctttcaaaactccgcttggtaccacaccttttcatcttctatatggtaaagcttgtcatcttccagtggaattagagcacaaagcagcttgggcagtcaagatgataaatttcgacatcaaatcagctggagaaaggagacttattcagttgaatgagcttaatgaaatacgaattcacgcttataacaactcgaagctctacaaagaacgaacaaaagcctaccacgacaagaagattcttactcggacctttgagcctaatgaccaggtacttctttatgattctagactgacaatatttcctggcaaattgtcttctcgttggacaggtccctacacagtccactcggttaggccatatggaacaatcattctcaaaaacaacaattgcaaaccatttggtgtgaatggacagagagtcaaacactactaggctgaagctgagattccagtagaaaagcctttggatcttcaggacccacctgttgattaagcaactgcaaagttaagctattgactataaacaagtgcttagtgggaggcaacccactggtatggttttctttctctttttcttttatttttcgtttttcttttatttttctcgcttactctatatttgagtgccactggggacagtgtcgtttaagtctgggggaggcagttactaactatgtttttctttttgagtcttattcttactcttttttttcttttttttgagtcgttttattgagtcaaaattttgtttggaattatgatctctattctttagattattgcctggttgattaatgctgcaggttcgactcaatccgactaatggaaatctagatggcaaaccaacagaccaatgtgataaaaagaatatgttactctccccttataaaaagaaaaatataatgagatattgagacgattttcagatagtgtataggggtaggaaagtttcctatgaccccattattatacattatttgaaatgatctattacaaaggttggaaaaataccgaggatgtcgatccagtatgcgagttcccctttgtttactctctaaaaaggataagtctgggggagagaaagaacaccaaagaaaaagaaaaatggtcgatttatcatggtatagtacaggaatgagtctagaaggatcttgaatgttagcttgtttgatgagacccagcgatgaaagcctggtggatatagttgtggaacttaggtatggaggctagaatgttgtataagcttgtagagaactacatgttgcttaggatttgattagacttgctaagcatatggatttggttagaatgatcaaggcaatagaatagagattgttgggagttctttgttttcaaacctcttccacgggttcggcttttgtgttttgcttgagggcaagcaaagctaagtctgggggagttgatatatccctatttttaccgattttagctatgatttaggtacaggttttagaatctaattgtaatttctagagtcttttctaatccttttcaggtctttacatgtttgggatgcatttgaagattatggagcattctggagatcaaaagacaacttaagctgcagaagcaatccggagacaaaaatgcacgtagatgtcgaacgacaccacccctggtgtcgagcgacaccaatacctgacggtaatttcgagacgcaacttattgatgttttgaagatttccaaattcggcccagaactttttcctatgtttaattaaggcccatcacgtttttaagacatatatatagttttcaggtcattgttttagacactaagctttgggaggctattccttggatctcttttgtactttggtagcaaaaccctgtggaaactccctttggatctttcttactctattctcttcttgttttatatattgatttctattctaatcatgttgtttgcttcattcatcatgcttgagtagttttcttgttaggtttagggttctcattagggtatagatgattagtagattgccccttgctggtatctgtagagttcttcatcttgttattcttatgctagttctagagtagctaactagaacttgatcttagataataggtatgccctttttaggggcgggcgtggnaacccctcatagatgagcctaggcatttaagaaagaacaggtaggctcatagaagggctctggtttagatactaggtgaattaatcaagcttattaacaatgcatactttagcataggatttatcggcttctctagttatcttattctttaagtatagagagtttcgcggaacgccaccggttactctagaatcatagtttgagtttgagaatcgtgcgattacaatcctgatattagctagatctacaatttatatatctcccgagacaattccttagacccgatgctttaatcacttgaatctacaactcatttacttgcttatttgtcttttacattcaattacttcatttagcttattaaacaacatcataagtccattgtgtgagcatcgagagctcagtggaattcgacccttaagtgctaacgacgatttcttatttgagggagtaagcttaaggcaatttgagctatatcacttgcatttcagccatacacttgtgcttcacttggaaacaagctaatttggttttattcatatttttgcccattgctctcattctaccaggattgccatgccctaacagttggcttagtgaatcttgagcttcatttgttgcaagtgatggattatcattgttaacaatctcctctgcctttttctgaaactcttaacatacatattaaaatggcagtctgttgccagataacagggtggtcgagtatgagatcgagtaacaagaaagaattgcagaaattaagcaacatacgacaagatgcagtaaacaacagtagagtaaacaaagaattcaatcagataaagaattcccgaggatggggtaattgagtagttttgtttcctcagtttacaggtgattgacatgctcaataaattatccctagacaacaagttcattaaccaaatctaattgccaccgcaatagagaccctcaagttaacctagtcccagactcaatcaccattgacgagagctaacctaacaggcattacgaatcaacaagttaaagccaaaacgctccgtgcaaccaataccttggtacagggccacgaatctctgaaattagtggtttagacatttcatcgaacaccttttggacgcaaaaatgtctgggctcaaattccaattgatcagaaagcaataggcattaagaacaactaatccagaagggatctatcaatcaaactcaactacccagcatactgagaattctaaactactctaacccatcctcagaaaacctatgcactactcaaacaccattgcagagaacataaacgttgaaacggatgaaaacatgataaaaccagagtaatagcaaggcaataacaaggtcaacagaagtatacgaaatcaagaacaaatattgaatactgaatactgaatagataaagagaaatccggattacaaaaggtcaagaacacagtgtctgcggaataaaacttagataaacgaaaatgtaaagtacatgctacttatagcgaaatacttttgataccctaatactcaaaacgacgcagtattgggatggattaagaacggtactcgacccaggtggtcgagtgagtggtcgagtgataagctggagtcttcttttcttccttgttctcgagtgtctagttgagtgtggaatgaaaaagactctgaagctggcagtcgagtatgtagtcgagtgatggtgatggtggtactcgacttcctggtagagtgatcgagtgaaggtgatggagatactcgaccatgtggtagagtgattggtcgagtgaatgatgatggtgatactcggccatgttggtagagtggtctattgaggtcgtaaagcgtctactcgacctggtggtcgagtggtttgacatgatcaggtctgcttcttccatttagctcgtcaacaactccaaatcatctgaaaacaacacaaatatgcaacatgcatgcaaaactatccttaacatgcaaagtgatgacaaatgatgagaaatgatataaaacagtgatgatatgatgataaagttatgacaaatggatgctcaaaacaggcaaaatacacacttatcaactcccccaaacttagtctttgcttgccctcaagcaaacaattaagaacaagctggaggtgaggtttgaaggctgggactcagagccaaagcaccagataaaccagatgaaatcaatgtccaagttgatagttataagctgcgatgtggtcgaattctactcaaaaacgttagccatgccatattatcaatcaatccgactcatatgctcgacctacacatgttttcaaatctacaaatccctttaacattcattagttctggaacgtgaatcaagcaatgcatcatcaaagaactcatttggctaaggtaaaaggtcaagagacaaagatggtcccttacagaataggcttcagtaataggggatctctcaaaaaatgattaagctttagtagaatgctaaaggtaagtgccaacctatgcatacagagataagatcccatctacccagagtacatcaaatgaagctctaatggtaatcccacctccaatcccaatacaagaactaaactctaccctttgcattcatgaatcttttaagcactttttctaatcattcttttcttttctcttaactctaggagaagctttctcaacactttgttacatctagcggatttggatttctttaacaactaaggttcctgtttttaacattttaaagccaagggcttttgcccatctccaatagctaacaagaactctttcttttctttacaaatcccaaaacctttactagactttttctgcttctttagcttacttcacctagagtcttctaccttttcttatcattgaatcaacccctttttttttttcttttaaacacatcccaacccaaagtataagcgcccacctagtcctatctagtccgaaaaatgcgaactagaactacatgagacactatctctgtcgttacgaacctaacactttctaccaagcttaatcggaataagacctcacaaacactcacaagttatatagggcttgaaagaaagtctaggtttgggtttgggttaactgctctaataaggagagtcaggtacttggattaacaagagtgatcaaaatgaataagaaaatccaagtattttagggtatcgatgagtgcaaatttgatgcagacatgataattaaagataagattcaggttcaaattgatagggaatggtatcagatcatgacagtgtggtcgaatagagcaatctaggcatggttcagttttatttcaatttcattgactatgcaacagacagctagcaacgagggcattgagtttatccggtgaatcaaaatgcttacaaggctatctcatcatcatcccctatgcatatgcaacaatcctaaatgaaacactctagactcgatcctaaatgtaatgcaactacatgaacactcttttttttttgtgaaatcattttctgaaatttttcaattttttttggtttttctatgccttagatgaatacagactccaaaatatatacaatgcaacacacacttcttgagccctcccccaaacttaaatcacacagtccactgtgcgaataaacttggaagagagtactcaggacaaatccaatcacagaaacaaaaaaaatgaagaaacaaatcacaacggatgatataatacaatggtgaagtgaggcgcttacctcagtcgaagaatgaacgtagttgctcctcaatggctgcctatgatcgctcccaggccatagacgaaccaccttgttctgtatcagctccagcaggtgggtactcgacctcatcagctctctggcggccagcaccgctctgaggatactcgacctctctccttctgttgcggccagcaccgcggtcgcgtaaactacgagactgcagaagtcgtccgctcctactgctagatcgagtgagtgtagtcctcctcttcctcctagattcacgaggctcgaatgatgaatgcctcgcacggacatgcagaatcttctactctctaggctcaggcctgcgccgacttggctcgggcgcgtcatatcttctcgaaggcatgtcctgagggagatgtccctgcggaatagctgtagtggaagaagagcaactgagcttgttcttcagaaacttgatagccctgaggcagttggcgagtaacttgtcctatttcatgcaccacttctgcagcttgctgttgttccctcgcaggaggtatatgctcactgaaatgatacatgctcgtgtcaaactccgcctcatctatatcatccgtctcatcaatatcttctgttgtagcttcttcggtatgactgatctcctcagttggtggactgccctcgaaataaagttcttcaagcgcaggcttgaagtcaatcttcctgccctcgagaatcctagtagcatcaatgcaggggagaagaatgttggcgattttaatcgatgaatgctcgaacctgtagcggtgaaagtcaccagccatgtcaaactccaagaactcacatctgcgcaaatgatccaagtccatcatcctcggtgctaaacctagttccttgagcggtactccacaagcttccagaattggcgtcacaacgccacccacgcatagtgctcctctcaccttcttcttcccgttcgtcaacgcccacttcctgtatccacacagatggatcaacagaggcattactggtggtgcgttgttgagatcgcctctcaagacattcttccccttcgtccgtcggagaatccctgtaagcgcataatctatcatctccatgtccgtgttagacacggtgcctgtagactccctggagtaaaagacattggcgaccgatcgctgaaagtagcggatcacaggacttcggatttggttgctcttagaccgcgccgagtttagcggtagatagttccctatagtggcccacgaatccttaagctcctctctgtcaaatctgggtttggttccctttccactagggaaaccaaacagttattctaacttcttaatcgaaagctgataccgctgttcatacaatgagaacgtcaagaagcctaaccccatggtatccagctcaaagtctgtgagtgcctcatacatctccacttgcagcgtggaaagaaactcgattgtctcctccttataggcagggtaagggtaagacatgagtgtctcctgatgacacttctcgaacaaatgctgcacgtcctccagtaaccccagctgggctaaagtctcataacacggatacctcgttccccagaaatcattcatctcaaagaacctgatatactcttccactgtaacctcgtcaggtttgttcagcagctttgtctccttgcgccatgactctggctcatactcagtttcgatgtcctcatcaatcagctcatatctactcgacatcgccctctttcctctggcgatttcagctcttctctgattacgtcgggctgcagagcgttcgaattcatccctgaagctctggtaaacattttgctctctcggtctagcggaccaggactctgcttcatcaacattgtaatcagggtccatagaggattctccactgtagttactcatgatgaaacctgaaaacagacaaaactcaaaaataaacgttaatatgttagtaacagcaaaccaaaaacacaaaccaatcaagtgaactggtcgagtgtaccaaaaaattttttttttttttttttttttcggtttagtggtgaggcggtgtgtcttggcgaggtcgagtggcgaatgtgagcttgaaaggcggatgtgctcttgccgtgaagtcgagtgaattgagtaaagcggtgaagttgttgatgatttaaaatcgagtacttggtgagaattggagtgagcgatgatgagagagatgcagtgaatcgagtgaagtggctatgaaggagaaagtggtgaagcggtcgagtgaagtatgggctggatgaagcggccgagtggtgcggcttggacggaggagaaggtggtgaagcggtcgagtgcgtttgctgaatcgagtgactcggttatgaagatggaggtgaagagatcgagtgaagcttgtgagaatgacaatggtgatgagaactcgagtgatgttgaactcgagtgatgttgaactcgctgaagaagagaagacggtggtggctttggtgaagaaatgagctgcggcggtcgagtgatggtcttgaggtagaggtcgagtgatggtgacgaatacttgaggacttgaattgcaatgagcaacgatgggagatgagagagttgcgaaaagtttggcgtttggagaaagacgaggtcgagtatatgaagaggatggtgatgaggtccagtgttgttgggatgaaaagaaagggagaagtcgagtgctttttaaggatagagaaggcccacaggtcaagtgaatgggggtttggtttg

SEQ ID NO: 33817 - DNA, 5319 bp, Arabidopsis thaliana landsberg
agatcagttcatcacgtacattaacagcaccaatgaggtccttcacaggtttgtgctcatgtgcccatggctgcttgaagtgctgaagagattctttgcgtgagctaacaatcagtccctgcaaaataatgttcaaaagagaaacatatatgaacaagaacggtatagctaaaaaagatgagactgatcttggtggtttgcgcctaacaataccttggagtccacaagccaaatcttcttccgggtctcagtgatgggagctccagtctacaaaaaaaaaaaagatatgatcaatcacatactcttagccaaaaaacagatcaaatgcaagaaaactcccagattgactaacctctttcgaaatcttaagagcaattagctcagcgataccggttccagccttcaaagaatcagcgagataaagtgtaagcagcaaaaaataaatgtaagaattataagcttatagagtataatgctttctggtctcacctctccggcacccaagaacaggaaggtatggtcagccagttttttaccaagcaccttctgagcggcaataagcccagcaagcaccacggatgcagtaccctgcaattacagaaaacaaaatcaagttcttggtaagcactctgacatcacaaccaaaaatttaagaaaaaaaagatcaatcttgaggagaagatgctacctggatatcgtcattgaagacaagatggctatcactgtacttagacaaaaggtcaaacgcattgtggtttgcaaaatcttcaaactgaaaagatgagtgtatgatattaattccggacatcttttatcgtagttctgacaacaatcatagttcttaagagagtatcctatggctcacctgaaccaacactttctctccatagttctgctttacagcgcacatgaattcgtgcaggaattcagcatattcctgaatcacaaaagcaaatagacttctcagtttttgaaaaatcatagtatttgctataagaagagaaaacactgataggaattgattagtaaacctggccagttgctcttcgctgtttaagaccgatgtagaattcatcatttagcaacttctcattgtttgtacccacatcaatggtgattggaagacactgcatttgaaagccgattttcatttaggatcaaaacagttattgagttatcaatcaagtagaaccaatttctagagcagcttttgttctagtgcttacagctgatggacggattcctcccaaagcggtgtaaagagaaagtttccccactggaattcccattccctggaaaatattgaaatcgttcaaacagatgatagatgtgaactttcaacacaaaatgtttaagtttcaagtgtaactcaagaacttatttattacctggcaaccaagatctcccagaccgagaatccgctcaccatcagtaacaacaataacttggattcctctctggggccagttcttcaaaacttcaagaatcttgcccctaaagaacattcattcacattagtttaaagaaacaaaatggaagcgacctggttaaagagattttaaaacacacttctcgttcaaactgatgtagagaccctgtggcttcctgaaaatgctcccatacttctggcaagcctcaccaactgttggtgtgtacacaactggaagcaactcctcaacgttatcaatcaaaagcttgtagaacaacctctcgttcctttcctgcaagattcagatacataagccaccagttgtaagaaaagaaaaactaaccaaacaaagctttggacacattctctactctactaaacatgaattcgaagaacaatcactgacctgaagatccatcagggccatgtaacgctgcagaggaacagtgtactgacggagattgtgcatcaccttcctctcctaataaaatcacccacaaaacagaagttaacacagacaaaacccaactcaaaaactaaacaaaagtgagttcttttatataaaacctcaagttacctgaacatcttgactcaaaatcacagggggaagaagaccagttatgtaatgagcatctctctctttatcagtaaaagcaagtcctttattgtaacgtggatcacgcatcaatgtatacccactgttcaatacaagaacatttcaatccactataagccccacagaaaaatcggaactttaacaagaagaaacactaagttcatatttcacagaagttggtaagtttagaaacttaaaaaagcaaactttacttagctgaagcaattgtgatggatcacaaaaagtaaaacaaaagggtatgattgagatctaaaggtgggttgactcacctagcgacagaggtaacccaaggggtgacaagctggtccaaggtagcggaatcctcaccgtagacgtcagaaataccaccgccgacgccggatctgttatcggcgacatcctcaccgggtaaatcagtcggagtacttcccatatctcttctgagctaatacaaacagaggaagcaaagtttacggagtagtagattgatgatgaataatgagcaagaagatattttgtttatgtggaatgatgatgaaagacagaagtggaggatagtggatttatataggccagaggaaaatgagacccacaagtttgaaatgaaaagtctgaaaattggagcttattgtcaaacagtgaagaagaacgtggacggagtcatccttcgtcgtaggtccctctcttcatccattacctcgtgtagacaactttcactttttcattattggttattttttcccaccaaacatataacaaatttaataaaagtttaagaaacatgtaagccactttcattttgagattagatatgtgtagacttttataaaactcggtgcgatattacattatgaattgttatttatgtaaatgattcttttcccctttttttatttttttaaatgtacgaatatacgatgatgttagaaacaaatcataataattgtacaatgtcacaaatcaaagggaaaaaaaaaacaaataattgtatttgaggctgcgggaatgttgtcggaggatcaaacttggcagccatattggaccccccaacttgaatttatataagtcaacaagattttttttaatactaatttaagaagagtgaaattttcaaataaactattacagagaataaacccacctcaaataggtaccgaactgtcatttttagtgtatgtaatagtaaaaacccacctcaaataggtaccaaactgtcattattagtgtaaggaatgcttaaagtctattagtaataatttaatttaacgatcatggataaggattgctgctagtgcatggattgaattaattattcattagtcgtaagcacatatgtccgatttgaaataagcattttttttgtttttgttttgcagtgaatttcaatagttttaaaataagaaagcattgaggttttcttgctcgccttttattgtctccacttacttttcgattgaccaatatttggttttcgctttttttattttgcagtcattccaatatttgtcttgcgttcatacaaaaagtaagctaagatggaccaagacgcgtttatagttgctaaaagctcatattttctagaacatattagggaatcctcgactccaacatgttcattttcttcaccaactcctatatttttcaaagtttactttctatatatgtttcatttttttgaccccttaatcctcgcttctcacttctataaagtcaaaaggcttgctatataacataatatcgtctatttcgtattttctctgtcataataaaacgtcacctttagattagaaatttaaagtggtatcagcgttatccccttttaccctatttgggtttagtagaaatatttctaaaaagtaagtagttatgcgacattctaagtggaaaaagcttatatctaatgatatgtttaattttttgaaataagattaaaagaaaacaagttgaaaaaaactatgcaaaatatatggaaaacataagcaagttataagaaaaatagttagaaaatgtacaagcgcccgttttgtagaagcttaatttatgaatctagaaattgtaaatcataaatctacatatctagaactgtacttagacaaaaggttcttgaagatttttgtgtttagctgagatccagttcagcttagctcttatctgagatttttttaaatttcgagtttggtaaagaagacacaattaaataaaacctatattactaataataaatccatcatctagaatcgaccctagctatcagcctatcaccaaccaatgaaagagtccctcatgagaaatcctcacataccgatgcatgacatgtcagtatgcagaaactgaggaagaagatccatagccattgcgatgaagcttttgccgtctttgttgtcaagtgaatctttagcgtctgcttccgaggatgtgtttgagaccatgggaagatttcgtaagcgatatgttgtcaagttgagtgctatgatggcttctttgtttcggtaataccggaaaggaatttgtttcgattatacgattaagattaaactttcttgaaattttttgtgtttagctgagatccagttcagctctaaaacacagttaaataaaacatgtctgactatatatctctctctctctccatttcgtgatcactaactctttttcctgttttgaatcgttagattctctgtgtgaaaattagggttacggtctttttagggcaaaagagtactggccgttggtttttgtagagacaattgatattgttttcgttgaataaaaatatataatgtgtatttacaaaagaaaactaaatctactgtgtaaaatcaatgtacgttaaatcttctttagttttaattatagttccctgttatgagtttttattttttcttctgatcccaaattagaaacttaaacgaacaagacataaatcaatacgaggatttactttaatgacaccaaacccatgcgtccgtgtatttaatggcatggcccgctatcaaacttagactttacaacatagttatgatcaaagcagcaggacaagttcatgtgatactttcaagcaatttgtgagcaaaacctataacgattgaacctaaatagccatgatttctgtactggaaatcaaacaacattcatgtaacaatactatacttgtttgtcattactcattatcttctctagaatggtccacccgtttgatatcggcatgatggtaaaaacaaaataaaacaagttccacagcgatcactgctttgaacgttttcaggacttggcg

SEQ ID NO: 33818 - DNA, 869 bp, Arabidopsis thaliana landsberg
gagtaacaaaataattattatgttcagtcttatcttaattgaactactaaacatctaaagttatattgaattgattttattgaaaattacaagattttttcaataatcttgtaaaatctccctggataagaagactttacaaaattttggaaaaactaatcatagaaattatacaaaactctctagtaatcatttaaaatctttaatttatctactttcaatatatttttaaagtcattaaaactctttttataatcttgtaaaatctccctgaatataattataaactttgatttgtgatttctccaaaattataacatatcaccaaaatattgtatactattcttccatcttctatagaagctatctccactaaagtgaaaatcacacgcataaacacaaaaactatggtattcgtaagtaaagttacatgaacagggaaccatccatgaagaacttgaagttttattttcaaatattttgttggatatttacttttcatgtgttagattaaactgctttgttctaaaagttgtttgtgtgttgattttcacatagattaccggagcacatgtggaacttgagccattagaatatatatatatatattgtcatcactgttaataagatttctgcatctgttcgtatcattggcttttgtttatatccaaagtcatgattcacaatctctctctgtttgtgatacttttcatgattttaatttgtgaagaaaagagtataaaatcataatccaataacacaatattttaaatcattaacaatcatgaaaactgtttaagttgaataacacaaaatttgtaatgactgtataaaatatgaatcaaataactccagaattacaaagactt

SEQ ID NO: 33819 - DNA, 3795 bp, Arabidopsis thaliana landsberg
tcaaactctataggatttatgtagtgtataccgctttgactattactgataagtgataacaaaagcgggaagaattagaggtaccgagagagcagtaccatattttacatcttcaaactattttgctattgattatcgttttctacattgtaggcattgcttgcaaatatgactgctatgtatgctgtttaccatggaccagaaggcttaaaatctattgcacaacgggttcatggtctcgctggtgtatttgccttaggattgaagaaactgggaactgcacaagtccaagatcttcccttctttgacactgtcaaagttacatgttcagatgcaactgcaatttttgatgtggcagccaagaaggagatcaatttgcgtcttgtggactccaacactgtgagtttcttcatatatatatatatatatatatatatatatttcttcaatatctggatatgattattaacattgatgggttttttttcttgttctttaagattactgttgctttcgatgaaacaaccaccttggatgatgtcgataaactttttgaagtttttgcttcgggcaagcccgtgagtttactttaagctaatatccattcatctcgcttgttcactcttttttttcgtgtttgcttaaaataatgttttctccaatgtacaaggttcaattcacggctgagtctcttgcaccggagtttaacaatgctattccctctagcctaacaagagagagcccttatctgacccatccaatcttcaacatgtatgttaccttctttaaatcttggttccttcattgccctgtggcttattgttaagtacctcacatttactttcccttttttcttacatttggttaggtaccacacggagcatgagttgcttaggtacatccacaagttacaaaataaagatctatcattgtgccacagcatgattccacttggatcttgtacgatgaaattgaatgccaccactgaaatgatgccagtcacatggccaagtttcaccaacatgcacccttttgctcctgttgaacaagcccaaggttatcaggtgaggccacatatttgatttacctgactagaaatttaactacgtactgaattttttgtttgacaacttataggaaatgtttacgaatttgggtgagctcttatgtacgatcactggattcgactctttctcattgcaacctaatgccggtgctgctggcgagtacgccgggctcatggttatccgtgcatatcatatggtaagcataactgtagtttcttgttttccaatatgaactcgcacttcaacaaatttggtaaatgggtgaataaatgatgcagtcaagaggcgatcatcacagaaatgtgtgcatcatacctgtttctgcacacgggacaaaccctgctagtgctgccatgtgcggaatgaaaattgttgccgttggaactgatgccaaaggaaacattaacatcgaagagttgaggaacgccgccgaagccaacaaggacaacttggctgctcttatggtatgtatttacttctttcatcactatagatgaaacaatgtcacttttgggtcaatccactttctaattctacaacttctgtttgaatattaggttacatacccttccacccatggagtctacgaagagggtatcgacgagatctgcaacataattcatgaaaatggaggccaagtttatatggatggtgctaatatgaatgcacaggtatggtttctctgctggtatgttgactgaagaatccaaaagttgtgaatttgagaaagtttttggaacttccaggtgggtttgacaagccctggttttattggagcggatgtttgccatctcaatctccacaagaccttctgtatccctcacggaggtggaggtcccggaatgggccctatcggtgtgaagcaacatttggctccattcctaccttctcacccagtggttagtgttaattcttatatgttatgatcgctaatccatctttctcaatgattgagttatctgcttttttgtactcattctgtttactctgctacagatacctaccggtggtatccctgaacccgagcagacatcaccgctgggaaccatttctgcagcaccatgggggtctgcgcttatcttgccaatctcgtatacttacattgccatgatgggatctggaggactcaccgatgcctcaaagattgcaattttgaacgctaactacatggcaaagcgtctggaggtaccttatcttatcttgacaactctttaaagagagtgaacgtctcttctcttgtgcaacctcacttatgctttcttgtctttcagagccactacctagttcttttccgtggtgtcaatggaacagtcgctcacgaattcatcattgacttgagaggattcaaggtatgtttctttatctcgtttgagtaaatgctctcttttttggttgtacatgctaaatcaatgtcttgttcaatgtcctcagaacactgctggaattgaaccagaggatgtggccaaacgattgatggattatggtttccatggaccgacaatgtcttggcctgtccctggaacgcttatgatcgagccaaccgaaagcgaaagcaaggtaattatgtcttgcattgcattgcaaatctctcactgactcagctctcagtctctaaaacatggcttcataatttgtatatatatatgtaatatttcaggctgagttagataggttctgtgatgctctcatctcgatcagggaagagatttcacagattgagaaaggaaacgcagatccaaacaacaacgttctgaaggtaagaaaaaatttgagaccacaatttcagttcggactagccctctagtctgatactaatgaactttaaaaaacaaacacacacagggtgctccacatcctccgtcattgctaatggcagatacatggaaaaagccgtattcccgtgaatacgcagccttccccgctccatggctccgctcctccaagttctggcccactacaggtacttgaaaactaggggtggcatttcccatagaaaacaatttgttatttgtaaatcgtttcaaaatgtataaaatatgtgtgaaacagggcgagtggacaacgtgtatggagaccgtaatctggtgtgcactctccaaccggcgaacgaagaacaggctgcagctgcagtgtctgcttaaatgaagccactatgaagcgattcgcactcgcaccaaaacccacaatggggcgattcggactcataccggatccagaaacgtatctttactggcttttacttctcttcccagcctcatcatcactttcactttcacttcctgtacaatgtacatacgtagtcctaagttcttccctcatttatttaataaaatacatttctttatgttccactttcttatacgtataacattccatttggatgatgtgatcaccatcgtggttatatttatgccatatgatctctttgaaaaaagtttgaattcttaggatatttattgtttcattttataattaggaaatttggcaaaataaccataattctaggttttataaacaaactgactgacaacatataggttctgaatggttgcatgtagagtaaaaagtggaagtgaaggagacaaaaaaatttagtgaaagaaacaaccaaatattaaaggaaaggaatctaaaatttgaagtagttattaattctaactcctttgggtagagttagatttttttttataaaaaaaaacttaataccaacttgaacttcctgtccaaa

SEQ ID NO: 33820 - DNA, 4920 bp, Arabidopsis thaliana landsberg
acataaaccaaatgatattataaaatatgtttatatttttaataaatatttccttaattctatcactacaattgtatcaccactcacaactagtttatatatataatgatggaaaactagggaatttggccaattcatattcaaataaaactactaagtcgaaatcatatataaaataaagtaccgtgtgaatagatacttcaactattatgattggggaaaattcataaacaaggaagtagaggcagaaaaagatataaacagttatcatagtcgggtgtaataacatcacgagtattcagattttggtaaagagttttttcttcatttcacatgcttgaattgtattaaaacagtcagtaatttagtttttttttgggagattaaggaagaagacactatttcaaaacatatgcatgggatcgttgtacggaagggggataatagggccttacaacattttactttacatgtggtcggcacttagcttccactgatgaatgtagggaccaaacgatatagatctgaaatgatgccatggagtgaaggctgcacattccatattggctgcaaaatttgatccttagtttctttctttggggacttaagcgtgggtacgtagcctcaaactccaaggatgatcctgcaaaggttgctgctagcttcacctcccaggtcgttatcatgaaccaccttggtcagattaaaaatggttacaccccagtccttgattgccacacctcttacattgcagtcaagtcttctgagatcttgacaagattgacaggcgttctggtaaggagattgagaaggagcccaaattcttgaagaatggtgatgctggtatggtgaagatgactccaaccaagcccatggttgtggagaccttctctgagtacccaccacttggacgtttcgctgttagggacatgaggcagactgttgcagtcggtgttatcaagagtgttgacaagaaggacccaaccggagccaaggttaccaaggctgcagttaagaagggtgcaaagtgaactcgaatcctcaaaactctatccgcagatgaatcaaaaaacaatattagtttctttactttagtttggtatttggtcgcgtgttatagcttcgtttcttctccatcggaactctgttcccggaactgggttcttgatcggaggtggcggagctactttgcaccttttttgcttttgaattgttatcaattttgaacctatttggagattcggttatatgatgtgattttccgaggatattctctctttttttgttgcgtgtatcacattcgaattcagtctcttggataacttgtggaaaaacttataacttcaagaaaaaccttataaacacttaaaactttaacaaaatatcgtaactgccattgtagattgtttttactccgattcgcttgagcagcttgaaaacaaaagcaacgcataccactttgaagaaaaacgtagctagtacatacatatattttacaatgtaaaaagtaaacaacacatttctagatcttttgtttatcaaacgtcaagtcaaacaaattcgatcttattgatccagctatagtcataaattcattatgatccgccccgtgagttaagttatgcaaaacactgaatccgacccacacaaatcatcatgaaaccaaggagttgtcttatattaaccgaaccaacaagctttaaaacttttcttgcacacgaccaatggccaatttccatctataaatcatccgatcaaccatattacgattatgtcaaagatcaagtgtcttcctcttcaccgagggattcaagtttaaccattattgacatatagagttcagtactggtaatatagactatactatctcggtttaacaaaaaatgtcattaaatcttaatctttggttttacaaagagtatcgttttgtatttcccatgatgcatatcattaaactaaaacattttcttttattccaattatttcagtttattaataaaagaagaaaagaatatttttagtgtatttgtagaggataagagaaatttaaacagtttacttaatttgtgtaacatatgttgtagagaatatgttaattttgaatatacgaatcattgagttagtaaagcatcatgatttgtaaatataaatgtattcaactctctatctacactgagttacattaaattttacaattttcccatgtatgtaaatatttatgatatacctaactatgtattagtgcatttgttttattttaaatgatatttaaggtttttacacatagatttagtaattattattactatttaattttttgtgcacatgatttcgaaatgatttattgttatgttcttatattaaaatatttttgtctacttataaataattcaatcaataaaaacatacaagattatttaaaacattactcacgataaacagagaaaaggtatatataagatactattttaaatagtgagttaatagataactaatataatcagccaattacaagtgaaagaagaattttgtataaacctcgaaattgataggtaatgaatcaaaatatgacgccaaaaaaatttataaatgaaaatgtaatagttttgggcctttggtttaaaatgaataaatatcaccaaattatgggctatagtattgggctctatcaaagtacaattaatatttttggtctaaatttaaaatatcgagcccaaggttttcaacaaagtgcgttattatcaggacactatagtgaaacaaaatccactcgcatcagtcgcgcgtagagcgcgttcagcgaaaatgcgtggtctataacccacccaaaaccgctgtttttaattaaaatccctttcctcgaaaaatcccgcgcgtgaccatattgctttggttctcttgtccccatatttatcgcattattaaaattttaaaaatggattacttaccagctgacaaaaaaatgatttacgcgttgctctaagttattgaaactagcgtatagccgtatactatataattaaaaaaaaaaatagaggatttaacattaaaacgtatgcaaatcttttcaatgtaaacctttaatgagtcacttatgtctttctttttttaacattttctttatgatttatgaatcaggttgaaacaatattgttagggtgtaaagcttcagttattaaaatggtacacggtaattgaaaaaaaaagaaagaaaagccatcatcttgtcctctccatagccaggtatagagacccgagttgagtaccttcatatcgacaagattactcaagcttctgcaatctacttcaaatttgatgtttgcatatatatcttcttccccaacagcttcgcattgccgttatttaaacttgaaatttgctttgttccttacatctatttcaaagaatcaacgaataaaatcatctcaaaagccttctctttgactgcatttttttgctaaatctcttcgactgtattaactttaaatattacagccaaaatcaaagaaataacattagcctttataaactgatatagacttgtttctccaatgttgtttaaagttctagattacaattttaccatgtaagaaacttcagaggctgatccttgaattttagagaagaaaaacagacttaagttgataagataagataatatccgcaggaatgacacaaatatcatataaccgaatatccaaaaaggttcaaaatcataacacaaaacaaaagaaataaacaggaagctcgagtgccaagtacctccgccacctccgatcaagaacccaattccgagaattgagctccgacggagaataaacgaagcggtaacacaaacaaccaaccaaataccaaactactaaagtaaagaaactaaaatagtccttcatttcatcagcggaaagagttttgatgttcagagttcacttggcacccttcttgactgcagccttggtaaccttggctccagttgggtccttcttgtcaacactcttgataacaccgactgcaacagtctgcctcatgtccctcacagcgaaacgtccaagtggtgggtactcagagaaggtctccacaaccatgggcttggttggagtcatcttcaccataccagcatcaccattcttcaagaatttaggctccttctcaatctccttaccagaacgcctgtcaatcttggtcaagatctcagagaacttgactgcaatgtgagaggtgtggcaatccaggactggggcgtaaccgttaccaatctgaccagggtggttcatgatgatgacctgggaggtgaagttagcagcacccttggcagggtcatccttggagttggatgcgacgtaccctctcttaagatccttgacagcaacattcttaacattgaacccaacgttgtcacctggaagtgcctcaagaagagactcgtggtgcatctcaacagacttgacctcagtggtcaatcctgtgggagcaaaggtcacaaccataccagaaattgatcataccagtctcaacacgtcccactggcaccgttccaataccaccaatcttgtagacatcctgaagtggaagacgaaggggcttgtctgatggcctcttgggctcgttgatctggtcaagagcctcaagaagagttggtcccttgtaccagtcaaggttggttgacctctcaatcatgttgtctccctcgaatccagagattggcacaaatgggattttgtcagggttgtatccgaccttcttcaggtatgaagacacctccttgatgatttcatcgtacctagccttggagtatttgggggtggtggcatccatctgttaggcgaaaatagaaaaagacgcaagttagcaacaaataaaacgaatcaatcaatcacaaaagcagatacaatgatgaatacgaaagttatattacctttgtta

SEQ ID NO: 33821 - DNA, 1022 bp, Arabidopsis thaliana landsberg
atcttagtaatctattgttttggtagctaacttatgccatattcgctggaaaaaaaattagaaatatattcccgcctttggaaatagtttgtagttgaattagggtcatgttgtgacaaatttactcaatttatcatgtgtcttcagtgacagatttgttcaaaaatctttatgacaatctctttgaacattgtttttctctatgataaggtattgtgtcgtctagtcaaaaccttatatagttaccggcctcgtctttatctagaaggtaaatcaccactacaaaacaggagcataaaccattgctgctttgtttcaaatatctttaagattagatcaagattaggtagtgatgtgtggaaaggtttgttgaaatcatcacttggtgtctttataaagtttgctcatgcggaatatatatgggctggcaaaactgttcactacttctttacaaaccagctgagtgtcaacaactttcaggagctttgatctgtgattgatggaaggccaatcagattttctcttactgaatttgcggatataatgggtttcaactgtgatcttattgacaagtcagccacttgtgaagctggacaccatgagttttggaatgaaatgggtgttggaacgtccgagggtcccttgtttactaagttggagtgcgtaatggatattagcaaggaatggagttatgagaagaggttgatggttggtaggttatgcttgttatctgttggagttcatgagattcttcacggttctagaatccctttgccaagcgctaattagttcttgatccagagtcttttgagaaatatccttggggtcgatttgcaattgagtctctagttagttccgtgaagattattgactacaaaaaaaactcatatgggattcatggatgtgtctatgccttgtggatttggatttacgagagtatgcctggattgaaagaaatttatggatttagaagagcaacaactaatggtgttgcactacttattggagatcaagtcgcgcac

SEQ ID NO: 33822 - DNA, 583 bp, Arabidopsis thaliana landsberg
agaaacgagaactgtagctgacccacatgtcggatgtgtcaatgtgttgatattgaacgttaatgagtatccccccggaccaacaacgcttgatctttctcggaaagcagctcgaggatggccgctctctttcggattacaatatccagaacgagacgaccttgcacttggtgctacgtctccgtggaggagctaagaagagaaagaagaaggtgtacaacacccctaagcgcattcctcacaagcacaagactgtgaagttggcgatcctccaattctaccaagtcggagatgagaacaaggttgtgcgccttcgcgaggagtgcccccaccctgactggggtcctggggatttaatggacaaccactcctaccgtacctactgcggtaagtgcggcatgaccaacttcttcaagaagtaagccaaaagactaaaagtccttctttttgttctctagggtcccaatctaccctttccccccctttaattaaactctgttctctctattcctcatgcacctgacttctatgcacacttttccttatgagacttccacccccccccttttttttttttttttcc

SEQ ID NO: 33823 - DNA, 4271 bp, Arabidopsis thaliana landsberg
agtgggcgtgtctgttccagaaagggctacgcgaggagttgcaggaaggggtatgtgcagcgaactgcggatggatccttaattatgtgtcagatgtagttgatgaagctgagaaggtagaggccaaacttagaagcatcaaggaaaaggtgccgctcgtgtctgaggagtttgcagatgttgactgcggacaaagcaatttgggccgacccgcatccgaagatgaggtggagagcaaaccctccaaatcctatgatccggaagaccatatcatgcaagattgagatggctagagtcaacataaggtcttgagtcttgtggattatgtttcctattttatatatcaaaaagttgctattactacttccctttatttacttcgtaccatgtcatgcaagattcaaagctgtgtcagtaccaaaataatattttgcgaagaagaagaaaaatcaaatgatgtttcagtacggttcgcagagattctccatttcgacggtaacagcactcaattcaataggtcatgttgctttctaggtaagtaggaaccgtgccaagttgattcattgattcatgtaactatacatgggatgaataagccatctctcttgtttacaattcgaaccttttggaacaaaaatattcctcaaaacaaacacaaagatccaaacaaagtcgataacttcattcaaatcaaatgcacgtatgcaatgagtcatcaaatatgttgataataagaacatttgactagagtaattcattgcctacaaaagcttatgttcccctccccatatcctaacgattgcgggtccaacaaatcccgatgcagaagaaaaggaaaagcagaaagcatatgaattgtaagttattgagattgacgggaagagaagagagcaccattcattgttcctttttgctactgatttccaatggctgaaagaagtacggaatcattctgacgggtcttcgagcttaccggtagacaaatcattaatgtgcggatacactgctttctcgtccagtcgattttgagcccaaatcaacatcttcaacaagcttggaagtttaggatctgtttgttcacaaacattgagttgctacattaaccatggaggaaaatggaaagtttcaagaagaacttggatgatacatgttgtgggtgaagtaatgaatgaaaatttttacttgttatgtagagaagagttgcatatactttgaatcttaagattgataatgaatgatgctcgagattataatggtattttgtggccactaaaagacaaccagtataacatcaaaattcaaaagctacctttttcgtggctctggcttgtaagaatcgctgcatttacttcacttgctgtcttaagacggtgggaaagatcaagaagctctttaaccgggcaggtagaggcatcgtcaaaaacaagtagggctacagttttttccaattcttccagaaacgcttgctgcagagagatataacagactatatgaatgaagtttcagcaacaacagatattacacacagtcaatgagcaatacacatggaaaacaccatctttaacgacagaaatcaaagtgaaatacaaagacttacgttttcttcgccacgtggtgcaagttcctcctgagcaaactccaaggcctcttctgtcttcccttgtcgaattaattctatcaacctttgctgctgaagatgaaaaaagagctccggattcgtgtctagtatctgcaagcatgggttcaaagaagaatcagattttgcttctttattacatcagaaaagtgaatgactactctccacacaagatatgaagaagcattgtacctcaggattcaaatcattaactttttcaatcgcatcctcgacatttccgttttgaacagcctttttaacagccattcgatcagtaatggtcgcaagatctatctctgctgtttctcgataaggaagttcaaaaggagtagataagctaaacatcaaacacaccaattccataaacaaaaactcaaaaccagaatcagaaaaaggatacgtttggttccagactccctttggaatttctcagcagcttcaacatatccttcagtcacaagaaaattcatcaccaaagtattcatatcttctttcctaagcttcacagcatttagtttcttctcccattcttcacgtgtgatcattttcttcgaagtagcctgcgacaagccacgattaaaactaggtcacacaacgtgcataaagattaaagttttccaaaaacccatcatcaagttgtatcaaataacacaaagaacagactcataagaggagtcaaaattaccatatcttcgtcgtcttcttcaagctgattgataaaaatacgaaacagtgacattagaacgccagtgaggctctcatatcttgaaatctaatctaatccactcaatacgaaattaatacctgttcgagcaacactccgatcagagctatttccaaaagaaattgactttgtgatcagatagtgatacaaagtaatttacggctttagtcaaaattcaagctttaatctcaaaacagcacaggagtggtagttctaagaaagagagagtgtgcgactattttcctaaaaaattgaatataacgatgtacctggagaagtggagaatctggggaagattatctgggaacgattcttgcaaataatccggagatttggcgatcgatttgcttctagattgcttgcgaaagtctcttccctaaatttacaatctgataaaacaaaaaaaagttggaggttttcgatagagaagaagagatcgggtttaaattattaggatgttgacgaaccgtcgatgaataatccggtttaaattattaagggaaccggtttgtttttggatttggttctttatataccggatagtattatgtaactcatttccaaatgattttaatacccaaagatttttaaactattttacctttgaagaacaaaatttcgatttaaaatcataatttttttttgaaatctaggaggttctgggtcaaagcccgtaatctcccaggcccgaaaccacagcatgtaatatttagtttcgtcccaaacgtcactcgaaccggcgacctctaaggttcgcctagagtctttaccaattgagctaatgacacttggtttttctctaaagaattgaatattaaagaactgagttttaaaagcaaacgctgtcttattacatgaaactggggaatgcaagccataaagcattaagaaataatacgtagtagagtactggctcgagactgtttcattggatgtcatatactcatatatatacgaagatgctcaatctgtaatcggtaaaacattgaccccaatttgatgaagcatcttaccgatttttccatggaacccgacgatcttgtgacattccttctcgagtatgaagcttggcgttgtctcgtgtccaaagagttgagaggttcgcaaattagtcttgaacctaagcatgcgtataacttcagactcacttccatctactacatcataactaccctcgacagatatcaagtattcacccggatgctccaactcaaactacatagacagaaaattccaagtaatgattagttgatcaagaacagaatatttttttttttggttcaaaacgttttaggtttacagtcctaggatttaaaccttttctattaatcccatgccaaaaaagaagtgaaaccatggaagcataatttttcaaaccatggaatcataatttttcagtccatccatttcaagaaaagcatagaagctaatggaaattagacgaattgatgatgaagattttgctgttatgtgctcataagaaaaagtaaataagtacctcgtcaactcttagtaatgtgttgctaccatgatcatctccgaccacgatctgactgtccttatcgtaaagaaacttgacgaatgcgatacccatcttgttgtgtcctatgtatatatttctaatgccgtcaaaaccaccatcatcccaagaggctccaccatcaccaccttttgcttctactttctctgtgttggaaggaggcggcagcggacgaaaatatgctccaaggtcaaaaatactactaaaacaccgtccatagaacccaacaacaccacaacctttgctttcaagcaagaatttactatcacttggacttccaaacgtcgaagaagttctaccttaagatgttttgaaagtcaatgatgcaacctgcataaaggattcagtacgcatagtccccaccacagatg

SEQ ID NO: 33824 - DNA, 1035 bp, Arabidopsis thaliana landsberg
caaaatttataaatatcttagtctttttttttacgctttcttcttgaccaaagaggaaattaacgaaagttttaatttgtaaaatgcaaactcaagccatcataatgtgaattttaaaaaagttttatcaatagcattaaaccataatcagagctgctaactaatgaggattgttttaataagacaaacagttgtataggaaaccgattcatttggatatatagatgattaaacaatcggattattattattgttttttaaagtagacaaaatttgatccctgcattagcctgactacttcgtggctatttgtgtacaatttacagctgtttaatttaattgatctatgatcataatagtcaaccaatatgaataatttttgtgtacttatcacatagttgagaactgttatacgttacattaacttctcccgttaatttcgagaatctatccgactctccctcacaaatgtctcccacaactttatcacatccgccatgacttggactatagtaaagtatgtggtgtggaaaaagcaagaatgaatgacaacgtctctataaggactctacttatataacacctaaagatataataacagcaaagtgatcttgatagactccaaaaccaaaacgagaacagaattttatcattttcattttcatcaacacaaaagaaaaaaaaagaaaaaaaaaatacaatttaacaccaaaagattaaaccctaagaaacgtgtactcgacgaaagccctgaaacacataagatgcgctgatcacaatgtcttggctacattcaatagagacgtccaaggccaagaccatttcccatacaattaagagtgcaataccatttgtatccacgtatcatcttgaatgcccaagcctgtgcacaatgaagattacattcagagcaaatcagccgagagttaccatcattgtgaacaatttcaacttcatcaccatcatcacctatttcgaatatatggccgggcttcatgtacatatcttttccaagtaaactatcgatatgtatag

SEQ ID NO: 33825 - DNA, 1862 bp, Arabidopsis thaliana landsberg
tccacgagagaatccacttatcagctatatataatttatctaacattttacggcatttttggtatcatttcaatcctcaaccacaaatgatctctcttctctcttcttattctactatatagggagcctgaattgtaacaagcaagtgtaagcaatgacttaagtagttctggtgcacagcacaacataatgactcttataccaaatcattgtcttaatctttcttttgttccgttcatctctttctccattttgttggagtcttttatgagccttctcttactcttatcatgcttataaatcctacacatcctagcagttagttcacaaattattttgattctacaacttccaattttactccaggtgaggacgcgcgataagaaaaatggaaaataaatagggatagctttttctttgtgtgcaaccaagccggatagttaaaagcctttacggaacttcctccaagcaactgccaaggcaagtcccagtttttaatcatatattgcttataactattgaagaaccaaaataatgttaattacatgccttacacttacccaaagtttttaatatgaatagaatatacacccaaaaaatatagagttgtaaacttgtgatcctcaaacttaattacaaaccaaaacacagtatgggaaaatggaaagaaagttggtcagatcttgattaaagaaatcgattgacttagttaaagcatgatgtatctacctctggagttatgcttcatattttactcatgacatgacttctcaaaatagactaaataattagccaacttattataaaaggaccatgtttgtttgagcgaaaagcgcatgttgttcgtttgcctattgcaagcgactacatactgtctttgacgaacatggcaagataagaatcattttaatagaactttaagtggacatatcaattactaaatgaatttgattaagcaaagataaaatggacataaaaataccaagtgaaatggatttacctaaaaatatgaggacaatgttgacgtaacatgttttttattttttttggtggaatggacctttggctactcacaaacacctatttcaagtactattgtcttctaatgtggaggattgactattatcgtcctctaatgtggaggatttgcttgcaatgagtgcaaagtcgaatccccaaccatgaactagatactttatgtcttctggttttaacgtaaaagacatgagaagagaagacatacatacatgtaccttacgtgatgaagttaattagggagttggattatgtgccgaaagcagtacgcatatcccgcgattgcatgattcatagtctccagaaattgattaatactatttattaagggcaccacgtcgactataaatttagctcacattgttttttgatgggggtatgacttaatttcagcgtaactgatagggagttagaagatgtttcccaataataataaagccctgttcgtttctccatttgacagatccatccaactaatccattcaatatatccatctagatgatttattcgactctttttcttttcatttttagtaggttcatttaactggaccatccgaatgacatgttgttcgtttgcttatctctatctccatccaaataatttgtaataatacaaatacctaaaataccaatgctttcatctaattatatttttattattacttgtaaacatattaattttaattcttaatctaaaaaaatttaaaagtaaataaattttaaatgatagttttttacatttataaatttattttacggtttttgcgggaaaacgtgattttacagttttcacggaaaaactcgattttacgattttggcggaa

SEQ ID NO: 33826 - DNA, 1038 bp, Arabidopsis thaliana landsberg
gtatcattgacatgggaatagcaaaacacgcaaccgtggcggaacgttggaccaatcggagaagaagaagacaccgtgtgaactatctcaatcagatggaagagattttatctctaaaatggcagtctcaacaacatgaagaagatagagtgctctggcgagggaaaaatgatgctttccacactactttctccactaaagacacgtggaatcacactcgaacaactacgaataaggtggcttggtacaaaggggtttggtttgctcaagctattccaaaacatgctttttgtatgtggttagctgtccaaaaccgactctcaactggtgaccgaatggttcaatggaacatgggagtggaaccgacgtgtgtcctctgcaattctgaacttgagaatcgagaccacattttcttctcttgtagctacgcaaaagaagtgtgggagcctctagcaaaaaccatctacaagacgagatacaccacagattggcaagcgattattcacagtgtctctaaccattggccgaatcggattgaagggttcttagctcgttgtgttttgcaggcaacgatacacactatatggcgtgaacgaaatgagcgcaaacatggcaatcacccgagccctgcagttcgactagtaaagtggattgataagcacattcggaatcatatatcgacgataaatcttagtggagatcgaagatatgatagaggtctttaattttagtttcaaacaagagagacagattaaacagagctttcttcatgggtttttaacaactgcatctcataagcttttttttttcaaaaactttgtacaaattgtaaacacatactttttttttttatatctaatttaacataatattaaattgttggctttatgcaatcctaaaggagcttctacaagatcctatgacggcagagattgagaactttgatggaatattctctagacctgcaataagcgaggcgattccctcaacgagtacacaacccagtgtattcccatgtccagagtcatcaacaatacc

SEQ ID NO: 33827 - DNA, 1691 bp, Arabidopsis thaliana landsberg
acactcagaccagcttcatctgtagacagtttggcagtaacactcatgggagttttcgaggtcttagctgtctgcattccaaatctctgaatcaaccccttgacataagtagactgagagatatgaactccttcatcaagtctgtttgatctgtagaccaagaaagtagttcatctctccaaccatactcatctcaaactttttggtcatggattccacaaagtccgtgacaagcttttgttttgtgcttccaaacacaatatcatccacataaatttgcacaatgaggatgtctttttcatctacaaagatgaacaaagttttgtccacacttccacgtttgaaacccttttctattaggaacagagtgagacgctcataccaagcccttggtgcttgcttcaatccataaagagcctttttgagcttgtaaacatgatccggaaaagcagaatcttcaaatcctttaggttgagacacaaacacttcttcctgaataactccattcagaaacgcactcttgacatccatatgaaacagtttacttttcaacaagcacgagattccaagaagaagacggatagattccagacgtgctacaggggcgaatgtctcatcaaaatcaattccttcaacctgagagtatccttgagcaacaagtcttgttctgttacgtgtcacattgccttcttcatcagttttattcttaaagatccatttagtaccaaccacattgacgtgaacaggtcttggaactaaatcccaaacttcatgacgaaagaactgatttagttcttcatggcaaacatggtaccagaattcatcctctaacgcagtttcaatgttggtaggctcaatgcttgacacaaaacaagtaaacagaatcatatctctgtagttcatctttatccccctggtagttctgtctccatccaactttccaataacattagtctctgaatgactttttagaacagtaaggcgagaagatgatgtatgaggttctgtagtcatcactgtctgttcagatccttttgaggtcctgattcaactttaggcgttgactgtcttgtttcttctacatgcttatcatcatcttgttccacagggaatagtctagtagggtgtttgtcatcaaacacaacattgactgattcttcaactctcttcaacctcttattgtaaactttgtacgctatactgtttgtggcataccccagaaatatcccttcatcacttcttgcatcaaactttccaagatgatccttatcgttcagaacataacacacacatccaaaagtatgaaagtagcacaaatttggagatcttcccttccatatctcataaggtgtggtgcttgtccccggtctaacatacaccctattcacaatgtagcatgcggtgtttacagcttcagcccagaatcttggtgacacattgtttccatgaatcattgctctagccatctcttgtaaagttctgttctttatctcaacaacaccattatgttgtggcgttctaggtgtagagaactgatgtctgattccttgaatcctgcagaacttttcaaattcttcattttggaattcccgtccatgatcacttctaatttgaacaagattccctttcttagtgtatagttgtaaagccacaatcctaaaacttacagccgcctcagttttttaggttag

SEQ ID NO: 33828 - DNA, 3059 bp, Arabidopsis thaliana landsberg
  unsure (1)..(3059): unsure at all n locations
attaaacacgggagagtaaaccatgggaagagagattttggaagctgagggagccgtgataggttgaggagataaaacttaattcaagttcttaagtttgataaaatcaaaatttaaacttaaaaaagggtgagagcctttcatgtggttctcaacattagagatggttttataattgggatttggaagtaagcctctattctattgagagtttttggattggagatataaaatcatatttcttcaattctgtattttaattcattttatattaagggtataattggtttttaattttccttaaaacctatttcaccaaatttttatctatataaagtatagaggacaaacttttggaaaagatccttaatatacaatttccccaaaataaaggtgtatcaaagtgattttactataaaataatgtgtaattaacaaatgaaactgagttaaaaaagtcaaaaaatccaaatatcaacaaacaataaatgtgacacaagaaaatcatgtaacgttttcctcaatgagtccatttgtcaaaataaaaaattgggtttttgtttgagtctattttttgttctgtttttcaatctatttaagcacactagatttgccaacttcatcactcaccaaaatccaacgtgaagaagaagatcaatatggaagctctaatgcttatcttcacgttctgtttcatagttctctctctcatattcctcatcggaagaatcaagcgaaagctcaaccttcctccgagtcctgcatgggcgttaccagtgatcggtcacctccgtcttctcaagccaccactccaccgtgttttcctctccgtctctcaatctttaggcgacgctccgatcatctccctccgtctcggcaaccgactcctattcgttgtctcttcacactcaatcgccgaggaatgcttcacgaagaacgacgtcatactcgcgaaccgacaaaccaccatttctacaaaacacatctcatacggcaactccactgtggtctctgcttcgtacagcgaacactggagaaatctccgccgcatcggcgccgtagagattttctcggctcatagactcaatagcttttcctctattcgccgcgatgagatcaggaggcttataggtcgtctcttacggaactcttcttacgtaagtgaagtctttgttccaaaaggattagaccttaaatactaatttataatttcttttatgatattagcaaagtttttttgtaaatttttatgctattaaagttttatggaggtgtgttatttttgcaggggtttactaaggttgagatgaaatcaatgttttctgacttaacattcaacaacatcattagaatgctagccggaaagtgttactatggagacggtaaagaagatgacccggaggccaaacgcgtgcggacgcttatcgcagaggctatgagttcttctggtccnnnnnnnnnnnnnnnnnnnataccgatcctgacttggatcacatattccgagacacggataaagaagctcgctactaggcttgatgagttcttgcaaggattggtcgatgagaaacgagaaggaaaggagaagaaggagaacactatggttgatcacttgctttgtctgcaagaaacccaaccagagtactacatggaccgcatcatcaaaggaaccatgcttgtaagtaacagagaatagcttttttaagtagtcattagtacacatttggtatgaaggaactggtttatgtttttgttcttgtatatgtgcaatgtgcagtctcttatagcaggggggactgatacaacagcggtaacattggaatgggcattgtcaagcttgttgaacaatcctgaggtgctgaacaaggctagagacgagatcgatagaatgatcggggaagacaggcttttggaggaatcagacatcccaaatcttccttatctacagaacattgtgtctgaaacgttacgtctgtaccctgcagcccctatgctgcttcctcacgtagcctcgaaagattgtaaagttgggggatacgatatgccgcgtgggacgatgctattgactaatgcatgggctatacacagggatcccctgctatgggatgatccaacgagcttcaagccagagaggttcgagaaagaaggagaggctaagaagctaatgccgttcgggctaggaagaagggcatgtcctggatccggtttggctcagcggctagtgaccttgagtctcgggtctttgattcaatgttttgaatgggagaggattggagaagaagaggtcgatatgactgaaggtccaggactcacaatgccgaaagctagaccgttggaagctatgtgcagagcacgtgactttgttggtaaaatcttacccgactcctcttgagtttttgtatgtaaaatgctaatacgttgcttagcaacggtaacgaattaaatgaaacgtattagcataataaaaatcagagacaaaaatcatattctaatttccaataacccattgttaattatgttacagtcttacaaatatgaatgttcagtgttatcaatcaaacaaaattctaggtgtgaaaaaaaaaaaaaaaaatctaggtgtggcattgctatgctaaatgtcatataattagctaaaataaataaataataatgattaggtatctaaacgactaatgggcacatgtgatttggccgaaataagattctgttttcgaagtcaacgtctatggagtagttcaagcagattttgcaccacatcatcctttagtacaacccctgaagattcttgaggaagaagaagtctaatatggaaggttaaaccctaattttcacattccttttaatatctttttttttcacgtttatcatcggaagaatttaagctaagacctaaccttcctccgagtctgtcgtaggcgttaccggtgatcggtcacctccgccttcacaagcagccactccaccgagtttttctatcagtctctaaagaaaaataggcgatgctccgataatctccctccgtaaaaaaaaccgactcgttttcgttgtctcttcacactc

SEQ ID NO: 33829 - DNA, 351 bp, Arabidopsis thaliana landsberg
cagtagcgaatgacagtatcatgctttattcgttcttgtttttttgcagataggccacaatgtgattataggaaagtgttgcttgctttgtggtcaagtaggcatcgctggttcagtaacgtaagtacagatctgaactctttttggttccattgaaagaaacaatattttgaagtttttcaagacataaaaagttaaaaaacaaatccgcaggattggtgactatgtggctttaggaggacgagctgctgttcgagaccatgtctccattgtatccaaggtataataggtgttaaccggtttcaaaacaagcagttcttgatgcggtttggttcacaaaaacttcttgtg

SEQ ID NO: 33830 - DNA, 1025 bp, Arabidopsis thaliana landsberg
  unsure (1)..(1025): unsure at all n locations
gcaactaaatttatggggtaagatcgcttcagcgttctaaattctgagtgttattatcttgatttttttagttaaaggtggatactgcattctactccagactatgccaacagtgttattgctaagaccggcctccaaaagctatcgagtgaaacactaaacaaaatatctgaagagatgttcaaagagtttcagtgctcaggccttgttagttctctcccctttttnnnnnnnnnnnnnnnnnngtaagcgtcctgactcttaagccttctgttaatcgcttcgcttgtcagcttaatgatctgttgtctctaggggaagtgcgtttccagccaaaagcatagccgtagaggagaggtgcctttgggatagaaacaggaatctagcaatctgtggagatttctgtgtcagcccaaatgttgaaggtgcaattctcagtggcttagctgcagcgtcaaagcttttgcagacttctagctgcttataggtaccctattgagtgtgtccccaatacctcaaaacagagtaacaaaaacatttatataaagattctactagaatcatgtaaaatgactatgacaatctccctcgtgaactctatcggccgatgaaacagatacatatcggaatatcatgtgatcttcctaaatctctactttgttccttgagaaatgatagccagcgcagttctatcgatgaaagtgccagtcgcagtgctttttgatggattcaattggcaacatctacgaaagtaagcaatgtaaattatcttgacagtttctgcttatttgatgatacataccagatgaatgcctatgcgttgatgaatctatgtgcattggtagactcaaaggattcaatatatgttcctaccgtgaaaacttgtaattctgaggtttttgttccgaaaattgattttgatttatttaaattctgtttcaggaaccactgccttggctattcaatcacctatcccatcatgtacacaggtagtgatgtttcatattatctttttgatcaatgtt

SEQ ID NO: 33831 - DNA, 1747 bp, Arabidopsis thaliana landsberg
ggttgagacaaaatgcaactgaatggtttgagtttaagctgtttgactcgctttgagtttggtagggttggatcggttaaaatgcccacccctaccaaataatttgcaagtttaattaatccatgtcggtgacagctctatgaatctagatgccaataagacatgttaatcgttaagtctttatcaacgttaatgccaataaagtggtgaaaacatacataaaaactctggtcccattcgaatcagaggggtagtttagtcttttcgttttaaatcagaaattgcaaaaattacgaaaacgccacgcaccttttagtgatctttccacgatctagtgaagaagatactctttaaccgattaccggcggcgagtctctgaaccgctttcttagcaccggaaacttccatatcctccagagattgaagataacgatcagctcctaaaccaatcaacttcttcctcgccgcataacttccacctgataaaatcgccgtcacaacgatcaccggaagctctttattaggcatcctctcattcctcggatccaacatttgcaccaatcgaatcacactcttctcatctctcatcaactccttccgatttgatctaacggtcaacaacgacttcgccgcctccgtcgccgcttcttgtaccccgccggtttcgggattccattaaccgaatcaacgagcttaaacaatcagcgacggctcgtttgttaccgtcgctgattgttaaattcgataaaagagaagttgagatctgttgaaggattacgtttccgtgttttacaattcacctaatcggattatgaacattgttgatgaagatacaaccctagaacctgtttccatggcagagatctgagagagagcacgcaaacagggttcgatcgtatcgggatttgatgattcttgaactaaatgaatcagaatctgtaatgctactctttctctaacaatcaaatctctgtaatactcaccggaagatgagatcaaggagatgaaattcgcggttttctcttgtaaccgatgatgaaccggagattaagagttggataagaaccggtatagctccttcttcagctaatgtcgttctgatttcttcaacggcggcgatgttgcttatagaaccagcgatgtgttcttgtacttgtttagatcctgatctacaagcttcaattaatacggatacgcctccgttagctgagatagcccaagcggttgctggatcggcggttatagcttcaatcgctattgctgctcttgtttttcacggtggagatccggtttctagcaatcgtagtaatggacctaatccgccttgttcgaacaccgtctttctcgagtcggcgctcgatgaagttaacagcgagacggcggcgagtgcgtgctcacggattagaggatggtgatggagatcaagaagagttactaagtaaccaacgttaccttctttagctatgattcttgcggatttttcgttatcggtgagaagttgaagaagagattctagagatttctttttgaactcagctcccccgatttggagacgagtgaagaggtctctgatgaagaaggcaatgtcatctttatctgatgttggtggtgggagtgataaaacgatggcgttttgttggtggaggacaccggatctgaggaggaggtcaaggtcacttatgtgagtagagagggaagaggaagctatgtcgaggtcgctttgcatgagaagtttaccaccggagaa

SEQ ID NO: 33832 - DNA, 738 bp, Arabidopsis thaliana landsberg
taacactgctttaaatggtactaaaataatggttatcatacattatactgctatttttgttatatacaattgattcctagtaccttacgatgataaattcgacagttgtgaccataccgttaggaaaactccataataaataacaaaagcaaagtaataaactaaaatagaaatataacctagcctttgacaaaaaaaaaaaagaaatataacctagcttgtagtagtctagcataagaatctagattagttgtaatttttatagtatcctagtgaaccttatgactaattcttaattaaatatggatataaagttacttactactggtccctgaaatatagatttccacctgagaatttcgatcgttaagggtcaactaaattttgaccaaaaaaataagaaggtcaattaaaataacccatatcgtgaaaaatagtgtctttgtgtatgcatgcatatatgatgagtttctcttttcaactcatgcatgagttttataatccaaaatatgcgtaggattcggctttcattaatttctgttgtggatcccatcatgttctctccactggcccaaactatatccttaacctgttcccgttttatgtttgtgtctttaattatctataaatagaaaatctcaacacatacaagtcactcatactctcccaacttcatctctctctctatctcaatctaataagatcccacaagtcacttttcttcttcttaatgacctt

SEQ ID NO: 33833 - DNA, 2171 bp, Arabidopsis thaliana landsberg
  unsure (1)..(2171): unsure at all n locations
attccctttaacatttattaagcacaaacattggaccaagcaatgcattggttatgattttatttggttctgggcttaggctaagagacaaaaatggtccgtctaatgaattggtcgagaaacaggggactctcatagaaaagattgagatttagcagaatgctaaaggtaaaagccaacagacaaatacaagaacagactctcatctaccaagtgatatatagtatgatagctcagaagatgatcccaatcccatagatgtcctaactctatccttcttcccattctttctctttttggctcaagttctaaggggtgcttctttaaaacgattcaagagtctagcgggtttgattttaaactttgacaaacttaaggcttttttctaattttagcatagaggacgttttacccttttctttgaactccaaacccctttactagactaacactttcttttgtatcccccttaagaactctaaactcttactctctattttttcttttctttagattcccattctcttttccattcattccatacacaatcccaatcccaaatacaattctccacctagtcctagctaacccaaaaagcgtgggcgaggtctacatgaaagactgctcttgtcggctcattcctaacacgttataccaagctcaatcgaaaaagacttcacaatcacacacaaatgatctttggcttgaaataaggctaggctaagggtatgggaaactgctctaaaaatgagagactgctacttatattaacagagggtggtgaagtgaataagataatccaagtatgtatatggtagccatgagtacacaaacaatgcatagatatgataattgcaaattcagttcaggttctaatagataaggaatgacatcagataagcgagtttcgaattaaagtagtatagtcaagttacaaattcaaagcagggtgcggtcttacttcagagatacagtcgattatgcaacagaaaactaacaacctgggcattgaacttacttcactgaatcaaaacatgcttaacggtgtgaaatcatcattatcccctatgcaaatgagcaatcctaaatgcaagcactctatatacaatcctaaaatgaaatacaatctacatgacattctgtttttgtgaagtcattttctgaaaaaatttcaaatttttatagtttttttctatgtcttaaatgatgcaaaatttgaaataagaaaagagaacacaatgtcaaacatgtcttgaaccctcccccaaacttaaattacacagtcccttgtgtaataaaaatctggagagaattcaagaccaaaacaaagaacacacaaatgaaaaataaaaagttatggtataaacaatggtggtggtggtgttacctcagcggtcaggtgaagtagacggatacgaaatcgtccatactctcttgagtataagcagggactgatattgaggcgggagggttttgctcgtcctgtccggtcgagtagttggtcgagcgtgtggatgctcttctctgcctactcctcggctctctcaactcggagatcatttcccgagactcanatgatgaagctcggggttgatcaatcctttcagccctccttgcagctgagcttgtgaaccggcttcttcttacttcagggggtcggagatggtgcctctggcttgctctggaagtccttgatttgagcagccatactcttcagcgacttattcattgttctcatcttcttcttgaaaccctttactgttttgctgtgaaggttcccaagctcttcaagcacaccgagcttcttgtgaacttcagctatctcatctcctccttgatccgcattttctctttggtgagcttgctcgaattcgttcgcctcttgctccggttgctcgctttgttgctcaaactcggtttgctgctcatagtcatcttgagtgaaatactcctgttgctcatagtcagcttgactatattctggttcatcttctcgacctactccaatgttgatgttcaagacagagggagatggcatgaaattgatgttgcgccttgtcttcaccaaagttcggttctcgcatggtaggggtaacagagaaggtccaagctccggatggttgaacttgaagagatagcgatctgtcggagtttttttcgcaagaaaatcc

SEQ ID NO: 33834 - DNA, 742 bp, Arabidopsis thaliana landsberg
  unsure (1)..(742): unsure at all n locations
atgggtattcccccagcttagctctaccagtcactaccgtccttgcccagccttcatgagtctcaacaaagctatttttatcaaagatacctccaagccatttaccggtattgtctttgaccccagctatagccgctcgtgggtcgcaagagttctctgggacatactccacaattctctccggtggatctaaaggggcaagaacaggaagaggaccacccacgtaagcaggaatgtagctcagnnnnnnnnnnnnnnnnnatacgccttcaagatcatctgagactgtaagatgaacaacaccatttgtgcccatgattttcgggccacccagttgcatgtgagagctatagacctcacgcccaagtaacttgttgagtgtagagaagccagtcaagatgatcggctgatcaagtctctgtatgcaccgcatacctaggcgggcaagataagcaccaattccaaccgttcttccactaacaaaggttaaagtaaaagtttcattgtatgcctttgagtaagcacccgctatggccccacttcctgttaagttctctacaccaataccatcttctttgccaacgatcgtatcaatcacccacctagtttccccactagggagctttacttcatgggcaatgacagatgatccaatcctttcgtggtcttcagggcttaggtatatatactgaaaacaaaacatcaggggaaatttcatccgaccatccaactttaagcaggc

SEQ ID NO: 33835 - DNA, 2208 bp, Arabidopsis thaliana landsberg
ctgcaggtcgactctagaggatcccccttctcagccttttcagttgcttcttttaatgccttctttctcgcatccatgtctctgtttacttcttccaacttctccaagcttctcatttctgtttctttagcttcctcgattcttgaaaccgctgctgctactcttgcgttcgcgagttcttctgcctcgtgagcacgtttgctgagctcatagtactcttctagcgaaagtgtaacgcttcgtggagaatcggtgtcattagctttcaatgttgattcactctcctccaaagccttgatggcagctaaggccagcctctctgaagctttagctgcttcgatttccttctgcgcagcagatagcctgctctccattgtacttgctccagcttttgcttgctctgcttcttctttcgcctttcgtagctcttcgcgagcaacttcagcaagtgactttgcttcatcagcctcttctgctgcttgctgaagttgcttcggtagctccaccattttctctctcgcgtctttctcctttgactgaaccgaagctatttccgacctcgttctgtcaatttcagcctctatagaagctactgctatagaggccattccttctctctgtttgatagaggcaagagtagacttttctttctcgagttccagttgcaaggaagaggaggccaatttcaagcaactcacttcagcagctgctttctcaatattgacattgacctcttcaagttccttctttgcagaggcaacagctgcatgtaaatctggatggctcatgttttctgtcgaaggatcggtgtttgtggttgagtcacacgcttcttgttttagcttggattccatataagctaccaattccgccttcaaatcaagaagcagcgctgaggcagtgtcgagcttcgattttagatctttcgaagaatgtatctgttggttaagtctttggagttcctcttccgcttgcttcagttccttctcccaacggtgagtatcctggtctctagccatagctgctccaatcctctgttcttccgcctctaaatgagaagcatgtgctgattccaatgactcctttgtagctatcaactctatggtgagttcttccactgtcttctcaacttcttttgacgccaacattgcttcttctactttctttacagccacatctttatcttgcaccagagcatcatattccttatgcaaagtttctagttcctccttgacagaaaacaactctgtaatcgctgttgtatgcctcgccttagccacctcaagttgcgctttagctgcaacactgacatcttcagctattccttgttccatctcttcaaccctcagcttagcaagctccgagtcttgcttcgcctgttgttcttctgtttgtgccttgtccaaattaagcttcaactgttctataagtctctttgtgctttccagctccttaagcacttgcagttttgcagcctctgcagtttctgaatgtgttttgtactcaggaatctcctcatgaatctttttaagctcttcttcaataagctttcgtctctgcaaaaccatacacgaaaatatgaacaagaaaggcaacaacaaattaaaacgagaaataatccaaatgtatccgttagtacaatacctctaccgcttgcattcggtgagacttccagtcagtaattcctccaaattttgatacagcttctttaacagattcaaatggcgctgcggtatcgattaaacctcgatgtgagtccacatttttcggtgttccagtgctcaccggtgatcctgaaaatctaggagatgatacagttctaggtgaccccccaccatttcttgctgtacccgtcgcagcctcggtaatcttgacactaggtaaaccaatctcatctggctccatcacttcttctacaattgttgtactcgtactatcttttccggttaacaccgcagcggttgcagcatcagaaggcgaaaacgtgtcatcgacataaatcttcgcattgccggtagtgtcatcagtttgagattgttgagtctcttcagtatcagtttgagattgttgagtctcttcagtgtcagtttgagattgtggaatattatcaacctttgttgcagattgtatgttagattctcgaatggtggaatcaatcaactcaggattgactttctcaacattatcactaacaacattatcagatgc

SEQ ID NO: 33836 - DNA, 1086 bp, Arabidopsis thaliana landsberg
tttaccttttgattatacaaacaatataaaaataaaaaaaaccaaaaaaaaaagaggaaactcttgtttttatatgatctcgggcattctttaataacaatccaacagaactgtgaaggaaccttcttttgtgtgtttttgttttgacggcttccatctttaagaaagtcaatgcatagaaaagaataaaatagaacatgttgcgtgtgtgtcctatagcactaacgaaaaagaacatctgcgtatcctttttgtctttcaaaaccttaattagcagtgtgtgccgttctgatttaagatagatatggaactgcctgacgtttcggtgtggagaagtgtcatgtccgttgtttgggattatataaaactgtttgcgtgtgatgtaacactaaagcctaaagactctaaaactaatactatataacttctttactgattgtcgtgaaagagtttctgcattccttgaggcgttgactttcaatattgatttcgaagaagaaagatcggagataatgatgaaggccggtgctgttgtttccaatccacgttcgagggtcaagtgggacgcattcctcagtttccaaagagacacgagccacaatttcacggatcgtctctatgaagcgctcgtcaaggaagagctgcgggtttggaacgatgatttggaacgtgtggatcatgatcatgagctacgtccaagtctcgtggaggctatagaggactcggttgcttttgtcgtcgtcttatccgctaactacgctaactctcacctgcgcctcgaagaattagctaagctcttggatatgagatcatctctagaacttctagtgtttccgatcttttataaggtccaaccatgggaagttaggacacagaacaatcatttcgaaaatgattttgaaaaacttgcaaaaacatttggcgaggagaagatacaacgatggaaaggagctatgactaaagtcggaaatctctccggtttaaattacgagtatgacttcaatctctcatctctaatcttaattattgaaattataatcttttcaattcaagtaatattatatttttggcatatagattagtaat

SEQ ID NO: 33837 - DNA, 1215 bp, Arabidopsis thaliana landsberg
gtgctctcagtacgccgagacacactgttggagagatcattcctccatcaataaactgtcaaagtttcaagaaagataatcaggctaatgctatgtgtttgtctacttcattttatgtacaaaacaaaactcgacctgtgtgtaacactcgatggcctctctaaagtctttttgcctgaaagccacatcacccttcttcttcgagttcaaagactcttgcatctggtctgtccacatatgaaacgagagctgcattgccaaaccaaagtaacgcaacaccatgaagaaccaagaaagaaactattcactgattaacagagccaaaccactgattcttccaacataattctgaaaaggtacctcattggtgacaccctcgtcgtctttgtatccaagtttctccaggatctcaagcatagcggtcaggtcccttcttgaacaagcctcaccaagaggggacagaggagagactgaaccactgtgaggtagacccattagaacatgagacgggacctgcaatttacaatacaaggaaaattatctcgagttaacaaaaagaaacttggtccaagttattctaatggctcggaaatcaataggaacctctgtctccttctgaagaggtgtcaaggcagtcactaaagatttggtgtttggccgctcacgagcttcatactgaagacaacgagaagctaggcgtactagctctgtaccatcactatcagaaaactgcccatctaggcaagaatcagttagcgtctggagatttctgtctctaatcagatcaagggcctgtataaaacagattgaaagaatcaaccttcaccttttcaagtaaaagctgcaatctcgtatggaaaacaaacttattatggctaaaatacttacatggctaggaggtatatgttttccgctgagaagatcaagcagaagagtgccaaagctgtatattacactctctggagtaattctccctgtaaatacaataacaaacagaacgtgcaacttaatctcaaccatattaatcttggagaaaaaaccaatgatgtaccagttcgtagatattcaggaggggtgaaagcaagattagtgctgtaactttttccatcccgactattcttcatcaagccaaaagtagatagtcttggaatgcattccttattaaaagccccttaaggcgtcagagaatgaaggaatagcatagaaacatagaca

SEQ ID NO: 33838 - DNA, 1749 bp, Arabidopsis thaliana landsberg
acctccgtcgcaaggaacctgtaaagggccacaaatagtggagccaaactcttcttctgccttctccaataagacctgaaagattggatgtttgagataatccaagggtaaaacaaacctcctgccttctctggtatacacagcgaagtgtcctttcttacacttcctccacttctccatcaaatcggtgagtctaagcctcgagcaagatcttttcttcagagacatatagagagctttgatatgttaccaatataataccggtgtgtatacggttagtatgttactgtctgaactatacttgcctctctctccacatatatatactataaaatctgattagtgtatgtggtagttgtcttgcggctcaaaaagaggattaggaatgtgtggaaggagtaaggtagccgtgtgattcttcattatttgggttaaaaagatataactgtgagattaaatgtgtggatgtattattgtcttgcatctctaggtctaaacaatatttttttggcaaaagaaatctgaaatatacatatatgataaaatcagtatgatgcaaaccaaattgtcaaatctttaaatctttttacaaaaaacagattgaacaaaagatacttccacaaaataacaaatctatgtatatgctaaaaaattgtgttagtgcctaatattataactgatcgttccaagaataattttgttttaattaataaactagagaggtacaaaagaagacagatagtgcataaaatgattttgattgcgaatggtaaacaacacttacatataatttaggccacatagtatcagtttgtgagaaggtaaaaggagatgtggtggtgacaatagagcatgtgagatgtgaccgtttagagcaaattgctgctgcttttctttgatatattcacgtcctcaacttctctattcttactttcttgtgtatctatctcccttgttttaatttcttcttgtctttttcttcaaatcacatgaaatcctacaagccctcacttttcaactatgtgtagtcccgagtagtacaccgttatagtttctatttgctgaatcttcatctttgtggtatgtagttagatgaggtctgagccgtaatttgaaacaaaagtttatgggaaaagattggttttattgtttcatgcctaaaccaagtacaagccgaaacagacaaattacaaaactaatcttcgagacactgaaaataatgcaagtttcgatattatttttctcattcgtttaccctaaaccatctgaatttcacaacccacaattacacatgaaacacaactctttgaaacacatatttctctgaacaaaaccagattgcagccacatgctaatcagaaaaatgattatctgactctaaacctatatcctgaaatcgcttgggtgagccaccctagccttactcaaccctttccgtgagcataactgtctttccatccataaaacgcgtaattgatcagcaagatcaaccagaaggtgagttttttgaggctcaataagagaaaacggttcgcaacagctcaatggtttcggtctttacatagagagaggaagaagcatccttcgcttcttcttcctagcatgtctcacttgctttgtgattttcatacagaggagtaatagtaaggtgacacaaagcaggataaaagcaagttgcaaccgcctggagtacaaggatacagctgaaaacaccacgagtgctaacatcactagttcccatatgacaaa

SEQ ID NO: 33839 - DNA, 1728 bp, Arabidopsis thaliana landsberg
  unsure (1)..(1728): unsure at all n locations
gatacattggcatttacacatgctgttgacatttaataaagagttttggctgatatagggcggtggggttcttatacagggaagttctacaggaccacggatatattgatctgctactagcctcacaactgaagctcgtggctatggcgtggtaaggataattctttaattaaaaaatatgaggaacactgtcaacatgtcatgactctgtatgaactaaaaatcacttgcatactgtcaggtgtactttgcacgacttatacttgcagatatgaataaggaaataaagggactaaggtttctttcttgatcattttaaatatgtaccactgttgttttggatctatgagttaatctaataagcaagagacattgtactaaagtgtacctcttccgacactgttttagatcgtgctcattattctgtcaatattgggcttgtcacataacactgaagctgcgtgacttgagtacaattgtgcgactctcatcttatgaaaccataaatctcttctataatttatttcagatttgtcgtgagtggttgcgggaagattgcgatgcatgttgtagagaagctaattgcttgtggagcccatccggttactgtttcaggtaatccactcatcttatcattccagatttgaagcaactcaagtgtatagcttttctgcatttttgttgttttcaccatctctaaggtgtcttttagttgagctgagaatcaatttaaggcccagtctgccagatgaaaggtcagaagtggcttgtacgtataattttctttttctaggccaagggcttagacttagaggtctcaaattaattctctagttattgccaattgatcttgattagttaggccaatgtaagaagtcaattcagctgtctgtgacgtattgtgctgctcaaggattagctttctgtgaaaatgatttggttttcggtttgcaatttgattccatagaaagcaaacttttttgctgatgcaaacttcctgcagattcaaaaggatatttggtggacgatgatggatttgattatatgaaacttgcattcttgagagatataaaatctcaacagagaagtctgaggtatttgtcgtcctagaatactatagtatttgtcacttggttaatcatatagatcccaactgtacatgtgtctgttatgcagagactattccaagacctatgcaagggcgaaatactttgatgaattaaagccttgtaatgaaaggtgtgatgtggcatttccttgtgcttctcagaatgaagttgatcaaagcgatgccattaatctgnnnnnnnnnnnnnnnnnnttactggtagaaggtagagatttcttatatcaagcagctatttcagggcctctcgttttgtgtttacgttaggtttttgctgttcttttgttaccttatcctaagcagtatggatgttttttgtgcaggttcaaacatgccgtgtacagctgaagcagtcgatgttttcagaaaggcgaatgttctgattgctcctgccattgctgctggagctggaggagtgagttgcttcttttacgcatttacatcgatactacaatttaaagtattttttattagtcttccgatcattaaattacaacactaaggcattgcagaggaattctctgctgctgtcataaaagaatgtgtaggagtgtggttttactgagagtccaatagagctgtatcagtttgtttttgattga

SEQ ID NO: 33840 - DNA, 621 bp, Arabidopsis thaliana landsberg
gccccaccgtaggcgtctgaggacattttagcggcggtggctacggttctttactgagaaaacacggtttagcagctgatcacgtgatagacgcacgtgttgtcgacgcaagaggaaggattcttgagagacgagagatgggtgaagatttcttctgggcgattcgtggaggtggtggatcaagcttttgcgttgttctttcatggaagatcggtttagtcaatgttccatcaacagtaactgtcttcaacgttacgaaattctcagaacagagtgctttaaagatcattcatcgttggcaatacgtggctgataaagtctctgatgatttattcataagagttatgttgcagagatacaagaacatggttcgagcttcgtttccgggtttgtatcttggttcggttaagaatctgttgaaaatggtaaacagagaatttcctgaattgggtttggaggaagatgattgtaaagagatgagttggattgagtctttggtttggtttgctgagttaggagaagaacctattgatgttcttagtaaacgtacacgagcgtcgttagctttcaaggctaaatctgattttgttcaagaaccgatgcctaaaaccgcgatttcga

SEQ ID NO: 33841 - DNA, 603 bp, Arabidopsis thaliana landsberg
cggttttttctgtataacatgacatcgctgattaaaggattatttcaggtaatttagtcggttgttttaccattaaaaaggtgagtgttgccatttctaatgcgttatgcatcgtttgcaggaaaaatataaagatatctatgtgcataaagcatctatatcataatggctagaattgggaaagtaaattccagttgcgttcataaaatatgattaattgtatcaaccgtagtagagtccatgccggggtttgacttgatctccattaaacaagaaactggtatgaaaaaatttaagaaattgtttctgcaaattagctagtatccaccatatcatgtccaataaaacataaacttgaaaatattaatgtccacttatgtatgtccaacgattatatcatagttgttcattgataagtgtccagtatcatcgaatgtttaacctgttatattgattatgtttgatgtaaagggatgtaaattatatcgttcatgtttttgaccttatcttcttcttagactttttagacacacccaaaacaataaaacacgaaaccatgatttatattgcttagtgatgactctgtacttattgtcagaaaaa

SEQ ID NO: 33842 - DNA, 993 bp, Arabidopsis thaliana landsberg
acacaaccaaaatggcggatgaattttgggatgaaatccaaaacctggaacttggtcaagaggacccggctttatttattcctcatgaagcttatgtcatggttgaagctactaatcgtttgagcttgattgatagaccccggaatccaagagttcagaatctaaactcggttattgctgtcttaccaagggtttggggattgacaattcgaattcatgaaagaatcttggatgcaacctatgttcaattcctgttccaaaatgaagttgatttgctgacggtgcaaagaaggaaccatggctctttaacaactggtttgttgctactcatagatgggaggctgctcctattttgaattttgtcactactattgatctttgggtgcagattcgtggagttcctcttctatatgtgtgtgaagagactactttggagatagctcaagaattgggagagatcatcatgatggattatcatgatgctacctcaactcaaatagtctatattagagtaaggattcgttttggtatcactcacaaactcagatttttccagaggatcatctttgaatatggtgaaactgcaatcataagattccagtatgaacgtctcaagcgaatatgtaacatgtgtttctggtttactcagagactattgtccctatcgtcagtgtcctcacaacatagcaagagaaagggctctcttccgagatagtgttttcagatcaagtttgaattctcagtctcatatgacttagactttgtttccagctcccttgacaccgcctccaagagtagctcctcctccgctgaatcatgaagaattggcggctgcaattccatattttgccacaacaagagatgctcataacatatatggtgggagtctagtactacaagacaacaagggtcatcaaactctaacaacactccaccacgagaagcggcaaacttatctggtagtagcagagtctattgagttgtcaatcatca

SEQ ID NO: 33843 - DNA, 8578 bp, Arabidopsis thaliana landsberg
  unsure (1)..(8578): unsure at all n locations
cgcaatgtcaagagttattactagagcatcgtcgtgcggtttgtccagatcgctggtctcttcctcggaaaaggatatttctgggcaatcagttcgacccgtctttggtttctttgcaactggagtgtcagatcttctctcgtgtggcttgatcgcgctaatataatcacgaaaaagttttgaacctcccataatcaccttgcccattttcttcggacctttaggaactacgggagctggatcacttttgtgctttttgctcggaggtgaagcgtctcctgactctgaaacttcgttcgcggtctgagccaaatcgattgttgtaatgtccacttcggaaatttctcccgaagcatacttcgctgccaaaagcctgcctaaagctttgcaatccttggttgcgtgaccgttcatcttatgaatatcacaatatgcattcggatctcggacccatttgttgctcggtaatgcaccgtttttgcccttaggagagaaagggggtttggacggcgaagctttaggagaagacttcggtgactctttctcaacggaaaaagttcctgctgcgggctttcggagttcggcaggtttcttggtagttgcgggctgagatacctttggtgcagcatttggagcactgatttttttagctagaaaagctcgttcttcttctgcatttatccagttcgttgctcgatgaagtgcatcttggattgtctcaggtcgatttaccgtcaaggactcgcggaaacgtgactcgtgccaaaggccattcttgagcgcggactgagctgctgagtcggacaagctaggaatttgaaccatgatttctttgaacgcagtaatatacgtccgaagtggttcgtcagcgaattgagaaagattccaaagatgggcttcagtgatgtcactcttgatgaagtatccgtactgcttaatgaaggcggttgatagttgcttaaaattatcaatcgagccttcttccagttgtgtgaaccaggtgagagcaggtccggacaaattttcagaaaacaatttgcaaagcccggcatcttcttcgtgcggttctagggggacccgtccggcgatgacttggaaggaagtcaagtgctccttcggatctccttttccactgtaaacgggaagcttgaaatctcggaattcgcggatgcgcaacttagagattcttggggtgaaaggtgttctccttgttgcttcgatgaccttatccacttcgggagccgaagtagtggcttgatggactcttgcattcatggcccagatttggtcttgaaggctttggagctccgaattgactgcgtttggctcttgtcgaggatcggagattgggattctgatggaggaatcaagcggaaacggagttcgagctattcctccatctgaaattgcggcaagtcctgctggtgaagatgaggtgacaggattctgagtcgacgtcgccccgacttcaaccggtggtggcggagtctgctggccagacgcttcctgggaattttggacgctcggactgacggtgccctggaagttgagtcgnnnnnnnnnnnnnnnnnnnnnnnnnnnnnnnnnnnnnnnnnnnnnnnnnnnnnnnnngtatgcgttgtgagccgatctgatttcggaatgattagccgctagtgctgcgagttggccgttgcattgctcttggaaggtcacgaacttgtcggagagagacgtcacggcaagctgctgtcggtcagtcttctcggatagctgctgaagcagctgcttaatgtcgtcgagggtgggggctcggtcgccggagctctgatcgtcgttgctactcatggtgactttgatcgttgttctgaagtaaaagactttatttcccctccttctagcgccaaattgtggattccgacatccacaacactatgcatgctttcagctacagatgatattacaacatcaggttcacttcaattcgaactcaaatctattgaagctgcaacaagtaattttcagaagaggaacaagcttggtcatggtggatttggtgaagtttacaaggcataatgttcttaaactttctcacctactagtttgtgttataaactaatattcaaaaatgagaaaagacattctgaaagttagtgaaagatcatacgaattgacagggaacattcccgaatggaactgaagttgctgtgaagaggttgtctaagacgtcagggcaaggtgaacaagagttcaagaacgaggtgcttcttgtagcaaagctccaacatagaaatctcgttagacttctcgggttctctgttgaaggagaagaaaagatacttgtctacgagtttgtgcacaataaaagtcttgactacttcctctttggtaatagatttatattctctatatcttagtatcttataggcatagtctaataatggctctatacattggatgtgcagaccctgtaaagaggggtcaactggattggagaaaacgttataacatcatcgggggaattactcgagggattctatatcttcatcaagattcacggctcacaatcatacatcgtgacctcaaagcgagtaacattctcttagatgctgatatgaatccgaaaatcgcggattttggaatggcaaggaatttcagagtggaccagactgaagacaatacaggaagagtagttggaacattgtaaataatcttccatttcacttacattctgtctgtcctttttcctttattttgatttctgatcaaactaaaagtgatatgtgctgtgttttgcagcggttacatgcctccagagtatgtggcgaatgggcagttctcgatgaaatctgatgtttatagtttcggagtaatgactctggagattattgttggcaaaaagagtagtagctttcaccagacagatagttcaataggcaacctggtcacatatgttagtaccaaaaatccagtttattctccaacttctttttactcttttaaactgtgaccatgacctgaacattagtttcttgacaaatgacttacaggtttggaggctttgcaacaacggatcatcgttggaactcatagacccggccatgggggagaattatgataaagatgaagacattagatgcatccatatcgggttattgtgcgttcaagaaaatcctgcagatcgtccaaccatgtccatagtatttcagatgctcactaatactacaatcactcttcccatacctcaaatgcctggatttgtcttcagggtcagaccggagccaaacccatcagctgagagattgcagcctggtccgtctactgccatgtcgtttgcttgttccatnnnnnnnnnnnnnnnnnnnnnnnnnnnnnnnnnnnnnnnnnngaggttaatgattacatgtagatcctttcgtaagccaaaacttctaatagtcactcattattaatgtgcacacattctctgaatcatctaaagaaaagaaaaaatgggaaagaagaggtatgtacagagtcctctgtttcttttttctttctgtaatctcaagagccatttctgtttctctacaatattgtgtaacactaccaaattgtcagagtctatgccatggtgaggcttctataaacaaaataatctcttcaacctcgtgtgactaggatatgctttggtagttctataaaatggtgtacagttcagtttatttttgggtttggtttgacatgggaatatgggatagatttatcactccgggaacgtgctacacaagtaagtgaatcttttttccaaaaccaatgacacaaggatatactaccaaaaccggttaatatgcaaaaccggatacatagcccactgcaaaacgatcatctgatccttctgcatctgcctttgcttcgtcaggtttggtgataggagagtttctgggctcaacggttaaaacatatggtcaggaatgatgatgaaatgcaacgttttccaatagcctaaaaccattgacttttgtcgcgggcccgtttcacgccgtatatgtctaacagggagggtttaaggaccactgttatctgtttgacgaattcaacatttataattttcggagaaacttcgatttcttttttagtaagtaagatatcaaaaacgcgtaaacaaaagacaacgaatcagcgaataaaaataaaaagggataatcttttaagggaataagattatgtgatccaatcattaactgaatagttcattaacgtcttattagcgaatggaaatagtgccttaggttataataggactacgataacttagagctcacgaaactaaggactcgtcaggaactgatggtttttaaggccattttctagggttttgctaggcgatttcgtttgtagccttgtgacccatatgacatttgcgacgtgttttgaaggcgttttggttttaaaggtaagaaattgattaggaaaacgctacgtaatgtggccgtggatgagtgttaatggtacctcgacccgagcctactgacctagtaaatatctacattattatttgaaaggatttaaacataataatactgtatgaacagaaaaaaatgaaataagacttttgattttcatcttttgttttgtgacatttagaaagtttctgagaaacaacaattgctgtttaaattgctaaggaacgaacagatgtttaaacactaaaacaaagctataatctcccaaggcaaaatgaagcagaggagtttcttatcaatcctctgttttattcttctagcctttggtgttgcttctgtttcagcacaaacatgcatagagaaccgtaaatatttcacacccaacggtacatacgattcaaatcgtcgtcttatcctctcttctcttcctaacaataccgcctctcaagatggtttctactacggttcgattggagaagagcaagatcgagtctacgcattagggatgtgcatcccaagatcaactccaagtgactgttttaattgtataaagggtgcggcaggctggttgatacaggactgtgttaaccagacagacgcgtattattgggcacttgatccaacgctgtgccttgtccgctactccaacatttctttctcaggatctgcagctttttgggagattgagcctcagtatttggtcttgaacactgcaactatcgcctcagatctaacggatttcaagaacatatgggaagacttaacatctcgtacgattactgcagcctccgcagcaagaagcacaccatcgtccagtgataaccattacagagttgattttgcgaacttgacaaaattccagaatatctacgcattgatgcaatgcacgccagatatttcctcagacgaatgtaacaactgtctccaacgaggcgtacttgagtaccagtcatgctgtggaaataatactggaggctatgttatgcggccaatctgctttttccggtggcagctttttacattctctaaggcttttcataacattaccttggctactcctccgaaacctccaatgaatgtaccgcgaccaccttctgtaggtcacggggcgaacactacagataatggtaagtattcaaaccgattaaactatgcctgtaagaaaaaactgaaataaactcaattatctatgtcatgaacagatagcaggggagtctcagctggaattgtagtggtgattaccgttccagcagttgtcatcgtcttgatactagttgttctaggattttttatttgctggaggagaaagtctttgcaaagaactgaatttgaatgttagtgtcttgtgatttatgctttttatcggtatttttttttcattataagcctatattgtctccttagccaagagacgaagcataactaatacacgctttcttttcagctgatagtgatgtttctactacaaattcattgcaatacgagtttaagacaattgaagctgcaacgaataagttttcgaagagcaataagctcggcgaaggtcgatttggggaagtttacaaggtattaagctatcggtttgccaaatttgccaagtcaaacacataggctaagttactggtaataaatggcgattgttgtttcattcaatgctctgtagggtaagttttcaaatggaactgaagttgccgtgaagaggctctcgaaagtatcaggacaagacacaaaaaagttcaggaacgaggctgttcttgtatcaaaaattcagcataggaatctggctaggcttcttgggttctgtttgcaaggagatggaaagtttttgatctatgagtttgttctcaacaaaagccttgactattttctattcggtatagttccctttaacagaatgattactcaaaggattcttctacagctttaaagtaaatgattgtacatcgatatgtgcagatcctgaaaagcaaagtcagctagactggactcggcgatacaagatcattggaggaattgctcgagggattctatatcttcatcaagattcacggctcaaaatcatacatcgtgacctcaaagccagcaacattctcttagatgcagacatgaacccaaaaattgcagattttggattggcaactatttttggagtggagcaaactcaaggaaacacgaacagaattgctggaacctagtaagttctgctcgtagtagctgaacactaaaccattttctattgcatattaacccgtgttgtatgtttttcagcgcttacatgtctcccgagtatgcgatgcatggtcaatactccatgaaatctgacatttatagctttggagtgttagttcttgagattataagtggtaggaagaatagtagcttcgacgagtcagacggcgcacaagacttgctcacacatgtaagttttgagaaagaagaaaaaatttgaaccttttaataatattactctgtttttcaataatctttacaatgagattacattcttctttttatagagattgagggagaaggatctagaacactctcgacactatacagatgtatgtaattttagtcattagataaggatgaaagaggattgaattagtttgagaggagcgtcttcctttctcttttaatgtttcctgcaggtacatgtacggatgagagacagcttttgatctttgtcatcttctgtatttgttgaccaggctttatagttggacttgatttgttatgggtttggcccatctccttagcttcacacatctcactcacaagttttaaggcaatcaatatatacctctcttacattacaacacgtaatgttagctagaactgattgcttgattggtattcaaggcttggaggctttggactaacaaaaaagcattagacctcgtggatccacttatagcagagaattgccagaatagtgaagtggttcgatgcatccatatcggtcttttatgtgttcaagaagatcctgcaaagcgtccggcaatatcaaccgttttcatgatgctcactagtaatactgtgaccttaccagtgcctcggcaaccagggtttttcattcaatgtagagccgtaaaggacccgcttgattcagatcagtctaccacgaccaagtctttcccagcgtctattgatgatgaatcgatcacagatttatatccgcgctaaatatgaccttaaacttcatgcttgtaatcaagcttacgcaaatatttacatatttgtagaattgtggatgtgatcaaccctaataattttttagttttgatttggtttattaaaaccatatgtattttgttttgattttttaataatgaataattagtctagtctcaacatcaccaccgattgaaaaaaatgagatagggagagaacacttggaatgttggcattacagtttggttcatttttaaaatttgggcaatccaaaagctataatcttggagttcatttcagcgtctaagagccaagaggatatatacctgctttgaagtcataatgtatggttatgatcttgaatcattctagaatcgctatagcaatacctccaatgatcttgtaccatttgatttggaaacagagactaaacagagtacagtgggaaggtgatttacatgatttgtaatgtggtgaagtaaatgaaatgtgaactatctatcacgtcaaaagttttttttttttttttcttgttgtaaagtaaactaataactaatacaatattttgaaagacaaagtcatctacacgaggaatttaaatgttagactaataaaacatgtggaagagataaccagagaaaatagaattacaaaattccaggttttgacgtctatcaatctatttccgagaaaaataaaaaatattgggtttgaatattatttaataagttgatgactattctgcttggcgccgaaactttgggtcaataagacagcaccgttagacttccttaccatacaagtaacaaacggaacagttattaagttaaaacagtcatttcgcaaccctagttgattcagtttgtagccttatttaaaaatcagcaccaatcaacgcgttcagtggaaggttagcctacaaagaaataggctttgatttttagagttttttttggaaacaaggaagtttacaaatatgc

SEQ ID NO: 33844 - DNA, 595 bp, Arabidopsis thaliana landsberg
agaacccgcaaccaacaggaacaagaaaccggaaacggaaaaaacaccgccaaccaaacggcgccaaaacaacacaaacccgccgcttttttggcgccaaaattattcttcccgccgatttttttggcgccaaaaaaaatatctccgccaaatttttttcccgctaaaaaaaaaattccaacataattcttttcataacaaatgttttctcagccaaaaaaaactttttaaaaatctttgtaaattttttttggcggaaatagatttacaagggattttaaaagggttttaaaatattcacaagagattttaaaagtgttataaaagatttacaaggtattttaaaagcgttttaaaagatttacaagggattttaaaagatttacaagggattttagatggttttaaaacaatttacaagagtttttaaagggtcttcttgtaaattctttaaaaccctttaaaaccctttaaaccctttaaaacccttttaaaacccttttaaaccctttaaaaataaaaatgtaaatctattaaaacccttttaaaatcccttgtaaatcttataaaacacttttaacccttaaaaatgtta

SEQ ID NO: 33845 - DNA, 1587 bp, Arabidopsis thaliana landsberg
gatatggttacgtagcattcaaagacagctaagcaagacaaggagacactaggttaaagattagaaactctatgaaaccaatgtatctttgtcattgaaacttaagctaaataaaatcaaaacatcaaagtttacagttttggcttctttcctttatggtatcagagccatggatagatccatggaaatttattcatgtccgtcgttagacatctcaaattgcattaccgtaaagcttacagattgcaactatttactatggaaatctcagttcgaatcgtttctctctggccaaggccttctcgggttcgtcaccagcgcaatctcggttccaacaagcaccattctggttcctcacattgaaggtcacacggatacagctgcaaatccagatttccaggcgtggcaccgttcagatcaagtcgtcaagtcatggcttctgggttcgcttactgaagacattcttagtgtggttgtcggttccaaaacgtctcaagaggtatggctaaacctcgcaagtcattttaaccgtatttctgcatctcgtgtctttgagcttcagcgtcgtctccatggtttgtcaaaagaaggaaaaaccatggatgagtatttgcattgtctaaagaatatttgcgatcagcttgcttcagtaggaagtcctgttacagaaaagatgaagatttttgcaatgattcatggtctaactcgtgaatatgagccactgattacttcacttgaaaacaccttggatgttctccctggtccatcctatactgaaatcatgtttcgtctaaaaagctatgatgataggcttcaaggatacactgcagcagatgtatcaccacacctagcatttggtacattcaacaactcctctcgaggtcgaggtaaaggatctagaggaagaggacgcggaaactactcaactagaggtcgaggttttcagcaacagtttctttctttaagttctcagtcgtccggtgaaagaccaacatgttagatctgtggtaaaagaggacaccctgctattcaatgttggcatcgttttgatgaaagctatcagtactctgaagctgctgctgcattctctgctttgcatattactgatgttacggatgatggtgcttgggttcctgactctgcagcaactgctcacatcaccaacaatggtcagagactgcaataaagtcagccctattatggtaatgacacagtaatggcgagtgatggtaatttcttacccataactcacattggttctgctagtctaccatcaacgtcaggtaatctgccattaaaagatgtattagtttgtcctgatatagctaaatctctgttgtcagtatcaaagttaacaaaagattatccatgctcttttacgtttgatgctaatggtgttcttgtaaaggacaaagcaacaagcaaagttttgacaatgggaagcagcactagtgatggtctctataagttggaggatccaaagtttcagatgttctactcaaccagacaagtcaaggcatctgatgcagtgtggcatatgagatagggacatccgaatcctcaagtcctccagcttttatcttcaag

SEQ ID NO: 33846 - DNA, 1651 bp, Arabidopsis thaliana landsberg
ttgagaattttacactactctaacccatcctcagaaacctattcactactcagacatcataacagaaagcataaacgttgaacaagttgaaaacatgataacaacagtgtaacagcaggatgataacagaatgaacaacagtaaacgaaatcaagaacaaaagctgaatactgaatactgaatagataaagagaaatccggattacaaaaggtctagaacacaaggtctgcagaataaaactagataaataaaacttgtctacgaaaatgtgaagtacatgctacttatagccaaatattctgaaaccctaatactttaaacgacgcagtactgggacggattaaaaactgtactcgacccatgtggtcgagtgggaggtcgagtgaatagttggagtcttcttgtcttccttgtgctcgagtgtctggttgagtgcggaatgaagaaggctctgaagcttgtcatcgagtacgcagtcgagtggtgatgatggtgatactcgactgcaaggcagagtggtgagatcgagtggtggtctgataatggaggtgaagacactcgacctaggggtcgagtgatgtgatcgagtgatggtcaggtgatggagatgaggacactcaacctcgtggtcgagtggtgaggcgaagtggtgatttcttttactcgacctgggggtcgagtggtctcttgagatcttgaagctcctactcgacctcgggttcgaatggtttgacatgatcaggtccgcttcttccagatagctcgtcaacagctttaaatcacctaaaatcaacacaaatatgcaacatgcatgcaaatctatcctaaacatctaaagtgatgacaaatgatgagaaatggtataaaacaatgatgatatgatgctaaagtgatgacaaatggatgctcaaaacatgcaaaatacacacttatcaactcccccaaacttagtctctgcttgccctcaagcaaacaatcaagaacacgctggaggcgaggtttgaaagcggggactcagagccaaaacaccagataaaccagatgaaatcaatgtccaagttgaaagttctaagctgcaagatcgaattctacttaaaaacgttagccatgccttattatcaatcaatccgtctcatatgctcgacctacacatgctttcaaatctatcaatccctttaattttcattagttctcgaacgtgaattaagcaatgcatcatcaatgaactcatttggctaaggtgaaggtcaagagacaaagatggtcccttacaaaataagcttacgtaacaggggatctctcaagaatgattgagctttagtagaatgctaaaggtaagtcccaagttatacatacatagataagatcccatctacccagaatataacaatgaagctctaatggtaatccaatctccagtcccaaaataagaacttaactctaccctttgcattcatgaatcttttaaaccatttttcatatcattcttttcttttctcttaactctgggagaagctttctcaacactttgatacatctagcggatttgggtttctttaacaactaaagttcttgttataaatctttaaacacaaaggcttttaacccttcttctttagctaacaagaacctcattcttatctttaacat

SEQ ID NO: 33847 - DNA, 1123 bp, Arabidopsis thaliana landsberg
tttctaacccatcatcttctctattcacgcaaaaagaatagatcagatcgaaaaaaagaacttattaatgttaatctgttatgaattcgtgagtgtgatatctgtaggtagtgacattcctcgccataacggtgacatttgaggcgtttgcgtttgcgatgaagaagagaaacagagtcttgaaacagaagcacttctcggagacaagttcacttgttccagtgcttgaaactgaagctctgatggataatctcttacacaaccgattcttggtcctgcacctgttgtccatttgcatgatagttgtttcccaagttggaaagatttagtttccttctttgaattgatcctttttaggattgattcttctgttatcttcactacttcactctccttggattctccttcttctttttcttctcctctaggagagctttgctctgaaggcattgattcttgttctaactcaaacatctcttcttcttcctcttcatcgccacctgaatcgtagtcttcagatacttttgtagacttcgatcccacggattggatttcatcgccaaatgtgctaaatgattccatcttttccggtgtctcgagatcgctttgctttcttgagatggactcatttctcattatagtatggtcttctccacttggatcatccttatcttgaaaggaaatggtcttctcattcctcaaatccttgtataaagaatggcttgttatattagtgctcctctgttacgtgaacagataatgcatcctcatctgtcggactcatctgaaatcatccaattaccacttcttacaacataatcctaaacatagccaaaacctaacaacgaatgagtcattcaatcaaatctcttcctcttacctttacatctgtgatatcgacatcattctcgcggctgacagagaggaaggacctgacatcctcttctgtgggtgagataagtgtcccctatgtggacaatcaggcttcagaacaccattctcagcagctaatctccctgcaacaccagttgctcctccagctaacaagctcgtatgtcggaacgctcccttcttcttcttcgcgacgtataacactatcgatgagctcagcacacaaatccat

SEQ ID NO: 33848 - DNA, 2123 bp, Arabidopsis thaliana landsberg
  unsure (1)..(2123): unsure at all n locations
tcagcaagagatcatgtttcagcatcagcaacatcagcaaaggttggatctttactcttcnnnnnnnnnnnnnnnnnntggaccaagtaatcataaccaattcgatatctccggcgaaacttcaaccgccggcgccggaagagctgcggcgatgatgatgattcgtagtggtggtagcggaggaggaggaggaagtggtggtgtgagctgtcaagactttgggaatcaagcgaagaaagattgttctcacatgaggtgtagaacttgttgtaaaagccgtggcttcgagtgttctactcacgtgagaagcacgtgggttcctgctgctaaacgccgtgagagacaacagcaattagctacggttcagcctcaaactcagctgcctcgcggtgagagcgttcctaaacgccaccgtgagaatttaccggcaacttcatcgtctctagtctgcactcgcataccttttcattcaggtatatgtcactgcaatgtgaaatatttatttatgtgtatatatatatatgtttattattatatggtcgtgagatatataatgaaatgcaagcagcatttttataatttatataagtaacgaattgggatcagcttctagagtaaaaaaagaaaaaccctattttgaatttataagttttccaaaaataagttttgttatttattgtgaaaatattgctgaacgggtattttcttaaaagtttgtgctagatgatttgcagtaccaattctattttctatctcattcttgttttgtcattaagcttttctctattcattttgttaggtgaataagtgatcggattaggaggctgcaagagcttgttcctaacatggataaggtacatttcttttacaaggcagattggtttaaagtttttcttggaagtaaaaatattagaattaggaaagtatttagaaattcttagttaattctgcgaaaaaatatgcgaataagtatagtaaatatttctacgagaatattctagatcctttggaaaataattacaccattagcgccttaaactttcccaaaaatacctaaaattttcattaaccgcttaaattttgccaaaattttccccactcaataagaatccctaaatccgcgtcaaaactatttaaccatctccctctacctctcagaatcgttctctacgctacttccttttttttagagagattggtttgtctgttacttcagagatctcattggaaggtatttctacataattcagattttttttagaagttagcctagatgttaaactccaaatctctgctctcccattgtctttcaaatctccatgtctctagtcatgtttctagtgatttttccaatgttactcatcatgtgtgatatactttgtttttcagaaaaggtttaactaggatgattccatcaactatcaagttgaaagatagtttaataagcttgctacttatcgcctcaaaggaatgataagccatgcaaaaaatggaggagaaaaatcaaattggatattgtctgactattggaccattatgcaagcgcatttggcaactgaaaaaagcaaaagcaactagtgagaaggctcgtgcttctcgaatgtctgatcgcaatggtttaggcccacattcccaccaagcgggttcacgctcctttctcaaagttaaagatgttttggtaattatatatttcctttcttgttaatttctaattgtgataatttttctgttgtttcactttggtttattgtttctttgatacaaatcaaacaatgatgcctacttttttattattgtgatgaagaaaacacatcagaggcctgatgtctcgtacgttttcaacaaccacggttggttgcagacacttatgaaaagcatatagtagaacgcttggttcaacttgaatattctaggaagagaatctgacagctgaaactcttgacgaacatgaggaaaatgaaattatatcaaggtaataattctaaacctttggctgattttacattcagtttaggcttgtgagtctctggttttaaattcatttgatcttgtgaagtgtgtagtataaactatcgttttagataacttgttgtgttttctgtttttgctaatatatttggtct

SEQ ID NO: 33849 - DNA, 764 bp, Arabidopsis thaliana landsberg
taacaccatcttggttggattcaacgtgtttatatttaagtttcgtctctattattactagtttgccacttacacaagtcgtaagcagtggtaggcggggaaagggctaaaagtggaaaagagagttcttacgtttggcttcttctgtcatgtgaaacattaaaatatctacagacattgtgttgtggtggactggtggtcacgtgtatggatacccaaacgtgatgcactttggtagattcgtgcggattttctcttgtttatgttttcaattgtaatctttattatattattaatcaaattaggtggcggacggaaaatacaagtacaagttaatgcaatcaattaattgggatgattaagttaagtctcttgcattggacttctatttttctatctatctatttaccgcgtataacgacgacacaccttaatttcaacatttttaagatcacccgtcaccaaccatttattttgatctttttcttctatcaatcacggatttttattaaaccatttttctcacaagaaaccacatttttgttcttaataagtgttaactgatctcgattcaaacagttagcaaagactccaacatattcagaaaatcttacgaaaattatataagtgattcacacacatgacataacggagataacaagaatatgaataaaaggcgtcatacaatcctaaccactgtttctgagttttgtcaatcattctcttcaagcttcctcccatctcaattcatactcagaattaac

SEQ ID NO: 33850 - DNA, 1171 bp, Arabidopsis thaliana landsberg
gtgggatcggaaacctttggttttcccttttccgtagtttaactatgagaaacatataattttctgattgtctatataattatgggattctaaatgtaaatcgttaattggttctgaatttgattcaagaaaatacaaaattattcttggcttattcataaacatttgagaaaataccaggacatttattaatacatatgttggtacactcccctattgtgatatagtcatagttgaaatctgcccgtgaatcgtatgccaacatttaaaatacaaccattatattatgtaaattagataaccaatgctaatcagcaccatctcttcgcttgataaaatagcagtcgtgtctttgtatagcagcataaatatgcagaaacaaaagataatctatccaaaatcttcatcagaacatcatctcagaacataacggattatttgcaaataatccttcaaaagattgctagaaacattttcttggctgataatgatatgatctagaatagatctaccatgagaaccctcatgtcttatatcatacactaggaacaaatatactaatcaatctaagccattaatgctttttaccaagttttaacggttgttttgattagaaaaatccagatcaacaattgaatatttttgaccattatctaactattgcattgattagtcacttcatgtcttatatcaattatcacattatcagaaaaatccagatcaatcaaaacaattaaatttttttaccaaaatctaaccgttgtattgattagtcacttcatataatccttgaatttcaccattcttttaaaccactatagaatgatcacacatttatgattcgggaagtattgatggatgttgtatagcttatttgctcagggcttttctcctttggttattttggtttatctttgtcttctggagtatttttgtactcgctgactaagatatccgaaaatgttcatgtacttgccgactctttttacttcacaataaaatcctattgacgaaaaagaaaaatcataacacatcttcaatttaattttttacctctaatatatcttctaaaataacatattttatcgaagtccattttttttattatcctatttattttgttcgcttattatttttttcataaagactgaagatacatccaatatcaatt

SEQ ID NO: 33851 - DNA, 1271 bp, Arabidopsis thaliana landsberg
tttttgatggcatcactttctgtcctttgaattccattgtcaagattcaagaagatactctagaatggtttcaggcacaatcacagattcgtgtctctgaatctgaggagggacagagagtgataccttttactcacagctgggaaccgccacctgaaggttgggtgaaatgtaacattggttcagcctggtctgggaagaaaaaggtttgtggtggagcttgggttctcagagatgaacatgggtctgtcattttacatagtagaagggcttttaatgggtgttctaacaaaaaagaagccagcctgtgatgtattttttgggctattgatagtatgcgtagccatagagtttcaagggtgttgttcgcttttgagccaggagacttgttgtctgcttttactaggccgaaagcgtggccctctcttgcatataatgttggagaactaacttattttttggacaaggttgaagagtggaaggtagtggaagaaaaagtggtttctaataggggaggttctcttatagctcaaagtgtggtcaaggaagacagatttcagtcgtacgtcgcttccggtctaccacgttggctttctcagctctttgagagagagagaatctctacctagaccttactcttctcttgttgatattggactgtttccaatcacaattttttggtgatcggtgcatataggtgtacctttctagtaagctgttgttcttcttttgtaaaggttccaatcaactttctaatcatcaatataatataattcagtgaaaaaaaaaaaataaatctagaaaagaatttattaactatacgaagtatcaaagaatacatgatgatgtcaagcatattagtgtatccctagctatacgaagtagatgtattgtatgaccacatatctgaactatacgacgtcatgtagttaacaccacagacatgcaattccggtacactaataaatttactccgttgaagaccagtgttgaccggcatagttgaggatactatagtataattggcatgggtaaattaactaaaaatcatcaatccatttatcataatccaaattctggtcaaaagaatctaaaaatagtttcatgtttctgtttacagtaataaaattgatatcttagtcatgaccaaatcaatagccgcaagttatgctcccaaaaattagctgttcatcttttactccaatcaaaaacataaaaaaaaaaaaacaattacaatttctattctaagtaaatgttaaataaatttatta

SEQ ID NO: 33852 - DNA, 795 bp, Arabidopsis thaliana landsberg
aacgacgagaaatttcttatggaagttagggtttcctggccattgattggttcgttccctgttaccttgttcaccaatcagttctcgtagagcttctaatgtcacggctcgtgatggcttcttcaattcttcgagtaggaggatgggtaatccatgtgccaatagcagagtcttgctcagattgtatcatggaagcgtctgatggagttgtcttaattagacatatgtcaatggaaatgtaatgctgtccgacaatcgtcttgatgcttcaactagcctgtaactgtaattttcttgccgtgggggttcgaaacttggattcagtcaggtcattctttaatctttactactctgttttgctttaatactggggggttcaaacccattgtcaacaatgcctctagtaaaacaatggttttgtattactgtttgtgctgagaaagtaataagatgatctattgaaagtgtcaacatattactaattttgcttctttggattattcaatttgttggttaaaaatattataagaatgatattgaaggtatcaaagtattataattgtaaagctatttgctaaaattgaatgattagtttgaccaaaagttgtagactttccttattaactaaactaaaccaatgatttaactcatatcactctgcttcgttgagttacgttgaggagattcattcaacaagcatagtgggcgtgtagtctgggtgcatctcacatcatcaacatattagaaacttcgagattctttttataaacatagaaaacatcacctctttgctat

SEQ ID NO: 33853 - DNA, 1293 bp, Arabidopsis thaliana landsberg
  unsure (1)..(1293): unsure at all n locations
cgtccgctgatattatatcacaatatgcaccaaaatagaatataatgtaaattaaattaaaaaagaattaaggctgaaagaagataagagagtagcatttttgccgtgtcgctgcttctgccagtctccctctatctatctcactcgctctcaccatttgaagacgattaggccataacannnnnnnnnnnnnnnnnnnnnnnnnnnnnnnnnnnncctgatacgctgaaatggggcatacacttcaaacatctcttactggctgattgaaagagtttcaagtataaacgcattagttatttcagttgacattaattaagacaattcactatagaaattcgatttaaactaaatgtgagaatttatataaacaattgaaaaaataccaaaaccttctttatatatgtcttatgtggttgaccaaagaattagtgttttaatataagattatatattatgatgagtgcaatttttcgaaaacccaagcatgatagttatacatttccatactaagttgtccgtcattgttcgcttatttgtgcatagttactgtcgtcctaccatggtcgatcgttgaattattttactattatttaaacgataaagtatggtatacgatggaaacaaatacgatacatttgtttagcatttgtgccgacattgtattatgtaagtgcaatcgatgaacaactttttagatgatatgtatatcagtacatggctcattttatcattttccatttgttttacttaactcaagattttgacatttagcatttgaatcttatggttgtctcacaacattccattgctgattgtcaattccccaaaagctattactttcgttcgataaattattcatacaatcttataaacacccatgatgacctagcttttctaaaattgtattttttaccaaacatgagaaccttgaaatatcggttttatttcttacaactaaatcaggttcaaattgagattatgaatatcctaattaaataagactaagggtccacgatttcaggccaccggtccagaggctctggtccgactctgagaaaattgtttggtcggctgattggagagtttacgtatagagtaaacatgataaattcttattattttcagtcggcagcacaaaatcctatggctattttctaatttattatactagctaacaaagtcaaccacttttttttttaacagtcaactaatatgttttacaaacgtatatatagttatggacaataaatgctctttaacgtaacaaaaaaaaaagttttagtaatttaa

SEQ ID NO: 33854 - DNA, 1919 bp, Arabidopsis thaliana landsberg
  unsure (1)..(1919): unsure at all n locations
tagaacgaacattctgtggttacaaaacaaatatataaagaagaaaacaaattttcatacaaatcggtaactatatatttatgaaagaggaagaaggtgtggtgtgtgtgtagtagtagaagatgttgcgggagatttgcaaccccgattgcttctctctcccgacgttgaagattgcggcggttgtgtcgccacaggagcgtaaactctattattagttgtatcgtgtgaaggtacccaaatgccttccatcaccataaactgccgttgttgtggattttcaccaccggtccttactaccggagtagctggtcttcttgtatgcaatctatatttctataaaaatcaagaaagttgataaaaattatagaactatgaatctatgttgtagtgagaacataaaatgattatgttttgttacctgtaaatgacttttaacttcgtcattagttaaaccatcgaccttcataagatctctaatctgcttaggcgtagcaactgcatatttgacaatgaacaaaaattaaatatatacttctcgtaaaattatgattctcaaacaatcaaaggatttaatatatttaccatgtgatccaccaagttgttgaagcgcgtgcaagaatctgcggtgtaactccggtgaccagcaacgtctttgcttcctattcgaatgagattgtttctgctcctcaaactcatttccacccccgacggtttccgccgtggaactagttgtcgtcgtcgacgtcggagtaattgctttaataaagtggttgagaatctgcagccttaggtttctccttttgaaacggttgaaacgcaccagcgctgcgtttgacttcaattaccatcggtttcttattattaggttgtggatctggtgattggttccataattgaacagatctaagccaatccgatttcttcttatcaccatcgttattttcattggtcatcatctcagttttctcagcttcttcatctttatcggtttcatcagatgaagcagaactccacttgattggcataaactcttcaaacacggcaccgccgcattcactagttgtccgctcagaacattctgactggccgccaacatgttctgaagattccgataactccttccgacatgactcgatagctacaagaatgatatgtaaacaattaagaaactggaagcgatcgtgaaaacgaagaatatatatatcaaaagaggatgtgtaataacattaccttgggttacaagttctaaacataaagggagctcacgttgaaagacttgaatctttttttgttcttcttctagagcttctacatattcgtgacatctcttcattttctggatgtaatccatgtcaccgctcttaaacatcatcattatgaacagatcttagactcgtttttgctatgagttacagttacgaaaacataaatcttgagagagacagagaagagttttggatctaaaatgagagagaaaggataaaactttgacgtttttaagttggaagttttaaagggcagagaaagaggattggtgtctaatcgaggtcgggccgtcgcgtacctaaaaccgaatcttcttgatgtttagatttattcggattttacttgggaaagggtagaatggtaaatataggaataggctgaggtttgtttgatacagggagaatattcggggatatgtggattcnnnnnnnnnnnnnnnnnnnnnnnnnnnnnnnnnnnnnnnnnnnnnnatgacgttgacgttgagataagaacgacgagtcattttagtcattactaactctttcttttttcttcggttattctctacctattttagaaatatacacatgaatttttttgtaataacaaacgagtgaagaagaatatccatagagattggaatcaagatatgttaccagaaaattttg

SEQ ID NO: 33855 - DNA, 3921 bp, Arabidopsis thaliana landsberg
ttttcctctgatctcctgcaaaatattacaatccttacaatgttgttgataatccgattaagaaatattctattacaacacaattttgccttacgtttatttttttgaccaactagagttagctttatttcaagattgacatgaatgtattcaccattaccaaatttcaatttgttaccatttttgcaaattaccacctttgcctcataggttattgtaaagtcaatagtaattttatacaatttcgcatctcgagtagaatgctggtacccccatgtagttttgcatacatcaatctgttaactatgttttgtccaaagcaacaatgtacaccattcatagctttcatagttgtgcattcttatcttccaacaacttttcattcttagctttgcagtcatttaatgtagttaattctcgacgaacactgcgccacaaatacatcggagaaagtggaacaaactcactgtccaatccatgtaatactctagctgaactaatcaaatcattggacacatatgtccaacatattaaatggctcatttggtttcgaatcaaacctccaaaaattcaatcttattatgttttctacatctactatatacttatctaatgggtctttcgtatattgtaacaaaaccaggtagtcattacaatcatattaggatcatatcaaatatgaattaggattcagcccattcaccttctcttcaaaatcatcaagcgagattctgagtggtatgcaacgagattaatgtttcaaactagaatcataagctttcttcgcatgttccaaatcactaaaccgtttttcaagctaaccaagtatcaaccaaagcttgaagaatggtggtttaaaaattcatttgattctggaataaaatatatgagtttagactttattcggttatttttagatttttttttttaattcttaagacttagaagatattttagattttgacaaagatctcacaataccgcctaaaaaaacgaatggaatggtgatagagacaaccgagattagttgttttgaattcgcgatgttttattattttattttcgtcattactcctactattttagtatatgttactattttagacttttagttagatttaaatatttaattactttattattattgtttgaccatggtataattatttttatatttatagtttatacaaactaataatttctataatattaaataaattttaatcaattgatccgtggtcgaatccggttgatccattgaccccgtgacctaaaaagtagtctagttcaccatccaggtttaaaaagattgcatttaagtctaattattgggcatagagaatgctgaaatagtaagtacataaagctggagaatcaaacctgattacactgtacaaagccatataggaaacaagtgtcaattcgttcttctttgatgtccatatcatatggaccatacgagtcatcatcctccaaagatcttaatcttgattttatataaaaagttatgggtctttctttatagtggtgcagagttaaggctttgaacattagaaacaacaaacttggaggtacccaaatatctctgattcatatcaaatcggttaccaaatcactcaggccgtaccaagcaagatataatgcatctgcaagcagatccgaaactggaatgtgtcttatgaaaacaccaaaagtattaaggaagaattgcaaaatatacatacaaaaattatactataaaaatcttatgcaagtgagacttatgccttatttcatctaaagaagctcgaatgtctaatcatcaagattacacactgatttctcgataactatatacaatcttccggtccctttcattttcctccaaagccaaagcagcaacactgtcaaattgcacaagacaaaccaatgttcaacacacactcactatttgaatacgtattcactaatgattatacttgaaaatgagttttaaagaatgtcttactgaggaagtgttgttcgggttacgggagctttgatgagtcggcgttcttgaagatccactcacatttgctccagaacttctctcttcacggactttattgaagatatgcgtgtatccgtcagctgatgacgggttgttctcgtcccagtcaccgaatttaggcaccactgtgactttttcaggctatatataaacagatgacaacacataagcaacaaacagagatattctctctttagaggttaaaagtgagattcttacactttcatcagctctaaggttggtaggtttaggcctagattttccagtaccatcataagaattcttatgcaaaggtgacttgttgtcataactattgttctgagaagctcttccttgtcttttgttagcagcttcatttgatgaaccaccagcatcatcaaactgtttcaactcgctctcttctcggcttctcatatgctcacgtgatcttctaaccgtgtcaacttgctcaggtttggttctggaagaaggaggatgaggaggagcttgtgattgagagtcaaagttatactccgggtcattcgggttcatgatcttgctaccgggtgctcgagtcttacgagctttgtcaaagtaagctgtgtaaggaacattctcctcagcttcccagtttccaaattttggtacattcgaacgctgttgcaacaaacaattcaacaacaatgtccttccacaaaacattcaataacataacatcctaaagaacaatcatcacagaaacaagatagcaaattcacttaagaatccaaaacagaacaaatacaaattgggtttatcgatttcgaccaagtacaatgataaagttgaaatctttgctaagcaaaaatagaaactttaccataaaaatagtaactttcataaaacccttttcttatctaaagcaaatcagaatcataaagttgaatactaatagacatcgcaatccatagaaaagatatcaaaataggaagaaccataaatgcaaatagattaagactcaactttctacaaatcctccaaaaaaagggtcagagattgacggaatcgaaacaaaaactataatctgagagaaagctctagacctaaataagaagaagaggagaaggaaaaaaggaaagaaaacacttactgccatgggagagaggtagctaaagaattgaagtctgaagcttttgttaggtttgagagagaaagacagagagagatgtgagaaggagaggagacgaagaagaagttttataaaagcgttgactagtggtgatgctatgtattctttgacccttcctctcctctctctaatcttctcttctctctttgtctcactccaaactctattaatttcctttcttaactctattactaattctcatgtattgtgaagagcactcaaacgccgttaccgttaccgttaccgttaccgttaaaggcggctttattttggtgtccatgttacattgttttcctcttaaagattgtaataaatatttttgtcctaaagaattggatatgtgggtcgggagcaacttttgctggaatcttctgctctagtagataagttttgtggatctaataattaaatgctatagtagaatttgattattgatagcaacaaattagaatgttaaagtagaatttagtgaattattgatcttggattttagcggattaatgagtagtaataactgaaatttattttggtgacgattggtaccaattcgtctatagataggttaccatttgaatcaactacttgcaatttttgtgatacaaatagtacaataactatttttacaaatatcgccatttaacgctagtacgtatacttttattatttacactcatagttttttttagagaaaacttaaaagtgttttgtgaagagtactacaaagtgatagtaagtaaatgaaaag

SEQ ID NO: 33856 - DNA, 5367 bp, Arabidopsis thaliana landsberg
ccataagatgcatatgcctaccgttgcagacttcaatctcctgaaacgaatcatcaggtacataaaaggaactgtaaccatgggaatttttttaacaaggagacagactgtaccttgagagcttatagcgacaatgactatggaggttgtgaaacaacaagcagatcgactggtgggttctgtaccttccttggaaacaacattatctcctggcagtcacagaaacaaccaattgttgctaaaagttctacagaagcaaaatatagagctctatcagaagcagcttcggaaattacctggctatgcaagattctgaaagaactcggtattcctcttcatcaaacaccagaactatatggggataatctctcctctgtttacctcactgcgaatccggctttccacaagaagagtaagcactttgccaatcattaccactacgttcgggaacaggttactctgggaactcttcgggtcactcacatatcgaaccaatttcagatcgtagacatcttcaccaaatctctgcctcacggtcctttcgaatctctccgattcaaacttggtgtcgatttcccacctcctccaagtttgagggggagtatcaacacaacagctccaaacgacacagtttgggaattgggctcaaaaccactaaagcccaatccgaaacaaatgctcaatccaaaagccaagcccaacatagctcaacggaaacctgcaacaacaaaggacaaaagcataaaagttgcagagcggtcattatctccaagcagtacggaagtaacgacgaggaatcgctatgaagctcttgaatcatgtgaagacaatgacgccacataacagccaagtgacagctatgcaaaccaagaagacactaggttaaatcaatctagatgtataaatagacatagcttgtaatcacaaaggttaagccgaaagcaaaataaaaacataaactttcgatttcatatgatctctttcatggtatcagagccatagatcaatccatggatctctatacacttccatctttgaacatctcaaactgtgttacggtaaaactcacagaccgtaactacattttgtggaaatctcaatttgaatcatttctctctgggcaaggccttcttggttttgttaatggcgcctatgctgctccaacaggcacagtttctggtccacaagacgtcggcgtcactgaagctatcccaaatccggattatcaagcttggtttcgctccgatcaagttgtatggcgtggctacttggtctttgtctgaggatattctcagtgtgttgtgttccaaaacatctcatgaggtatggatgaatctcgcaaaacacttcaatcgcatttcttcctctcagatatttgagcttcaacgccgccttcatagtttatcaaaagaagggaagaccatagaggagtatctacggtatctcaagactatatgtgaccaactcgcctctgtgggaagttcagttgctgaaaagatgaaggtttttgccatggttcatggtcttactcgagagtatgaacagttaatcacttctcttgagggaaccttagatgcgtttcctggtccatcttatgaagatgttgtttatcgtcttaagaactttgacgatcgtctccaaggctacactgtcactgacgtttctccccatctggctttcaacactttctgatcttcaaatagaggcagaggaaacttctcaactcgaggtcgtggatttcaacaacagttctcctcctcaagttcttttgtctctgcgagtgagaaaccaatgtgtcagatttgtggaaaaagaggtcactatgctcttcagtgctggcatcgatttgatgactcttaccaacactctgaagctgcagctgctgccttctcagctcttcacataaccgacgttagtgacgacagtggttgggttcctgattctgctgcaacagctcacattaccaacaacagctctcgtctgcaacaaatgcaaccttatcttggcaatgacacagtaatggctagtgatggtaattttctgcctatcactcacattggctcagctaatctcccttctacatcaggtaatctcccattaaaagatgtattggtatgccctaatattgctaagtccctattatcagtgtcaaaactgactaaagactatccatgctcctttacctttgatgctgatggtgttcttgttaaggacaaggcaacttgcaaagttctgacaaagggaagcagcacaagtgagggactttataagttggagaacccaaaatttcagatgttctattccaccagacaagtcaaggcaactgatgaagtttggcatatgcgattaggtcatccaaattctcaagttcttcaactcttagctaacaaaaggcgatccaaataaataaaagtaccagcaagatgtgtgaatcatgtaggcttgggaagagttcgagattgccatttacttcatctgtttttaatgcttcaagacccttagagagagtttactgtgatctctggggtccagctcctgtttcttctgttcaaggttttcagtactatgtaatcttcattgataatctatcaagattctattggttatatccattaaagaggaaatcagatttttgctcaatattcatcaagtttcagagtctggttgaaaaccttttgcaaacaaaaattgggacttttcagagtgatggaggaggagaattcattagtcaaagatttctcaagcatttacaagattcagggatacaacatttcatatcatgtcctcagacacctcaacaaaatggtatggcagagaggaaacatagacagctaacagaaatggggcttactctaatgtttcaaagcaaaactccacaaaaattttgggttgaagctttcttcacagcaaattttctctgcaatctcttgccaacaaccgctcttgcaactaatgtcagcccttatgaagctctttttggtaaaactccaaactattctgctctaaggacttttggctgtgcttgcttcccaactcttagagattatgcttgcacaaagtttgatccacgatctatgaaatgcatctttctcgggtacactgaaaaatacaaagggtatcgttgcttctatccaccaacaggccgagtttacataagtcggcatgtcttgtttgcagaagaatccttcccgcttgcagacacttacactgatcaacagaacgcatttccaacttctttgtttgcagctaagttaaaaggattctctatcttcttacctccagaaactgaacagttcagtgaaacacctacaacaacagaaaatcagcaacagtcagaattaataccagtaagtcatcctattgattcaaatgtacaagggaagactactgaaaatttgcagcttatgatcgttgattcattaagtgttacacctctccaaatgattcctcctcaagagcgattgtctagaagtgatgagcaacgtcctgagtgtacggcaagcttagatcttgatcctataggcaacagcgttgcttcgtcatcttctagtcaagagcaatcaacatccaacgtcatcaaagtcacagagtcaactcatcctatggttacaagatcaaagacaggcattagcaaaccaaataaaaggtatgcaatgcttacacataaaatttctcatccaacaccaaaaacagtcactgaagctttaaaagatgaaaagtggactgctgcaacggttgaagaaatggaaaattgttctgaaacaaatacttggtctatagtaccttttaaacacacatgaacgttctaggttccaagtgggttttcagaatcaaactcctagcagatggatctctagacaagtataagtcaagactagtagctcagggcttcaaccaagaagagggaattgattaccttgagacttacagccctgtggttagatcagctaccgttagagcagtcctgcatcttgcaaccatcatgaattgggaactgaagcaaatggatgtaaagaacgcctttcttcatggagatcttactgaaactgtgtatatgaaacaaccagctgattttatcaacaaggccttaccaaatcatgtgtgtctgctacacaagtctctctacggattaaaacagtctccacgagcttggtttgataaattcagtaacttcttaatctcttttggttttatgtgcagtttctcagatccctcactttttgtctgcgtaaagaaatcagatgtcatcatgcttctactctacgtcgatgatatggtgatcactaggaacagctcaaaactactatccaatctcctcaatgaactcaacaagcagtttaagatgaaagatctaggcaaactaaactattttttgggaattcaggctcaatttcatcaaaaaggtctctttctatcccaacaaaagtatgcttaagatctactaatcattacagccatgaaagactgctcaccagtagctacaccactaccaattcagctagataatgctcctcatcaatctgagctcttcgaaaatccaacttatttttgtagcttggcagggagattatagtatctgacactcacaagacgagatattcaattctctgttaactatgtttgtcagaagatgcatgctcctactttatcagattttcacttgctcaaacggatcctgagatatgtcaagggtaccagggcaatgggaatctcgttcaacaaggatacagattgtaaattgagggcttacagtgatagtgatcatgctggttgtcactctacaaggagatccactggaggtttctgcacttttctaggcaacaatctcatctcatggtcatcaagaaaacaacctacagtagccaagagctctactgaagcagaatatagagccatgtcagacacagcttcagaaatcacatggattgtcaatctgctcaaagatcttggtgtccctcaaccgcaattaccagagctgttctgtgataatcattctgcagtttgccttgcttcaaatccatcttttcatccgcggacaaaacatttcgcgactcatgaccattatgtgcgagaacaggttgcttttggagaactcatagtcaatcacatcccagggcatctacaactcgctgatatcttcacaaaatcacttccagcagcttctttcgaatctctcagattcaaacttggcgtcgatttcccacctactccaagtttgagggggagtatgaacaacagagctcaaaacgacatatttttgcaaatggaccaaaagatacagaagcccaatgcgattcagtcttcaccaaagcccatctccatacaacggctacctgcaacaagcgacaaacacagaggatcagcaga

SEQ ID NO: 33857 - DNA, 1180 bp, Arabidopsis thaliana landsberg
  unsure (1)..(1180): unsure at all n locations
agccacctccagattaccagaccgggaaagaagatccacaagacaagagtaatgctttaagttgggtttcacatcgtactgatgcatcttgagaaatagttttttcccttgttctactaaaccagcgtgcgtgcaagccgatagaagcgcaagaaatgtaggtccggttggtttaacatcagactcttccatttgatcaaaaagtgctatggccgattcaacatctccgtgcattccataacctgatatcatcacattccaacaaacggcatccttctgatttccagcatcaaacagttctcgtgacttttcaaggtggccacatttcgcgtacatgtcaatgagagcagctgaaagagaaagattcatctcgtgctctgtttcagtgatgtaccgatgaatgctctgtcctctctccagagagccagtattggcacaagccataagcagagtcaccaaagttattgagctgggtttgaaattctcagaaaccattctatcgaacaatgcaatggctttttcggattgctcacagtgaacataagacgcaatcattgcgttccaagtgataacgttagtatctgcttcacaaaacatcctccaagctacagtcaagtctcccatttttccatacaaatcaatgagggaattgaccactgagatggtaagatccaagctagttttgacaacatagcaatgcaacgacttccctagtagcaccgctcctatgtgggaacaagaagatatgacagaggttgcgctggcagagtcgatttcaattccaagattctgaatttttctaaataactcgatacactttacgtgacatttcattttaccatagcctttaagcattgtattccaagcttctttgtttccttcttcgcttatcctacagaaaagcttctcagccacagccagaagctcgaatttgcagtacatcgataacaaggaattgcaaactgtactgtctaaagagaaacaatgtcttatgacgaacccgtgaaaggctttaccttgagggacaagcatcatcttacctagttcattaatcaaacagctaatgacaaccccatctgggtgcattcccttgttctgcatttcccagaacatatcanaactttcctccatgtcacctgatctcgccagtgacgctataatcgaagtccatgaaaacata

SEQ ID NO: 33858 - DNA, 1072 bp, Arabidopsis thaliana landsberg
tagaaaggcaaaaaaaagttgcgacattattttagaagagaagggcaagagctaaagaaactaacatgtcttttgttttcaattctctctctctctttctctgtatgtgcagatttgtattcatgcaaaactcagatgttctcttatggtttattaacagaacaatcttcttcttctctgcacaaagaacaatctcgagtgttagttatctcatcacaatgttccttgctatactgaggcagattaggttcttacgtgaagctgggagtctcgtatattttgcagcatttcagttatctccatctgtttcatcaccgtggcgtgtaaaagctgcaaccaatgaaaaaacgcttttgagtccatactgaatctttatgtttgaaggttttaaaactaacaggaaaggcatcgcaccctctttgttttgtcgagatcaaactcaactgacttgattctgtctaagaatccatcaacattctctccttctctacaggtattgcaacgggtttgttccgaatatcctcataacttttctccagtttctgaatacgttccaaacatggaagaatccggtctttcattgtgggctctctaggaggtggtgagatgaggctgcaccgactgtcatcttctgttggacttgaagggctgactgtagtctggcttctcagaagctcaagcggagtataacgaaaaactgcagctagtttcagcattaacgaaagtagtcttttcgctaggttctcacattttatcttgtcaatcgttacccttaaatcatgaagccaacggatgatgggagcacctaggagataccagagagaagatgaaattcaaaaggtgagaaaactatagaagagatctgtaatatttagcactgagcaacatttgaattaaaaaaggagacatataaaatgaaattgttttatgagaaaagcattaataagaagtataacctggtgaagatgtttcacattttaaaccgatagttgttgcattaagttcacgcattcggtattgggattgcctttcttggccttttcggataagagctatgacaggtatggcaaac

SEQ ID NO: 33859 - DNA, 1679 bp, Arabidopsis thaliana landsberg
gatttagtaagtacctcagttctaagaacttttgccctcaacgcatcagcattacgagggtcaagcatattctctgttgttgtatctccagtgaaggctatctcgggggataatatcgtgtccgtaatctgtaattaagttcaatattattgtactttatcaaacctcaatatcagaaatatggcttattataagcaacaaacctcgacgccagactttttaatcttttctatctgttttcctttgaggtgagcatactgcttctgcaacttcttcctgaccgaatagatgacataaccctaaaagaactcaagatcagtaaaaaaaaaagacgctctcatgccacattcacgatgtgtagtacctgacttggtataacatggtgagttgcaaatggtctaacaacaatgtcattgcgcaactcatatgtttcacctgccaccaccaacaaagaactcagattcgctatctaaacaaggttggcttttaacaagtcactatgtcattacctacagcaagtggtatcaattctacattcaactctacttgacccatagtcctgtgaatctcaagaagtttctcaacatcttctttaatagatggtggcacaaatattttcggtggctcaagattgtataaaccacggctcgctacatacattggaagccctccctgaagaaaacactaaacttagccacaagattcatacaaaagatcccataactcaatcaataagcagaaacatcaaaccaaatctaaaagtatgttcaacataactaatgcttatccttccaaatcatagtacaatggctctattttgaactaaaatgtatcatcaattcaacactaagattcatccacaattcaatcaaaaggccgaaactttacacgaaatctaaagagggttttgaagaaagactcaaattttgaacaactcacgatatggtcaagatgggcatgagtgataaaaagaaacttctgctgaatagcacgagaagggcaccttccaatatcaaagacacatttgagctcagggacgataacacaagtctcgtgcccacctacagagatcccttcaattgcataactctccaattcgacacctttacggttcactgcagcgcgtgctttccgatactcttcttcttcctcaatagctcggctaatcgatgagaaatagccagagactttgacgggactcacgaaatgtctacggttgctctgtatctgtgcggcgagctggtgagtaatcactggaggtttatggtgtttggtggaagggaagattttgggaggtgaaattggaaacgaagaagaaagctgcattcttttgtgaggttttacggaggtttttggggtttcctctgtcactcagacatgaaacgatagaaaatgcaaagaacggcctttttcttgggattgagtgagaccaaattaaactgatctactacatatgtatagctccggtttaatgctggttaggattgtttttcggttaatttggtttagtatagattgtaatttgtatatatgtatccaacatttgtaacaaaatttatagaggtattcaactattcatcatacaataaaattctattaatttataaaagtactattaatttatagagagttgaaactaattctgtaattgttcaaagattgtttctaaaaaagatttt

SEQ ID NO: 33860 - DNA, 1454 bp, Arabidopsis thaliana landsberg
tgacgctgcagggggcgagccatctgtgcatctggggtcgcatgagtcgcagtttgattcctgcgccaaccaatactatgacgctatcggaccgctcatttggcccttaggatggacccatcccgcggcgatattctcgccgtaaggtccatcagaatgtctcatggagctgtagtcgcagactccggctttagcttgtctatttgcaaatttctgtgcataggccgctacggttttgttccacttcagtggagccaccccgaccgcggctcggatctggttgtgaacctttagcgtttttctcggttggacatctttgattggtcttaccctaggtagaccatacgctcgagttaacaaaacagagagtaatgtcagtaggacgaaagtataacgaaaagaggacattttgttgtggttttgtaaaatgttttggacttatggttctgcagtgatctctattctgattgttcttcctccttttgtaggcctagaataataattaagaaaggctctgcaactatttttcggtaaggtacagccgaatttggaaggtttatctttcttctattcattagtcaatctcacataatctcacacaataatcttagaaatcccttaaaaataatataaatctagaataaattctaattttagtattaaatcttgaatttcagaattaacaaaagaaaatatgatagcaaaaaaaaaaaaagagatcaagtgcattttatgactttatagatatatattttgttagttctatgactttatagatttataggaaaaaatcccaaaattttatagatttgggatttattagttttctttttcttgtttcttaaaaaaaaaggtttatcaaaaaaatcaaatcaaatcaaagctttgaatgatgagtagtaatatacagaaaatgataagacttgtctttacggattcacctaaacttttagttacacactaagtgattttgtatactaacaccaattgatccaatgagtccacatgaaaaatgtggccaaaacaattataaaccacctagcaccccaaacccaagtttcagcagtttggctttgagccgactctaatcagacactagtcaattcattcttatcattattttgcatgggaaaaaatctagttgtccgttgtcgtacatattttcaacactaacacaaattaaatcactagctaggtgtacatggtcgttagtccattaacatgtacagcatttaatttaatactactgtgatatattaattaacctatgtgtatgaaaaggtcccaaaaactactttaggacatcaacatttactccaaaagaaaatttatactaaaagagtaaagacaaaatcagaaaattgttgtaaatgcttactcggaaattcaggtaattaaccacaaaagtcagaattagtgacgagaaacatgatcgctaattccgcggaaatcga

SEQ ID NO: 33861 - DNA, 994 bp, Arabidopsis thaliana landsberg
agtttagacctaagttccttttatcaagttctttgcaatcccttttttcagagacataagctattcatccattgttttcagagattcattcagttttcaatacagtgaagagatattttcttactctcatcttatttgctgtgtttatgctttctaactctattatgttgtttgtttcattcaatatgtcagagtagtttgcttgttagaaatagggtatttcattagggtttcatatggtttagtatatcgccccctttgctagaatatatgtagagtaattaatgctagatctagagtaattaactagattttgaatccaaacaatagataccataggtatctatagttggatctattatttgatgagcctggtttataggtgtgtaataagaatcggcttatctagtaggagaacaattgaactcgtttagaatgcatgtttaggttaaaaatctctcttattctccagttattcttagctataggcatagggagtttcgcagaacaccgccggttatttaataattagagtttgagtttaagaatggttcgataacaacctatctttcattaggtttagtaaccaataatttcttgagacaaccctgttcctagctctttatttaatcattcacaacaaaatcaacctgctgttttcttactttggtctcttttattttcactattaccatgctagcttaatctcgacattcaactcactgtttggacaaaagaactccgtcaattcgatcctaaaatagattccaaggtgaagtacctttgatattaaataaggtccttcccaccgagctttgagctttcccgcattcttttcctttcgtattgccgaagacttctcgaaggacgagatcgcctatgttgaagcggtattcttggacattccgattatagtactttgccgctgcattttggtaatctggatctgaattagagcttgatcgcggagttcttcgatgaagtcattgtgatc

SEQ ID NO: 33862 - DNA, 4214 bp, Arabidopsis thaliana landsberg
aggaatggatgtaaacctctgataggtgattgtattcattctttaaaacgatttatgcagaaagcccatcatggttcatgaagtctgcaaacggaatctgttatatcgttagaacatctatcgtaccagaattcaccataagtaatctggaaagatgccagagctaaattgaaagcaataccagtgatatgcgttttgagttttcccacgcacgagatcccactggccagcaacaagttatccagattgagtaagaacaacacaatgcataaaacctcccttatgagagattgtacatggttgagtaacaccagaaacagatatagagccaaatgaatacttgtgaagtaactttctcacctaaagcatatgcatacatgaaatcttccaaatctgggcgttcagttactatgggacaatgttgtttgaatgcctaagaatcaccaaaaagtgattttagaactcttatttactaagatgaaaaataaattcgacacatggaaatacatctaccaaacatacacatatgacatatgtatactacgtacttggttagcttgacataggacataatcatagtagccttcgtaatatgctaagacttgttatgaactggagtataaaacttgaagaagataattcaaaatttaaacccgtaaataatttttcagcggtatatacacaggtaatatagcaccttgatagacccaactcggtttctcaatctaaaggtctgatatcaccacgagaccaaacagacaagacaaataagttttgtaactatttagtctatatgtgtgtgcctgtcttatgggttcatacactattcttaacggtacataagcagtcgcttgaaggccttttaaagaattaggaacccaaccaaacagttaccagtatcactagaaaaacatacttacctgcgctacaaatgaaaagtccttttctatctgagctttttgttttactgtttcctggtgaactgcactacaacgaatcatgctgagctcatcttcaccccaaaatatctaagagaataaggaaaccacttttttttttattattctgcattgtccaagatagcataggcaacaaaattgatagtaaggcaattaagaagctttttgcgtaccaggttatatggatcatatcttaaactataactatttatatttgtatatctcttttggtaaaataacacacattaaagaagtggccaaaacaaaaattcaagactcgaacatatgacataataactagagtgaaatctcaccgagctatgcatctctgcaggttgaggaagtcggctgatataagggacccatcgagacttctgattcaaaagcaatcagagactaagtcaaaaccaaaacactcacatgaaatgggagacttattttaagtcaattactcaaatgttgatgccctagcttacttgacccattttcttctctcttattagaacagcagcaagcattccgatattcccaacttcattgctcaataaaactctaatatccgaggggagctcatctggagttatttgctgaaattttaagttagaacaacactaatggcataaaaagaatttccaatacttcttaagacacatgataacagaaaagctcgtttcagtagacaacaatataccgcattaaaagggactttcaacatgcagtcaccagcatagataactttggaggcgaacagtgacctgctcagaagttgatatagttattaacatggttagtgtatttgacattaaagataaagcatcacaccaggagacagcctctggtaggaaatgaaattggttattctcacaatcactcatttaacaatcgcataaagatggaaaacaatcagattactaaacaagacaaaataacatgattcaaagttgtacaatgtttcaactattgatgacaagacagaaccatattaaagaacatcaagacaagtcatataaaaattaagctgccacagaaggtatcaacaaagaatctgatcattacattgaaagggaactatgaatagaattattgaatagagaaaatgtgtctaacaatccatattttaattgccggtaaacagaaaaccgaggtactcgaaaaacggattttgaaaaatacttgcaaagttgcatcttattcaaaacatcatcaagcccacctgccataggtggatttcccaatcgaaagagtattagttatctttgctccagcaattcgctctaaccagggtaagaagttattgtccaacgaagcctaaatataaaatggataagatgatcgtaaatcctcttttgtgagagacataaaagttctgtacaacatcttcttacatcaattagctcccaaaatcaacagtctgtttggttaactatagatagaagaagctaaaagaacataaaggtttcatctttggtatcaattgctatcagtagaggagaaacatacataacttagaaaaattcttggaaccacactcaggtatgataaaacttttctaacacttgagataatcaagctgtgaacagtccatcacattgatttcacaaatttcacgaaagtctcaatctttcacaaatcaaacctgagtttggagctctaacgttagtttcccggcgagactgaaacgcttggctaaagagctaacattgcgcctttgttgaaaccccgaacagcttcactgtcgaaatgcagaatagcatctccagccaaactggatggcgcgtgagcaaccaccgctcgatattatggactcgtgtttcgactgcggctagagcagagcggccaggaccagacgatattctgatgcggtttgtttcggttttaaatttcagataaatcggtttgtttttaattgattttgtagatagccttccaattttgactttttgataccttacaaagtgaaatggctttgagagttacttgcctctagcaacagtgtctgtgtctcctcatttttcttccacaatctcaatggagagctcacctcttatgccactattggagaagaaataatcactcgtgccattcttatgtttggaatattattattgatttttatttaaatcgaaaaatgaggaaagaacgaaaaacctttgcgaaaccacaaaaactacaagaaaacgtaatttgttggctcgggcccaaaaaaaaatgtaaatactcggccgagttgtattatttactcggcccagctgtattatttacagaaaaaacctaagttctcccttttcacttctcgacttcttcctcttctctccgtcgtcgtcttctctcgtctccgacgataccactttcaccggaaaaatcaatctcttctattcttctttcttctccgttttcgttcgtctttgtctctttcatatccgcaaatttattttccaatggctagagtaaaagactcatctggagaatatgaatcaactagggttgaagcgaccggcgaaattcctccatcagtcgacgagaccgccgccgagattctccaaagagatgaagaaggcacagagcttcttacaacagaagaggaagccggagaaattcagcctacaaccggcgattgtgacgccgccgatttgggtaattcaaacgccgtcgcatgggaatcaattgacgatctttcagacccaaatgccgattcttgtgtagaagaagaagaggcaacgaatgcagttgttcaacatgatgatggagcaaataaggtatgatagaagaccgttatttttttgattaggctcgttttagaatattatgcattggtaaatgattggatttgtgaatgttgcttcagataaaacaagtagtacaagtaggtcgtaaatttgtgaatgatcattcaggaacaagtagtacaactaggtcgttaatgtggaattgaaagtattttggattgaatatgcaggatgatggtgatgatgataacctgccgcagaatatgcaggatgatgatgatgatgataaccaaccattgccgccagaagttatgtaatttgatccaactaactacacgaaggtgtgtaagataggaacgaggtgtcagttggtacaaacagtggaatttatagagactttggatgcagaactgaagtggtttaggaatcatgaccaatttaagcacatattccacatgcctaaggagcccaatcaaggcatgtggatgcttatggttcgcacggctaagacagaattggcgagagagtg

SEQ ID NO: 33863 - DNA, 5881 bp, Arabidopsis thaliana landsberg
  unsure (1)..(5881): unsure at all n locations
ggcttggctccagcctgaggaagattaagtctgatacagaatgagttcaaccttattaacctggccaactggagaaagggttcaaccaatacaactaagttcatttatttgtattatattatttgtaagtgtgatgtactatgttttatgttttcgtatttgtattgaattctttgcaagtttattgaattatttgcaagtttaatgtatttttttaagttcaactgagacaactgatatatgtatctgtattttagggttaacaaaatgataaaataattctcaatattttcagctattatcaatatctaaacattgaataaatccaaaatatgatattacaacattgttattaataaacttgatcataaactggtttcctaataaatcacctatgtataacaaggaacatatagttcatgattgtccaatgtacatacgttatgtataaaaacagatatttactaaatatgattctatcaaaacttattaaaatccattaatatgttaaaacttatgggaccaactaaaaaaatgagttggtttttcagattcaacttcaaaaacacaaaatttagaatagttcaactgtttgtgattccagccaactgtacatatacatacaactatgtgtattctgaatattctaataaataattttttaaaaaatagaccccacgaagtcgcgttcacactacgattattgcgttcacactacgattattgctttcacactacaaagtttctacctatttattctcgttcatctctctttctctctctctcttctatttcacttctctcgttctctctctcttcttcctctctctcgttcttctctcttcttccttcccaacatcagcgacgacatctgaaattagggttcccattatccgccgccgccgacgacaacaacaacaaccaaggtattacatagggtttctacagggtttcttcctctctctcgttcttctctcttcttctaaagggtttctagccaccgtaattagtagatctagggtttcttacgggtttttagccgccataattagtaaatctagggtttatagcgttcatgattcatatctctttctttctctgttctgtagatgccctatagttactctcaaccatccacgtccgaagctagttggaatagtggagaggcgaatgccgatgcaaattggggggttccagaaaaatgtttttgtggtaagcctgtaaaacttaaagtgtgcaaaactggttacaggcaaggcgacaaagtctacaaatgcccaatgcttaaagtaagttattgtgttttcatttcattggaacaacaaagtacaagtgaattatatttatgaagtcttctctctttcgcaggctgaagagtacgagtcccgaaaccaccttattcagtggtgggatcaggcggtaactgaggagcttgagaaggtaaatcacaaacttgattccgcactaagacatggacaactagcatgcaatcatgctttggagtccatccgggaaactattcaactcatgcaaggtgaaattgaaacccttaaagaaaggttactcgccaaagaagtcgagattgataggcttagggcattactttctacatggtgattatgatatgttttatgttattgaggatggtgtatggcatttggattttatgtaatatttgaacctaattagacatgtatttacctattttaagttatgtgtattgaccggccaacatggacaacttagctattcttgtattttaagttatgtgtattgaccggccaacagggacaacttatgtatttacctattttaaattatgtgtattgaccggccaacaggaacaacttagctattcttgtattttaagttatgtgtattaaccggccaactgggacaacttagcaactcttgtattattgaccggccaaccgggacaacttagccaaacgttttgattttaataaaatcctaaaacacataaaccatttcagaaaataagtttgtcctctacacataaactacgcataacattcccaaatacacaaaaagaaagtcctattttgacagacacctaagagtccacacacacacataagcaagaaagaattttcaaagtcctaattcttctgtctcttcctcgtttgcttcccctcagttgtaaactcttcccccttatacttggaaggtttccttccacgtttttccccagaatccagagtaggaccaacatgctttctcttcttcttcgatatctgcttcttcttcttcttatcctcttcatcggactcatcgctgccatcacctacaaaaatatgtaaccaaacatgtaagaactattgtgaaagcatcactacacaaaagttcaacannnnnnnnnnnnnnnnnnnnnnnnnnngaggtgctgggtcacggattccactgtgaataaccaaggccttgctctgagtatcccttggatgataagacggtggcacaaaatcagcagctgaaccaggacgcatatcttcataacgggctttctctgcctctttctcaagctgatctgccacatattcctctattccttgtactctcacacaaatccgcttgatttcgctatccatcacagcaagcttgtccgtgagcttgtcaaatcctctctccatagcttccttgaacgagagaatcgatgtcccagggattttaggttcaggtacagctggaacatcatcaacagtttcaatacgtctaccatcaatgtctgcttggtagagactacgccagaaaatcttctttttctctacgataagcctctctctccaactatcaacaatcggatcgatatatccaataccatcatcaacatgcttctctacaacgcgtgacaacatttttctctcatccatatcaggttccaagatgcttgaaatatcctgtcaagtaaacatatatttcaaacaccacaaagattataaacatagatttcaagagaacaaagctaaccgttatatctccaagtgcttcatttatttcttccaaagtaaatcccttcatgcaactttcactgaacttgtcacattcttggacattccttgtttgcaggtacaacttctctaaatctcttcccaagctgcggaatgcactcaaatgccagaatctagacacaaaaacataaaagtaaatgcaagttcacaataacaaaatttagccactcatataatttactcgactacttacctcaagtggagtaataaatccataaaaagcagtctgtgccttgagagaatcaatgcatgctctttaattgagtaccttataggtactccattgacaacaaaccaacactctctcgctaattctgtcttagccgtgcgaaccataagcatccacatgccttgaatcatgtgattgggctccttaggcatgtggaatatgtgcttaaattggtcatgattcttaaaccacttcagttctgcatccaaagtctctataaattccactgtttgtaccaactgacacctcgttcctatcttacacaccttcgtgtaggtagttggatcaaagtacataacttctggcggcaatggttgattatcatcatcatcatcatcatcatcctgcatattctgcggcaggttatcatcatcaccatcctgcatattctgcggcaggttatcatcatcaccatcatcctgcatattcaattcaaaatactttcaattccacattaactacctagttgtactacttgttcctgaatgaccattcacaaatttacgacctagttgtactacttgttttatctgaagcaccattcacaaatccaatcatttaccaatgcataatatcctaaaacgagcctaatacaaaaaataacggtcttctatcataccttatttgctccatcatcatgttgaacaactgcattcgttgcttcttcttcttctctacaagaatcggcatttgggtctgaaagatcgtcaattgactcccatgcgacggcgtttgaattacccaaatcggcggcgtcacaatcgccggttgtaggctgaatttctccggcttcctcttctgttgtaagaagctctgcgctttcttcatctctttggggaatctcggcggctgtctctttgactgatggaggaatttcgccggtcgtttcaaccctagttgattcatattctccagatgagtcttttactctagccatatgaaagagacaaagacgaacgaaaacggagaagaaagaagaatagaagagattgatttttccggtgaaattggtgtcgtcggagacgagagaagacgacgacggagagaagaggaagaagtcgagaagtgaaaagggggaagaacttaggttttttctatagtttctagggtaaataatacaactgggccgagtatttccatttttctttgggcccgagcccaacaaattaagttttcttgtagttttcgtggtttcgcaagggtttttcgtcttttcctcaattttcgattttaataaaaatcaataatattattccaaacataagaatggcacgagtgattatttcttctccaatagtggcataagaggtgagctctcgtcccttgtatgtggattgtgatgtttggaatttgatggccggtaaagaacaaatacatgagagcgtgtttgctactagtatgaccacttgcttcgttatatgttccggtgcctcaagatctgatggtttttttatagagcttgatttctactcatctgaatgaatttgcgaaacagacatatggtgaatcggaagaagtagctgcttgtgtgaaatcttaatcggaaatagagattccgatcaacggccagcttcggtggtaatggcgctgacgaaccgatgaagagtcggtgacgagtcagttgcatcttccacctccaatctgcgcaagaatgtgtaagtcacacatatcgcttctagacctgctggcatattttggcatatctagttattttattttttgggcttatattggcttttattgtatggctggatccatttcatcttgtaattttgctcttttgggttttaatttaaaagtttgacgacaaaaaaagaataagttaacatttagaaaggaaattacttatttaagagaatatgcacaaaataatcaaatttttgaagataattaacaaattaactatatgatagagtaatttgtcggtaacatgttaaagagtatgtataattatttacatttcctttgtaacatatttttttctcgaattacaagtgatagcataatatatcccgttttatcatattattttgcgtattacctattattaaaaaagagcatatagtatttcttgagaaaaacattttattcagtataatatttctctctatcatgttattttgtagtaatatacattgttttttattaagattacatgtaatctttttaataaaatttcttattcttttgataatatacggtttttattaagattttgatttcttttataaaaaattctattcatgttaattttcataacaatgttttttcttcaaagaatactatgtaacaatattttttataaaaaaattaactatattttttgaaatattatatcttttcgttaaatataacatataagatttaaatattatatattattttgtaaaatctcatgaaagtgtctcgcataatattaattttgaaacaaacgaatgagagttttgttcattttgataacgtgagtccagacctattttgtaaccaaaattttttttgctctactattttattatttctatgttttatttcgcagttcataaaatatataacattatttaaagctttgccacgttagagttacgaatagctaagttgtaatgggacccacaatttggtaggtttg

SEQ ID NO: 33864 - DNA, 1984 bp, Arabidopsis thaliana landsberg
ctttgatggtgttgtcgaagtccgtaggagtctttggatttgtatcttctaacaaggaaacattacataggattttaagattaatttgcgattctagttcttatagtcaattatacacatgacatctagtcatatttgactccaaaacactaaccaagcttcttcttacttctcaaagctttgatggtgtagccaagtccgtatgagtctttggctttgtatctccaaacaaggaaacactccttaggcttttaagatccggttgaggttctagtttgtatactcaatcatacacatgacatctagtcatatttgactccaaaatgactccaaaacaataaccaagcttcttcttacttctcaaagctttgatgctgtagcccaagtccgtatgagtctttggctttgtatcttctaacaaggaaacactacttaggcttttaagattcggttgcggttctagttcttatactcaattatacaaatgacatctagtcatatttgactccaaaatactaaccaagcttcttcttgcctcttatagctttgatggtgtagtcgaagtccgtataagtctttggatgtgtaacttctagcatggcaacacaactttagcgttttggttcccgttgcagttctagctcttatactcaatcattccgatgtattcctatttttactacttttagctatgatataggtataggtttttgagtcttttttgttatttctagagtctttttagagtcttttcaagtattttatggagagggacaacaatggagataaaaagacatttttgagcaaaagctgaagaaaataagccaaaggacgaattcactttcagatcaagtcgagagtatcgattgacacactcttggtgtcaatcaacactagttgtggcccagagaagtccatgatgcttttaagtttgaagaattggaatttgccccaaaaaacttctctattttcattatcggtctctgcacgttttttaggtaatatatatagttttaaagtttattgtttagacaagaaggagttttctatcaagttctttttgagacatcaagctattcatcccctgtattcagagattcatttagagattttcaataacagtgaagagatcttttataactcttttctctattgatttgtttatgctttctcactcaatcatgttgtttgttccaatctccatgtctgagtagtctgcttgtcatagggattcatatgatttagtagattgccccttggctaggttatatgaggattcttcatctttagttgttcttaatgctagttctaaagtaattaactagaacttgattccagataatagatatacccgccataggtatctgttaccagaacaactatttgatgagcctagtttataggtgtgtaatgagaatcggcttatctattaagatgaacttatcgaactcctttagaatgcatgtttaggaaaaggattttacggcacgccactgggaatcttagctctaagcatagtgaatttcactgaacgccatcggttattatgatattagagtttgagtttaagaatggttcgataacaacctacctattactagatctactaatcatctatttcatgagaataccctaaatctgactcttttcccatttgatttacatcttgataattattgcttttctttgtttcttattttacaatctattggtttagcttaattcgataaccatagtctattgtgtaatctgagaattttgtggaattcgacccttaagtgttacaatcgatctcttatttgagagagtggtcttaaggtaatttgacctacatcaattaggacaggtgtcacgcaagtaaataaggatagtgccggaattaaacagaatgatgccactatgccgaaaaatcagaaaatcgtgtagcgcaatctttgcaaattagggcattaaagtcctccgaactagagtaactgctggaagt

SEQ ID NO: 33865 - DNA, 3044 bp, Arabidopsis thaliana landsberg
tgattttccagaagacgagtttcggcgagagttccgtatgagcaaatcgacgtttaacctaatatgcgaggagctagatacgacggtgacgaagaaaaacacgatgttaagagacgcgattccagctccaaaacgcgtaggcgtttgcgtttggcgtttggcgacaggagctccgcttcgccacgtgtcggagcgtttcggtctgggaatctcaacttgccacaaactagtcatcgaagtctgccgcgcgatctacgacgttctcatgcccaagtatctcctctggccgtcggattcagagatcaactcaacgaaagccaaattcgaatcggtccacaaaataccaaacgtcgtcggatcaatctacaccacacatattccgatcatcgctccgaaagtccacgtggcggcgtattttaacaagagacacacggagaggaatcagaagacgtcgtactcgataacagtacaaggagtggtcaacgccgacgggatcttcaccgacgtttgtatcggaaacccaggatctctcaccgacgatcagatcctggagaaatcttcgctttcacggcaaagagcggcgcgtgggatgttacgtgacagctggatagttggaaactctgggtttccgttgactgattatcttcttgtaccgtacacgagacagaatctgacgtggacgcagcacgcgtttaacgagagtatcggagagattcaggggattgcgacggctgcgtttgagaggctcaaaggacggtgggcttgtttgcagaaacggacggaggtgaagcttcaggatctgccgtacgtgcttggagcttgttgtgtgttgcataacatttgtgagatgaggaaggaggagatgttgccggagttgaagtttgaggtttttgatgatgtggcggtgccggagaataatatccgatctgctagtgcggttaatacgagggatcatatctctcacaatctcttgcatcgtggacttgccgggacaagaactctataggctctgtttttcaccttttcttattttgaaactgattttttattgcaaattctttttccaaattaggaataaaaacattttagggattggttggatacagaaagaatagttgaattgagagtagaagtggctgatgatattgtttgtgttacttattagcatggtgtaatctttggttcatgtattttctatacaaattgaatttgaaacctcctaagtattagctttttttcctttcgatatttaacaaaatgggtcgactaaaaaagaaaagcaattccacttttattacaagctcaggctcagacagaagtacaagtgtacaaccatgaataaatggaagttgtacttaatctgtttcgtttgcaggatcttccttatctattgatgtgttgagctctttgagaaggaatgcaaatttggaagcatgttttcctttgtcattcattatttgtgggctaaatgatacaaagaggaaagccatatgaacatgttatttactgtcacatggcgcacacagaggaaaagccatatgaaatacaacatttgaatatgaaacttgttggaacttttttgacaaaacttttccggtgactttccggccaaattccggccaaacggctgaacggaattgtagggtcattagtgcgttggaaagctagtaaagagtactacaaaatggtatacacatacgtcaaaaatgaagttgtattgaatgagaaataaaggtgtaaagtgggacacttgggccaaaccggaccgaaccgaaccaggctgagtcgggttgcgggttgtcgggacgtcacgacgtcgactagagggctgtcggacttgtggaccgtcatgtgtgtgagtaattgggtttgctgagttgaatctttttggaaatattccaaattctcaaaatatgtcatattctaaaaatatgcaatatcttgagaatattctcgaaatatgccatattctaaaaatatgccatatcctgagaatagcctctaaaaatcctatctctctctactatataaagagacatagcctctcattatttttcaagatcggaaacacaaaacactctaagttctaaagtctatgctctctcttgcttcttaaaagtaagtttttagtttagtagtttcgagattatatcgtagatcaagtttgcttgagtctaatactcgtgtgctcgggtattagtttgtgatcggatgtatcctgacattcataaatcgtgattatccaaaaagcagttacggtcgatttattgaattaaagaaaaatatatcatatcttttctccgtgttttactttttgtctttatttactgttgttctaatttattattgttatcgttgtttcaaataaatttgtacttgtttctcaattcggtttttgagctcttagaatcttaattcaataaaaagtcagtttttagcttattgctctagacggattgagaaatttttgaatttattttaaaaacaatttctaaatcttctaaaaatagttttgctattatctttgggtgcttacgcggaaggtgtatcgaagaacggttttacttctttctttctcctctttctaactgatttgcaaacgctacgtagcgattgttgtggacagtgtcttatacaaacatctctagtttccacgaacgctcatagttgagtgagtttgtgaaacgtgaaacaagtttctgcgaacgcttcttaagctagtttgcaaaactaattcggtgtaatttagttgcctgaattttttggttaatatactaattagatctgtttttccgtgaacaaaaggactgggatcaacaccaacagcgaggtcgttgacacccccacagttcttgagactccagatgagatagctttgcatcttgcgaaagaacttgaaaagacacagatcgacgattctggtatggaaaacatgcgccaaaatctgttcagtaatggttcaacccacactgccataccaccctctgcttcccaagggatgatgctatacttgtttgatggcaaagcagggttcaaaacgtggc

SEQ ID NO: 33866 - DNA, 1238 bp, Arabidopsis thaliana landsberg
cgaggtaaacaaaccgattctgacggtagattattcatggcaacaaaagagaggtttaaattcaccaatgttgcacatgaataaagggatataggcattttaactaacttttcattaacaacatacgggttattggtaaccattagatcacaaactctacgcttaaccacatcatcgatcatccacagaaaatcatcataccagtggacattaacatcataaaatatatcgaaactctttaagtctatctctttgtcaaatccgacaaatctatcaatgaactccctaaagaccagattatctggaaaatcactggtttccaattccaaaacaggaacatgtaaccaaagatttctccaatgcttagacaaaacactcgtgcgaaccgaatccttggtggagagttcagagagtatacgacacaacaaatgctctggtaaaccgcttaacctatctatccccgagcctatgcttttgatagaggttctaaccatgacttctaacgaaaaccctaacttccacacaaactaagctacgaaatgaatcatagtcctaagtaccaagagagttcagagattacgtgagattttaggtgtaagattaggtgagaaagaagaacactcgattggccaacagagatcttatctctatttgttttgaaaaaaaaattaccttattgttgattaaaataattaacattatttataaggaaagatatccaaggcatttcaatcttagttataatatattagtatatatagactaatagtaatgtgaattttaatctacagttgttacataaatgaaaactcttggtctttcaatctgtcttttgggtaattcgtatatatatatgggtaaatgaaaatttcttatttatgaatttagaacaatattaatatctcttttgcactaaacatatttatagtttaaaaaataactagtgagatactgagtaaaacaaatataacaaatcaggttctgacgatataaactattttaaatattagctagagatttataagcaaaaatataagtacaacatatgtaaaattataagaaaaaacaagaaaaaatatagaaaaaataaattaaagttgaaagaattaaagtgagatagttactaaacttcatggtgtttaaccttttgaacaaatgttggttggtccttcttcatttcgaaaaaggttcaatttgggcctttgttcaattcccggaaaaattttgcaattttttaa

SEQ ID NO: 33867 - DNA, 4778 bp, Arabidopsis thaliana landsberg
  unsure (1)..(4778): unsure at all n locations
gcttacgtcgttaaatttcgaatctagtgttttattgtttcattggttgttaaactaccgacggggtaaagaaaaagaaactaatatttatgattggtgcatcttgttgtaaattgtaatcgtatggcctaccagcgatttcattgtccccaacatacagatatttttgttcgtgtgttataaattagggtagaaacatcacatattttacagagacaaagaaaaaaacaagaatcgtaataaaatgatattatggatacatgtagattataagatgagaaataataatttgtcacgggtccatcagtatactcgtcaaaattgattaggtaggtaatttacttcacatgctcttcctgtatacaagtataaagtatgtattttcatctaaaatctactcttttctcaattacattttatataagaaaattcatattcttaagaaatagtagtaaaattgttcttgaaaaaaaatatgaaaaggcattttccgtgactcagcctcacaggcggcttaaaacgacgtctttttcaattttaataaatttttggtaaaaaagcttttggatccgccgctatcttcagcaattaaagttggacgcagaaactcagaagcaaaaagacgataaatattcatcatcaccttcatctctctcttcctctcatcagacttcaccgttcttctttctctcttcttcatcttcagacgaaacctcctttacttccccttcaaggttttatatttcccaaatcctacacctgctcacatctcaagctcaagttttgttttcccgggaaaagtgacacaaacaagaacttaacangggagaagaaaaagcttatattcatatcaacggttgacgttggaaagctattaagatttgtttttctacaaatttgttcttcctgaaacgtcacgagacagagcttccaagaagagaaaacagaggaaatttcgttgcattttttttacatattgattcgattaatggattcaaataatcatctctacgacccgaatcccaccgggtcgggtcttcttcgttttagatcagctccgagctctgttctcgccgcttttgttgacgacgacaagattggtttcgactccgataggttgctttcaagattcgtgacctctaatggcgttaacggagatctgggttcacctaaattcgaggataagtctccggtttcgttaacgaacacctctgtttcatacgccgccactctgccgccaccgccgcagcttgagccgtcgagttttctgggtttgccgccgcattacccgaggcagagtaaagggataatgaactcggttggtttggatcagtttctcggtatcaataatcatcacaccaaaccagttgaatctaatcttctccgtcaaagcagctctccggccggaatgtttactaatctctctgaccaaaacggtaccgttttgctctctgctacaaagtttttccccctttttttagtctgaaatctttttttcatttataacagaagtgtttttggtacttcttgttcaacttttttgaatgttttaacacttgcttcaagatttttgaatgttttacgttccttgagaataattttaagacaagatctgatttgattttgtcaaccatagagttaaagcactttggactcaacaaatctaataagtgtttactatatacttacaaatttgcaggttatggttcaatgaggaatttgatgaattacgaagaagatgaagagagtccatctaattccaatggattaagacgccattgcagtctctcttcaaggccaccttcttcacttggaatgctttctcaaatacctgaaatcgcacccgaaactaattttccatatagccattggaatgatccatccagctttattgataacttatcctcacttaaaagagaagccgaggacgatggaaaattgtttctcggagctcaggtaactcggttatctaaccggtttgttttggttattgatcagtagctgaaagtggagttgatttcttggagtggtttctaatgatgtttttgatgggtttctacagaacggagagtccgggaatcgtatgcagttactgtcgcatcatttgagcctaccaaagtcatcatcgacagcctcggacatggtttcagtggataagtatcttcagctacaagattctgttccttgtaaaatcagagccaaacgtggttgcgctacacatcctcgaagcatcgctgaacgggtaacttcacctagttaaggccatctttacatatatcaatggaagtccatttgaagcagaatctagtttgttttcagaaagcctttcctaagaaatcttgtcaattgtgtcaggtaagaagaacgcggataagcgagcgaatgaggaagttacaagagcttgttcctaacatggacaaggtacagttttcaggaacttccttgtaatgacttttgatcataaacaaattgttaaatgatgttgttttctttatgttttaacagcaaaccaacacttcggatatgttggatttagctgtggattacatcaaagatttacaaagacagtataaggtaaagttcctgatcattgtggaaaaaaaacaaaggggcctgtttagtcttctgttgaattgatttagtcttctgttggttttacacagattttaaacgacaacagagctaactgtaagtgtatgaacaaggagaagaagtcaatatagggcgcaacaaagtgtgtagtagataggactaaaaagcagggagaaggacaagaaagaaacaatgtcatgtctgaatattttttagccgaaacagaccaaattgtctatgtaagctctcgagaaaagcatctgcttccaacaaaattctaagtaataaaatagtactcgatttgttcttatttcattacaatgcagaatctactaatcaaatgttgtactacaaaaggtaagatcaactacggtagctaaatgcgaaaattatgaccagaagaacaaagaaagactcgaaaactaagcagaaaacataaattattcttccatgtgatctgcagcgtcagaatctttgatatcaccagtaagactactcctggtcacaaccaaagtaagaatcacacatgaagtagagtgtatacgacttctctcctggttcagttggtactgcaaactccagctacgatgcagaatctagtaagcaaatgttgatattacaaaaggtaagatcgaccacagtagctaaatgcgaaaattatgaccagaaaacaaagaaagacgcgaaaactaaccagaaaacataaatcattcttccatgtgatctgcggcatcagaatctttgacatcaacagtgaaagaatactcctggtcacaacccaagtaagaatcgcacatgaagtagagtgtatacgacttctctcctgtttcagttggtactgcaaactccagcttcaccttcgccttccgttgcagggagattctcttgatggccatcaactggttcgtcttggcttctccaaatgtnnnnnnnnnnnnnnnnnnacattgccagattctgcaaccgcttccccaacattgaccttacatatgagattgtgggaagtaacgaggtaagccctggaaaagatatcacattgcaggtattactggagagagacatggagggaaggaccgaggtgggacctgtggacgcgccaagatatcctaagactaaagaagaaggtacaagcttctcaaagatgtcatgtgttagttccacctaaacgagaggtattagaagacttactataatcatactactctttcgagactgtgtgattaaattatgtataattagccactacggagagagcaaattaaaaaagaaaacgtcgttgtttgttttcatcctttttctcctttttactttgtgtttatatatatgaaatgaatgtgtgtttggcgtgagcttgtgttttcttaatcaccatataagctattaataactgcaatttgcgtaaaagactcctttttctttaaaacctttcgtaaagatctttattagacttaacatccacgtatatatggtttcaatgttattccccggattctcatggcaccttttggctaagtcctttgtgaagtgaggaagctgcagaagcatggagtctcgatcccacatgccttgagtcaccatctggcttactgttactatatatagtcaatttgaatggaagaagctaaagttgtcctttagttgtttaaattgttcctatatattatcaattgaaaatctacaaagcttaggacagtctaaaagacaattgtatacagttagctaaaccagaaaaaacagaaccaacacaaataccaaaattaacctaatgaaaattattacattctaaaaccagattgttgttgtcttcacttgagattgtagaacctctttgatttgtagaaagtttttcaatagtttgcttccagagatgtttcaatctttctcttgcagtcgtgacatgacgcagtttctgtttcaaccggctcaagatcataggtaaagctctttgatgatcttctgtcactgtttcaaacatatcttcaccatataacatctctacacatctgtagaactatgctccaagatctttcagctccatctctcccttaataacttcctttgcactctccactgcacttgttagaactctcatcggcatatctaccccaaacatctcctcttcccatttgtacatatcttaaacgatatcggataggttcttatgtcccttgatatcttaactcttg

SEQ ID NO: 33868 - DNA, 545 bp, Arabidopsis thaliana landsberg
cacctcaggtaggtctccagacatcgattcaccacctctgtctgcccatctgtctgagggtggtaagctgaactcctgtgcaaagagactccctgcaacttaaacaactctgtccaaaagtgactcaggaacactttatcacgatcagacaccacagtctccggaaacccatgcagcctgactacctcgcggatgtaagcttcagcaaccaccttggcggtgaaaggatgtttcaatggaacaaaatggctgtacttgttgagcctgtcaaccactacaaggatagaattaaaccccttagaagagggtaaaccctccacaaaatccatgctcacattggtctagatctgttgaggaatcggcagcggtgatagaagccctgcgggtgaggtggtagcatacttgttctcctgacactcctggcaatgcctgataaacttaatcacatcttttctcatacccctccagtgaacctcttgcattagcctcttgtaagtctttagtgccccttcatgcccccctatgggacttgagtgaaactgttc

SEQ ID NO: 33869 - DNA, 699 bp, Arabidopsis thaliana landsberg
tggattgttggatcatgtacgatgacaaaaccgttaaggtaaaagtgttgaaatactttcgactttgcaagcaaatactgatagagaacatgaatcaaagagatatgtgaaagttttctatatttctcaatcgaaacagaatgtgcaattggatgtttatatactctacactaaaccaatctaaaccatatacattgtaaatacaatctaacttaaccggtctaaaccgaatctatatatacagtctaatagcccccctcaagcttgagtttcaaagatgttaagaactccaagcttgctattgttagttctgaagagcaccggataaagaggtttagtaaacatgtctgcaagctgattatctgatcgaacaaacatagtctttagaatcccagcttcaatacattctctgaccttgtgacaatcacgctctagtgtttagttcgctcgtgaaacacaaaattgctagcaatgtgcaagactgcttcattatcactatataagtaagccgatgctgtgaaaggcaccttaagagctgttaatatgtatccaatccatttgagttccttagtagcaacaaccatagcacgatactcagcttcagcagcactcattgaaaccacatcatgtttctttgacctccaagacaccaacgaagaaccactaatatgagcaaagccagtcacactcctacgacta

SEQ ID NO: 33870 - DNA, 526 bp, Arabidopsis thaliana landsberg
agggaattattttttcttaaaacagggattagcgattcgcatcctctgtctttcttagtacgtttgtgctataccttcatttcgaaggactggattgtccgaattactcatgtgtatagggaagctaatcgtctcgcagatgaattagcgaatcatgcttttttgttacctttgaggtttcatagtattcttcttaggcttgattttgctacttcgattattttttaggatgatagtggtgttacgcgcccacggaatattcgtgtgtaattttttttttttgtttttttttaataatatgggagactaatctccctcattctaccaaaacattaagggaaatattttttcttaaatttgttgatatgataattatggtctatataatatcgtgttttaaatcaatatataataaatgttggttaaaacaagagcaataacataactcttggcgaaatttcttgggaaggtaagaggaaaacataaacttgatagcatggaagtatgtaaattaggaaatttcaac

SEQ ID NO: 33871 - DNA, 696 bp, Arabidopsis thaliana landsberg
atgggccttataatggcccattaaaaacattcgtaatcaattattttggttagtctttcccaaattcgtctacattccttctttataatcacttttaattaaaaccatatgaatttacgaaaaaaacaaaaacacaattatcattatgcaaaacatttaattcaataaattgagggatgtttaatgttaacaccaaaaattattaccaaaaattgacttcaattagagacatattaaaacgaccctgattttactcaaaacttaattgaaagatttaattatccaataataaaacgacacgtgtacctccttgtcgctttcctctgctttcttcgatggcgttgcatcgaagcatcagagagattggtatggtggtggtggtgagagagcatcaacaacagcaagaagagaaagcgataatcgaactgattaagatcgtgaaatccaagtaatctctgttgcttaatctcagatctttttgataaggagaaggaagcagaagaaagaggtcaacgaacaaaatgaagctctctgctttacatcaaagatacttaaatcgccggagtaataagcttcaaatctccgacgtctcttgattcttccgttgatggctccgggaagtctttaatcgctgtgttttggcttatcctgcacctgtctttgcttgcttgattagtcctaatttttcgggctttt

SEQ ID NO: 33872 - DNA, 3983 bp, Arabidopsis thaliana landsberg
gaatcatatgttttatggaagctacctcttgagaaatatggtctaaaaccaaaccattctttcgaggaagactatgggtcttgtcaaatggcgatcataccggagaatttctttgaggaagcggataaagggatgatccggtttaagaaatcatcaaaatggtggttttatgaagaagggattgtgtttgaagatgggacgacattagaagctgatgttgtgatacttgctactggttatgatggcaagaagaagctcaaagctattgttcctgaacctttccgaacttggcttgagtttccaagcggtgtcatgcctttatacaggtacatagacataaaaatcgtctttagattaattgaaattatgtgaaaatgcattagttgcacacttaaaaagacgatcatgctataatatatagttctatgactataaacatattcagtggtacaagtggaagcctatatattcttgtattagtatactcatgaaatttggaccgttgcttatacaaactaaatcatttacaggggaacaatccatccattgataccaaacatgggtttcgtaggatacgtccaaagcagctcgaacttacacacatcagagctacgttcaatgtggctaagccggctagtggatgagaaattcagattaccaagcaaagagaagatgttggatcaattcttaaaagaaatggaagtgacgagaaactcaagcagattctacaaacgtcattgcatttccacgttcagcatccaacatgctgatgatatgtgcaacgacatgggactcaatccttggcgtaaatccaacttcctccttgaagcttttagtccttatggttctcaagattaccgactcggtcaagaagaaaaagaagatatgactgcttaaactaaattgaatatatatattacaaaatgaaattgttacgaattgttatgtgatggatgtataattaatgaataaataaatgtatgtgtaaagtacatggtattttatataataatattgtattattgtatgaccttggtcaaggattattttcaactagtaattatgaaattccaattttgtccttttggtcaacgagaagtcaatttagcaatcgcttccttcatgactggaatcatcattgaaccttaaaccctaattgatcggccagaaatggagggtttggagaagttttacagcaagatggtgaaagaagcgaaatcggcagcttcttcttcttcgtcttctctatctgattttgcggataatctgatgcaagacaaacgagccgccggcggcaacttgactactacatacgacgcaggatccggcactctggtaaccagacctcccaggtaagctgcttctattcaatatttgttcgaaaagagatcattttgccagtaaagctaagaacttttaagaattttgggtgagtgagtgagggcatgtctccaatttttcagattctctctaattatgggaaggatgataataataatcactatttctgtggatgtattatgaattggtctgcctgcttgagagaaattttaaaaagatggaacaaaaatgaaaaagagggcagattttgtgttatagctcaaaacctagagaccatgatgatttcccagttccacatcacagagcttgtaaatttgtaatggcttgttcaaatgatctaagatcttagatacccgaggaacaaaactgtgcaggtcgattatagactatctagtaggagctttgggttgtttctgattgattcgactaatatgtaatggctttacgtgttttgtgtactattagttctaatttaagaaaattatctgacctatcttgggactgtgtttggtggcagcggagtttcggtctggacgtgttcaaagttgtgcgctgttttcttcgtcgctggagtgtttgtgggttatacacttaagagacgggttcgacgctgggcttctaaattactgagaagaataaaggatgattaactccaacctcgtcttctactgcaagttttggtacacttagcacaaaggcattactctattcttatccttgaatgtgttttagtaccaatatactgtgctgaggcaccttatcaatgaaaatttgttgtttacttctctgcctttgtgactagtagcttgtggtaatggaaagagagattgaatcatcttgggaaagacacgtatattatttcgtatagtaacttagatttgttattttcatgcctttaggcggggtctatacaaacaggcaagacaatgtttccttttttaacatagtgtatataatctactttgctaagtgactgtgaagttagtgtgaaaaaaaataatggcgggctggatttgaatctcactttagggaaagtgatagaagctggcttgtaacattgaattagaaatgctccttatggaactcgaatcgtgtggttgttttttgactcatgtcttgtgcttgcttcttcaactcctttgccacggtttgtatgccgcagtaaaacactcctgcacaattatataaattgttttcacatatgcttcgtaatacctggcctaaatattagcagacatgttcatgtgtttgcatgtgtcataattcctattgcaagttttctttcttttccaatggtattaattcgttagtcctagaagagagatttataagatgtcttgatggtaagcagctgattgtatagaataattaccgactgtcgaatttggatgctttcttgctatgctactgaagacttccttccagttgggccttgcaaaatgtgttctcacctgtttgaatgatgttattttgtcagttataggtaatattggcaaatagtttctggttatatgccctgcatcaattcttacccgtgttccggatagaatatcaactccatgtttggcatggttcaaagcctggaccatttttatcagggttgatcttgcatcaccttcatcatatacgcttgtaaggtagttgtgcaactcaatctggccctgtattacgagaagatgaaggaatatgttagtatatcgatcaatgttaaagaggtgatgcaaatgaatgatatgctggtgtttagtattactctgcagtccatgtctgatatttcctccattactcctctaaaccattcaacggatcctggctcccttgtgacccagtaaaagtgagccttcactgctttctttttccctccatgtgttgaagttggggttgctgtggtatatgaagatgtacagctattccagctgaaatccgatctgctgaattcattgtcctgtgccatatgaagtttagagatatgtatttggtgcaaggttctagaaaagactaatttttctggtgcactgaattggacttactgtttgttcgtctcttgaattgttcagcagatccttcaggatgcttatgaaaggagtagctcctattcccagtccaatgaggagcaagacatcatagcttctgtagtcctgtgctggagctccatatggaccgtctactagtaattttggtcggctgtcagtgcaggatcaacaagccatgttaataataggtatccaagtgagtaaggagaaagcaaagatgtcttgaaatttactttatcatatcaatattgcaataggcagagaattttgaacgcccaatcacgcatgttgaaagatctttgcccacagttagaactcgtcgtagctcctctgtccagtctccgagtgttcggatgtgaacactaagttggtcatctcctggtgcagaggtaatagaaaatgggtgcctggaaaagtttagggaatatctttctgagtgaaacctgagatgtttgttaacactatgggaattcggtatcagtactcaccattcaaatcgagagatagttggacactgcaagaatatgtactgaccgctcttgtacttgaatccaggaggctttgacatgattaagctgagtactttctccagtagcatgggaaacctgc

SEQ ID NO: 33873 - DNA, 1134 bp, Arabidopsis thaliana landsberg
cattggttaacacaattcaacaaatataaacgagagaaaaaatcataccacagtaaaccaaatataaagctaataaaccgggaacctgaataagatgaatgaactagtaagttacagaacaacagagagcaatcgtccttattattagtccagacaccaactttgattcaaacatcgattttacagataagatattaaagggtttaaggatcgagcaactggagtgcacttaagaggatgagccattgtcaagtggattcctcgatgctcttcatgttccacaagaatcttctccagcaacttgtcaaagatatttgaaacacacactatctcctttttgaacagtgagattccgagcttctcaagcggccagcggaatatgtttgccaacaaaaaattctttgtcaagccatctaaatcagtaaccaatccccttagtctctcagcctcaccactctcctctgaaaaactcctccccatgctcatcttgcagatatgctgttgatactgagcttcgttgcttccttaccaatctcaacactctccttcttcacagctttatcaaaaagacttctgtaaagccgctctagctcatctgcacggatgcctcgtgacctctcgagtgcatgtggtcctaaaagctttgtaaccaagagcttcttcataaacctaaaatgatctccataaggggccctgacaaagacggaagatccaagcaagagggactcgtcgattggagggttctcgcgagaggagatgctcaggtcatgggccttgaagatctcatatgccactgaggccgaggagacgaggactacagggaagttgaagatacggagatataggagaggtccgtacttggatgagagtttttgtaaagacttgtaagctgaagaaaagagtacatggtggagatggccaatgatcggtagagacggaggactcggaggcaaattgaagccatcctttggtttcttgaagaagagagagtaacagaggactgaaagtaggcagaggaggattaagatgaacaaattttgaaagtcaaagttcattattgcttccactgttgctcaaagtgaaaaagcagatgaatatatcaacaatccatgaacgtggaatagtagacagata

SEQ ID NO: 33874 - DNA, 4161 bp, Arabidopsis thaliana landsberg
atagctgtatgaggtcattgttcctgatattgattcaaaactcacaactaaactttagtatgttagttatcaaatctaatgaggagaaatgagagaagtgacttcctgaacttcaccgatactgtgatcgagtaaaagaggtggacaggagctcggagtggttgtgatcgagtaagtgagggagagaaacaaacgtggagacgttgcgggcttgcgatcgagtgaaagaggtaagagcagggtctcgggagcttgcgatcgagtgaacttgatgaggatggcttgagatcgtctaagtgagatgcttgaggcggttgagcatcactgggtagtgattgagtgaaagaaggcgaggggtcgggagcttgcgatctagtgaagtaagcttccaagggtggagagacttgtgatcgagtgaaggcagctcttaaagagatagaagcttgcgatcgagtatgagagagaaggagatgttgttgtgaggtgtgattaacattggatgaggagcttggtatttataggaagaggaggaggtagatgcgccccttaggtaggtgaggagagctcttcccttagcaaaaacgtgatgagaggtgggtggtgagaactattggtttgttgacatttttgtcatgggggacaaggtgggcttcaccggttttgtcattgggaagtgatggcctgatttcgcccactccatgtactcgatcacgcgttggatttaaacgggtcactgcacgttttcgttccttcgttcagctccgttatcaaaattttcgaactattgcttcccgggaaataaaccactcgatcgcaaagtttgaaaaccgtcttgacttcgtgatcgagtgactccactattcaccctataaatcactattcacactataaatcactattcaccctgtggttgatttttgtcgcttactttcctgagattaaaacaccaccaaagtaagttagaaaacaataagaaagttaaaattatatacaaagatagtcatgggatttcctcccaagtgagcttgtttagagtctctagcttgactcctcacgcttattgggcgttgggcggctcttccagtggaacagaagttccttctagaattgtttggtctgccatatatttctttagtctttggccgttaaccgtgaagtcgtcaccttttccagacaacgtgatagctccatatggtcttacttcagtgacactgaaggggccagaccacctagacttgagttttccaggaaaaagcttcaagcgagaattgaacagcaagacttgatcaccaacttgaaaatcttttgaagttattttcttgtcatgaaacgacttggtcctttccttgtaaattttagaactctcatatgcttctaggcggagctcatcaaggtcgttgagctgtatcaatcttttctcttcagaagtcttgatgtaaatttaaaaatttcactgcccacatagctttgtactccagttcaacaggtaagtgacaggatttcccataaagaagattaaatggggttgtaccaatgggagttttgaaagctcttttgtatgcccataacgcatcgtcgagctttagagaccaatctctcctggtgatcccgacagttttctctagaattgattttatctccctattagagatttccacctggccacttgtctgtggatggtaaggagtcgctactttgtgtttaaccccattctttctccgtagactctcgaaaactttgttgacaaagtgcgtgccttcatcactaatgactattctaggaactccaaatctagggaagatgatgctcttgaataacttcaggacgactctagcatcattcgtaggactggctattgcttccacccattttgacacatagtctactgcaaccaatatatacttattcccatacgaggacggaaacagacccatgaaatcaattccccatacgtcgaaaatctcaacctctaaaatcgggttctggggcatctcatttcttctactgatgtttccccttctctgacacgaatcacactttgaaatgaactcttgaacgtctttgaacatggttggccaccaaaatcctgcttgtaggattttagatactgtcttgaacgttgtaaaatggccgccattgctagaaccatgacagtgctgcaagataccgtttatttcatcttcttagacacacctcctatagattttatctttggagagagtgtagaggtacggctcctcccagtataagcgatttatgtctttgaagaacttctttctttcgtaccctgacagattcggaggctcttcaccacatgccaagtagttgacataatcagcgtaccacggatgtttctcctctactgcaagcatctcatcccaaaactggttgcttttgaattttttgttcacttcccagatggccataagctgttcctcaggcatggtgtcgtcaatggggactgcatcttcaattctcattcgcgataagtgatcagctacaccattttcaatcccctttttatccactatctccatatcgaattcttggagcagcaaaatccatctcagcaaccttggcttggtatctttctttgcatagatgtgccttagagcagcatgatcagtgtaaactgtcactttagagcctaccaggtagcttctaaatttttcaaattcaaagaccacggccaatagttctttctccgtagtggcataccttacttgtgcatcatccatcgttctgctagcgtagtagatcatatgctgctttttatcaatccgctggcccaagactgctcctactgcgaaatctgaagcatcgcacatgatctcggatgggaagtcccagtttggagcttggactattggggcagtgaccaaagcttccttgattaacttaaagggtgtcaaagattcttcatcaaatgcaaactcggtttccttgcacagcagtctggtgagcggtcttgccaacttggagaaatccttgatgaatcttctgtaaaatcctgcatgtccaagaaaacccctgatgtccttgacagtctatggtggctgtaactgcatcatcacgtcaaccttatcaacctctattccctcctcaaaaattttgtgtcccaaaacgatgccttctctaaccatgaaatggcatttctcccagttcagcaccaggtttgtctcttcacatcttttgagtaccctgcataggttcaacaaacacgaggagaaggaagagccatacacagagaaatcatctatgaacacctctaccatctcctctatcaaatccgagaaaatggaagtcatacaccgctgaaaagtagtaggtgcattacaaagaccgaaaggcatacgcttgtaagcaaaagttccataaggacaagtaaaagtggttttctcttggtcatttgggtgaatagggatttggaaaaatccactataaccatccaaaaagcaatagtaaggatggtttgctaatctttctagcatctgatcaatgaagggtaatgggaaatggtcttttctaaaagcagcatttagcttcctatagtcaatacacattctatgtccagttataatcctagtgggtatcagttcatctttaaaatttttaacaactgtcatacctccctttttaggaacgcagtgaactggagagacccaagtgctatcagagatagggtagataaccccagcatctaatagtttaagtatctcatttttcacaatctctttcaagtttgggtttaatctcctttgaggttcattactagagtaggattcattttcaagatggattctatgggtgcataaggtgggtgaaatcccctaaatatcatctaacgagtatcctatagctttcctatactttttgagctcagttatcagcaggtttacttgatcagcagttagctcatcattcactatgacaggataagtagagtttagtccaagaaaaacgtaccttagcccttttggtagcggtttcaaatctactttgggtgccttgagttcagaccagtcatcggatactaagttggcttcagaggaggggttgtgatcgagtagttcggtcgagtatactgaatgggctgttggtcgagtgatgtggtcgagtatatattccccccttgctctttcacccaaatcttcatattct

SEQ ID NO: 33875 - DNA, 1382 bp, Arabidopsis thaliana landsberg
taccagctttcatcacagatctacagagtaatttacaacaagatcttttaagaatatatatacttatatatataacaaagaataaaaaccaaccgagtgagaaatggcgatcctttgggcgattttattacggccttttaaccatcttcttcccactacagtggtggcagttttcagcaatttggccgtgttatttaacttccttggcccatctctccggttgatatcttcacgatgttctctttccatcgtgatgttacaggagttgcggttcaaaaaattcctcgcctttatacctcctgaataatctatccctctcgcttctttctaccccttgagattttacttactcattcacaaaatggcagacaatttgcggcgagcagtacaagacatcaatctcggcgcaaacaatgctccagttactttatcggcggcagtggtggcccaaccggcggcagagaaccggttcatcctcatgggccgtccagttatcccccgcagacagaaccttcgttcaattgtggcctcaatgccacgagtttggggccaagccagcttgatccatgtcataatcatcccaggcaaccaatttcaattaatttttccatcggaagaatcgcttgacatggtgattcggaggggtccatgggctttgaacgaccgaatgcttgtgcttcaacgatggacccattggtgaatcctcctctgaccacaatcccattctgggtccaaggggcgggggattccttttcagttcctcagtgttgaggtaattggagagatcggaggcgcaatcggtgaggtccatgacatcgattttgatgctgaggcagcatcacgaattaaatttgttcgggtgcagataaactggaatgttgagaatccccttcgtttccaacgcaattttcagttccagggtggagtgaataccttgctccgatttcgatatgagcgccttagaggcttttgtgaggtctgcggtatgttaacccatgactcgggagcttgtgtgatcactaatggtggacatgattctgactctgagggtgacgatgatgatgacatacccaatgctggaatccaaacccaaggtgtagaaatccgtgagattgaagagggtgaagagaatgtcggtcctaacatggctctggtggttgaggctccagacgataatatgccccccattgatgacatagatccccaacaaaacttgctggagaatgcagatgatgatcttcaagactatcaaccttacagcatgtaccagggagaaagtgacacaaatgaactcttcaacccaatatcaatctttgcaaatgctacaggagacattcccggtgatgaaagctatgcaagatactctgcatccatccacccac

SEQ ID NO: 33876 - DNA, 971 bp, Arabidopsis thaliana landsberg
  unsure (1)..(971): unsure at all n locations
tgctatatccacccctgcaaacaaaaactccatcatcatcaacaaacacacatgactcaaattttatattttggtttgtaatacttacgtttttgtttctctgcgtcggtttctttgtttcaacactgcaaaaacgcatagataagtgatgaaatttctttaaatagaagaaatgtggaaagctttagatgtgattattgtttcagttacctttcnnnnnnnnnnnnnnnnnngatgcaagtcccttcgagttcttcacaacagctctttctgtaatcaaattctacttcaagagaagacaacttcttctgtgtctcgttgaggttagctcttgttatgttcagctttgtatcaagatcttccttcatcgatttctccgtttccatctctgcctctaccttttccttattctctctcaatgttttcatctctgcttctaagtttctgatcttctccactgattcctcaagcttctttctcagttcttgcttttcatcagattcaatcttctccaccttatctgatttcgtcaaacccaaatgtctcttgatctcatccttagtcattggacccgattcgttattagatttccatgtgatgcagagaggatcttcttcacctttctttctttctacattatcattttcatccatacatcctaaagcaatcttaatgtcttgtaagagttctttaacaccgcgtttcgatatcctctcttgcttcgttatagcgctcaaaacaacctgaatccaatcaaaagatccttccttttcatcatccacctcttggatctttttcagtgcacacaatggctaacttcttcatctcattaaaatcatccatcagtaacttcatctccttggaaccacgggggctcatcacactacttttgctttgaatatcgaaacttgaagccttttaccgtttctgcccgcggctaagatctttgatctcaatgtttttcttcataa

SEQ ID NO: 33877 - DNA, 679 bp, Arabidopsis thaliana landsberg
acagaagatacgagagagataaaaattgtttttcttgttacttgatacaagatttcttgtggcacgaattattataacctcaactttaaccctttttccgaaaaaagaaaggtattataacctcaactattacaacttggaagtaattaatcgtatattgtgttgtttttcgtacataaagagaaagtactatcatttaaaacttattttattttagtttcacttcttaatgagtttgggaatattttcgaactttagttaaattataaataatgtatacttttcttaccaaacatttgatttaaaggtttgtattgatttgttaaactatgaggaatattttttccctattatggaagaatcgacaagataacatattgtaattattaggctggccaagggccaccccgggtattatcgaagaagcacccctcagaatgatcaagataatttgactataaaaatgatcatgttaatcttcttcccccccaaaataaaaaaaagttgatttataatccagaaaggaccaaaaatcatatacgtatctttaggttatggttggtaatccatgaattagaccgataaactgattttgcgattctgtcaattagttattgataatttaatttatactttgccactttcacaaaaaatttgacaaaaagtaaaagaacatgat

SEQ ID NO: 33878 - DNA, 925 bp, Arabidopsis thaliana landsberg
actgccatttgttttccatcgccgaacattctgttgctaaactatgctttgtcatcacttgtaccaggtgagcgtttgagcccttgggtctccgctggatgcttcatgatgggtgtgtcgatcattttcttttgagtgtcaacttcttacagatccagttcttgtagatttttacttctttgggatgctcatttttctgtatgcaaaagattccaaggggttgttgatgaaactgaaagagtagaatattatcctctttggattatggatatggtcttgtatttggaacaaattgtgtctgttattttaatgtggagacaagtccataaagctcaaccatagaaattagtagagcataagacaccagaaccagctaataaaacgcatctttgtcgtaaaggaagagagtaatcacatacgtaacttcaagtttactaatttcattgaactaatgagagcatcagttaataaaagtttgttgtgtgtgtggtagctgtaaaattatcagtcaatttggataatcgatcagttttatgcgagcaaaaagaacaaaggtgaagtcatggttacccttttgggctttaatcaaaatctcgccgacaaaagaagaaactaaaaaaccaaactcccaagatcaaaactagttctgtcggttaaggttagttcacatgggccgaagtatatcatcacccaggcccattaaaaagatgtataaaatcgacaagcatataagtaacagcgtaagcctaagttatcattcagaatattcaagctgagaaagtcgtagcctctaaaaccctaatcctctctgaaaccctagacatcgcagctgaaaatggtacttctctcttcctctttcttcttttcggtattatcttgcagtgttttcgaaggaatcttactctttgattgtctgatttgggtt

SEQ ID NO: 33879 - DNA, 2419 bp, Arabidopsis thaliana landsberg
ttaaagaagcttgtcaagatccaacgaagactttttgttcgttctagagttctttgccagaacatgaatcgttttttttgagctttgggagttccgatcagccacggtagatcttctgcggataggagcggttgctctggcaggactattgttttttctagttgacgaggacaacctgcacaccaatgttacaactaactgtaattaatatgaaataatgtagtaaccataaaaatatgaccaaaaaaaaaatatgacaacaaagggaggataaaataacgaaagacatgcaaaaaatatgttttcaaacttaattagatttggaaaattgcttcatcaaattaatatcagattagtgtgggtttttcttgttcatatggttagattcatggttcccacttccaacgaaaagtttgacttaacagttttcatgttgtatatatgaccaaaactatgatatatatgtggatatcattgagtgatccaataataaaactcctttctaatttgagtcatgacttaaaacttcgtaagacttgcattttcattctttatcaccgtatccaatgattgcatattttttaggtaatcatataatccggcaattatcaactacaaatgttctgtttaaaaacctatgtcgaccgactaattaaaagacctatatatattgaaccgcaacatgaggggacaaccaattaccatgatatatattcatttttttataatatagatggatctattgattaccatgactatatatatacgcacatgcaattgcataactctcatttttacgtctattataattcactttaaaagcttcgctaagttataatcacaataacatattaaaacaactacgtagtatgtgaattaacccgagtatcaaaataatgcgaactacctttttgggaaactaagcctgttcggactagctccggtattgcttggatcaaacggtaagcagcgaacatcaccggccagaatccggcgaccggaactccacaccgatcagccactcctatagcccacgaagccagcaaatcaaccacaacacaagccacatccaagtcttcttctagtaggagccgttcgagctgtggtggcatgatgttctccattgagttctctatcgagaagaagtccgagggaggtgcgtccggacgatcttgaccgtcagataaggccaagaacgtgatcccaagatcctcgttagtagccgagatcctacggtggatagactcgggagtcataacgacaggggagaatccacggctgaggaaagccgatgcaaggtgaagcatcggagtgacgtggccttgcgccggataagggatgaatattatctttggcttttgtgttactttcatatctttttttttctcttcctatatttttgagttttcgtaattgatagttgcttatgttaattatgtgaaatcgagtgattatataacaaggaagatgaaagactacagattcttatttaattgttttctacataccatgcatgtgctatattgatcgactctagcaatccgtacatgcatggatatatgtatacacgtccactatccacagatcaccaatgaatgtttgttttcatagtttatcataaaatatatgtaaatatttagaaaaggtgactcaaacataatattgtaattaaggaagatgctacttcctcatttttctattacaattgttgggccgttacttctgcagtggccattcttcattttaattaaataaaaccctatcgaatagtttcgagtatggaccacatatctactatttatatacgcatacacacacacacatagataatgtgaactggtaatttgctggaacatgatacggtggctgctttagaaaatgcttgtatagttgtatcaaatgtaaatcatgccctaaatcgaatataaaacatttaagttatgtcaatagtcgcatgaagtcaatgactcgatcgtagtcaacaatcctcgagaagtagagggcatgttgataccagcgatccataaaagattccaacttggatttctgaataaatataccatgaattttcaaaaaggcttatgttaggtctagacctaataatttaagtacaaagtgtaatagttgattagctggattaggagatcgaaagccgttgacgaaggagatccataatagacaaggcttaccactattcctgaaatcttcaaagatcccacgtggtttgataggttttaaagaccggtccatctcgatttatattaatgtgcttcgtaaattataaatagaaaaaccatattactatatgtgaaaaactgtttggccgcataactcaaaaggttttcaactcttaaactattgaaattatcgtatagtgccttgtctgtgaataattttttcatgtgagcggatctaaaaa

SEQ ID NO: 33880 - DNA, 795 bp, Arabidopsis thaliana landsberg
tatttaacttttacaaaactcacttctccgttctcaatctgaaatattttttaacttgtcgaaatgtcacaatgtttgtttgcttctaattcatttacgttcagaaaatacattctatgatgccaaattaaaccgagcaggtccatagcacattttgcactaacaaaaaacattcgtgttgtgcagcaaatatgttgcgtctacgtgagcttttacttttcttgataaaaaaaaaattggaggagtcaattatatcgatcaatataattaatgctcagccagaaataacattatcgactagtggagtagaatttaaacgtgctatcactgtgttcattgactgctcctaccattcacccttactttctttacatttgcaatttgatgggtgctttcgaaagcagtgtttaccaaattgtgctgatgcagtatttgctatccaaagttccataatatgttgtccaatgttgtctatctcaaatctcctcaatccttttttgtgtcgattttccaccctacaaactctatattcatatagccaaagaaataaatctttttactcagcagaaagcaacacctaatattgcccaattatcctagtggcggacccatgttggtggatatagtgttgttgacaccaggtcaaatataaataaattaccttttacatggtgataggctgatagctataaaggggcatagtggtatgaaatgaacccaattctacatgaggtaaatggttttatgctccattggaacatttgttatatattttttgggtacattgtccaaaac

SEQ ID NO: 33881 - DNA, 689 bp, Arabidopsis thaliana landsberg
gaatttcttaagaaacctttttggagtttctcgcacatcgcttcttagttaccacaatagtttagtaattacatggtattttgatgacaggtagcatgtgtacctacgaacataaatttgcttcaaaaacttgctagtcataaggagtttgcagtgggcaatgtagaaacttattttattgagcaccataaaagtgatctattagctgacgaaagcactccaaatgtaacagatgtggtataccaggcagttaagcactagtgcagcattggtggctgcttgtatctccacaatcgagcattctacttggaatgaaagtaatcatggtcagttcgcattgggtctagtctcttcttcacaacttacatgattcccgagcatgtcttaatttattatgtgtaaactcatccagggaaagttccatcgatatggtattcgaatcctccttttagggtccatcatgaagccaaacaaaccattgagctagaatggaataatgaatgcgagggaactggctctaacctcatatcactcggtgtaagatatcaaccagatggaagctatctcattgaggcttaaaacttcacatactccttttagattcacttttagactcatatacttcatttatgagtcttataattggaattcttatggtttgtcaacattccacgagacaggaaggctat

SEQ ID NO: 33882 - DNA, 1553 bp, Arabidopsis thaliana landsberg
gtgggagccaagaatggatttactcatttacaagagcaagtcggtcgacaatggataaaaaaaataacggcaatctcaaaacatgataccgttcggattgaaaaggagtttgcattaactatgtaaaattattagttttaattgaaaaaatcactgaagaagtatacttcgattaaccactaggatacctcgattaacctcaagctgaacacaaaattttgagagtaagaaaacttagaaaaacattgtatggttatatgtggatgacttattctcacatggtgtttagaagaaaccattcaaaaattcaaaaagaagctgaattcttcatgtaaactaccgagccaatggggtcacttcggtaccaaagatcaagcttacttctatagaaccttctgagtccatgtctcgaatcgctcctccccttgaattttcagatgtcaaacactcgtttaattcaataacaacttgagacatgttcggtcttctagctgatgaaggattaagacaacacatcgctagctcaacagctttccaaacagaagtggaatcataatctccatttagacttggatccattatattttttatgtctccttttgtaagcacttccccaacccattctgctatatgtggcttttcacgtctttggtctatcacgggttgggttgtgatgatctctaacaatacgactccgaaactataaacatcactcttttcagtcaaccaatttgttctgtagtatctggaaaataatatagaaaacaaattttatgtgggttgctttgaattgaaggaaaaaataaaatcccttaattaagaggtaatacttactcaggatcgagatatccaggagttccagcaacagctgttgaaacatgagtttcacctccaatcggaaaagaccttgaaagcccaaaatcagcaagtttggcttcaaagtgttcatttaacaatatatttgtagttttgacgtccctgtgtaccattagtggtttgcatccattatgcaaatactcaagccctatgcaacaaaatccataaaattcaatcaaatgaaaagcagaaaaacatatataagagaaataatagggatactaggtaaaccaaccttgcgcagagtcaatgactatttttagtctagtttcccaatttaaaataaatcggattcttgttcctatgttttaaaaggagagaaagatatcaatgtctgatgctatcacgataaatctacagcaatatatggttaggtcatgtttggttgcttacctgacaaatgttcttttaaatctccattggacatgtattcgtagatgagagccaaatgacctcgttcatcacaatacccaacaaggtttaccaaatttatgtggtgaaccctcagtagaagttcaacctgcataccaacaatttaaaattaatatcttcgttcctaaagataggtagactttgttctactattttttcagatttagagcattatttcatacctctgtttgaagtgtttatagccttgtgatgatgattcaaaaagtacttttacagctacttgc

SEQ ID NO: 33883 - DNA, 2828 bp, Arabidopsis thaliana landsberg
  unsure (1)..(2828): unsure at all n locations
attttactatgaaaatcatgtgcgtttcaggacatggaccaccagctattcgtatctaatcatcgaattgagtgatatcaaacgttactgtccgccaacccgtttcttgcggtggtactctgacctaccaggtatggctctcacactccatctaaagctatcagagagaaagagaacgtgtcctataataatgtgttggatacttgcaggatcaggatgagatactgtctctgtctggttcattcatggaagcggagagtcaaggttcaaaaggtcggtctggtggcatgagtgtatctttggccggtcctgatggtcgtgttgtcggtggcggtgtcgctggcctgctcattgccgccactcctattcaggtgactcatgaatctaacaacaacgtttacgttatttcttgaaatcgtctctcatctcatcaagttttgttgtttcttaaacacaggttgttgttggcagttttataacgagtgatcaacaagatcatcagaaaccgaggaagcaaagagtcgagcatgcccctgcagcagtcatgtcagtgcctcctcctccttctcctcctccttcggcggcttctgttttctcaccgacaaacccggacagagagcagccgccatcttcattcggtatctccagctggaccaacggacaggacatgccgagaaactcagccactgacatcaacatatctttaccagtcgactgagtttgagtttccagatggaagattaggtttcagattaactctctactatctgtacaatggttaggaggattgttgaagctgaatgttactgtacgcttttctttattttagaacacaacttgagcttcttctacttttagggtaactttctctgatgacttgcctcttgttacttactatattgctagtactgaggtttaatccttttaatggcggattaatctgtgttgttcccttttagttgttttctttattgatattttacactatttagtatacataagttatgaatgtactctatataatagtatgggactttaaagatctttgatggaacaaaacctacaaagacaatttaattagtaggaggtcaagattccatgaggttagaagttagaactgcaacatgtcttagcaaaaaaaaaaactgcaacatgcgttagttcacatttaaaagttaaaaccgatccaatttgtaacttatatattatgggaaaatgtctataaaaaccatgattcatattatatgttaccttagtgaaacatcaaacgatgaaacgtggagtaattgtaaaatgtttcatgttatttctgataactgatgtttcctcaatggttttcggaaatgaaatgtgcgatgaaacgccgcatccgggtgaatgcaagactctactgattaaacacaaacncataagaagcactacacagttcctccaagtgtccgtggaacgaacactagatggggctgtcaaagccaagagtgacacgtattttcttgagccacaatttggttcaaagcaagcttgggaggaatgtatggatctgtacgagcagactattcacaggctcaacgagagcgtgttgtgtcccaagaacgtttgctctaggtcagacgtgcaagcatggctcagcaccgcactcaccaacctagacacatgtcaggaagagatgtcagaactcggtgtctcgtctcattccttggagagcattaccattgatgtcattaacaccttggccatcaacaaggtagctctaacattattactaaccaatcaaaattctcaaaaccatcttaaatatcaagcatgttttgaataattcactcgttgttacttgatttttttttgtattttttagaggatggaacaaaacggtaaggagtttgggatatcgaaaataacaatgaaaacactatctataggtgaaaaagtggatgtagtggtggctcaagatggttccggggactacaaaactatccaagaggccgtgaatggtgctggagagaggcccaaaggaagcccaaggtatgtcatacatgtcaagcaaggcgtttacgaggaatatgtcaatgtaggaatcaagtctaataacatcatgatcactggcgatggtatcggcaaaaccataatcaccggtgacaaaagcaagggccgaggattttccacttacaaatctgccacttttggttagacatttctccttaacaacttacactatatatattcgttttattgccacgtaacatattgcatgacagtggctgagggggacggtttcgtgggacgagacataacaatcaggaacacggcaggaccggaaaaccatcaggcggtggctctcagatcgaattcagacatgtcagtgttttacagatgtagcattgaaggctatcaagacacactctacgtgcactctggtcgtcagtttttcagggagtgcgacatagacggaaccgtcgccttcattttcggaaacgccacaactgttttacccaacggttggatatttgcatgtcaaaaaacgaaaggagtcaacaccatacgggcacagagccggttcaacccgaatcagacaacaggaatcgtaatccataactccgtggtgaaaggagctccgggggtacagttaggaggcgtgaaaacgtatttgggccgtccgtggaggtcgtacgcacggaccgtggtgatcggaacgtatcttgatacgttgatcgaacccaacggatggattgattgggataatgtaacggctctaagcacgttgtattatggggagtatcaaaactcgggaccgggttcggggacagagaaccgggttgattgggccgggt

SEQ ID NO: 33884 - DNA, 1429 bp, Arabidopsis thaliana landsberg
atctccttcggctagacatcgagataagtgaaaatatgtcttatattatctgcaaggttagattgacttggacttattttattctagaaatctcaaatttggtttagttggttttgtagatgaaagatttatatcagatcgatataaaaatatatcgcaaaacaacaacctcgcgacgtttcaaaagtagcagacttaggtcgttgcttgctcaagtcatgccaaaattattgtgcttcatgaaacatgtcaaaaatctgtatgacttcgataaacgccatcaaaatatacaagaagcaagcaatatagtcaccagtgaagagccaacaacaagacaatgttgcatatgtttcccaattcaaaggaagatatgtcaagagcgacatgacaagacaaatttctctaagattcttctgttacattcaagacctcaagcagaatcaagaagttgatttccagtacattcgctcaagaaacaatgtagcagaaaggctcttccagctacaacattcagaaaggttcttcacatattcacatatcaaaatgcatcttttgaagaagatgcttctagagggagacatatgatgatgagcgtgattgtactcttttttccttatcatggtttttatcacattgggtttttctatgaaaaggtttttaacgaggcagcaaacaacatgtaaaagatagacatgaaaataaaggtctatctctcttcgaaaatctttgtcatatattgacgagatcaaaaggagcgaagagaatgatcgaaatacatcatctatgagacctgtgaagtcttttcgaagggaaattcacgtcactgtactctttttcccttgtcatggtttttatcccaatggatttttccattataaggtttttaacgaggcaatacgtaactcatcaaaagtgatggatactcaagggagagtgttataaacttgataagtatggatgtgattatccatcactcatctctatccataagatatagatgatgtttatccattacttccttcctaagatatgaatgatgtttatccattacttcatccttaagatatggatgatgtttatccattacttcttctctaagatatggatgatgtttatccattactttttcgctaagtaatttacttcctagctaagtaagctctactatatatagttcatttcattcatttgtaagttacagagaaaacagagaaaaaaaaatagaaaaagaaaacgcaataagaaaactcttgtttcgagttttattctttatagtcttcattcttctttcttaatttaattttttataacatccataataattttgttttcatatctaaatattttttcatgtataccatttatttgtaattataatttattagtttaaaccttctataaggtttacgctctctcaaactctctatat

SEQ ID NO: 33885 - DNA, 1750 bp, Arabidopsis thaliana landsberg
gagcaaacacaattgaacacagattcatatggtcaaatataaaaaacttcgtttacagtcaacttgcaacagataagaaaataggcttatactcgagaatcaataaaatagtgcataaagacgatctcaaacagccaagtttcaaccacaatcatctaatattcgagaatccacaatctttcatagacccaaaagcactaaaaacatcaacatttcttaactgctttagttcccaatctattctactaaatcaaccaaccagagatgtaaagtaatcatttgttctcaattggcaaaaatatcattttgttcagaaacaaagaatcccgtatacaagagttcatatttaccagagtgcttgtaagagttgatgttggtgaggttgttgctctctttgctgaactgaaccttggcattacctctaccgaattgcttcaccaagaaacagttgtttctcttcacgatctcccagatcaactgtcctggaactgtggccatttcaaatacctaccttcaccacaccaaaaatgatactaccaatcacaacacatacatttacagatcgatccctaaaggctactactatagagctcgctgaatcaaaataactacacaaaatcagatcatctaagctacgaaaatcaagacatactgaactgagaacaattgagagtaatactaagctcaccgtgaaatttcgcagagagagatcgagagattttaatggtggcgccggagctttgttagaagacgaatggagctatttatatatgacctctgaaaaaaataaaaccctagctcatgtaagtgtacgtgaaaagtctaaaatacccctaatgtttttcgaaatgtcgaaatacccacaattctgagaaacgttggaataaacccatttcctgctgctctgttgaactttaggggttatcgattctttttgattcgttgtcattcgattatagaatttgtattagaaatcggaattttcgatctatggggaggagaatattgaacgatgcattgagaacgatcgtgaatgctgagaagcgagggaaagcttcggtggagttgaaacctgtctctaccgtaatgtcttcgtttctcaaaatcatgaaagagaaaggtgagatttttcacttcttctttcttctggtctaattgggtcttaattcatttccctaatttttcatctacttgtttagatttatcagtttcgtcgacattggttttagtcacttttgcttgtagtgaagtatgattacatgatccatagtctctattgttttgttggtccttgagctgatcctaacacgtatagctcaagaattttcatgtgtgatcactcgatgtaagagattggttacaacatggtcccaatgattaagctttgttcttggttaactatgaagttgcagaagattgaaaagtttctgttttttgattcttatggataagttacatcttgatctatggttggagaaagtcatatctgctcctgtttagtttatggtctaacttaagtttgtttcgatcttcgtctgtgttttgtatgtttttagttaggaatttgaagtagttcttttcaaagttgatagtttgtgactgaagtataaagataccatttctatgctcaaaccgcagaatcagctagttttttgtctgttactttacaaaatgtatgttgatgtattatgtatagggtacatcaagaacttccaagtccatgatccacacagagttggaagaataactg

SEQ ID NO: 33886 - DNA, 1444 bp, Arabidopsis thaliana landsberg
ttgtgcactcagttctttgattttacacctacccaatcatatacatgtatagatgtgcatgtgcaacttttataatgacgtgtgccgtatggtgattcagttgtattaagaaaatgagactaaccaagttgggttgtccgattattatgacattttgtatgcttagaaagatttatatttaattattttattttgtcatcgtccactttgatagtgtataacttcggttccacatccactatactatagaatgtaaatatgatgccaaacacaaaattattgagcaattatatatatattctaatatccggtttgtaattttgtttttagagttttcaaaaaattagttttttaggcaaaacattttttatagttacttgaaagagacattttctatgattttttatattccctaacaaactatgaattcaccaaccacacaaagatgttattttgtatgtgtgttatgttttaaccgtacatatgcagaaattatataaaagagatattaatgtgcaaataagctatatatgtctattgtcttcctctgatccaactgagatactctaatttggaagttcaagtatatctttaacaacagtatgcccactcacgagcaaacaacaagtgaataacgattatgtatttgttaaactttttataatatacaagtatgatgttaaaaaatagataaatgtgtgaagggcccattgaaatgtgttatataatttagtttagtcgaagccacgcctattatcgtaatcattataatttgacttccgtgctatgtgacaaatgacaaattcctaagccactacaaactgatttttgagttattttcgttataatgatatagaattctgcccaaattgtttcttatatttttaacttttagaggtaaaacataggtatgaaatgtatttgtatgggcttcatacccggaaatgataaaagtccaagccacgaaggggagatggagtgtacaatttggtattctttttatttacctataattttattcttagcattgctatatatatctacatagaaatattaaccgaaatcgaattggaaacgtaacttcacattcatcatccatccctaataccaacccatccgataataattccacaagagttactcagattttctattttcagtatatttaaataaataataattgggatgtatttttaattaaatgggtaagtccacttaattctgctatcttttcaccggagcttgatttcaccaaatcgtgttaccccatgtaatagggattgaccttagatttatcgattcaaatatgtcaaatttgtcttttaaaataatcatataatatataaaaatgaattgtgaatcaacaaaaactctcaattatctggtatctattttcatcacttaggtaaattattaacagaaacgcttcaagtaaggaattgga

SEQ ID NO: 33887 - DNA, 1212 bp, Arabidopsis thaliana landsberg
  unsure (1)..(1212): unsure at all n locations
tcacctgcaagaacatcaggagaaacaagctttcgaggaactctaggcttgttaacatgtgaagcagacttcaaagaatctaaggaattaattgatggtaaagcaggagaagagatagaagagaacctatcatagagggcctcaagaggtgtgggatgaagagaatgtgcagaatcctctttctgtgaatcccgaggttgttgatcgacaggagggatgttgtcgatcgacaccgattctttacaactctcattggcgagctaggctgatgggagcgttgtgtgtgactctatttggggattctaagcagtcagaggaggtgtgtctgtgctagaggcaatactactgataggcttagtgaacgctgaaccatccatgccaaactccatctccaaatcacatactttgaaagagatccttcctctcttcacatcaatcctagcaccagctataactaggaacnnnnnnnnnnnnnnnnnagcgatccttgggttccttctcataatccaggaccacaaaatcagatgggataatagagttaccaactttaacaggaacatcttcaaggattccttcagggattcgcttggaacgatccgcgaagaggagagtgatgcgagtaggcatgtagtgagtcatgcctagtctctcagcaacagacttaggcatgagattgatgcttgatcccaaatcacacaaagaacggctgaacctgcttgtggagatagagcaatcaagaacaaagctacctggatcgggaagcttctcagtggtctgaccaggagtgatggtgcggatgtactcagcaatgtctactctttgtgccttctccttcttggcattaggcagcatgattgcactaatgtctctggtaagcagcttagcttcatctgagctaatttcatggtcaacaagtcatttgacatacttgttgagtgaagcagaagatgtctctgaagcatccttagggaaaagtgtggagcatcatctccattattgctatgcacttagcgagcatgaatatcctgtttagaacgacgcttcctcggataagggacaggaggagtgtaaacagactcgggctacataggtatttgcacctcacagggtgcagtccggatccaatgtcgatcgatcaagaggggtatcgatcgacaccgtcgtattgagtcgtctctgataagagcgtcccatatggtgtcgatcgacaca

SEQ ID NO: 33888 - DNA, 1407 bp, Arabidopsis thaliana landsberg
  unsure (1)..(1407): unsure at all n locations
tactctaatttttttatttgacaagaaaaaacagacgatcagaattgcatggaaaaacgttaattaatctcattataatctccagtccattttataaccctcctacctaccacaaagaatccatcgacgaaatagagtatccgatgaattaatccatatctatgccaggaatttaccgaaacaattatagacatatagaagaagatagaacattacaacatgcatatatcatgtcaaaagtaacttctaactaatatcagtgatttacaagagaacaaaatggatttttttttatgtatacataagagaagtaaattgtaactcttgacgtggagggatctgcatcgaacatataggtgatgagatggtccaacattcatttataacttatccatctgtcactctataaccctaattttaacccttcactcttctatataaacctcccccaagtacttaacactcttcactactctctccactaaacaaaaacactagagttaagttacatatagagtaaggaagagatggcagttaggtgtttagccgtgttcctcgttgctctcatggtgtctcaagcagtcaccgcaacaagatcgtgctcaaccaagaatgtcaggagctggtcttgacgaccanaagaactttgtagcgttcgctggtgtcggtggagctgctggaattggtggagccggtggtgttggagctggtcttggtggtgtcgccggtggagttggtggtgttgccggagttttgcctgttggcggtgtaggcggcggaattggtggtctaggcggtggtgtaggtggtcttggcggtctaggtggtctaggtggtggttcaggtcttggtcatggagtaggtggaattggtggtgacctggtattggtagtggtatcggtggactcggcggtgcaggtggtctaggcggtataggcggtgttggtggtttgggtggaattggcggtggaagcgattgcggtggcgtaattcctcaccattgatgttaaacgtttttttttttttttttttgctctctataaaccaaagatcggtcgaaaggttcataattattatgttttaagttcttttatcgatgtttatgttttaagtcgtttgttttctacatatgtttcttgttttgtttgttatgctgtttgttattaattacttgtgagaaacttgtgttatcaataaatagtgtttttttttgtttcatgttacttgcttgtgttccaagatattcaattagttgaaatttgcatgcagcaatgtatacgtcaaacttaatcccatttgtaaaagttgtcagaaaaacaaaatcttctttcgtcgtgattgttataatgtagagaaaaccagaaatattagctttgtagattaccaagcccattatgaacgattctt

SEQ ID NO: 33889 - DNA, 1540 bp, Arabidopsis thaliana landsberg
gacatgcacttgagtaacatcaaaggaatttgatagagtccttacacctagtataatatagaagtatcttaatagcaattcatttagatataagagaggaagccgagaatgaattagatatacctttataagatttgattttcacaaatctgagaatgcaaatcaccattccacgattagagtcttgacatgccctaaatatctgttcagcaaatgtaccccacaaagtacagccaatcctctcatcactgtaaaacaaaaaaattgattagtgagatatataattaaaattgatttgtgagattagtagaaaagtcaaacgtccagaaacttacgtttcatcacgaagttcaaactcaattttggttgttggtttgttggctgcttctaagttctgcagctctccaatagaaacaatctgaccaatgacatctataaaagaaaaaggtgttaatttaatacaaatggaatatcgacagtgaatatttattaatattagcttttttaataaatgtttaccaactaatatgtatggattaaactctccattttggattttctgaaattttgccagtgatagaaacatagaatcagatacaggatcagatcccatcacagtagttccgttagtaaatgtcatcttgtaaagatgattcgttggcctgaattgaccgccagcatagttgagagtaaaaatctcaacaaaaacccactgcccaacagttagcttattaacatgctttgacaccaagtctgtccgaatggtggcgtggatttttttgttctgaaatgtagattaattttcattcaattacaacatatgaagtagactatgtaaaaagcaaataaaaagttaatatagataacctgttcatcagagaaaatgagctcaagggtttcaccagtcttttgtgtatattgcttccaggaatgaagaactttgacttgaactctccatgctgtggtgtaggggcggacgtctttgaggtatgcaaaggtggcagccattttctgtggatgtttttttgttcttgctttaatgctaatggtaatgtgggtggtgatgagagaatgctcgttggttctttatatagtggaaaggaaaataggttaaaatcgtgtatggggagtaaattagtcgctcgactttttgtggatattcctttatttgaaggttttgatttgatttgatttgttgtgatttatattttatgctgaaaaatttatagtatttaattcgtatgattatttaaacgaagatatcgaatgtatttaggtgtgattagctcattttaagcgattttacgatacacccaatttctccttataatttttgtttaaaatactatccgaaactctagttcaaattttggataaataagatttagcaaatagattagaaatgttttgttgtgcgtttgctcgttttaagggattgtaattgtattttggtttgagttaatagccaaggaatgttttgttatgtgttttgcacattttaatggattcgactttaattacgtaatataggcattggcgc

SEQ ID NO: 33890 - DNA, 2083 bp, Arabidopsis thaliana landsberg
gtaaaaaggatacaggggtcggagattggtatcattatatgtcgaccaagtaccgtccacggattcaaagttgtgtcgggtcctatgaaaattttgttgttgtgcttacttttacacgcttatgaatacttagccaattatatcaagacacaattctaaaacggtgtcgttttggggttaaaatttttaatctttgaaattaatttgtatgaagaagcagcttagctttctgggttttcttcttctgcaccttaaatatacgcccagaaaattcctttggtcaccaaaccaaaccaaaaccgactctttctttgaatttctgaaaggaaacgataagggtttcgagaaaaatcattcctttttgacttaaaagacgcgtttccacatttttggcgtttcttctctgggtttgttttgtctctagacgaagacgatcacgggttttaacatattcgtgtgtacgcgtgtatctccaattttgcgaatagggtttgaagtaatcgttttgtttgtgagggtacgaagcgattatctcgtgttcttcttcactggttttaaggatctcgttgtgctttttgattgatcccaggttcgttattgattataaaggtgattcctttttttcttgttaggataattctgttttcacttttgttttattgagaaaatttggattatatgagagattttagcctatgcatttggagaattgtcattttggtaccatttacttctctttgatattgaaacattggctctttgagtatttagtcttatggctgcttttgattgatttcgatattcgcgtttgaaaacctcaacattcatggttagtgttctttaatcaaaggtgataattttttacagagtttaattgtttttttgtttctgtcttgcattctaagtaaagtgttctgttttttagtagacgactttgtgattttcatgttctgtgattgattgattgtattgttttgctcctagttttgaggggtttgttttgctttttccaaaggggaagcacatgatttcttgcttgtttgctagcattgcttgcaattgtgatcatcttgtaagggaatgatttaatggtttgttttgacttgtagatatatatttctggtcaatagtttgttattgaatggttggtttagaagcactatattgtattcgtctgtgtaggttctacgacaatgacttgcttttgacaaagaattttattgaaaagtctggatgatgaccagattttccatttaaagagtggtcctattctgtttgtcatgtgtgtcttcttcttcttggtattggatcttatttagaagcctcatttttcttctctagataacgactcgcggggttacgcatagcaggttcctggcttctctactgtcaggaggggccttgagtcgttggagttaccacagtagacagaaccccagtgggtgactttttgaaaagtcttcttgatttagtgctgcacattttcgctgtggagctacaatcagaatattagagaagatatgggaatcttttcacgcaggtcaagatcttgtctctctctttttagctaattagtttggtcattcgagagttgttgcagagaaacttagtcaaattttgttcttgttatttcagttcaattagtaggaaatcaaaagatggaatgaagatcattgcaacggcattttttggagtaacatttggctttctgattggaatatcttttccatcattatcaatcactaaggttgccgaatcaatcctttatttccctatttctgtgtttgattagatttgtttccttgtcatcatttgaagatttttgttctcatataggtgagtctccctacaaactttcttccttcaaacgatctctcatatatcgaggaaaagggttcgaaaattgcgactccagaaagtcataaagcttggtcatcatcaaagggtgacgatagcagctcatctactccgattgacaaatcaaaggcatgcttctactccttaatttgtttatgacttgggaatgttttggacctttacattatttagacaacttaccgaatcctactttatatgcaactgg

SEQ ID NO: 33891 - DNA, 520 bp, Arabidopsis thaliana landsberg
ttggtcttctcgcatgcttcttcaggctgtataaagctttcctggattcttggtgttttagctgcaaattgggagttcttcacatttgtaaccatgagatgagatctagacattaaccaaatttttatttttttgttgtacaagtcaaatcaccaggagattaaatacaaacagtgtaacaacaaagagggatatgtacatactagagccattatgaggtctctttggtgcaactaatttgctggaaatactttagttgcagcgacttgaaccatttgcagagatatcttcaagctgcctttccctagaggacctagccttggcgtcttcttctttctcttttacaaaggagagaaaggagtggatacgcgcggatggtgagcttcttctcctgatcgacccttctgcttcttcagggcattgctgtccaaactgacgtatcatcaacactgtatacactgcaagagcaagaacacatgccactccacacaccacaaataatccccaaaagctcttaagc

SEQ ID NO: 33892 - DNA, 1400 bp, Arabidopsis thaliana landsberg
  unsure (1)..(1400): unsure at all n locations
gtacccttttggtatttctacaggttgttactatcccggagatgataatttcaatctcacctgtgacgtgaaagagaagctactactctttggcattattcaagtgaccaatatttctcacagtggccatgtaagtgtactgtttgaacgattctctgaatgcatctacgagcagaaaaatgagactaatggaactggcctcgggtatcagctgggtaatagtttctctctctcctccaacaacaagtttactttagtaggatgtaacgctttatcacttttgagcacttttggaaagcaaaactactcaactggatgcttgtcattatgcaattctcaaccggaggcaaatggaagatgtaatggtgtaggttgctgcacaacagaggacttctctgtcccgttcgatagcgatacattccaatttggctcagttcgcttgacaaaccaagttaataattccttagatctatttaatacttcggtatatcagtttaatccttgcacctacgcttttctcgttgaagatggtaagtnnnnnnnnnnnnnnnnnnnnnnnnnnnnnnnnnnnnnnnnnntcacgaggttccctgtggcactagattggtctattggaaaccagacatgtgagcaagctggaagcacaagaatatgcggtaagaacagctcatgttacaattctactactagaaacgggtatatctgcaaatgtaatgaaggttatgatgggaatccataccgttcagagggttgcaaaggtacttcatattaatttctttgctttctttcttcttttgagtgtttataatcttcctcatacgtttttggttgcatcttgtgcacttattcctttggtcagacatcaatgagtgtattagtgatacacataactgttcggatccaaaaacctgtagaaacagggatggaggcttcgattgtaagtgtccatctggttacgacttaaactccagtatgagctgcacgaggcccgaatacaaacggactcgaatttttcttggtaaacactcttcactggttctagattctctttaaatcaactcgctctaatcatctatgcatgatgttatcagtaatcataatcggcgtcttggtcctcctgcttgctgcgatctgtatacaacatgcaacgaagcaaaggaagtataccaagctccgacgacaattctttgagcaaaatggtggtggcatgttgatacagcgactctcaggaacagggttgtcaaacattgatttcaaaatctttactgaggaaggcatgaaagaggcaactaatggctatgatgagagcagaatcttgggccagggaggtcaaggaacagtctacaaagggatattgccggacaacactatcgttgctataaagaaagctaggcttgcag

SEQ ID NO: 33893 - DNA, 1479 bp, Arabidopsis thaliana landsberg
gtgtcgttgagtcagctctaccagaatcagatgaccaagcccaataacatggtctggaggcccaaagcagaaaagcagcccatttagcccatccaagagcaacggtcacctgcaaaacaagaagacaaaattaaggaagcttaaaggaaattgctaaaagatgaaagcaattccagctgtccaagtcaagacctaatcttgactaataggtttgaatgtctagagagtgaggacctagcttaacctaatctagagactatataagagagtctaatgtaatcacaacattaagagagaaataagatggaaaatatttcagtctccttcacatactatctctaaagcttactactttcatggtatcagagccatggattcatcaatccaactctattctcattcggttctacatatctcaaactgtgttacagtccaactaaatgaaagaaattaccttctttggaagatacagtttgaatcctttctctctggccaaagtctcctggggtttgtcaatggtgctattaaacctcctccagtcgccaacactctgactcacattgatggtctcaccacagaggttccgaacccagactatcaagcatggctgaggtcggatcaggtggtgcgagcttggttactaggatctctgtctgaagatattctgcgggaggttgtgcacaccaccactgctcaggaagtttggaccagtctagctcaacattttaataaggtatcttcttctcgtctttttgagctgcaaaggaaactgcaagttatagagaagttagataaatcaatggatgattatgttaaggagatcaagagaatctgtgaacaacttgcatctattggtaatccggttagtgagaaaatgaagatttttgctgcattacatggcctaggaagagattatgaaccaatcaagacttctatagaaggatctatggacttacatcctccacctactttcgagtctgtgattcctaggttgactggttttgctgatagaatggctggatacaatgctggaaatgaggtgtctccccacttggcattcaacattaccactactaatggttcccattactatagtagccaaggtcctggaaatggaaagcctgtaaacaacaacaaagggagatcaaattttacaacaaaaggaagaggctttcaccagcaaatctcatcatgttcttcaggaggtgacagaataatatgtcagatatgtggcaaacctggacatcctgctctgaaatgctggcaccacttcaacaacagctaccaacacgaggaactgccaagtgctctagctgcgttaaggattacagatgttacagagactcctggtcatgattggtttactgattcggctgcaacagctcatgtcacaaactcagctaataggcttcggcagtctcagccttactcaggatctgatgcagtaatggttggtaatggtgagtttctccccataac

SEQ ID NO: 33894 - DNA, 2327 bp, Arabidopsis thaliana landsberg
gagagacaatacttttttgtggatggcgtcgtgatattgatgatatgatcaaggtacatgatgtatcaaaagagattggagaactatagtgtaaacattgttccatgcaaactctgtgttaactagttatgtgcttttctaaccttataggtactagaagctctgcttgcgcctggatctgagttatggatgtttaatgaggttccagatcaagaaagagagaaaaagttgacagatgcaggactaaatatatcaaaattggtgaatataaaacttgtgcataggcagggaaatgcagtgatcaggcgtcatttagagagtctccctctagaaacttttgactcagtaagttgttactttctgattgatgtagcatgagaatagatatgccactttctttccaccatcttcttgattaccaaatcaaattgcagatcttaattcttgcagaacagtcactagagaactctattgttcattcagactctcgatctcttgccacgcttctccttattcgggatatacaggtacatgtcctatgtgttttctaatggaaacatataattcagttgtgttattataatctttatgcatgcatgtctcttgagctcataacatatataagactactaatggaagctgttattttctattttaatcaaacagtcgaaacggcttccatacaaagatgcaaagtcaagcgcgttacggatatctggattcccaaattgctgttggattcgtaagatgcagcaagcttcagataaatcaattgtgataagtgaaattcttgattcaagaacaaagaaccttgtatctgtgtcaagaatcagtgattacgtactctcgaatgagttagttagtatggctcttgcgatggtcgcagaggataaacaaataaaccgtgttttaaaagagcttttcgcggaaaaggtacataagaaacgaacttgctttgcttctgtagaatgtgaagttgttctcatgagtatagtcagttttttttgttgcagggtaatgaattgtgcataagacctgcagagttttacatatatgaccaagaagaggtttgcttttatgatataatgagaagggctcgtcaaaggcaagaaatcataatcggttatcgccttgcgggaatggagcaagctgtgattaaccctactgataaatccaagcttacaaaatggtcccttgatgatgtttttgtagtcatcgcctcaagtcagtaacttaaaaaacgcgtagatgatctctgactgtttgaacgctccaggacgtaacatggtaccttgagtccccattttttcgcaacttggtctgaccattttcttagaagaagcaagaatcattcaagaccccttttttccacaacttgttcatttagtcactacgaaacagagacgattatttgtatagtaaatgaccaaacactcttcaataaaatctgtatcttgttttagttctacccatgaaagacgtgattcatcacacagttgcagcaagatcatactctgattcaaaagaattaggacggtaagcaccgcgtcacaccactcgaccatcccccaaatctcttcaccatcatcttgttcttagtttcgtacagccattggtagtaagcacaagctcagaccataaaaccaccatctttccaccataatccaccaacaaaacacaaccataactttcaaactttggcaatcctgtcaaagccttcaactctatccaacatcctccctttgtatcataccatttgaacaacgataatggtaaaataccttttcaatcacgcaaaaagaaaaccatccccaactcgatatctgaccccataatgtttcccattgtccttctttaggtatgtaagccaaaccattagttaatccaaacatgtcgacaccttttcattaaccactgcttgtacggtcatattatcatagtcccatatcccataagaagaatgggaaatgaggttggagccaatacatacccacttgtcttctttttcttattaggtttcaggcagagagtgaaccagcgagggttagggtcaggttcaggaaggacccaaagcacacatagagacaagtctcggtgcggcctaaagaggatcgactcttatgtagctccggtgaagcaaggagagatcgaaagctcttggagacgtgggagagagtcgggtagtgcaatctagagacgcgtgctaagcacgtcaatagcacatcatcgggaagtgaatgaattgaggtcaattgcagcgaaagcttcttcttctttctcttaagagatggtttcttcgtcttcgctgccttcctcttcttctccgc

SEQ ID NO: 33895 - DNA, 1827 bp, Arabidopsis thaliana landsberg
gctctcagttttaacgaccagagatatatctaatcaggaaagaaaaatatatcatgagtttttttatagataaagcatagctgaagagaatatgataacaaatatatcatgaggtataatgaggccaaagaagcatcgacttcatagaaacattttggtattaattggttgaatttgctactaaggacttcatggattagctagtaattactaataaaatagtaaaagaaaagaaagcatttactaaagtgaaaagagcaaaagagttttgagaaagataagaaaagagaacgaatgggagacgaaatcgtgagatttctaattaaattggccaaggacatatatcgtttaatttcactatgcagtattaattgtggtataacacaagtgaaatccattagatatgtttaatttcattgtactgtattagatagtatgatggatttggatcgatagtaatacgaaccgatatagtacggatgaaatcatagatataacaattaaaatctatatatacattatcctaaacactaaacaaagtaaacaatattaataaaacaaatatctatatatacattttatataactaattttattaaaaactaaccccgcggtataccacgggtcaaaatctagtatcacttaaaaaaaaaaagactattaacgtcagtttatttttaccttaacgtcacttattaaccgacattaattaacttaaagtcatttacaaaattgacatattagtggccgacgttaacttattttgcttcactttaaacatactagcgtcactttttatatattttaacgacggtttacaaaatgattcaaaagtatcacattaatactaattttgcattaaattaaattataattaggaaaaacggtaagaaaacaataaatttattaaaaattaatttattgaaataaatagcacacataacaattgtcaattatctggataccaacataaaacataagatataagttttaaacattacataaaaatccattaaatccaccactctgtcacgacattcttgctagcttctccttccgcatcattttatcttcttcaagtcctctactcattttcttttaactgagctacagctcgctggttcaaaggttcaaaactctacaaaagtacaaagaagtttacaatgaacatacattcatatagtcccattcaaagttccaaactatcgattacaacctctacaatgcaaagtgaatcactacagggtatagaacacaatgactaacattttatttagtgttttgagccattaatacattatgtaaactgaggaaagaaaaatcgacatgttgagtattaatgtcaaccccagaacgccaaaagccaaaaccaggatgtgaatgataccaaccaaccaccatttcaggtctgaaacaagatacaaaaaacatgagatccaaaacagattctgtatagaaaactcaccaacgtgtaaatgatcttacttctctatgctccaacatctacaagtatgtgttcatgatcttcttgtctaaatttctaactcataacagaattctattaacatcatttttctgagttctgaagcaaaaaaaaacattacatcatatcatattgaagaccagaaagggaagacaatgaaccactcaatagatcgaataaccaataagttcttgctttcaatgaaaaaaggttttaacccttttcaagaacaacttgaaggaaatcgattcttctccacatcattttcaaataagaataagtcatgaaataagcctctccaccgaaaatcaacaccttatgtttcaagtctaaaacaatgctta

SEQ ID NO: 33896 - DNA, 2443 bp, Arabidopsis thaliana landsberg
  unsure (1)..(2443): unsure at all n locations
caggggatacaaaagttctagctgcagtctaaagcaggaactacgaagaattaatattgttgtcaaggcttgttttgaagtcatatggatgcctatagccggacagattggtatctttaaatgcatgtagtttaaccatgtctggatgctgtttttgtggcttcagtttgtgattcctggttattaccataaacacgcttagagaacagaaaatggcggccttggcttttttagtctttccaaagacaactctccctttcttgaatagaattccatgcagtgatttattgtattcttacgttccatttgtctgagaatgttttacagaagttggttctcaatcactgcattatctatatagttctgaatcatcggttttgagaatggtggtgctgctacggctattttatctgcactttttaggagtatattccaacaaagccagaggaattttcatccaaaacagggtaaacgcatgaatcataatggtatttgcgtgagatttgtaagctttcatattccccatgttgtaggttctacagaaacgaaacccttaccatttacatatgtgaacaaatgaacctgttatccaacataacttagagctttctatccctgaattacatgatagttactcattatcatggattttacaaattagtacggttaatataataaaagttactcgaaaatgacatgatcattagcaaacaataattcacaactaggtgtaaagtttaagtatcttcctcttacgttgctattaaagacgtttccttagtgttcttgagacgttgaagcatcagttcgtagagagcgaatccgccatgatggcaacctggcattctcgatgtcatcatcttcagctcatcctgatcgattatttaaagcacatctacagttacattcgtgatgagatcataacatttagagagtaaaaaacatgcagtcgatggttttttcttccttgatggattagagaactaaccaatgagacagtgtggagctgtgttgactcgaacccatcttcagcgctagagtataatctttgaatgtcatctgaatgatgactacacttgaggtagaaaaacatagctggtcttacattcaactcccttcgagatataccgatgaagagaggcgagctctgtaattgtataaaagatcaatcagatatctctcgggacgcctaagtgagagaccaaaagaactcattccggcttacaagtgatgatgctggtattccagtttcttcgacaacttcacagataatgctatcaaacatttcttgagttaccttcttgtttaaaacctcaccggtttgaacattgttttcaagctgatgataatcaatacctactgctgttggctgcaatgtttaaagtcatcaacaacaatgccaaagagttagtaacagacacaatatggtgatgcttaatgtaaataaggatgcttcatgtaaatacctctggatggcccccagggaatacatagtgtcctggaaattccccaacattattactccgacgtaacacaataatcttcttatcagaagtttcgataactgcaccatttcccaatggacttgaggtgtgtcgacatctaacagagtcatctgtgagagaacaaaactataacgataagaaacctgatcaaaccacctggaagctctccagttccccaacacaaaactagaggcaatgataactaaattcctcagaggatataccttctgatgtaacaaggaacttctcccacagagaactcaaattcgttcctacaaaagtccttggaaaccatgtccatgattaataattctctccatcaaaccatacaatgtaaaccagaaatcaataaactagaagcataatcctgtgaaggagataaatgagaaacctgtaatctgtcaggccaagacgaagacaaacgtgtggcacttcattggtactaccatcatcatcatctaaacaatatcctccatactgaaaattttaactaagagtaagcttatcgaaacataacatgaacgtttggtaaaacaatagatacataccctaaatttttggccattgaacaatgatgaatttccctgtgatctctgctcccaaacctaaattttcaaaagtaatcaaacctaaattgattagagtttcgaaatggannnnnnnnnnnnnnnnnnnnnnnnnnnnnnnnnnnnnnnntcaacaagcattattgaattctagatactccattttcggttctcacctgtgaaatagaatcttctagaccaggatcttgatgaggaatccgatcatgcgatttcgagaaatccactgagaccttttttagcatcgaaacaacaatatcggatgattaaggatactaagtcacattgtatagattcgattggagaaaaacctgagacggagagaggccagaaggacatgagagaagaagctgg

SEQ ID NO: 33897 - DNA, 1781 bp, Arabidopsis thaliana landsberg
acggtgtgcttattctctcggaatgatcgaaacgagaaggatctgatgaaatcttgattgcggatgattttggcccataacttcgatacacaaacaaacctggctaaaaatttcgctggcaagtttaagaagatctcgaacaacacgtgaacaggaattggatccagagattgcaaactcttctccgtatctgccatttcaactctgctttatcttctcaaaccctaataatatctttcccttgaactccaagatatcaaaaacacgaaatattattgaaacaaaaacaaatcagctatttataaaagaaatgtttcactttcaccatgtcgacacttgtcaatttttattttatataaagaaacattaattacatatttaattaaaagaccaaagaaatcactccatattaatttttgcaagaatattgaaattttaaatgaaaaaataaaccactccaaatgtcactctcaccctattagaaaacttgtcatcttatcatttacaaaactaatataaagtttgataataataaaaaaaaaaattctgtttcaaaataaaatatatttaaggttaaagcacgcacatatttagataatatttttaacaagttatctagatatttgtttaaaaaaaaatcaaccaatcatgcataatataaattggcacaagttattaaatacatcaaaatttgcatagatacttgcaaaacttcatttagtaatacaatatgttagcttgatttgagattagttaaaaacggtttcacgtaaaccaatccatacattataaagttactagataaggtccgactaaataagcgggatgtaagatataaatttttaaaaactattcatcaaaattatttaaaatttaaaatgtaaattagtaattcacacatttttctaatattaatttattaatttttgtattaaataaaatttcaatcatacacatttaattttattgtacaattttaactatctatttcgtcataataaacaatcttgtaattctatacactccatctttcttttttttggtaatgtgtaggggacaaaatcctcgtataatatattcataacataaaaatacattcggacacttcatggaaacgacatcccatgtgtatcctctaacaatatcatacttacacctgtgagaaacatcaaataagtacagaccaagcgataactaaaacacataatttgctaatcatttcactattcattcctatacacatgagtaacccggactatcatgtccttatacactccatcttattgatgatatttgaattttaaataggaactcacatactttttcagtatttaatttagtatttccttaaaccaaattttaattttacaaattcgattttacaatataatttaaatatctattttactttaatcaatataatttaattctatacattacattttattgttagttttccattttagttaagaaaattataagttaattttttagatatagacatataaattaaatatctagaaatatgtttatttatttagtttctttattttctttaggaaaaaagtaaaaaaaaaaaaatctaacacatgtcaaaatctaaaatcttaaagattgacatgtgtcatgatattgtgagttactaacttttaaaaccgtactttatataataagattttatatatttatagacataaaaattagtatatgtaaaaatatttactttttttatgttttctatttttttaagaaaaaaaaagttaaatctttattgacatatg

SEQ ID NO: 33898 - DNA, 847 bp, Arabidopsis thaliana landsberg
  unsure (1)..(847): unsure at all n locations
gtgaaccatattgctgattaacgctatgatagattgcggttttactttaacattgttcgattctagtagtgtttaacatcacacaaatatacacttcaggcatatagagcatcggattgtctctctcaagacccatctactccattgcagcatcctctgaataatactcaacattctagtgtgttgtgatagtgtcttgcttacgtttgaataggccagccatatacttgatttgacaatttttgttttagtgtatcttatttagcgagtgtattcaaccaaataatttatttgattgaagttcgaagaatttttctactctgtattctcagttcgatttttgaggtttacattaatttacatacctcatccaactataaacaaacaaggacaagagtttgtggtccttttagaattacaaatttttaaaacttttccatttgatttgtacttaccaacatattaaatttgaatatataaggtatttagacagacatattgatggttctttgcatgaaaaatctctgctacattttgttagtgctttatttctctccaatttcttgaatcccccctgttggtaagaataaagaaaaagtcagagtgtgtttgatctgtcacatgccncctcttgccctctcgcgttcctcctctgtcgcgggctgccngctgttgatgcgtgtcctctctggctcctttctcctccttgccggtgctatcttcccttgttttgtttcagtagccnctggtcctgatccttttgctttctcctccgccgggtgttgttatatagggtaaaagcgggtttataaaagaccagaggcatacatcnaaagcgggctttatc

SEQ ID NO: 33899 - DNA, 2355 bp, Arabidopsis thaliana landsberg
  unsure (1)..(2355): unsure at all n locations
tgcacgcttgaatcgggtaaaccagcccacatttctgaaagaaattggcgtaagcacaaacccacccctccggcacgttcttgggtaacagcggcgaccttgggagtatcatagtcacccccgccggaatctagcacctcctctggaggtcgactaaatcattgttcgtcatcggcaagctccccttttgcttgggagctttcttcttcttaggcttgtcgactctggtcgatggccttcggataggacccattccgccaagggttatgacgcgcctgggttcctgccgcgaggacgccgccgacctcatctttgacgaactatcgtcgtcgccatagctgtgattgctcttgttctgggaatcgtctaagtcactcatctcttgattttgaagaagagagacgatcgatatgaaggaaagaagagagaaagcagagaaagtacgaaggagatagcggaagaaaagttagagtttctatctctaaaaacaaaagttaaaggcagtaaatagttgagaaggagagaagttaccttgggagtcgtgtgagttgacgtgaaatcgagtggagatgtgggaagttatttaaagaagccatcatcaccacgatttttgagattgtagagatctcttccccgcgcctgatctgagccgttagatgcggtgcgctgaagagacgcgtcatctcgaccgtccacgtcacccgcgatttacctcgcgtatctactcgatatctttcggtttaagaatctaagattataccgttttcattgagtttatcctcagaaccgattgatcttatcgtatctactaccttatctacaatattttcgcaatcttacttggcttaggtgtccgctcattgagttcgcctacttactcaatgggctggatggcaaatgttagagctggatttctctccaggaatccacctgcaaaaataccatgccagcccactaagcccaccaagtagaggacctgcgcagctctggagcccatgaacagattaggtatttgggcctgataagcctagttacctgatgaagggagataagcgaataacaacctaggaactgaccaggagatattcgcggagcggacctgatatctcggaactaacctgccgaatatccaggagaatatccccgcggatctcggatggagctacccacgtgcgtagatctatataaggaagcaaggacgacttggaagacatatacattcagcttaacacttacacttatacttaacacttgtaatctcattctacattgtaaaagctctactatcatcaatacaaaattccattcgttttcagcaatataaatctcaaagttcttgtgaagatctagccctcctttctcataaacttccttataaatttctagtgtggatttcagtacccacactagctctagagtaattaactagaacttgattccagaaaatacaggtacccaccataggtatctattaccagaactactatagatcagtttggtttataagaatcggtctatctactaagatgaacttatcaaactcgtttagcatgcatctttaagtataggattcgacggcacatcaccgagaatcataactctaggcatagtgagttttacggaacatcaccggttattctgatattagagtttaagtttaagaacggttcggtaacaacctaggtatatctggatctactaataattatttcctgagattattactagacctgacgttttaatatcttgtttctcaaccaaccaacctgctttttgcttactttacattctttttattttttcatattcccttcttccttaatcttgatacttaattcattgtgtgaacaaagggactttgtggaaatccgacccttaaatattgatcaagacttaataagagcatccatccgtacaaataaaaagaaaagcctagtattgtgcatgagctacaaggagttggccgaannnnnnnnnnnnnnnnnnnnnnnnnntagaatgagtgaaggcacacaaatatctcttgtagccgttgaagaggactcacgagtggtcttagcgacatggtcaaccacggaccagccgctctcaccattaagaccaaggaatctcttccctcatatctctttcattcgcatgttaagtgtaaacggctatgttccctttgtgtgtccttaaatacagtgtaaacacacaaaggtaactaaccaattttagtaatatgttttggttattcccatcacaaagctctcttgttcttcatgattctcttactctttccaaactataattccgcatattctttcattaaatactacaattgatctcttatttgagatagaagttttaaaataa

SEQ ID NO: 33900 - DNA, 178 bp, Arabidopsis thaliana landsberg
gatccattctaagaggaccatagtcatgtatctgtagcaaggcggttaggagagacaatctatcccaagcctctctagatatttctttccatgcgcactagacttggcgtgttccgtttcaaattcacattcggtgtccctgatgagagtcagaccacgagcgcctcctcctacgccc

SEQ ID NO: 33901 - DNA, 2023 bp, Arabidopsis thaliana landsberg
gcttctctacatgcttagtctactccactgttttgaatcaatggagaactcagaaatcttatagtcaataggatactggagagagattttgttctgctgattccgaaattggtactgttcattgtgttttggctaattgttgtaagttcatagtttcaatagattgaactaatcttaacgattgagattcatttttgtgtttaatcgtgttttgattaggatgaagtgttcagaaatttgagagatattttgttctgctgattcagaaaatttcagtgtttattgtgatttggcaaattgttagaagtctaacttttgattctatcaaaaaatgtaaaggtttagttcaatcatgttttgattaggatgaagaattcagaaatttgattatatcttatacaggagagagatgtgtttcactgattagttgattttattgtttgattttgagggaatcaatagttagtctcttgtttcttcttattcttgcaggttttgaaagctctacatgctccaatgactgtgactttggttcagtttgctgttggtagtgtgctcattactatcatgtgggttcttaacctgtacaagagaccaaagatcagtggtgctcaggtgtgtgtgtgtgtgtgtgtttttaatggaggctggtaaaagctgcttgttcttgagatttgtcactcactctgatatgtttaccttgatagctagctgccatcttgccgcttgctgttgtgcacacacttggtaatctgtttacgaacatgagtcttgggaaagtttctgtttcctttactcacaccattaaagccatggagcctttcttctctgttttattgtctgctatgtttctcggggaggtgagctcttttttttatttgggtttttctttgacgtctcggagttgattaatgcactcgtacctattgtcctcctgtctggactaagttgctatgtgattcttgtttctaatggcttgttaatgatagtctatattactcatcgcttttgtttgatttgtgtaaagcataattcgtttactaactctttcttagaaacctactccatgggtactcggtgccattgtaccaattgttggtggagttgcacttgcttcaatttcggaggtctcattcaactggttagtttgtcgacgagtattgtgacatttaagtcggtggttatctattcttctgataactctcagatatttactacggttacttgttttgtggtagggctggattttcgagtgcaatggcatcaaacttgactaaccaatcccgtaatgtgctgagtaagaaagtcatggttaagaaagatgtaagtttcctatgtgtggatcaaactttcaatcttcgtgttttggaataaattaactaaaacttgattttgtgtctcggcaggattctcttgacaacatcactctcttctcaattataacattgatgtctctcgttctgatggctcctgtgactttctttacggaaggcatcaagttcactccttcatacattcaatcagctgtgagtttagtatatattacgattctattttttctatatccttctcaaatgtttgcagttcctaacaaccaatctcggttttgcagggtgtgaatgttcaacaaatatatacaaagtctcttatcgctgcactctgcttccacgcataccagcaggtgaggcttttttttctcttaatgatttggttgctttacttgagtatataacgaatttgaattgacatttctgaaatgtggataatacaggtgtcgtacatgatattggcgagagtatcaccggttacacattctgtcggaaactgtgtgaaacgtgttgtggttattgtgagctctgtcatcttcttcaagacacccgtctcgcctgttaatgctttcggtaacatccagtcttattctcttctcggcttcagtgaatacgcaatactttggaactcattgtcggttatttttgtctctgcggcaggaactggaatcgcccttgcgggtgtcttttatact

SEQ ID NO: 33902 - DNA, 4200 bp, Arabidopsis thaliana landsberg
attatataataaattataagattatgaagcaaggcaagatcaaatagtcgagctctaagatacaatttacaagactgatttgcaattagctcaaacactaaaagaatacgacaaaggttcttaaaggaagtctaaaagaccaaaattaaactttctaattcgatatgcagtaaaatgtaccaatatcaaactctttgcatgtgttggaaagttctcttatactagtcctaccggccaattcggtcaatgatctcgaaacattgactaaaccacttgaaaggtattttccgatatgttcaaaaaagaattcaatagaaaatatagtttgactaaattgaaatatgccattttaaaaagtaattagtatatgctattttggagtcaacaagaagtgtgacaattgaagaatgaattgaagtaattacatatgaatacttttctattagcttacagtgtacctacatggctcattatatctggcaatctaaatattgccaaaacaaaaaatttgtttcggattggccctaactacaacatctgctcaaagaaggaagatgacatcaaaatgtggttacaagccctatgcctacttcttctgcgagttcgtcccatacaggcaggagtgtcaaaaccactaggattagtgcaatccctacaagggccttcctccatgttccaacctcggtcacgtcgtttagacacagtttttcaggtgttctatgtccaaaacatactgcttagaaacatcttttaaagctgactcgtatttttgaagtagcagagtttagaaattttgtgtacccggcagattagtacgtagagtccccaaggaagtgccaaagggccaccgagctgaaaagtaggaaaatgccagagcaataaactagcaggttcgagaagtataaaacaacactacaacattaacagttgaacataccactctgagtccaagcattacataggttgacaaaccaaatgtaaccaatgcatttttcccgaatgctccctgcacaagaaccatgcccatatgtctcagacgtgattgatagtattaataatttgatctcttatatgaatatctcagacccttttcagttcatacttcatctaaagtacactacttttcaagattataaaatagtatacacttgaatcaactgcaacattttccatacttgatactagttggattgttttaatgacaagatagacttggaagaagcgtttttcttggtatgagtcaaattttcactaagcaacattaagtttctagttttcgaatagagtatgcaccattccttatatacaaggaagtacctgtacagctcttcctccatccaaacatcccactggaagcatattaaatgctgttgttgttaaaccacacctaacaatcaaatttcaaagtaagattgctaatgaaagacagaagcatgagccaaggcataagacactaccatccagcaattacaagcgggtggattgaaactgtcgcagcatgcaaagctctgcaatcaataggaaaacggaaatggagattggagttaggttttttcgtttagggtgaacagtcgctagctgtggagagcttacgcatatcccagagttgctctgctgatgagtccaagaagtaatgaaccttgaaataacatgctgggaacctggaccaggtcgttagctgcatctggttctgtagataggaacagaccaacagcaaacatggaaactgagagtgcagctccagcaaatggaccagctagcgaaatgtcaacttttgtactccggtcaggaagaatcgacttgaactgcacaaatcaactaaaaggattactaaaggctaacactactatatcaggcttatcagccaatattattgtcttcgaaaaacttcaaaatgttcatcagagaaaaaagtagatggatgcatttaatagagaaatagatggatgcattttcgagcatagtagcgtttcctagtttcctcaaaaaagtttcaaagatgactgcttctagatattaattacataagagttcaacaggagataagtcccctaaacttgaaagacttgcaatagaaatgctaaggaataccacctgtgtgatttcaccatagcttcctagaggaatgcttcctagtgccctaattcctgcaaataaacaagtcatagatataactctctaaacgaagcactgagagcaaaataagaaaatcagatatcaccaatacatgaaagttaatcattccaccaagtaagcatccctgcttggtatgaatttgaaagcaaacatgtatccactctataaacgaagataaataaaatagacgaagacaaacctaaaaaaaaactagaaattacagctcatttgccattataagccaaacaaaggaggatacaattttccctcaaattcattgtcaaagaatgtggaagttaaaatttgggaaggggcttgaaatcaaagggtccagctactgccactcacggcattgaccacagctccagctacttccgggtaaggctgaccatggagaacagtgagaatgtataagcaatccacaaaccgtgcacaaaagatcaggcgctggatccatttgcaaacatctctgacatggacccatatcatcttcacactcttctttttctgttggttcgaactgagggtttcctgaaacaaccatatctccattttcctggtactgaccaccaccactatcatcggctgtcagtagctcggtcaacgagaaataagtttgcggttcaaattccatgtcctcgtagtcgaaaagtagctcaccagacaaatcccattctgttagaacaggtaaagcttgctcctctgcctcgggtttcacaataggatgcagttcaggataggctgcatcagaatcttctcgtttcacttgccttctaactggtagcttttggggtccaggcgcaaaagcagtggtgctccattcaagatcgaaactactgggtgtgatttgtttgactttggaaactgataccaggagaggatcatcttctggaataaatacatcgtcaggaggatataaaggagtggcaggtaacggagtagaaggtttcgagtctttttgttcagacattctttcagaatcagaatccaacccagaatttccttgcctctgtttctggttcgtgaagactattcttttgatctgcttctgttccttgagtttgggatccatgtaagggcaatcaggggatcgtatacgtcgacatttgcaacatttgaacccaacaacttcaggaatttgtgaatctttgagcttaacagcttcagtgtggaaccactctgcatttgagattcagatattagataatataacatttaagacgccttcaagaaattacacttggaaacagttgttgttgagtgaataattccttactttcgcattttgtacagtgaatatacgttaacccaggattatacggcagtaggcagatcccacaaaccggttccaggctcggtttatctgatctaccggccaagagaatgttttgattccggaaatcaacacctgtgtcctctacgttctttttcctccatatgactccacaggacagtgtcttctgtttactcttagatacactagaatcaggagtgacttgtttaactcccgaagtgttctcccgtggcttctgggatgataattgttgactaggaggcttaaccttgatgactggaatgactgcattttgatgtcgtacgttgatcgtgaactggggtgctgttgactgtctgtgattgatatttgttggaactcgagtttttgaaaggtaacaccgtttgcaggtgaccagaacttcaacatttccatttgtgtgttgagacatcgaagtgcaatccttgtgacaaaatcctaaaaaaagaaacaaaatatgacaatccaacgctgatgcacaaacatactgatatactacaacgaaaaatttgcagtccaaaaggagcagtgagattaatccttctttgtcaagttagcaaatgagatgctaaaatagaataagataacgcagggctgcattcccaatccattaggtggattcgaactttctagtttttatacaaaatgcacatattgaaacagtacgaggatggtaaaataaaatggcaagaactgcatgttgttgtatccctgtcgacatgtatacagaacgaagacaaaattaataaagt

SEQ ID NO: 33903 - DNA, 1246 bp, Arabidopsis thaliana landsberg
ttcaattagcacttcaagaagggaggtacaaagttatcggatatgataaccgggacacactcatagaacaatgcctccacgacccgagggctattgactgcgtgcccttttgggcagatgcaatacttgctgctcttcatgtactccatgtaactctttttccctttagatttgggtatctcactgaatattttcatgtctggatctctgtttcctccccagttttgcaataggagaggtctaaggtaaccgtgcattccgcctgcaaagaaggcaagtatttgcctttgtgaaacaggtttgcctccgagagccctaagcggtctcctaggaacaagaatagtcgtctcaggaagagctacatctttaccgaacacaaaaccttctgaaacatcagaattgcataatgctctgatgcacttggccatgtactgcctcgtctcggaaggagcctgaaagcatggttaacaaacaaagagaaagtggatcaaatgggtttcatcgagatcacaaaacagtgacatagtagataaagtagaatttttacccagtcgtggcaagcaaccagaaaatgatctgatcctccagttttattccagaaactatatttggaagaaatcatgtccaggtagttcttcaaaaactgaatgagattctaatcgctgtgagaacctgggacatacagagtttcttccaacattttggagctgaaaggaagataaaataggtgagctttacgagggtcttttgtgacaaatgttctgctggacttgagttgtttcataaaccatccttcagaagcatatattcctttcagcaccggcttatgcagtacaggtcttttgccttccctgtagacatataccttgagctttttctccattagctcatagctcctgcaatgtgaaaaaatatagaaaaagagacatgactcagctagacaaaactcataccaatatgaccaaagacagaaatcatcataacagaggagtataaaaatcttcacaactgaaaatactaaacagagattaaagatccaaagaaacaattagacaaaaaaagctgagccacataaggaatactgtagcatctctactgaagtaaagtttaaaataagtaaaaagtgcgtttcttgtgatcatggtctatctatatctagtaggattctgtaattagtgataacattctcagttggaagagcagaaccaaagctatgcctagatataggagaaagcaatcgaaatgc

SEQ ID NO: 33904 - DNA, 1101 bp, Arabidopsis thaliana landsberg
  unsure (1)..(1101): unsure at all n locations
gtattgtatgcgtaacgcatgcaatatagctttgtatttcgacttctacatgggtatggtggagaaaggtgcccagtttgatggtgcgaagaacctaaagaaggtctactcgctcatggcactcaagaagagccactttggctgctacttaacggggacagagcttttccttgattactgtgcttacaaggcgaagcagagtgatacgactggtgtatcaagaagaatgagaatgagagataaagcagaagaagaaacgtgcaagtgaggaggcacgtgagaaggaagaataagatatttttaggatctaaaaatatctttagaaaactctgttctagtataaatactgcctctgaatgtttgttgttcgttataaatctgtggtgtatgagtctcgcatgagagacttgagagctaagctagttatgtgctagtctctctcgtatggtgtattgggagctgacctagtgatgtgctagtctctctcgtgtatggtgtgttagtgtgtactggtttggttaaggaataaaggtatcgatattgaaaacttaacagattgttgatgtgaagagcgtatttcagatacctttgactcatgcaaagcaattccatagtaacacatgatgactgaagatcttggatttatttggagagccagttgaaattgatgctgcgcaaactcgaatttctcctgacgaagataggtcattccaagaccgtaccatgcattatagtgtcttgtatctatgcccagagccttccggtagcatctctctgcatcctcgaattcttccaatgcggcaaacctgtgcagccaaggtgagaccggtatgttattaacgtacatgcatatgccgattatgcgcaaaagatgcatcgaaaagaattgtactcgtggccacaaagggtatgtgcatatgtgaatctttcattcagttggatagctctctgaaacattttgagagcagtatcatgatccttacgcaaactgtaacagttcccaactgcacacctgcaattcatattgcgaccacagtcattacagaaaaaaatacangcaaagagaaaagtctgcagtttcagattntgatatgctagtgc

SEQ ID NO: 33905 - DNA, 1055 bp, Arabidopsis thaliana landsberg
  unsure (1)..(1055): unsure at all n locations
tcgtgacattccgtcttgatcttgatatagatggtacggtatatatatttgttcgtaccgaactcgtgaccgagaggactccaaaatctgttaacacaccgagaaaaagctattggacaacaaaacgaaacacagcaaaaaccgaggcagacgctcgggtgaaactaggcttgagagcggaggagttggtggtcgttaaccctaccaaaaaaactaagcatggcaatgaggttggataccgtctacttcctgggccggcttcaagcccacttcttgtccaagatgactacccacagattcgggcagcattcaccaactacaacgtgtggatcacaccgtataacaaatcggaggtttgggctagcggtttgtacgctgatcggagccaaggtgacgacacattagccgtatggtcccaaaggtattttacatctctactaaaaattgattcttagtatcattcgaattatcgtagtaccacatttaatttaaatcctaatataactttttaatcaacgaatatattccaagcctaacttcaaacacgaattgagaaaatanagggttgtatgtttacgggaaatgggtaaaattgaaattaaatgattanaaagttttactatattatctttttaattcgtaaaaaaaattgtgcaaaactaaccaattagtttacttcctttttttttaaatgaaaatttatatttttacgtatctttaaagcactttgacgtaagattatatataaaaaaaaatataaagaattttaagggattagtacaagtaaaagtatatatacatagacctgtctcaaatatagaaaaatgtaaaaacctgaaatatttttgaaaacaatacaaattttatgaataggagatgatcttatttgaaattttagatattattttgtacttatgagacaaatttctgtgtattattatgggaccaaaaattatacaaatgaatgtgcccagagatagggaaatagagaacaaagatatagaaatgtggtacaccgatggattccaccatgtcccatgccaagaaggttttcc

SEQ ID NO: 33906 - DNA, 1597 bp, Arabidopsis thaliana landsberg
aatgaattccaattctcagattcacaaatgtgtgtcccattcttctttccatgccttgaaagagaacgctgtgttagcatcccctggttgaatattctaccttgaccagcacttgaagtttctgacctctcaaagtcgttaccgtctttagaacatcctctccgatactccggtatctgttacaaaaatgataaagaaacttgtgttactaatctaccaaccaaatcaagaacggatcatgcaaaggcataaattacctctgaagcattgcttttacgaacagtgagttttctgttttgaggaactagtttacgatgcttgtaatgtttctctccccaaagttttttcctaaagcttttgccccctttaccttcactagaagatttcttctcacaaacttcttcatgctctcttcttgatggatcagaagctttctcgttaaacttagataaaatccgcagtttttggcccttagcatcaatgtaaacaggtccaatgccagcagcatcttcatcaatgcgagcacgcgacacgcttcgcttctttactttgttggacacttcaggcttatcatcagagacaacacggttagagtagctcgaaatcatagcccactttgtgccatttcttttatcaagatcttctaatgtgccttatttgacaggagcatagagatcagatcatggcacatgactttaaaccgtggtcttagtcttaggccagcccggctgacgaatcggatgctgccccgagcaacagacagacactgatcgatgtgagcattcaaagttgtgttagaagctgaagagaaggttttgcaaataggacatgtttttgaagccattattgactcagaagtcgtcacaaggccagcacaactatcttctttagatttcaccatccctcgtccacactttctactgtggttgtccttcttgttacttgtagtagctactagtatctctacttcagacttggaaacacttgtgctcggaaacaaaccattctcgatgattcttgattggctacaaactcctttactactagtctctgctactgtctgatttaacccaagtttagccaaatccaaatctcttccttgatgaacataggatgatactatttgcttcccggaagacggactagcagtggtctcaaacttgctacttactgtggaaaacttctgaaacggtggtaaaggattagttacgccatgagttgagaaaagctggagactttttgaggaaaatggccaattgttcttaatgttgttcttcctgttactatatgcgtaatctctgcaaagcatcacatagataaaacaaagttgattactttcaaactctagaaattagagataaacattaacacaagataaaactcaaaaggaagcatatttaaggaaattttgagaaaaggaacaaaatttgatgatactgatttctaatcacagaaatcacagaaggtggaagaagaaagaaagaaactttgaagactgacccattagtaattatactacaaggaagaaagaagaaaagcttataactttcgatctcgagctatgatttgacactgacccatcatgaaatccagagac

SEQ ID NO: 33907 - DNA, 1164 bp, Arabidopsis thaliana landsberg
aaaataactttttatgcgttatggttccatcaaaaattgaagtataacatcatcgtatttcgaactcatgtatatgtatatgtaatagcagttttataaaatttatctggtgttgaaaatttttttcacttattgaatgaacaaaggcttttttatattagggttttagtttcctattgcaaatggaatgaatcaatttgttttaggaaaaatatcaatttggtagaaatcccttgtgtttactggtcaaggtttaaaagttatgtttggagtacaaacgtactctttcattggctattttattttgcctcattatttgattgtgtaatgtgaaaatggaagtgtgcgaattacagcaaaatttattttatatagaatatagcaataagtcaatatatatagacagtgaaatcacctgataaaaatgacaggacgtgcttttagggtttcctgattctattttttttttttatgtatataatagtagttcgaattgcatgtagaagagggtataattggtaatatatatgtataatacacacttcctcgtttggaaatttgcgaatctgatttcttcagctatatattgtaataaagaatatacgtgttttttcttaagattccaataaattttaattagataattttatccgaaagaaagaaaaaaatttagagaacatgaattttgattccaaacaatggacatagtgatcatttacctaggggaaatgacaagactgccctaagaaggcacgtgcaacttcttgacgtaaacaagggtaacgttggaaacagcattatatacaaatagatcagtaccatcgtcatatcttttgtagattttatttatttatttgtattaaattcagttgcattattgtcagttgctagaaaattcggctaatgtgtttttatgcaagaaagtgatatacgtacataaaacatcagcatcaaaagtatccaactagcatttgtttatgcaactaattcttaagcaaaaccttaaaaatttgcgacaaattagaaacgtagcttatagctagtaccctagtgcttgtttattatatacagagaacatgttatacaaattaacagttattacttaacattttcccacacaaacaaatataaaaatattacagttattagttattatatacacta

SEQ ID NO: 33908 - DNA, 4979 bp, Arabidopsis thaliana landsberg
  unsure (1)..(4979): unsure at all n locations
ttgaaaatctatcaagctttaacaaacaactgtttttgatttataacaaagcacatagagaggaaacgtagaaatcttcatatgcccaggatactaaactagagggaaagtaagggtaggaaggtgcacttaccatgagaatcctgatgcttttgaagctgtgaaggatacttaaaggcttttccacaaccaatttctttgcagacaacctgcttctgaccagttgaacactccgcaggctgagaatcgccattaccattattgtccttaccacttccgccattcccttcattttccttctcacaaccgccactaccagatttttccttatcatcatcccccttacaagtattgtccttatcaccatcgcccaaaccagtattgtccttatcacggttgtcattactatgatatttcttaacatgcctaccaacatttccctgtactgagaattcactcttgcagttctccttcggacacttaaagagcttccctttatgtgtaagaagatgcctattgagatgatccttcctcctatagctagcagcacaatcatccacatagcaagtaaaagatctctacacaccaaaagagtgaaaaccatcagaaacatagctcattgacgaaaagaaagtccaaagcaaagtgaaacaaaacaagctattgaacatcagacctcaaacattttgcgtgatcgaggcttacttgctggagcttctcaggaggtctcccaacctgatactagtccataacatgtagcctcgcattttggagttctctctttgggatccaatgcctcacgcaataacataagtaagaccacttgatttaaacaaaaggctatttatttcctgcaaatgtataaacttttagttcacaaccagaacaaaactcaacactaagcaaaacccacgagtatctctatgtatctccatctgtagctgcaacacacagaatgggaacaattcgacttctcatgacaagaggatgcataaatctacctcgagcgaatgactctgcatatgctgcttcaagtgagcaggtttcttaaactcagcaccacattcttgacaagaatgattacttgaagactcctcatcaacctcacaagcttcatcatctctttcctcttcaagttccatctaaacaaacgaatcatagaaactctcaattcaacaaaccatcgccgattctacagactcaactctcaatttcattgaaaacaaatcaagatgccacggatgagaaattggaatcgaattggaggaagatctcaaacctgatgatgagattggatgtgtttagtgatgagatagtttttagatctgctgattccgcaatactggcatagataattgcgtatatccttcttcgccgaagtcttcacatcaactttagcttcttccgccatgtctctcttattgtctacacaagaactagggcttatctcctccatcaagacgccgcacagtagaagctgaagtaacaatggccatttatatatcagcttctttttnnnnnnnnnnnnnnnnnnnaacctagaacacttgggcttctaattgtataatgggcctttcaagcccatataacaaatttaaattagaattacaacaaatttgcaaaatcgagttaagagaatagacaagggatctttgcaaaacgaaaagttagacttgtgccaggaaaaaagggaacaaatttgaaacgtcacaatcggtccattaaatctaatgggccctgcatctgtaacatttttgaaaaatttacagtcgataagctcaattaggtcatcgttttaacaaagggtaggcccaaataaaagaccagtccaattcaaaaacaagcgttttaaaacaattaaaaaatgattatgtaacttatttgttatccgcacgtgtcatgtgtgctacacaaattcgtaaagatgacaaataacacctcacagacaggacacatcaccatttttaacatttcttccccataacgattgattaaaaaacgtattaatcccataatcatatcttctaatgaattaaataattaaccacacacaaaatttattttaatgattttaatcaataaaattaaaaaccctaaaacgcaactttctctcttcttcttcctctgtctttgcgccaaaccaaaacccacacaaaagccctctttttttgttatccccttctctctctgaaactagggtttctatttttctgagtgatgtgaaatgctcgtgtaacggaaacgatgcagaagattctgtgcaaaagtaccacttcttcaacccctgttctctctactccggtgaactctctcgccgccggttttatctctgtagggtttaagacccccgtcaaaaatctccctccttgttccactactaaacctctctccacttgtttcttctcgacttccgctatgccgaccacaacggcttctgtgtcttcaggcggtgttggtttctctgcttatctacagaggactgttcataaaccagcaccggcgtcggttcggttctcaacagctggttaccggacttgccggtgttcaattgacggtacgaaccgggcttgggttggtcgaaccgggtcttggcgtgcgttgttttgttcagactctactggtgctttaaccccggttaatgctactgctggagcagtggttgaaagcgaggaagagtctgacggagaagatgaagacgaggagaaagatgagaagcctgtgaggatgaaccgtagaaaccggagctctaatggaaatggtgagtttgttggtaatccagatttgctgaagattcccggagttggtttaaggaatcagagaaagcttgttgataatggaattggagatgttgcagagctcaagaagctttataaggataaggtacttttgaatcttcaattttaacttgcgggttttgagataagtattgaaagtttcaatctttatttttggttggttgatttgtaatctcagttttggaaggctagtcagaagatggttgattatcttaggagctctgttgggattatacatagaaaccatgcggagagtataacaacgtttattaaagagagtgtggatgatgagcttaaggattctggccctgaacataatctaaatgtgaagaaacgtttgacgttttgtgttgaagggaacattagtgttggtaaatcaacttttcttcagaggatagcgaatgagactgttgagttacaagaccttgttgagattgttcctgagccagttgataagtggcaagatgttggacctgaccatttcaatatattggatgctttctactctgagcctcagaggtatgcttatactttccagaactatgtgtttgtcactcggctgatgcaggagaaagagtctgcttctggggttaaacctctcaggttaatggaaaggagtgtcttcagtgacagaatggtaaatttaaagcaaatgttatttaaattgatagtttgaaatgtgtgattgcaaacttaatatgttgtggaacttggtgtttaggtgtttgtgcgtgcggttcatgaagcaaaatggatgaatgagatggagatcagcatctacgactcttggtttgatccggttgtctcttctttacctggacttgtttctgatgggtttatatacttaagggcgagtccagacacttgccacaagcggatgatgctcaggaaacgagcagaagaaggtggagtctctctgaaatacctccaagatttgcacgagaagcacgagagctggctgctttcgtttgagagcggaaaccatggtgtattgtctgttagtaggccatctttacacatggacaactctctgcatcctgatataaaagaccgtgtcttttacttggaaggaaatcatatgcattctagtatccagaaggtaagcttatctccttttttcctttctttgtactaaaagtcttaagatagattttgcttagactgtttcatttgtttcaacaggtccctgctctggttttggactgtgaacccaatatcgacttcagccgggatattgaagcaaaaacgcagtaagctctcattctcacactaccgtaatgtcaccataccttatttgaaatcttaaacataacagcaattttcttgattgatgttgttaaaaggtatgcacgccaggttgctgagttctttgaatttgtgaagaagaagcaagaaacatctacagaggagagcaacagtcagtcgccggtactactaccgcatcagaatggaggtctctggatgggaccagcaggcaatcatgtcccaggattagaacttccgcctctagatctcaagtcactcctcactagaccgtctgcgtgactgtccattcactgactctgtttttgttcgctccaagggagcgtgtcaggttatccaatgtcaatagtttcgatcggcttttatatcgtttgtttaggaaaaaaacattatctgccgcttttgttcatcttagatgtagaaacaaaacatggtctcgcagccgtttagtttaacccttttgtataaaagtttggtctcctggataatttgtttcttgaaatcttgttggtcgtctaaaatttcagttcagttcatgtttctgatatggttgcacatttactctgtatccaattagatggtagtgtgtttattgttttaaccaaaatgtacatgaagaaaacgcctaagaaaagcgtttagtcataagaacgcgacgttttctgcctatccaagtagaggtccacacgggggaggctcgaccacactgtagccggcattcgagtaaagatttctagcagctgcatcgtcttcataagctcttagagcaagaagcttgaaaccccacaagtgacacaaaacatcacatgcctttaacaaagtacttgccatcttctttctcctttgagcttttgagacagctaaacccgagacatagagatattcgtcgacgcccggaaaatagcgaagtactgaactttc

SEQ ID NO: 33909 - DNA, 8515 bp, Arabidopsis thaliana landsberg
ttagaaagatagccacgagtggcaccggtatcgttacaaggtaaatcattgtgttctttcttttcatatgtaattgtagttaaatgtatatatccactggtattcatatgtgtttcatgtaatataataatagatcacattggtctggatttccagatgcacgctcagctatttgtttcataaattgctcacccttaaaagaaatggaatgtggcatagtaattttaatacctgattgttatctttttatttatttatgccactcgaatataatttctttttactttcaataaatttagtgtgctcgattttatatattgtttagaacatttgtgataagtaatattgaagtttctaccctgtagatattgtttggaattgatacatctttaaattagccaaatcatgagtaatatcatagaaatatacagcagctgtaatctttctgtttagctagtatcttttaaatacaccatatttggttcctgcagggatgcatttatcaagtattgggttgatggacatatgttggcaatggacgtagcctcacagatatataatattttaaggcagccaggttgcaagtaccttagacaggtctctttgttttcttttcccagctcttcactgctgttttgatttgtttaccaatgattattgtctcacttgatttctttagtcctgaaggctaatgtcttcttttggatttgggataggctgacttcaaaccagttcttgatgagcttctgacaactcatcccggcttggaattcctgaggaatacacctgagtttcaagaaagatatggtaagaacttggtttttgatacattgatgttatggtgtgaaatagttctaccagaatgtctgttttctactaagacgttcgtacaatttctttccatatatatatgatctttcaaaacgcattgacgaacttgaaagtgacatctttagctggcttgattggcctaggcaataattcttctaattttaattctatgtacttgatcattataattacattttgaaaattatgagatgcttcttaaatatagtatattttcaggagcttactgttttatacatctattgactaattcataatctttttcccgtgcttgcttcattcttctctgtgttctattccgtcaacccagctgaaacggtcatctacagaatattttactacattaacagatccggaactggctgccttactcttagagagctgagacgtggaaatttaattgctgctatgcaacaacttgatgaagaggacgacattaataaaattattaggtgagtttattttttcttttcataatttcctaacaataagtatttgaaattcaaacatattctgttgttatataaggagtaaacaagcttacgaaaatatattaaagttcgagggtttatcacatatgtaacattaaacagttcaaaatggaagagctatatgagtattggcttataccttcatattgcttctgtaacagaacttatgcctgattttaccatttgcaatcatgtcgtttcttttaattttcaggtacttctcctatgagcacttctacgtgatatactgcaaattttgggaacttgatggtgaccatgattgttttattgataaggacaatctcatcaaatatggtaataatgcccttacctacaggattgttgatagaatattttcacaggttggttcccaaaattgttcctgcctagaccttcttaaaagctaagttatatagtatgatgtgatcctttttatttgatctccatgcgtcttgtggctatgtttctcttttagattccaaggaagtttacgagtaaagttgaagggaagatgagttatgaagattttgtgtacttcattctcgctgaggaagacaagtcttccgagcctagtcttgagtattggtacatgtctcttcccctcttctctttttgtctttagtgacttctctttagccattttgtcctttagctgcttagctcacagtatgtcactataaatgtataacttctgagccaaaacttgtggcatatgtggccttcttgatgatacaagcctacctgatattttgaacgcactaaacatttagtagtactattatttcatgaacataggatacccatcttgaatctaagacattttcattcatcatctcatgaacctagaacattttcattcatcatctcatgaatctagaacattttcagttgaaccgctgatatgagggcatacctcgctggtatgctcatctatctcccatcgatgttaaacacaggttcttggcagttttttgtttttcgttttcccttgatattgattaaaaccatctttgcaggttcaagtgcatagacctagatggagatggggtgatcactcccaacgagatgcagtttttctacgaagagcagctgcatcgcatggaatgtataacccaggaacctgtactctttgaagatatcctatgtcaaatattcgacatgattaaaccagaggcaaaatttcttttaaaccataacatggtcttttgatattcctggcttgtctgttcctttgctcttattcgcatcatcaatttgtcgaatgactctttcagaaggagaactgcatcacactccaggatctgaaagcatccaaactttctggaaatattttcaatatactctttaacctgaacaaattcatggcgtttgaaacccgtgacccttttctcattcgtcaggtaaacataggttttctatagagttttcctccctttggttattcaatccttcgtttagctgttgaaactgttactactgaatatttattaatgccataaaaattcgcaaaaattattataagttcagatagtcacctgctactgcagccggttgtatctgttccagtctctgctacttctaaaccaactttgttttccatttgacaggaacgtgagaatccaacattgacggaatgggaccgatttgctcagagagagtatgtgaggttgtcaatggaggaagatgtggaggaagtctcgaatgggagtgcagatgtttgggatgaaccactcgaatctccattttagtgactcgtaagaggtactttgttcaacactggtcagcatcatgttccttatgcatgtatgaaatagcaaaattgatgtgctcaatgttacaagtttgtatcttttggtatattaaacgtattaaaagacgttttcgttgctttttttactagtttcttgggaagaagagggagaagtcagatcttcttgggtggtaagagcctcggaaacaattttcagacagacaaccacgaaagccagtccattccacggttccacctagagattggcgaccaagagacttatccgatgcgtaagcttgtgttagtttcatgaaatatttgtcttgcttaggtttctcaggttggaccctctttcaatcttatgtatattatatacgccgctttatagtgttttgtggaaccaacaacaacggttttatttaaaatcgaaagaactatgtacaaagacactttttttttgtgggaagaaatttacaaaccttgaaacttgttttacatgatcattgtttttgctttttcctcattagcaaatttgtgcctatgatatcaactacaattctcgtataaactatagaatatcaaatcaaattatatactatatatcagtttttgattggtttgagccgacattggttatttgtttgtataagaatcattaaaactttgtttgtcaatatgatattttggaagatgtgttaaaaagtcgtgcattttgttttaacaagcatgaactcactttctatggcggttaaaaacaagggaatttgacacgtttagacacttttaaagaattttattctttttgaggcacttgtcacggatgaagcacttttctaacttttcattaaacttttgaccaatttacccttgaaaattaagaaattataataaaaaaaaaagtttcatctttccacgttcctttttttttcttcttcttcgtcgcttcttcttttcactctctttctctctcttctcattattactttttttctttccttgcaaaatcaaacatttgatagtttgtcaagatcgtgtagcttctgtatttttctttacggagaagcctctctagagaaaacggagaataaatagtaagggtgtcgttgcgaccacttttacacgagatgttggtgtcgtcggcatcactagactaaacggcgatcacttttatagtcgttgcgactctttcatgagaatgatgatgttagtctctacatacattacacgcaagtaagttaaaaaaaattcagtcgccgatcgctgacgtatcgattacaaaaagaacagggccattccttttcaaaagccatagaatttgatagcaaaaaacttagagacaagttcaagtaaactgagataaaagagtaaagaagaacgtgtccagaaatcgttgtccacataagtatgttcatttaactctgttaagatgatcttctcgattttgtctaaattttaacatctatatcttaaacacaacgtagaatcagtctatcgtctgtgaatgaaaattagtatcagatgtaagttaaaatgtccatcaatttcacagaaccagaactagcaacaaggttcttcaataagtgaatcaaccatcaaaaaacttataaaccgtttatgatgaacacataaaataaccagattttctgaaaagatacaacccaaatataatcatgaatcaaattcacagaacatgaactaagcaacgagttccatcaacgagttccatgaacatgaacccaaatattaaacgattcgaagtccactacgaggctttaatctccaattcaagagaataatctcgaatatgaaattggaaaagcaagacaaagaatcaaagagcaagtaatgagattaattttgcaacaaacagcaaaaacataaaacgaaaaccaaaccgtaaatccaattcaagcattcaacgagtcatgtaactaaatcggccagatagggcagattctcaaattgatggtgtgaattttttttccttcaagtcagatcaaagcacacgcgaaaaattaaagaaggtgaatctcaatctctcttttcataaaagctcatgatttgttaaagagggaagaaagaaaaaggaataaatatatttttttggcttgagttttgtttatttttcgacaacgtgagagaaagagagagaaagagagagaaagaatagaaggaggagagagataaagtaatatatggttagagggtaaataggtcaaattatccatttaaagtgccttctcattagaaagtgtctaaccacggaaatatttttaaaaagtgtcttagaatgtaatatcctcttttcctttatctcctcacctttttcacaaaaccaatacaaatctcacactctcctcaaagattccttcaattcaccaaaaaccctaaattttctcatatttcaatggcgatttcatctcctgctgctacttactcatcgtcaaaatccctcaattgcttcacttccccatcaatctatatcatttaaccaaaatctctaactctttcttcgtctttcccccatcaatatcatctctctccatcaccataatcataaatgatggaattaaaaaataaaattctaattatagtgactggagattaaaaaccccgtgaagaagacgaagtgaaaggaaaaatacgaaataaaaattgaaaggattggatgtgggctcgaaccgtggaattgagattaaccagactgggcgttaccagaccaagacaacataaacgaaattttttgtaaacctgttattatataattaaaatacgtaaggttaaaatttaacactgtcaaataattccgttatgttcattgacggctgttaagtaccaggttcaaaattagcaaaattaaaaatatgatggttttaaaaaacaacaaaaaataagtgagatatttttattccaaatttaaaactacaagtattaaatgattaaatgatggttttttttggcttatttcccttttagcaaatcaccgccattattcaacgcccgtctcttcttccgttatatttttgtttaacaaaaaaatctttgttagtcaatttaattaaatttttaaatattcgctttccttgttttctctaatttttctcatcggtcgtttctctcgttaagctactattcaactccgtctcctcaccgtccgatagtttgacttttttttccccgatcaattaaaactttgaccggcaacaatgggccactgttacagccggaacatttccaccgtcgacgacgacgacgaaatcccctccgcaaccgctcagttaccacatcggtcacaccaaaaccaccaccagacttcatcatcatcatcaattccccagtctccggctacttcagaagtcaacccttacaacatcagcccatttcaaagcccgttaccggcgggagtagctccatctccggcgagaactccgggaagaaaattcaaatggccattcccgcctccttcacctgcgaaaccgattatggcggctttaagacggcgacgaggtacagcaccacatcctcgggatggtccgatccctgaggatagtgaagccggcggaagcggcggcggaatcggagaaaggttagataaaaatttcggatttgcgaagaattttgaaggtaagtatgagcttgggagagaagtagggcgagggcattttggtcatacttgttgggcaaaagcgaagaaaggcaagatgaagaaccaaaccgtggctgtcaaaatcatctctaaagctaaggtctgtctcttctcttctgttttgtttggtttcagaatgtagggactcttgttttgttactattcacaacataatcactatttcagattcagaggaatgtagaatgatatagttaggttctctgtgatcattggttagacgatgaattggaattttgtgttttcagatgacgtcgacgttatctattgaagatgttcgtagagaagtgaaattgctgaaagctttatcagggcataggcatatggttaagttctatgatgtatatgaggatgctgataatgtctttgttgttatggagtaagttgtttgactctatatggtttgttctttattaaatgaatctactgttagatattcaaatcttcttctccgatatggtttcaggttatgtgaaggtggggagctattggatagaatattggcgaggtaaatccaaagttacctttcttagtcttacttttatattagtgcttatatttcagcctactcaggctagttagctttgcattagatttaaatccaaccttgtcttttgcagaggtggtcgataccctgaagtcgatgccaaacgtattcttgtgcagattttgtctgcaacagcattttttcaccttcaaggtgttgtgcatcgtgatctgaagccggaggtacactgtctgcttctataatttgataatatttctgttaatgccacctattccctcttctgtgttatgtatggttgcttaaacatatggtacaactgtgtatccagaattttctctttaccagcagaaatgatgatgttatactcaaggtcatagattttggcttgtctgatttcattagatacggtaatgatctatttctttggttctctctcttattacatgattctttacatatcatatgtctggcattgacattaatttatctaatgagtttagctacaatgtgtaatggtcatttacgatatccatatatgtccccttggaattatttgtcttgccaaatctcatttgtacaagttttccgctcacatttcttatttgttaatcttttatatatgcagatcagcgtctcaatgatgttgtaggaagtgcatactatgttgcacctgaagtactccataggtcttacagcactgaagcagatatgtggagcatcggtgtcataagttatatacttctctgtggaagcagacctttctatggaagaactgaatctgcaatattccgttgtgtgcttagagcaaaccctaattttgaggatatgccttggccttctatatctcctactgccaaagacttcgtgaaaaggcttttgaacaaggaccataggaaacgaatgacagctgctcaagccctaggtaagttcttttccgtgggttaaaacagatatgatcttgaaatggaaacaatcatatggctttagatcttataagttaactgttttattttttccattagcggtaatattatatgatctatatttgtagctcatccgtggttacgtgacgaaaaccccggtttgcttcttgatttctcggtctacaagttggtcaagtcctatatccgtgcctcacctttccgacgatcggcacttaaggtaggttcttgatatcctcatattattattaaggacaattgtcttttctctttctacttaattatagcttgatctactaatgataatagtcg

SEQ ID NO: 33910 - DNA, 1071 bp, Arabidopsis thaliana landsberg
  unsure (1)..(1071): unsure at all n locations
ttgtttaccattaacaactcgcctttcttcggtaaagaaggaaaatttgtgacctcgcgccatattcgtgagcgcctggaccgtgagctggaaaaaaaccttgccttgcgtgtaaccgataccggttcacccgattcattcaatgtgcacggtcgcggtattcttcacctgtcggttttgatcgagaccatgcgcagggaaggttatgagctgcagatcgggcagccacaggtaatcatcaaggaaattgacggtgtaaaatgtgagccgatcgaagaattgaccattgacattcccgaagaatattcaggaaaggccatcgagctggtgaaccagcgcaagggagaaatgctgagcatgaaccccaaaggcaaccgcatgatcnnnnnnnnnnnnnnnnnnnnnnnnnnnnncattggtctgcgtaacacgttattgacccaatcggccggggaagccattgttacccatcgtttcaaagaatatcagccactcaaaggcgagatccagggccgtctcaatggttcgttactggccaattcgcctggtaagcactgggatattcggttgacaaattacaggaccgcggtactttcttcattgacgtgaacgaggagatttatgagggacaggtgattggagagcacatcaaaccgggcgacctggtggtgaatgtgaccgaagggaaaaaactgaccaatatgcgtgcatcaggttccgatgacaaaacgcgcattgcacctccgcgcaaattcagccttgaagaagcgttggaatatgtgcagggcgatgagtatgtnnnnnnnnnnnnnnnnnnnnnnngcctgcgtaagatcctgctcaccgaaagcgatcgtaaacgtgcggccaacaaggctttacaattatagttggtgcagtcccgcatacatgggattaaattcgtgcatcattaaaagaccatggttttttaataaatactccagggaacccggagtatttttttttattttgcacaaaaccgcagtatgtacaagactattacaagagatttttcaacctctaagtcgtgatcattcccgcctgggtctt

SEQ ID NO: 33911 - DNA, 757 bp, Arabidopsis thaliana landsberg
atactaaatgcataactatatcactatattgttggatctaaccagaaaattctatttattatacacttttaaaatagcaaaaacaataattgaccaggagaaagtgcagtctcaatatttgagattttgtttgttgtaagcgtttatcgttttaccattttctcacctattggtatagtcgaaagaaaaaaatattgctagctacacgaagtgtcagacaatatatgatcacacatatcaactatactattgtatcatagctacataaaatatatgtattgcatgaccacatgtttaaattatacaatgtcatgtggtattcgccggagtaaatttatgagtgtaccagaattgcatgtatataatgttaactacatgacgtcgtatagttcagatatgtgaccatgcaaaatatctatttcgtgtagctgatgatataataatatatttgtcatgtgaaatcatgcattgtccgatattttgtgtacctagtaatcttttttctagtctaaatactttttgttgccattttaaaatctagcgaaactgctttaataacaaaaacaatacttttcttttctacaagatatattatttaaattagttggaataactgatgtaaaaaagcgatttttttgattaaaaattaaaattcacaggtgctttatatataaaaaatactttaaaattttcaattggaagaaaggggtctaaatttggggttttaaaaaaaaaattttttttaatttttaatttt

SEQ ID NO: 33912 - DNA, 707 bp, Arabidopsis thaliana landsberg
tcaatttcgcacgggacggaatgcaagaaaaagactggatttctttggttgcagttcacagtgattcatggcttatctctgttgcattttactttggtgcacgtttcggatttggcaagaatgagaggtaagtttctttctctgctcagtgttctgtgtttgttaattttgcttgtttggtaaagcttcaatgactagtatagtagctgcataattctagcatccaaacaccgtgtagttgttgttgtagatactagtgacgatctctggcacactaaactcatgttatcctgtttctgtgaaacaaccctgaagaagtgatcatcattttttctccttcagtagagagaagtgaacctacaaatgtattgaattccatctaagctgaaccaaaatttattgagatttaagaatttaggtcaaagatcatgtttgttgaatagccaagtaacattgtttgttttctctgatattatagactcaaatggtttagttatcttgcctctgatcttattaattcctttcaggaagaggctcttccagatgataaatgatctcccaaccattttcgaggttgtaactggcaatgcaaagcaatccaaggatcaatctgctaaccacaacagtagcagaagcaaatctagtggtggcaaggtagaagcttctgttttctcttttttttcgccctctcagtccatgtatctgtg

SEQ ID NO: 33913 - DNA, 499 bp, Arabidopsis thaliana landsberg
agtggctgataatacagaccactgcccacaaccaaaagagccccgcccaaaaacatcaattcccatgtagacatcgaattttctgtccccagcaacttcagctgataggtttgggtagctctcctgatacatcattactcattaatagtaaaacaagacaaatagaagaaactgagagagattgatcaaacccatagacagaccttccatgtgtagttcatgaatattccatcgcataagtcaaagaaaggtttgttcagctcagtcaattgatcttgccactgaagattaccacgaacagtgacactgtcatacctgcagaaagttatcagaacaaagtggtatacaaaaagaacaaagaaaaacttctgatcaactcaccatatgactaaagccccaggtgtcgataaatgcaagactttttttagatggcttacgaattccttcatatttggaatctgttcctcatctatatcattctctatatttatctgcaagt

SEQ ID NO: 33914 - DNA, 1916 bp, Arabidopsis thaliana landsberg
aaaactcagagcaatgttgagtgcattgccacgtctatagggggttagcgaagaagtgacaagccgaattccggagaatagaaaatccaattcctatttcaatctgatgaatcgatgtcctctgtcctctgtcctgcgaccttggtctttcaacgattggatgtgtgttctccacaaatgggctctgctgcaaaccgatgaggatctgaaacagatcccgttttgggttcagataaggggcattcccctcgttttctcatgcaccgtatggttacctacattggcgagaacatcagacacttcattaagactgatttcggtggtgacggttctgtcttggttgactatgttcgggttcgcctcttatggaacattgatactcctctgcgctttcagagacaatttcgatttggaggagagacttgtgtgcttaagtttcagtatgagaaactttgaaatttctgttcaaagtgtggaatgctaacgcacgatgcatctaaatgccctcttggtaacaaccctcctcctccaccaccgcaggatgatgatgaggaccgagactacaacccagaggaaccagatggaaactttccaggaattgctgaagaaccgatgaatggaaatgcagacaacaatgctcaagagggtaatgctaatgaggaggcaaaccagtaccaaagaaaaggaaaacagagtcatctgcaaaaacagagcacgacactacttttcctctggtatgctgcgaaatgcgacaaggctatgtcacagatgatactcaacaatgctatcaaaaacgtaacatacgtcaatctgaagtgctggaggttcgtaactggttcatgaagaatgcaagtaaaagcgtctatgggagatacacacagactcccccaaacccccatggagatggcacggtgggccagaaaccaccggagctgcgatgaatacagcattttggaactgccggggcttgaaagggtccctggtagttcgacgcctaaagggaatcaaggcaacttattccccggacatactctttctgattgagacgaagaatcctgatgatgtcattcgtgatgtagcagcccagttggattatgattacgttaaatgtgtttctcctttgggaattggtggtggttcagctttactttggataaagacagtttcagtttgtttgtatgatgttgacgcaaggataattgattgtaagataagtaataaagatatttctttctacttctcttgtgattatgggcatccaatccgaccattaagacatgttttctgggaatgtctccaacgcctctcactgaacagaactgaaccttggttattatgtggtgatttcaatgagatactcaacgcaaatgaaacaaggggtgggagaagaagagaaaattggagtttggctgactttagaaacatggttaagtgttgtaagatttctgaccttcctttccaaggtaacaacatgacttgggtgggaaaaaggagaaattatacagtagagagttggcttaatagagcaatgacagctgaccagtggaaagctacttttccagcgtcagaggtgatttacttagaaatggtggaatcggaccatcgacctgctatcatcaaaattcggaggaaaacagaacaaggtatcagaccttttcagtttgataccaggctgtgttcaaatctggaattggaaggagtgattaaacagatttggaataacaatctcgtttatggcaacacttctctccaagagtgcatacgcaattgcagaagagaaatattatcttggaaaaggaatcataacacaaattctgcaatccggatccaagatataataaaagagattgacgttgcacattcagtcaacgcagattccgtggagcagattggtcacctacgacaagaattgatta

SEQ ID NO: 33915 - DNA, 465 bp, Arabidopsis thaliana landsberg
aagcaaaagctaaagacaaattctgtgattcttttcttcacttcttagtgcttttttctttctttctcatgattatagtttttatgaaacagagtgatacaaagcttactaatatatatgatatatcttacattcactacgtatttgtcaaaaagaatcatgatcatttgcacatctacacaatgctacttcttgtgcattgaggcattatgggagagcttgcttaaagactcaatcctcattttcaggtacctcaaagaccataaattttgcaagagaggtgattatcttaccatctaaagatctgtttctgcaagaattacttctgaaaatagatgatgatagtgacgatgaattatgagtctttccttgcattctgatgttgtttgcagccacagttattctcttgcctatcgattcgctttcagagtctacaggttttcttctccgcggtttttggtgtga

SEQ ID NO: 33916 - DNA, 624 bp, Arabidopsis thaliana landsberg
gatcgatttcagttttgatttgttatttttcgatgttccggttatcgtaattgatcggttattgaaattgaagcatttgtgatctcaattttgatttcagtagttgttgaagaatgtttagtgaagaagtattgaagaatgtgtttccattgctagaaggcgaagatctcgcgtcatgtatgggtgtttgcaaacaatggagagatatcgcaagagacgatttctactggaaatgtcaatgtgcaaagaaatggccatcggtttgcaaacggcacaaacctcctactgaaacatactacaaaatgtatcaaacgtttagtaagcggcggttaaaccggcgcttcctcctccgcgattgtcgttcgaaaacttggagtttttcatcgatatttggtcggaagagaggctcgtgttctcggggttaatacccggtgttgcgttggaaaatggtatcgaaacgttaccgttagggatcagtaatgttcttagaactcatcttggtagacctgattacaagatggttgtcctgctgacctaggtcactattccgtaaccagtctgttagtgtcctgtcttgtgctaggatgatctgaaaggtcctcgaaatcaccggctgtgtcgata

SEQ ID NO: 33917 - DNA, 1447 bp, Arabidopsis thaliana landsberg
aagagctttgtcttgttggaaaattatgatggaaaggttccaattattcaaagtctagagcaacggactatgttttcttagtttccaactaacgcattttcattaagatatagatcaaaaaggtcattatatgacgaacattcacaacgagaagcaacaccgtctcataagtcataataagagatcatttgaaataatttcactcaattttctagtaaggtattggacatttggacttgcttaataacattcattgtcatacgaaatatggcgttggtccgttggtaagaatttatgaacatgtttcgcctcaaagtcatgggacatgtgttgaaaaatcattaccacatctttgttatttccataattggaatccaacctgtaaacaatataatattccactaagacaatacaagtcaaccactaagaatctaacaacacacaaaaacttaacaaaacaaatgtaataaaataattaatcttagaaacttttgtacaacctcttctttcatctaaaaccccacaataaaaaaaaagtaagcaatttctgaatttctaatcatccctctcctctttttctatatttacaataacatgacatgaccaaaccatcacctaacttaaaatttaacctatcaaaccacacgaatcaaaaggtttatcctttccaaggcaagcagacttcttaaacaaaatccgcgtgcctctcaaaggatgaatttcatcgaaccggtggttcggtcaacccaagatttgaaagatttaagaacatgatttgataagaccaaagttgaatagatttctccaaaccaaacttccaagtgaaaccaacactgctttggtttgttggtgttcttctccatctcccttcttatgatacattgttggcatctccttcactctcaaacactccaaaccgattttctccctaaccgattcaatcaatttgaagtccggttcgtctccatttgcatcagttacatagaatatgtttgtagccatgtcgctactcgttgatatctctgttcttgtaacattcagaccgttttctctgaatgtccgcgttacttccgctagtaaaccttgtttgtccggatgcctcagctctaatctcactccctgaagacaaaccaaaccaaaaaaatgtttagatttccgattaaacaacagaaaaatcaatcaatctcagtatagtgttattatacctctagtgctcttctttcaactgcagcctctaagcattgaatcactcgttgcctctctgcttccgaacttatcggtgatccatccttatgccggatatagaattcctgaacagtttaaccaaacaaaggaaagattctattagctcaaaatcacaaaaaaacatcaattcatcaaacgaatttacaagataatttaaagaaacataccaagtgagcttggtcttcagctgtgttgatagtag

SEQ ID NO: 33918 - DNA, 2196 bp, Arabidopsis thaliana landsberg
ttaacttaattaatatgcggataaacgcggacgatcttatccatacggaatagataggcatgaacgaacttatccatattcgttcctatctacttctcgtagaaccgtaaccatgacgggttcacccaacgcatcaacacattaatctcagtcacccaagtctccgttccactcgactcacccatccggttccccgaccacttgctcatgaatatctccaaaactgccagaccgttggtccgacaaacaatactcttcccataaggactttttccgaccgttccgattgtacggcttgctaaatcatcgagtaaaattcctcggcctagtcctagtcctggccaggggtattacaatatctatctaatgaagcaagtactccgatgtctaatctccaaaaagaagaagtctgggagagaaagaatacaaaagaatgattgcgtggttgatttatcatggtatagtacaggaatgagtctaaaaggttcttgaatattagcttgattgatgagacccaacgatgaaagcctgttggatatagttgtggaacttaggtatggaatttagaatgttatgtaggcctgcggagaattaaatggtggttaggatttgattagacctgctaggcatatggatttggttagaatgatcaaggcaataggctagagaacgttgggagttcctgcgttttcaaacctcttccacgggtttggcttttatgttttgcttgagggcaagcataagctaagtctagggaattgatatacctcgattttcactgcttttagttgtgatataggtatagtttttacagtctttctgttatttctagagtcttctatagattttttatggtctttacatatttgggatacatttggagactatggatcattttggagcaaaatagacaacttatgctgtagaagcaatctacacaccaaaaccgcgtagatatcgatcgacaccacccctggtgtggagcgacaccaatatctgacgggaattcaatctcgccacttattgaagttttgaagatttccaaattcgccgcaaaatgtttccttattttcaaagatgttcttgcatgtttttaggaacttatatgtagatttttaaggtcattgtttagacctaaccctgaataacttttgataacttttatttaccctttattttactttgttcttgagagccaaaaccttgtggagcttcttctagagaagatctttctaaactctattctcttattgtttcttacattgatatctactttaatcatgttttgttctttgataatcatgtctgagtagttctcttgttgagtttagggattctcattagggatttatatgaattagtaaatcaaaaaccttgtcaagataatatatttataattcttcatttttgattgttcttaatgctagttctagattaattaattagaacttgtttttaggttaataggtagtacttaaaaaggcatctattaccagaactatcttagatgagcctagtatttagatgcggactagcgtcgatatagatacttaggtgaaacttatcaaacctgattataatgcttgcttagttttagggaattacaagagagttgggatcaatactattaagcattgtgagtaatgcagcgaaccaccggttactctataatagtgatttgaaatctaaaatggttcaataataatcttaatttactacttgatctactattcagatatttcctgagaatttctctaaacctgacgtttttatcatttgaatctacaattaatctctattattgctttcttgtcttttattttcttaatattttgtgtttagcttaactcgaaactgttagtctattgtgtgatccgagaactttgtggaattcgatccctaagtggtataacaacctctttatttgagaaagtagtcactagggtaatttgactcatatcaagtcacctctgagaccaaggaactgaataatagtgatgtacgtgtctataaaattgttcaagtaaagatttggcgagcctactaccaaggcgtttccaactactatctcaagaagttacttaatcataattggatcgtggcatctcgaagatttcaagtgatgtactcatgaggggtagtagagacgcgtagcactcaaaatcttaaagctaggctagatgcaaactggaaagc

SEQ ID NO: 33919 - DNA, 526 bp, Arabidopsis thaliana landsberg
gaggaagtagagaagctagagaggttgtatcaagttgggctccaatgataatgttagatgagcaaacaaaaaagtgctaattttatcgatctataaacacattcgcagcaaaacaaagacatacttgtccattaatgattgtccaaacagtctagtccatatggtcatctaatgactcacattgtagtttcatactaatacataagtttatacataaacaataaacgtcaatcctaagtacattatccatgtctatttgaccatttatccacatgtgtatagacatgttgagacaattttatcgagctataaacacattcacagcaaatcaaagacatacttgtccattaatgattgtccaagcagtccagtacatatggtcatctaataagtcatatggtagtttcatactaatacataagtttatacatgaacaataaacgccaatccaaagtacattatccatgtttctttgaccatttatccaaatgtatatagacatgttgatacaattttatcgagctat

SEQ ID NO: 33920 - DNA, 7891 bp, Arabidopsis thaliana landsberg
  unsure (1)..(7891): unsure at all n locations
aatattataaacatttttggtttttctatgccttagatgaatgtagactcaatagtatatacaatgcaacacacacttgagccctcccccaaacttaaatcacacagtcctctgtgtgaccaaatttggaaaagagtactcaggaaaaacacatcatagaaacaaaaagaggagatggtattatacaacggtgaagtgaggtacttacttctgtcaaagaaggagcggagttgatcatcattgtttgcctgcgattcctgctaagccattgaaaagtctccctgttgtgtctagcctccgccttgtaggtactcgacctcatctcctttgttgcggccagcaccgtggtcgagtgatctcctggcgtggagaacccaaaataaggtcgagtatttttcatcgctctgtggtcgagtatactgttgtactctcagagccagaatccacttcactcagctctacatacttatctcccgaaaacactaccagaatgcattaaagacaaccaaaaaaaaaattgtacaagttagacatgggacttcctcccaagtgagcttgttttaagtctcgagcctgagtcgtcacacttattaagctaatggagggtgatagagaggaattcaggtctccgcttcttcctcgtttgatacaacattgtattcaacatgctctcttgatatgtcagtagttgagtacttaatggcccttttcttgtaagtttctttttgatcatctcgataatcgtcttctctagaccgttctaatgtgaattcgcatccttctttgtgaagcaaagaaataacttcatcatttgggacatccttgatgtcgagtggtgcttggttggcttttccatggagctccttgatttgatccttcagctctctcaccgtatgtgttaaatctcttatagctttgtcctaccatatagacttctccgtgaatactaaccaataatttgattgcagaatgcttgacttgagttgtttggttgagcatgacgtctttggagcaattgaaaggttactcgagatgacggtcgagcaaaggtgtctagaatgagttgagttttcctcgttcgatgcaatagcctctatgtttgatccaaagaactatgttcatgttactgctgatatgtctataatttgcatgttttctgtgttcattcatcatcggtttgagtctagtttcatatcattcatcactgttttatatcatttcttatcattcttgcatactttgcaagattaggatagccttgcatacatattgcatttctgagttgttttcaggtgatttggagctgtttgcgagcaaattggaagaaacgagccagaaccagaagacatactcgaccaccaggtcgtgtgcatccagcaccatactcgaccccctggtcgagtgactttggagccattcttcccatcctactcgacccccaggtcgagtaacctcagctcaggccactcgatgacgccgaggtcgagtatcacttcgccacaccacttgaccacactcggccgttcactctaccacgttactcgaccccctggtcgagtatcatcactcactaccaacaccatcactcgacccggcactcgatcacatcttcatagtctactcaaatccgcattcagccagacaagctgagcacaaggaagagaagaggataagacgaagtgtttggaagcggcctggacctccattggatcacgaagcccatctcggcccattatcaatctatgggccaggcgattaggttattggcccgtctactatcattttatttcgttttgtataaatagatgtcttagggttctgtcctgggacatctagtcgacattgagtttttgcttcagttttattttctgttttactctgttgcgccgcttttgcttttgcaacctgtaattcgagatttttcttcaataaacgctccaaacagccaatcccttgggatagagacgaatatctcaggaactggtagattaacattccatcgaacatcttttgggtgcgagaatgcttgggatcgaattccagttgatcagaaagaaataagcattaaacacaactagtcctgaagggattcaatcaattctaaaacttaaccattctacagactacggattccacaactactctatctcatccttaagaattctaagtcactactcaaacaacatgctcaaaaacataaacgtaaataaatgataatattgcataagtaaagagataaggagtagagaaacaagatgacagatgaaatcaaatgcggaatcggaataacttggaaaaatctcgaattaccggttgcagaagcaaaagcagcgcagtagagtaaaacaaaaaataaaactgaagcaaaaactcaatgtcgactagatgtctcaggacagaaccctaagacatctatttatacaaaacgaaataaaatgatagtagacgggccaataacctaatcgcccggcccatagagtgataatggcccgagatgggcttcgtgatccgatggagttccagtccgcttccaaacacttcttcttctcctcttctcttccttgtgctcagcttgtgtggttgagtgcgatttgagtagactgtgaagacatgatcgagtgcttggtcgagtgatggtattggtggtgagtgatgatactcgaccagggggtcgagtaatatggtagagtgaacggtcgagtgtggtcacgtggtatggcgaagtgatactcgaccagggggtcgagtggcgtcatcgagtggcctgagctgaggttactcgaccacggggtcgagtagatgggaagaatagctccaaagttactcgaccagggggtcgagtatggtgatggatgtacacggcctggaggtcgagtatgtcctctgattccgactctcttcttccactttgctcgtcaacagctccaaatcaacaatgcaatatgtatgcaaagctattctaatcatgcaagaatgatgagaaatgatataaaacaatgatgagtgatatgaaactagactcaaaatgatgatgaatgaacactgaaaacatgtaaattatagacatatcaagctcttccagcagctccatagaatctagttgaagaggtccacgggtccaaccagctcctgtggtcatccctcctataggtacgagctttcatttttgatttgatgctcggttnnnnnnnnnnnnnnnnnnnnnnnnnnnnnntgaacggttatgtttgttcagctcctcccgattctagctctacttcagaccttccagagattctagagatttgtaggctatagaccaagagattggctagtctgcttattggctttggtagattgttgcttaaaccctgctctgctatgtttcatcaacgagagttgagattaggaagtagtagagttatgggggtctctgtcacgagagtggattgacccggtttttttgaatctatcgtctagggtttctgcctttcacctgttagccacttgatgagccctagagttgcccttatcaatgaatccatccttaggacttctattcttcttagatttatttgtattcaccccctcattgcacttctatttaactgttatttgtgttacttgttgattgcattttagttcttaaatttgttacatgttggttttactcgacccaatgatcgagaaaggcttttaaagttctcattttcgttgtttgaatcctgacctaggattgttactagaaaccaaccatctctataatcaggtttgacttagttgcttctgtacacatcttgattgctagcaataacagtggactggattgacaccccctatagctgcatcgatatgttagtgtttaagcagaattgaactgaacacaccacacttcagcacattaagtaggcgtaaaaacctacttatcaatttggcgccgttgccaattcattgttgcatggttacattcaagatatcagaaaaagttaagatcaatttcttttacattactcaagttactaactcatcttttcgtctgcttgtttttgtggtataggtactaatatttgtgcatgcacactcggtccaaaggatctgcacacctactatctttcaaagacagaattgacagactagctcgtgagttataagaaacaaaagcaaaggcagactgtgatcaacaaagaccagctcctacggatcaacagaaaagaggagttgagatacaagacccacctaatgttgatcaaccaagaaacattggtgcttgtgatgtcccaaggaatcatcaccaaagacaagggatagtgccaccacctgttcagaacaacaactttgaaatcaatagtggtctcatctccatgatccaaggaaacaaatttcatggttttcccatggtagacctcttggaccatcttgacagttttgataggctctttagccttaccaagatcagtggtgtcactgaagatgggtttaaactaaaactatttcccttctctttgggagacaaggcacaccactgggagaagactctgaccccagactccatcacctcatgggtcgattgtaagaaagcttttattgccaagttcttctctaatgctcgcacagctatattgaggaacgagatctcaggcttcacacagaaaaacaatgaaactttctgtgaagcttgagagagctttaaaagctacaccactcaatgcccccatcacggttttaagaaagcatcattattgagcacactctacagaggagctttaccaaagatcagaatgctactcgacactgcctcaaacgaaaacttcctgaataaggaagtagcagaaggatgggagttggtcgaaaatctggcacaatctgatgggtgctacaatgaagactatgatcgctcagtgagaggaactagaggcactgagaataaatagagcaaagatatcaaggatctgaatgaaaagctagacaagctgttagactcgagcccctggtagagtagatggttctatgacttcaacaaaccactcgaccccctggtcgagtagatggcctcatcactgcacatcaccgctcgacccccaggtcgagtaccaccaagacaaccactcgatcacatcactcgaccccctggtcgagtatcatcacgtccaccacatcaccttcactcgatcatactactcgaccacatggtcgagtacctacatcacctccagctcatcactcgaccactcactcgaccacctgggtcgggtaccattcttaatccgtcccaatactgcgtcgttttgagtattagggttttgaaatatttcgctattagtagcatgtactttatattttcgttattctaagttttattccgcatacactgtgttcttgacattttgtaatccggatttctcttaatctatttagtattcaggatttgcttttgatttcatttactaagttgttcatcttgttatcatcttgccattactctgttgctatcatgttttcattctattcatcgtttatgatttctactatgatgtctgagtagtgaataagtttttgaggatgggttaaagtagtttagaattctcagtatgctaggtggttgagtttgatttatagatccttctggattagttgttcttaatgcctattgctttctgatcaactggaatttgagcccagacatttctttgcccaaaaggtgttcgataaaatgtctgaaccactaattccagagattcgtggctctgtaccaaggtattggttgcagggagcgttttggctttaacttgttgattcgtaatgcctattaggttagctctcgtcaatggtgattgagtctgggactaggttaacttgagggtctctattgcggtggcacttagatttggttaatgaacttgttgtctagggataatttattgagcatgtcaatcacctgtaaactgaggaaacgaaactactcaatgaccccatcctcgggaattttttatctaattgaattctttgtttactttactgttgtttactgcatcttgttatctgtggcttactttctgcagttctttcttgttactcgaccttttactcgaccacctagttgtctggcaacagactgtgcagtcgagtatctgtgtttcattttctgtctgttactcgacctgtcactcgacctcacccagtgctctgtaaagagctgtgttggtcgagtgtttttctgtttctgtttgattttctgttttctgcgtgttcacttagaactgctagaacacaccaaaacctgttattgcttggcttgacttagtgacttctgatcacatcttgattgttagcatcacacccatttggattgacaacctaaaatactacaacgacatgattggtgttttaggataattgactgaaaaacctattatcattccactccaaattttatggttttgaaatgaatctcaaagacttgtccatggcgtgtttatgcacctaaggtagatttttctgacagctttcaagtgcgaaaggcaaatcagagacacacatgaaagattgatcaaaggcgtagataccaccatttagcaacaactcaagtcataggcgaacttatgcaatctcgttttcttggtattaaacgttgtccaaatgttgctgtgattaggaagttcttgcttgacaactatcattttagtatatcctactagaaagcttggtgggctagagaggtgataatggagaagtctttgggatctacggcaggcaatggcaggcaactatgcactgattccagcttacgctggactcctttagcaagcaacccatgtagtttgtgctttacagagtatgatgatgagccaaatggtccacgccgtttcaaatactaattcatcgccttcgcatcctccattaaagggtatgcctatatgcgcaaggtcattgttgttgatggaacatctatgaagggacaatatggtggttgtctcatatcaacatgttgccaagatggaaattttcagatcttcccactggcttttggtatcgttaacagtggctcaaccttatagctcctatgggaatgatagcgcatatgaatggttttttcagcggctcaacattatagctcctgacaatccgaatttaatgtttatatcagactgccatgcaagcatctacacatgcttgagtaaggatagacactacaatgcctctaaggttgtttcatataaaatacaaatatcgaattacttaatctccacctaagctgggtctgttttggtggagcaatgatcgaattctttaatatttggtgaaggggtatacgcaagccaaccacgctgcttgtacggttcacctttggcggaatgtcaaacatctctacaagccaaaaagcctctgccgactaatgtctgaagcagcgtaagcgtttcatgtcactcatttcaatcggatttttctgaagagacaaaaattaaaccctagaggtgctgcatatttagttgatttgggtacgtttgttttactctctattattatattggtcagcttccatatagttatagtaaattggttgacaggattgtagattacataaccatgtatattgtaatgtgtatagggttttcagaatggaccagagtgcattcaaaaggtcggcgtttcaatattatggatagtaacacatgtgagtcgtggaacaacgttattaaagaggcacgcgagtacccacttatttgcatgctggagtacataagaacaactttgatggattggtttgctactagaagggctcaagctgaagactaccactttagctccgagagtgcatgaaagagttaaggaaaactatcaagccgccatgtcaatgtctgttaagccaatttgcaacttcgagttccaggtccaagtttagactggtgaatgt

SEQ ID NO: 33921 - DNA, 9695 bp, Arabidopsis thaliana landsberg
tgctttactacagcaacatcgatctccacacttgtaataaggctgcaaattggagagatacgctcgcctgttacatggcccccgatcctcccaagttacaggacttgcccgcggtttgcgggtaacgtttccctttccataccaaacacctagctagctaggattcatttctctttagtttttttttggtttatgatgatagagattatattcttttactttaattatgagaaagaatttccacgtacgaattggcgtatttctcatctacttgcttcgggtctactagatcggatatcttgtgtgttttaactcggttattacaaaatttaaacttgaaaaagcataaaaagtcaataattaataactacataagttagtggattctacacttgattttatcatgagttattgatttctaaatagtaattataaccttttaatgatttcattggtttttaataaattatttatttatttcacattggattttaacagatctttcaatgtatatattaaattaaagataaataaatcaaaaagttaaataccaaagttattttgaatagatttgttatatgtgccttgtgaatagctagacgtacgctaatctcttgcaaatattttgatgtgacagggagattatgatggagtactcaaagcaactaatgactttaggtgaatttctctttgagcttctatctgaggctttgggattaaaccctaatcacctcaaggacatgggctgtgccaagtctcatatcatgtttggccaatactatccaccttgccctcagcctgaccttactttaggcataagcaagcacaccgatttctcgtttatcaccattcttcttcaggacaatatcggagggcttcaagttatccatgaccaatgctgggttgatgtttctcctgtccctggcgcccttgtcattaacatcggagatcttctccaggttaaaaagaaaatattgttgcgcttctagcttcatttcatctatggagtgggtttaaccctctgttttattgtgtgcagcttataagcaatgacaaattcattagcgcggagcatagggtgatagcaaatggatcttctgaaccgcggatttcaatgccatgtttcgtcagcacgttcatgaagccgaatccacgaatatatggacccatcaaagaacttttgtcagaacaaaaccctgccaagtatagagacttaaccatcaccgagttttcaaacaccttcaggtcccaaacgatcagtcaccctgcgttacaccatttcaggatctgaagcaattatattggtggctctgctcggtcttcatctcaaagtaactttcgtgaaaccagcttcttttttctttctcaaaaggcataaggatatttgtaacattcaaataaggtacacaatgaaaactactactacttacttacttcatcttccagccgtgatgtaataaaatttgcgaggaactttcttgttttaagtcctcgtgttaccattttcatctacgaactttggggattagattccccctcttttgaaccttgttttatgttgtatcacgaaaaaagcttattggcctcatttatcatcatcatccaccgatgatatatcgtttaattatatgttcatcagatattcttgtaaacttgaataattaaccaaaagcatatgattttaggttttttaaaaccttggtggactagtccacgttcggttgactgatttggatatacatatacatatatatatatatatatgaaaataaccaaattaatattagatgtggttgtgatatacgtacatcattttctttatgaggtggcaatttctcttgttatctgaatgatacaaatttagttaaggacgtagaaaagcaaaaaaacaaaacaaaaaaaagaccaagaagcaatggagtcaactgatcgttcaagtcaagcaaaagctttcgacgaggccaaaatcggtgtgaaagggcttgtggattcaggaatcacagagattccggccctgttccgtgcaacgccggctactcttgcaagcctgaagtcgccaccacctccaaagcatctcaccatccctaccgttgatctcaaaggagcaagcgtggtggagaagatcggagaagctgctgagaaatggggattattccatttggtgaatcacggcatcccggtggaggttctgaagaggatgattcaagggattcgcgggtttcacgagcaagaacctgaagccaagaaacgcttctactctagggatcacactagagacgtgctttactttagcaatcatgatctccaaaactccgaggccgccagttggagagacactctcggttgttataccgcacccgagcctcccagattagaggatttgcccgcggtttgcgggtaagtcattcactattattgtcagaaaatcatgtgttattcgttcaatgattccacatggataatgtagtagctagacgtttattagcatacacagcttaataattctgcatatatggggcagggagattatgctggagtactcaaaggaaataatgagtttaggtgaaaggctatttgagcttctatcagaggctttggggttgaactctcatcatctcaaggacatggactgtgccaagtctcaatatatggttggccaacactacccaccttgccctcagcctgaccttactataggcataaacaagcacaccgatatttcctttctcaccgttcttcttcaagacaatgttggagggcttcaagttttccatgaacagtattggattgatgttactcctgtccctggggctctagtcattaacattggagattttcttcaggttaaaaagatcatgttgctacttcgatcttgcttcatttcatgtatgatttggggtttgatccttcttttttactgtgtgcagcttataaccaatgataagttcataagcgcggagcatagggtgatagccaatggatcttctgaaccgcggacttccgtggcaattgttttcagcacgttcatgagggcgtattctcgagtatatgggccaatcaaagatctcctgtctgcagaaaaccctgctaagtatagagactgcaccctcaccgaattttcaaccatcttcagctcaaaaacgctcgatgctcctaagttacaccatttcaaaatctaagacatttgggtttagaccttttttgtctactaatctatcaaactctctcggtacacaatgaaaactggtacttcatatgtaagccatgatataatacgatagtgtacatttcgaagcttattggcctcgcattcatcctcatccacccatgatacttgattttttcatcagataatcttgcaaacttcatcagaagtaaccaagagcatatggttcactagttttattgagtgagttgaaaactcatcctgtgagtctaggtcggggatctacgcaaaacttatggttcccattataccatgcttgttggatgatacatcaaataaataaccaatcgatatgcaagaacaacacctgcaacctatatctcacctagaccaaaccggtttaactaattgaaatatcactacaaattctcccccttttcctgatggatattggtgaaaaatcaaaaccatttcatttgatttatcaaaatggcttcttgcatccaagaacttcatttcactcacctccatatcccagtcaccatcaaccagcaatttcttgtacatccatcaagtccaacacctgcaaatcaatctcctcaccatagtctctatctatcaaacctagatgatataatcggagcacgagttttcactccctccgtttatttctatccatcaaccaataatcgagaatcttttgtactgaaacggcttcaagatgctcttagtgaggttttagttccgtattatccactctctggtaggttaagagaagtggaaaatgggaaactggaagttttctttggagaagagcaaggtgtgttaatggtgtcggcaaattcatcaatggatttagctgatcttggagatcttacagatccaaattcagctggggtaccataaatctttcgaaacccaggagatgaagcttacacagatcctcgaaatgccgttacttatagctcaagtaacgtctttcacctgtggtggatttagcctcggaattagactttgccattgcatttgtgatggttgtggagctatgcactttctcggatagtgggcagctacagcgaaaaccggaaaattgattgcagatcctgagccggtttgggatagagagactttcaaaccaagaaaccctccaatggtgaaatacccacatcatgagtatcttccaattgaagaaagatcgaatttgacgaactccttgtgggatacaaagccattgcagaaatgttacaggataagcaaagagtttcagtgtcgtgttaaaagcattgctcaaggagaagatccaaccttagtttgtagcacgtttgatgcaatggctgcacacatatggagatcatgggtcaaagcacttgatgtgaagccactggattacaatctcaggctcacgttttcagtcaacgtaagaacaagactagaaaccctaaagttaagaaaaggtttttacggcaatgtggtgtgtttggcttgcgcaatgagcagtgtcgagagtcttattaacgattctctttctaagacaacacgtttggttcaggatgcgagacttagggtttcagaggattacttgcgttctatggtggattacgttgatgtaaagaggccaaagaggttagagtttggtgggaagctaacgataacgcaatggacccggtttgaaatgtatgagactgcggattttggatggggtaaaccggtttatgcagggccaattgacttgaggcctacgccacaggtttgcgtgttgttgccacaaggaggagttgagtctggcaatgaccaaagcatggtggtttgcctttgcttgcctcctactgctgttcatacctttactcggcttctatctttaaatgatcataaataagtcaatgatgcgacacaacattcacattaatgtcaatcatatgatttagtatcgactttaaattaccacttcatgtttattccagataagagttaatattatccccaatcaaaaacataagccacataacaaatcaccagagaacgaattcggattcatcataatcacttaaaacaacaggagataccaaaaaaaaacattggtgtagttttagaccaaagagttgatctccacatggatcaaactgtacaaagattagggctcactagtagggtttaaaacaacatggaaaccccaaattcgaaaattttcattttcttttccgttcaaggtttcaaccacgccccaacgacacccatatttaccaaactcccatctatcataatgtacatagtatttggcctatttgcgtagccatatcttatataaaagaagaaaagggacagagaaattattccaccaactcggaggaaatctttatataatatacaaactccaaaagcgttcaggacttgactatttacctgttcaaacacaaaaattaggaaaagagcaaagagatcagcttctcattactcgcttagacaacaaatcatcataaaggtgtctggaggattcaccgtagggagactccagactcgaggtcgtgattgtggttccgtgagagatttaatcacctacaaaggaaaccataccatgtaccattttgtctccttgtagtttctctgtgttgttgttgttgacgtttaagtgatgaacattagtaacttcatctaacttctttttcaggtgttcttcttttggatctgctactgctttacagtgctcctcatgcaaagcaaaaccaaagcccataggaggttttcctgtagagagcatctgttcgttgacactatcggtgagtataggtggtgtggtaaaaccatttgtgatccgggtttctttgagtgtagagagtttggctgttacgggtttctccatccacccatttgcgttgttcttctctatttccttgtagatcccatttactgttgggtaaaggggtaaagaagacttgattgagttgctcatatgatccgaatcatggagattctccatctgttttgttgaacctatagccattaaattaccaaatggttacttccactgtggcttgaattaaaacgaccctagattttgatctctgccatcaagaatattttaggggcagaaacataataatttaccctcttcagaactttcggcggactcaattgatcctggcttagagtgacagttgataatatcttggcatatttttccattaacttgatgagatcccgttgcggatgtgtgatagcatttcattgaaaacctatgtcaaaggttccatgattcaaagcataagatatacagatcaaagaaaacttttgggaatataaaagagaatattcggaaaagaggacaggctgcaaataatcacacgttaaaatacttgtcgcactatgaactttcgtcaagcaatgcacaatacaagaagacagcaagttacgcagaaatttttgtccaacatttaagaatacctgtcttccaacgttgctttggtgctgtggaaatggtcaaaaactggcagcagctttttctgttttatttcaagttcatgggccggaaccttttctatctcaaactctccaccagtggaactactatctcttggagaatccataacatgaaaagaaatctagcaacacatcaagaaagtaaaaaatcaagagacaagtacagatatatcaaagaaaggaagagtttttgactaaacaaatacctttgaattttgccacactggtagcatccccgaggtaacctttacctcaaagttagaaagatagcaatgtgatctttcagggggcttctcagaacagcttttcaaatacttatcttcactaaaatggctgttcatgtcaagggaaagacatgcatcctcatggcttgtcaagtgattcgacactgtctctaaatcatattgcttttcagtgatacttttgggaagtcgttcctcagtctctagccagtcagaccttgtacatacatcccaccactgaataggctcaactttgaccctcaaatcatcctcctgaacttgaacatgtgatgttttttgcactctcaaaccattttcaggtgattctgtgcaaactgatggcagaagttcatgctgcaccacatggcctgatggagtatagactaagatatgctccaacgcgttagtccgggagttcagctgaaggtcatgagtgacagatttatgaaaaacagcagccacggcacctgatggtacaaaaacttttccagtagcagcagtagtagcattgcttactgtgttaagccacccaaaactgctatactttattctgcttacaacagaaagggcaacagctgttggtggcgataaagactgctgattacttgacaacgattgagtaaaccaccatggcaaggatgaagctggtagtcgggtaggctcctcaccctcgcaaggttgaaacgcagcgtcgctaccagaagagtttaaaacaaatatatggcaagtacccttggatgaaataatagcaacccactgactctgctgactaaagcaaatgtcctggacaatctgttaaaaagagcagaaaaaatccaatcaagcaaagagaacattgaaaagaaaaggacatagatcaaccaaaaagtatacttacagctgaagtgatccctctatgcagtttgaagagatgcacatgagaagattcccactcataacttaggtcaccaggtgcattatgtgaacgagatggcatgatctgaaagacattgatattgttcccacatactgaagcagtaaccaatagagttccactaggatcaaaacaaagtgctgagataggactcgtatgagccttgaactgtgatactaaagctccagaaacaagatctttaacagcaacctgttggacgaacattcaaataatatcacaatctggcaattaaaaaaaaatagcaagagagcaaagctcaaagtaagtgactatgattaagatctttggtgtaagagaatagcatgacccaagaattgcccgcaatgttcagatccatcttaatactaaccattccggcattctctgcatctgatccagaaaccccaccaactttccagattgcatttggtgatgctggagaagtagatccatcagggagcatatcttgacagtattttgacaatgttttgtatcccatgtcccccaggttgattaatccattggctaactgcttgctagactccatggcataacgggccataaaactgcttccacctgatgatgaacttgggctgagactgggtgaagaagtaaacgtctgtgggcttaggcgccctgttttcatggtcatggaacttttggacgcatatgcaagccaccttggacctacagccatcggaccatagccaacattaactctggttgtcccttgtctcactggctgggggacaggataagtgagaacactgaacttattttccagagtaagtgcgtcaacacaatatatctgcacacaccaaatggaaaccgtcagtgtatggcataagaacaaaagataatctcttatacttaagtataataacactacgcatagttaaactacattcaatacaagcaaggttcatttggtctcaagaccaactaccaaacacttatcttgccaatcatctaagataaagtacgattggtatggaagaattttctaataaagaatctgaatttattgaaccacagtaatactcacttgattcgcaaggccaacagcgactactcgggagctgcatctaatcatgcaaacagatgaccgaaatctcaggacatatacataactgtgggacctaagggagtagaagcgaacagtggtaggataattgatggcatccccggctttagagtctgaactaccatctcttgctaatgaaccattctgggaaaaactgtgacccaaaccagtgccatttgtttcatccccagcaacaaccagcaaaagaggatgtgagttccaaaaaccctcatgatcaccagaccttgcaggtaatggctgcatctgtaagaatgaaactggaccacctcgtttagagaccagttcattaaaattagaggcatcctcaacatcaaagacttgaaagccattctgataaccgagtaagagaacatgtctggtgacatgttgacccagttcaagaatgccaaatccagcccaggtcacctggtcatgaaagcgaagttcagatgtttgtggacaaagtagtctctcgaaaaaaagaaaaagaagttgttaacctagaattgaaaatatagcaaaacctcccatttcaaagagggtcaacaggaaaaaggaaatagacacctaattcagaaattaaccaaccacaaccaacaaattcgaacacataatttcacatcagaagaatcacttgcatatttgttactagacctatgtatctcaaacttagtggacacagcagcaaaagctagactaagaatgaaagtaacacaccaaccattaatccactaaatatttctaaacaggaaaagaatcccattacgtcttagattttaaatgatccaaacaaatagtaaaattcacacggtacac

SEQ ID NO: 33922 - DNA, 2805 bp, Arabidopsis thaliana landsberg
tgtagaaaactctcccatataccacacctgatgaagaagcaaacacaagaaacactaattaaaaccggacagaaacttttgggagtaagattgactgaatttggaagattaaaagaactagttctagtaccatcgctgacaggcattgcaggccagatgctctcagacactgtttttgatgttcctcaccttcttcacgagccaatgagcaaactttgagcgcaaatttttcaatgctgtgtgtataagttccatcaacctgtccataacagatgaagagtgagagatttcacattttcaacatggactagcatatgtgtagaagccatgcactttattaattgttaaatcagtcaaagcctccaacttaggtatgcattttacctggctgtaaatgaacctcgtcagtgtttggcatccaagaatggtcggtgtgtcctgctttgaattgtcaagtagttccgtaaccacattcagcaaacttgtagcgaaataagcccttaaataagagaacatgtaaatgttagtgagaagttaagaatcatcaaattaatactgcaataatgttgctatgattttgcattgctaatttatgatattataaatcttacatctgatccttgcagtggcaaagcattttgttgtaagcttcagtgacaatattgatgaacttcatctgttcagatcgaaggtccttgtaacacctctcttcaagaaacttagcaatctgtaacagccatacaacacaatatgctgaacttacacacacaagactactcctcacctactagtaagattaaaaaaccaaaactataccttagggatacggattgggttctttgcagcatactcacacaatttgacaatctttctctcatttggtccaccatcctacagaaaattcatgaaaataagtttaatatataccgaagcatgttttcaacttcacaaatcaatctcacgttggcattttaagttgttacagtgaaatagttactcagaagcaaagataataacaaattacaagctaaaagtggaaactttaaggaatgagctaaaaggagacacttacaggggatttagggaagatctcgccgagcaatttcttgtaacgcttgacaggctgacgagatctcgacctgagagcaggacagcaaatgcacatactctcgcatgccggaaacacattcctagagataaaccccattgttctctgcaacccttcacagaacaagagataagtgttggaaaatcaaaagaagagaacataaagcttcaatcttttgtaaaccctaaaagacaaaaagttactaaaccaagacaaacaaaggaaaagtaccaaaaaaatcattactttctgagtgggggaacttagaaaccagacctcatctatactttttgaaattcaaaattcaaacaaaaaaatgttaaggttcaaacatcaaaacctaacgaaactgggtatgaatcaatgcttttggagacagaggaacaagatcaaacacaaatgtgccttacccgatttctaaaacaaaccctaacaaaaaatttagcttaatttccaaggtaattgagtaaacagaacacaagaatctcgagaaaccataagagaagagagatttgaagagacgtacagagcttcagaggacggatctgaagagagaggcgaagtgagaaactggtttcaaagatttgattaatctagaaagaaaagtgggagacagagagtggaaaaaggcgcgtggatttggatacaaactacaattagagatagaagagagagagagagcacgtgaaatgtcacagattttaatgtcaaagaaaaagcagaactaggctatagtcctgtcttgtgtcagaatgctccattgattaatgtccagaggctaacaatttggttgttgtccttcccacaatttttaggttcttaactcattaaaagttggcttcgaagttatccaaatcttgtaaatttctttatgtttttactttgaaagtttagatgtgatctatacgaagatggtaaagttgtgaagaagagatacattctttatactttgatcaaaaactaaattttaacctagattctaatcagtttttttatttaaagttcaattttttggatttgtgttttagttattccattgtatacattttacatggtggatatggcttattgatgacatcctttggatttattccaattgtttgtgtttttttcatcagtatgttgtaatgatttttgggtgatttggaaaaataacacatttcatataaaaattaaaaataaatatatatatatatatatatggcgctagtttatcacacatgaggtagaatagccattgtttctcatagatgcatcatcatttctctccattttaagtgttattatattcaagtctaactcagtgcaacccaaacctctcttgttgacaaaatatatgttggaacccataatgaccttgtagcacattgacggtaggttcatcgggttgggatttgaggctaatttgaccacttgccatttgccggtggtggatgctaggtctaaagattccatcgatttttgttgttaccatatatagaaggaaagttggggatcagacgcaagacgtactcattgatgtagactttcttgcatgaccgatttttgaattttggtggcctaatgcatatttaaataatataattttttatataattaaaaaaaaatcattgaaatatatttaaattcattagaaaagtcattgaatttttaaaattcagctttgtatcataagatctagtaacaaagttaactaa

SEQ ID NO: 33923 - DNA, 1353 bp, Arabidopsis thaliana landsberg
cctgaaggaagttgatgactctttagagtttcagcacgaagatgatctcgtgaagctcgaatcactctgcgaggtgagtatttgagcgacgagacatgtgaggaaggcgatgaaagaactcgagtcatcatcttcatcataatggccaaaatgatcttacaatctcagatcttagtctttagagttgtctccagctttctaggtaataatttatctcatctcgtttggtgaaaccttacctcgaacattgttaaggtaataatttagagtttcacttccaagacgactgaagctttttgaaatagatattgtagtttatattccacaaggaacatccatatcaataaaatagacttatcctactatataaaataagctagagtgatcatttacatttatttatatatctcattgaaaaggtacaaattatcaccataccttggatgaatctaagagacatgttcctgtgtttttattaattataagcaactccatagacatgagagcttatgtaagcaagcctagaaagagatgtctttttaacatctgcaccaccattgaacctagcttctaaaatggactctccggtgtgccttgtcaagtgacatccatcggcagcaacttgctgcaatgggtccaaaactgtctgcaccaacctcaaaaatgtaccatctgctcagccaaagaaaaagccaaacgatgggttagttttatcagttctgtacacgctctgctgatgattgattcgagtcggatgttgtgccttcggctgcaacatgtcaatgaaaatgtatatccctcccggtcttaagtatccgttttatctctgtaacaaaccacataaactcaaactgttactgagcactcttaagctgttgaatacaaaggaggtaaagagttacctttgagcgtctgagtgacatctgtgacagaacaaagcaccagagtccccacgactgcatcaaccgatgcatcttctaacggtatagactctccaagctagacacaataacaaaaaatgtagcatcagggggatgctattttgctaatgatatcatatttgatccataatcacaaagttaccgcatgaacgaatgtgaattcttcaggtttcaagcctgcttctgtagcggatttacgcgcataactttccattttagcatttggatcaataccaataacagaaacgtttggaatgtctgtgtagtacttgaagttgggacctgttccaatgccaatctccaaaactttttctgctttcccaactaagttatcaaagagattaatcttgtaatctgaaacctgacaaaagaataacaataagacataaaggaatctgtagaagataagaac

SEQ ID NO: 33924 - DNA, 1608 bp, Arabidopsis thaliana landsberg
aatcataagctggaactaaaaaattttgggctccaaaaaggctttgaccaaagacttaggctccaaaaattattttcctcgactattcttctcctttgactgtcttctccttttcatctttctctagctcttgaacttcttcactgctaaaaaattcagaggttctatcttcactcttccttagcatctgagattgtcgcatctatcttcactcttgctctctcgtcgaaattcgtactctaccacaaatcccatccatcgtctttgtccgcttcaaggttgtaatttttagggttaatgtatgattttgggatttagatcttgttttgttttgtttcaattgaagttttaagagtttggggttttgatttgtcacaattttgcttcttttaattgtatcgatttgggttctcgatttagggactaggggggcatttagatgataaggtcgatgttgaatttacagaattgggtgaacactttggaaatagttcagtcaaactgtcgtcctttcttggctctctagtcagggagcatgtacctgtaatacttgatgattggaggcaccttgatgaactgacaagacacgcactttgggaggaaattcaggtatgtatatcaatttatttagtttaccaaaacgttcctttgttactcttagttaactatctaacttatgtaggggaggtttaatttgcaagaagaatggcaaaaacaatctatttttaggcagatgggttgtttgtggaggtcccataaatctaagcttctttcaaaggttaaagcagcaaatacaaagcttagagtacttgagctaagaccaagcaacatcccatctgtcgcagtttcgagcaattgggtcaagagtaggactagcagcacttttaaggttgtattaattgtgatatttgattttctaaagtaaagttgtttggagatattaataatgttgcaatgggtttgatttgtaggtacaaagtgacaaatttaggcaattaaggagggcacaaattccacataccaccagtcgaaaaggaatgattcgcctggctcaagagatggtaagtttatttagtttttggttacgttgtaatccttaaaaacaatagtgagttctgctgctatttaaattaatatttggtctaggaaaaaatgagttcagacccaaggaaggtgacaagaagcaaggtttgggtagcaggacacacattctgatgggagacctgtgaagccagagtttgaagagaccattgtaagaagttgtcctttattctattatcattttcttgatcaatttgtttatcaagatttgtgttttgtttcaggaaaaaataaagtcaattgacagtgaaatggactccacatctaatactaatattagagaagatgctgttagtcaagtattaggaaaggacaaacccgggagggtcagaggggttactttttctaagctagccttcatgcaagttagaaattcacatgtgcagcagcttgaaactaaacaagctgaattgattagcaaacttgaagacttgcagaatgttgttcatgacttagctggcaaaaatgtatgtttctcacctctgttatgatagtgatgtagtcttt

SEQ ID NO: 33925 - DNA, 2623 bp, Arabidopsis thaliana landsberg
aaaagtagaatcactataagcttggatctgctctttagggatttgaagctcataaaacgcatcatcaactctagatttcactacacgatattgaatcaaacaaaccagctgcacaaacacattatcctacaacacagcaacaacaacaagaaaaaacctaatttacatgaatctcaccacatactaacgaaaattctcaaaggatcaaaaggaataagtgatcactaaccttagttttggtttcaattttggttatatgtagctaacagagtcgactgcaaaaaataaacaaattgaaaagagttaacacatgatgaaactaaatcaatgcaacacaaaaccaaatatgatcttcaataatcaaaaaggtaaaaaagaaaagaaaaaaaagacagaacgcaagtaatgattagattagccaaatcatagagacaactctattgagaaatcgatagagaaatcaagaaatatctaattactctgaaataacaattctaaaataaaccctagaaccatatcatagcatcgaacatcatatatctccaaatagattcatactaatcgcaatcaaaatcaatgaaaaatacttttagagcttaggggatcaattacaataaacaaacgtggtctatcccaatttacaacctcaaggagcagaagataaatcaaacgattgacatagagaacaagtaattgaataaaaagatgaactgagaaacaataaaacttaccatcttgttcaattgagattgataaaatcgatctcctagtctcctcctctttgtctggtgatgttcaccgtcggagaattcgatgaatagagagagagcaagcgtcgacagactgaaaaaacaaaaatccacgactgttttttttagccgtggaaatgtgggtattcgggtcgggctcggatcggatttttcgggttcgggtttagaaattttggacccgtatggttatatcaacaatttcgggtcgagttcgtttcggattcattttgggtccgtataattcgagtattacccataagtaaccaaaactatttcgagtttgagtactacttacccaaattttgtccaaatatactcaaacatacataaaagtatccataaaacccgaaagatctgaaattagaacaagtttttccttaagccaataatataaaacaagaagtaaaccttgttttaagcttgttccataactcaaatcattaaacaagtcacattattagtgcatatatatcctcatatgtatatatagggctgggtaaaaaaccggacccgatacctaacctgattcccgaaccgaaaaatcgggttggggtgggttagggttttaagaaattacttcattgggtaaagttttagtaaacccgtgggtatcaggtcggtccggggtttatccgttacccaaacaggatacccgaacatagatttaatatcaaaaatattaattatatttaatcttaatataatgtaataatctaaaattataattataaatctaaatatatcaattacttttagatctaaatacccaactatttaaaaattatttgttatgtttgtcaaaatttagtataatatatttaaatctaattaaattattaaaatttgttaatatttaaggttttttttttgttgggtacccgctatctacacataaaatacccgttttcatttgtttggctatttttagggcctgaaattctttacccaagccgacccgaacccgaatgtacccgaactagaccgaaatcgaaaaatttcattttaccctattgggtagtaaatccattacccatttaacccgaacccgaacgggttttacccgaatccgaacgggttacccatatgcccagccctatgtatatatatgttcgggtaataaaagtacccacggatatcgggttcggttcgggtaatatccgatacccacgattatttgaaaacagaacccgatcgagtaattagcctgaaccgaagtagaacgagttcaggtatttcgagtcgggttcaggtattatgcccatgcctatttttgtaaatgatatgtattcaacggaaccacgttttcagaacgtgaaaaaactctatgttattcaagaccattgtgttcaatatcatacatcaataaatttattgtaaataaaaacttaaattaaattgtgtgcaaattttattcttagaaatgttatttaaagatgagcagatcttttggacaatgaggatcggtgaagaacattgccggaaacatcatagtagatgaatttagctttggagtgagtgatgtgaagagacatgaaaccttgtccatcgtaatacagtttgagttcttttggatcccatggctgaacatctcctctccatgcctttgatcctcctccacttgtaagaaattgggttttacttcaccatttccaaaatatatgttaagttttctttctttcaacaaaatataacaacttaatagagaaagaaacattttaaactcaacaaataagtacttataattttacccgtgagaaccaatgtgttgcaagcagtgatcatgaccatttatgtacaagtccactttattctccttcagtaataagtgaaaaaaatcataaaaactatcgtag

SEQ ID NO: 33926 - DNA, 948 bp, Arabidopsis thaliana landsberg
cgccgtcgccacacatggcggagcagttactgaatcaattcatctccgcagtgatatcaaagtcgagacatttgaatcatttgaagtctagttcagtcctttatgatagtttctggactaagtcattcacatttcctctgttttaagcttcttcgtttttgtacgcttcgtctctgtaatctctcttacgctcgctttatctttgatcgtttctctttccccaatacgcatctttacgctgccgttttaactgcttactcttcttctcttcctcttcatgcttcttcagctttctccttctttcgtctcatggttaatcgttctgttcctcggcctaatcactttatctacccacttgttcttaagtctacaccatatctctcctctgctttttcaactcctttggtgcatacccatttgtttaaatctgggtttcatctctatgtcgttgttcaaactgctctttttcactcctacgcttcctctgtttctcatataactcttgccagacaactgttcgacgaaatgtctgagagaaatgtagtttcctggaacgggttggtttcagggtatattaagaataggatgattgcagaagctaggaatgtgtttgagctaatgcctgagaggaatgttgtgtcgtggaccgcgatggttaaaggttacatgcaagaaggtatggttggtgaagcggagtcgctgttttggagaatgcctgagaggaatgaggtttcttggactgtgatgtttggtggtttgattgatgatggacgtattgataaagcacggaagttgtatgatatgatgcctgttaaagatgttgtagcgagtactaatatgattggtgggttgtgtagagaaggaagagttgattaagcagggctcttttggattttgtccgagggggtggcaaattacttcttaaatttttttttttgttcttgaatc

SEQ ID NO: 33927 - DNA, 1681 bp, Arabidopsis thaliana landsberg
ccacgatacgattacacgtaccgtcgtatatgcatgtagttgtaattacattttttacttaaaagtatatgacgacagataaaaaaactttaaattgtacatacatgcaccaatccaatgtataaaaggcaaaagaatagcgttaaaatgcattcacgaactaaccaacgaagaaagatggcgactagttcttcgagttatgggattgaacaacttcaaaaaggatgttactatgagtggatgagtgtgcaggctaaacacatagttgatctcaaagaagcactcatgagtcatcgatccaaagaagatcacaagcttgaagaactcgttggtaaaatcgtcaatgacttccaaaaatacaccgaaaaacgatcagagctctcgtaccgaagctgcgctcattactttacaccgtcgtggaacactcctatagagaacagtatgctatggatgggaggatgtcgtccttcttctttcattagagttatatacgcactttgtggatcccaggccgaaacgcagctttctcaatatcttcttaagatcgatgaaaatgtcgatataaaccatggtggtttcatgagtgatcttaccgcgacacagcttggaaaactcaatgacttgcatttggaggtaataaagaaagaagacaagattacgaagacatctgcgaattttcaagacgatgtggcggatttgccaatcgcggatgtggtgcatgctgatgtagcggtggaggatgctttggataagacatgaagagggaatggcggctttactggcggaggctgataaactgaggtttgagacgcttaggaagattgtggacgttgtcacaccgcttcaagcggtggagtttttgcttgccggaaaaagattacagctgtcgttgcacgaccggggaagagttagagcagatgtttgtggaggagtggggggcgccgctgtctgaagaggtgaggtggagcggggatgtcagacagagccacttgttgaagtgcgtgtcagtcagtagcgtataatatatgtgtaatatttgtctaattagagatgggtcatgtttagtgtgtgcttcatgtgtatgagatgttgcatacataagcttttgcttgttatataacgaataacaagagctaccaaaaagtcaatagacgacttttttatgaatccaagttaaattgtttcactctttccttgttttgtttttctttgttcttttttgaattattattttcacagtcgaattactaaattattttttaattatcttgttttgttttgattgattttctatgacattttactatgtaaagagtataatgttaactctagttgtaaattttcctggaaaataaacttactaaataatttggaacagtatatttaagttttatttatcataaaaaatacgtggaaaaagcttaaacaaaactagtggtaggtgttctttcaagacatccgataaatttggccaatggtaattggtaactgacaaactaattgggtgactggcagttgttggatctttatataatttgaatattcatttttgacatagattatcattgttgtgtaagcccataaaattaaatgttgaaagtgatattttgaaacattatattatagtagtttattttcgttaaccattattttcggaattcgtacaaaaggaggtatttta

SEQ ID NO: 33928 - DNA, 864 bp, Arabidopsis thaliana landsberg
tggtaagttctactcacaagtccaatgactagtttaatgggttgtatatgaccattactcatcttcaccctttcatctatcaatactgtctccaggtcacagaacgataggtgtaatcacaaaggtgcatattcccagtccagacatttgttttatttcatcaccataggcgtccctgtctttcatgtgatttactatatgttattatcatgttttcagttggatattatggacaaaggtactgatgctcgaaaactccttcttggaaatgttgttcctcttcgacttggatacgtgggagttgtaaatcgttgccaggaggtaaacctgtggttgctcacaactattgctttttaatttatttagtgtggctcttcttttatgtgacttgagctttattgcttctgttctgtacttatttttcttatgattctcttgctatcatatagtaggctgtctcttcttttttttttttttttttattattctacctttggctgtgcttgttttttaattctaattttatcacttcgatgctattgtgacagaatttttattttttgtctactttttgtggcgtctgcatctacagtgttttgatctttatattttataaacaggatattttgctaaaccgcacagtcaaggaagcacttctcgcagaggagaagttcttccggagtcacccggtatgctaacatcattttgttgattcactttctgatactcttgctattttttctgattaaagctgagtctttttggtacctatacaggtttaccatggtcttgccgatcgtttgggtgttcctcagctagcaaagaagtcaaatcaggtattttctgcagttatgggaattggga

SEQ ID NO: 33929 - DNA, 635 bp, Arabidopsis thaliana landsberg
tctacgagaagaagatatcatggagaaggagtcatttttttggtgaagctcgacgaagtgataacaattaccttagaattgagaagcgccgagcagaaattagggttcttctctgctgttgagagcgagaggttcatcgttgtaattcgggtttgacccgaaacagaacccatttggaacctcacttttctgcttcacgatcgagagagtttccagaaattgtgaagatttggggaattcgggtggatcaagtttcttttttttttcccaggagattctgtagcgagaacagagtaagagtgggaaaaaaaaagagagaacttttcattggtggattgatgatgatattgatacgtcttggagatgatttaattttgtggctaagattttttactttattaatcaatacgacagaacagactcccaaaagaaatataaaattaaaaaaacttgattgttcgacatgggcttcgcctcttataaagcccagcccaaatatagatagacccaaaaacgagaattggattcggcacatctaagcaagcccatcccaaatagtttcatcaagggtagaagaagaaatcttcggctaatctaatttttttgtttagactgattttttttttttttttttt

SEQ ID NO: 33930 - DNA, 1252 bp, Arabidopsis thaliana landsberg
tttgttaagtcaagcaagaagacctctatcataacataacaccaagtaatgaaaaataatttgttttgaatattaatatagtatttcatattgagtttttccaaaaggaagcttaagaagtcgcgatttggggtagtgtagcataaattggcatccaatgtgaacttcaaaaagacatgaaagacaatgaaacttgatcaataaattaaagtatctttgtttttctttattctagtctggtttatgtttaaccatcatcattgtacattagttaaacaatgtgtacctttttagaggggtaaaattaccaaacaaatatctataaatgaccctatttgcaatagtaaaatatctataaatgacactatttgcaatagtaaaatttgacttttctgactgatacaaaaataaaattaaatgacagacagatgcagcttctgtgttgcatgaagcgatgggttacatcaaattcttacaagatcagattcaagtcctttgctctccttatctaatcaaccattctcttgtaagtagaagtctctctctttctctcttaattattttttattaatgaaatggtgcttctgacatgtcggcgacgtttattaggacggtggagttgtcaccggagatgtaatggcggcgatgaaagcgaaagacttgagaagcagaggattatgtctagtacctgtctcatccaccgtacacgtggaaaattccaacggtgctgatttctggtcacctgctactatgggtcacactacgtcaccgtcgttacctcaaggattttaattaaacggtcgtaggctgatatatattagtagtattttagtagccttttttcttgggttttgtttttggctgaagaactattactagtaaatgttacacccagacatttttttgggattatctgggtggtataaaaaggttggaatcttttgtgtttgtaaaattagattgtctaagttttcttaaagtttctttgatgtcactgtcacagttgcgacgagtagtgatggtacttactgaaaggctaagcttattcacgctcttaaagtgttgtaatgccaccaagttttcaacccttttaactcactcactcacttgagctaaagacgtgcaaaacgttttttctttgttttcccacattttcacaagcgcggtaacaaagaaagcaagaatactatagtattattagaccaaattattaacatttaaaaatagattgaatcttttgtgtttggaaatt

SEQ ID NO: 33931 - DNA, 475 bp, Arabidopsis thaliana landsberg
ctaatcatgtataacatagattgtacaacactggtggttcttgtttctacctgaccttcctgattggcacagctttcccaaacaattgttcaacctcacttgcttccattttgatctcatccaaaaactccatctcttctttacttaactctctcacgaaattctcctcgtcttgcttcagttcattaaatccttcagccaatctctggaacaaggtcatctcagtcctaccgaccttctccacttccttctctacctcttcttctatctcttcaacctctgttacgattatcctttcaccttcttccactgtcttctcaattctctccacgagcgcatgttcaggaccacatgtgttatccgttctaatgaatgtgctgaagtctctgcctatgctttttgctgctatttcgagttctggtataatgctattgggtaatacagaacttctcgtgtatacaactgcaccaccata

SEQ ID NO: 33932 - DNA, 1509 bp, Arabidopsis thaliana landsberg
agaaaaatgaatcagaacaagaagcaaaacgaagccattacgacgacgaaaagtatgtgaagttttcattatttttctattctcataatcaaggataaggaaattgttaagtatgctactttggagatgcgtattcgtgagtagatgtggccctaacattttctatcaatttgtatttctatttttcaaatctcgtatttcttggttttcggaggtgtaggggagagacattccttctgacttttccacgattatctaataatacatttactatttttaattaagtgaagaagaaaaagaaataagggtttgttagtagaagacagtttaattctccattggtttttagattttaatattttttgcttattggttttatttttatatagagactcaaatttgagaatttatttttgttagatatttacttatgtcatgtcaaaaaaaaatataaaaacatataaagtatttagctctcccatccaatacacaaagtactcaaataattaccaatttatactgacaaaaactgtagaagcatgttctcattctccttggcatgatctttcaataaataaataaaacgattttgatacgattcatattttcctcacactcaaaatacactcttcgcaatgagcttgatttcttcaagcttaattctttctctttatgtttttttttcgagcttcaacaataacaaaattttggattcttgatttcagacatttctccaattttaagcttgagctaatggatgtgggttaaatattaactcatagttaagttttaaggagaaaattaacatcataggacaattatgtgttgtatgttaatggtaaaatgaatgcaacgatggtgataaaaaaaaaaaaatagaaaattttctttttttgtgtattttttttaaaatgtgattagttcttgtatttctattgaaataactaattcattattttttgtgggatttttgttttagtaaacttatttcccaactatataatgatacaaatctgttgtacataagaaatatcaaaaatattaggatatatgacattactggtgacaaatatgaatcaaaaatgtataaagttgatctaacgaatcataattatacgacaaaattttccacgattttgcagaaactacgagccctagtatgattaacaacaaactttgatcaaagcgaggaaagagtgaaacgataaagaatcgcttaagcagtagaaacctaagtttttgtacaagtagcttcaacaacgaaccaaggaggactcttgcaatgagtcggaccaaacatctcgtcccttctcccaaaagaagtatacactgccattttccaagacaattctgcaccaaacaatacttataagatttactgaaataattatatatcacactatcgaataaaggtgaaccaaagataatgaacatatatatgtttagtttggtgttccgtgcatatattataaatatgttttctaataggcacctaatgtctggatttgc

SEQ ID NO: 33933 - DNA, 2098 bp, Arabidopsis thaliana landsberg
acgcgtgcacttgtataaagattccgtgtgaaatatggaaaatttaattcatttaactctctactcaaaataaaaaatatactactgtctattggtattcaaattcatgtatttaagtttttttttgtttgttaattacacaaaaacatcgattatacatgaatttattgattatgtatatttaaaatttatgtacttagattcctgtatttttagatacgtttcttctagacaagtacagaattcaattagattaattttccgttcttatggaatagtaagattcagttaaaggaaagaaaataaataaatgtaactagttaaaaaggaaataaccaaatttgtaaatagatcgacggctaagatcacaccatgaaccaaaaataaaggtattttactattttattgataccaataagactgaaaatagaaatcagatgtatctacagtatataaatagatcctacagtttgcaaggaatcaacaacaacaacaaaaaaccaaatttggttcctttttcttcttcagacgagtaatatcttttgtcttcatcatgctctatttgcctaagaaactcttcttgttcttcttctcgtgcattgtggtgattgtcaactacaacaatagtgacttcgtaaacgcagcaaatagcattggcttcgtaaacgcagcaaatagcattggcttgaactacggtctcctcggagataacctcccatctccgtcaaaagttataaccctttacaagtccatagacatcactaaaatccgaatcttcgacccaaacactgaggttcttaacgctttacgtggccatcgtgatattgcggtcacagtaggagttagggaccaggacttggctgctctttccgctagcgaagaagctgttaagggctggtttgcgaccaacatcgagccttacttatccgacatcaacatcgcgttcattactgttggtaacgaagtcatccccggaccaatcggtcctcaagtgcttccagtcatgcagtctctcaccaacctcgtcaagtcaaggaatctcgaaaagcacggtggtggctatgtggaacctcgagcaatcatacccaccttccgcaggaatgttcacgtctcaagcgcgtgaacaacttgtccccgtgctgaaactattatcccaaacaaattcgcctattctcgtaaatatctacccttacttctcctatgcgtccgacccatctagcatccttttggactatgccaccttcaacactgaggccatcgtggtacaagatggatcactgggctattcaaacatgtttgatgcaatctttgatgcgttcgtgtgggcaatggagaaggaaggcgttaaagatttaccaatggtggtgtccgagaccggatggccatctgccgggaatggaaacattaccacgccggatatcgcgggtacctataacagaaatttcgtgaagcatatagcaagcggaaaaggtacacctaaaaggcctaacaaaggcatcgacgggtttttgtttgcaactttcaatgaaaatcaaaagccggtcgggactgaacaaaactttgggttatacaatccgaatgatatgaagcccatctacaatctattctaatatgtgtgaaagttgcttagactttcccgattcatcaataattatgttacactagttgttagtgaattaaagtaaaactaacagtgatatatacacatactataagcaactgagatgatgagatctcgtcgcggaacttagttgacttttgtaaaattattattatttaaaagcaatttctctggtttagtaaacgtactatgtttcttcatatatttttttttcttctaaaatcattccattatgtttcttcatctattaatacaagagtatgcattttcaaaataatacttttttttatatatatgcaaaccagtgttttttttaatcaaaataagaaatcactgtcccaaaatgattcaatagttcaaggttttataaaagatttcttaacatttataatataactctttttgtcaagatatgaaaaatgaaaaagtatctcttattgttaagacagatgttttgaattcgtcatattccattga

SEQ ID NO: 33934 - DNA, 1704 bp, Arabidopsis thaliana landsberg
  unsure (1)..(1704): unsure at all n locations
agccttctctttagctcggggtatcatgcaattagggttccaaaaggttatacctaagacagagagtagagtttccgcggtgatgttgatgcaaaccaatgcttctatgattgcaacgttgatatgtttggttggattgtttgtaagcggtgagttcaaagatatcaaggaagatttcgagacgtttaaaacggggaagccactttacgttttgagtcttatcggattatcacttgcatggcaagtaatgtctttagggcttgtgggtcttgtgtgtttggcttcttcccttttctctaatgttgtcagcttctccgcgacacctgtagtaaacattctccttgtgttggcgtttcggtttacggatgccgacgttaaattttttaaggaaggagctctggtagctgggattcttggttttgcatcttatgtgtattccttgtataagtctaccaagaaaaaggaaatagcaagccaaagccaaacaactagagtatgattatattatattgatcatatgaatttatgtgtgtgtaatttctgttgttatacactttcatgtgattcatactgttnctcagtgtttaccatttaaaaaatgttcgatagcattcgtctatcttgtaagttgtaactacgccttataatggtgagtgtttcttcaaataaagctacaggagccgtcgaatacaaaaatattcaataatcacctgactaaagaattaaaaaaaaaaaaaaaaacagaaccttaccctgacacacactttgacacacacagaaccgtaccctaactcagcttatattcccttgcaagatgagcgcaaaattccactactggtggcgtcaatttgcgaaattaaaatattaagaacataaaagaattttgttgttttgaagcaaatgataaaaaaaaatagctcactctgataaaaactctactaatatattctgcagcttctctccccaatgtcattgcaacttccacatctgatacaccaaattgcaccatgattgaatccgtatctccataaataacctaaattcatcattgtcagtatcaagaagatttgtccgatctacccacctctgaccatttcttgtggtttgacttgaattgtagtatctctaggtaaaatcagcctcatcggtggaccttaagggtttctaaaggttcaaaatccttagcaaaagccaaaaaaaatcagaaatgttaaaagttttaagaaacgcaccttagataaggtttcttcagtctgtaagaaacgatgacgtgtcagtgttgggctgaaggcaaaaagaaaacaattttttttttagtttgtttgaagactagtacgtttctgaaacttaattatagaagtagtacatatactattcacaattagtaatatagtcggttttatcgtggctgttatttgctcaaaaattgaagaaatctaaagagtctacatgtgggatttgtcatggctgttatttgctcaaaatctgaaggatatacaagtgcaatattcaccaacaatagaagaaataataaataagcagaaaggaatgagtattaccaaagtgcatcgagatattgttgttccctttgggaagctggaatcccttcatctatatcaattggctgagcttacagaaatctgctggaattatcagactcttcctaaccttaaagaatcctatgtcaattattgtccaaagcta

SEQ ID NO: 33935 - DNA, 3019 bp, Arabidopsis thaliana landsberg
ataaccgtttgggtgattctcgcattgccctccacacagaccttgatggttatccatcagaaccttgatgtataatgccgacatcgaaaaaatgtagatgcagagaatagttgccgaagaaacaaacataaagaagtacctatagtttctctgcccacaacacacacaaaacaaaatgtcaagatggaaaattaaagttcacagttttgtcaacaactagaaaaaccagatcctcaaaatatgaaatccttttatagaaaatcctgcacatttttctgcttataagaacttatgaactgcatatcttcccagtttaatatgcttttgaatcagcttaccactccaatgcattggcctacccaagggcaatgatgatcaaagcgctcaacacagttgttgcaaatggaacaatgggagcatcgaggaggccgataaagcatgcatgtatcacaatatttaactctaacagaaacgccataaaccatgacttccttcgtcctaggaatttgaacagtgggtgtttgtcttccatcacttgatacagttgtatcatagcatagttcttcctctggcggatgcaaatttcttggaacgattccaggatcccgcgcagaagtgaggaagagaaggatcagtacctattaagtatttacatgattttaaaaaaaacataaatgaaggaagaataataaacctgcccaaaaaaagcataatccaaaagccacacaaaaagtgacaacattcaaaataatacttcaaactttatatctaagctagaggaaagaacataacaagaaacacagtaagatacatgttattgaggtgtgatttcaaaattttggtaagatttttaacttattgtcgtataattacaagtgaatcatactatgatgcatgtatataatcaacattcaaaacttataaaagagttgataagatcctataatatcccatgataagattataaggtatacaagatacatgtgaacaagaaatcaaatatcaaatgggcattggagaaaacttacaaagacagtaaatagaactcctgccactaagaacacatgtcccgcattgtttggtaagagctcgcggcgaagatgtgttgcaacaaatacagaaaagaaacaaacgggagttatgatgagcaggaaggtaaaaggaatagaccaagcatctggcccaaatatcaatctcccaccaaacagaaacttctgcaaaagaccaacaaaagagaagatgatcatcatgttcagaataaatacagcatagagcatgcatcaaaagctacattcacaagtggtaatgggttccattgaacaaaatctgacaatagactgatagagttcaccaaaaatgcaagttcatgcttggagagtgaaccaatagtgaatagaaagctcatcaatgttgtaaatatggtgatgcatcagcatggaaccaaaccaaatctaacaaatacggtatatatgttcaaacttagatcttcgcaatgataacaataaatgacactatcaacagtgatagagttgaaaaagattcgaaatttaaagccaccaaattcaacatatacagtcgaatccaataaagctcaccaatgtaatctaattgaatatgatgatactaatttcttcacacaaaagtacaatttccctcaaaaatgtccagattgttctcatcaaaacaacaaatccactcagaacattcttctctgcaattatttttcttaaaactaggacagtgaagtcataaaaatgtcgcctttaagaaaacctaaatgtagattccagaaaagggaaaagagtaaagcgaaatcgagacgccttaagaaagaaaaagaaaagcttacattacttcccttccaggcttcgaagacccgtccagccattagaatcagcgaacggatcagacactcctcgctacactctctgacgaattggaggatcctgaaaattttctacgccgattcatttcacatcagaactccgcccaaaacctaagtgttgtctctctagcaacaaaattcaggtgggtgagagtaatttccaaaacaaaattgtagtttttgtgtggtgtgatctcttctcttctcttctcttctcttctctctctcacaaaaggcgtttcgtttctggattgtgtctcccgagacgaacattacagttttgttccttcttttttttattacgcatataaaattatttttgtaatgttttaaaaaccggaccggtccggtcctgcagaccaagaatcgttcatgtggctgaaattgggatgaaccggtatctggtccggtttctaaaacatttagctgcaagatttattctgaatggctagagacatgtattcaaaacttataaactggatgggactacagtatatcacatgtcactagttctatgcccaaaagtaggcctgggagatcggttaaatcgggttaaacggttcggtttaatcggttttccggtttgttcggctacacaaaattctgccgaattgaacagaataaaagttcggttcggttcggttcggtactcgggtttttcggttcggttaataagatttattattcaccgaaattgcaccgaatattttttttctcggttttaatcggttaaccaaatcgttgtgggtcaattttatgcattctgggcttaacttttgtgcataatgggcttaagttattcaaatcctaaatatgtttttagattttaaaagcccaaatgttttttcccctgagatcaactcaagtccaccacccagatctaggttttcggtgttcacttttttaaggtgacggtaatacggatggagtaaagtgaagatggatctgtgaagtgaaggaaaacaacggtgatgtgtgaagaagaacaacaacgtaatagagaagatgtgtaaagaagaacaacaacgtaacagagaagatggatctgtgcgacgcggtgtcgagaagaaatgtagaaatccatgatataaattgctgccgctaaagtcgatgccggagagaattaatggcgtg

SEQ ID NO: 33936 - DNA, 1611 bp, Arabidopsis thaliana landsberg
  unsure (1)..(1611): unsure at all n locations
gatgttttgacatagcatcatcacataaaaacaacgtacgaacataaaagccacttaaaatatatgttattgtaagaatgtaatatagaataagccacaatatatgaagattggatgattgatgtaacacaaaattagccatgttatattgttattatcgactatatatacgcaatagaaaactattccgcatagcgtttgtccttagccttcactttgaagagaaattaaaaacaaaacaactccaaaacattgttactatctgtttcaatgattctcgaaattgattcattatttccttttttctgcttgaaaattatttttgacaagtaaagggaaaatgtttgtaaaagtgctatcgccaacgattaattatcaattaaattctttgatagagaagggatcaggttgctccagaaatttccaatatgcaaacagacacaaggtaccattcagcatttataatatattgtgttttgggaaatgtatgattaatcaccaaacaaacaaacgaagagataacgaaacatacagttaacctataaaacttcaaacttaaacaaaactaataataccgtggtatttttgcgtaaaatgtcatatatgtcatcattcaaaactgaactggtagtttattcaaacgggttacaccgatatatataaccacttttagctaaataaatgcaaaataaacaagtaggtttcttaattaatcagccaaaaaaatcagaagttaattaattacacaatcgtcggctctcatagccgcatcctatgccatcgtagtgtgtacgtatttatttgtaaacacacacatacagatacaggtatatgtccttaaaatatgattggtgattatttcaagattccaaaataacaattcgtttttgcattctaatgtctgaatagaatttattggaaaagctccataggaatatcaacatactttgaaggaaaaaggtaagataaaacggggaaagtgggtcccattttgaaacgcggttacatgtcggtggctccatagttctgacgtggcatatgtgacggtgtctgactgtctacactcgtacatccgatagaccgttactttcttacatcgaaacggaggatgtttgggtaaaaggataatagtaaaacgtggataagtaagttaagtgcacggtattcgagttcttgtgtgtggcggaccgtgacaaagaaaacttcacggatcgtgttaatttttggatcacatgtgctttttactatttcacattttcaaaaaaatcataacattcaatttatatttatgcacacaaaaaaaaaaaaaatcaaaatggtagttaaaatgcatttacttatatgactatatgattttcattcgacgtgcgatacatgaaaatgatttgcagtttttattctcaaagtatcttttaggttttctttattctaatcggaattttgttttgagtgtatggtatacagacacacatttgggatttggatttctggttctaaaacacgtgatgatcgtgtgatagaaaatttaattttggaatctacatgttcccttttgtccataggtcaaagaatggaccagggacgtnggataggtgattaatctaagctgac

SEQ ID NO: 33937 - DNA, 3918 bp, Arabidopsis thaliana landsberg
ccaaatgtgatacagtgaggattgcccatactaacacacgtcacattccagcttactccatcaacaacttgtctctgtctcaacaacagcttcacctttgttccctgacaatttcgtgggcacatcttgtgctttaagaatcggtgtccccatgtcaaccttaacctgtaccaatatcaatcacaaaaaataaaaattcaaactttaccttacccatcatcatgaatactactaaacctaatatgagacatcaatccaaatgatctacctgtccgtcatcttgaatttctggaacaatcaacccggcaccggtatgtattgtaaaactacaaaaacaaataaatagacacttaaggttacatcaagcttgactaaactcggaactctcaagtctaaacagatatttctcaatacagatagagatacctatgttttccctgcaaattctcaagctcagcaatgaacctagcaaagcatcgaactccattgccacacatctacaagaacaaaatcaaaagccaatgacttcgagcgcaacaacatatcaccagacattatcatcgaaaagccccacctctggttcactaccatctgaattgaaaatccgcattgcgtaatcagtaccattgactcctggcattgcaaaaatcactccatcggcaccaacaccgaagtttcgatcacacagcttcgccgcctgttcttgagtaatcttaggttccgatgagtctctgttatcgacctacaaaatccaattccaaagacgaaaaatttgaaaacatttgtaagaattcgatacatttcgggttaaattaccaaattgagaattcaacggtgaacaaaagtaccaaaatgaagtcattgccgaggccatggtatttcacaaagtgaagaactccggtttcttttttgtctagaaaactcgccggagaaaatttctcagcagtgacggcgtccatggaagctgctgcagacacacgaaggctagggctcttaaagcaatattctttctcaaagaaaccaaacgaaagagaagatacggatcctagattcctggagaacgcattcgacactctgcgcgattgtggcgcgacggagacagtgctaacggcggctatctccatggctgcttcagattatttttcttgttcaacgactctcccgtctcctccatattaaaagactttggagaaaacaccccattgttctgatattaaataactgaactccacgtcgtttttatcctcaacagtaataacatcatgtcgtttctttagtcaacatatatttaataaaggcctgactaaaaaagcccattaagaacttccagagcctctgtcgctccttcgctgttctcttcctcaggttctctctctctctctcatttcagtctctttcgctgttaaatattttctcctgagatttttttcttcaattccaattcagtgagcatttttattgtttctccgatctgaattccggcgatcaaattacgacagcgactaattcaacgttttaaattactctgtgtgagagaaatttgcggttagtttattagctacattacttccactttttttaatatatttttctgttacttttcccaccttttttagttatcttctggagatagatcccccccaaattgaagataactagggtttcgaatttcggaatcttattatccctctaattagattcgaaattcaatcgcaattctctcgctgttcataatctgggtttctgaatttcagctctggatatgcatttttctaatcctttatgcaaagcagtgtgtatcgtgataaagctagctcgatcgcaatgatcttagaaactcagaggaatgttgaattccctcatcggatcgttgataagcgtcccaggaaacgtccccgattgacttgggatgctgctccgcctcttcttcctcctcctcctccacccacggtaacgaattgtccacatattgtattggtatcaatggactgttcttttgttgttttcataagatactgcgaattgtgttaactagtaagaaattaagatttttatttgtgtgcttgagctaagtttcagctgatgtgtttttttctttcaggtatttcaacctccgttgtactatggtccggagtttgcgagtggtttagttcccaattttgtttacccaaacatgttctataatggcctccctcgtcagggctctcctccctggagaccagatgataaagacggccattatgtctttgttgttggggatactttgactccacgatgtgagtcttatgttacagagtctttcgacatcttatctgttacgtttcacagactttatcatggaggtttacattgacatgcctcttctattgtgcgtgcagatcaaattctcagcaaaatgggtgaaggttagtcatctcttgcgaaaatgtttatataatcattatgattagattattctgtttttcaaagtgtaggagaaatatgtttatttggtcgccagttatcttaatcaattggattgtattttggcaggtacatttggacaagtattggaatgctttgataataaaaacaaagaagtcgtggcaatcaaagttatacggtccataaacaagtatcgtgaagctgccatgatcgaaattgacgtgctgcagaggcttacaaggcatgatgtcggtggttctcggtaagaatattctttcctctactatttcttcgctagttttaattttattacatttggtataagcttttcaattccttgcagttgtgtgcaaatacggaattggtttgactatcgtaatcatatttgtattgtaagtgctgttacctttatttgacaagtttgaggggaaaatgcaatttcttcacgcccaaatgttatgtgagttaaaagaacttgcgcatgggtttaaatggtttcaacaggtatttgagaagcttggaccaagcttatatgattttctccgcaaaaacagctaccgttcatttcccattgatcttgttcgggagcttggcagacaacttttggagtctgttgcatgtgtgtggaatattcttgacccattcttctatatagtagtccattagtgccacaaatcatttttcttaactttttgatacaagacttaggcgttaatagttattacttaatgttctttcgataatgcaatttccatggaatccatattgctcagacagttatttctggagacttttgttgactagtgtactcagactttgctcattccattctgacagatatgcatgatttacggctgatccacacggatttgaagccggagaacattcttttggtatcgtctgaatatatcaaaatacctgattataaggtgagcaatcaatcatctccaagctggactcatttattttcatggctaatatgatatccatccatgaaggaacttgtataactcttgacccttgtcctgtgtgtggtcatgaaaatctagtttctatcccgacccacaaaagatgggtcatacttcaagaatctgcccaagtcaagtgccatcaagctcattgatttcggaagtacaacatttgaacatcaagaccataactacattgtatccacaagacattaccgcgcaccagaagttatcctaggtaaacgtttatgactctgacacatctacgtagatgattatttttttgtgtagtcatggtatttaagagtttggaacgtttattgcaggggttggatggaactatccatgtgatctgtggagtattggttgcatacttgttgaactttgttcggtgagtaactttatgtttgcatatcttccggtacaccaccctattcatctcaccatgtctgcatcaacgttttctctggattaaaccttgcagggagaggcgcttttccaaacgcatgagaacttggaacatttg

SEQ ID NO: 33938 - DNA, 4128 bp, Arabidopsis thaliana landsberg
  unsure (1)..(4128): unsure at all n locations
atagttaatgccgacaaaaatagggatatatcatcaatcatccaagctgtgtgtggagatacatcaccgggtagtacatgtgaaagacggtagcggtcaatgtcagaagaaaggagcaggtgagtttgtacatccacagtgtaagcctggtcatctgaatcttatagtatctcatcatctccttaggtaaactcaactacaggtggttcctctatggacctgcgacgtttaggaacttcgtctgatgggtcaggaatcaagaactcgtcagatggggtgaactctagattctcggtagaaataacttagatgatgtgcttgtttggtaattggtagaagtatgtagcaccatctcgtcccataaattcgtacacatcgcctgacttgagaaaatgagtatgtatcaagtgatggtggtccaataactcttgtaccttcttaattgtggtcttgctcaagtctagatcacagcgtagaaaaagaggagtgagtgcaataccaatagagaggctttgcgaggctgaggtaggagcagtaatcttcatcttcatgaatgcatcgcatagaatcgcagcgacattagcattaggttctggaagatgcttgatgctatagaagtgcatcggtaattcagtcctagtcagatggtgccagagctttgaagtacatagaatggctaataagcttcactacacagcggataactgggttccagatgtgagttatctttgttgaatgtgacttgtatgatcctctagcaatcttaccccaaaaggcattggcaaccgctgaagacaactttgcaaaagcgatagactctcccttggtgaacccatacatatcacagacttcaaacaatgatttggtgtagtgtttcatgtttacgaaaaatgtgagagttccttcactcgctctaggctccatagggttcctgtatgtgacgcgacaagtggctttgaagtccctcacatacttaggatacacataatattctagtctccacagtcttcccataccaagcgtctgaaacactgtggtaacatcttcaagcaaaccaagtgacgatagaacagaatgttttgcaacccggattggcaaaatcttaatgtgtttcatagcagctaagcattgggtgtcatggtcatcccattcgcccgttacaggtcgcttgttaggatcctcttttagtcctggagcggaagtacttcgacgtggtctagaggttcccgcgacttcattcgattttcccattccttcaaaaagagaaaagtggtgtcaaaataaaccagaaaccgaattcataagctcaatcattatgtattagtcaagaaaactaaacaatgcatcatacacatctagtcaagagcttaaaaattcgttctcttcacattctaagaacatgtccgttttgcaacaatggtgaaaaattcaatcttcaaatttgaccttaatccagcaattaaaggcacaaataggtccccaagctatcctagacaagaatctagcatcaaacaactcataaatatcaagggatttaagaataagagatttttttttttttcacctttctaaaacggaaccaaaaagagggatttcgaactcatacctttgcagatcagaaaacccaacacaagatatagaaagagggcaaaaaatcgactgaaacagacaccaagattttgaaaatcgagcaacaaatgagaaagttatgaatttctctaagtgttcttcaatttttttaacgaagaagatgaagaactgttggtcgatttcgttttttaagtggcaaacccggttcaatctggtctagtttggttcattggcaattttcggttaaacagaattgaaatacttaccctggatcgatcgatcgataccaattcaattgcatgctcaaatcgcaaagctgcttcccggaccgatcgatcgactacctggatcggtcgatctgttgccattggtcccgacgactcatttctggatcgatcgatccctttctggcggatgtttctgagctcgacgtcacgatcggatcgatcgatcccaccctggcggactttttttcagcttcgatgtcacgacaggatcgaccgatctagtgttgggatcgatcgatctaaacctggcgggttcctgcactcaaaaacaatctcacaccaccgtcaaatataaagactctatcgactgttgagtcaataagtctaaactccacatcggagcgaaacaaaccaaaatcaaagaaaatgaaagaagcaaaagaaagtatgtacaataacttgtgggttgcctcccacgaagcgcttgtttaatgtcactagcttgaccggattcttgtgaatcaatgtagcctgcaaaactaagggacctaagacaccaaaaatgcaacatatcaactccccccgacttggatctttgcttgtcctcaaggaaaaacaaaaatctttatcaagagaagaggtttgaaaacacgagaactcacattttcttcgggatcatctcttatcaattgcctgcaaatcattatcacaaaattcatcaacccgtactagactgtacttcgccataaccgtagcgacaaaattaaaccccgagatctaaaagaactttcagaattaaaaaacttaaccttttaacattcattaacagaggcgtgtactctcacaaacggggtatcgaacacgttatgggcttggtcaaaaagggataatatatggtggctcaaagtgtttcgggttctcaaatagtataaacggatgcatgtcattatgcgaaatcacagtgagacatagaccaattaggtggtacttagctccccttaagtttggatcaaaccaaccaactcactttcccaagcgaatcaataagttcctatgatgcttatctatatgaataataataactcaacatttctggttccttcattctcctttcccgtctttttttttctttttttttttttgtattaaggaggagtggaaccggtgtctaacaaaaatctgcatcaggaaaaactcaaacaatgtaacatctcatacccataaatacaagtgttcaacctcgaaaccatagtggctaaatatcatcacatatgaacaaccagcaaactacaactcactatcctaacagaaggaaagttatatcggtccgtatacttcgtagtttttgcacatggatgcatatcataatgaatatataagagtacatgaggatacaaataatgggtgggggaacatgtgtggtactagactaaaaatgactacaaccattaagagttatgcaaagagtgataaaaatgatgtaaagaaaactctgaatgtatgatccattacatgattttcaagcccctaagtgagataaattaagtccagattaagttcaaatagataagagaaagcccaattcatccaaatttcaaagagatagggactattataaagcgatcagttatggattttcctaacattccaagttatcgaatagtgctaaaatggtcacaaggtaatgaaagcatgcatggtgcaattctctccaaaaacatcataactctcaaaagaaaaacagactcgataaaacagactcgatgactcaaaagaaaaacatcaaaatgactcaaagaaatatcaaaaatgcaaactagattagtagacaagtggcaacctcccccgacttgcttcacaccgacccggtgtgaaaacatctcaaagaaaaggtgccacagagacccaagaaaatcaaaatcaaaataaaataaaaatgatatatgacaagggaagaagatgtggtattgtagtactcaacgatggtggatggggctcttgctagcgctctgtggctcgcctggctgtctcctgctcctgcctaagcgacggcctgggagtgctctggtggtggctgcgaggtagaaggtccactatgtccagcagcagggaccaacctctcagcactgtcgatcctcaatannnnnnnnnnnnnnnnnnnnnnnnnnnnnatctactcctccttggcgagtgcatacacgagcctgatcctagatatggctctctacatcttttgcatcatactggtgttcttctttgtcgatgctatcatccatgccatcggctgtgagatatcgtcacctgctggtgg

SEQ ID NO: 33939 - DNA, 794 bp, Arabidopsis thaliana landsberg
accatttaatttacagaattactcgaacaagaattcatgtggtttttaaattctacgtactacttgggtttgtgtgttttgttgtatgaaattttcacctcgagagttcctgaaaatttagaaacagccctaaacaaataatctttattacatttcgatttcaatagtcccttttctttttgtagcattgcttaagcacaatattgtagaggcaacgccggttcaaaaggtgatatatgatacacgttggtgaatagcgaagaaagtatgtactttggtaagtgtgaaatatgcaattatctgtatacgcaaaaatagtaggacccttaattgtaataaatgattgaaagacagcattagtatactacagtttctttgtggggttacgcggcactgggactatatatgccccagtctataattttaataacttatttccaacatttattgattacacatttacgaatttttctcaagaattgatattttctttctgttatttataattcataatatgtttattaaaaaaaagaagggaaaatggctcattcaaaagacactgtcgctctgttgagtcttcatttgtgaacatctttttgctttggttttgatattgacgtggttagtagtttacactcgtttagattttttacatgatcatctattatttttattgtgtgatcaacattgttcctctatttctattaagacacaaattaataatgttactgaaagtgatgaattgctcttttacgaaagctacaaaacatattatggccgtggtggtttggtga

SEQ ID NO: 33940 - DNA, 2484 bp, Arabidopsis thaliana landsberg
  unsure (1)..(2484): unsure at all n locations
aaataaatgatttatctagatataatagttgtatcacattttttaggggttggttcaaaaatttaagcgtgagtggttgacttgactttaaagatggaagaggcgtgttcgacgggatatgttttaagtgagatcccattagtcattgacctcgacttactttagttttcttctcaagtctttgttgttttcttcgaaccataagatacgtcaatttcattcgtacatatatagaagataatttagaagtagcctttttcaacgacaaatattttgggcttgatattgtttgggccgaaatatttggcccaaagagccgctatagctaatgcaggtttatagatagcagctgaggctgaaagtgaaagacaaaaagcattaggaaattgaagaggaacaaaccaagacagtgagaaaccaaagaaaatgtcttaaaacctattgtagacttgtagtgtttcgaagataaaaaactaactgatgataaaacagagaaacaagatgtacaagaatctaagattctaagagagtcttggataagataaaaaccattgtgaaacttgacccacaagccatcgatatgactatatgagcttacaaaatgtacaaaatattagattcagacacaaagactgaagaacaaatgcacaagaaggcaacaacaagaacagaaactaaagacggtttttcaagacatagattttctccacctagaaggtgttcttcctttaacaagctttgtcatcatattaccaggcgtttgagtcacatactcaaaattttcaccttctccattattaccaaactcttcaccattcgtgttttccacaacgctaacgcttaaaccgctcctaaatcccaacttcttccacctaaaaaaacctttattcccactagtacaagttcctttcttctcaaccagcttatgtaactgtgtttgcatcgcttcacactcgcacttaagcttcgccatatcttctctcaatcttcttatctctgcttgctgaacattaatctcgcgtttggacgtacaccgcgcaggaccagaatctgagtagtgtgaaccagaaggattagggctgctcctaacgccactgaacgatgaaccactccattccatattgccgtggctgcgatgactcagctttgcctgttcagagaacaaaacttgaataatagttctaaccggtaaacgatcgttctgttcagcgtgaagagatgcctccattgatagctgagtgctgtctattagtccacaaagtctcttcctttcttgcttggtcactttaggatgtgcctaagtaacataaccaagattcaatttgaataaaacccatcacaaattatatatgcttcaaattttcgatttttttacttctactatgtaaaataaatataaatgtgagacgggccagtccattcattgccaattaattctaagtcgtgaagctcattgaacttaacatttaccttgagataagtgtcaattgcacggtataacccatcttcggttacacgagcatggttagggagagcttccacgagagatataaactccgagagggttaaatcgccgtctaaggcggcttctgctaagtaagagtccacgagcttcgctactttaattagggaagcaccggatttaactccttcgttgtctaagccagcaaatttcttaaccaaccgagtcatgagctcgacatcgagcaatgtcccacacgtgtgagtaaaggaaggtatcattagatccttgagtgaagcttgatcaagctgccatgaaatcctcgcctcgagctccgccttgtaatttgcatctgctccgaccatgttcgcggttctgagtagacggaggaggaaatcacaaggaacggaatctctctcaggtgggatgattccgattagagtttcgacgaaggaacgtttcttcatcacaaacgcagtaacagagaagctctctgattgctgctgcggctgcggttgctggtcatcggggtttaggacgacgtcagagaggtcagggagccatgtggcagcgtaatgaacgatgatggatccaatgagatcaggacgaacgccttttgatttgattccggcgatggttttgacgaaataatcaatgtcaagaatgcaaccatcgtcgaaccaagaacactccatttttctggtggaggttgacggagatttggtggagatggtggtagattccgnggaagatgttttttccatgtctttggattttttaacggtggaagttgtaatgtgtgtaaagtgggtttagttagttttatagagtgtgtaagcaattacgtttgctctgttcttgaaaagtcttacattgaaacgtcgtcctctcatcatgactcaaaggtacaattccaaaggaaacaacaaattcttgccatttcctataaaaaaaatcaaaatagattttagaaatccaaaaacaattatgagatttttgtaggaaaatttaggaattttcag

SEQ ID NO: 33941 - DNA, 5964 bp, Arabidopsis thaliana landsberg
tctcatcatccatgctagcgtagaagcagttagcgcatgaggtctatctaggaagagaggagcatcagtagtgtgggactcaggtatgggtggaatactcctttacgtgcacaatcatcaaaagaacaaacaagcgctcggcgagaaactcgtggcttgctaaaccgtcaaatagtttttggaaattttaaactcttatttatgaaatcaggaggtttaggaggaggagatgagtaccttagccgtttaagaggtggatcaaggagtaacggtgcagtgggtgacgtgactctagtgcctgaagtatcagcagtgaactctacacgaaaatcagctctaataaggaactctggctcagcctgtgtggggtgtcgatcgacacctagtctaatggtgaagcaaagagaactccggcaacggcgccaaatttgatatacctcaaattttcttaagcttactccctcaaataagagatcgtcgttagtacttaaggatcgaattccactgagctctcgatgttcacacaatagacttatgattttttcaattaagctagaccaatagattataaaataagaaataaacaaaagcaataaatatcaagatgtaaatcagatgggaaaagagtcaggtttagggtattctcacgagatagatgattagtagatctagtgatagctaggttgttatcgaaccgtttttaaactcaaactctaattatggaataaccagtggtgttccgcgaaactccctatgcctatagctaagaataaccggagaagccgagagatctttaaactaaacatgcattctaaacgaattcaattgttcaccttagtagataggccgattcttattgcacacctataaacacggctcatcaaataatatatccaactacagatacctatgttggacatatttattgtctggattcaagttctaggtgatcaatatagatctagcattaagaacaattaaagatgaagaattctatagataacctagcaggggggcgatctattaaaccatataaatccctaatgagaaaccctaaacctaacaagtggtttactaagacatgatcaaagaaaaacaaatcatagtctgaataagaaatcaataatagcaagagaaagagtaaagaagatcttttccaaagagagtctccatagggttttgctcccaaagtacaaaagagatgaggagaatagcctctccaagcttagggtctcaacattgacctaaaaaatatatatgtcttaaaaacgtgttgggccttcattaaacataggcgaaagttttgggccgaatttagagatcttcaaaacgtcaataagttacgtcttcgaattgtcgtcaggtattgatgtcgctcgacaccaggagtggtgtcgctcgacacctacgtgcattttcgtctccggattgcttctacagcataaattctctgttttactctagaatgctccataatctccaaatgcatcccaaatatgtaatgacctgaaaaggactagaaaagactctaacacctatacctatatcatacctctaattggtagattattctaaataacttcataaaaataattttgttgtaaaatttacaaaagggttagtaaaaagggtctattagtgcgtgaatgatagttttgtagattggatatatcttggtgaaagactatgtcaatatgaacaaagtagagatcatatatatgcagtatgaccagggatgttaaaacgggctcgaagcccgcgagcctaaacgggtactgggtaacatttttaacccaataccgtttatttaatctattattatacgggcttttaaaatacgggcccagttatgcttataacaaaacaggtttaaggaaaaatacaaacgggtagcccatttaattagttttgctccactaaacaaaactagtcgtttaaggttaggtacgacatacacaacacatgaccatgatctcgatttcttgaagttgtgaaagtgaaattattcaagaaagaatttcatcaatcaatttaggaactattgcatgaacccataagcgatttggattggtttgtctctcttcgatttttcaattttttctttaattgaaaatttgatatatatatatatatattgagattatatctgttgtttaatggcttagggcattcggtcatgacggagagagatctcaaaagttttcatttgtaacttgtaaggttagattctaaacttaaaatgatgaactttagattctctttatcccacttctagtgtgtatttcacaaaagtatggagaattgagctatgagaacagtttttggtcctaggattgttagagtaagcttgaagataatgacttaagttataagttatttaaatataggattagattaaatcttaaggagatatcttaggagttaagttaggagttatctaaccctaatcctattgttatttggttttaaatctctatatatatgagtcccaaagttgtggtgaaccatatgagttttagagagattaagactttgagattgtttaggtttgagttatttcctaagcttaataagagagtaattcttatatatctttgagttcttaatcttctttgaaactagatttggtatcagagcatccaggttttcgatcaaagcaaaggattgaaaacatgagtgagattattgcagtaaacaacaaatcaaaagatggaggaggatcatcgtctattcaatgtccgatgttgaataacacaaactatacggtatggtgtatgaggatggaggctgcactacgagtgcataaagtctggggaacaatcgatcctggattagagggcgaagagaaaaacgacctagcccgagcccatctcttccaatctattccggagtctcttattctcctagtcggagagctgaagtcttcaaaggcagtatgggataagattcaatctaggaatcttggagcagaacgagtcaaagaagcagagctacaagctcttatggcagagtttgacaaactctagatgaaggatagtgaaactattgatgagtttgcagggagactttcagaaatttcaactaagtcatcatctttgggagaagatatcgaagaaacaaaggttgttaagaaatttttgaaaagtctaccaaggaagaagtatattcatatcgttgcagctcttgagcaagttctagacctcaaaaacacaacattcgaagacatagtaggaagaataaagacttatgaggacagagtgtgggatgatgatgattcagtagaagaccaaggaaaactgatgtatgcagattcacaatctcagtatgtttctcacgatggaggtagaggacgaggacagacttgtggtcgtggtagaggcagaggacgaagtggttacaagcagagagacaactccaaagtgacatgttatcgatgcgatagacaaggtcattacgcctctaactgtccagataggctacttaagctaatcaagctccaagaaaaacaacaagagaatgaagatgatgataatgatgaagcggagtcactgatggtacatgaagtggtctatcttaatgaaagaaacatgaatccagagatccatgaggcatgttcagacaagtcttggtatctagacaatggtgccagttaccatatgacaggaaaccgtgactggctctgcaaacttgatgagttggttacaggaaaagtgaagttttgtgatgattcacgtattgacattagaggaaaaggatcaatcaagtttacaggcaagaacggcgagtctaagatactagctaatgtctactacataccggatcttaaaagcaatattataagcttgggacaagctactgaagccggttgtgatgttagattgagagaagactatttgactctacacgatcgtgatggaaacttactagtaaaagcgacaagatcaagaaaccgattatacaaggtagatttgaaggttgagagtactaagtgtctgcagcttgtggcactaagcaattcaacaaagtggcatgctcgtcttggacatattaatcttgaaaccataaaatcgatggtaacaaaggaactagtagttggaattccaagtgtaccaaaggagaaagaaatctgtgcatcatgcttactagggaagcaagcgaggcaagcgtttccaaaagcaacgagatatcgtgcttcacaaatactagagctaatccatgtagatctatgtggacctatctcaccatctacaactgcacaaagaaggtatattcttgtcctaattgatgattattctcgattcatgtagtcattcctttttaaggaaaagagtgagacatttggaaaattcaagggatttaagacactggttgagcaagaaaccagagagaagatcaagacattcaggacagatagaggtcgagagttcctatctcaagaattccaagcttattgtgaaaaagaaggtatcaatagacactataccgcgccatacacaccgcagcaaaacgacgtcgtagagagacgaaacaggacgctttagggaatgactagaagtatcatgaagcatatgaacatcccaaattacttacggggagaagcggtaagacatgcgacctatcttatcaacagagttggaacaagaagcttggaaaatcagacaccatatgaagcgcttaagaagaggaaaccaaatgttgagcatttgcgtgtctttggttgtgtgagttatgcaaaagtttaagcaccaaatctaagaaagcttgatgataggtcaagaatacttgtgtaccttgggacagaacccggttcaaaggcttatcgacttctagacccaacagcaagaaagatcactgtgagcagggatgtagcgtttgacgagagcaaaagttggaagtggaatgactcagacttactctgaaactcaaagagaaccaggaatgttcacaatctgtcacaattaagtcagaaacaatgaagaagcagagtaagaagtcattgatgaagaggttgaaaacagaagagatgacatagtgatgtagatgtctatgaagaagaagacaccaacgtcaccaataaccctctgcaaatttcagaccactctgctccagtagtgacacgatcgggaagacaagtcataaaacctgcatatttgaatgattatatactgatggttgaagctgaaggagaaagactgttggtagtactcaacgatgaaccatgggatttcaaggaggcaaataaattcagagaatggcgagatgcttgtgaggaggagattatgtcaataatcaagaacaaaacttggagtctagttgatctccctgctggaactaaaccaatcggtttaatttgggtgttcaagatcaaacgcaagccagatggaaccataaccaaatacaaagcaaggcttgtggcaaagggatatgtgtagaagcatgggatagacttcgatgaagtgtttgccccagtggctcgaatagaaacagttcgttttatcattgctttagcagcaactaatggttgggaagtacatcatttggacgtgaagactgcatttttacatggagaactaaaggagaacgtatatgtcacccaaccagagggatttgtaaccaagggaagtgaagaaaaggtatacaaattacacaaggcattatatggactgcgacaagctcctcgagcatggaacattaaactaaatgagattctgaagaaactatcctttgaaaaatgctccaaggaaccctctgtgtaccggaaacaatagggtaagcacttactccttgttgtagtttatgtagatgacttgttggttacacgttccaaccaaggcaagataaacgacttcaaaaagggcatgttaagtaactttgagatgagcgatctaggaaaactgacctattatcttggcattgaagtacttcaagaagaagaaggaatcagtctcaaacaagagaggtatg

SEQ ID NO: 33942 - DNA, 1288 bp, Arabidopsis thaliana landsberg
  unsure (1)..(1288): unsure at all n locations
gggtgaagatcaatgggatccattcctgctatcttcttcctctgctacacctgagaaaccctgaatccctaattcttcagtaattagtttccaaagcagttaattttgggcggaaaatgtggtcttcgagaactctcaagtatattttcaggctaagacctgaaccaatttcttcctcatcgtcttctgcgtattcgctctctcgcatcaccggaggttctccaattccgtcgcagcagcaacgatcgattacctccacggcgccgcttaatggatggatggattcgatcaaaggtgtttttaccgggaacaaggatactcctttagaagaatcaaatctacccgttgaagctttcactcttctccgtaagtcttacatggatacgtgtgattgactgtaatggtggatagatcgatatactcatcaaagctattctctttggattgaaaattgaatttaggatttgctgatgaattgaagaatgctagacggttagggaaattcaagcagtacattgtgggacgaagcagcgaggccacttttgctgatgcatttgagaaacaagaagctgttattagatatcttggagctcttgatgctacatgagaggttggtttctttctagcatactagagtccagctatgtatctgtcgtttctatcacacacacatgttttgctaacaatttgcagaatccttgaaaacaagaatttttttttggtacgttagtcaatgtctgactgtggcactaggtttcttgatgtgtagaatctccaagcgagtcaaaagcaagatgcggctaaacattgcaaatgcactataactgatgtggagaatacgctgtccaaatttacnnnnnnnnnnnnnnnnnnnnnnnnnnnnnnnnnnnnnaaagaaggaggcaaaccgttaccaaagaatatgggagaggtattcttctcactttgtatactcatatgcttttttagctccataagctcctatgtatgactgtgtggtcacgtttctcatttcttagacttagaatagtgtctaatgagattttgcaataacacgctcttcttcgttttgatcatcctctaaaaaaactttaagtttctacacctaactaattcccggctcaagaacagggttcccttataacaagagctcgtttgtaacttggtgtttttggttagatttgatgttcattggttagaaacaggagtcatcttgcactatgttggtattcttaagattttagtttacatttaggcagnttggtacttngtggtttactgtttccct

SEQ ID NO: 33943 - DNA, 644 bp, Arabidopsis thaliana landsberg
agctctgttgttttctattaacacagatcgaatatttagcattacgcattggcctttattttttacgggttgttcttggcttgttgataggtgttccccttacttattgagaaattcaagtatgaggagcaagcttacatagtctggcggtttctctgcagtattcctgtgaatatgcttgctgtgttcttgccatggatttcttcttccatttcagtagatgaaagcaaggagatgcaaacgtgcttaaagaagatagttccaggcgagaagctccttcagcaggtaagttttgaattaagatccaactttctaagttgaaagactttggcttgttgattgatattttccttttgaaggttattttcacctggctgggagggaaaagcaataccgtggcttcgtgtcgcattgaagattctatgttccagtgctgtctagattcttctagcagcatgcttccttgtaaagcaagtagagaacagtgcgcatgtgagggttccaagattgggaagagaaagtacccagagcttactaactttggctcatctcatactctgcacccagttgatgagataaagaaaagacacaagtcaatcaacaaggagatgaaagaaatagccgatgaggctaggaagattcag

SEQ ID NO: 33944 - DNA, 807 bp, Arabidopsis thaliana landsberg
tcaatagtacaatatatatagttatttgtgtggttagtattttcttatgccataattaaaattagttaaatataaacacatacatgagttaataatagatactgtcaaaaagtatggttgaccaataaataaaaccaaatgaattcaaccttacaaattataggtgatccacaaacacctaacaaaaactaaaaagtttaagctatgacaaaaattttgcaagtgttatgataatcatatatgttaaatcaatgcccattgggtgcaaaaaaaaaaattaaaatattgttttgatatgaaattattatgacttaaggtgaagtgtataaaattgtttattatgatgaaatagatagttaaactgtattgcagaattgaatgtataagataaaatttgttttttgttcttcttttaaatactaaatcaaatatagaaaaacgatttgaattactatttagaatttaaatatcatcgataagattgagtgtgtataattaaaatgtacaataattataaaatagaatacataaacttttttaaaacaaaactattaaattaaatatcaaaaaatgtataaattactagtttactatttaaaattcaaaatgtatcaataaaagtttacatttatgggccttatctagttcaaaataaaacaaacagattttagaaacaaacatatcacgatgttgaataaattaagggctgctacacataaattctgaaactaaacacgtgttttaagacaaatgaataatgggcctctcgttaaagcccgattaaaataaaagtgaattggaaattga

SEQ ID NO: 33945 - DNA, 3979 bp, Arabidopsis thaliana landsberg
  unsure (1)..(3979): unsure at all n locations
cccgtcgtctccgggaacaacttcaagaagaagttcctgggacgttgccggatctacaagaagactcggcgttggctctgcaatcgacactctctgtgccaaacagggagcagtggtgttgtgtcttatctccaattcccaaacctaaaaccgagtggtatgttttcttcctctattttattctagtgttcttagcctgtgtagtgtaactcgtgttatggtctgtagaatggcttgttagggtttgtgtaacatagtaaaatctgcctttgttggagttggatgtttgttagggtttgtgtaacatagtagaatctgcctttgttctaaactcgtgtgtgatcttgttaagttcttcactttgtctataatcttgttaggttatttattgtgttctgtggtgaatcatgaacataattgtggaacatttgttgattgttgaacttagcatgttttcggctttgacattgaggatctgtctttgttctatacttgtctataatcttgttaagttctttattgtgttctgttgtgaatcatgaacataattgtggaacatttgttgactattgaacttagcatgttttcggctttgaccatgaggatctgtctttgttctatacttgtctataatcttgttaagttctttattttgttctgttgtgaatatgaacttaattgtggaacatttgttgattgttgaacttagcatgttttcggcttggacattgaggatctgtctttgttctatacttgtctataatcttgttaagttctttattgtgttctgttgtgaatcatgaacttaattgtggaacatttgttgattgtatcccattgcatgtttttggatttgacattgaggatctgtctttgttctatacttgtctataatcttgttaagttctttattgtgttctgttgtgaatcatgaacttaattgtggaacatttgttgattgttgaacttagcatgttttcggctttgacattgaggatctgtctttgctctatacttgtttatacttgntctttactgtgtgatatcttgttatgttgactattgtgttctgtgtgtgatcttgtcggcttatacttgtctagaatcttgtagaatctgcctttgttcaattatatagtctactgtagttgtagtgttttggattttaaacatgtttactttctgtctgtgttgcatgtgtttggaggtttactcgcgacagaggatctaaattggttagaaagatcacacggatttttactcaaaagttcaatgctccctactataattggtcgtgtgtgccattggataaaagagaaagattgtttttagagtttgcggtaagcttcttgtatttctccaactttcattagactgtactatttcatctgtcatttgttcactaacttcacactttttttgtagaaaactcaccactgggatcccttcataacagggacagtccaatactacttcaatgagatcgttaagaggcgcttgaaggacatggttagcaccgcaaggagaactcgagagcagcctccatggattggagaaactctgtggggaaccatgtgcgactactgggacactgaagaggcacagaaaaggagtaagacatattccaaagctcgtttctctgaccgtaacggtctcggtcctcacgtccactactctgggccaaagtctttccaagaaatccaagatgaattggtaagtgtttctgcaatcttcccatgtgttttagtgatgttcgtttaactgtgtgtgatgtttagtctgttgatagtaatgaagcttgtgatctgtgtttgcaggaagcaaaaaatgggaagacctgtccctcttggtgaggtgttcatccagacacacactaagtcggatgggacttatgttgatcagaaggcagagaagattgctctggcgtatgagcagaatgtgagagagaagctgtctgaactagaggcggctgcttctgctgtgtctgatggctcttcacgtcctcgggatctcacactagatgagtatgcagccatatttcttggggtaagatgttctttgtctttttcagagtgttagagacatttaggatctgtcactaattatcttcctctttatttcttgcagtccacagaaagggatgcaagaggcaatccttatggacttggctgtcttaaagaaactctaggcagtgccaactgccaactccccggagactcaacctttaaagccttagaagaacggctgcaggaagctcagcggcaaattgaagaacaggctgcatataacgagaagcgagatgctgagattgctgcccgagaagccgagacagcccgagtcacagctgagcaaaaggacaagctcgagcacttgtccttagtcgagaagtatctccgccaaaccgatccgcagttcttggacttcattgccacacactcttccacatccacaaagcgtatcccaattactccaccatctaatgatccatagattttaggtttccaaacactagttgtatctttcaataagttgtatgtagaaacaagataattttatgttttgaacttgattttcaatatatgagtagtgtcttttcatatgttatagcatatcaaataacaaacaagaacaattgatgactttaaacaacaaacaagaaacccaacaattgatgaccaaatccttattcggaccaaactattagtcgcaaaaaactagtaaataagtagcaatttagttgcagcatagtcgtcaattagtcacataactttaggacaattatcagactaaccaaattagtcataatctaatcggaaaacagacgtccaatagtcgtatatacttatacgactatgatatgactaaaagtttcaaatccttggtaaagtacaattaatcgtcaaacagtcgtacaaaattttacgactattttacgacaactggaaacatacccagggtttagaatatttaatcgcaacgtagtcgtaaagtcgtcgtacgttattaacgactactaaacgactccatgttctgacacactctgtacagtatgattaatcgtaagatggtcgtcaagtagtcgccgatttagtacgactacgtaacgacgaacttgtactgtttaggctattgtcgtattattgtcgttgaccaacgactaattaacgactcctatacttagcgactatggattactgactacagtcattagtcgcggattagtcgtattatcattatttacgactacgaaatgactgacttgtaggtcgttaatcgcctgttttcttgtagtgttaagacaattggtatttatataacaactccaattaataataacgataaaatatttttataattttcctaatttatgagagtcgacaaatttaccatgttattaataattgagttattaaaaatatattaccgtatcttctagattaataagtgacttgaaacgtcgtgactattattactattttgaaagttgcgtctaacctgcctctacggtgttttagtctttcttatatatatatcgttatcattagcatctcataaaatgaataaaaaaaataatttaaaagtttcagcgaaatgatggaatcgtttcatgctcttactctgttgaaactgtctattacaggatggtgtattcgtgtgagagttgtgcggacatttttagttccgctggttccatcttcaaaggttatgggtttgattctcgccgatgaacatgtaagttttgactgtttggttatgaaaattttaggtttgcatgttttagagttttgattagtacgtttgatccgtagggtatgactattgaagatactgttggatacaagatgtcggatcactataaagattttattattgaaagagaatgggtaacgataacgagttttggaattgttgataaccaaagttctgtcaggccaacaactcatgccttcaaaatttcgattgtctgtgacactgtcgt

SEQ ID NO: 33946 - DNA, 854 bp, Arabidopsis thaliana landsberg
  unsure (1)..(854): unsure at all n locations
cgagatctctctactatctttctcgcttctcaaggaacttatttgaaccaaaagtttggtcttaataagtacaaaaaggcaagaaaggaatatcaacagtctcagttgaggataatggtgtttagtcccaatgagtgttttcttgtctcgagaagtcatagaggacagctttttgttaatggagacgttatagttccaataaaccagataatttctccaaatccaaaacaagttagtgaaaaaccagaaacgcttctcactttaaaccagccaacaataaatgaataaagcccactaaggatatactaaaccagaaaattcattcgggtcaatgagaaagatctaacaatttaaagaaaaaggtttggtctagcatcaaagatggaacataggcacaaatgcatgtgtatatgtagttatagatttgtgtcttaagatcattatatgttatacatgaactaggcactataacatataaattagcttatagtgtatacagtatgcatatatgtctattcattgaaacaatagtatgtagagtaaacctgaagctacacgatagattcatatttgtttccattatcaagataaagagtttccaagagttgcaatagaaacattttaaaagcagaaagcatcacataaaaccagataattgatagaaagaaaaagactatatatatnnnnnnnnnnnnnnnnnnnnngatctcagatggcacaagtttgaaagatcatcaaagaatgatgncaccttgatccattttctcgagttctttttgtgctctctcgagtttctacgtcagaatctttatctcttggctgattcttcgtggagtttattcgccttttttccg

SEQ ID NO: 33947 - DNA, 1787 bp, Arabidopsis thaliana landsberg
  unsure (1)..(1787): unsure at all n locations
ctcaatgcagtcctcgatggcttctgcacggtgagactctgatccgtttagagactttgacttcatcaaataaagagacgaagaaacgtttctggaagatgacggtgtcgttttggtgttcatcctgccgaatgatatataacgaaacgttttgccaactctgtctccaatactgcggagtaatctcttcgtcgttgccggcgagtcactgaagctgaaactgaatattccaacaacgaccctcctgcgaccatgccgtgatgagctgtgtgttgggaagatcagttcgtcgtttgcttctgggtccggactaaagcgtactcttttggatgctcttcgagacatattcttgtctgaaactttatcgagagagagacagagagaaaaagagaaacaaaatggagacgtgagggattttgaagatttatttatgggggcaagtcatgtataatgtttggggaggaattttattaaggaaggaaatttgaacaagttacttgtttatacatgtacaactacacgtaagttatttaaccaattgatatgaaatggtttccaatatctagatttgtttaattgattcttgatttttttccattatagcttgtagaatttctacgaagatgatgcgatttgtaaaaccacaattatagtcaaaagaaaagacaaggaaaaaggtttgaagtaaaagagtaaattgagtacttggaataaatctaggtttgaagtcgaagattcaacaataacaatataagtaattaggtagataaattctcatatgtatgatgaaataaatcaataagacaaaaaaaaaaaaggttgattctcttcttgtcactgttgtgagagctttgtttttttaggtgaaatattaggggtcctacccccaatgttccccattcattataatactttatgtgtaaacataggcatatatatagagaagttttgagatatatatcaggcccggctcttgggaggtgctgagtgtgctagtgcaccgggtctcacttctttattcagttttttctttatattttagggtcaaaattttcaaataattgcaaaatagggtctagtttttaaatatttagagttttaggtaaagaaatttggagcataacacaaggtnnnnnnnnnnnnnnnnnnnnnnnnnnnnnacaatatatagttatgttattaagtatatataggaccaccatgataaattaattttgtttatcaaatgtagtatagtagttttgtgcatatgtttaaatgttatccacaagtttcttgaaatgaagtttaacgacaaaatatatttttttcttaaacaaattattatctgtaaatccatatagaacgaaacagaaaatgattgtggtggctttaagaccacgttagtgtacattctcatcactcctcgtattagatgtaacaatcaatatcctacccgtgggattgtccttatcgatcataaatgaaaatgaaccatccatcgctacggtatcattttatacgtcaggaaaaaatggacatgatgaccttgtagagacaannnnnnnnnnnnnnnnnattgaagtacggtagaaaaagaagacatacaaaaagttacaacaagaattgttacgttgctttctaacataatcattttaatccgttagatcatatagtcataccagaaagtaaagtttacatgtgttgaaagtcattttaaatttataaaatatagtcagatataattatataaaagttagtgtgaattaaagtatatatacaatntaacttatttaaaaaaatcaata

SEQ ID NO: 33948 - DNA, 962 bp, Arabidopsis thaliana landsberg
aaacacaagaaaactttttcttttggcagattaaaactttttggctttttcattagtttaaatgacaaacaagaagcaaaaagatggaattgtaactcttaccaacaagagaaacatggatacttgtctgaatgatacagcgaaacctccgatcactccaatgaataataagaaactcagattaaactccgtaaccagtaacaatcgaatcgatgttcatagaaaacacccaaacgataagccagctctcaagatgagagaaatctagcaaagtttacagagaaattgagagttcacaaaatattcgataaaaggaaaaggtgagctaacaatgctcatatagtcgggtcacaacgggcatgtgcagtcctccaatccccctctgccacgccttgcttctttattcttctttttgtccacttgatgtcgcacgtgtgagtgtcacgtgtggtcctgtataactgaatcccggatccggatatcgtatttatttataatgcccatggagggcatatgcctttttccttcttcacgatggacatccaggatttgcaacggctgaaacaatagtaagaacaaaaacattcttcgacaaaatccttaagaatgaagggacctgggcaatgacaatgacagttgtggcaaagtggtcttgaagatctattgttaggcaccaattcaacattgttgttgatgcttcctcctggtttagcatatcgaatatccccaagtacacaaaagacatgcaaagtgaccccgcaatctttacaagtgtagaaccaagtctttgaatttgtttctctttcgcaaatatcacaccaatattttccgcttgccttttcaccataacaaagagtgagtggatgatcatcgtacctgggaagccttactgtatatggtagagtggcacaacgaaaatccaaaaagtagttgcaggggatcctctagagtcgacctgcagg

SEQ ID NO: 33949 - DNA, 550 bp, Arabidopsis thaliana landsberg
tagacatagaacatcaagaacctaataatcaacttgagttgaagaaagaccacaacattgcagcatttaccttacaagcaagagaacagaacaggaacgaatcgagaaggttacgagaacagatctgacatgttttgtttaagcttttaccagttcgacattgaggtctcgcgtttaagaagaagatcttagcactattgataacataagtctgaatacaagagatatcaatatgtttttgaatctcactcactctcaccacattatgatacgacgatcgtcgaatctgtaacaacaaaaaaaaaaaaaatagaattaggttcattaaacaaacgtgttcgacaaaattcctgagagatagatgggtaatgaaaaattgaaaaccaaacctggataacacgatgggttctgtgatgagcgagacaagaagaacaaaaggcattgcctgaacaatccaaacaaaacagattacattcacttttactcgattgtgaatgaatcgaacaagtcacgaagtaatcagctcgaagcattggtgttagccatggcg

SEQ ID NO: 33950 - DNA, 2257 bp, Arabidopsis thaliana landsberg
catcctaatcgtgttcccagttctgatcatttcatgccgtcttttgttcctattgctactcttcaacaacaacaacaaatggctgctgctgcggccgctgctgcagcactaatcctcatttacaaccgcctcagttccaccgtcaaatcgcagctgcgcattttggttcaccgactaatggtggattcagttcaccgacgagtaatggacagtttggatcaccgactagtaatggatttggatcaccgacgactaatgggaagtttgatccttcgttcttggcggtgaggcaaacgcagcagcaaccaattcagagaatgtctacaccatcattgcatagtccagttagtaattacgttgaggatttggaatctgcaaacgctaatggagggagaactgtcttaactttattcccaactcgagacgattaaaaagtcattatctttccggtaatacttcatcaagattctgattgttgaccctttttgtatttgtgaaccatagcttgctttgttgatttatgtcaggttactagatgttcaaaatgtctctgcagtcatcaagaacatgagtcagctgatcgttcttgtgcatcggttttatccggtggcgtttactctgtgcagtcttatcagtttaacattgatacaatccagcgtcaatgtgtggtcaagttctgtatctgaagctcaagcaccttcaggtcaaggcttgtattaacccttgtagctttcttgtgtaagattaatgtaaagatgagtttacttttgaacgtacatccgtacgaacaaactcaagattggaaaaaagaatgaaaaaaacaaaaacttacttcacaatgttctttgctttcccattttgttgtagatttgttcttaaagctgagtttagctgagtttggttgtagccttttacactgaaagtatattggaattgctgaaactgtttattcagtcacctttttaactccatatattataaggttttgatttacaagaatcaatgatgcaatagtacaatgtgaaaatgatcatgaaggagaccaataagcaaaagagacaaagacaatgggaaggcagaatcagaatgaagaggatctgatgctcttacatccttaatcataccccaacttattcactactaccaattataaataaagtcgcaatactatatggaatcattgaagggaccaaacccaagtaaagttgtgatagacttatttttagcttttataatgaacgtttaaataatttaggagatgagtgatttaaagcaatggtggtgggttcatagctggcatgtcctgatcttgtctctcccaagtctgaccccatcccttttttttcttcctttataaaaaaaagaatgtaaattaaagttttatttattctgaaatagactttttgttgaactcgttaatcgttatatcaactctcttttacggttattcacgtaaagagtgtgtattacgattatttaatcttgtaatgaccaaatcaaagtacaaataatatattaaataattttataactcttgattggttcttttcccataagtctaatcttaaatattaaatccaaaaacattgttgattgccaatccaaatttatccccaagtctctaatcgaatcttgtgatttgagaccatcggtcaaagaagtgatttatcaggaattttgggaaagtgtcttcgtctctacaaacttagaaaaggacccttcatgccttcaccacctcatgttcttcttttatgtaacgaaaaacaatcattttccattttttaaaatatagtagcatttaagaatctagttccaatttcctttgacaatttacttcaccataagaggaaaagctatcatcaaagatttggtttctgtctcgtcgtctctgaagctcattcaaagttcgataataatataattcagagatataaaaaagtagatgtcttgtttgttatataagaaagaagtagccattgttcggaacagaacagggagctcctaaaggctaatatctatagaatctgcttttcattacagacattgaagactcaaacactactcttgctgtcagggattacttgcagaaggatacctgcagtgcaaatgacgagtaagcaaacactagattttgagataaccaatcaaatggcggattaacaacagtttagtatcagcaaacctgtaaagatttgtgtctgagccgttcaacggctgtgcatagttcataacgggtgagtttggccacggtgtatat

SEQ ID NO: 33951 - DNA, 5118 bp, Arabidopsis thaliana landsberg
  unsure (1)..(5118): unsure at all n locations
aatattgactaatggtgctcggttacactggttaactcttaataactcggtaccagtggttaactcttaattactcggtttaggtaaatcgtttacaatgacacagtctaatcccaaagatgagaatcactctccatggctctttcgctgtaccctaaccgggtaagcctcaataatagcgattagcacgtgatagggctttttgtgtatactacataacgccgggtcacaacccttaataaagctatgtttcctggctagattgaccaaagtttatggtctccttcgcatataatagatggtttatgttcaaaaactagccacaatgatacctattaggagacttcacatatacaaaccaagctatcaagtagtttgattctaatccccagacacttggtttcaggtctattgtcggtctttgataagtagagtaactgcaaacattgttcgatattcacaaattgtctgcgtttataaacgagaatcaaagaacaaatgtcgaatttgaaatcaatatgaaatacaacattgatcaaaccctatttacactatttacacacgcaatgctattaatttaaaaacagagtctcgcacagaaagacaaacccaaagatagtaggagatagacctcttataactttcagagagccctaagaacaaccttgctggtcgcatgaacacccttagcagctatcttcagcgcaccacgagcttggtataacctgaaaaggaagcaaacaacaaagatgctacttaactcgatctatatacttgtgtttcaacatcttaagatcattagcagaaatcagacataccctccaaaagcaagtccccaagtggaaaacgtgtagaacattttcccagcatgccatatatccactaccttccctaccttgctcaaagcagtaacttcttgcaccagcactgcaaaattaagccgttcgataagccacgtaaacaaactagaaaataccgtaagattggtggcacaaagctaacagtaaacccgactataccgataattctttaacaactaaagtggtatactaggggtggaactggaagacacaaagctaatagtaaccccaaatataccggtagagaagccacataaacaaactagaaattaccggtaactgtaagattggtgacacaaagcagtaatagtattttagcaggagaagagcggtannnnnnnnnnnnnnnnnnnnnnnnnnnnnnnnnnnnnnnnnnnnnnnnnnnnnnnnnnnnncaactaaagcgttatactccggttaccaatcaatctctatatataacatcaagctgaattgtaaacttacgtttctgaagctcttcaggtttgagattctgcaatttaaaagcaatagccaaagtgaatatgagatttgaagtaatgaaaatccaaaattgaatactcaaaagaaactaaagaaaccttagctttgggatttgacataatacatttagccaaaaagtgagcaacagcatcaatcacatgatcttcattcacaacaatgtaatgttcgttatcgatcgcgctttgttcctcgacattactaggaaccatatcatcagtaaccaaaacccaccaacttggctcttgatgatccatctctataagaacttcaacagtcttcacatcatcttctacacaaatcaaacccattaacataatttcttctaaaaccctcaaatcgaatttcaaaatcatcataaacaaacctgttggttccttgaatggaaattgattctgagtaccattagataaagcttgtctaatattctctaatctagccaagaaatctcttgaagtaaccatcgttacaagcctagcatagagctgaattttgcaatttcaaccaaatttgtcaacaaatccctaaaaaattcgattgaaattgaatttgtttatatatgcttacgtcgctagggcaatcatgagagaacgcagcagattcagcgagagtctcaaagagtttaagattcgattcaagcaaagtcctgagacgacgattctcttgacgaagagcttctaattcacgatctcgtggatcagaaatcggattcgttgactcgtgattctcgtcttggtggtggtgatggtgatggtaggtttctacggcggtccatgctacgtcggctacttctagcaccgtcttcgtcacttcgatcgcgtggtgactcgccatagttttgatcttcttctcttcttcgccgtctccttctcaaaaatctggataatgataaattctaagaaaactacttgtcgtttgcgtgtttagaaacgacaagcaagctttatatattaatcattaaaatataattttttgttttattaccaaaatacgtccttctctactaacgtatttcagaattctactattttatagactgcttaccgttttggttttactcttagaaacatcttggcgttttcctttctcgctgaggttttacattaacgagaatattatttattttcactcacactttcagagtgagaaatatctggtgactcggcggttacggcgatggagacggcggagatgaatcataattccggtaagagtaatttgaagaacgttgatgcaacggagatcgagttcaagattctggcggctttgcgatcacgcgtaacctacctcagaaatgaagcagagtagaaatctttgtctctcaacctctttctctaaaccctaacatcgtaaattctctgtgtgatattgtgtacgtttgattgttttaaaggcattggtgatatacatttctgatttggattagggttttgatttcagtgatgtatctataaagcatttcgtcagaagatttatgaatagtggaatgatttgtagttttgatttcacagctgcttcaccttggtgagtgtgaggaggatgttagaggaagatattggattggagaaatgtgatttggatgtgtataagagctttgttaaagagcatttggttaaggtatctttgtgttttcatggtgaagcaagataataattcttctggtatgtttcctttttgaaagcaccgttgtttcctttttgatgtcagtgtttagaagaagctgggaataatgatacttcggagaattctcaagaaactgagagggaagacgatgagattccaactaaagaagtagcagaacaatctgaagagcacgagccaatgaacgatgctggtgaagagaacacatcgaaaagggtagctaaagatgtgaagggcaagggaaataaagaaaccctgcagagggatataaagagagcccttcggaagagagcttcatatattaaggctaattcagagtaagttaataaatgaagttctgaagtttcctctttcatgacttgagaaataaacttttctgtttagtaatggcttgctttatttttcaggacaattacaatggcttcacttcgtcgacttctagaggaagatcttatattagagaaggagtctcttgatctatttaagaagttcattaacaaagaattggatgaagtgagtactttaagttggttatgtaatctcttgagtataagtgagattcaagttttttttgatacttttattggctaattaggtactacaacttcctgatgctcctaaatgttcgactgagtctattgtgaaaaatgtgaagaaaaaggtcaagagcacaccatctaagatggtaagcagtgaatacaattctgattcagatactgaggggaatgtggacaacgaggaggtagctgtaaagaagacaatggcccgaaaaggtaaattatcaaaaccagagatgatgggaaaacggaaaagtgaaaatggtaaacaagtatctggaagaaagaaagcaaaacatacagaaatagattcagagaatgacagtgattcaggggatagtgaaaaatctttgaaggtataacatcttggttgtgatttttatctcaatttccattaaaactaatgtgtttctgcttttatgttatacaacagcagactaaggagactgcaactgatgtgtatggaaagcgtgttgagcatctcaaatcagtcatcaaatcttgtgggatgaggtttctaccaaacttggtatatctttaagaagttctgtatttgttcatattccatgcattttattgttttattattttttcgtggcagtgttcctccaaacatttacaagaaagccaaacaggctcctcaagagaaacgtgaggctatgctaatagaagaacttgagcagatacttgccaaagaagggctgtcttcagatccttcagcgctaggtagtgtttcgctcagaattgatttcttttgcttggagagaaacttatatcttccatctttagagttcagtagtttttttctgaatgattcttaattcaacttgtgaatatgttaacccgaataagcatgctgatgtttgttttctatctggtaaatgtgtgaacatactatgaacaaactatctggctttactctgacagagatcaaagaagtaaaaaagaggaagaatatatcaagagagcttgagggtattgatacaaacaacattgtatggaactcaaggagaagatcctccacaagtttcgcgcctcctccaaaaccgaaagtaacagcggaaagcgagagcgagagtgatgaaccggaagattctgagaatgaagaggaaagtaatgaaaaagctgagagaggaagccaaagcgaagaagtagaagaagaatcaaacagcggtgagaatctatatctcacatctaaatgaccaacgggtcaaattttgaaactgatgatccttgactttctttgcagaagaggatgatggtggagaagaaagcaattgaattaacgattatctctgactcagtgattggtggagaagaaagcgaatgatttaaccattttgttcttttagcctttcaagattaggatgaatattaagcaggtaatatgtcaaacttttaactatagtgataactaagtgggaatcccagactctggttacaacttgaggaatcttatgccgaatcactgaatgtttttgatacccactcaatgatgtgatcaaatatgataaagaagagagttgattgatagtgataacagattcaattgggggatg

SEQ ID NO: 33952 - DNA, 1592 bp, Arabidopsis thaliana landsberg
atctaataattaaattttttgagaacaaattttgtttaagccggactagttaaacctttatattatctaataataatatttttgaaaagaaaaaaaaattcttcaaaattgtattgattattttcaccagatgtgaaacaaaaagagtaacatgatgatagtcaaacatagtttcatttgtgctgtcagaacctactcatctcttccttggcggtttaaatttcatttggccttggtttatggtctaacgttgttgttgtttatgtttcacttttcattaataaaacgagatgacaaataaaattttacaatatcagtcgaaagaagatcgaagaagagcaactatagttgatgtgacttgttgttatgtacggttaaagactatttggtcttgtgctctttccaaagtctaatgccatagaccttaatagtaatactaaagaaagacgcgcgagagttgtattaactactctttgtctaataatacaaaatattttaaaataccaacaacctgccgctaatgtaataatatgtttgaatcaaaaatagagggggaagagaagtaaactttgaattctattggtaggttgttgtgtaagtctctctcaccgacgcttctttccttctccatgtcttgatcgtcttggagcttcgtcttcgtcttcactttcactctcttcgtttcttaaactgtttccaacctcgaactgctccatgtcatgtgatgcatcctgattttgttgatcccccgacactcctctctcatcgcttctctcaggtgtttttcggttgcttgggccaggtcgagctgatgatgttgctggtggataatacatcggcctccctcctctaggagcgtttcccattcctcccatatgcgggcctcgtccgcctcccatcataccataaccgccatgtggaaactgttgcggaggcctaccaggaaacatcatcccaggtactggtcctctgaaatcaccaccgaacctcggtccatacggtccaaagggtcttggacccatgccaaatggatctggcataccattatatccaccaggcccatagggaaatgcatcgccagggcccattactccgagagggaaacctcccattccaggcatcggtctgattccgcgtcctaaaggcatttgaggaggccacattattcctcttcctcttcctctgccttgaggaccccccgccatgctctcttcttcctcctcactttcatcttcttcctcttcctcttcttcattgtcttcaaacggcacaatgtctgggttctcagctctactctctggattcacaccctttgctttctcttcttctcgttttgcttctgcagctatggagattgccttggattcatggaaaaacaaaaataacactccatgatgaagtaacagaatgaaaatcctagaagaaaccaaagtcaccaataaaagagcatatggagctcagttcttcattgtgtcataaattatacgcttaagaaccatgaaagaacaaagttaaacaacaacgagagagagtgggagagagagtattagcccctatgcatctttaaacggaatgaatgccttcaaatcaat

SEQ ID NO: 33953 - DNA, 7954 bp, Arabidopsis thaliana landsberg
aatcttttaaataaacacctcagtcttctatctctatctaaaacctgacgcatgtcattacgacgttcatatagaggcagcatatctccaataatagcttcatccaaccaatgaatcatctgttgaagatgatcacgaagctgcactgaaagcgaagagagcgtaggaaacacttccagtatctgtgaacgtgaaaaataaaaataatagttagagcaaacaataacaacggagattcaggttagaactgtaggatctggctcgagttcaaaaaccatttattgaaaagaagataagttagtagctagcagtttacaatcctaaggcagtgaatcagactaacatgctttaacagattcagcttctttgagacaacagcttgtttctggctcgagttcaaaaccctttattgaaaacaagataagctagtagcggtttacaatcctaaggcagtgaatcagactaacgtgctttaacagattcagcttatttgagacaacagctggtttgcctgaaactgactttgacataacagctgatgtagagctatagaagagtaggaaagaaagaacgaaaacaaaacatttacctggcttgaccgattttcattagcagcatgctcgtttactctgaataattcatcaacttcacggacaacttgatcagaaacatctgcaggatccattgctggaaatgctctaagaagcaagtctcttgactaaaaatcaaagaaagttaaattatctcattaacaaaacaaatactagcaaacaataagaaattatgtgatacttgtgatttatgatctgatcaagcaaacacttctttgcactctattcgacctactacaaggcttcactgaaggaaatgacactaaatagtcattgagaaccttttactaaaagaaaatgaatggtgcatctgacaaaaaaaaggcatggcacatttctagagtagacaaagcagataacaaaaggttcacagtttgactagaaaggtagcaaaagttcttcagtaaaaaaaagggtagagttgaggagtaatagatgactaaagtttagatatacttgagaagaaacaaagtaataaagtgtgaactgtatacctctactatcggtgaggaagtacatttaagaaatcccagaacagagaggacagtgtcgtagtggacaggcctcttccttgctaccactgcaagactgaaagataagctactgtcagttaagaaaccagtgcttaaatacgtaatattcaaaattgcaaatggtttaggtatgcttcagcaagcatgtcctattgaatcactacacatctcagcaaacaaaaataactatactgacgttaatgaaacagtcctaggtgtgaggagctgcttttaacatatacaattatctaacgtaaacgatactagagtttgatataactttatagagcaaccattcatgtgagaaactttactcttgattatgcagcataccacacagcgaataagctccttaacaacatgaaactatcctaaatctaaatttttacttatcctattatcacagtaagaggagtcagacgatctggtctggaagctagcatatctaaaagatttcctgcaattgcagactaactgccagtataatacaaaaagatgatttgttaccattaccaaagcaataagatgatctatgttcgcatatttcttactttaagacagctccattaataaaacattaggtaaaacagaaaaatcaaaaaccaagttaaacaaaaagatgatttgttaccaagttaaacagaaggtgctctcaaacaggtgaaagaactttgattgttcaaagtgattagacatatgccacctactggacatgacaaccacgagataacttctgtatccatctaaacagtaacacataatataagttcaagcagcaatatatgtattcaacgcatcatcaaccatatcaaattttcacctaatcctgtatatggaaaagaaaaattcatgataaaagaaggaaaaaccacaatgcaagtaaatgttagtctagaattcagtagaagaacgctctgattgccaaatgacacagtgcataagctgctatactgtactgtatacatttttaatatccccacatacagtcataagtatatgtttatatacatccagttcacaaaaccaaataaaattttcttaaaccaaataatatcccaaagcatttttctgcgttacttggaaaaacatttctaactagtagaggtgacaatctccattgtttgaagtacttatcacttgcatattggagctccacatatacccaggtaactgtcaagatgtgtaactgatgcagcttcaactgagccaatttcccctggagtatgactcagttagctgcacctcatcataggggttgaaccggtgctttaacctgtctccatgctttatctctatcagccaaaattttagtagacatacaaatggaaaccgagcagttcaatttccctgatgtaaaatatttacaaagccaatttgattcaaaacactgaaagtgcaagtaggacagccaatcatgattatcaaactatttacaagtgaaagatcatctgcttattattgtatctcacaaacatgaggcaaacttaaagcttacgcaaagaagattattatcacagttagaggagtcagaagatttagtctggaagctagcatatctcaaagatttcctgcaattgcaggctaactgccagcataatacaaaaagatgatttgttaccattaccaaagtaggaagatgatcaattttcacatatttcttactttaagacgacagctccattaataaaacattaggtaaaaccgaaaaatctaaaaccatcgatctctctagacaaagtctctccccctcaggatttgacattgatctatctagaaagataagtgcccccagacattctatggtagtattagttcaaacaaaaacaaacatctgcaagataattactactactgaagatttttttttttcaaaagtgacaacttagttggctatgcagagatttcccaagttaatcagaaggtgctctcaaacagatgaaggaaactttgattgttcaaagtgattagagatatgccacctactggacatgaaaaccacgagataacttctatatccatctaaacagtatcacataatataagatcaagcagcaatatatgtattcaacgctccatcaaccatatcaaaatccacctaatcctacatatgacaaagaaacattcatgataacagaaggaataaccacaatgcaagtaaatgttagtctagaattcagtagaagaacgctctgattgccaaatgatactgtgcataagttgctatactgtactgtatacatttttaatatcccaacatacagtcataagtatatatatatatatatatatctatatatatatatatatatatatacatccagttcacaaaaaccaaataaatttttcttcaagtatttttctgcgttacttggaaaaaacatttctaactagtagaggtgaccattctatccatcgtttgatgtccttatcacttgcatagtggagctatatacccaggcaactgtcaaaatgtgtaactgatgcagcttcaactgaggagtatgactcagttagctgcacctcatcataggggttgaaccggtgctttaacctgtctccatgctttatctctatcagccaaaattttagtagacatacaaatggaaaccgagcagttcaatttccctgatgtaaaatatttacaaagccaatttgattcaagacactgaaagtgcaagtaggacagccaatcatgattatcaaactatttacaagtgaaagatcatctgcaaatattgtatttcacaaacatgagcacataaagctattgcaaagaagactattaatattaccctatcattcaggacacattccagtgtagcaagacacattctgtatagctattttatcaccaacatacatgtgagaacgagtgtttcacgttatgaacataacaataggaaacaaaaatttctgagcgccaaaacatccatatcaacttacttgcaagaacaaatcagcatactgagtggaaaaagaactaacatagtttcaactaaaaaagagggatagcaaaaaatgtaacaggtaaaagcacaactaatatcatgatgaatataaagaaaagtaacacaagaatagtgggctgcatacagaaacataccaatcaataacggctatcggcagtgcatcctgtataagagtaggtgcctgtaagaaagatcctaagcggacaagtgtctgatttacttcagacatgagccctgttagattcagcatggggagaccggcagcaagggaggaaatattgatcatctgtctacttcctgcagtagaattggaaaagttgacccgcgcacaacaaaatgaacaaagcatgtatggtgcagttccagataaaatacaatataatcggaataataataataaaaactgcatgattagaacataataccttcgctggaagtggaaactttctcaggatcagatgcatgaggagtaatgagcaaaataaatgtctccataaactttagagcaagaactttcacccctactacacgaccaggctattgtgaaagagaaaaacggacttgagttagaaaaccttaaaattgagagagaagcagagcaaatactaaaccaaaatcgaatctcgggagaggaacagacagacaaaaaagagaggctataaacagtcagcatacctccaaatccaatgcaatgttaaagacagcatctttgaacataaccatcaatgtccataggttcacacaccaacgatcaactttaccatggtgatggaactgcagagatcatcaagaataatacatatcagcgagagtatcatataagatatccaacaaaaacttaaacagaaaattaccaatgcttgcagtgctttattttattcactatttcatattaccctacagccttatgacagtagccttaaacatcaaataagtagcaccaacataaaaaccaaccgaagtttcgaaaatgaaaacaagaggaaagtttccatgggttaacaatagttcaatctcatcagcagctacgagcatgtaaaatatacttttgctggtaaatactgactccaaatgtaggatttttgaaaagatctcaagaaggaatttcaaaacaacatatgcatacgacaagatatccaacttgagaaacagtatggacctgcgtttccatcttctccaagatgctgcgaaagaaagttgtgccagtagaaatagatttctctgcaacagttggatcattgtcacctactaagtgtattaagacactcactagaacataagaatgttccagcatccgcaaaccaacctcttcaatgatcctgccatccagaagaaatcgatcaacatgtctcttaacttgtcagacaaatttaatcaccatgaatagctacagaagtaactatttaacataacttatgaaaactatgcgaggtgaactaaaaaaaaagtaagcggacgagtaatatccaccatattgctgtggaagtttcaaattaatcccaccaaaaacaaacaatcatgcagactggaggcatcgtttgcataatttctacaacatagcagctgggtttggaaagatcaaacgtttgggaaaaatagagaagaaccctaaacacgcaacaaaacaaaagtctttacgagttcgtgtagagcaagggaaaacatcatccgtagtgaaagaagaaagtaaaaccaggtacgaaaccgtaaaatttctgagtaactcactcgataagggatctgcgaactaaaacttcaggggacaagcagagttctctaagataagggaaaatctcagcagacaaagacggctccaatgacagcaaaatctccttcacctctttaagagacgagagcttcaccgccaaatcgccgtggtttttggcagcggcgaggagagcgagcgcctgtcccttcgttgtcgcgtcagccggagccgccattactgaattctagattcgtccggaaaatttgtcaagggaatttacggtgccttatgcagtggcactaaacttttagggtttttcaaggttgaagaagagaaaaatcttggcgacacagaagcagcggacagtgacagtgacagtgacagtgacagagcaatttacgcatagacaaaattgctggataagaggaaacactgggagttcggttaaaccgggttattcgggtcgggttattcggtttggtggaaattcggttttctaaaaatctcaccgaataaacccgaattgaaattcggttcgggtcggttcggacgtcggtttgttcgggtcggttatagcctaaaaaatatgttccgaatatgaaccaaattcttttttttcttcggtttatccggtttacacattaaaaaagaaattggtctattacaaatacaacaaaataaaagcccaatacacttaacaaaacccaacatacaatcaataagcccaacccacaattaataaacccagacttgtaaaaatttagggttttgaaaaagctgtgtgtagtgtgacggctgcgactccgactatgaggctcggacgatgacggtctcgtccacggcgatctcaaactttcttattccagctttaagcgagattgcagtaaacaaggttgatgagtcggtttctcgctttctcactgaaacaagaaagaaaacaactaaattattgaaataaacacaagcctaagatctagagaacaaagacacgagactacaaaaaaaaacaagtaacaccaataatcaaatctgaacaaatcttacgtttaagttcgtcgaggacggatttagacatgaatgattgagtttttagaggataaagatgaatagatgataatgaattgatgaaggagaagagatgtgatgatgaatagattggagaaaaatgttttttagatcggagaagggctcacttggtttgcaagaggcagtgaagaagcaaaataaaacaaattagggttattgactagggttaagcttatatatgattgcatattttaataaaccgatcggtccgattaccgaaccgacccgacccgaaatccgaacaccaaaattaaattcgccgaacggttagttacagtatcttcggttttcgccgataaccgaaattatcggtttaatcgggtcggtttgctcggttcctgccgtaatcccaggcctaggaaacacggatggctttccattaaatactgccttacgtaaaaacaccctgtcgtcttatctttctagagttgcaatgaggactgttttctgttacctatccaaaagctctttctttaaacgcagtttttaccttttaacacagctttcgttaaactgttaaaagaaaatgaaaatgcgatgtgaacaaattagaaagcaccaataaaaacatgccacatacattttctatttaataatttaattttcataaaaataaatcaaaacaaaattgagatcgtgcaaaacagaaattttttttaaaaaaaaaaaaaattaattattgaccaaaaaatatgggcttagtaatggaaagaaaaactttctaaaaaataaaattcaagccaatattgatatgcaaaaaaaagtgtaaaaaatcctatattccttaatttgctcctaccaaccccttcacgatcaagctaaaatcaaagcatgttttattaactgattttctctatttaatcattttttctattatcttccatttttttttctcttgtggatgctatagaaacgactatggaaattctattcaggttagcgcttaatttttttttatattcattcatttgctatttaactcatattaattgtgattttattgtaattatgttttccaaattacaaattattagtagtttaacgatt

SEQ ID NO: 33954 - DNA, 667 bp, Arabidopsis thaliana landsberg
tacagtcttcatattctcgcaaaaaactacgactaacgtcttatcgttgagatctagtgccacatagatatttatgttacttcttaacatcttattactctactttttttattttttttgtttcccgagtactcatccttcttaattatttgggtgttatcgacatgtctgtgcctttagctaaaagaggcttttttggctcataatttacacgaagttctgatgactttaataatatcatagaaagtaaataaataaaagattataaactattgctagagagttttttataatcttattgatttgtttttcacaatctcgtaaaaaaatttaaacaatctctcgattttgatgatactttcatgattttattttgtgaagaaaaatgtaaaaaatcataaaccattaacagaataatttaattcattaacaatcatagattattttgttttaattgaataacgcaaaatatttaataattttataaaaatataaatcaaataacttcagatttataaagattttatattactttttacaaattctaaactaataacatctacaatagtttagaatctttcatttattcactttcaataatattattaaaatcatcaaaattcttagtaaattaggaattaatgataccctgccagatagtgtcaag

SEQ ID NO: 33955 - DNA, 1461 bp, Arabidopsis thaliana landsberg
aatccccgaaaactctaaataaaaactttctcttcatttttgtaagccttgagctccccaaaattagtagatctccatcaattacctcttgttttgccaaggcaaaatcatcgactaaagattgattttttatcttgaattcccccttttaacttatagagagattctaagtgtctagtgggtgtaatagaccagcaaacatcatgtaattgaatcaagatagatcggagagattgagaattctcttttgtcttaaaccaatagtcttgatccatgaagccagtgaaagatgagtagaggtgtcaagcaaactggaagtccgtgagctcagtccaagcagtactataataagccgtgagcttaggacatctttttttatgcccatataatagcaagcctcgtagataaggataagccaatacaaattgcggattttagcagatttcatctgcgctgaacaagtctaaacatcttatttttgcatgcgatcctaacggttcagtccgtcgtggtttcacaaaagattaaagcacaactcgaacgcgaaccaacctatttgatatcttaaaagatgagccacaatgacaaacgatcggctcgaatgagaagatattgctttcatattatgatcggttgctctgatatcttattttaaacaaaaaaaaatcattattactcctaatctgtgatcactaattttgcgatataattttgtgatttatttgtagatgatctttcgagagaattaacacctctcttgtgatcttatgcaagttagtttttgaaagattctagaacgtctagtatgtgtttatatggttttaacttttaagactattaagaggattaaaacaacaatacattatgttctaaaacattttttggtatgaaatatgcaaatatgcattgtaattaaaaaagaaaatcatattattttgtagatgttttgagagaaatgactgttagtttcttaatctataaaatgtagttttaatatgaaggagaatccgacttaaaatacatattttaccaaaatatgtatttacataatattatggggaataaggcaaatgcattttatttttgtcattatgcattgcacatgcactcgttgttattttcgtggctgattagctctcttcatcaacagcaacatgcatgtgttatgttgtcacatttgcaatttggtcgttacagttttatgtgtccacgaattaggagaatgagggttccgatattattttctttggataaccggtcaagccacatctacatccgaagaacaagtctcgaagctcgagattccactgaacttctgacatattggattaagctatagatataggatattagtagagatgatttatgagatcatgactactgctaatttctttatatgcaatttttaaaatcatgactaaaacgagtccactttttttgattttcagtcacgtgcattat

SEQ ID NO: 33956 - DNA, 882 bp, Arabidopsis thaliana landsberg
ctttggaggtcctggaggatgctaaggcaataatttatgatctggagagttacaatatcttaagttggagatgaggctaatatgagaaaattttacaaattttaaccatatcttagcactacttatgcttttataaataatcaaaataaactaaaccaatttcagaactttcagtatatgtttattgagcattggacatacgtttcttgtctacaaaaatcataattataagattaagaaactgcattataagtaggacataaagtataattgctattgactagaacttctaagcaaatcaataaatttcttgctaactatttttctctcctaattgataaattttgtttttgattttcacatagatacggtaaaaacatataagagttttttaaaaaaggaaaaaaaaaaatatacagcagtaaaaaagttgttctttctagggttaggatttcgtcaatcttttctaccaatatatatatacatacagagctttccactaattagggttctacaatgccatcagtcggttaccatcacgtccattgctatcagagcaacgcatgatgtataataactaagcgtcgctctgataccaaattgatgcaatggaaacatcgattttgcttttagatttattttccccaatttctggcagacagttctttaaatgcttcagtttcctcctagatttaaattgatctataactttgggggttcctacccaagaattttacatgaagttaggccatgagttttggattcagaccgaacaaacttttccgtgtgtggagagcctgcaatgttatatacggagctctaaattcgatttgctatccgtaaaagttcaatacactgcgatgctcaagctagacttatatc

SEQ ID NO: 33957 - DNA, 3822 bp, Arabidopsis thaliana landsberg
ttagaaattatccaaatcgaggcaaaggtgctgacgaccacatctactacaactaaattatataagaattagcctgtgggacatttgtttaagttcaagttcaactactgtatttgaatcgttataaagaaagactctcgataatccataatcaattattaatttctccgacttttctttaataatagcataataatcacgtcttccgtcttcacttggagatctcatcaaaaaaattaacaaacccttttgattcgttgacttcaaaaaaatggctacaacagcagtaaacctaccaattcatgagcaccctctttatccttcagctcgatgtattataggtgaatgtgatggctgccatgtaaatggtttcatgtacagcggctacttttgcaatgaacctttctgctttatttggttccacaaagagtgtgctgaggccccagcggagatcagccatagttcccaccatcaacatcctctcctgctcaccaatgactcgactgatggtccttgtgatctgtgtggacagaagctattgcctccttgttataggtattccacatgtgagttcaaggtggatatgacttgtgcgatgaaaccatcaccgcctgctattgaacatccgctgtgtcatcaccattcacttgtcttcttgaagaaacgagaggagaaggtctcatgtgaattgtgcaaggattctattgcccgaccatcctattcgtgtcttgaatgcgatgtgtacttccacgtaaattgcatccagctctccaaagaggtaaatcatccttgtcattctgctcatcctctcaacttaatcccatctgagtcacttacggatgatgccgagacaacttgtcttttatgtggagatataccagctgaaaatatgctgtatcattgttcggtttgcaatttcacatctgccttggttgtaccaaaaacccacaagccttgttgctttaacagggcttgcatcttaatctgccagagactgaaactgtttctcccagaaaacttgtcgatcttcacatttatcgcagacatcttctcaccagattacaaacgcggaattcccaaaacctgagtctgcacaaacctgattctgcacaaaacttcttctgcacggattttgcacgaaaccttcttttacacagatctgcacgaactttcttcaacccgaaaatcgcacgaaacgcagaaaaggaaaccttgtgctctgacacaaattttgtataaatctgaaactgcacgaaattcgcacgacggacacagaataaagaaccttgtgctctgataccagtttgttataatagatgtgagcaagataacaaaaacgtaaagaacacgacacaaatttaacatggttcaccaacacttgttgttggctacgtccacgggcaaagagacagattttattgcttgagaaaacagagtacagaatacatggaaattaggttaagaagagtacttatacaaaagaaaccctaattaaccctaaactgattgggtctaaagttaagggcccaatccaattcaagtcatatctaacaagtagaatgctaaaggtaagtcccaagctatgcatatagagataagatcccatctacctagagtatatcaaatgaagctctaatggtaattccatctccaatcccaatataagaacctaactctaccctttgcattcatgaatcctttaagctctttttctaatcattcttttcttttttctttactctaggagaagctttctcaacactttgatacatctagcggatttggatttctttaacaactaatgttcctgtttttaacattttaaaaccaagggattttgcccatctccaatagctaacaagaactcttccttttctttacaaatcccaaaacgtttactagactttttcagcttctttagcttacttcacctagagtcttttaccttttctcatcaatgaatcaacctttttttttttcttttaaacatatcccaacctaaagtataagcgcccacctagtcctatctagcccgaaaaacgcgaattagaactacatgagacacggtcgagtaaaccggtcgagtacgttgaaattatggctacgagttttgcggttttgcggtcgagtgaaagtgaatgagagacagtaacggcggggtcgagtgaatggtggcgaggcttgttcggtggattgtagtggcagtttggtcgagtaaacagcgaatgaagagaagacggtgacggtttgatgagagatggcaacgatgaggacgagtggttgagagggggcgtgaacggtgaggagggagaggcgagttccttggtggccgagtcaagcttgcggtgagtgaacggcatgaggtcgtcgagtaaacagaggcggtgattggagaggacgtcgcaatcgagtgaaagagagacggtgagagggatgacgagtgaggtttggtccagtgagagttgtgagggagagatggcgtcggtgggaagagatgaggtaggatcgactggctgtgatgaagccttgggatttccttatcactaaaaacgcatggggggacaaagaggagagaaggtgggccgcacttggtctatttgccctgaagcattgttttctgttgactagaaccttctgtaatcctctgtaaacttgttaaactccctgtaagtctctgtagcttctgttggtcgagcatagatatgatttcaaaattttggtttttagaatcatcactaatactcgaccagtttactcgagctcatggcctctcagtgcaacagagggttttttttttttttttttttttttctctaattcttgaatttctggaatactcgatcccctgttgctttgtagagtaaaaatttttaaatttttactctacctccacgctgtttctctgttcctgagaatcacaaacacaaccaaaaacaaatcaaaaataacaagaaaataaaagttttatttacagaaacagtcttgggaattcctcccaagtgagcttgtttaaagtctctagcttgactcctcacactcattaagaagcaaatgggtgatagagaggatgtgcatagtcctctctaatctcatcatcatattcagcatcctctcttgagagatgcgtggcagaatactcaattcttctttcctcgaaataggcctctttctcttctggtggataatctatctcctcagaccatcttgaagtaaacttttatctcgggatagtatcaatcccgcattttgattgagctttctcttgcatctgatccaatttactcttaagttcctcaactgtctgagctagcttctctatggttccttcttgatcatcagatttctttttgagatctcgcaagtcaggtgtagagtttgtgcttggtctggtgattgaattcgaaggttgaggttgagccctgatcttttcttctacagttgtcctttgcgaagtttcgttgatgtcaaactgcggcttgatgtgcttcccaaggttgagacttattctcccgtctttgacatctatcatcgctcccactgaggctaagaaaggtctccctaggattagaggatccttaggttctggttcaatctcaagcacaacgaaatctgtaggtacttccactccattaatcattactgggagatcttttagcaggccgaagggttttcttgaagacctatcagcaaggatcaaagacaggtcgcaaggcctgtattgagtgaattccagcttcgttgccacgaagagtggcattaagcttactgaagctcccaaatcacatagacaattgctgaaaatcaattgcccaacggaacatg

SEQ ID NO: 33958 - DNA, 1211 bp, Arabidopsis thaliana landsberg
agagtttatctaccaacatcaagaacgaaggccattcctacataaacctcgtgtaagaaactatatatgaaccaattgtatttaaatcgtaggaagaaactatatggctctagatatttgactatcccaaatttagagattttactcatgagtgcaaaatcgagacatctactaagattgggcaaatttacttgttacctggcttttacctctttttcggctcgtatccgaattgaaactcaagtacccggtacaaaatatgtcaagataaaacaataaattaatatgtgaataagagtgtgttaaataaagttatggttatgagtgggtcgaataaaattgtggttgtaaaatatcttaaaaaatactataagttatattttctaagctttgtactgtaaatgcctaagcttagtgttagaaccaagttaagtgaataagaaagaatttgaaagagtctatgagtgtgactggtttgtataccatgtaaaagaaaagaaaaaaaagagaagaaacgagaagaaaaaagtagaagaaaattgtataccatgtatttatgagaggaaatttttagttgtttttactgaaaagtaaaaaaaaattgagaagaatattgttggtgaacaaattattcttgattggaaaaatgacaaagagtaattgagaagatttattttttcccaattttttccctcttctatttatttattatttttttgaagtagcttataagcccattaaaaatgttggcttgtggcccaacatatttaagggccgttctgaacataatgcacataattttactgtagctaagccagtcaaagattttaacaaaattgttttggaataaaattataagtttaaaacgcatggcttgacttgaactgtaccggaatttataccggaaatatcgcaccgtctttctaaaataggaaatgtagcattacggagaaagacatatgagctctctctgttctcttgccacactttccaatacatggatccattttgacgtcatcttcatcttcaatcactatcactatctctctattatataaaaactcttcatacactgttaccgatccttcaccgtgatcgtataatcatacctcaatgttcgtgttaaagaacaaagctttaagcagccatggatccaaaccaactgtatggcgagaatctctgctcatctcaatccttctaatctttataat

SEQ ID NO: 33959 - DNA, 1347 bp, Arabidopsis thaliana landsberg
caacataatatattgccatctttccgaatatttgtccagccattcgaaactttgagaaaacacattgtaagaagagatgctcccttgtcactatagagtatagatacaaatggaaacaatgggttttcacgtgataaagatattgtacgccttttattataatcatacaagatacaacacatgaatgaattttttttttgtgcaacacatgagttatggagatttttattcacgtaataaagtcattgactcattgaatggcttttattaaatcatacaagacacacaaataagctcgaagtagaacattcagtttctttgtgttgaacttaagaccctagagataaagatttggatcggacaaccttagaacgggcgtggcaacaagtggattctttagctacaacacgatcccaaacttctactcgacctccactctctgtacttgcggaattttccaatcaaaagaatgcaaaaacgtagcgagattgtaaagaacaaccctctcgcccatagccattcccacgcgtatgctacgaccagacctaaacggtagataattgaagtcatttcctttgaagtcataagacatatccagaaacctgtcgggatcaaacttcagtggattctcccatacattcgggttcctatggattgcccacgcgttgatgaaaatctttgaatctttagggatggtgaagccgcccaccacggtggtttgtgacgggcgccgaggaacaaggagtggagcaaccgtgtgaagccttagagtttctttcataatggcgagaatgtatggaagtttagagatgtgagattcttccacaactttttcttttcccacaactttgtcaacctcttgttgagctctcttcatgatatcggggttgtgtaatagctcggccatcgcgaattctattacgtgcagtgatgtgtctgtaccaccgagcaccatgtcctagaaaaatacaaaaacagccatatataacaaatctatttgcgttacgagggacaattatttttaacttaccatgagtacggccttgacatcgttcatggtcaacttcgtcttttcagcttcttcatccttgactttcaacaagacgtctagaaaatccacagctctcccgtcactactgtccctatccatccccaaccgttggttaatgatccggtcgaacatctgatccattctttgagccggtcttcgcatacgcttagccaaaccctgaagatcaaaccggctcaataccgggaaaaagtcggagatattgggcactagcaggaggtcgttcatctctctaatcacctctaagaactcggctccaacaacctccctctcttctt

SEQ ID NO: 33960 - DNA, 1087 bp, Arabidopsis thaliana landsberg
gccaataggttttttaaggcaggggaagaggttaaaagttcaaatgaattttaaaaaaccaggataaaggtgaaggttcttagaccgagtaatataaaatgccacttaatggtatttaaatggccagtacaggaatccagagatatcccaaaatataaataatcctcaccagacttctttggcaattggcccagacagatcaaaaggaatggggccaccaccaccctttcggctcagcaaagaattaaaatatgcagttgtcaaagttatggatttttgatcagaatgtggcttgagctgaagaaaaagaaggccaaaaagcaagaaaactgctgggatgattaatcggattgccactgttttgcggtctctgcaagcagatctcgctctttttatgaacaatgctttgcaatgccgccaaaacattgaccttgagataatggaacaaccacaacattgaatgctaataaatccaatgagagtccaaactgcagcaacaattaatctgaaagcttttgcaactgaggtaattataactccagcgccatcattacaacttgctagcaacttgggttgcatactacttttctgattagatccaatgcataccagagaagacttggtatcaggagaaacaaatatatcttcctgcttatcctcgatatctaagttacagccagcaactctcagaaacacctcttcaagtgtcgtgacagatataccataactctgaataccaggataatctgagtcctcaatctcactaatcttagatctgtcaacagaattcttcatgcaactttcgatttctctgaacatattttcgaaacaaggcaaggaagccaacggaagcttgaaagaaatttcgtttcccacctggacattcatcacttataaagatgaggcaagagatgggcttaaatttatctaaatgcagtaaaaaattactctaggggaaatatctgcagctatagatatgctatgatatccattatttagaaattaaggacacaattggaagattatcaaccaaattatgctctctactctagaagcttggacctctgcaagtatcacagcatgcagc

SEQ ID NO: 33961 - DNA, 4385 bp, Arabidopsis thaliana landsberg
taaatacgaaggttaagtaagggcttcagatgccaacaaattggtaggcccaataacataataaacgaggcccaaaaacttcatttggatacttacttatcaaatgtcttcttcgccattctctgcttaaaccctaaaccagcctccttctctctctctgttagctgcgttcttcttcaagctagctctctgcttgtactctagaataatggaggaagagcttcgtgttcggctgaatgaccatcaagtgtcaaaggttttccctgtgaagcccaaatcaacggcgaaacctgtttccgaatcggagactccggaatcgaggtactggtcctccttcaaaaatcattccacacctaatctcgtctcctccgtagccgctttggctttctctccggtccaccctcactccttggccgtcgctcactccgccaccgtctccctcttttcctcgcagtcgctttcctcctcccgccgtttctccttccgcgatgttgtctcctccgtctgtttccgttccgacggagctcttttcgcggcatgcgatctctccggtgtggtccaggtcttcgacatcaaggaacgaatggctctccgtactctccgctcccacagcgcccccgctcgattcgtcaagtatccagttcaggacaagctccacttggtctccggaggcgacgatggagtcgtcaagtactgggatgtcgccggagcaacagtcatctcacatctgctaggccacaaggattatgtccgctgcggtgattgctcgcccgtcaacgattcaatgttggtaacaggctcttacgatcacacggtgaaggtgtgggacgccagagtccacacgtccaattggattgccgagatcaaccacggactcccagtggaggacgtcgtatacctgccttccggtggaatgatcgcaaccgctggtggcaacagcgtcaaggtatgggatttgatcggaggcgggaagatggtttgctccatggagagtcacaacaagaccgtcacgtctctccgcgttgcgagaatggaatcggctgagagtcgacttgtgagcgttgctttggacggatacatgaaagtcttcgattacgggagagcaaaggtgacttactctatgaggtttcctgctcctctcatgtctcttggcctttcccccgatggttccactcgggtaatcggagggtctaatggcatggtgtttgccggtaagaagaaggtgagagatgttgttggaggacagaagaaaagtttgaatctctggagtctgataagcgatgtggatgagagtaggagaagggcactgaggcctacgtatttcaggtacttccagagagggcagagcgagaagccatccaaagatgattacttggtcaaggagaagaaaggattgaagctgacgagacacgataagctcttgaagaagttcaggcataaggaagctctggtctcggtgttggaggagaagaaaccggccaatgttgtagcagtgatggaagaattagtggcgaggaggaagctgatgaagtgcgtgtcgaatatggaggaaggcgagttgggaatgctgctaggcttcttacaaaggtactgcactgtgcagaggtattcaggattgttgatgggattgacgaagaaggttttggagacgagagctgaagacatcaagggtaaaaacgagtttaaagggcttctcaggaacttgaagagggaggttaatcaggagattaggatacaacagtctcttctagagattcagggtgttattgctcctttgatgagaattgcgggtagaagttgatctaatcaatatcacaagttttgtttgcttctttttttcattatatgccttcaattttgttctgctaatgatagatattccatggtaatgtctaaacttgaaatgatggatttctataacaaagagcagttttgttggtttccttgactgtatcaactagaaacaaacttttaaacacataaattatgtcgattgataaatgttttacccgtcgtcagtgtcccttggaccgttcacccttgagcgctttccgtctggcagccgatctaattgtctcgattagaggagcgtcctcgtcgagcttatcttctctgtctgacccgccactaatagactcatcctcatcgcttccactttgctcatcaaacagtctctttcgctctgtttccggacgttttcttggccgtcccctgcgtcttacatttgctgcttctttgtcgtctgtgacagacgcatcatcacaagtcaagacttaaagcatgcagacatatcatactcatctaccggctttgattaaaccaaatcagatgttgtgcgagtgcacataacataccttgtaaatcctcgtttttcaagcatttctcctccaaggtttccaagaaggtgaagcaaggacgccatccactgggatcttcgtctgtattaacatgcactatacgcccctgaacgtccttcttactgttcagcaagcaaacaagagcatatataaagttatttattagcagagagcttcctacttgctcagagagtcatcagtcttacatgtcaatgatgtcagacactgagagtctggttgcaaatggaaggatagcaacttccagaaacaacagttgctttggggcgtccctaaaagcaaactcaacaccttccttcaccacactcaatatctccaatctgtatttgttgcgcgcagccccgatatacattcctgagagcccacctgcaagctcccgccactcttcaagacatttatctactctggattcttcacggccactagaaagttcacttgaataccggtgataggcctgcccaattacatagtgtcagcaattttcttggactacgaaactttgcatcttctgaaaatcttgcttacccgtttcaaggattcgagatagatattagagatgtcatcttcttttttccttaagaatgtaataagattctttatgatgcctgttacaccaggtccatgcataccaagatgcgatatgatctctggtcctagataatcctgcaacagaaaagaatccatataagcaaattgatatgtgagcatcaatctatataggtgtcagaaaaatactaagataataatagcagcaatgtaaaatgcacttggtaagtacctttggaaccacatcactagcaaccaacttgcaggcagcaatgactgaaacatctctgtttgtctcttcaatgtattccttattttcatcctcctcatcggtctcatctgtgtcaaagtccggcagaaataaataatacgtaatttggaaaatcaagaaatgacaggggtttgtggaaaagcaaaacaaagagtcacctgaagtgttaaacatttctgcacagagtttccaaaatttctcaagaaagacactgtcgggacagtatcctaatctttcaagtttacccgagtcataatttgactttctaaacaaacaccatgtttcggcgagtatagcacagatctgtaagcattggagaattcactttttaggataatcatgactcattgcttgataaaacaagcacatatacggaatgaaatgtgtaagttaaattggaatgtcaaatagtctttaccctgttcgatagctgattaccatatttcttcgattcctcaattccattcaggaagtacgaaagctcctcaaacagggtatcacgctttgatataagggaagataaggaagcttcagagatagcttcacaatttatgatggagtgcagataccacgccaaatacatgtgcatattcagaagcaggaaacagataacctaagcaaccatgaacaactgttccattaaaatgtgagagacacaaaaaagatagtaagtgctttaaactaattcctttagcacctcttcgtccaaatttctgaaattatggagcgtcaaagcaatctcatcgaacatgctctcaacaagcacaggctttgacaattgaagctcatacaaccttttcagatttactaggagggagtattcatcatttccatcctgcacagaaaacagatgtaacgtttcatccataagatgagtatgaagatagatggcaaaggaagtaaagtgtaccttgacttctctaattgcagaagtgatcttatctaaaagctcatcttcaagatctttaagcttcccacgtgaaaaatcttgaagctcccctttactttctgacgcacaaaatgttatagccttgacgcaagatcttagtgcttccttctccccgtgtttgaaaaaagcatcctttatgagtcggacggcagctttaaaactctgacacggaggacaaaatgtaactttcactgagaaaggtaaataacaagaaaaaaggcatcctttaagagaaacaaaatga

SEQ ID NO: 33962 - DNA, 662 bp, Arabidopsis thaliana landsberg
catatatttatttgataaggcgattaagtgtcaacatatttgcattgtagaggtattaattgtccgttcgtttttttgtattcaaatagtggagagttcaagcacttaggaagatatcaaaaattattgaatactagtattaatttgtgtcaacataatattaataacattaacatggaggattaattatgttttagggagggggcctaagatcatctccaatcctattcttttttttttactctaaattctcttatagaataatattttctccaaccttattctatatgttactccaaaatataataaatgataggattattctaaatatatagcaattctgttttttttttacactaactctattttaaaagtaagaaataaagaaatacattagaaaggaactattttatattttttagttacactatttttaagtcaaaaatagaaaaatacattggagatgatcaagattataagtttgttgccccaaaaaaatagatcatttctattaatttggcttaacatgcaaagtcgattattttttactttctatctcatttctcctcataaatattagcatatatgttcccaagagtctccaatttttttctttctccaacgttaatatattcaccaagctcaactcatatttattttta

SEQ ID NO: 33963 - DNA, 1272 bp, Arabidopsis thaliana landsberg
catggatgtctctggaaacagattcgaaggacgtattcttttttccatcggtttacttaaggaactgattgtggtgaatacgtcaaacaacggtttcacaggtcgtatttcaccatctctatcgaatttgactgatctcgaatcattggatctttctaaaaacagattatccggtgaaatcccaccagagctcgggaaactcacgtttctagcacaaatgaacttctcctacaacatgcttgaaggtccaattccacaaggcactcagattcaaagccagaatagttcttcattcgcagagaatctcgggctctgtggtgttcctctccaagaaacttgcgggggagaagaagaagaagaagaagaagaagcaacaaagcaagagcaagatgaagaaaaagatcaaggtattgagctggatcgcagctgcaataggctacgtacctggtgttgtgtgtggactcaccattggtcacattctcacttcgtataaacgtgactggtttatgaaaagctttcagtattttgcttaataaaagcatgacctcttaggaggatgatgcccccttgttataatgcgtgtactctaatgttttgagttgtataacgagtggtttgttcccaaatttttgttacatactatctatcatcactctcctcctcctctttctttcatttttcaataaatatataaatcttatgaaacttgatcaacctttatcgtcaagaaaaaatgtctcaagaaagcggagccagaacaggttctgattcattgagctatattactcaatggtcagtgtacttagcaacagtcctgttattctctaatgtgattctactgctgcattacgtaccgccaacattcatgattttcacgagggaacaaaacacaacgacatagattgtcaaaacacttcatgtatgcataagctcatttacttgcgggtgtgctcaccaaaccattttgtcatgtaggcacgtttataagggttcagtgtcgttggagccggtttagtagaaccgagtagttaagtgttgaccaaggtaaaccgaggtcaaagcatcattataattgtgagagttgtaaacttttatctgttacagttaaaagaattaacaaacttttccacaacttaacttcttcatcgaggttaatctctttactaaactttttgtttaattaattttgtctttttattgaacagaggtaaaatgataacaaataagtctggtcaagaacagagtgtttttttatcctctcttttttttttt

SEQ ID NO: 33964 - DNA, 1342 bp, Arabidopsis thaliana landsberg
agatccgcatatctggctcgacatctgcttccaatggaaacttcatgaacaaggatgtagaagaaggatgggagttagtcgaaaatctggcaaaatgtcatgtatgctacaatgaggattatgatctctcagtgagaggaactggagaaactgaagatagacaaaagaaggatatcaaggccctcaatgaaaagctagacaaactcttattgactcagcagaagcagatacgctacattactgatgaagagcacttccaaatgcaagaaggggggaatgatcaaattgaagagatcaactatattcaaaactaagaagggttcaacaagggctacaacaactacaagcccaacccgaacctctcctacagaagcactaatgtagctaacccccaagatcaagtgtatccaccacaacagaatcagtttaaaccatttgttcaatataaccaaggttctgtccctaagcagcagttcaatggaggataccaacagccaacataaccaccagtgttacactggacaaccaaagcagacagcatgatcacaagatcctgacataaagcagatgcttcaacaaatcattcagggtcaaactactggcgctgtagttctggaaaaacgattggcttacataaatagtaaagttgattgttcctaaaatgagctaagaagcaaatatgaggacctaatatccaagatgatatacaaggaaagccaagctgcttccaatacctcttccaagtatccagggccacattcaggaaaagccattcacaagcctaaagaatatgcacatgcagttacacttcgcagtggcaagaaactgctcaataatcagaccaaagagagatcactaaggatagtgaacttcaagaaggggaggatccacataaaaacgaagttcaaattgatgaaccaactaaacttgatcagccttcagactcactcgaccctatactcgatcaagcaaagccaacttttgaagaaagcaaagtcgcggcatcagaaaaaaataaagaatttgctccgccacccttcaaaccgactatgcctttcccaggaagattcaagaaggaattaatagaaaaatataaaaccctttttgataagcaactaaaggagattgagctaagaatcccgttaatggatgctttcacgctcatgccacactcccacaagtaccttaaaggtctgattatggaaagaaccaaggaggtgcatggaatggtggtaaaaggccatgaatgtagcgctctcatccacccacatataataccaagaaagtataaagatcctaaatccttcaccctaccttgttcagtaggaccattatctgcagt

SEQ ID NO: 33965 - DNA, 3818 bp, Arabidopsis thaliana landsberg
aaaaataaaagagaaaacttgcaggttacctatcatcacagttctgctgttaccaccaagggaatcctaagaaattaacatgcaagcttatgagaatggaccaaacagtgtaatatcaagaagatttgaaaacaaatatacctgcaaaagccgtgtaagtttactgtctctgtaaggaacatgggcaccatctttacgctttttctcatcaccgagcgcgctgataacattaccaagcgcaaggaggcctttgttgatgtgaactcctgatgaaaagaatcaacttccattacagcaccaagatcaaaaacgcttaaaactagtctaaaaccaaattcaacagaagaacgccaaccttccttaaatctcaaaccgtctgaaccagttcttttggctcgttctgaaccagcaagatctactaagtgcaacttggcacacaaatattcttctttcaagctcccattgtaagcaccgttttcaggagaatccgtattaattttgcgcatttgctccacggtgatagtgaaaatggcatgtgaacgactgcatatacccaaagaagaaagacaaaacttttataagtgtttaaagttattgactgcaacgttctacttgaggttttagattgttacataaaaacaataataacacaaatatcacaagtcacctggactgattgttcatgttagtactaccagtagccctgctaaccgaaccttggtcaaggcaagcagccatctctttcaacgtactaacacttacttctgtggatccagctagtgtgataacaccgttggatgtttctcgaatctgtatcggtggcttcccagggacatgtgctaccttaccaacatgtccagtgttattagtgtctgatttattaacagtacaaggatccagcaaatcttgaacctcttctttatgaatctaaccaaataaaatcattaatggtcagtcgtgttacgaatgaatcaacgcgaggtcagaagaaagaaaggtgtttaaaaagaacctcaataaaagaaacatgaatctgaaactcaatctgctgcttcaaagtctctatcttggtgaaaagagcgttcatcacttgagggatgattcctgtctggctgctgtctccgcagccagtacccattgtatatgctttaccggaacccgtttgtccataagcaagaacggtagcattgtagccttgaaatataccatcaacaagaggggcagcacattcttcatacatttcagtagatggagaaccagagctcccatatacatgatcaaatgtaaaagaatgtgatccaatttgtacctgcagcattattttacaaaaatccaattttcaaagaaatatttgattatgattacaataaaaatttctcactaacaatttaacgagcatgggccaaaacttatatatattccaaaaccacaattccaattcacatattgagtaaaaaggtcagtgatcagaattttttttggtaaggaggtcagtgatcagaattagcaacaaaaacaattgattagtgagctaattaataaaggaaaagatattaatgatgcaataatactaaaaacagaagtacttggtcaaacatgcataaagtaaacactgataaaaagtcactgattctaaaaacgtcgtgagatctagatctcagggagagacaattccgattaaaaaaaaaagagctaatcagttgaaatatatttcacctaaaaaagtttattcttctacaagttcagattaatcagacagaccaaaagaagagagctctaacatttaacgaacctggaagaagaagaagaaaaaacaactgtacctgtggtttaccggtaacgacagtgacacaatcttgacaaccttgaatcctttcgtcgccgatgagtggtctgatgtgaacagcaaccttaacggaacaatcatccggtggcggcgtagattccattggaagaagaagaagaagtaatctagaatcgaagaagagagaaaagagaaagagagagagagacagtgaagttgcaggcagacagacaaatgtggtttgatgatgtgtttggacagagagagagacttggaaaaaaggaaagggtagaaatggaatttggtaaaagataaaaactttatcgaggagagagcttaaccgcaacgacaataacactctgttttaacttcccttaggctacactctttagtccttactatcctctttcttttcttataaaacggaccgacgtgactttcctttcactcttcccggttctaacctctcctctctctctttctatctttcaagtgtgacttctgacaaaaagtggtggaggagaatatttaagcaaagagagaaaattaggtcaaattctttactttattgcatgtgccgttgtaatgtacacatataccaaatgattgtaaaatttattacataaaagagttttaggagatgaattcaatcttatcttttatttttaatctttatacaattttctagaatttcggtgaattttaagaagttgttatgatttattgtaaaattttcttaaattttatctaaactcatgaaattttatattttatatttttaactaaggaaatccactaaaattcttcttaaagtcattaaaaatttaattcttaaaatgtttttaataacaaaggatttttacatagattttaaaatcactagtctaatagcattagatttcatgagatttttaaaaatccataattgaataacataaaatttgttatttaaatacaaatcacctaaaatgtttgattgaatacattccttttagagtttatttagcaattatgtgctcacctaaattacaactgtaagttttaagtttaattcgttttccttatatttgcaactaacaatacctttgtggagttatgtctcacaagctatgaccaacggattggtttaaaggtttacatctaaactacaattgtttatagtgtcagtttggtatttaaatatgattagataagaaaacagacaccgccaaaaaaatgggttgttgacgtaattatgaagcaaagacggctatgatatatattattttcttatttttatatatgtatatttatatttatattcagatgaaaaaaactaaataattactgcagtgaaaaactaaaagagaaattaaagaaatgttagatatgaaagtgaacaaacagtgaatgcaaattgtggctacgatcgttgacaaaaagtgtcattcttttttttctgaatgcttaatgcacagttgcacagaattagagaaaaaaaaaacacggacgacttttggagaaaggtccacaaggagagacaatgcgagctggcggaggaatcgtggtcacgtggctatagcgatgggtcccaatttatcggcttttatgggaaggaactccctactcttaggctaatgttcggatccaagaaaataacagaaactaatcaaaaaagcaaaaccaaatccgaatccaaaccagtaatatacacggacggattctaagaccagctctaacaatatctctcatggttctctaaaaggatgaggtccttaaaaaaaagctcaaaaataaaggaaaaaatgagattgtttgttaatagttggatttaaaggatagatcttcgcgaatagtgaacatgttaagtttttgattatccgaagaatttggttgtgaaaatttgttccaatttggagatgtgatctacgagagactgatttctatgatttgatatattagggagtagtggttatgattctagatgtgtggcaaggaaatagttttcagctggcattgattagaagaaaatgat

SEQ ID NO: 33966 - DNA, 498 bp, Arabidopsis thaliana landsberg
tgatgtacaactctcatgtgtagtgtataattggttttaaacctcgatttaatgttttatttctatgttttcttaatgcttaaagtatttttggagtcttttggtttttttttttttttggagtcttgagataagttcaatgaaaagaaagaaagtttttatgcataatttagagccattttcatcaaagatcgaaaatccagttataggaaacattgattcatcatatttccctttccatgattaaaaactttagactcgtttttcctagggttatcatgcatttagttagttcaaaactttttacctattatttattaacatgcacaacttattctttattttgctaattggacagaaatctgtatatcctactttaaaggaaatatagaggaaagcaaaatacgagtaagacagtgaatctgaaaaaaggaggaaataaaaataaaaataacacgagtaatttgttttgttccaaaaaaaaagaagttgcttgac

SEQ ID NO: 33967 - DNA, 966 bp, Arabidopsis thaliana landsberg
ttgcatccggctttgcgaaacaacaaaggggtcgtgtttgctaggcgaagcacctcattgctaacctatagattaatgtcatatcttccacttgtaaatatctcatacaaatatgtatatatatagatgggggtatttaatctaccatgttggtgaaagtcatgttgtgtctatattcttcccagctaactccagcttccttatcttttctgttgtctacaattgccttatgctcacgctgtgccacaatatatatgactctatcaaatccatccacacttgttcttaaagacgatagccatatatacatgtttctttatatattaccttgagctctgcaagcactttcgggtctttggatatgaacttcacggccaaagcagtacaactagaggtaccttctctcaaggcaaacgccagaaggaagatgagatttatagccgatccttggtcgaaaaagctaccgtctttctccagttcttctagaagcgtgttaaggaagtcttcttgcttctctcgcgtctcttttctcatcatgagaacgtctttcatcacctggatagcttcttcgcgtgactgaatacaacaagcaattagttgagaaaacatgtgctacttattattactaaatataaaaagttccaaaaaactaaaaaggaaatgttttaagtcaccttgagggctttggtgacagctttccaagtagagagtcttaagaaggacttaaaccaatcaagattgaaggcgttgagattatctataagctttgattgcgtctctggtttaaggttacttatcagctttggtgtcatgtacgctactaccaactgcaatattaaggaagattttcttggtacgagctgaaattggtaaagacaaaaatgaagatgtgtaaacttacgttttcaacttctttacgaacattgaagctcccctggctagcaatggacctaatatggtcgcggg

SEQ ID NO: 33968 - DNA, 839 bp, Arabidopsis thaliana landsberg
agagcgttttctaacgcaaaagaaaacgcgtttaaacgagaagatgacttcaaagagataatctctctcaagtccacaatgaagaccaaactctatcatcaaactcaccagaaaaggaacagagacacataaaagagattcactcttgttgaagttgaagtgatggcaacgattacttattaagtagtcggtagtgaatcaagtacataagatttcaaaaaacataaaattttgatatttattgatgaacattggtacactattattaatgttttatgttagcaaacgctgaagtatctatctacaaatcattatcaagaactctatagatacattgcgtagacttacaaaaataaaaactcagagatccacaagaagaagaagaaagatagaatctttgtggtacattgaagacgatgttcatgtcctctggttttatagactccactaaacgtgtctcgagtatatgaaccggttagtcttcttagccaaagaagtgaataaccattgaagaactttttcatttcaatctcgtggatgtgcattccagaggaaagataagcatcccctgttttcatccctgtgttaagaaaccccacaatttaaacatttagaacaccaaaagttgtagccacggcacaagagattgtgttacaaaattaggaaaaatagacaaagagacttaggcatatagttcaaatccctcaaagaagtctaaaacttgaggtcaaaatctcgtgcaaccaacgcaactaaatccaccccccccatgaccattaacttcaaacccaccaacgaaaaaaaacgaccaatttcacaaactctttacacgattcgca

SEQ ID NO: 33969 - DNA, 610 bp, Arabidopsis thaliana landsberg
tacttgaggagtttcatggaaaacatggaattcgacgtcctactattttgggagttagagagcatgttttctctggaaggtttgcagttttcgccttagaaaattgtttttagaatttttttttggtatatcatatgttttatccttatcacttttacattggtggcaaattgatattgcagtgtttcatcactggcgtggttcatgtcgaatcaagagaccagttttgtaacgttgggtcaacgggttctagcatatccacttaagtgagtattctcgcttaagactataacttgtgcaataggactacatttcattgtgaactttcctttattgtggagcttgttacatgttttagctttctcttcatctgcttgcatttacttggtaaaatgggttcagcactcgttttccggtttattggattgtttttatttaatctattaccactttccagtgacagcttagtttcaatttgttcaaaactaatcttgcagagttcgaatgcactatgggcatccagatgtgttcgatagaatatttcatataactcgcggaggaatcagcaaagcatcccgtgttattaacatcagtgaagatatatatgctg

SEQ ID NO: 33970 - DNA, 1757 bp, Arabidopsis thaliana landsberg
  unsure (1)..(1757): unsure at all n locations
ctaacgttgagatgagcaatgaacagatatgattccatcatataatatatatagctttaagtacacaaccttggatcttacacacaaaaaaagagtaaaggacaaacaggagtagcttctccacacaaaaacaccttcatattactttctcatctcaaaatcgaatcnnnnnnnnnnnnnnnnnnnnnnnnntcaaacgaatcctaatgttcagacacatggtggattcggctcccatgactacttcttcagcaaaaatccaaacaaccagaataatctcatttccaattttacttaattatcagcatgaaaggcaaaaactatcaataacgtagaataaatctcaagataattccgttgaggcagagctaagaagcctagacactctctagtaatgctagaacaacgattattacgagagggatgaacataccatccggaggtgccgggtcggtttccggttattctcggatccgtacggatcctctcatacccgcccgatttgggccgtccgggctgtccataaccgaaatattcctgccgtggctgttcctggttaggcaatctctgattcagattcggattcggatctctaactcgagaagagttgagtccaggtttctcgtctttccgaacaaaacctggcctaagatgcggcggcacgaaccgatcaggtttcggggacaatgaaaccggagttggagcatttacctccggagccttgttgatttcaggagtccgaattggaaaagaaagcgaggaactagatcctgtatgacctaagggacgaagagagatctgattcggatctggatcagagatggcttgatttgaagaaatcctcggagctgtagagattggaggtgtggtcgtagtggtggtggtggtgggagcagcggagggagatcttagaggtttgggggaagatttggtgagaacgagcatacggccattggaacgagcgacggaggaataagaagcagaggaggaggaagatgaagaagaaggaggatctttgtgaaggatgtggttgaagttgatagaggtgtatttgttgttggctcttgccgccattcaattgtctttcttcttattcttcttcttcttcgtcttctctctctgtagctataagtttctaaggttagaaggaagacgaagaactaaagaatcaatgaatctctggttttctcgttttctgtttttttattttcactctctctgctttctctctctccgttggtttctttagggtttgaatggttacggtggttggagcggacaaaacggtcaacggatcagaccgttttttatttatcattcatcaattatagttcgcagtggtccgaaccaaaaaaatagaagaaaaccgcagcggaccatctgcgaaccgtttttacatacaaataaacttggtctgcagcggtttattgtccacccaaaaatgagatggactaaatcgtagacaaattagaccgttttgtccgctctctccatttataaccttattttttttgaaaaggtattactttaatgattaccaaagaggaaggaagacgcaagtgatgtcattattaggcatatgacacgtatccatcgaattataatacagaaaataagaagaatatgaattatggacaaattctgaagctctgttggatcttatccgctaataaataggattaccaagttttaagactaaattctgaaaagtcaaaacttttgaatttaagctttgtctgggctataaatcaagccca

SEQ ID NO: 33971 - DNA, 3992 bp, Arabidopsis thaliana landsberg
gtatctactattgaataattcatttatgtttgtcaacttacttgttttcctcaagtgacttattctaaagctagcaactactcttctttttagatgttgcaatttttcacgaagagctctccacttgatgaatagatccaaaaccattttttttatgttcgactgtgaatattgtgtccatgtagaatttgagaaaattagagatgtatatggaaagaaatgtggttgccgatgagaggcacgattccttatcgttctctcagcttgaatccgcgtaattcagatttatacactacaaaaaaagtcctcattgatagcagtagaggatagctcattttcctcaactgctataaaagatgaataaaatttttggttactttttaatagcaccttataaacgctaagaccgtaaatcctctagcgggaatgtaaaatactttagtccgccaacacttaggtaaaattattcacttcagcgccaacacttaggcaaaactattcacttccctctacagcttcgtgaaaacctaagaaaatcgagaagatcaaaattattcacctttgcctaaaagctaagatctgtcgaatccactcccaaaatcgattcaacctaaaagctaagatctgtcgctggccagaaattcggattctccgtcgccacattctccagctcagccaccgttgagctcaaattcaaggttagtctttcttccttattaatccatttcagcttccatctttctcgcattttgacctaatctcatagaatcgacttccattttgcagccaccagtgagctctaaccttgtcgcagccaccagtgagctctaaccttgtcgcagccaccactgagctcaaaatcaaggcatgtcttactctcaatttgacctagttctttgtgacgatttgattttggggtttatatgcatcgatttgttatatttagggcaatgtgatttgaatggaattaggaagtgaaacttttcttctttcttatactgattatcgttttggggtttatatgcatcgatttgtgatttgatttagagttcttaaacgttttgcttcaacttatactcataatcgtttttttttatcaagtgttggtgattgcaatgtcgaggaagtgaaacttttcttcttctattcacacgactacaggttagtcacacgacagattcttttgttctgttctttacttatgagttgtatgaacttaagttgttgtgattcttttgttctgttctttactgaagttgatgtgattgttgtcgattggttttattggctgagatagtgtaatttgttggtccttaaacatgtgtctttgaattaatctgagatagtatactgtcgattgtgttcttcattgaagttgctctgattgttgtcgattggttttatttgctaagatagtgtaatttgttggtcctaaaacatgtgtctttgaattaatctgagatagtatattgtcgattgtgtttgccattgtttatttcttaatttgatgaacttgataagagataagtttgtatattggtccaagtgcacttgtctgtgatgctatttgagttactgtcttctatagtttaatgttgcttatggtttgaattgcttttacaaaggttttaattaagcttagaacatataatgttggacaaggcatgggttcgtctatgcaggtaagcagataattaatatgggttagttttctgattaggtttggttgctttaagagtttttttttatttttcctgtttacttgaagagctgatcctggatatgagaaaggtgctcagaaatttgtaaccgatgtggctgctgcattaggagacattgacatgatagtatgtccctgcaaagactatcgtaatgtggaacgaaagtcaggctgcgatgtggtggatcatcttgtaagaagggggatggatgaggcttacaagttgagagctgattggtatcatcatggggacgtggactcagtggctgactgtgagagcaacttcagtcgttggaatgctgaaattttggagctataccaagcagctcaaggttttgatgctgacttaggtgagattgcagaggatgaggacataagagaagatgagtttctggcaaagttagcagatgctgaaacacctctatatcctagctgtttaaaccacagcaagttgtctgctatagtgactctttttaggatcaagaccaaaaatggttggtctgataagagtttcaatgaactccttggaacattgccagagatgttgcccgcagacaatgtgcttcatacatcattgtatgaagtcaagaaatttctaaggagctttgatatggggtatgaaaagattcatgcatgtgtaaacgactgctgtctatttagaaagaggtacaagaatctagaaaattgtcctaaatgcaatgcgtcacggtggaagagtaacatgcaaactggagaagctaagaaaggagtcccacagaaggtattacgatactttccgataattccacggtttaagagaatgttcagatcagaggaaatggccaaggacttaaggtggcattatagtaacaaaagcgctgatggaaaacttcgtcaccctgtagattctgttacatgggataagatgaatgacaagtatcctgaatttgctgctgaagaaagaaacctgcggcttggcctttcaacagatggatttaatccattcaacatgaagaatactaggtatagttgctggcctgttctgttagtaaactacaatttgccgcctgacctatgtatgaagaaggagaacataatgttaagcctgcttattcctggaccacaacaacctggaaatagtattgatgtgtacttagaaccccttattgaagatcttaaccatctgtggaagaagggtgagttaacatatgatgccttcagtaagactacattcactctaaaggcaatgcttttatggaccatcagtgactttcccgcctatggaaaccttgctggatgcaaagttaaaggtaaaatgggttgtcctctatgtggaaaaggcacagatagtatgtggttgaaatatagcagaaagcatgtgtttatgtgtcatagaaaagggttggcaccaacacatagttatagaaacaagaaggcttggtttgacggaaagatagaacatgggagaaaggcaagaattctaacaggtcgtgaagtttcacaaaccctgaaaaacttcaaaattgatttcgggaatgctaaagaatctgggaggaagaagatatattagcatctatattagcatctcaggcatctcaggatccatttaaaacttcaaaaataattaaaggatccatttatattagcatctcaggcaaagcaagtcttctattcaagggtagatgattcatctagttggtatgttgcaatgaaaggttcatcaagaagatatagtaaagaagatgctcaggaaggaaacgcagagattggtccattaccagcagatattgacatggacgctgaaatggatgaagctgaatatgctagatctgattgtgaaggcatttatgtgccaaatgtagattcttattcattttatgagtcattgttctatgccttgcatgctctatgtttactcttgcttttttggtttcagatttcttttttagaagtatgattgacatggaattctttttgtgaaatgcaggtgaactgaaatgggtaaagcaaagaagaaaggtggacaaaaaagaaagaagaaagctgtagatgatgagccagagtatatcggcaccattgagccccaagatacagcagctgagcctgctaaggaaactgagcctgataatgaaactgagcctactaaggaaactgagtctcaaactgagcctgtaatagaccaacaagctgaggagaatcttttagtgaatgatacggatgggctgaatgaggaagaggcgataggtgagatggaattgtcagaaggaactgagcctccggctaagcgtaggag

SEQ ID NO: 33972 - DNA, 1307 bp, Arabidopsis thaliana landsberg
ggtctgaattccatgcacttccaatgttttagccaacaaaattttcttacatttgatgacttgatgttgcatgggttcattaagaagccacatcactaaacgttaaacataactttatggaaaaaaaaaaacccccccaccgtgttcttacttgtcatccaaattcgatctgccatttgaagtttcctaagctgttcttgatgactattcttaaattcgatgttatatatcttaccatctaaattaagccttacaagagctacatatccaagtagtatatgctggagtagtattgagatcccttaatcttattgatcaacaaatgatcttatctggacatatatatggatcactactgttaaaacgatataccatatcttaagcgttaggatttgcattattagctgactctgtctcttacagacacgtggaacgtactcgccgtcataggaacattgtcggtaatccccttcaaacaccagtagtcagtagatcgatgacttgaattacatcactgtcccctactttgaccaatagagatctaaaggtttcctttcttgcattattgtgctaaaaccgacatttacttaagttacttgattatgtcttggaaaaaaaaaaagattttaactttgggaacttttattcaactgaaattttaaagaattatttaatttggaattccttctataaatttactggcttttaccgttatacgttaccataaacttatatatatgatcaaattcgaccgtgatgaatgatcacttttttaactttccattcagatcaactgaacccccttactttttctatatatactcttttaagcacttgtttatatattatcaacaaattaaggtgtcgaaagtaacatacaattagacaaagcatgtatagtcaaaaagatagatagtcatcaattttgaaaaacgagcaatttacatgatcctacaaaacaacaaaactaactatatgaaatatcaagtttataatcatttttaaaaataccattacaaaagatttgtactttgaatataatttaacatgaaatttagaaaatgatctgtttaagaatataacttatgtggtattttaactggtactttatagagaaaaaaagattggtaattaatgtgatatttttgcaatccatattatatattcgagagattttactaatgatagtacttgattaatcattagagaaaactaaatcttacaaatataggtagacatgatgaataatatgcatgatttgcgtttcgtaaattgataggaccaccccaccctaagggggttccaac

SEQ ID NO: 33973 - DNA, 3786 bp, Arabidopsis thaliana landsberg
gtggggtttttaaaaaatcaatcacaccttgtagtggtaaagtcaataactttttacatattgcatgatcgacttcacgtaagggaaaccaaatgaaaatcccatagaattagaaacattccaattcttgaatcaagtactgagagtatgaagacaagagtaatctaaaacatcaattcacatgtctatgtcttccttagaagaattcctcctaccattcacaatctatcatctcctctactttggctatctacattcatcattgagttcttcatgaaaccccaccattaaggaatgcttttacaagttacaaattgggatgtctagaagactatatccatgaaggaatgcttttacaagttaaaaattaggatgtctagaagactagaaccatgaaggaatgcttttaattacaagttacaaattggatagataaatgccaaaaacagatgcacaatagataaatgagtgcttcagacatttgctttataaattaagcaattcaagagcataccacaacagatcaaccaactagttgtcaatcaaaggctagacaaatgatcgaacactttatctgcctaaaactagttgataaatttggtttgttatacaagagtcagactaatccacggacaaacgagctacatatctattaatcaaacatttgctttctagtttaagcgatacaagaacatgtcacaatcaattgcacaaaagatcaaccaatttcaaaatgctagaacagatgatcaacacctgagcttcgtctagctatatctacttgttaaattgtctcacacatgccatcaaaacaacgttagggaaacaaaaaaacaaactacaagaatcatcactcttaacgaatccatatagccaaaatatgattttttttctgcaatcccaaataaatgaactaaagtgaggctgcaccaccgatcgatgaaagtgaaaaacgatcaccaacatcaccactgtgacggggagagtgataatcgagacgtatctcttccgattttgcaatcggagagaatatgcgaaagaaagaggaggaagagagagagagagaggaggataattttttttttcgtttcacagtacacccaatcaaacacgtcagcgcctcttaaaggctctttaaacctcttagttaagagcgggtttttgtaataaagcccattattgatttaattttaatcaatccaaaggtaagaaccatcactaaaacccaccgttaaggatgctctaagcgactcatttatcgcctaaacccaaacgacctacatatatgttagttcatgaacttatgactttaaactcgttcataaatagtaggtgagtcgcacatatatttccaacaacatgctttataacagattcaattatatctgggtgatggacaaggagaacactatcataaacaactagattacaaattggaaactaatcttatttaaataaattaacattttgtatctacaaaaccaggccaatatacagtcaaaactgtttgcaagctactcaagacaacaaagaatggcaagatgtgctacaaccaagcataagtcagccaaaaagccgagtgtgaaatttagatcccttgtgtggcaatggaatgagctctacaacacggtttgttttctgttcactttgaaacatattgtgtgtacatgaaatgttttaatccttaataaagacagcaagtggacaacacaaacacattagtatttagggattgaatctacatagaccaaagaaacacacaatagactatatataattagatttagctagaacaaaataggagttacagaaactcgagtgaaattaaattttcagaaataaaacatgatagaaaagaaatactagataaataaatattgaatcctgagaaatcatgagggagttcatataaaaaattaaaaacaagtaaagtaattatagaagcattatgattcgctcttgaatttgaatgacatatatttaatcatcctgctctggtctgttataattaactatgaaatatatttctaaagaattaaactattctttgttttaggaatcattaacaaactttaagatcctaattcaataaactcaaaaaacacaattttcgattgctaaagaagcttctcctagctaataataggtccatcgattcaacactcattctaatgccttggtgaattcgattatagacatagttaaattggtctaattcaactaaagcattaagaataatcaaagattgagaactagaaaaacaatccattaataaaatcacttctaaataaattaaacatccttttgaaattgctaaactcaatgataggattactcacacataatctaagtacatgtgatcattgtagaagaagggatcaagagctcaatagagattgtcaaaggattttaacaatctatataacaaaataatgaaagaagaacaaccttagaaatcgcacaaaatggtctgcctatgcggctataaaatgtttaaatatttttaggcaaatagacagagccttaaacaaaaaaatctctctttttaggaaactagggtttttctcaccttccccgacgccggtgtggcctctcgccgccggtgagcatttttttcttttttcctcctctttttttctcccatggtcttgtatggtggttttttcgttttcgacagatatgcagatgcggctgtcagatctgctcgaggtcattcatcagcagccaccagaacctccagtcccgccggacccccttggatccactgcctccacccatctaccgactggcttccactgtgaacccctccaccttccttccctgtccatttctctggcacatcggtctgggttccgagtcgtctttcgcttatgtttctcgtgttgaaaccattgtgtcatctaatgacatccttatcgcttttatgcgatctattactgcagaatgcaaatctgttatcttggatacaagccttgctatgatctatctttgggagtgtgtgtctcttatggtaaccttagtgtttgtttatctcaagaatcttgttatttgcttggactgtttacgtttgggccttcgttgccattcttattccttcatggagatgtttgttctatcattttctcctttgtgggaaagatgtttgattgcaggtatgaagttcttcttcggtgttgctaggcttgccatctcatctcacggtggcatgggatggtccttcaacatctcctccatctactcttaagttctcctgcttgacggttatatccttagccaaaaggattggtgcttacaagaccttcgaagacaccttgttggacgacgctgctccgtttatgtccttgtaacatacggttttggctctcaagaaagtatttttaaatgcttgttttgcttctttgaagcagtttattttcccagaatttcctctagtgagtggtttggatgatcaagacttgtcagtattgcaaggttctactttccgacatattgtcccatctgcctttgtggtagaatttgtaacctttggggttactatggatgcggttaaggaagcagcagtgaagattctatttgtttgtcgatctcttatgtattctttctttatattgtatcttaattatcctttgtttaaccatcttttggttacctttttggcatttgttgcatttttctttttgcatttccttttttaaagttccctttgttatgaatatattttctcctttgtattagaggttgaactctttagtctaatgaaagcaaatgcaaaaaaaagacagactt

SEQ ID NO: 33974 - DNA, 635 bp, Arabidopsis thaliana landsberg
cttgttagtaaaaaataccgaagattgatataaaaaaatagatttaaatccgctagtgagaaatacgcagagaattattaagattaaacagaaaaatacatttgaaaagcaaaattcagtgattattaacaaaatctgagaaaaaacagaaaaaaaaagatcaaggatatgatttttcttgatcaaaatttgcatcagagtcatggaagttttagatttccaacagtgctcaattgagcttctttttatcaatggtgatttaactcatcatttgcaatcagatggatatataaatcgagtaacataagacttgatgttaaataaaaactcattagaaagaatgtaaaacgaaaacataaatgaataaagaaacagagaaaatgataagcaatggaactgaaaagagttgttttcctggtgctgaggtatttattgggggctgcgacgaggtagggtttctttttttctacatagaggtggtcagaatgtaagccctagggttaaatttgttaaccatggttaagttaacattataattttagatatccccttaaatatatgagattttgtttttttaaaaggtttggttctaatttttttttctggattttgaagttttcaagtttgtcccttag

SEQ ID NO: 33975 - DNA, 764 bp, Arabidopsis thaliana landsberg
  unsure (1)..(764): unsure at all n locations
taacattaacataatctgtgtgaataaacaaacaaatggttttggtgtcagatctatgttgcattgtaagttgaacatgtgttgtattacactcgacttatgtgagatgaactttgttttatatatttgaatcatattttgtcaaacaggaaatttcccatatgtgtaccttgagaattttgcaatatgtacggcatccatcaaactcgacatacagtccaaacttagttgctatatgtttccattgttctttaattgtttatttattttattttgttacttcttaaaaaccgattgtgaaattttctgaaaccatctgggtcaagaaattccgatttgttttgtacgtatgttataattgttattggactcacatgcatctttcattgatcaatagctccgtgtttataatatttaaagaaaacaccattccccaaaattcaaagtatataatttgacttcaaatatttttttcacacattaatttctctggtggtttttctaacaacttgaatccatggcatacgtctattgaataataaaggctatagtgaacaggaaggaantgacgatataaaaacatgtcgatctacacaaagtattangtaagacataatcacatatgagtcaaatgtactaacttcttggttggatttattgtatatccaaaaagtttgttattatggagtgagtttcaacgacaaaaggatttcctacaatcaaagcgagtacttatcaaattctaagcgtccactaaatcagcc

SEQ ID NO: 33976 - DNA, 897 bp, Arabidopsis thaliana landsberg
aaaaaccccgtcagccatcacattcgaagccaaaacctctgagcttaccaagacaaatgctcaaaaaatctttggtatacaaaggactagagaactggaaaaataccttggattacatgaaatgtgtggacacaagaaaaaggatcttttcaaccaaatcattgaccgtataagacagagatctctcagctggacttctaaattcttatctgcggcgcgaaagactaccatgctaaaatcagtggtggcaaccatgtcatcttacaccatgtcatgcttcaaactcctaggatctttttgtaaaagagagcagtcggttctaacacgtttctggtgggacaaaaaacaaaaatgtgttggatcgcatggtaaagatgacaaaatcaaatagatgtggaggattggggtttaaggatattaatgtgtttaatgatgatcttacttgcaaaagtgagccgactaatcctttcaaaatcttcttgcctccttgcaaaaataatgttaggaaaattttgcaaaacaacccctttccttgattgctcagtcacgaccacaacctcacatggatgtagaggaatttgtataggtagagacctgatcaaatcccagttgggtaaatcaatcgaatcaagtactttgacaaaggtatggtcacaaccttggctttccttgtcggcgccattattccttataggtccaccaacagagtataaccaaagtatgactattgataactttatacgcccaatttccaagtcttgggacagggcaaatattctgcatcgcctcctcaacatgaatcagaaatcctcgcactttgacctggtactctggaagccaaagatcggtatgtctggttactcactaagacaagtgactaagcgctaaaacaagcta

SEQ ID NO: 33977 - DNA, 726 bp, Arabidopsis thaliana landsberg
aatatactacaattgacttttcttcctcggcctaaccaagttaccaactactctgttctttttggcatcatcggaaatgcacatgacgggcaaaggacttacttattggcagtttatgttattcttacccatcgaactaaatcttgctagcctaatattattattcccaaatagtagaaaatgtctgaccttcagtagcttatcatgttcaatagctgcttctcgggcactccatgcagaccaataagatgcacataaaatggtaccaattgccattaaccacaaaaagacttcagctacgtcaacagctggtcgtcttggggagtaaagctgcgccgacactgacaagtgcagaagattgttgagttaaccgatacatataatgatttacaatacaagcttaaaatgacaacttcggaagcatatcctgattgaaatagaaaaggacatacctttagaactgttggctagcatcttttgcaaggatgcaccagcatcttgcgggagcatgacggcaggaatctgtatatctaaatcagtttcatccggttcacaaaccattttgtaaagttctgtcagagacaaacaaacatacaaaccattaaattctacaaacaatattgtctgtgatagtaagcatacccaaatataactgattgctataataacatcaaaacaatttcaacaaaacaaaatacctttctgattattgatgatgagcagagc

SEQ ID NO: 33978 - DNA, 2522 bp, Arabidopsis thaliana landsberg
gtaaaaaaccaagcttttgttcttgtctgatcaatcggaataaccaacgccaagcataggcagcgcatccatataaattagacttgtcaagagcccgccaaatcttaaatcttcaaggcccgttatgaagtggtaacgcttatcattatctcattccttgaccattgtagtcaaaatcgatcctttagcacagacccagctggcctgattgtttctctactggttccccaagtgacacaatcttccatagtaatcgattactgtttgtccatcttgatgacatgaggcaagttgagctttgatgtaatgaacccgaacattgttgctcaccgagaaacgttgttgtagttcgtcccatagaagatgtgcatcggaaataaacgtcacagtagatttgactttgggttcaatcgaagcccgaatccaacctacgatcattgaattcaccactttccaattatcgaaattaggatcttcactggacggttttttgattgtgccattaatgaaacctgtttttcttttagcttgaagagcattcaacatctcttcagaccattcaatgtagttttctccgttcaaaagaacagaggaaatcatcgtccatggaatgtcggagctagccaaggtgtaaggcgactgcacaacagatgatgcagagggaggctgcacaacgagcgctcctcctgaacccaccggattctcatcaccgatagccataaaactgaaaaattttaagatttttcttgctctgataccatgtaggaaaaggtattgaactaacttgatttattaatgaactcaaccttggtatttatacatgaggggatcgacacaagataaacatatctcgacttctaaacatatcataactatgatttaaacttatcacataagatttaaacttatcgcataagatacaatcttatcctcaatattgactcttgcatcatcatcatgcgactatgttgtttgtttctgatgatacacaatctcaaaagactccagatcatatgactctggctaaagcagcggattatgcggttgctgactctccatatcatgaggatgcggttgataagaatccagcgggcctggacaaaactgctgctgttgatattccaaatcatgacgctgcggttggcaagaatcttgctagcggttgatgatactcgacattgcaaggttgctgctcttccaatgcttccacatgtgcaactgaaacaacggcttctcctttcttctgcttcttcttctcttcttccacttctttcttcttctttattgcttgtggagtaagatatatcttgcaaaaattgtaatcctagacgcatcaacaaaaaaaggactcaaaatagaatccaaaacttgaaaaccttaataacttgggaaccaagaaacacatacttaccttgttgctgttgtgagacaataatacatacatacatacaataatgaccatatgtgcaaaaggagcaagaaagagtttacatgaccatatgtgtttctctgcatcatccaaagtccacaatataataccaccattgacatcgttcttcatggtattagtaacacatgctaacctaccctgataaggtatcagcatgttcgcaaaactacccgaaggtaatgctatcgtatcaaacttttcagatctgacctcaaaactcattatagtaggattgctaaaccccatctgatcattataggcttggtaatatataacaccgttaatgcattgcccataataacgaaggatagaacgatgcttaaggttagttttgatccttctccatgtttttttttagctgatctcagtgttaaaaccctacactcatcgcttgtgttatcacgaggcatgcacattagtttttgcttaacttcgatttggatcgtatcctaaaaagactgataatcccttccagcttttttccggtttaggcaagattaaaaatatatcgacgtgtatatatgtatcattactcatttttgttagggagatttacattttatgtgtattatatataaaccgtcaaagataaagatttatttattatatattgctagatgtaggtagattcttattaacaaaaaagtgagcctatcgagcccatgaggctgccttttgagttttattaagaaagtgaatagttgtgtatattttctttttaataaatagttaaattaattcttatttagtaacaatgaaatatatgtacaaaaaccacatcgactttattctatttttggcctcttttacatattcataaataatttttattgttatcacttaggaaaaactaggagtctaaccaatagcagcctattcacaaagttttgtaatttaaagtaaaaatgtaaaatttacatttcaaaatagcgttaaacttcctaagttaacatattgacattttagattactcatctcgaccgttagatttcatcgatcttacattgcatttaatacaaaaataaaccctaataccaagtaatttaatacgtcgttgctatatatatgtggg

SEQ ID NO: 33979 - DNA, 2537 bp, Arabidopsis thaliana landsberg
ttcaccggcctttctatcggcctttcgactgccacgatctccgtacctactacattctcacaatcattcacatcattctcatatccatcatgcaccatctcacatacttcatttaaaacatcatcctctcttacatttacaccaactgaacttcgacgctccggtacagaaatttccactctcctctcaactcctataccatttaattcctccacatgcaaaacaggaatccgactctcttcaccagattctgttaaaaatatgaagacatcctcatcatttacaatatacgtctctctccgaactttagacagattgtaactcagtttcaacttcacagaagcttcatcaaccgcaaccttcttcatgatcttgtctactaacatcgaatatgtaatcttctccaaactactcgtcttaaacgatatagcatatagtgaatttttaccaatccactcattcacttcagaatagtatcctccaaaatcaaaatgtaccttagtgtggatcttcttcttcatcactcctgaaaatacaaccagttcaactccaatcaaacattttaatagttataccacatgtactcatacgttgaaatcaatctctcttcgcactcgattctactgaacctaattcgttacctttcaattgatttacaatgttaatacatacctattcgttaaactaattggttaatctaaactttgcaaacacaaaccccccaaatctcggaattcaaattcaactcacattcaacctacattcctttgctcatcacctcaaataacgtttcggcaacctctaatcgattactctttactttgcaaaccaatcatcaaactatcaaattgaatctgggaattatatagaattcaaaatcccaatctaaaatcacaatgcaccaatgtcaaaggaaatatgagaagaaactgacctaattcgttggcttttacgccggatttcaagtcggcggcggccggaatcgatggtggccgacgaagaagatgaacgtcgaccaaagaagaagaacacgacgacgaagaggagagagaacggaggatctcgattctttatttagcttttgaatttctttttcatttttttaatcaactcattaagggtacaactggtatatcacattttcggtggcattcagattaactgatggcagtccagatcagttttttcaaaaaagtggcataagtgataaaagttcatctcaatgcctctatttgaaatgttgcattaattttctgagtaaaagcgattcatagatgctttttgtatttccaatttcctatagaataatatttttttattgatggcaaaagtaatacaaatgttaaaaagaatacaattcaaatacacaatcaatcaacgaattacaagtaatgaaaaagaattacaatatatgtttttggttttaggtatcatcagtagtttcactttcacctcctcttgttcttgctccctagcaacaaacacaagtaaaacaaaatcctaaataggaatccgaaacctaccgtgataagcaagcagttccatttactaagctgtgtcactccttgctgcttcagaacatcagcacccgtcgttaaacacgtagagctcgatatcctcatacctatcgaccggctcacagaatccaatagcctcagcttcatcccatacgtcaattctcccaaaggcgagttgtcgaaaagctgaacacctctcacaaaacattctgtaggatccgagaactcgttctgaagaaccgcctcgtatggatacttaaccagagaaagataatgaaaccaaatccaatactgagggattcgatctctgttgatgaagaagccactgaaaagcaagaagtaagctaaaatagcaacaacgatcgtgtagcctaacatcacatgtggaacgacgccggataagaaagtcacgaaggagcttccggaccagaaagaggctaagatgattaagcagtagaataaaaagcccattggacctccttcaagcccaacagcccaaaacgtcgtcactgcgaaagctacagagaggaagatgagcgaagggaaggtaacaatggcgtgagagagaacgtaggaggatctccggtaagcgttgtaagctgtttctctcatgaagatgtaacgttcctggaggaacacgggaagagcatcggcgcaagtgtagaacattgttgacattgcgaatgcgaagaaccctaaccgctcttgaactccttttggtgaattatccaatcgccagaatacggtggctaagatgaatccggtgacgattacggtggctaatcgcattccgagtagctccggttgtcgtcgggagttgaggattgagcgtctggtgagagttttgatttcgatccagaacggattcgcgaatgcagggacggctaaggttccgccaccgtggtttatggcggaggaaccaccgccgccgccggagactagttatcctctgcttatgctggcggaaatcgcttctttcaaggttaaatttgggtttggagaagccggcggagtgagggt

SEQ ID NO: 33980 - DNA, 2214 bp, Arabidopsis thaliana landsberg
tgaacttctccttgatggctttgcaagaatccaatctcaagaaagagttttgcagctaaccgatggcacgactcagcaaaagggtcatgccttcttcaaccatccattcgatttcggttcagcttcatctcagtctctctccttctttactcatatcgtttgcgctcttgtccctaagccacgagttgctggtggtcacgggattgcgtttgtgctatcatcttcaaataatctcaaaaaagcatctgcaaatagttacttaggacttttcaacagatcaactaacggatctacttcttctcacattttagctgtcgagcttgatacggtccaaagcgcagagtttgatgacatcgataataaccatgtcggtatagacgtaaacagcctccaatccgtcttttctgcttcagcttcctattattccaacagagaagggaaaaacataagcttattactcttgagtggagatcctattcaggtatggattgattatgaagatactcaactcaatgttactttagcacctctaagagaacagaagccaagtaagcctcttttgtcaagaaccactaatctcactgcaatcttcccggatcgaatagcatttctcgggttttcggctgcaactggatcacttataagtaaccaatacatcttagggtggagtttcagcagaagcagagtgttgttacagagccttgacatttctaaacttcccacagttccacgtcccaataaaccgaagaaaacatctcctctgcttattgagctattgattaaactcgctatcatagtaatggtggtggtagaaggattttatctttacagaagaaagaagtatgcagaagttagagagccatgggaaaagccatatggtccacttcgttattcatacaaatctttatataaagcaacaagagggtttaacaaagatggtcgtcttggaagaggaggttttggagaagtgtataaaggtactctgcctattctaggagatatagctgtgaagagactatcacacgatgcagagcaagggatgaaacagtttgtggctgaagttgtgacaatgggaagcttacaacacaagaatctggttcctcttctcgggtattgtaggcgaaaaggcgagttattgctggtctctaagtacatggaaggaggtagtgttgatcagtacttatttcacggtgataaaccgcctctttcttggtctcaaagagtagcaatattgagagatatcgcatctgcgctctgttacttgcatacaggagctagtcaagttgttttacaccgagatatcaaagcttctaatgtcatgttaaatggaaatctccaagggtttttaggagattttggaatggctaggtttgatgatcatgggtctaacctctctgcaactgcagctgtaggaaccataggctacatggcgctcgagctaacgtcaacaggaacttccactagaacagatgtgtatgcatttggtgcattcatgcttgaagtaacatgtgggagaagaccatttgatcctgcgatgccggttgagaaacgacatttggtcaagtgggtttgtgaatgctggagagaaggttctctagtcaatgctgtccatccaagactaagaggtaaatttgtacccggggaagttgaaatggttctgaagctagggttgctttgtacaagcattataccagaagcaagacctaacatggaacaagtggtccaatacataaacagacaccaaagattggctgagttctctccaaatactcccgggatcggcgtttcgactccggtgttaatgggtctacctttcttggcagtcacttctagttcagagacttcatcagtttcaggaccatcagcctctccttcctctgctaacaactcagtgttcatttctcacaccattatatatggtgatggaagatgacattggacaatgttcttcacatttctttaatgtttaaactttctatcagttcagccagtaacaagttcttatttatgtaacactctagatgtagcagaaatgcctaaatattttacttgataatacatggctacagtgtctgtgattaaaagagactacggatcatgttgtattaacaaatcagggctcttatgagaacagaaccagagataacaatgaatattatcgtctttagagtggtgcatactgaaaagagacaaattgagagccttgactatgac

SEQ ID NO: 33981 - DNA, 1110 bp, Arabidopsis thaliana landsberg
aacttataaagatcttgaggatgattgtgaggaagatgacttgaaggctaaggatcatccccaccaccatcaccatcaacatcaacataatgagggaatcatccctccttttgaccctttttttaccaatgagattggtagtaacaaagatgagagaaatggagaagaatcaggaggatcttcaagtgatggtgaaaatacagggaaacgcgttcgggtctcagatgaagatgaagagaaagttgaagggtatgaacgaaattggagtacagataaaggtatgaatataaacgcaggatctgaagatggagcaagctctcctgtatccacttcaccaatgcttcgtaaatagaggtaatcaagctttacctctgtgtttctctagttgctaaagcaagttgcttgcttttcaagaaaccgttctcagccctaaagctttacctctttgtttttttttacttgctagagaaggaaggacttgcacctggccaaatggagtttgtgctttatcattaaattaaaaatgtttcatataattgtgggaaaaaaaatccgaaaaataacaatcatcttagaaaattgtgagtttgagcactagatttttttattttatttttttatttttaaaattctcctttttagttgtatttatatataccagaatggtctggatatcaccagcatcacatattttctctcttttttatttttccttttttgttataaaaaaagatttggaccacgaatttgtaacgtatatactgttgtcggaattatttttccttattttattggttgattttcatattttatttgtttctaatgatttatcaatcacatatttttctttcaaaaatgttctgttaaataacgaaatcgcaaaaataaaacagtgatattatcaagaagacaatgcaaatcaagaaaaaccaattaattatcgccacgtgtctggctcccacatcagaattcagattttcacaagatgagatttttcacaaatataaatcaccacacagcctcatcttcttcctctagctgcttttgctctatatctcactctttgcttctgcaactcacagtcaatggcggctgaaatggcgttagtga

SEQ ID NO: 33982 - DNA, 2226 bp, Arabidopsis thaliana landsberg
gttgcgtttgtgtcttgtctgtcatatcgtgtggtgggtctgtctaatactgattcgagtttttgttattcagctaaggaacttttcttgtttctgaacaaatcttttggttccctagagtaaaacttgacttccaaaagatagacttcctaagatcactggaatagataggagtgacaacttgacgtgaaaggtagcttggttatagtaatttcagatcttacaaaacgagatcaagaagttaataattttcacaacaccaatttgttatcgcttaaaggttgtttgatttgttcaatagggggaatcatattctcgcatgctcgaaaaggggagagaagatggaatgaacataactttaaatcggatgtttgattcaacaacaaaactaaactcagatagagattatgaaggattccggaatctgaattacaaaagcaaaatttaaagctgaaaactcctccatggtcttactgtcacctaaagacatttctttttcaaggcaaacctgaaccagatggtgcagctgcgctgtagccaccagcaccacggccaaaaccacggccacttccctgataaacaagaaaggatgttagaacaatggcaaccaaacaaagagaaggcgggtaaatcaaatcacaaggcaattatataactatagactttgaaacacttcacagctaaagtaaaagatttatgttccttgtaactaaagtgataaagagagactaaatatgttcatggtttctcaggttcaggagctctatgataaagacttcaagagtagcacattatatgacgttggtgagatagagaagtaaatagaaggtatggtcagtgagaatttacttggaaagatggctggtaatctgcaggagctccacccttttcacctccaaactcaccaccagctcgaggacctgcacggtacccatcacggtcaccaaacctgggacggtctcctccttcatggcgaggtcctctgaaatacaaagaaacccaaaccatgtcaaacaaattaaaaaaaaaaacaagtttttgccagacatgaaatgggttaagcaaagagttaatcaccttgagcgatcaccaggtgggccaccaaatggacgaccaccaggcttagctgacttcttcaaagtagcaggaacaacatcagatggaagattaagataagttctcaagaactcgatcccttcattggtcaaaaaccaatagtaatgcatccaggcaaatgtctccctaacatactccttggatttgaaactctgcataagcttaatcacttgtaggttggggacatcgatcaacggatgcttagcaagattgaaatccttcttcgcaaagcaaactccttctgcaaaaatcatagaacatatgataatcaacacaatgttcaccttctaagccaaacatcataattgctaccataactagttaacctaaactagttcaaaaatcacaatgttcatcggcataagcctaaaaatgattcaatttactcacagaagctgaagaaaacagagatctaagaacaaatttaagaagaacgaacctttgaagaggtacttgcagatttctttgcggttagcctctgagataatctgagagcaagaaggaagaagaaaatggttaaaattcaacgaaacaacattctgagacaccggagaatatgatgagaatagagaaatagatcaaaagcagagcttgtgtgttaccattgtatcggtaggagatcttgctcgagcagagagtcgcacggaacttcgagagagcaaaaaactagggttttcgcaggaccagagaagacgatgactttatatgctttgttttgggcctataatgagttcattaaatatgggccttaagtttgggcagtatcggagactgagaaactcaaaatgatcttgtcgaattgaattaagaattgggggtttatcaaattatttgatgataactatatttaatattttattaaccaatacttacactcgttgtatttatatttacgatggtttatcctctcttttttgaaaagtttatatcttgtaaattttgtgacatacgtttaaatattatttactataactttgattttttttttttttactataactttgattactttatatatttttatcagattagtttattcaataaattaacatatatttttattaattacatatattatcttgttaaaagaatttccagtttaaaataatt

SEQ ID NO: 33983 - DNA, 2851 bp, Arabidopsis thaliana landsberg
tcgccatcctttatttttattattattttatttgacccttttgcttatgcggcacaaagtttgagacagttggggaatgaatgcaatgaaagaagaagtattgctttggaactttcttgcgggagacgcggctactcggcgcctctaaagacagctcagcaaatgacaaataagtcaaaacagaatcattgtcttcgctttcatattaaactctgtttttgacacgtgtcccatttctcttatgcagctctttcgattcagagaacaaacgttttcaattaattagctactactaatggacaaatattagttatataattttttcacctttgttgaaatcagtggattatctagcctgtggattataatttcagtggactaattagcgacgaaaatataaattttaacaaacaaatatattaaaacagaaaaaacatttgttgtgaataaaattaaaattctaaatgacattccatttacgataatttaaaacggaaaataatatttatattactacatatgtatgtgtgtaattgaactacgcaaatgagtttattaggatttttaatgatttttacaaaaaattacttaagtgatcgtatattagtagctgggaaaaagaccccaaaatcaaaaaataaaaataagttgttaaatgtttttgattgaggattatacaaaccgtaagttttagacgtttgtggggagtgcactttacttcaaaatacttaataacgtgagaacagaagaaaatttggtcatgtaacaagactcttgttgatgggatattatcaaattgaaagtaaagcaggcaaatggggcaagtaatcgaattatcttttgatttataccataatatgtgtttccaatttttgtttaatgaaaaaagaatatgattccttttcttgtgacaagactaactcacgcacaattttcgaatatgaatgtaagttcgtagttaatattattttcagtttagtcactcgttatataacaagtatagttaaaatttgacggtgaactagatggagtttctcaactaatttaaaatatccaagttgatcgctaattcagaactatcctatggtaaataaatgcaagaaaaatatgaaagtaacacaaataaatggaggagacaaaattataacaattattcataattaaagtaactaaacgaatctccttgacaaatagaaaatgtcgagaatatatacgtaatacaaaagggttaatttagtacattagtttctgaaaatgaatataaaagtaaagtttgtgtacgggatgaatcacgtttccatcgaaacattgcaagctttgaatttatgatcaatagtgttatgatactatgattcatttttttgtagatcttagtgatgacataaaattgtaagaattttaagtactattatgttattccgttttagtttactctattactgattggtattaaagctgtatgagaaaggttacctatcacacttttgagaattacaaaaactaaaaacgagttttccaccattggggataggaaattacaagcaaacattcattaatcataacccaaaattttctctcagtaaattttacatttcccgtgaaaacacgaaggaaaattcccaacaataaaaaaaagacaagactgagagaagaaaagaaaacaaaaaaggtcacgggctcgttgtttcttcattttctttggctttctctctgtctcccattttctcctctccagcaccaataccatcctccttgaaaattaccattctaccctcgtgaccacacatgcatttgttcgccgccggcgtggccagaaacctcggcaagtcatctccggccattatgacaagaaccttctcctcgcacgccgcgctagccgccttcactccagaccgactctctttttcctcgtcgactctttcgccggagtcatcaccggaggttgacaagcgccagtaagagcaggctaggataagtaaagcgaaggctatgaggcctaacatcgccgcaagaccaccgaataggtatggcaccggtgagtgccacggcgatatcggcggtcggtgattcccaaatgattctactgatgtggcatgtctagctacatctaacgatgttggtttaatgctcaatggcctcattttttttatgttccttctgtttctctcagattttttctaactattttgatgtttttgtttttctaactttatataaaggaaaaagtgaagaaagctggaaagatgaatgaaacaatgggtgtggtgaggtgttatatttataggtaagaagtacctggggaaaaagaaagtgagtcactccgaatatttaattatttgaattaaagcagctttttttttttcatttgccgtttattactttttagttttgccgcatatatttgcatgcaatattatgtactcaaacttactttgttatagacacatatatatgttaaggtgcttgtttttttaaagaaagatagcgaacattaattacacaaatttaaactagacacgataaattaaattttagtatctttaaggaactacactaaaaaaaacttgaaaaatgcctacaagaactaccgcagattggtttaaaatttttgcttaacggttgttgaaaaatatataaatggtgattttttaaatcaaaaaaaggatatcaatcataatatctaccaataaatttgaaaccatatgaactttgacatcaatcaactacacaaactacaataattgggtattagacttataagtcttatatccaataatatgtcagtgatagcatgatatcgagaaagtttttggaaagacaaggggtttcctcttgatgactctaagatact

SEQ ID NO: 33984 - DNA, 4093 bp, Arabidopsis thaliana landsberg
  unsure (1)..(4093): unsure at all n locations
aactataaatcaaataatcaatactgccaaatttttaattaaaatgaaaaaaaaaaagaatagatctttatcagaactttgttttatcctcaaaatttacatatgtaacgaaatataaccaaaaaaatccatctttatttctatttatattagtggaaataattgcttattgtggagtgtggactggagcaaggaggcatggtaaaagaagaagccagaagcctacgataattgagtaattaacggaaaagtttatcagaacacaaacagtttattaacccattcaactttttccgtacaatgattaaatatgctgttcttacttttgggaacaaatccacgattcattacaaaatatattatcaattcaaatataaataagcatattgtatacaaaatatattaccacactttacattgatacattcttccttttgtccaaaaacatatatacaaaatactggaactgttttttatcaagttccaaattacaaacatatcgttttagcttttgataaaaagaaaacatggtattgattttagctgtgtaaatagagagatatagtttcaatagttcaatgaaggatatagataatcccatgttgttgttgatacctgttttcagacacggtacagcttaataacctgatcgatcttggctcgacagacgggacatccccaattcttggatttgatctccttcaagcaagacatacatcccgcgacatgtccacacgggacacagactgcttcagatggagcatcgagacatatcgcacacgttccagtgttcccgtcttctttcctttcaccttctgttgaagctggaagagaagcagcagatgggagatcgactggtgttgaatcgattgatgggtaatgaattggaccatcgtctactgtagctatatcatcatctgtcaatggaggagctgatggtgaagattctagcacaatgccaattccatggctattgaatccaaaggcacttgcttttcctgagggaggtgcagttgatgagcttggaccggatgaggaacttgcttgaccgatggaatggtgattgagatttgatgggtcactcatagtagtgtgaagtgaggcgttcattcccatggctagtccatcttctgatggtggtggtggagcagatggtggtgcttggaggaagaccggtggatgcatcggctgtatacatatattccaagcaagtttcaatacttagaaccaaataaggaagaaaagaaacaagaaatccaatggatgttgtttatgacattacctgtggaatccctttacatgcatcacaaaaccactttagctgttggctgtcaccttcagtcgaaggtgcgagtttaagacgtgtttctgaaagaaagaaagattagaaaaacttaacatgcttctacatcaccgaaacaaaaaaatagtaaagcaagagcagagataaaacagagacattaatttagatactttcttggttaacttatatatggaggcagaaaaattactatacgaaactaaggatagtttgtcaacaactatacagtgtagacttacgcctaactacttgaggcctacgtctcccgtgggaggcgcagacccttcgtttcttcatcctgcggcttgggactatccaccagaataaaattcaatcaacatccacaaaactagaggttgcatgtcaacaacatacaaaagtgctgggaaaattacttgtggagttatcaacgatcatcactgaagtatcggactgcttcgcttttggttcttccaagtttgctttccacaaaggcatcactgtgcgtggctgtgcatcctgattacatcagatcagttttgtagacagattagccaaacatgcaaggcttaaaagcattaaaagttacacgtcatgattttattattgtttaatgatgatcatacttgcagactagcatacacaaccagctccaacttgaaaggctttgtagggtttcttgaaccagtaggtacaatgactacccatctgcaaatcgtaaggtttaaagaagattctacgcnnnnnnnnnnnnnnnnnnnctcagattcagtgaaagaaacgagtaaaaaagaaatataatggtgaagtttaatggatggatactcacactcttcttgaaagaagctgcggagcaaataagtcgagaaaggtagggccgtaaaattcacgcatccaacccgagaacaagcagatgtgtttctacagaatccacaataaaaaaaaaactattaatcccaaagtagtcatatcattcaaaagtctgttagaataaatgatcaaacaggtattacaaacatacctcaattgcacgtacaacattgctaaaccctttgactctagcgacctcaagtggtgtctgacaatcatcattaagaacaagtggattcgctacaagaaaatgggattacaccatatgagataaagacaccataagtattcactgacctcacattcatcgagttgtatgagaagacaaacacttaccaccgtgagaaagaagtaacttaacagtgttctcaagacctctttttgcagcatggtgcagaggagtcccagcatgacgacctgaagagaaacacatatgaccacattagctcaatcacactctaaaaccaaagcatctaatatcacagaactgattcaaaatacctctaacagaatcaacaatgtctcaaactccaaacacattccactaacttcaacttaacaagttgttacatttcaatgattatcaccggatcctaactaagcattgagtcagctactcaaagctaggattacaagaaaagttaagatctttgacataccaggacgataagcattaacattagaacccaactcaatcaaagtcttagcaacatcaaatagctcggagttcatacaagccaagatcaacggagtttttccttctctatccatccactgcaatcccaaaaacacacacaaaatcaatttgaacccttaatttcaatcaattcaaaacaaatttgattaaacaaaaatggagaacaagccaacctcaaggtctccaccatctcgatgaagagctcgaattccttcagagttaccataactaannnnnnnnnnnnnnnnntccccttttgattgctgttgtcccatttttgctcacagatcagaaagaagacgaaaggtggaaactttacataacccacgagcaaaagcttcaatctttaggtgttgaatcgatcgagagaaacaaaaatctcgggaaaattgaatttttgatcgaacaaagagaagagataagagaaaatatctaattcacacagttggatggatatttaatttttccttagcaaagaagagttctgagaaattcagaggaaacaacaactttgtaattcacgtttgacgtttcttccttctatagagtttactggattttataaaatgctccctatagtttaggatatttcatctttgtatcctttaactattttttggagatgattttttggatattataaaccattcattaaccattttgaaaaatatgtgagttttttttcatgatcagtatacttaaaaagtataagttttgtaaccatattttatgttacactaaacttcatatatattttcttatattatttaaaatattaaaaaatcttctaatgattattttcaatggcattgtgatgtagaggtcctagagaaatgacatttaatctctcacatgatgtgggacaaacatttagtgtgttagtagatgtaaaacaaagagttataataaataaatgtgacaaattgtaaaaagaatatgaaacgaaagttgataataagatgaggtaagtaaaaaaaatgtgactacatttgtagtaaattgtgatctttgtaaatatacaaaacaagtagtaatgataaagagatggaactctccaatccaaattatttttgcgattgttgtatatagattaaagtctcaaatataaaaatggttaaattaaaacttgtcatatatttgaaaggattctatatttaaaattgttggaatcttttaaggtcttaaaataatttataccaaaaactgttttgaaatatttcaaaaaa

SEQ ID NO: 33985 - DNA, 964 bp, Arabidopsis thaliana landsberg
tgttttctgtcagcttccttctctgatgatgcttttctgattcattcccattttaaaataatatggatccgtttgtctgagtgcaactgatcctacctccttcactacgattggagaatgtctctcggaatcagaagtaaagctagatgatttccctcctgaaatgtttgaaaaaggcatttctcagtatgagaagttgaattcatcaaaaaggcttaagcttttgaatttcttatgcgatgaaacgcttggcacattgtaagtaatagttatactgaatcaactactatctttgatttaaggtacttgagggtttacatattgcgacaacattctcagggtgatgaggaattgcattgatagccaaaatattgaatctgttggaaggaaaaaagatgcacaagaaatgatcattgctgcaaaagataaggtaactctaaaatctaacaagtctttacaagtaaactttgaaaacacttgattcattctaaaaccattctgttgtaggagaaacagctgaagcagaaattgcaagatgagttggctcaagccgtaaaagccaaaaacgggattccattgttgataacagaacatgatgcgattgtatcgcggataaatgcagaaactcaagaagtttattctgaaatgcaaaacgcaatagacatgctatctaaaagtacaaatctcgactcctttgattctttatggttccatgatcatgattataggcttcttaagtgttgtatcgtgtttgcagagagtcaaggaagtgatgatgctgttagaaccaacccggtcgaattggatgacaatggtcttatattctggagattgaagtcttacaatgatgagcaaaacattttgcttcaggtgtgaaatatttacaaactctttgtttgtttcacgagagtatagaataataatctctatccttggttggatgcagatttaggaagctggaatg

SEQ ID NO: 33986 - DNA, 678 bp, Arabidopsis thaliana landsberg
  unsure (1)..(678): unsure at all n locations
taacctaatccattccaatatcaactctacaaaaagactggtttttctttttaaggaattggttttctgtttcgtcagggattttccacttccctttgatgcnnnnnnnnnnnnnnnnnnnnnnnnnnnnnnnnnnccattctgagatgtatccatgggatcggtgcagctctgcgaagaaggagagagccccaccctacattgggcagagagcgagtgggccaaacatcatgccatcagcactaaatagaaacaaatagagaggttaggcatatgattatgcatcggtttctctaatccaaattacctttaagaagatccacacaacagtaacagaaatagaacaaaagacaagcaattaacttccagacagattcgcaaagtaatttaccatttatcacgcagatcaagttcagatcctcttgtactttgttcatttacttcaagcatttcccgcaactcagctgatgttacatattttttcagatcatccttcaggtcccacaattccttagtttgggcctccatttccttttctttgctacaaggttgtaaagcaccacttgtagacatgtcaaaactactttttgctagtttcgacttctcgttatcaacagaatcattttttcgttttgtgcctgctcttgaatttgtttgacgtgcttctgctgtctctgt

SEQ ID NO: 33987 - DNA, 1365 bp, Arabidopsis thaliana landsberg
caaaaacgatgatatgaacaattataaactcgttgagagcattgaactcggataataaatcatcttttatatacatcgtagataacaaacaaacacgtaattaaatttgacgtatagcaaaagacttgaagaataaaacgtcaagttaaagataattttggtatatatgagaaaggtatcgacaaaaaccataacgctatagatgattgtgatttgacaaaaacaccctcaaatcattgttttcagagtttttttagataaggtacagataagaaaccacctctaaaaatcaagcaatagatctcatcgcttaaaagaagagagagatcttcacttgtatgtgtcccactgattccaacacaatgtcccagaacttgccacgtgtcgttcatttcaaaagattgcagtactgttgtccctagagaatcattatctccctcgctgtaatatctttatgctcctgtcactttctgtctgtacccaaaagaagtaatgaacctctctcatcttcttcttctctgtttctttcatgttttgtgagttgtttctcaacaattttctggtctcttagagtgagaggagagagatagagagttgtgttgggcgtggaacttggactagttccacatatcaggttatatagatcttctctttcaacttctgattcgtccagaagctttcctaatctggtcagtagtactctttttatacgggtttttggttttataagatgtggctatatttggaaataactattttgcaagctttcctagattgccagaatataaaaaaagatgtttaacaagagaacggactcatggacttgctttaaattttaattattttaaaatcattctataatgattagagtaaataaactattaggactctgaattataaaattcgattttatatatgctcctccttgtatctcttaatcataagttatcattagctctgttcactagtgctataaaatatattctgaggttaataaaacttttttttctttttattatgaaatggctacacatatctgacatggaacaccaaggttggagttttgaggagaattatagaatgtccactgatccaatatctatcatggattatttaatcatgtttgatctaaaggtttcattcattaaaaaaaaaactttatgatatacaactgtgtgtgtgtgtatcgagtgcctaggccacaaggagacctagagcgtgatattatagcgagatggaacaagtggttttgcacagccaacctcattgggaacaaacccacttcctaaacaagatcatcttgaacaagccttaggatccaccaccttttttgaagatcaagaaactgttttttggatccaatac

SEQ ID NO: 33988 - DNA, 1541 bp, Arabidopsis thaliana landsberg
gtctcttaacgctgtggtaagctcctcctagttataattaaagataaagcaattatgttttatttaacaagtgcttatttccaagacaaaaaaaaaatgttttctgcaaaaaacttataactcatctctttttgcgactttatcctcgacatctaatacatgttagattaaccctacgaaatctaatataatacgcagtataaccctttttcaccatttttgttaccatcaattttgtaaaatattgacatataatgttaaatcgaagccacttcgacaaagagttcaactctaccttcaaaattttaaaattctaatgtatatgaccgtaaaaacgtttataatatacgtataaggatcatattttagatttttttaggcgtgataagattaacttgcatttattaaaggtgatgtgtaaagttgcaaaaataaatgagttagatgatttttttgcaaagaatctaaaataaaatatatatccattggatatttaagtaaccattttgtttgaacttgcccttttggttttgtgtttatggttttttttgcaagaagctcaatattatgagaaaaccgaacctgaaattcgtgatcgcacctaacaaagttaaattcgtcttcaagttctatcaggcgagacatcaatgtctccggtacaaacttcccaccgaacctcccgaatttaccgttaccgtcaccacgaagaaactgcctcttgtcggtccttgttgggaccgaatccaacgatggaccactattactgctgagtgcattgatttcacggtggtggcgttttgtggaaacgccgcaaacaaccaagtgtgtcatacggtggtttcttgccggaaccctaagaagtggctgccctcgtacctggattttactggacgacattttctctctcttttctttcttccagaatacttgttatatctatttgagattttcttaaggaaacatttgttttgataagtgcttttttatagttggaacgaaaataatttggttgaccaaaaaaaaacggagatcattgtttttttgttttgctacgcatccatttgagttttacatgttaacacgttgttgcataattgcatttgtacccttgaacaaaaaaaaaaaaagcatttgtattgtatactagtcctcttcattcttcagaaatataactttattaacgagagaaatacatttagtttttttctatggaagagagtaattttcacttatttaaataccttaagtgggagatatataactttatgtatatcctcgtttataactaacttattatagatgtgagtataggagttttttttttttttttttttctgttcaagcttaatatgatataagaaaggaaaagaaaaagggcgattttaggtttcattgacttctaattcaatctaaattagaaaggattgacatattttcttgacgatcttatttctaagttttttttttatatttttagatgtgagctcttaacaaataacatcacacatggatggaattttgaatgttaatttctttcatct

SEQ ID NO: 33989 - DNA, 1904 bp, Arabidopsis thaliana landsberg
tttttgcacaaatattatgttcctttcttgtctacattatccattgcgttaacaaaaataatgattattttcggatgacaaaagaaaagaataatgatttttttctgaatttgtccaggataattaaaaaaatcatagctaattagtaatgttaggatctctagaatgtaaaaatattttttaaaaagatactctaaaaactatcctatttcactcttttctttttcagtaactgtaaaaatcagtaagatactaatctccatctatttgtcaaatttcatctaaacacgtatgatatcttataattttgatatctagatacggccaacgtttactttgtcaacaaacagtcaacgttcaattttttttatttttttttgagatctttatcagtaaagattttttttttttttttttatcagtatcagtaaagttcacaccggaacatttttccaactttctgttcacctacttagaagaatcgaactactaacatttcgttggcacttggcagtgtaaccgtcatcttgaaaataaaattcactccaataagggatttatatatttgaccatacattttattaatacactttaaatttttctctttaactataggaaactaaaacttgaattttgtttacaagtttacactaaaaacataaaacgataaaatgaaacaaaaaacaaaattttgaaaccaataattgtcaagaaacgagaagggtatataatttgtatgaaacaagactataaactataagtttgtgtcaaaaaaaaacaaagactataaactataagtgaatcatataacgtgtcatctattagtgaattggttgtagtagagtcattttgaattccatattgcataatggtaggcccatttaagcccatttagctaaaagtgacataacccctgctccaacaagaagagagatatgagccatgatttgaagtctagtgttagactgcatcttagggtgcataaaatctgctgcgagaaagtccactagagacatatagatgaggatgcctgcagatgcagcgttaaggactccctgtacgatcagagccgttggactcgaatcatcataagagcttgaaattgccattccaaccgcgattcctaccggcgtcgttacagagaaaaatatcgacattattgtaattgacatacaattgaaatttccctgcgaaagatatgagttaaaaagatcagagacacacacaattgagagtaactttatgaattaatcagctaaatgattatgtcatgtagctaaattcgtagattaattttccttgaatgcacttattttgttataaaggaattcgtttacatccaaaataactttagattttggtttagaagaaacatataagtaagccaggtccgatgtttataaattagagtgtgtcagattatttatctgattatgtcaaatgtttgacaaaacaatagattatttatacatcttttgtcaaacatgcattcagagcatatattcaactcttggatgcattctaccaaaattattttgaataactaattcattttaaactttaaagtgttttttttttgtaatttagtgaagatatataaatatctgacaaaaaaaggttaaatgtgtatatgttgaaaaaataagtcactgtttgaaatttgcaagtggtagagagtagagataagtcaaagaaagccgaaaagatggacgcaaaaatcaatagataaatatcaatgaaaactatacctgttttgtgtatattgatcttaattatgattcttctattaaaagaaaattatgaaaaaagagaggatacaaccacctgggcgatgcaaccaccaagaccaaaaccctcgaagcattgatgaaacattaaagcagcaaagagagcgttggcagtgt

SEQ ID NO: 33990 - DNA, 1121 bp, Arabidopsis thaliana landsberg
atcggatattctttttctaggagttgatctcagagttgctcctgtcttatcgctagactcatgcagttcatgatagacgtcttgttgtcctctttgcttgcacgagtcaagggtgaagtctagaatacgtgagcaagcttcgaaaagcatccaggctacctttgtttgtcgcataacaactgctaaagtgtcgaactgcaaggcctaaccggaaatgaatttgcctacatgatcgtaactctaagttcaagcaatgtctaaaattccctcgttttgcttcagatcacttaccaatgcactgagcccgtatcgtcttttcacacaagtaagggacatggcaagacccatgcggttaagtacgcccttgctgtatagtataggaaagtgaagagccaatggagagggtaaagcgacatgactaacgccataaaagtcgcttttctatcactaagattcggccccaagaatcttattatctcatacactaaaacaccacacaatactgcagaaacagcatttgtagaccgcaggacagatgtcgaacaagcttctgaaaaggactgagatgtattttccatcaacaacattcctggaaacaaactagcaacatgtgctagtgaaagatagtacctgcaaaagaaaggtttatatcaacattttcaattcaaaagatgtaaaatttcaaactctaagttaatcctctacatagtaacatgaacaagtaacagcttaaagaagcagtaacaacacaaattagcatcaacatacactgaaaaatccagactttacttaaaggtaactacttgagaatctacgtaagaagggatgattcaaaaagagagtattacaatccaggtggggtagtgatcattggatcccagctcctaaaattcccattgcagtattgctgagcttgaggcacatgaaatatctcgtcctgcaaaattcaacagatgcagtaatcaacacaaaatcagagagatagaggaacccaagttctaaaaaggtttttttttaccatgtagggttcaggaacaatgtgattgacgataatcgacatcggaatcacccccaagctcgtgatcgctgcaacggctaatttccccatttttccctctaat

SEQ ID NO: 33991 - DNA, 967 bp, Arabidopsis thaliana landsberg
aatttggttgcattcttagagaagattgagacagagtttttaagagtttgcagtgcattgatcctcacaccaatgattatgttgagaggttgaaagatgagcctatgttcttggctcttgctcagagtatccaagactacttggagcggacaggcgattctaaagctgcttcaaaggtagcctttatactagtcgagtcaatctattacaagcctcaagaagtttttgatgctatgagtaaattggctgatgaggaaattgaggaggctaacgaggaaagtggatcttcttcttcttcattcattgttgttgcggagattgttcctcgtaagcctaccttcgcaaagagcagcagagctatgatggatacacttgtatcctttatctacaaaaatggagatgagaggaccaaagccagagcaatgctatgtgatatctatcaacatgctttaatggacaactttgtgactgctagagacctgttgctgatgagtcatctgcaagacaacatccagcacatggacatctcaacacagattctctttaacaggaccatggcgcacttggtctttgcgccttccgggctggaatgatcactgagtcccatagctgcctttccgagctgtactctggtcaaagagtgagagagttgcttgcccaaggtgtctcgcaaagccgataccatgagaaaaccccggagcaggtaactagttatcttctgtttttagatttaatacagataggattgaaaaaaaattgtttgaccagatagttctgattgagacatgattacaaacactgttgcatttttgggttcttcattttgtttcatttcacacaatccattttctctatttcaacatggatgcttatggttatgtttttcgttcagtttatttatatgtgatataaaactttcttggtttatttcttgatttaccaggaaaggatggaaagggggtacgag

SEQ ID NO: 33992 - DNA, 591 bp, Arabidopsis thaliana landsberg
gcaatgttttcctaatctgggcacgatataagcctttcatatgcccaataatttagattattactatgaatttttgacaacactatactagtataaacaaaaaaaaaaatcatttcaactaagaacagtgattaatgatgggtttcttgtaagaatacaataccagatccctaaatcttatgtcttaaggaacttgtttattacatcaatcacattacgttttcctacttaattttttaataaatgcaagttcttagtacgttacatatcattaaaattttccagcacttgttgacatctgttaatatcataactacatactcgttttatctttgatatatatagatataatattgtatctcaaggaattttttttttgggcccgaagcacaaagcttgtctttacatagaataagatatggctgcagatctgtctttaagatttggcagcagatctgttttttggtgaatgtatatttactataatattctttggtttaaattctttgatattttttaatatataaaacgacaaagacaaacacctttaaagaaaatgcaccgattttgaaaataccaaaggaataacat

SEQ ID NO: 33993 - DNA, 1686 bp, Arabidopsis thaliana landsberg
gtgatcctaacaatagtagcctccataactaaccagtaagatataccacgtggataattaccgcgcgtatagatctcagactccagaaaccagacacattgtttccgtactagtaagattcaggggtgttttcgtcatttcgtgttattcctgtcacgcttctttcttcttcttcttcttcctcatttttctccttctcctttatatatcaggaaaaaataaaaatttagagagaggttcggttttgttttttcccaccggaaaatctccgactaatcggcgtgatgaacccgaaactgcaaatcgttaaccgaattcggatcttagaaaaaccggttcaccactctcttctctatctccgagctgtgtttctctttattccgacttaaagcttcaatttttccgattccgaatccaacaaaagagaaaacacatttctttctccttaaaaagtttctttttgttgttgttgtgtgtttatttcttgttctgttgcaaaaatgtcgacgtcaccatcaattttatccgttttgtcggaagatcttattgtccgagtctacgaatgtctagacccaccgtgtcggaaaacatggcgtttaatcagcaaagacttcctccgagtcgactcattgactcgtaccacgatccgaatcctccgggtcgaatttctcccgacgcttctcttcaaatacccaaacctctcttccctcgacctctccgtctgtccaaaactcgacgacgatgtcgttttacgtttagcattagacggcgccgtttcaacgttaggcattaagtcactgaacttaagccgttccaccgcagttcgagctagaggacttgagacgttggcgcgtatgtgtcacgctttagagcgcgtcgacgtgtctcattgctggggattcggtgatagagaagcggcggcgttgtcgtctgcgacggggctgagagagctgaagatggataagtgtttgagtttaagcgatgttggattagcgaggattgttgttggatgtagtaatctgaataagattagcttgaaatggtgtatggagatctctgatcttggtattgatcttctttgtaagatttgcaaaggattgaaatctctagatgtctcttatcttaaggtaaatgtcataaatttgaaaactttatggagattggattcaaagtttctacctttgtagtgattgatgtgagatttgtttgtgaatttgattcagatcacaaatgattcgatccggtctatagcgttgctggtaaagcttgaggttttagatatggtaagttgtcctttgatagatgatggtgggttacagtttctagagaatggttctccttcattacaggtacttactttgccttcttcacacactaagtatggattcagtattcgatttttgaaatgtgtgagtgctataaacaggaggttgatgtcactaggtgtgagcgtgtgagtttgtctggcttgatctctatagtcagaggccatcctgatattcaactccttaaagccagtcactgtgtatcggtaagtttgcgattgaggccttgaattattctatttactcgataatgttctctgctaatctttgtgattcacaggaagtctctggtagcttcttacagtacatcaaaggtttgaagcatctgaagactatatggattgatggagctcatgtttct

SEQ ID NO: 33994 - DNA, 4220 bp, Arabidopsis thaliana landsberg
gatgaaactgtaacatttaaatatatttattttggaatcatttagcattcatttgaaggatcatcaattacttcttattcttttttttgttgataggccgtaggaattacagatttttggtcaatattcttcttgtgttcataaccaatcgtcgataatactatgtttaaggcgtaaaccatccatcctatttcataaccttaaaattagcacaaaaaaaacaccacaaaaaaaacactccagactattaatagtaaatttcatttcttattaaacacataatcatctgtttaggaaaatcaaacaacaaaaacagaaaaaagaaaatttgaaaaagaaaataaaaagttttcgtgttgtttgagacgagatgaataatacatggagaggaattgtagtatgttgcctcttaatactcttcgtcttatcaactttcttcatcagaattgactcctccaggctacctccttgtaggattcatgccacccgttttcgttatccgaatggtactaaaccgtgcgattcgaccattgagcgtggataatgaggcagtattgaatattattatatatatatttataagtatcacctaataaaataaatttcacaaggaaacttaattactgtactagtttagtaactttgttaattttaagttttccctttttctcttataaaatactatatgaaaatctaaatttttatgcaattttcattttttgtaagtgattatgtagtttgatttctatcccaaagctagcacaagggaaatttggtatgaatggactggatttggatctgataacagacaaagcgttaggacctgattttatcaatattggccctttatcaagccatgtccaacattgaacccacaactcatttttgtgcttgatccttaaggtataataacaccttcaaaacatgcaagaaatttctggaggaaattaacagaaatgagatcagtgggtggacaaaagtaatttcctattgataaaagtgatttctaaagggcaaaacttagtacatatgattaagacatacaaaagatcaatgctattgcaaatattgtagcaactttctacttgtgtttatcaaggagatatatgagacgactagcctaagagcaaaagctggcgagaagaatggcaccaacgaacataagagccgttgaggtcaggccagtcagaggaagcgcaatgtgtgtaatggtgaaccagagtgagagaactcgttcttgctcctcttcttttagttcagatatcatcttctccaacactttctctagatacgctcgttccgcacttcttaacaccggtttatcagctccgttgctggctcggcacagcaacggaatccacgaaataagcatcttcttctttatctctctcaattttgcttcctctccttcttcttcttcgcttccctttttaatgtccttggcttctttgaatagtaaggcttcacagtaaaaatgaaatttgttttggaaagtcaaaatatttttatcatacaaaataaaaaaagaatatcctgaacagaaaaagagtataatcctattttctttcttttttccagattgggaaagagattattctatatagtatttaccatatttacgaaaaattaaaaaatcatgcggtaaaaataaatatttaccagagatttggatcaaagagcattgaagacgtggctcacacgaaagagcaagccaagctaagttagaagccgaagcccatttctcaacggcttcatccacgaatccataaaccgccatcttctccgccaaccaaagcaattccgccgccagtttctccgacgtttccgccgtctgatccgccgtctcttctccaccccaaccgataaacccatctcccacggctctaaccgcagctctgacaacccggtttaatccacgacgaaccggttcatctatatctctccggttagggttacgctcaaccgccgtctctaaccggcttagagttgtacgaaacgacgcgtttaaaaccctacggttcaaatccaacaaggcgactgagttttctccttgattctcgtcgattagtctctccgccaacgatcgaaccacttggtactttatagaactcaccggaatttcattcatcgctgacaatacctgccaagttggtcgtccgattcccgattttttgcaatggttgatcaccagtatcccattattctttttcgtcttcgatgaataagggttggcgaaagagactactcacgaattagggtttgcgaaatagacccctgaaggaagatagcgtcagagtaagaggaaacacgtgacgagaaatacacggagtttctcgaggagctttgaattcccgttgatttgaaggagagattcatcagcgaaaacaacgacggcgacgatgatgttgcggaggagctgaggaactacagcagctgatgacagcttctccattatttcttctctttaattacaattacggttacaaaagaaactctctcgtctctttcgttcgtcggtggttatataataatcgacagcggttttctatttatttttttaattgatttctgttttgttttttgtttttgtgaatcacaagctatataactttggtttatagttcaaaaatcaaaattgaattacaactgccgtgaaccggaagaaacagatatcagatatgtggctgatatctgtcagcgaatcaaaagatacttcagacatgatttgcttattgtaagaagtagactaactcaaattacaataatgttttatggttatttagttaacactttaagaagaaaaaaattaaacccctagaaaccaatcaccatgtaaatgttcaataacccaattggtttgtgtacaaaggcatttttcctagacgacagaaatctatgggtacattacaactgaaaaagaaccaaagtctctatccccaaactaaatcaatcaaattcgtcactcaaaactatgtagagagaatttctattccagctgtatttacatggaaacctaaaatgaaaaaaaaagaggttagaaagcattgttgatgacgatggtataccagatgggtgtttatgtacggtttttctttctttctttctcagctgcagtgatcatcattcaaatgcaagagacatgaaagtgtcgtcatccaaaagagaatcaatgtcaattaaatcgtcttcttcgttgtaatttgcagcttcctctgtgttgtttttcaatgccgagctagaagaagcctgctcaagaattcacaaaaacaagagtctcaagtttcaactattgaggtggatatacgtctgttctggagattcagatacactaacaattgttacctcgttctcacggaagccttcaacgacagtcaatagtctacggtattgagcccgtgcctctggatattgagccatagacttcactcgggttagagccttttgaagcctttcctctgtttgtttccttccttccttgagaaaatcataatcatcttcttgtggggcaggacatacaggttctgttggcttgctgattgtatcacgtttgaaaccgcgtaagccactacctttacgcctccatcgcaagatgattttctcaagcaatcctacggaccaaataatggctcggtattgttttcggacttgatgtcctctcacatgagcctaataggttatcaataaaaacccaacaatgagacagaagcaaagaaaacacaacttgaattaaagaaggaagttattaaaacctgaatcttgacgattctttgtcggatcagaaggaactcctttctcttcttccaaccacggtattttttctggatttgaaccgcagcagcatgaacagcaccactactgtgtcctgacttcttagtctttgcagccgcaaaagacacagctaactcatcggatatatcgaatttgttgtcgccaccaagttcagagagctgtttccgctggaacgactgcattctgaacacttgatgaagacgatcagctgcttgtgtagcatttaagacagcagtaagtgaatccttcattgaaagtgtttctggtacatcaccataactcataggagtagctgttcgctcagctactgtcagaacagcttttgctccagaggagtcagcggagctgttttccttagcgtccactgttagtttttcaaggtagctagtgagggatgactctgcaaggaaacccgatattcccctgtgtcc

SEQ ID NO: 33995 - DNA, 504 bp, Arabidopsis thaliana landsberg
ccgctcttgttgcaaggttcctcagtgttatcaaatctaaattaatttacaaatgtaaaggcattagcacttgcgagaaaagtagacttcctatttgaggtcataatagcaaatattacttgattttcatatacggtgatgcttgtctcaaaagataggaggtatcaagaataatcctttccccctgtttggccggtaaaaattggtaaaataggtgaaaaaggaaaaaaaaaattccaatatttgaaaactaactcttgttaaagaactcaagaagaaatcccacaagttatgcataccaaagccatactttttttcccctctaggtaatctcgcaggtcccttgttaactacataaatcatattacctttagaagggggaaggattcaatacctcataaaacgcaaaagaaattcatgagatactgtgaagggttttggaggacaccgctaccaaagaatttggatgatgtttctgcaatcccttctttcggttcttctggt

SEQ ID NO: 33996 - DNA, 713 bp, Arabidopsis thaliana landsberg
caaacaaaaatcccacatagggaccatctagagagaacgagaccctaggctcactgaagcgatcaacgcttccgccggatgtaaagaggagaggctctctcttagaaccctttttctcattttaatcacaaatattttaatatttccttaattgaccaaaaatatagataagtaaataaatcatttatatgaatgaatacttgaatttctaatctcaattatgtacactaaatatttgaaattgattacaaagttaccttaatgcacacttgatttattattattttcttgtcaacatttgaattacttttataagttctaaacttctaattcatatgtaaagaaatacaccaaaaaatatttatgtatatgtaatgaaaaatactgtattgtaaaaattatcaaaaaatatactcatcagaaatatatggacatgaagattgttggaggagaagaagataaagagataaagatagagatgatgagaagcaagtaaggacaggatttgaggcttttgagataaacctccaaaacctttcacagtccacagaaagaaactctctgaattccacatatatgggagagagattcttaaaccaacctccaaaatctagattcaaaatagctaaaattaaaattccttaaaacaatcaataatgggtacaacatcactaatcctcaagaacaaaaatgaaattctcttaatcagtttc

SEQ ID NO: 33997 - DNA, 4172 bp, Arabidopsis thaliana landsberg
atggtggagatagattgatgagtaaggccgatgtgcatgaccattggaatcacaaccaagaaggtgaagaaagacaacgagtttgtcctggtggaggagctctttcaactttggatctgcgtgagacctattgagaaggccttcaaattgatcgaaagaccactcatccaaaaaggaggcatctacaccaagatacaacatctcagttcattctagtaataaaaagcttctgttgcattcacaagcaataagcaaattgaccgcagagtcaaatttcattccagatactaatacatagtttttcaaacaaggaaacaaacctgtagcaaagtcttcatactcgtgcgggtaagaattccaagtgctgtgaggtaaggcactgcagaaaataggaataatatcggggctcccaaaagcaaacgtatgccggctctggttaaaaacagaatcaaattcaacaggattagctttccatcctgcaaacacacaatttcatttcaaaaagccgctaccaacttgacaagactaagtaagtatctacaagcatatatacagaagaagaagagaacctttagtgacagcactaggatcttcatagaaaccagcaataatagcaacatggccaggtctagattctgtaggaggacgagcatgagagacaccccaacgcccctgattctttataatattcctcaagaagggtgctctgtatttgccttcctcgtgcggctcaaagaatttgtcagcacgtaaaccatccgctgataaatgtccatcagcaaaagcaaatcagaaatgtctcgagcagaatcatatatactctaaaatcttactataagctataactgaaagaatccagagctgaagtaagaaacacatttcagtgtgtgaggactactactacgtagtacgtacagatgagaagaacaagtcgcttagccggcggctcagagaatctcggaggcacaggatccatcccgtggactatgggcgttttgaagtaaatgtcgaagatgcttagcatgtagacggcgtgaagagcaacaccgagaaccaccagccatgtttctcgcctctttagccatcttcgtctactagcgaccacgacggctgttgctcgactctgatccgaacctccaactcccaagatcccgtcgctcctcatagatcttcccaattctccgaccaaaaacatttctccttggatttttttcttaaatctccatttttcagtgttcactattctcagaactaaagcccaaaccttaagcttacgatataacaaaactatgatataagttaagttaggcccaatccagttgagatttatttctttttgtaacaatttagaaacataaataatccaattgtgttcctctgcgctcaaattattattacaacgttccaaatatatgaatacaaagaagagtgcagagatggttgttcaaaaaaaaaaaaaaagaagagtacagagataaattacaaaaaagcagagaataagtagcaacaataatataagatgagtctctcaaatccagaaatactcacaaaagagaaagagagcagatcactcaaaaatgactcccacttttttcataaactttttttttactttcttataaaaatatctctcagttcttcactgtggtcacatgtttcagaagcatttcgacaacatctttggaaatcctcgatgcttcgttcttcaactgctcgattttggtatcagtctcttgctccagcctcttcacattcgcaccagagtctccgcttgtctgttttcaacaatatgataattagagtgaggacactacattttaggttgtctaagaacaattttctctttttaaaaaatcatttacctcctcaagtttcctctggaagtcttgctctgtttgagctttgtattcggcaatctctttctctgcctcttccttagcttgcttcagtcttgccatttttgctgcaaccaataaacaggttataaatcaatttcaagccatataatcaaacctatgcattatgctccaagtgctacacataactacaacttcatttccataaaatatgcaggctcccaagaatgtaattggatgtagatattagtgttggggaaactttcagttctaaagttgacaagtaattatagagtttcagatatgaaaactaaactggcaaaggaaaaaaaaaaacttaaaattaccggtccttgcagcattgacaatgtgttgagcttctacctcagcagcaagcaactgttggatcgaaccttgacctctgttggattccatgctttattgcacaaaagtctacaaaaacaaatctgttaatatataaggtccaataatgcatcaggaaaacctaaacaacaaaaatttgaacttccataaaggcaaaacatacctaaaattttgctcataaacctacacataatctcactgtcactgatcactaattcggccgatcatatgaattacgagactgactaactactaacttaaggacataacaggattagagaaacataatttacccataattcaaagcagatctgttactctagcaatccataagtcggaagcaaaacaagtggaaaatcaaattgggatgagaatcagatagatctaagatcccgaaaaaaggattaattagaatctaagatcaccaagtaagtgaaatccatgtataaattagttgatattcaaacaaaaatcaaaactcttaacaccatcctaacaacgatcctaccacgttgaatcaccggaatttccgaaagaagtcaaaacagtttgacttccgatagaaaactgaaaccgatcgcattgaagagaagaagacacattacctttgttgattccgaggacaagagagaagagagaaaatcgaggatctatcaacacgtctatctaatctgctgctctcggtacttgtatgattaacatcagcagtgggcccacttttaatagacattgaagcccattcgtataatgggtcttatctacaaaaagcccaaagtaaccatgagacacgcggagcctcgtaataataatgggaccgggccattgcaaaacataaaatatatatttatttatacatgaatgaaaaccattaattaattttataataaggtattattattccactctctctctctagactctgaattagctcattcttgcctccaaacaaatattcctgacagaccagaccactcgtaagacagaccaaaccctaaactaaaagcatccacgttctttgtttttgtattgatggtctgatctcatatccatggagatggagaatcaccgccccggcagtttcacctacatgggccgcaaattcagcgatttaagtctcaacgatgactcctctgctttcagcgattgtaacagcgacagatccggcgaattccccactgcttcctccgagagccgtcgtctcctcctctcttgcgcctctgagaattccgatgatctcatcaatcatctcgtgtcgcatcttgattcctcctattcgatcgatgagcagaagcaagctgctatggagatcaggctcttatccaagaacaaacctgagaatcggatcaaaatcgccaaggccggtgcgattaagccgttgatttctctgatctcttcttcggatcttcagcttcaggagtatggtgtcactgcaatcttgaatctatctctctgcgacgagaacaaagagtcgattgcttcttccggtgcgattaagccgcttgtcagggctttgaaaatgggaacaccgactgctaaagagaacgctgcttgtgctctgctccgtctatcgcagatcgaggagaacaaagtcgccatcgggagatccggagcgattcctctgttggtgaaccttctagaaacaggcggattcagagcgaagaaggacgcgtcgacggctctgtactcgttgtgctcagctaaagagaacaaaatcagagccgtgcaatcgggaattatgaagccgcttgttgaattgatggcggatttcggatcaaacatggtggataaatcggcgtttgtgatgagtctgttaatgtcggtgccggaatcgaaaccggcgattgtggaggaaggaggagttccggtgctggtggagatagtagaggtgggaacacagagacagaaagagatggctgtgtcgatattgctaca

SEQ ID NO: 33998 - DNA, 1089 bp, Arabidopsis thaliana landsberg
acgggaacgcagacaacctcaggcgcaagaagagctcgaacagcacccatacacagctgcgaaccacaagaacaagcaaagacatcagaaacggctctcacacacgcacaagaaccagccccagcatcctgaccatgaatgcccaacaagaagacaaacagccaagcactagagcgacacccgcaaacaggagatctcgacggaaatcgaagcagaagaagcgctgagaagtataacctccagagctctaaccataataccacgctcagctgcatcatctttaccaatttttccaaccgtgtaagttttacctgtgccggtttgaccataagccataatggtaccattgtatccactcagaacaccctgtaaattcaatgtagtagatatcaataaccaaaagtattacttcttaacattccaataagttatataaacatcagacactttctaacctcgacgacaggttttgctactccttcatagacacgcttttgcgaagctgtgtctgtaaagacttcataaatttgtatgactcagagttccagttgttcttcctcaacttaagcctctttatctgtacacacagaaacaaaacagaactttgtaagaatataactaacacagagttgaaagagagaagatgtgattagtgagcatctaataactcacttctggttgtaactcaacaagatcagcaaaatcagcatccgagataagctcctctccgtttcgaggtcgaactcttacagagactcttaccctcccaggatcttcatagaaaagtatgaaactttaaaaacagattatgccaattagtgcattttatgaaagtctaacaatgcaccaattcgaatcaacaatctctgaatcgaatgtagaaaaagtcaaatactttaagaaattgaaaaaaaaagctcatctttcaattgtggaatcatacgggtgaatatgaagagagaaggagaaaaaggacagaccattgtcgtcgtcgaagtctttcgattgagatcggcgaacgggagtgccggagcggcgtgtggaaggagaagaggcggagacagaggacgaagaggaggaggaggaagc

SEQ ID NO: 33999 - DNA, 1063 bp, Arabidopsis thaliana landsberg
  unsure (1)..(1063): unsure at all n locations
tgtctactcgagaatgctcagccaagactagagtgacattaaagtctccaaatatcaaccatggtttattaagaatcatttgagagtcgtaatgatctcgtagctcctgccatagttctttgcgttcctctacaccattagaagcatagacaaaggaacaaaagaattcgtcatcgagctcctcaagcttcaccgaacaagtaattaattgagcagacttatagaaggggctcaatctaacatgactttgccaaactacccaaattcgacctctgctattgtgttcataatttgtcaaaactgaccatcccttaaacaattgattcatcaacatctgcaccttcttctcactaaaccgagtttctaacaaacacccaaacttgaacgtattctcaaaattccatttttgaattatggaatattttgacgttntgtttagaccacgaacattccaaaagaaacccaacatttaatgatgtttggagtgatgcttcttgattgatctctagagggatcactagtgaaagaagcagaatgttgggaataattttatgagcagtctttgatccgcgtggcagagatggtcgcgtggcagctcaaccttggatacacggctttttgaaacagcgtcatgggattgagctgtaccagtttgaacttcttgatcaacaaaaccggaaccagaaactcgagacggaatctctgcttcccctgcttcctctgttttattttcctcctcagtgtcagccttttctcccagaactgaatatgagttggacaaaatcgaaacttcaccatagcttgaactcttttttttttttaatcctgaactgctgcgattcatgttaggcttgatccattccccaccatcttctttctctatgtctacatcaacgcctttacccgttgtcaaatcttctgtagtcgcatggctcttttccttctcaagagcgatgggtggcgatagagttgtttcccttacttcctctataactaccatgataggtgctgaacttgatggagcttgagtatctcgagcttctgcagaaagacacgtagagtg

SEQ ID NO: 34000 - DNA, 890 bp, Arabidopsis thaliana landsberg
ggtttccaaattccaacgatattgttagaatgaatcagattctagtgtggtcttgcttggtcaataagaaataaaagtatggtagaagcaaaaattcttagaaccacgaacaattcaaacaaacagatctttcataaataaaacaaaaagaaatcaataatttttcccaacaatgatacctagaatgacagagacaagagccactccaagtgcgatcttcaatgtcatgagatgccatgtttcagctttctgaatcataacgtgccctgaagacgaagcagcatctaagttcttcttgatcttagtttgctttggatttgaaaaagataagtcactgtctcgagatttcacttctacttcttcctcttttcccgtagactcagtttcctgcaaatttggtttctacatcaacagagcattctttcgacattttgtatagaaaagaaatttaacgaagatgcggctatgttttatatggctaaccttagatttagcatctgcaagcttcactttctgttcaagctcattcaacttcgattcgagatgaacgaccacagactttttagcatcaagctcttcttgtgatttctttaaagtagctcccaactctgaatgcttatgagacaaggcttctttctgtttcccccacagaagaaagtatcataactcaagaatatatactaagcacaattagatataaagttagaagaagctaaagaaatatttattaacctgttcagaaatggctgtgtgagaagcttgaagctctttatgaagctgaattgctttctcttcaagcacatctcggtcactcgccttatgtttatgttcctgcaatttagaggtcaattctgctaccttttccacccgagataaaaaaagacacgaaa

SEQ ID NO: 34001 - DNA, 2882 bp, Arabidopsis thaliana landsberg
agttaacttgtattcaaaaaaaggacttcttgtagggacttgatgtcaccaatgcttcccggaataggacctgtgaatctgcatcacatcacatgtaattcccccccaaaaaataactttagaaccttaaaaatacaagatacaattcacaaatatctcgtgacatcataataccaaacttgaaataaaaacagagtaaataactctgtaatttgaaacagagtaaataattccctgataacaaaacgagaatgaaagtgtggagcttttgagacctgttattagcgaatgtgaggtaaagagcggtgatcgatccaagattttcagggagtctctgaacaagattgttgttgttgatgaacaatacgtcgaggtctagattgaaaacctgaggagggacagaaccggagaaagaattgaatctgagatcgagaaacgtgaggttcgttgcttttaacacagagcttgggaactctccagagagcttattgttgctgagatcaagctcgaaaaggtacttcaatttgctgaagtttggaacagagcccacgaaattgttactgtttgcgtgaaagatggtgacttcttctaacttgttgaggaagttatctagccggagtttcttgccacccaagttaaaattgttgaactgaatgctggcaagtgcgaggtcgtttgttcccggtaacttggcgcactcgagtcctatgtatttgtcctgagcgcaaatgtcggtgcctacccatgttttaagtatgctctttggatcatcttcgattagcgtctggaaattcttgatgactggataaactttctttattaatgggcttgagaaatgtagcggcggtggcggtggaggaggaagtggccgtggtggcggtggtgatggtgttatataatgatgataaggagggggaggatagtgttcaggctccggagatggggatggaggagggagtgactgtggtggcggcgggggtggtggcgtttgaggaggaggaggcagcggaagatagtcttctggctccggagatggcgcaggagaattgtaattggtgctatcactgccaccgccgatgatgatttcgagagattttctgtaggtgttgtggttgtttccggtggctagaattgaaagaaagtgaacagacagaatcaagaaaatggaaggataataatttggggccattgctgatagattgatgagagccttgaggattggcttaggcagagctacatatagagaaagtgactgaaaatgatgagaagtcaatgcacatgtcttcttgtgggctggttttaggttacaacttacaatgcaattagctaaatttacatttgaattattggtaagaaaaaatattaattaagatcttcatattataatgccaaagggtggttggatacatgtgtagctatagcttcgttggtgtatgatttttttccgtcaacggcttccacgaaaaatcttggtaatagaaaaagagtaacataaattctttagtgtgtgattagcaaaaaataataaccaattagtatttgcaacaaacaattttctaatagaatctgatcaaggactctaccatagattttggtgctttggatccattcttagagtcaaaggagcgaatgcctctggtgagtcaaagggcattggctttgtacagtacaacactgaagaatcagctcacaaagccatagaacatatgaaacgaatgtttcttaacgataggaaagtatatacgttggaccttttcttcagagagatttccaagcgaaaaggagatttaatttcacggatatttatgtcaagaatctctccaagtccttgactgataaagatctgaacacaatttttcaagagtttggaccaacgaaaagttggtgtgatcattagggatggttttggatttgtcaattttaagaatccagaggatgcagagaaagctgttgatgctttaaacggaaagaagtttgaggacaaggagtggattcttacaaaatcgaaaaagaagtatcagagtgaatctgaagtgaagcgaggtttgaaacaggctatcaaaaacagatcacagggttcgagtaacttgtgtgttaagaaattggatacacgagtaacagatgagagcctcaaagacattttttcttcctatggaactataacatcatgcaaggtttgaaactctatacacagaaaaaaattgaggtcgttgttggattcaagatttttacatttttgaatgtaaacaggtcactcatgagcgacaatagtggagtaagtcaaagatcaggctttgtttcatttttgaagccagagggcggacgcttttaaagctgtcagtgataccctatgggtttctcaaaaaaaaaaaaaagtattttaataagagagtataaaagactaaactaaaaagtaaaaagaaaaagaattaagacattgaattgagtagcaagttagaactaaattaagccccaaaactgatcagctgttatgtatgattcagtagctttccattgatgaatcaagttcatcttctagatgcggaactgtctttccttcaacccagcctctccggaggcctctctcggcgacgaccctcttccccatccgtccttaggtatgcattttttgacactccgatactgcccaccacgtgtttgttaaaatgccttagtgaggtgtccaccacgtgtttgttgaaatgtctaactgagttcatctttggctctgttgtacagagagtggtgtggcctccacttccagaaacgacgcttctatttcgtctcccacgtttaacctcagccgcgagttagtcacgcttttcaaaccccttcataccacgacgtacgttcacgggttcacgtggttgttgaccttacac

SEQ ID NO: 34002 - DNA, 1116 bp, Arabidopsis thaliana landsberg
tattattatcttaatctttccgactttcaatatattttattgtttttttatttgtttgtttatttctagacagtgcaaagtcaataaaatattggtagcgataatatagacggaagcgtgtgatgtcaaactcttgacacgtggcagcttctgtttaataactggtaacagtccaaaataattttttcacatgaatccgactccgaaaataatattcttttaaaaccgaaaaattaaatgttatcaaatactaatatattataacaataagatatcatttttgagtgggtcctacctacggatgctgactaataaaataattaaagaatacgttttttaattaatcggtggtaaaataattaataaaagaagaaatatcggttatttattattatatgcgagatctcttataacggagggccaagattttgtcacgctggtatatagcgtatcgtgaccgttggatgtattcacaccgacggtgaagattgagaaaatgttttacggcaggagatatgagccgtggatttattcgctactctgcttttatgaggccacaaataaaggagataatggaagcaagtagagagatagaggagagagagtttgataaagagagagaaaaagcgggttgcgatttgggagaagagaaatagagaggagaagcattagagaagaagaagaagaagatggatagaaatagagaagctagaagagtacctatggcggctgccggaaatggtctttcccggcggagacatagagccggaagtttcagagattcaccaggtttgtttttgaatctcttgatttggtttgtttttcatcagatctgagagaaaacgtttggttctgatttttctgaacgtttttttcacagaggaggaaggtccggtggagttaccggaggcggcgaggttgagagatcgaggagggagtaataagaaggatcgagatcgggaacgtgatagagacagagagagggaaagagaaagagatagggagagagatcggttaaatagccggagtaaacggcggagaggagaacgcttaatgatggttcacggtaatctagacgacggtggcgacgatagctcggaagagagtgtcaacggg

SEQ ID NO: 34003 - DNA, 756 bp, Arabidopsis thaliana landsberg
gaatgaatgttcctccatatatttggaaactatgtagcatatgattatttatttttaactattaaatagaacgaattctcttaaatgtcttcgttttctatatgaattcttttattcttttttataggttattagagcatgtacaatggttgggatttcgtttcctatttgaattcctttattcatttttataggttattaaagcatgtacaatggttgggactgtcaaagttcctaaaaagtaaaaagtaataatattttattattttaattatattctagtttttaatataaattggtcattgataagattacacgtgcaaatatgtttgtgggaacgtcccttaaatgaggactttcagagattctctttcatccctcttttactttttaaatatttttttatttttaagtggatgagcctgtagaaagagacccacgttggacgtgctcttaggccttaactaggcatatgataagggtctaacgcctatgtcgattaataggagcataaggtgttagtgcattacttacttgttttctaatattttcataattttataataaacattgcttataaaatatggaatgttgaaaacggtacacattcaaacttgtttatatatatatatatatattcacatttagtttatatgaaaacttaataacttactccaaataactaagacaattgaatgtgaagaaatatcttacattggaaaaatgagaaaggacttgatataatgggatggagca

SEQ ID NO: 34004 - DNA, 812 bp, Arabidopsis thaliana landsberg
  unsure (1)..(812): unsure at all n locations
atgatagtgaattctccaaatacacgtcactgggatttacgatctcaaatgagactttataattaaccagtactgtggctcaattcgaatatcattagtttgaatctcttctgaagataaagaggaatggaatagtttgcatgaaagatgaaatgaaagagcactatgcgtacgaaagccaatagtgtacgtgtaccatccgcgttcagtaaacggccgtttaccgccgtcaacgcgttttctttttccttatactaattgctgaatattccacttcttctccttttgatcatttgttgcattttccactttttatgtaattagtattttactaattttaatcgatttcctcttcttctttttttctttatctttgctagtacaaaaatcaagttgtttgtcaaaaaagtggatttataatttttagtgtaccttctcaacaactcaatttattgtgaatcgtccaaatgatctagtgtttccagaactcgatacttcttcgcatttttattaatagttctatgttttctcttgtctttgaagaatttgtgaatacttggttcttttggctacaattttaagctctcgtaagaatgttataacaaatgaaaacgaatatgacatgtaatatagtggtttgtattagtgttattgatgtgctaccgtcctacttcaaattcgtataatatatcaccgttaaacgcagaaaaacaaaagaagaatccaaacaagataatgcaccagagatagtcgggctatgatccaagggaaagggatcacacctnccctgcgatttccactgtatataaact

SEQ ID NO: 34005 - DNA, 956 bp, Arabidopsis thaliana landsberg
taacacgtccagccatgttaagccgacttaatattttgtcgttttgtgttttagggacaccttagatcattgaccaaaaaagacttttatcctgtggacaataacttatctacaatttctaatccaaattcatgtggatctattgagtatttgcatttgtttccttcagtaatcttgtttatctctgtctaagctacaacatacttgagttttaacgactttttgatttttccatgttttatgggtttgtgttcttgagtatgtctgagtagttttagagttcttgaggattggattgagatttttagtggaatttttagtttctttaggtggttaaatagttatttgcatggtttccctttttgattagtagtccttaaagttatttcttttctgatcaattggaagttgagcctagacattttcatgcgcacaaagtgtttcatgaaatctttgaaccaactaatttcaaagatttacattcctagcccaaaagattggatgttgaggatgtttattggctttaataggttggatcttaatgcttgtttagtaaaattttgtcaatgagagttgaatctgaaattttgtcaatgagagttgatttctatcatgagagtggattaatctgttaatgaacatgtcgtctagggatagtttgattgatttttttagccatctaaatatattaaggattctaccataatcaataaccccatccttaggacttttatatgaatttcaattgttatcttcatactcgatttctagctcgacttatttgcttcactttattgcttttgcatcgctttttaccattgctaagttgtttagtttccttgttcaagcttatgcatgatagctcttggtatgtagtttccttgtttctttgcatgatcactttaggttgttagctactaaaaaatctatctgatcacatcttgtctcttaacatc

SEQ ID NO: 34006 - DNA, 4410 bp, Arabidopsis thaliana landsberg
tatttaacaagaagaggcggatcgaacccagctgagggtgtgtatcgtttagaacgattcaattcaagcagtatgttttcccattattcttcgtcttcaaactattttggcagaatttgaaactctctcttgtcataagggaatcgcatcagatgcttgggtcttaacatggtcattatatgacttggctcggtatggtaataagcaagcctcgttctttgatgcatttacaatctcaccaacagcctagcagaagcaccaacaaaggttatgatgtttgttagacaaaagaaagccaatgattttaaaagacttcaatagaaaaaaatgaaagattgaattaccttcaagaagggtatagttagatttggatgctgttgtctaccaactatttcaagttcctgggaaaccaatcgcatctgtagatcccccaaaatggaaaaagaaagttcttaacacactgaatatgatgaatcggagtgtgatgaagatccaacagaggcaattttccatgaaaaagaaaaaggttcactacaaatggccttaccggttcctccaacaaaggtaatatatcatgggcaaccccgatataagaaagcatagcagctagaacatttgggacatgaggattaagatccaggtggcgcagctggcgacaaatagagtcaataacataatccgcatttgcaacaaccagatgcccaacctgccaaacaaacaaacaaaagacaacaagatgttgattttaaaaacgattctatgatgtgattgaatattttcgactacattattcttcattctcactgtgggatggcctgaggtggcagcaagaagacgtaggacagtgtctgaagcatttctaacttggaaactcgagcaggtaagactctcaagcagaaggtaaagcgaagagtgaagaaatccacttgaagcaaagtctttccctagacacaaggaaaacacacctactccttctattataacttggtgtagcattgcactgtctcttaagaaatgcagactaatatgttgcccatcgttatcagtttggcccagaattgccttttggtccacggggagatcccaaacttcagaagcttggtattcatgcaggattttaccaacgcactcaatcagatttgtttttgcacgtttgttccaagagatttcccaggaaagtttgtctcttcccttccttgacttctgaagcagtcttgagagagcatccgttgcttgatcagatagaccaaagatcatctcattcaagatacaagcagcagttgccgcctggcgaactaactgtcctgaaccagttcgattacaccacgactgccagtcttctccattatactcctttacacgaacttctgaaaccaatttacggacaaaccccagaggaatatccaggatgactgctaaatgcccttcgtttttaaatcctatcaaacacaaacacaacggagatgatttactatcagtaactaactcatttataagttaactgcagagtaattttcagaaaaatggttccgaaggaatatgaaatgacctgccattaaggataagcctacaagtctaaggattccagcgagcatctcgtagagcttctggctaccaacataagaaaaccagggaggcatgcgaggtaacatatggctactgggggacgatatctccaattttacttgatctgtttctgtgatatttggaacagcacggttgtatctggtctcccggaaccccacttttagttctgtgatagaagggaggtaacctgtcgatgatgaaggcctttctgcgatgagtttctcaagagaaccggtgaatgctgaattatggcttagacagagagaaaatatatccaggaatctgctagctgttatctacataacagaatgccatgaagaactaatcatatatcgcaagtcattattagaacatgtttggtttttcgaactagatttgctaatcaagaaagaagtagcaccaaacctatgagcgtgtcaagaaagaatacatacgggagactgaagatgatccgccaaaaactgaggaccggaataataggtgatgacaagtaactgcttcaccaccgaaagtgcaggcaattcctcattccccagaaccacttttggaagcctctcaagtagtctgttgtcaacaagccacggaagaagaataaaaaaacacatctctgtttagacatctgcatacttagcttcaaaggaaaaaaacaatatacaacaaatacctgctaaagatcttttttatatcactctctacatggttttttgtactttctgagaataaatgatcgagaaattcctgagctgctacagaaacttcatcagagtcatcaacagccagagtacatacgcattcctgcatcattataaggaatttatctggtggcaatccttggaatggatatacccaatatcatgagttgttgttagttatgaacctaccaacatcactaatctagcacccttcaacgagcaagagctcttagagagcagcccacgtattgctgctagaaatccccatcgaattttgccggctgggtgaataagaatctgaaaccaattaagaattaccatttagaaaaaacaaatccaaagggatttgggacaaatgtgttgaacgtagcacgagaataaatagcttacatgaggaaatgtctcacacagcagcttatttacgtgagatgtagtgctatctaaccatttcttcgtgcgttcaacaagaaaggagtcacgactcagattcagattggatttttcaggtacattgatgttaacaatctcttggtttgtaatttctgtcagctcgtcactctgtccttgagattttgttgtcagagaacgaagttcgtctaaaattgagtgtgcagattcatgtttctgcgacttagtatcaccattagaaatctcgagagccgatgaattagcctcatcctcaaggacgatcataagaaactcagctaaccctctaattgcttggtccaatgcatcaacacttcctgcagctccgcttatcattgctctcgaaacatgcaacactttggaaacttggctaacaacaccaggtagaaaaaacgccaacacatcagcagtaccaatctgcaacaagaaacatgttctcattaggacccatgggtgccagaaatggtccaaaccatatatgcataatttaaaagttaccttagccacaagtatccgtaaagccataaaggcttcaactcgaagatttgcacttcctcgatgtcctcgagaagcctcagcatcagcgaccttgtggagtgatcagaattgaaataccttagaatgtataaaactacatgactccagatgaaagaaaaaagaaagcataggagaaaagagggttactttgagaagaatggaaagccaatgaccgacagcagccaaagcagactgagactgaagaaatgcaagcaagcattcacgagtttcaaaatcatacttataagactctgaaacttgagtttgataatctcttctatctgacagctgaggccagccaacagtgcgcttacaagagcaagaatcatcagagcatggaagcagaccagagatcattgctcggaaacatttgactatcccttcacgaaactcttcagaagcctcagatggtgataaaacagcaccactagttaacttcttcataattacaaccatctgtacggggaaaaaattcaacacagtttccataactaagctgagaatatgttacccaaatcgagtaaaggtagaaaacaatcataaaaacgattgtgagagttcaaaaccagctcacctgatctatggatccaatgtgacatttttttagaagttcttcgagacaagagattacaccttctgctactttatcactcactctatatggtgtttgtggaaattcctctggcttgttttgcccctgacttctgcaagcaactgcggcgtctaacagaagaagcaatgggaacaaagtgtagctgaaacgtacataaaccaaaacagttctcactaagtaaacagtcgacaatacaccacaaatgaactcttttaaaccttagaattgaaactgctactcatgtgcagattaccgttttttcagcagaaagaagtaaaaagataaagagaaacgagaaaagtggaataattactggaagaaggactggagagaggacggaggagtacggcggaggagaaggagcaaagcagggatcgtggccggatccttacgaggggtttgggaaaggtttagaagctccaagcagagaacacacagttgggcgaagacaggttgggtgtcgggggcaacgccagcgacgcacccattggggtgacagagaattacgacggacttaggccagaggacccgaccaaggactgaaaccaaacgggg

SEQ ID NO: 34007 - DNA, 4668 bp, Arabidopsis thaliana landsberg
  unsure (1)..(4668): unsure at all n locations
gattcagtgtcaagcggaaagtatttcagactcctatgaaacaatgtctaacgttctttttttttctacaccacctttaatgattgcagtagagatgaaaccggaaaaaatagtacaaatgtagttgctatcgcagcatcagtggctagcgtgtttgctgtgctagttatcttggctatcgtttttgtcgtcataaggaaaaaacagagaactaatgaaggtatgatcactagaataggtcttgaaaataatgaaaatgaaagttgtcagatttatactcacttcctttaggttttacagcttcaggaccccgatcagtcactactggcacggttaagagtgatgcaagatcatcgagttcatcaatcataacaaaggaacgcaagttcacttattcggaggtactaaagatgactaaaaactttgagagagttcttggtaaaggagggtttggaacagtgtatcatggtaacttggatgatactcaagtagctgtgaaaatgctttctcattcatcagctcaaggttataaagagttcaaagcagaggtactttaacaagaaatggatatgttaatcctttttttaaaaatattactttctcagttatgaagttgtcatgggacactttgatattctttcgtaggttgaacttcttttagagttcaccatagacatttggtgggacttgtgggttactgtgatgatggagacaacttgngctctgatttatgaatatatggcaaatggagacctgagggagaatatgtcaggtaacatttttaatttagagactgatctgagtttttttgccaaaaaaaagagactctgatataattgaatcttccgtggtttaaaaataaaataggaaaacgtggaggcaatgtccttacctgggaaaacaggatgcaaatagctgtagaggctgcacaaggtgaacaaaattttgacttattctttttacctttgtttgactcattaccaaaaaatattgtttcttgatgttcattttatgatgtatgaaagcaaactctacataagcaaacacattttgtgacagggctggagtatctgcacaatggatgtaggcctcctatggtacatagagatgttaaaactactaacattttattgaatgagcggtgtggagcaaaactagccgactttgggctctcgagatctttcccaatcgatggcgaatgtcatgtttcgacagtggttgcgggtacacctggttacctagacccggagtgagtgagctcaatcaaattttaagagttgtgttgttgaagccaaatacttatatgaaatttatattattcatcttatattattttcaggtactacagaacaaactggctaagcgagaagagtgacgtgtacagcttcggtgtagtgctattagagatagtcacaaaccagcctgtgaccgataaaacccgggagagacctcacatcaatgactgggttgggttcatgctcactaaaggagacatcaagagcatcgctgacccgaaactgatgggggactatgatacaaacggtgcatggaagattgtggagctagctctggcctgtgtgaacccatcttcgaaccggagaccaacaatggcacacgttgtgatggagctaaacgactgtgtggccttagaaaatgcaaggcggcaaggtagtgatgagatgtactcaatgggttctgttgactatagtctctcttctacttctgactttgctcctggagccagataaatttgagaaattcttttatgtgattttatgggaaagcaatcttgttgttattatgtttctatgtgtatttcccaatgtatgttttgaagaaacaatgtacattctatcttcgtgggtgcaggtgttttgattactctgttttgaaactttttgtgtttactatataaatacttgtcttaaaaggattaattatgtaatactctttattttaatttttacgtattaatgcatcaagctagctaacaactagtgacagctcaattttcggaatcatacacatttagaagtcaagggctgactaaaatcattggaggttgcattggcatgcacaaacattacaggccacgcccacattgatataggagacttctcaaacatgatcgttgacttttgacgttggattcatccaggacgccaaagacacaaacaaagagacaaatcaaccaacgaattgccatacaaaagtcaaagtcaacaaattcatgagaacatttgtggattaatagtaataatacaccgaaattacattttgtggattgataatacaccgttgttttgagtttacttatagtcaacggtgttttttgttcgaaagaacataacaataataactcttgtcattgttgacgaaaaacaaatactacttcttatattattttcactcaacttgctctatcgaatcattttgcatcgtgaaaacatattctcaatcaattaatatttattcaatttcaattatgttataagcagttgacttggacttttgagtagtatagctcatatagtcatattctcatatgcataacttgctatcttaaaaaaagctctcctgtggacagtaaggagaacaatggagagacattgtgtgttagttgccacttttttgctgatgcttcatatcgttcatgctcaggatcaaattggtacgtacaaatttgtcacttcaatcaatatatgtatatacggtttcatagattataagtcattatttctttaattgtcttattaggattcattagtgtggattgtggtttggcacctcgtgagtctccttacaatgaagccaaaactggtttaacatatacatcagatgacggtctagtcaacgttgggaaacccggtagaatcgccaaggaattcgaaccgctcgccgataagccgactttgacactgagatattttccagagggagtacgaaactgctacaatctaaacgttgagaagggaataacacatttgataagggcttactttatctatggaaattatgatggtcttgacattaatccaaagtttgatctgtatcttggacctaatccactattaacatgttttggaatggacaagtcatctccgaccctttaattcctccaaaattcactatttatactatctttagccagtcaccaagtacttgtgaaggaggaaaatgcagttttcagctgagaagaaccaacagatcaactcttccacctttgcttaacgcttttgaggtctacacagttatccagtttccgcacctcgacccaaatgaaaacgacggtatgttatgcaaataaagtctatactattgttttatgtttagaaaggtagtcaaattatttctgtgttaactcaagtatcataaactaaaacatgttatgtcagtggttgctgtccaaaacatcaaaaccacctatgaaattagtagaaatagctggcaaggagatccatgtgtccctcggcagtttatgtgggagggattaaactgcagtgatactgatatgtctacaccaccaaaaatcacttctttgtaagtcataagatcactaagtacacacgctcttcaagatctgttagtagttgtgatatatgatcatttacatttttacactttgaatgtgtttttggacatgtcaccagaaacttgtcttcaagtggtctaactggatccatagctgctgccattcaaaatcttacgcaactagaaactctgtaagtatgtatagagttgataggaggcacaaaaattgctttatggatgggaataaattaagatttatttattatataaaaatcattctggaatagggacttgtccaataataatttgactggagaggtgccagaatttctaggcaacataaaatcattggtgttcatgtaagttcctctctacttattttgcttatgcttttcaagttctacctcattcagtttcatgtatgtatgtaaagtttgctctctttatttctttttaatagaaacataagctggaacgatcttaatggttcaattcctcaatctcttcgaaagaaaggactggatttattgtgagatacttcccacctactttatttttataagcccttttgtgaattaatgttttcaacaagactcttcttattgcagagtgcaaggaaacccaaagctttgtctctctggctcctgcacagaaaactccaagaagaaatttcctgttgtaattgttgcatcagttgcttctgtggccattatcgttgctgtgttggttcttatttttgttctcaataagaaaaaggcgtctactgtggaaggtaatttgcaggagatctctcatcaaatcaagaaactacaaaaaatcgataaaatagtttttcttacatcccctacctttttttctctatagctctacaacctccactgaatacgccaacggtgaatgatacatatgctatttcatctgaaccatctatcaggacgaaaaagagaaggtttacttattcagaggttatgaaaatgacgaataatttccaaagagttgtaggggaaggaggatttggtgtcgtgtgtcatggtactataaatggttccaaacaggtagctgataaagttctctcacattcatcaagtcaagggtataagcattttaaggcagaggtatgcatgatcttcaaaaaaa

SEQ ID NO: 34008 - DNA, 801 bp, Arabidopsis thaliana landsberg
ggggttttggtgcaagctggtgatgcttccccatcagacttagcctgtgcgctctgtttctctttctctgcttctgctttgactgtgaattgaggaagagatcgatgaggaagtcttctagaagaaattggtaatgaagaggagatggtcgaaagagaagaaagctgagacagggtagctgagaaagccattggagaggccaccaagaattttcttttttctgtgttcttggagtttcgggataagaccgcaatggtctccaagtctcaacggtctaaaacagacatcactgaacgaatcataaaatgccacgtaagtgcaaacaagtttcctctgctatacaactaggattatagtaatagataatgtatttcaagtttcaacaaagattatattcgttttttttttgttttctgatgcttgaaagtttatgaattatacacacatacaagtgaaatcgtgtatgtcacatggaagatcatatacaaaatctttttacgtgtacttttaaattatatgttacattatagaatctaattgatctggtagtgaagtaggaaacaatatactgtaggcaaagtatttaattttataaaattgtttaaatcatattcacattgatctccttttgttttaacaaaaaaaaaaaacagagtaaaaaggtgagcattagaatctagacttgcatagttgcatatatcaaaaataatgtatattggacacggaaatcaaaagaaaacgtgagaaaagatcgagctcaatcattaacccctagactctaatttgatcctcttggaagat

SEQ ID NO: 34009 - DNA, 394 bp, Arabidopsis thaliana landsberg
caaccttttacttaacgttaacgcagctattacatatctcttcttgaaccttctagcaaggagtaggatgttcactaagcctgtcattgggtctcgcagtgggctcctactactcgctagatccatcgggggactgtcctaaccggacacattcaccaccatccagaagcacttagagtgtgttagatccacgaatataaatggtcgcaggcagcagacattcgacaaaaaagagaccgaaagcagccattgttcacgagtgggaagatgtcccatactccaaccgatacctattagcgttctcgattgcgagttccccataaccaccaccaccactatttgtatatttgggccggtatccggttggttgggtcaaaaacccgataccgatatc

SEQ ID NO: 34010 - DNA, 638 bp, Arabidopsis thaliana landsberg
gctaatctcaatacattataatggtatacggtatcaaaccactgtttttcttcacagggtttgatcctacttagactgggcaatatggcatgtatgccacgttcaaactcaaacaaatgtctttttcttttttttcagttcaatattatcatacatgtgatgtgaattcatagattattgtgtaacctagatatgcacattagattacgtacgttaccataagttttgatccaatacagttaacttagtccatgaatctatatgattcatgcacatgatttatatgccttataaatcatattcactttaaatgttaatcatactcactttaaatttgcttttgagtattatttgacttgtaaaatgatttgttttcgtatctccgaaaaagtggactacaagtgttgttggagtagagatcttcacctagtggacgtctacttgtacggttaaacataatgacctagttcaaggaaacgatttctccaacatagttggtttctgagcttctaatctcaatcatcatcccaatagattccaaatgcttgctttgcttattcgactaaaaaatacatagtctctagtttttagcttcattaattctttacttgtttttcacattgtatgtcacattcaaa

SEQ ID NO: 34011 - DNA, 923 bp, Arabidopsis thaliana landsberg
tatatttgttacaagtcttcatttacattaattgggttgggggttgtgtttacgtttagagtttacattacttattattttgcactagtttctctactattattttttatttttgtcaaccactagtttctctatttgaatttattttttcttttgtctatttatagtaatctcaaaaaccataaatacaacagaaacccgaaaaaaacaatgagtgtgttagtaagttttaaactaacaagtgcttgtcaagtggtcaacactcaacagaacaaagatttgcatccactaatcaagacgtttaccaacacgtcgatttcaacaaaaaaaaaaaaaaaaaaaaacttagtatcaaggccaaaaaaaaggatatcttgctcatttattttacaaattaggttatctattgaccacttatcaagtgtttttcgtatcaaataacgtcttcacggtatccaacgttaggttaatacgtattgaaggtggccttacctatcaaagtgttcgaatctttgtaggatcgggtccaaacacaaacaatattttacgctttacaatttacattaaatagagttctatggggtgattagtagtttcctttaatcaaaatcatacatgacgtaaaacatttttgctaaacagtataagtgatcatttaactctatatatttaagctgatcttataacactggtttttatttttttctttggtgcaaggactctcattcgacaactgtgatctttgcataaaacacaattaccgtatccttcgtttttagaagggatttggcttcttaagacagaaattttttaggatttagagcgtttaaaggtgaccgttagagctatgtattgaaaaaaccaccaaataatttacatttgtggctcgtcactacttttcgttacaaaaactcattatacca

SEQ ID NO: 34012 - DNA, 1116 bp, Arabidopsis thaliana landsberg
cgttgcacacaaacttgttatggaattctctcatgtacggtattcctgttaataataaaagtgacttagaagcatcacatacttgttgtgcaattctctcccgcacggtattcacgtgttctttgtgtcgtatcttgttgttcttctaaaaaaactatgtctactatatagttgtgatgatctttaccgggcaagctagccattattacttataacagaatctagatcaatataccattaatgaataaatttatgtaatctagctagtagtgactattgtgttttgtgctatagagtaatctatcagaaactttgtcaatattcttactttatctttgaaatatgaaatgtgtgttcaataacggatcaaagagatcatcacaaagaaaatgtagttagactaattccatcgcaaaatttatagttcattgcacatcctttggaggctatgatcagcaacgcggtcatcacagaattgcttaaaggtgtgagatatttttacgtcaatattgatttatgactaattaaaactcagttgaaaaacttgtggagttatggcaatatttatatcttccgttcttccaaaagacgactacttatgcatggtgcaccaccgacattggatacaagcccaccaaaccaatttggcctatacggtccacttaaatatgttttgttaagtagaccacccaattggacatatagaactggccccccaaagaaaatggacatagacacaaattctggtttaacattacaacagaagaatgtactacctgaaatttgaatgaaaccaatctctaagtgaaacacaccaaaacaagagatacacgaaaaaaacgtatcttacaagtgttacacacttacacttctaaccaaactgttttgaattgtatgtaaggagacgaatttaatatgcataccatagtccatatttgtaaagtctagtcagaacaaatggttgaatgtatcccgggctttactgatctcacaagcgtggtcggtccacatttctaaactcgtatttgaaaagtttatctaattagctcatttcatttggttcgaggtgtctcaatgatgaaagtttgagaatcaatcaagacagataaacaagaa

SEQ ID NO: 34013 - DNA, 838 bp, Arabidopsis thaliana landsberg
  unsure (1)..(838): unsure at all n locations
aggaccaccaactgttcgatgaattgcctcaaagagcttttttttaatctaagcttgcctttatgagtatgatttggagaacaggatagtcttttggttataagggcttgaaccattgttacctttatatatatttgatgcttagcttatatgctttctgtttctcatgttgcttcttttttccaaaatttgctcagatcttcctcattgggatatgtctgcctttatatgtcatccattccattgatgcgccactaaacatctgggacttcatttcctcggctatctgttagaccggaatcgtcatggcgtacttcgcagacacacatcttcacgagtttgtaaccggaaaccaaaagctcaaggagcaaggaaagcccaaaatccccaatctggactcgggtttgtggcgttactcaagacatcctaattacttgggagagcaattgtggtggtggggattggtcatatttgcttgcaaccttggtcaagggtggactttgattggtgcattggtcaatactctgtgtctggtctatgtaacgatccttgtcgagcgtcggatggtgaaacaacaatacagagctgannnnnnnnnnnnnnnnnngaagacaacttcggtgtggattccatggttcaaatctcatgctgctgctactaaagacaagaacacttgaagaagctgtgattagtttgtttcaaactttcaatagggttactagagatccttaattgtgtattattatgagcattgtccgttgtttcttcctctgattttgtttctttggaatgtgtaaatttgcattaaaatgggtttttgtttatttgggctcgtgca

SEQ ID NO: 34014 - DNA, 8485 bp, Arabidopsis thaliana landsberg
gtctttgatgaattcttcggcacagagcgatgtcatcatgagaatgatggcaagaaactccatgtctgagaagcttgcagaagacattgattctgcggtgaagagactatcagacagtgcatatgagatagctctaagccacataaagaacaatcgtgaagccatggataagctcgttgaagtgcttctcgagaaaaaaactattggcggtgacgaattcagggcaattctttccgagttactgagatccccccggaaaaccgagttccttcttcaacaacgacaactccagcatcagcaccaacaccagctgctgtctaagtaatcaatctgtatacttctgatacttataatttttctgtaaatttatcttcaaacttacactctagaaatgtgatactatctcaaaatttagtaacaagtaaatgtttaaaaaattgaatttgtaggcttgtttatgatattgtccagatttgcaacactcaaaccgaaattcaaaagtattttcaagtagcacaagcagaacaccaaaaactgttatggaatcatgttctttatacttacaaacttatgtacatttgcttacaattaacctcaaaccattagtccctaatgcttcagagtctttaatccaacaccatcatcatctctctgttcaatgaacatccaagaatagtagcattccagagctaagcagaaaacctgaaaccaaaatattctaaaagatcaatgtttgattccaaatcagtaaatagaaaccgtaaagaagcaacatttatcaaaccttaaaggaaacgttacgcattaaatggcttcacgccacttgcaattccataaccagctctctcgttctgctctttcttcacccacaccattgtagaagaagaagctcctctcggcattggccgattacgatatctccatttggtttgtgtcttgagagttttggcttctcctctattgatagagaagttctcaaactgtgtttctatggccattgatttggtaatctctttagatttggtcgctttcatccaataaactggaaccacatctttcaccggagtattattctccgtcacgacggactcaggcggcacgattgatgatacacatccgcaatcgatgacatcctcaaccacagctccatcttgatttttattcgtcttgctattatatcgtttcctccaagctcccttattcttcttcttcttcttcttcttcttcggtaatccatccgccgcatcttcacctccaccgctctcgatcgccaccgtgacttccggtttctccttctcaacgaatcgtgcttctccgccgtctatagattccttttttctcccaaaatgcttccgattacttcgattcatacgcttctcctcctccgctttcttcagatcttcttcctctatctttttctcttcctcagcctgtagtttccgtcgtctctcttcttcttcctttcgcttcttctctttctcattgagccaacgctcctgaagctgaaggatgctgatgtagttagccggaatcagaggaacagtctttcttttgccgtatgtgttcttctcctccattgaaatcatttccttcacacgcttcacaaacaaacctcgtcgaagctgaaatagtgaaaagcgtactgtagtaataaaatgctgaaaggaaaagtaaaaaaagagaggtcctacgcaatagcattaactttttataccgcacttccttagaggcccattggctggcccgtaacttcctttacttttcttagattttctgataattttgttgtaaagttcacaaaacataattaagttggaagcacttaagttcacaaaacattctaatgaattcatcttgttataattgactcaagttacaaataatatgataaaacagtcaaaattaaaaaattaactaccataaacatgtaagattctaaaataaatataaatgttttattactagattcaggtgttggaagactaactaaaagggaaataaatcagacacatagagccaagcaacatttattactttttatagtattgatcattagagtaaagcttattttatttaaaatcaaaaccttatctctcacacacacagaccaaggccattttctaagcaacttgtgcgactctccttcgtcctcatctgccaaaaacttcgtacgagtcgctacttctctctctatatataaactccttaccactctctttttttctgattttttgacgttaagagatagaaacagagagagatagagagatagagttatggctttggcgatgatgatccgaaacgcagcttcgaagcgaggaatgactccgatctccggtgatttcggtggtttgagatctatgtcttcatggtgaaagagcgttgagcctgctcctaaagatccgatcctcggagttaccgaagcttttctcgctgatcctagtcctgaaaaagttaatgttggtgtggtgagtctctctttctctcactctctgttttcccctgcttactacaagatcttacgaatctatgaaattacatcaaaattgaggtcttaatcctatggatgaacatggattgttgatttggtgtttgcatggtggcttttattttggttttgatgaagctaatctgtgtttactttacttatgtgttgaattggctaaatcattttaagggagcatatcgtgatgataatgggaagcctgttgtcttggaatgtgtcagagaagctgagaaaaggcttgctgggagcactttcatgtaagagtttctctttctctccccaaatgatctaactttaatgcttctctgttcattgacatgaattgattgtcaagttttgaaatcttcttgtacagttggtgaagttcttgaattgtaactgacgaaaagtatgtgtgatttgttgacataacttgttaaatattgtaggtcttattagcccttttgaatatggttgtgtttgactatgtggtgcttaatttgtatccttcatattaaaaaagatcaacatcagcaattatctcattgtcccatatttcaccagactgatctgagctgtctttattgtattaatcatctaaagggagtaccttcctatgggaggaagtgccaaaatggtggacctaacattgaagcttgcctatggagacaatagtgaatttatcaaagataaaagaattgctgcagttcagactctgtctggcactggagcctgccggctctttgcagacttccagaaacgtttttctcctggttcacagatctacattcctgttccaacctggtccaagtgagtttcctacagttgatttgatcatttctcatgttaacctcaacggtctactttgtaagtgtggccaagcttcttttgcttcccaaaaataacatggtttatgttttctcttatgaatagccaccacaacatctggaaagatgcacaagtccctcaaaagacatatcattactatcatccagaaaccaagggcttggatttctcagcattgatggatgatgtgaaggttagcaaagaacatcttcttcaactagcatcttttttacttcttcttgttaacatcctaattctgttaagcctttttccatagaatgctccggaagggtcattcttccttcttcatgcttgtgctcataatcctactggagtagaccctacagaggaacaatggagagagatatcacagctattcaaggtgataactcatcagtttcttatagttatctgtctatcattgactttatttctccttgatcagccctctgcagactaacatcgagttctcatttcaggctaaaaagcatttcgcattcttcgatatggcttaccaaggttttgctagtggagatccagcgagagatgccaagtccatcaggatctttcttgaagatggtcatcatattggaatttctcagtcctatgcaaaaaacatgggactctacggccagagggtgggatgtctcaggtattcatttttctcaacaaagaacatcgttttcttcctacacgaaggaaaatatggaaattagaaagtacagatatcagcattttaaaaatttggattgtaggcgtcaacaaattgtatgaaatagccatcatacaggttcatttagtgatgaagtaaaaactgaatatgaacatgacaactttgtcttctactgcagtgtgctttgtgaagatccgaagcaagccgtggctgtgaaaaagtcaattgcagcagctagctagaccaatgtacagcaacccacctttgcatggtgctcagctggtctcaaccattcttgaagacccagagttaaagagtctgtggctaaaagaagttaaggtaacatttatgaaaaaatgctaattctttcattcaattaccttatatcccatgttcactcttttatgtttagtaatcaactatggaattaaaatctgataagccatatgtaaaatctgtaacaggtcatggctgataggatcatcggcatgagaactactttgcgagaaagccttgagaagttaggatcgcctttgtcatgggagcacgttaccaaacaggtaactacaacaacaaaataggcttcttttgtgaaattcttgttatttctctcctttgactcacacagtcatatctttatggtgataacagattggaatgttctgctacagtgggttaacaccagaacaggttgaccgcttaacaagcgaatatcacatctatatgacccgtaacggccgtatcaggtacttcactttctcctgattagaaatctttcagctcacattcaatgcaatccatttcctaacatcaacatgcttaatttcaatgcaagccatttcctaatcattgaggctcttgatgtttggttgcagtatggctggtgttacaacaggaaacgtgggataccttgcgaatgctatacatgaagtcaccaagtcatcttaaatcatttacttacatgtttcagccaaacatacaaattttgtttgaagagtcaataagacaggaggctagatttgtacttctgcaattggttttgtgggaactgaaagtttacccataaacagtaatttattagcgcattttttcgttagctgggcaataaaagcaaagcctaaacgatggatttttggatatacaaaattcggattgttttctttcttctcaattgctctttttgtgcttgtttcctttcaacgttacaatgccaatgctggcaaaattttatcctcaagctcattgatttcaaatgtttttagtttttacttttaccgtaggcaactttagattatcatgatttcatttcatcatttcggttatttgacttgcagtttggaatcgattttgtttcatttcaaggacaaaaacatatacaaatactgatacaggagaaaagtatctctctacaagtcagtgaacaaaaagaatataataggacacaatcatcgcctcctgatttctcaaaaagctgaattggccacgtgtaaggaggagacatcatctcttctcagaagctgatacttagttaatcagagagaagtaaatctccctctccttcattccataaggcggcattttgctctggaaaagcatctcgagatcgcttttctagggtccagcttgaaatggaaagccaccattcatctgtcgcctcacatgctctggtattagcctgttgataagctccggtgaagccccagacaactgtttcaatagtcaaagagagagctaacagattgagtaactgtatgcacattcagttatgtttggttgaaggaaaagtgattttggaatggtttaacatacctcttgtttgaagttgaacaacggtggtagaggtcggccatttggaagacgagcatttggctcacggagttcattgaaaaacggatgcgcacatgcctcgagcttcagacggcaaacaaacaagtcagttgaaaaacaacatttcacttcttcattgaacagtgtatggtccaaagaagccagagagaaccactgtaacaattaagagtacttggtttagaaataccaaccgcagtgcaacgtagacttggtgagtattgaagaagccgagatgcaaggtcaatggcttccggaggcatccgcttgtggaaaacctggaggtcatagagcagttgtgcaccgtgttagcttcttttccatgaatgttgtttaggtagagaagtaagcaattgtatgattagaaagaagttcgaaagtgacatgcatatatatatattaccttatgccaagggtgggctttgatttgtgggaatctgaagtctgtgatagtttgggttcatgcaccggatttcttcgcgagttggagtaccaagaacctaaaccaacacagcacatcatgagcacagacaggaaatgacgccaaaacaaaatataataaaagaagacttcacctttatgatctccactagctggtccacagaattttctcccgggaataacggctgtgaagataaataataccacattgtttacagaagattttggagagatgctttagttctcaagatactcaacaggttagaaatttacactaacctgcccaagaagtagctctgccagaacacaaccagcagaccatatatcaatggatgatgtatactctgtggcaccaaagatgagttctggagctcggtaataccgagagcagatatatgatatgtttgcttcacctttcacctaatataaaaagccaaatgttgcaaatatcaggctaacagagaaatatctgaaactgcatccatacttatgtaaattacttgcataatattcacttaattggagtttttaactactgcatgcaaagacacaagcacagtggaaaagacaaacaacaaatggggtaaataaaagtctaaacctcttaccagtacttttgcacttccaaaatcacagagcttacactgatgggtgaggggatcaacctacagaacatacagagaataagattacaatctagtcaaggttaccaaagacaaaacccacaatagatcaacgtaccaaaagattttgtggtttcacatctctgtggcagacaccaggagcagtatggatataagccaagcctctgaagatctgcacaacatattttataaacagttttaggataaacacaacagagtaaagagtatttattggggaaagagtagataacaatgcatacttggtatgtgtaaagtttgacatagaagataggcatccgctggtttgaactagtatagtgcttcaaaacccggtacaatgtctctggtacatactccataccaaggttgaggaagagctcatctctactcgttgtagagaaaagtcagtgcttcaaggagatgacatttgggtgatccattggtcgcattagttgcaactcacggtttttatagcgtcgatcttgcaagacctttttaatggctactgattctccagtttccaagcatttcgcgtaaaatcgtaaatttcagacttgatcagaaagaaagaagagaatttatgacctggaaccgctagtacaaagaagcacaaaatacctgaaaaacaatcccgaatgaacctgttccatcaacccgctcagccatgtaactaatggtctgtaggggacagaatgaagatcatgtaagggagagatgaattaatttgacttgaaaaagggttttaatgggaaagtaacacttgctggaggatttgatgcgaaatgaataacccagactccgcagaaaccttacacatggtactgtgctataaccgtaagtgttaactactagttagttatctaagagattttgcaaacattagcatcaaacctgctttggttcgccgtttttgcctcctatagtagtggaaatgatatgaccagtaacagcgtcatttccctcaataacagctgcagacatttcctgcaatccacctcacatattagtatagacattaaactattttgatcaactacaaggtggaatagagatggcaagcatttactgcatccgattatttcaacaaacctcaggataggtatgactgtatgagaatgctgttattgctattatacaagtggtcggaattaacttatattgaaaacgtgaagctaacacatataaaatgtaccaactaaccagttgtcaagccaatagaagcactcaagcaagatgcagaaagaataagaaaaataaagtaaagcatgggttaaccagaggtaaacaatggtgatagaagttcaaaaatgtagtgattttagacgtcaaacaatttatgggtattagatatagaacaaaaaaaaaatcatagatacaaaatacaagtcaatggaagaagttctgccagagtgaaggacaagccataagacaaaattcagaataaatgtcgatggcaaatagaaaagagagagagacagagacagagaagcaatgggccaagaaaaccataactaaaggaatactccgaaacctgccgagagtgaagccagg

SEQ ID NO: 34015 - DNA, 672 bp, Arabidopsis thaliana landsberg
ccacatcctcccctccttccaccaccgcacttatgtttgcgatttcctatttttcatttttcacatcagtttttatatatttaaactcgtcgccaaattgtttgaggaaaccttgaaaatgatgtaaacctgagtgatgtcttaaacaagagaatgtgcactagaggaagtttcccttaagttttacaaatccatctttaatctttccttgttttcttttcggtttagccttgttcgcttttttgctcacaacattgcaaatgagaaaaaaatcagaaaatcactagaataggcatcgcaacaagtttataaagtggaaaacattgtatttcatagcaatgaaatggtatttatgaaaacagcaaagctatttatgatcccaatgaatgatagtaaattttattattttgaatgattttatttctaccattcaatttagtcgagaaacgtgattttttaccagtaacatacttgttatgttaacatttttgatttatcaaataataatttgaacaaaatttatttttatcatataactataatacaacagatagttttatttgtaagtgcggatgaaacaataataaagtgtagaaagtaaatgagacaagaaatttgttaacaaagttcagtttttcctactccccaggaccaagtccagattcgatttca

SEQ ID NO: 34016 - DNA, 2072 bp, Arabidopsis thaliana landsberg
aggtctatccaattttattggtgcttccgacgttcacattaggaaagtttggtgagagtttctgatccttttgctcatttttagtgcttaaatcttgctcctctcatagtttttgaccttcattagacattttgtctcttggtatgatttctttgatttaaattagttttcccatatctgttgggttttttcttccctcttttggattgagtttctggagacaatccattgatccaccgatttatatattttaacttgtatcctactttggtttttaatataatttagaggacaacaaaaaaatagtaaacttgcagcccgacccagtaacctattaaggtccagttggacctcgtagaacatagcaagtagaagaagaaaagatatagagatagagacaatgatatcatcatcatcatcatccaacatggcatcatcatcaatcctcatccctccgattctcacccgtcgtaatctcctcctctccaccacaatcgccaccgtaactccaccaccaccagctaaaccaccttcccccgacatcacaataaccgatcgagtcttcctcgacttctccctctgccccacctacttccgctcagatccctccgcgacactctcctccaccacaccttgctccgattcaactcctctcggccgcgtcgttctcggattatacggccgtcacgttcccataaccgtctcaactttcaaacgtatgtgtacttcatcttccacatcttacaaaaacacacctgtccacaaaatcttccctggtcagtattttctcgccggaagacaaggaggaggacggcgagatacggcggaggttggttattcactcagagacttacctcgtaacaccgacgttgttaattccaaagcttttttacttcctcatgctcgtgctggtgttgtttctctttgtttatctgagaatgatgatgatgatgatattagactcgatcctgattatagaaatgttgaattcttaatcactactggtcctggaccgtctccgcagctcgatggcggtaacattgtattcggaactgttcttgaaggtaaaagattaagctttttcttaagaactctttaggaatcttggaattgaatttggtgagtttctacttgcaggattagatgtagtgacgagtatttcttcgattccgacgtataagccgtcggagaatattaaacagtttaacgattttgcggagtttcttggagacgagagagctcaaaacgcgagatctttgtggaatagacctttgaagacggttttcattagtggctgtggagagcttaaggtcactaatccttcactctctccaactttgccttaattatcgtatcttcgtatatatatatatgtgtgtgtgtcaaatcttgtttataatcatgcttctgcttcttctactatatgaaaatgaaattgtaatttaatcctactctggtggttgctaaagattagtatagagaagagcttatataatcataacattgaggttgttgttgtttgacttgccctccggaactaaccttctagtgggttgtaatcatctgcagagaaagtaatttaggatagagcgttgtttacggtttgagtaaccctgtttgtggtctggattttcaaaggtgaatcccaatgagggtagagaaacgatttcaggtgttttttagtgagtgaaggattagtgtgtgaaatgtttcagtttgttgcggtcatgccgtttatgattgagaaaattgtgtatgaaaaaaatgaagtagaattgtgagagctccctaatcaaaccagatgaattagaatccgtaaaagttttgagacagctttaaccgaactttgttcgctatgagggcaacaatgttcctttattagtgagtggagccgaggaggttgcagagcagacatggtctactagaacaaggtctcttcctggtgtgtatatcctatgttcttagataataagctgcggtgagtgtagatttgcagtacaagattgcagggaagacaaagaaagtggatgaattaaagcctgatcagaaaagccagagttccctgaatcaaa

SEQ ID NO: 34017 - DNA, 2135 bp, Arabidopsis thaliana landsberg
tctgaagaagggtttttcaaccagaggtggaggctaggccacgcgttgcgttgaggaggttggcgtgatcggtgttgcagtaaagatagctctctttcccagatgaagtcgtagtaaggactttggagaaacccatgtattccatctcctgcaatctcttcaagcagatgttcgccatgaacctaaacagttctttcttctggttccagggttggtttacgtattcttcaattggcatccactgagaaagccacaacaagagatctaagcagttaaaaaaccatccttggttcaggttcatcaaaagatatacaatacaagacgttttaccttagcagctaagatctcagagtcttgtttcttgatttcaaaagtggttggttctaactcacagaggaaaaatatatccgtttttatttccaagaatgcttggtggctttccctgcgagaggacattaaaatgcagtcaaggttaaacagatcaagaactcatggatacttaataaagatggcatgaagataatcttgttacctgagagccaggacttctacaaattttgtcttaatctgaagcaaaagaccataagaaaacatgaattagattacactacatcaatagaaaacccaaaaactggatacgtacaccagtttcttcttccacttccctaagtgctccttcccaaatattctcaccctgtgaaatgtcacttggcttaggtatgatatcagagggaagtgcgaaatcataagcaaaacaacgagaggttttttaacaaggtgccaaaatcccataagctcacctctttaacaacaccggtaggcagtttccacactcctgtacctttgaaatgaccatcaatctcctggaccacaagcaccttcacatggaaatatctcgttaagttctgttctcatcattccagaggtcaaaatacttactaggcaatgaacaaacagaagaccttaatggcctctctagtccagtcactggctacattccaccagaaatgcttacactttttctagtgattttgactctttatcaagccattgggattgaaagagatggaccaagaaaagaagacggtaaagagttgttacctctttggtcttcttgtttaggacaaaggcaccaactccaatacgatgagacgcattggcaggaagagtactaggaacatcagcgatccaagatgtaagcatggtgtattccctctcggcatggtggcacacaaacccttcctgtcaaattaccaactaaattgctgaacaagaaccaatccaaagccatagttacaaacataaacatcttacttactgcttttgcaggtgcaataagattgtcaagcccatcggcaagctttaaccatatccccttcgtcccctgcaaatacatgtctcaactcattgccactagactacaagtgtcttctaaagagtctctctaagtctcaaatctgaagtggtctattaatgaaatacctgattgctccaatacacaagtgaagctctcagctttgggacaaaatcctcaatagtcattggttctgtcaagttcaccttaacacctccataattatctgcaaccccttgaagtaaaagggactcctgagcttcactgtccatgctacaaaaagaaccaatccatattctaagaaaactcaagttcccaaaatcaaatgtgagtaagagaagacataccttgaagaaagttgagttatttgtggtattggaatgatttgaacttcaggttttataacaagaagctgagagtttcagcccagaggacgacttaaagagtagacttttaagaatttccatgtaattgagttgctacacagacttaaagtttcaaactttgttgaaattacttggaaaagaacagaagcaaaatgagatgagattccaaattaaggtttttggggttttcaatagatttgggccattttgctctgtcaacggaacagtcactctctcttaagttacacagcgactttggaaccaaagaggcattttcacaatcttgaagacattggttcgatttcgctaagactgtttaagaaaaaaaccgaaatttttccggtctagtctggtttagttttccactggtttggttttctgtcaaaaatgtattt

SEQ ID NO: 34018 - DNA, 852 bp, Arabidopsis thaliana landsberg
atgcattgctaattagcaaaatgagggttactggtctatccatttttgcaagacaatgcccagtggtgtgaattatgagacattctctggtttacagaaaatggatgagcttcaggctattgtaggattcgtttaggctgccacaggaataaagaaagcttacaagtggaaaccaaattatgcaataaacactagtgatatattaactgcattagtacgatctccttaagaaattaacaagctgtcttctagactttatcgaatctgtgcgcgggtcacatattttaaccattccgtggctgaaaatgtatttagctctgtctcttttgggtgaacgaaaagtttttattgctctctcatgttaggaagtatatcaagaagacgagaaccaatgacctgaaacacacaattattaaccccctaatgaagcattcatctgtctttagtaatccagatattgatatgttagtctcaatatactattgtgctaatcaaagcaacattgcaaatttgcaaatgagatgggtgtgtgtgtgtgtaacaacagaacactggaaaaaatctttaaaaatggatcatagtcgcttttccttatcatatctttctttatttctctttccgtacataacaagcaaaagaaacgtgagagagagaaacccaacccaaatctaaaccggagctccggttttaagactgggtagggcagaaagtgatcaagtagttagatccggtacaagtgaaagtgctcgatgcgtcgtcgtaagcgtaactataagcgctaggacaagcgttcttaaacatggacgagtaatacgtcggagaacaagtttgcggcgtcgcgggagctcccgt

SEQ ID NO: 34019 - DNA, 553 bp, Arabidopsis thaliana landsberg
caacataatacaaggaaatgtttgtcaaaattaataccttagagcttctcagcattttaagtgctgcaatgcctgtcgtgcatgctaatatggcagaagagctgcgggacgtaattctccaggcccgggccgtttcaccccatcatattatcctggaattggaggaggttacggagatagatgagccggttattgaagtattcctggaaatacagaagacttgcctggccgaaaaaatatcttttgtcattacgtgcctgcagccgcctttgacggaaaagttaaagccgcatcgtttaaatatcgcccccacaacagctgaagctattgacctggtgatgatggaacaattggaacgggagttgcagtaagcactggtcatttgtcattcagtgtcgtttagataagaaaatatttcagttcggccctagtttgacaagctcactatgacagacagatcgtcaccctgagcttgtcgaagggtggcaaaaaatgcttactaaacgacattgagtggtcatctgtcattggtcatctgccattgggcattgat

SEQ ID NO: 34020 - DNA, 849 bp, Arabidopsis thaliana landsberg
  unsure (1)..(849): unsure at all n locations
tgtggatttgatcggaaatgagttttttccgttttattagtgtttatcagtctgggatctgtggtttgattttgttttctccagttttcgttttgaaatggcgaggaagaagatcagagagtatgactcanagaggttggtgaaggaacatttcaaaaggctttctggcaaagagcttcctatcagatccgttcaggtttaaatctgtttcctttggatcttgtctttttttatagcttttggtaatggacattggtttctccgacattaggcagatgatgttttctggttacattcttgctttggtttctccgacattaggcaccatgtggtctagcttttctccattatgaatcatggatcatgtttatggatctatgtcgtttactgttgttttcctgttttcataaagcttcatgtaaccttttctcatgtgtgtagattaatgaaacaactgatctaaatgagctagttgaaaaggaaccttggctctcgtctgagaagctggtggtgaaacctgacatgttgtttggaaagcgtggcaagagtggtttggttgccttgaaattagattttgctgatgttgccacttttgttaaagaacgtttgggaaaagaggtaatgcttttgttttgcgcttttaagccattctatagagaccattttgactccatctctctatntgtatcatatgtaggtagagatgagtggatgcaaaggacccataacaacattcatagttgaaccatttgttccacacaatgaggagtattatctcaatgttgtctcggatcggcttggttgcagcataagctttctgagtgtggaggaattgagatcgaggagaac

SEQ ID NO: 34021 - DNA, 3621 bp, Arabidopsis thaliana landsberg
gtgatctatggactcagggttctggggctgtgacccaactataaggtgatctattatcaatgtatagttcatacctgtgaaaacaaaacaaggaccataaatataagagacattacaacacagaaccgtggatccatatgaaacactataatccatgtaacacagttatcaggtttttagatttgtaatacctagatcatgatgatattcataagggcttctcatcaatctcttcatagctgtattgtaatcctccattttgttcttggagctaagagaaaccccatttgttcctggattttctccagagaatttgcaggaaactcccgccagatttctgggaaatctcagatcaagcgaagatttcttgttgatagaagtgaagcaagaagatttctcattttctcgggtgtatctagccacagagaaaatacagctcttgcttccaatcacactcatcgttctctatctctcgttcttcacctgatgcaacattgatatctgtgttttacaataatcgtccgtcacacaaacgaaaacgacattgtgttattgggctttttatttaatgggctttaaatgatagattattatagcccattgaataaaaccctaaaaccatctccattgaggtatctcataagagtttctcacaattaaaaaaataaaaataatgaaaatgaaggagagagagtgtagaaagtttctcacttgagaaactatgagatactctctacaacccatcatgacaattctcatcttactattggttcaatttttttaacaaaaactcttttttaatcaaataatcaaattataatataatattaatatttttttttttttagaacttttgtggatttttcattgatggagatgcccttatggtgttaataaagttttatgataataattaattaatgcaaaataaaaataattttggggtaaaattgattttttttttttgggagaccaacagtcttcaacctcaaaaacgagaagctctagtaaatcatgatcgttttgtaatttattggtttaccaattgattttagtgatatagttttcgaaccgcttaaatgattaataaataaattaaattatggattggtgattttgtctctaaataaaaatgttgaatatgaaaggaatagttttgaattgtccttaataatttaacgttgaactattgaatagtcaataattcggtcgctaatagttgactagtacaaacaaaaccgaacagagcatgtattaattggccatttcaaaattcgtgttgcaataattaaggaaagtcagaactttagagaagtaaaccggtggcggttacccataattgccggttcggcgaatggcgtctcggtctccatttgccggttcccattgactaacgcgttagagagtgactgatgggtcgacttttgacttttactatttttcttcttttgtttcttactgccagttatgccccattccctgcctcttaattacgtatgagtgccactcacaaatatttttatttctgaaaatcatttgggggagacaaacaaaaaacaagatataacaaacctgttgttttacttttgttactgacaagtccttcagtcaaaaaataaaaacaagatagataaagaaaatgaaaactgtatttaataatatcctgaatagtcaaaatagaattgtctataaaatctgattttttaaaaaatataaacatatatgatgaagtattcttgtttcatgtatccattcgaaaatataagtaaatcctatgtacaattgaaaaaaaaaaaaagaaggtaatctagaaacaatgctgatcaagctgtagtattcaacgtaattaacccaagctagggctactggattctagttttcaacaaaattaacccaagctagggctattctaaagctagtctaaacatgtgggaggtttgataaatcgcctaactttatttgtttaattaggtcagaccatgggtttgatgtttatttgaatttttatactttagagatggtaatatgagatcttacaacaaaaagtcaatgtcctttagtggtgataccaatataagttcgaatttggtttctagcttattggtataaattccattgacagcaaaaaggaatcacgaaaacaatataatctagtactatattcacattttacgcgtaacgcgtttgtaatattcacataattatgtaagtgtgaaattgatcaaatcgcgggagatgctaaataaacaaaatcaaaatcactaataaaatgttcacgataacttagaaagatccaataaaaagatgacggtcggaatttgtatacgatagtaataaaagtattcgtgtttctaaaagttagtaattcattggtctaaatattataatgaggaaaagtcattggtaaggaaaaggtttgaaaaaggagcacataaataaggaccagcgatgcttcctttcacgatgcaaaacacgaaatgaagagacacattctctctactatatataccatttgctcctcttcctctaattccactcattcttcttcaactacaaaacaaaaacactactacacattctttcctcttgttcatttcaaacccaaaaatcaaagttcgaagttgaaagaaaacatggttttgtctaagacagtttcagaatctgatgtctcaatccattcaacttttgcttctcgttacgtccgcaactctcttccacggtaacaacttgtaacacaaatcttttgtctaatgttttcgtcaacaatagtaacatgtaatgatgtaaaccttggatagtttttttttttggccgaggttaatgttgtagatttattatgtgttatatactaaaaggaaggacatgtttcgttattttaacttaatgtatcatcatttcatcattagattcgaaatgcctgagaactcaattccaaaagaagcagcgtaccaaatcatcaacgacgagctaatgctcgatggtaacccaaggctgaacctagcttccttcgtgaccacatggatggagccagaatgtgacaagctcatgatggagtccatcaacaagaactacgtcgacatggacgagtaccctgtcaccactgagctacagaaccgatgtgttaacatgatagcacgtctcttcaacgcgccgcttggtgacggtgaagctgccgttggtgttggcaccgtgggatcgtcggaggcgattatgttggccggtttggcttttaagagacaatggcagaataagcgtaaggcccaagggcttccttatgataagcccaatatcgtaaccggtgctaatgtccaggtaaaccaaaacaaaaattgatgaaatattaaccaagacaaaattgaatttatcaatccggttaagttatatgtgtgactcaatttccggttcaatacaggtttgctgggagaaattcgcaaggtatttcgaagtggagcttaaggaagtgaacctaagagaagactattacgtgatggaccctgtaaaggcggtcgaaatggtagacgaaaacacaatttgtgtcgctgccatcctcggttccacgaaaccgaagcttcgtggcgttagctcccaacgacctccttgtcgagaaaaacaaacaaaccg

SEQ ID NO: 34022 - DNA, 688 bp, Arabidopsis thaliana landsberg
atccactcactttcattttcttcgtaccattttaccctcttaaggcttaaacccttgaaacaaatattgaagagaaaaacaaaaaatctaagagccaaaatcatagttactagactattataatccgtcaaaatccttaaccacagaaaagattaacacatgagctgatttaaataagagtagctcaagattatcaaataaaaatcaccatgactactccaactctttggatcaatcaacaccaaataatcaaacttgatcaacctccagagagaagaaaatctggttaagtaatatcatcaaaagtgaaaaatggttagaaccaatcaatctctgtgatgactctgcaaagaatcctccaaatcaagatcaacaccaacacgattccgaatcgatgcattagcgtggcacgaagaagaagagcaagacgtaatcttccacttgttctcaagttctttaaacctctcagcatcaaacttatgactcttaagcaacttcctctgcctagaaagaaacaaccttttcatgaaatcttgatacgttggatctctagaagtcatcaagaaataagcataaccaacaataatcccagtatctgtagtgaaaaacgttattggttccatcacatccgaagaaaactcccaaaaagtttacctaacaaagatttgattttaaccactgagtaacc

SEQ ID NO: 34023 - DNA, 497 bp, Arabidopsis thaliana landsberg
caccttcgtcaaatcgtctttattatcagaaggccacgcacagattaaagtgacattttcgtttataatcccctacactccaaacggcgaagtaccaacatggccaacactgagaagcaacctccactaccttctaacatatcatcaaatacaagagagtgatgcaacaagaatgacgtcaatgttcctgcactttctcaagaccgtgcacatatctcagcaaagtaaaaaagataagacgattcttatatacttcaaggttacagattacatctttcaagctgattctaggattgaaaccggcgtactcattgtccatctggaaactgcctatagagtgtcaaccacatcggaggcaaatgaagattgagccatttgtctactatcattcgaaggtcgatatgatatcaactatccagcatgtagtccacatctatctccatgactgtatagtaaattggttatatgcaaagagaaattgtccaatatgtaggcca

SEQ ID NO: 34024 - DNA, 1269 bp, Arabidopsis thaliana landsberg
accgctatcgtacccgctgatcaaccagtcgtaaattttctgtttacgcacctgttatcaaccgctaaaccgagcggtcgaaacgctaaataacgcttgaaaccgtaactgcccatttcctcaaactcccacaaccgctgcgtttaaacgagtcaagcccttaatgtttctgtggcaatttctttgttggttggtacacgcatgtcaattaattggactaatccaatacggccggacttgcaggttcaacatgattcactccgtaccggttttttttcttaaacacaaatgagaagcgaaaccatttgcatctgtgataatgagattgtaactttgtacgacacattcaagaacctattttctgcaactaaggaataaaaagcaaatcacttggacactaaacacactcttcaatcgtaggcagaacagagtttcataggcctcttagcagagcacaaaataagctaaccatcagagtgttataagtgaaatgatgcctattgtattaatgtcaaaacacactgaatcatacaacaaaaccaaataacccacaatcactagagattcaccacattaagccttctcacaagtcaattcatcaaagtagtagtaatagtaagagcatagaggcccgattcagttaattattggacatatttctcaatagtttgaaaaaaaatatatataaacagaatttaaattttttgggttttttctaatttgtttcaatacaaattagcctaaatactgaagaaaaatgtcaaaattatattggaccctattcaaatgttccaattgcacagcccaataatcgggcctgagcgcacaaacaaaatcataaaaaagaaggactgtactaagaacatcatcagcccactcaatctttccccaaatctcttgagtacttcgtctttcaagcgcaatcacaacacactaaatcattttgtttctacatgaaggaacgcacttatcccacaaaagagtcatctttccactataatctaccaatctaacacaaccatcatcgtcaaacactggcagaccttcctaacccttcaaagattcccagtatcttgtattagagttgaagcattggattcttggcaaatcaatacaacgatataacacattttgtataccatagcaagaaagtaagtaccatcatgtttccaaataatgcagcattcctatagcttgccatctatctacttttgccttgaaagccacgcgattttgcacaaccacatactttttgccttcaatcattat

SEQ ID NO: 34025 - DNA, 830 bp, Arabidopsis thaliana landsberg
acggactattattttacgtcaaaattgtatatattttcccaccaacaccgtaaaatcatatttttctgccaacaccgttaaataatgttttccttcaaaaccgacaaatcataattttcctagtaaaccgcaaaatcatattttttcgctaaaaccgtaaaatcatgttttccaccaaaaccgcaaaatcatattttcccgtcataaccgcaaaatcatgttttcccgccaaaacagcaaaatcatgttttcccgccaaaacagcaaaatcatgttttcccgccaaaacttcaaaatcatgtttttccgccaaaaccgtaatattatgtttttccgccaaaatcgtaaaatattttttcccgccaaatccgtaaaatcatgttttcccgccaaaaccgcaaaatcacgttttttcgccaaaaccgtaaaatcgagttttccggccataaccgtaaaatcactttgtctcgtcaaaaacgtaaaatcacgtttttccgccaaaaccgtaaaattttgtttttcgtcaaaaccgtaaaatcgagttttctcgtcaaaactgtaaaactacgttttcccgccaaaaccgtaaaataaatttataaatgtaaaaaactattatttgaaatttatatacttttaaatatattttcgattaagaattaaaattaacatgtttacaaataataataaaaatataattagataaaagcatgggtagtttagatatttgtattattacaaattattggatggagatagagataagcaaacgaacaacatctcattcagatagtacagtcaaatgaaccgactaaaaataaaacgaacaa

SEQ ID NO: 34026 - DNA, 515 bp, Arabidopsis thaliana landsberg
ttgtccgactcccgatgagaatgaagtcgtgatattccgaagcttcttaaaggctggactgcgtttcccttgagcagttttgtcgtggaagtactgaagatatttgaaatctgccttcatcaacttactcccgaagcaatcataaggatgggcatcttcgtctgggccgtgaggagccaaggtttagaaccgaatgcaaaaagtttctgcaacatacatgagctattgtatgagacaaaaccctggggtaaagagcagtatcacaacaattttggctgctacagcttcggcgcccggtttgggtcaagctgtcccgtgccaaccttctgaaagaggtggcccggcgactggatgacggaatggttttatgtgaagagtgacttgaaaacatgggaagatatgaaagctattattatgcgccctatgtggcaacgcttcggcctccggaggccgaaggtggaaatgaatgaagcagcctaagaatgccagagacgtcggcgtggtttgctctttta

SEQ ID NO: 34027 - DNA, 843 bp, Arabidopsis thaliana landsberg
actctcggtaacggctgcaagagagaaaaaaaaaactcttagaacttctttgaacaataaagagttaaagattctctgtgcatatgatgattggtatgtcgatttaccttcaaactcacgttcaattgcatctagcatactttgtcttttggcatctgtaaataaagcataacatctagctatctcagaaaactaaatgagggacataagttatcaaagtagagataacagtttcttaccttgttctttatcatcaacatcatctttgacagtgtgagcattaatctttagctctttaagaccacttgtagcagctgcaagtacaaagatgaaacataatcataaatccaataagtctcaacacaaatattgtgaatcaattaagacagatattgagtgtgtcaaaataccttcaaactcgcgttcgatctcatctagcatattctgtctctttgcagctataacaataacaagacattagatttgtgttctgagtagtgtatctgagactaaaagatcatttaaatagagggaaacaaaagattacattgtgcttcatcatctgtgcttgaggtagaatgccttagttcttcaagaccttttgtagcttctgcaaacagaggaattacagagtctaagatggttctcaagaagatatttcattaaagacttattggttatacttatacgtttcaagataccttcaaactctctttcgatctcttcaagcatcttttgtctctttgcagctgcaacaagataacaaaatccgacaaaagaatactgtaatacagacaaaggcatcaaacaacgtgaaacatagaggtttctttccagtgttct

SEQ ID NO: 34028 - DNA, 1364 bp, Arabidopsis thaliana landsberg
gtttcctaacatgtaatcgaaagaatacctcccccactgaaaattcctacaaaatgtgagatcactcacagcgttgaggcaaaattcatccacttgaggtgccttatccccggtcttgataggcgctatgataatgttgcttaagaaatacaaaaccatcatcctcaacctttcttttgatctttcacccaacggtaccatttctatgagcttctctctcacgtcttcgtgtttcacaacagtattcttgaaatgcttcttcttgaaatccaagttttccctgatttttatacccaagtgtataaatccatagttcttgcaattgaagcccgatatcaatgcgtgttctgatataccatatcggattgaaacgccattgacgatgaaccacggttctttcttccttttaatgtgcgccgtgcgaagaaggagcatccacatacccataagtcggtggtttgggtcttttggcatgtggaagatgtgttgaaaactcggatggttctcaaaccatgacctctcagacttgctcatcataggctccaacttatcgaatgtagtcaacacttcgtgaatatagcaccaggttgatagcttgttttttttcacatattccgacggtgggaaatacattctcggcagtggtattgcttatgtttcctcgtcgatctcctacaacagacattcattcgtatatcattattcggcgaatagtattaccagtattacttaaaaatcatacacatagttgtatcctattactacccatgctaccctgaattcatacacatagttatatcctagtgatgacaatattaccaagatatcatacacttatttgtatcttattactaccaatgttaccctgaattcatactcacagttacatcctagtaatgacagtattacccacaaatcatatatctagttgtatcttaatactaccaatgttaccctgaattcatacacatagttattgttagaaacttaagtctccaaaacagaaacagagtaaaacagagagaaaatcaacttcgtattgatcgtgatcaatacgtaacttgaatgaaaaagaacttctgttttattcaatagaaaagacaaaatgaacaacttgtgttccagtaatacaacttatgtttaaatagacttcaatcgggtttgaaagttaagagatgcaactcttctttcttgtgtcccttaagacataactgtctaaacttaatagacacgactctttaaccaaacacacacctttgacttaacatacataattacttatataattattagacatactaaactcaattatcgatcaacatttctaaccccacaagtttatcaaactgagctgagattgggcg

SEQ ID NO: 34029 - DNA, 1303 bp, Arabidopsis thaliana landsberg
gacgacaaaatcactttctataccaccacttggttaattagatggtttagtacgatcccatgatctttcttggaagatttttaaacttttgagtcaatatttcaccaatgcatataggtgtagtgtacgtctgtgatcaattaggattcgacaacaaaaacagattggatagtccaactctaccaagagaatttatgggccgtcaccaatatggatatatcagccaggctcactgggccactgtatcttcatctaatatagtatactatttaaaaactaattcaacacatgagttttaacaaaatttattgatctcatgtctattcacatcaccaaaatttcagaccaatatacttttaacgagtaatatatacaagcgtttaacaatcctatagaaacctttattgaagtgcagatcatgtttacacagtaacagattaattcagaaactgatttggccccaaaaacataatgaatgtaaagtagaacttcttaattaaaagaaataaaacagtaacagcagaaagcatctggtttgatttcatattaaaaagcaaagttcagaaaatatattgaatctgtaaatcgtaaaagtacttatcaacgacgttacgtcgtttttgaacattaactcaaaattctccaaaatgggtctaattatcgatttatgtttccttatccatcagactttttctaatcttctctaacatcatgatgtctcattatatcacatacgtgatacgtctaaaagactcattgtatgtccaaagaaacactaacccaaatcttattttgttcgtttttccatacgaaatctaccaaaaagctcatgaaataaaccaaaaccataaaattttgtggaacaaaacattttcctttggtgaattcggccttttgttaaaagtcaatcaaattatgcataaaatggcccaaaactatatactccttaaattttgtggcccatatttgtcaacacgtgggcccgtttgtcaatttataagccacgaatttctaaagaggtccctctaaaatagaccagttcttcaattgtatccttatattactttgcatggcacataattggtcagggcccaattttcccacttcttttcttttcatgacttttatccaaaaatatttgtggataaaacttttaatcattctcgatgtgaaagataaaatttaatgaagcttaagcttaaccgttttttcacgaaataatagtatccttctcgatgtgaaaattaatactacaagaaaactaattgtatgcatttattccttttattggctaatttgatgt

SEQ ID NO: 34030 - DNA, 943 bp, Arabidopsis thaliana landsberg
caacagccatgcatgtaggatcgttggaaccggtttatgacatatactgacactaattatgctacacggtatagatatttatgcgctgcggtagagcacgaaaaaatctgtttcctgctgcatgcgcacaaatttaggatggcaagaatgtgcgttgaaaagaaatagattgtcatgcatgtaaacaaaaaatctaatttaaatgcttaattttcactataaatataggatctctccaacatccatgcatctaggctcgttagaaccagtttatgatatacgctgagactaatatgctacacgtcaaaggtatttatgcaatgtggtacactatgtacaaaatctgtttactatggcatgtgcacaaatttaggatgacaagaatgtgagttgaaagaaaatgaattgacatgcatgcaaacaaaaatcttattttcaatgttttatttcgtccataaatataggatctctccaacaatcatacagttaggctcgttagaatcaatttatgatatatattgatactaatcatgttacatgtcgaaggtatttatgcattgcggtacactacgtaaaaatcaacaaacatttacataaaatgtgaataaatatatcttaaacatacaaaagatggaagaagaacaatgatctgacaatgtatcaaaacatctatccactttggtataaatatgtatacaaaatggcataaaaacaatgtcaccgatccgccaccgctcgcgtctagagaagtcagtcgtcgtcgttctcgcctaaggaagaccgacgtcgtcacgggaggtgggacaccggcgtgtgccactccggagcgcgtgcctccgaggatcattgctccttcagatcagagagccactgtcgtgcgcttcggatcgaggaactgccgtcgtcgtgcaaccggattagggagctgtcgtcgttgcgcttc

SEQ ID NO: 34031 - DNA, 112 bp, Arabidopsis thaliana landsberg
gaaagctgatggcttagaagctgagcgcgatgcgctgaaggttaaggttgactctctgcaggaactctaaaggctcacgtagagaagcataaagcagatacagccgcacacg

SEQ ID NO: 34032 - DNA, 1016 bp, Arabidopsis thaliana landsberg
cacaatagtcattaaatctgttatacaaaactccaatccattgacagttcttagagttttgaccttttttcccacatgattctctactatttccttccattcacagaacttatcaaatgtctcatctttcgatttcagaaacattaaccaaacttttctagatttgtcatctataatggataagaagtattgtttacccgagatagatggagtaacatttggtgatccccacaagtcagcatgaacatatcaaagtatgtcttctgtaacatgtttaccaacattaaaactgagtttcttcgattttctcataacatagtgttcacaaaagtccaagtccttgaattcctttttctcaatcagtcctttccctgataagatcttcatattattaatgctcatgtgaccaagtctgctatgccacatctttgtgttgttcttaacactttccgcattgcaggtttcagtaatcactatgtgtccatccaaaatatagagaccattcatcaagtttccacataaggcagttttgccatttttgtagaatctcagtttgccttctccaccttcatgtttataaccaagagagtcaagtgtcccagtagagatcaagtttctcctcaagttaggaacatatctgacatttttcaacattctgattgaacctccatgagtgttcaatttgatggtaccacatcctcttgactctattgtgtgatcatcacctacaagtatcatagttgctccattctcattaatatctgtagaccaatccatgcgagaagtcatatggtaggtgcagcctgaatctatgacccacttttcttttgcttcattgtcaaacatgcttagtgcttcggaatacactagcttctcagtaatgactccagcttctgcttgacctccattttccaacttcttctttctcgcaaatcagtcctttttcacatgaccttcctttttacaaaaccagcaagtcactcgcgttttagagttagacctgcttctattctttc

SEQ ID NO: 34033 - DNA, 847 bp, Arabidopsis thaliana landsberg
taaagaaattgtggggttgtgcagttctgcccactgtcagttagataagtgttgaaacaccaagtgaatcccaagtggccctcaaggtgtgatgagcttcccactaaagaccccatcattgatgcagaaattgttgatatctccaaagccaatgaatacaattctctatcaagttgaccatgatgctgttgtgaattgtgatgatgatattgttataatagggtttccccacagacagatttttagatgtgaggaagctctggccggtccatgttcagccatcccacttcaccaactttctctctctcaccaggtttcttcaatcaacatttatgtggcttttgttcttcatggctaaaaaaatgtaaacatttttacaacatttgctaataatgggccctaggcccaaatagtgacggttatagtaagctttatctgacaatttaccgcctaaagaagaagtgagactgacttctttttgctgcaggtgcgtggcactaaactcaaggattccgttgacatcgtatcgctcaagccctgccacctcactattgttgaaggtactctttcttgatctaacggtctacattctccggttgaaataacttccctagggttgcccacagaggattatttaattttgaattcgcagaggactatacggaggagcaagccaccgcgcacatacggcggctcctcgacatcgtcgcttgcaccaccgcatttggtccgtcgaaacccccggtgtctcgtacgcttcctaaggattctgaaaagaaggagtcaggctcgacggatggagattctccgaccgaaaaagatgccggtgattcaaattccggtctca

SEQ ID NO: 34034 - DNA, 1276 bp, Arabidopsis thaliana landsberg
tcagtgctcttcctccccacctgagcaggaggtggagtccgtgaggcgccgttcctctgttcctcagctggaggcgccccctgcaccaccgcgggacgcccggctgttggaggagctactggagtaggtcctggaggagatcccgatgatgacgacggctcagaccacaacacagagtcctctgagccgcaggaggcgacgagatgggtcgcccgacccatcacccgtgacgccgctcgcggtggtcacttccacgacgcactcgacaccttgttgtgctgggctttcgaccaacacacctggtcaatcgagtatcgttgtggagtctaccagcatagtcgcgggaggtaccggatcgctgggaggctactgcctagttcgccgtccggaggatgacctccggggtgcggaggccgtttcggagcactattccatctccgagagggacactgcagaggcggctatgcaggatgcagcacgacgtgactctctcagtactgttctttgttcggtggcatggccgacggtcttaaccttcggtactacccccgccgccctactggcagcacagagagtgtggttgtctcacctgttggtgagggtaaccctaggttgagcagcacagtcaacctagtcgcagtgcttaacactgagctggaccactctctggacgagctaagcagggctcgaacggagattgcggagttgcgtgctgagctggcagagcgccatcaccaggagggtggttctccgcacctgttgggactcagcacccataccgctcgccgccacgtggtcaccacacttatggttcccctgcctgtaagaccaggatagatctggatccttagatcgttagcgtcggagtttgtaataattcttaagtcagatgtctcagtcttagatagttagtttagtttgcttatcggttgcttccatttagcttagtttgcttatcagttgcttacatgcttgttatgatgaacttgtgctggatttgaatcttcgtaatgactgttgccaacatgtgggtttctcctgcagtttggcctagcttccattgttaatgaagtcagttatttagttgggaagccatttacttctactttcctttctatctaagaagctgtgttgaatcatgatgaggatcagtgaagctctttgttcactcagtgtcatgaagaattctgtattctcttttcttatgctgaagggttgtaagatcaatgctgatgtatgaatgtcttccacagatgtctgacaactagagcgcgat

SEQ ID NO: 34035 - DNA, 519 bp, Arabidopsis thaliana landsberg
tccggtggcacgccggacggtccagtgcccctctgactcactgctctaacatctgaattccactgttcactttgcagagtcgaccgttgcgtgcagatagtcgttgctccgctggtgcaccggacagtcctgtggcacaccggacagtccgtgaattagagcgagcactcccagagaaacccgagggtggcgagtttgggttgtacggtcttggtcgacggacactgtccggtgcgtcagaccagggcacactcggtttcttgctccttctgaatttgaaccatttcttcaaatttttattggtttgtgttgaacctttatgcacctgtatatcatatactctagagcaaactggttagtctaatatttgtgttgggcatttcaaccaccaaaattatcactgggaaaaggttaaccctatttccctttcaatctccccctttttgatgattgatgccaacacaaaccaaagcaaatatataagtgcagatttgaactagtttgcataaggtaagtgca

SEQ ID NO: 34036 - DNA, 796 bp, Arabidopsis thaliana landsberg
tttctatctcttcttcctcttttataagctaatatgtgcatcatattcataggattgtgtttgcgtcctattacagatcaaaagatcaaagaccaatgtcattaccatgttggacgaattaatggtcgttttggttccatctcttctgttccaataattcacctggtttgttattttctcgggtctatgatgttgtcacgagttatactatttgtgaaggtcctatagtagtttctgataaagatttcatccttctatgtcaggattgttctgttgactccaattacttatgcgcactttatgcgatttcaggtaatgaatttccttcactactacacatgatgatcattagtttggttttggttctttatataacttgtttgaggagtttcatttttttttgctttagatgtaatgcttgtaacatctttgagagacggattgaatcttgttagtcatgaatttgttgcttgccaagaggccaaaagaggggttcttattctcagtgaggtaatatggataaatttggctttaatgttagtattgaatcaaaaaaatgctttatatcttaatgtttttaaagctatgatttttacatgtaaatacagtttgcaggtgctggacagtctcttggtgctggagctctacttgtgaatccttggaatgttacagaagtttcttctgcaattaaaaaagctctaaatatgccatttgaggaaagagacacaagacacagagttaattctaagtatgtaaaaactcattttgctgaaaaatgggggtttgatttcttgag

SEQ ID NO: 34037 - DNA, 270 bp, Arabidopsis thaliana landsberg
ttattagacaccatgatcaatggtgtctaataagtttttgtaaccagctttttttattttattgtttttatcgtctttcgatcctattttttttatacattctttttttttacacgtcagctagttacaaaatcaaatcgtattgagagcctcgactcgtgtccgagctcgtctgagagctagattagcctcaattgtctgtctcttaccttcagcttttctcaagttagcttctgctatttcaagagttgctgagcttctgtggatcat

SEQ ID NO: 34038 - DNA, 1144 bp, Arabidopsis thaliana landsberg
ggaagagctaaagattgtgtatacaagaaaaactcagttttatttatttgaatattatagagactgaacctataagtgcatgctgcctacgtacccaaaggtagggatcaactcttacgtagttcaaattacaaaagtgcattaaatgtaaaaacgtttgaggtgagcggcattctacgctctgcgaattgttttgccttccatgtttatgagacgatagaccccgttgcgaactatgtgagtgattttgtaaggaccttcctagttgatccctaattttctgacccctttttccgctgtgttttgctggatctggcgtagaaccaaagtttcgatctcgaatgatctgctctggacgtttgtattgtagtatcgagttgcggcgttatgatatgcatccgaactaacgcatggttttgttgttcatcgatagtatcaatcacgtcgaccatcatttcgttgttcgcaccttcattcgggtgatttcagatccttcttgtactcgggactttgatttcagctgggataactacttccattccgtgaacgagagcaaaaggagtttcaccggtagctcttctgggagttgtgcggattgcccacaatacattttgcaactctccgaaccaagctcccttgtattcacttagctttttcttgaggtttgagatgatcgttttattcattgcctcggcctgaccactcccttgcggatagcgaggtgttgatcgactaaggcggatttgccattccgcgcaaaaagtttcgaactgctcagaaataaattgaggcccattgttggtcactatctcgtacggcaaaccgtgcctacaaatgatttcttttcaaatgaactggcggacttgaacttgagttatattggagtaggcggcagcttcaacccacttcgaaaagtaatcagttagaacgagtaggaacctcactcctcgagttcaaacgtggagtggtccaacgatatccatagaccatttcatgaacggataaggcgcgaacaccgaggtgagaagttctgcgggctgcaggatgtatggtgcatgcttctaacactgctcgtatcgacgtgcatacgcttcgcaatccgctacaattagggccagaaataaccgtactttttgactttaaa

SEQ ID NO: 34039 - DNA, 317 bp, Arabidopsis thaliana landsberg
tttttatccaaatcacacttaccccatgagcggtatggggttatttactaaaaacttcctttaccctaaaccgatggattgttagattcaacaatttgctctatatactataaagacatgaaatgtaaactaccataagtatatattgtggaatctaacataaattaaccaacccttttgcatgtacatcacctcacacttataatatctggggaggcttacttgtcttatagtttagctgctttatctgtttgtggtttcattgcttgttgttttgtctggtttaataataccgcttaccctagtgagttttacgg

SEQ ID NO: 34040 - DNA, 2171 bp, Arabidopsis thaliana landsberg
atcccagttcagctctgatggccggaccggttataaatctgaccgccatggcaaacgtggcgacagagttcccacaagcaatgattttgggttgaagtgccatgaataaaccttaaaattacaccaaaaataagcaattcgttaactaaaaggatttgagaaaattgacagcaaagagttaggtcatctacttggtgagacccaaataagtagacagagccagtggggactcggcgtggggaccggacacaccaacatgtctgggtcagagggtcaggattctctctttgggtaagtgctttgtacagtttatatgacttttaccaattacaagctggacaactacgactaattaaacacacagacccactttgcattaaatgaatcttttttaacagataagatgagaacaaatttggacccaactttaaagattagatcatcatcaaaacaagtctagatttgcatgaagcaaggttagtgtttacctaagctgaacatagccattccaagaccagcatctgagagtatggagatggattgttgtaatattttgggcatagccacatgccacctgcttccaaaaacaacccatactcattattagttcccactacaattattccatgcatagatgattatattatttccttttcttattataacatttatccataaaatctgtaagtaagaaaatgattggactcactgaccggtaagcaacaagagcccatatgagaccgattagactggagtacgtgtttgggtttctgatcagctttctccacaccattatcaatatcagtcgtgtcatcacacttgtcggcgggatatgtgttccgttgttgccgccgccatctccaccagccgcctctagctccgccgtggaattagaccccattttattcagccctgctgtagctttctctatctctctttctccctctccactatcaagaccgccgatatcatcaccaccacctgagaaaaccaaaaatcatgaatacatacaaaaataatagtattcgaataataataaaattaaaccaacaaacctctagcatattatttatgtaaacaattttccgcaattttagctaaataatatttgatgacaaaaaaaaaaaaaaaaaagaacctctagcattactctttcgaggttgatcagagacaaccattcgaatctccttagcaccttgttcagattgttccgttgccacgttgtcgcctgcacctccgccaaacacgttggagaccggagaagcgcttgagctccagacgaacatgtgaagctccttggcgtcatggctgtttgacttgccgcccgttggaagagtcgtctgctgattcgtattaacgtctttcgggtttttattgacgcttttattggcggtagatgtggtggttgaagagaactctggattcggagccggataagacccggctcctcctccagggtaatacccgaatctcggggaggatgccatggcgcaattctcctcgaagtttgaaggtcgaggagttggacctctagatgattgaacggagtacatatccgccggaccgaaattggagagacgaccaccggggaaacccatcatgttgtaaaaatcagagtggttgaaattagagcctctaggagtggtgctgagactataaatctcagctccggtgagatttgacggccgtggagtcatgttcgggccgcagaacgaacgacgtgaagcgttggattttctcacggtgacgtgaagcttcccgtcgtcacctatctctgcatcggtctcaagaaaatcatggccgtcgagcgaaacgacgtcggattcgactttgaaagaaacaatggaagcagccgtctcagggaactgctccatgatgagcatcttggcgccacgaaactcgaagagaaaaaggagaagcgtgtaccagatgatacactggaggacgacgatttggaccatgagggaaccagagtattcgccatacatggcgatcaagagaggaatccccataacaagagtgttgggaagtgtggaaagggaaaagattgtgatgctccactcgaggctaccggagcgagtgaaattagcccataggactaaaagtgacaacatgatgattttttggagagtgtcggcggcgatgaaccggagattcattgcgtaaggatt

SEQ ID NO: 34041 - DNA, 783 bp, Arabidopsis thaliana landsberg
ggaacacaaaatcagcggtacgtgtgaatcatggaagaagagagatgatgatcattgtcttatcatgaagacccatcaaagcacatggagcctcagtcgataaaaggaaaaaaagagtagaactgtacgtattattagaacttagaagaacaaaaaaaaagaagtaaaaagtaaaagctatagatatgatttttgtttttgacctagcctacatatgatttaaacatcctatgtgaaaagcttttcattaaatcttaataaaaaaacacctcaaaatatagccgactgttctcttcagcagctttttatgttttgagctttatagattcacactatcttgcagctttctctttatatttttgttaagacttattcagttttctttgtttattgtatataatttgtaagatcatctccatatgtaagaaacccatttttataaaataatataaattttattattattttattatttaattttttaattattatttgaaccaatcaaaacaaaacaaaagtaaaatgggtttctctgagtttttcaagtggcaaacgtttttactctctctccacctttttcgaattttttattctgtcttaatagacagtttctggatcagaaacttcggatggagattctctaagtgcactcatccactatctcttaaaacatcaaatgatagcatagaaaaaaaagcataaaaagttatgcacaattttgtattttcttttatctggattcagatgtcgaattattcaattataagaaattgagtatacgtt

SEQ ID NO: 34042 - DNA, 623 bp, Arabidopsis thaliana landsberg
gattgtgttcttgaagtagaagaatacagttttcttccaagtccaaccccttataggtaagcatttactttatttctattttaccgaggggacactctctttcattcagagtgtttcccaaataaaaccacactaaaaccaaaccgagatgcttttattcgtatcaatccggttaactaaaattgaattttctagaaccaataaatcttattgtggtttagttggttctaaacttcttagacccattccgaaccaaaaagaagaaaaatctttagtcaaaagataatgaattcgtaccaaaccgatcgatagtagatttggttttacattgataattgttttcttaaaaccggaaagtaaaaaagaaccgaaatccagattaaattatctctaaaacaacaagaacatataaataacatatttttttgactaagcataaactaaaagaagacggtgattcttcttcagagcatcatcacgagagaacaaaagccggttaacagaaggttgttggagtaatagagcgcaaatccaatgctttcggttgagtatccgtggtcacctgattccagttgcatcagtgatattgctcttaataatccggtggatggtgtgcagtgtat

SEQ ID NO: 34043 - DNA, 1818 bp, Arabidopsis thaliana landsberg
  unsure (1)..(1818): unsure at all n locations
catccgattacatattttataatcaaaatatcaaaatttagaactagtaactatgatgaatccaaaaaaaaaatttatattgggtgtgatgaaatattaaataggattttaaatctttgatagtaatttcatcgctaaacacaattgggcaatttatgatgcttaaacctgtcccagttttggtacttagtaattccacctctagtcacaattgtgtaagtttgtcatgctttgacatttcaattctaacttttcggacccacttttctggtggtataattagttgtcgggttatggacccgacccaagggttgatgaaagcagatttagattagataccttaacccaccaagaaactaatttcgatatataatatcgacataatatgatccaatcagtttctctagccccccctatcactttcgtgctacatgataatatccattttattttccgtttcccaagtactcgtggtcacatgtcataggactcgcaagtcacaccgtacatatgtatgaaagttcaaacgtgtcatattgtcttgaaaggttgccaaatcaacgtctcttacttacacttacctgatctttgatctctaataataccatcgaatatacaaacacactaaactgacaatacgcgacttatattccctaacattcttctactcacaagttaaacatacacatatgaactgataaaatcatgtcattttgaatcatttcgaaaaacaaatgagctaactttaataacatagaacctaaacttaaatataattatagttctcgatccaggtttacaagtttttgtgtataattaagaaattttatcactgtctcatatcctgaaagtttcgtaaactgaagtttgtatctagatgtagctgaatacaagacaacgggcggttgggttattggttgaatccaaataaacagaaaacgtaagtatttagaactacacgagctaagggaaaattttaaatgctatagaaaatgtatggagttaagcctagaacttccaggttatttaaaataatgacacactagtgagtttctgataactcagattattgtatgattttgatggtgagattgttcattttgctatactcntttggtacaaacacctccatgtttacttttcgattctcccatgtattcatcaactaccaacttcacagtgtgtatccatatttggaaaccatatgcttataacggtttcccttgatcaagttaaatatttcttaagagaaacatgtactcactaactgtcacaacaccggcagatttctcttcgatccgtatcttgatcctcggaggatccaaaatgcttcatgttaaagcatatagagagaacgtgcatttgatttgcaacttccaaatgttcccttatttgcttttattaacagatgttgatgctcctctaaaagctctaccaatataagatgttgaaccttttttcattttttattaataaaagatcgatgcaaaacaaaaatacaattttaacataagaaataagttatacaacatcattgtaacaaaataaaaacaacacatatattaggtgaagacatggtaaaacgatggcatcttctctcatatttaataacacttagggtacatcgtgaaaagtgataaatatacactgatgacttttatcaaatcaattcaaggagaggtaacgaggcggctagacaagaacaccgtgcacccgtccttaggcgacattgtggggatatgcacaatctcatcgcaaccatccgatcggaccctcttgaaatcaaacatcgaggagaacatggcaatgaagagcacg

SEQ ID NO: 34044 - DNA, 528 bp, Arabidopsis thaliana landsberg
tactttcatctttgagatttaaatcgaagtacactttataattatatttttatgctccatgagccccttggaaggtttggttgtacattatctatttctcccaaaattccctctttcttgctattgcttcttattaagtatttttaaactatcatggtcagttaacattttccaaaaatgttataaaaattacagtgggtaagtatttacctctgtgggttatcctagaaatttgaggttgaaattaattcagatgctccttgtgtaaaattatcaaaagtaagggtaaaagggcactttacactatagctctaatttatgtgaggtctctgcactaaattttatttttgtcaagattcataggtgatattaggcctctgtgttaaaaatcacagaaaaagacctactggatatttagttgtgattttctaaagtttaatgcaaaaaaggtacttataactaacttgttatttgaaaaatatcaaacaatagaactcatatttttcctatattcataataacaaaata

SEQ ID NO: 34045 - DNA, 724 bp, Arabidopsis thaliana landsberg
  unsure (1)..(724): unsure at all n locations
tagaggatcccctagtgtttatgagtgcaaaatgttatcattacacaataaaatatctcgagaatgttcccaagagtttttggaatcttcggaaggtttcttcgggtatgaattatgaatttcagtttttctaatattaattaaatacctaaaatatggtagttgtgaaactataaaattttgggactcgtaatatatatatttcttcctcctcgtcgaacatattccagatctcgtgccccttttcgcgagatcactgaaccgcgtcttctcacgaacagcatgctacccgcatcggcttttcctcgttattttgggttgcagtccagctctgaccgtcttcgtctaattttagctaaccctgtccaccacctcgctaacttcgtcttcgtcttatactgtctcgcacaattcgtcgcgcaacagtctctctcgctcggccagaacgcgatttgcggcgaatttggcaaccacctctcatgtcctctttttgtatatacgtaaccctatcgtcgtataacctctgccacttcctcctagatctagatctcacagcacagacatccctttcagacggttctcctcccctacagtgcaccaccgtcaacgcatgtgagtcctctcctcccctttttttccttcatccttcttncttctcgctacgcaggcaggcaacgagcacttttctgtccatggctgatggtcgagcaggcgacatggcccc

SEQ ID NO: 34046 - DNA, 1068 bp, Arabidopsis thaliana landsberg
  unsure (1)..(1068): unsure at all n locations
taattaaggtttcgatccaacagaaacaagaaagttgtctctgaatcattccttcacattattgctttccttgtgtggtccttcttgctttaccaaaatgatgaaacaaagaaaaagaaaacgttaagagaaagataggagagaaccaaaaccggccaacaacttttattgaagaggaaaactctcttgcagttcatgtgggcctgacccggttcaaagcttcgacttaggcgaatccttgttggtgcaaattttaccaaataattgaacatataaaaaaaactaccaatttttttttgacaaaatatcttcaaacactacatataaataatttttatctaaatatatccctccatttaaacgtggcctaattgagatcgtggtttgtgagctcccgctatgcaaagtcaaatattattctattttcttggtatgaaaaattagtttttttttatctagttcatcatttgttgatcaaaaaagtcggtgcctataaaaaataaatataagtaagtagtcaaactctaaattaagtgaattatatagcgacatgttaatcaacgttgatttggggtttaagggaaaatatcgttccattagtgcaagctaattaaatagccaaatgactttccaaatggcgacgggcgagtgctctatctttgacttatcgagaccaccattattttctgagttccagtaatagtggcatccataatttctcatgtatgtaacatctctaattaataggaaatcgagtaatttgtaccaaaatgagatagcatacaaataaattttaacatataatcttgaaaaacagtttatgggctcttattagtgaaagctgattcacaacatttctaatcttattatcgtaatcaaactagctctaggtttcaaaaataacctcttcagcgtgtatatttttgaaccatttaaccgtacattcgtcttcagcgtacttgtacatcaatccaagtaacttcgatgcgtgatggtaatttacaacanaataaaggaatttgattagatacctttgcattttatttttgtttaaagtgaaagctaaat

SEQ ID NO: 34047 - DNA, 826 bp, Arabidopsis thaliana landsberg
  unsure (1)..(826): unsure at all n locations
atttaaacccattttgtccaaaagaggctaaaaccaacaaaaatttgtttagaagctgtaaataactttgttagtatttctatggtaataatgtctcacaatctaatacatttgacaaatcataagagttaaagatggaataggagtttttagacaacaattatacccattttctcgcaaaagatgttaaaaccaaataaaaattgcttagaagcagtcaataactttgttagtatttctatggtaataatgtctcacaatctaatacatttgactaatcataagagttaaagatggagtaggagtttttagacaacaattatacccattttctcccaaaagatgctaaaaccaacaaaaaagtgcttagaagcagtcaatagctttgttagtgtttctatagtaaaaatgcgtcacaatccaatgcatttgagtaattataacaggaaaagatggataggagtgtttagacaacacttatacccattttgtcccaaaagagactaaaatcaacaaaaaattgcttagaagtagtaaacaactttaatagtgtttctatggtgaaaatgtgtcacaatccaatgcatttgaataatcataagagttagagatagagtagcagtgtttagacaacatnttatacccattttctcccaaaagaggctaaaaccaacaaaaaattgcgtagaagcagtaaacagctttgttagtgtttttatgttcaaaatgtttcacaatccaatacatttgactaatcataagagctagagatagtgtagcagtgtttagacaacatttatacacatgttctcccaaaagcggctaa

SEQ ID NO: 34048 - DNA, 560 bp, Arabidopsis thaliana landsberg
tttcacatcgatgtagcgaaagcaaagatctctttccacaaaacttgtgtgtttgttgtgactttctctcttggtatcttgtgagacctgtcactgtttctagcctcaactcttctaggtgttatgttttgttagttttcatttcatcttctaataaacagcttggatcttgtgattgactgttatatttttatgttccttacagtttaaaagcaaaggaggatcacaggttaagtattactgtaggtatttaactaaagaggattgccgtcttcagtctggttctcacatagcctgcaacaaggtttgaaccaactcaaatttacaatgtacatcttatttgataggaaattcagaatgttatattgttaagaattccatagcgaacaaattaggattggtttgcatgtcaagttttttgtttgttattttgtgaggtttatattgatctcctgctatggtgtctatgttgctttgctgaaatctacttagtttttatgaattctgtatactttcagagacatttccgtcgactaatcgcttcacatactgacgttagc

SEQ ID NO: 34049 - DNA, 835 bp, Arabidopsis thaliana landsberg
taaaagttggatgaaagaggggatgccctaatgaaaaccctaagaggctacttatataagggaaaatgaaacaaataaggaaactagatatatatcgaatcttcacgtcatgatcctgcgatcgaatgtgtcattggcatctgatgggctgaaatgagcttccctgtgatcgagtatgtcattgatcaaactgggcttcagggactccgccttgcgatcgagtggtatgcagtgaagacgagattgaatggtcctgcgaccctgtgatcgagtgcgatcgggtggatgtgatgaggtggtgatcgagtggttactttggcttcaattctcttctttgttctcaccttgtctggttgagtgcagaatgagcagataggctttctggtgatcgagtggttccgatggggtgattcctccggcttcgcgattgagtgaaactgagctgcttgcttctccggggttgcgatagagtgatttgccctggcagggctccgaggctgcgatagagtacttttgctgaaggcgtcattgggcattctgacttcatgttctgtttttcctctgtttgaactccaaaagcatccaaagtacctgaaaacaaccaaatatgccatgcacatgcaatcctaatgcaaaattgtcctaagtatgtaaaacacactaaaacgactcctaatgagacgaaatgtggatgaaacaatgacaaactggtgaagaatggatgcctaaatcatgtaaattatagacatatcattgttgctctgaatcatggagataagactactcttgatctcaaagtttgttattcctgaataggaggtggggacaataccca

SEQ ID NO: 34050 - DNA, 1626 bp, Arabidopsis thaliana landsberg
ggagtggatgtacaaaaggttcgacaaaatgacgggaaatctgacaccagaatacatcgcaggggtggaggaattcatgaactttgctaatagccagcctatcgttcaaagtaatcgggataaatttcactgtccttgtagtgtatgcaaaaatgaaaaacatatcgtctcgggtagaagggttagtagtcatttatttagtcaaggacttatgcctgattattatgtatggtataagcatggggaagaattcaatatggatgtaggaacgagtaattacgtagatagaacttatctaagcgatcagaatcatgaatatgtgggtaatactgtagaagatccatatgtggatatggtgaatgatgcatttgcttataatgcggggtttgatgaaaactataatgaggatggtagttatcagaaagtggaagaaccggtgcgtaaccattcacagaaattttatgatttgttagacggtgcaaacactccattatacgatggttgtcgtgaaagccagtcacaattatcgttagcttctcgagtcatgcaaaataaggcggatcataatacgagtgaaagctgtgtggattcggtttgtcaaatgttgacagattttttaccaaaaggaaaccaagccaccagttcgcattaccagaccgagaaattgatgtgcaatttaggccttccatatcatacaattgatgtttgtcaaaacaattgtatgcttttctggaaagaagacgaaaaggaagatcaatgtcggttctgtggtgcacaaagatggaagccaatggattacggcgttcaaagacgaagaaccaaagtaccatatagtcgtatgtggtatctacctattggtgaccgattgaagagattgtatcagagccataagacgacagcggctatgcgatggcatgccgagcacaaatcaaaggagggagaaatgaatcatccttcagatgcggcagagtggagatatttccaatctttatatcccctgtttgccgaagaaccccgtaacgtttatctcggattgtgtactgatgggttcaatccatttggcatgtctcgtaatcattcgttgtggcctgtgatcctcactccatataacttacccctggtatgtgcatgaatacataatacttgtttcttacaattctgaattctgggcgaaatcatcctcgaggtagtctcgatgtcttcctccaacctcttattgaggagctaaaagagttgtggtctattggaatcgatgcatacgatgtgtcaatgaatcataattttaatctaaaagcagagctgtcaatctttttttattttaatctcatctctggttctctattgctttgcagtccaccatgaaagattcatgaggaaatccgtatggagttggaagcctcaaggactcgctggtcaaaggaaagcggaagctagaagactcttcttgttttgttgcattggaagaacaggtgaaggaagctcaacgaaagattgaagaacaggttgcttattctcaaaggcgtgatgctgcgcgtgaagctcagctagctgcgcgtgaagcagagcagaagtgtaggctcgagcacttgtcattggtggagaagtatctcgttcaaacagatccgc

SEQ ID NO: 34051 - DNA, 295 bp, Arabidopsis thaliana landsberg
acataacgactgcgtaggcgatcttctccagctctgtcatgttgcacttggacggtgtcagtacctcggagacatagtaaacagggcactgtctgaccgcacactcaactgtctgctcctgcactagtgccgcgctgaccgcgtgcggcgaagctgcgacatagagcagtagggggagcgaagagtcggggcttgtgaggatggccagctccgacaggtactgttttagtgaggcgaaggccgctgcttgctccggtccccaggcgaagtcttttgcatcgcggagtgttttgag

SEQ ID NO: 34052 - DNA, 523 bp, Arabidopsis thaliana landsberg
tactcaaaaacgttgtgcaatgggatcactgacatcgacttgaccatggaacgtagaaaataaaagatagggttttaacttttaattgaggacatcgttggttgggaattaatcttgggatggttaatagccacatcactacaatagtatctttcttgggatttatagtgggttggtagtggtagaaagatcaaagttttgaaaacatatcaatttagtgttttgaaactaccattgaagtttggtcaaagcttgctaatgatttagctaaccattagaattcgaacttttatgcatgcactataatctttctttgatctttgaattatttcaaaatacagaaacctttcttccattaattccaaaagaaaaaaaatgccgccgcaactaaattatatatgtactttgtttgttgctgctctggccaagctttgacctttcgcgaacgtgaagtcgctatttgaacggtccaccacttgttccatatgcctttagggcaactaattttacccttttatatatt

SEQ ID NO: 34053 - DNA, 1096 bp, Arabidopsis thaliana landsberg
atcatggggaattctcaaatttgttttttttgggattatgtgtttgattttgggaatacactgttagggtttggctagtgtgatgaagtttctgaaactggtgatagtaaaggtgtaaactttatgctcattttaggttaaattctctgtatcaataaggcactaggcatttagtttaacaattcaatgctcagaattttgatttgagtattttgttagagttcaagtgtttagtttagcttatcgtagtctcttttggtatttgaggtcactattggctcatatatgttatcttgttgtaggtgcaaggcattagagaaattggtacagtcgcgtgacatgtgaagattgttgttgtacatatagctgaaggaactctttgctgatttttacataaaagagtgtatcttgatatttggtttgcgatcgagttaagtggaagcgatggatactgccagagcatggctgaagaaattaaagtctaaagggaaagagaaatcttcgaataagaaggaaacttctagaggaaatgttaaggagggatcaaaaacagctggaggtgaagaagctgtgtctaatgtgacaaagcagaaggctgctgctgcgaaacagtatattgaaaatcattacaaaatgcaagttcaaagtcagcagcaaagaaaggagcggtatggtttcgttacatatttatatgtttcaagttttcatgatgggaaagaactttattcgtgtctttctgctactttcgtgtgaacttccgtccatatccttagctctttgtttggtatttacatttcatacagacgcaaaatgctagagaaaaaattagctgctgcagaagtctctgaggaagagcaaaataacttgctaaaggatttggagatgaaggaaactgaatatatgcgccgtcagaggcataaaatgggagctgatgactttgagccattgacaatgattgggaagggtgcattcggagaggtaacatctcttttatagatcatagtctgttactctgttttctcagcctctcattggcatgcatcatcttgaaatgttctctgtgatgcatccttcttgaaaggtcttgttgggcatt

SEQ ID NO: 34054 - DNA, 6667 bp, Arabidopsis thaliana landsberg
  unsure (1)..(6667): unsure at all n locations
tacatgaccgttcttaccgtattgcttaatgatgaagcagagtgtctcaccggagatgtcgagagacaaatccttcatctgtttgaggatcttccacatcgattcgtattttttatgtgaagctaaggacttagcaagctcttcatattccatggaggttggtgtgtagctagggttcgatcgagcccaattgaagaatcggagagaatcgttggaggaacgagaagttgcgcggaggactctgaacacgaattcggaggttacaggtagacggagactgttcaatgatctctccgggtgaatctcgcggcggacgatattgacaacgtggttgatcgcggcgaagtaatcgcctttagttggagtcgaatcagagctttgcaaaggctcgaggctgttgaaatgacgaatagtagattcaatagaggctctgatagggaggatcgagtaaagacttccgccggaataacgacgaaggagtaacattttctcaccggaataaatctctccgataagattgaccttagaagagacgatagtagtaactagtgacgtggaattgatttttattattttattttattttttgaacagtttattaaaacgctgcgtattagagaggatgccctagttatatcgcttaatataaagccctatatttcgctttgcacctcccactctgtgcattaggtttcattttagcggcagacgagagagctaaagcaaggagcaaccctaaccatggcgactcaaccagctactgaatctgtgcaatgcttcggaaggaagaagaccgcagtggccgtcactcactgcaagcgtggatctggtttgatcaagctcaacggttgcccaatcgagcttttccagcctgagatccnnnnnnnnnnnnnnnnnnnnccggttcttctcctcggaaagcaccgtttcgctggtgtgaacatgaggatccgtgtcaacggtggtggtcacacatcccaggtttacgccatccgtcagagtatcgcgaaggctcttgttgcgtactaccagaagtatgtggatgagcagtcgaagaaggagattaaggatatcttggtgaggtatgataggactctgcttgtggcggatccgaggaggtgcgagccgaagaagtttggtggtcgtggtgctcgttctcgttaccagaagagttaccgttaaacaaagctggtttgtgttttgtttttcaatttggaatcatcgtaaggtttttttgggagtatggacttgtgagactctttagattttataatttctgctttattatgcttgttggattatggtgattctccaagaaacttatgttttgttatgtctactattttcttatttttatttcattgtcttgtcggtatttactctttatatcttgtcctgatatgtgtggcatttgcatagtccgatcaaaggttaggttaatcgtttcttatacaaacttaatctaggtgttgttgagtttatgagaaggctgttgtttaatgtggcttagctataaattacagtgatgaaatctctgttaaacaaatggacttaacgttagtctttgctcctgagtagatcaatagaagttgtgttatgcttagtttgatgttgttttgatctgtaagctaagtgaagcacatagcatatattgttttaatcttttgatttcccatttgacctaatctagctgtgtgctgttaatcatatcttaagttttctccctttgacttgcttttggatttcacaaaaattgatcttcgcaatgcaaaatttgtgttgtctattgattatcgaggttagaattggaatcgtgcttggagggcctcgtttaataatcaaaggatagttaatcaaataacttgctgatcctaaacatatacctcttgcctgaccgtaatttttgtgattccacaagttctaaactttattaactccattgtataatttgtatattttcaagcaaacattaggcaaaaagtcaaaccattagtagtcctgcatgtttctctcaaaacttccaaaactcgatgcatatgggcctatggcttcaagttgtgtttgaaagaagagtttctgtctgaccctattgatcgtaaacatatgaagaagatacatgatttaggttcggtaaaagaaaaaaggtgttggatctaaaaagtattgttgtccttgatgatgttaaattaagaacaacttgatgcctcagcggaacaatctcagtggtttggttctagaagtaggatcagtgtgagtttgtgaccacggaaaaagggcatgggacgaagaagtgactccagattttctgccactttgcattcagagatcgctatgcagcagatgcttgctactagctagtatagtagttagtaaaagaatagtattgatttttttattttattgttttggtcaacgaaaatagtaatgattatgttggcttagcattttttcttttacgtatatcggtaaagtctttgtctctccatcagactgtagtcgttcaatggctattgcagaggtgattggtttcttcacacttgtttgtgtaatttggtattgggtttacaaaaagcacaagaatttgcagctgaagatatgcagatcatcaatcgagtcttcttcttcttcgtcgtccctttcatctcctccatctctttcgtctcctatatctcgaacctggacacaccaagtctttccgagcttccgcggggaagacgtacggaaagggtttcttagtcatatccagaaggagttcaaaagcaaaggaatcgttccctttattgatgacgaaatgaagagaggcgaatcgatcggtccggggctgtttcaggccattagagaatcaaagatagcaattgtcttgctctcaaagaactacgcttcgtctagctggtgcctcaacgaattggtggagattatgaattgcagggaagagattggtcaaacggtgatgactgttttctatcaagtggatccatctgatgtgagaaaacagaccggagatttcggtaaagcctttaagaaaacctgtgttggcaaaacacaagaggtgaagcagagatggagtcgagctttgatggacgtcgcaaacatactcggacaagattctcgcaaatggttcgtctcgcatttcatatttttcctgtttttacgagttccttaatctctcttttgattctcagggataaagaagcggacatgattgtgaaagttgcaaaagatgtatcagacgtcttgagctatacgccgtcgagggattttgatgactatgttggaatccgtcctcatatcacaagaatcaattccttgttatgcctagagtctagtgatgtgaggatggtagggatattgggtcctcctgggattggcaagaccaccattgcacgagttttatatgatcaaatctctgaaaagttccagttttctgcctttatagagaacatcagactaagctactggaaaggctggcacgatgagggtaatttggattttccagttgagatcatgactggagaccggcaaaggaagttgaatctacaaagacggcttttgtctgagttattcaaccagaaggatatccaggttcgacatttaggtgcagttcaggagaggctcagggaccacaaagttcttgtcattcttgatggcgtcgatcaattagagcagctaactgcattggcgaaagaaactcagtggttcggctatggaagtaggattatcatcacaacacaagatcaaaggcttttgagagcgcatgagatcaaccatgtttacaaggtggacctccctgctacagatgaagctctccagatcttctgtctgtatgcttttggtcaaaagttcccatatgatggttttaagaaacttgctcgggaggttactgcacttgcaggtgaacttcctctaggtctaagagttttgggatcttatttgcgaggaatgtccttggaggagtggaaaaacgcactaccacggttaaggactagccttgacggtgaaattgagaaaactctaagatttgcctacaatgtcttgagcgataaagataaatctctttttctgcatatagcatgtttgttcaacggctgtcaagttaatcatgtgaaacagtggcttgctaacagcagtttggacgttaaccatggctttgaagtcttgagcaataagtctctcatatctacagatatgggactcgtacggatgcattctttgcttcaacaactaggtgttgacattgtccgtaaacaatctattggagagcctgaaaaacgtcagtttttagttgacgttaatgagatttctgatgttatcaccgacaatacagtaagtatatttacagttgtctctttcctttctaatattgtttgtctattaactaaatcataattaataactcttgatattttcttgctttggacataccttagggcactgggactattctaggcataatgcttcatgtctctaagatcgaggatgtattagttatagaagaaacggtgtttgataggatgactaatctccagtttttaatattggacgagtgtttgagggataagttgaacttaccactaggcctgaattgtctaccccgtaaaatcaggttattgcgttgggactattgtccgttgagcatttggccctctaagttctctgcaaagtttctcgttgagcttatcatgcgggcgaacaaatttgaaaaactgtgggaaggaattcaggtaaaattttataattgtattgaaacaaactgtttttatgtgtctaaacattgatataaacgcacaaaatgtgcctttttgttgtacagccacttaaaaatctcaaaaggatggagctgggtgacgccaggaacctgaaagagattccagatctctcaaatgccactaacctcgagtcattgcttctctctttttgcactagtctgttggaaattccttcctctattagaggcaccactaatctcaaggaattggatctcggtggttgcgcaagtctggtgaagctctcttcctgtatttgtaatgccactagtctcgaagaattggatcttagtgcttgctcaaatttggtggagctcccctgtgctcttcctggcgacagcaatatgagatctctgtctaaacttcttttgaacggaagctcacggttgaaaacttttccagagatctccacaaacatccaagaactcaatctgagtggtacagcgatagaagaagtgccttcatcgatcaggttgtggtctcgtctcgataaattagatatgtcgcggtgcaaaaacctgaagatgtttccacctgttcctgatggaatttcagtgctaaacttgagtgagacagaaatagaagacattcctccgtgggtcgagaatctctctcagcttcgacacttcgttatgatcagatgcaagaagctggacaacatctcattatcaagaatttccaagatggaaggtgttcattgtctgcaaattactcgtggtgatgaggatgtctctggtgattcgatagtaaacatcaggtggtactctaacttcccaaaccaatggactttacagtcggatatgttacaaatttgtctgccagagttggtttatacttccccagtgtccctacacttcatcagtaatgaattcaagactattccagattgcatcaaaaatctttctcaactacatcagctttcgttctatagatgccataagcttgtatcgctgccgcaactttcagactgcctctcatctctagatgcagaaaattgtgtgtcacttgagacaatagatggctcctttcacaatccagatatccgtctgaattttttaaactgcaacaacatgaatcaagaagcaagagaactcatccagaaatcggtttgcaaacatgctctgttaccttctggagaagttcctgcatacttcattcatcgagctattggagattccgtaacaattcatttgaaagagaggcatcttcctctatatttgatatttaaggcttctctagtgctgttcaatgacgatgaaatcaattacgattacgatgatgacgatgatgatgactatgacgaggaggtcatagtctatggtgattatgatagttaccctcatagcgatgattataccaaacaggagaccatgaggttatcttgtcgtgtcgaaggcaaacagaatggcctcactattcagtatggatctagtgtgcaccttctaccaactccgcataggtatacagagcatgtgtatatatttgaagcttctttctccctaggcgagtgcaacagtcctgaagcagaaagcgagcttgtctttgacttcaaggttcacgattacttttgggcgataaaagagtgtggtcttcaactcttggagctccctcatgctcatggagacgattgacaagagcttcagatgtagtagcagaggttgtgcagacagccagatggagaagaatctggcaataacgaggatgagcaaaaaaaatagtgacatctgtataaacctctctggtgcatatatgaaaggtaacatatgaagctagaaactattttataagaaatggaaagtaaaatactaacttatattttgtgaaaacaaaatcttcgatggtaaaggtaatacatgtcagagcctcttctgtttttttgtctccgtgtgctatatttatacagt

SEQ ID NO: 34055 - DNA, 823 bp, Arabidopsis thaliana landsberg
  unsure (1)..(823): unsure at all n locations
ccttagcgttatacggagatatatctttgacccaagtatgtcaaacgtctccacttttatccatctggttgaaactcacttgttccatgtgttacacgtctataagcagtttttgtgactgcaactctttgtttcttcagattactggtatgccacttggaagaataccagttgagacgcacatttttgaaggaaatgagactggcatcaaagaagtctactcagtaaggccaatgacaataactacatttcttttcttgactctcatcatagaaaaaggcatcattgatttttaaactttcaacattaaatgatatctgaacatatcttctttccattgacagatgatgctggaagacctgaagtctggaggcagagtactgagagatcccctcataatttccccaaagcgtaaccatgtgtgaataaattttgagctagtagggttgcagccacgagtaagtcttcccttgttattgtgtagccagaatgccgcaaaacttccatgcctaagcgaactgttgagagtacgtttcgatttctgactgtgttagcctggaagtgcttgtcccaaccttgtttctgagcatgaacgcccgcaagccaacatgttagttgaagcatcagggcgattagcagcatgatatcaaaacgctctgagctgctcgttcggctattggcgtaggcctagtccgtaggcaggacttttcaagtctcggaaggtttcttcaatctgcattcgcttcgaatagatattaacaagttgttggggtgttcgaatttanacaggtaagttagttgctagaacccatggctcctttgc

SEQ ID NO: 34056 - DNA, 343 bp, Arabidopsis thaliana landsberg
acaatggtacaatggcgttcttgtacaatgcgacgaaagtcttctgaatacaatccaggtgttgccatttgttgatcatgtagaatttgtggcgccacttggcaagcttcttcaaaccagtggccgaaagtttaatatccatagaaaggcacagtcacacgaggagaccgagaatcagttgaatatgttaggaattaatgaaatgcatggagcaggataccggggtgaaacaatgacaattgccgttctcgacgccggatttccaggtgtaaacacagctgctgcattccaaaatctaatcaacgagcaccgtatcaaccttgaagtgtcgaaggatttcgtc

SEQ ID NO: 34057 - DNA, 2752 bp, Arabidopsis thaliana landsberg
attcgttttaatcttgtcggtttagtttgtatttggtccatttttatgattagatatagataactcggataaatcacggcattctcttaattatagattaaaattaaatcattattcctaattgcaatttttaatttgataaggaacaacccaaaaatcatatcctatattttaatctaaatctctatgatgatcacttaaaagagtaacaaatattccttgtgtgctgccaaacaatcacagagtgctaagaggcaaataaaaaaagttaaaaagactttagtttattagaagatgaataattaaggtatcaaacaactggaaattagattgttaatgtgacagataattgagatcaaaggactatagttagaatctgatcaaacgcaaagcgaatggggaacatgccgcgtagtcatcatgcaaatatgtgggctccaacaaagcatgtaccacaaaatattttcttcaaaatattaaaaagaaactctacgcataaacgattaataattgttgacccttaaaactataatgtaacgaaaatgaataaaactctaaaataatatcattatatttcataaaaaataaaatttaaataacttaaaaaaatgtttcaatagaatcacatataaatgtattaattctcctaatcatatacagagggaatgatttattactgattagtagtagtattacagagagcacgaggagataaaaaaaaagatctaaaattgataacaaatgattataattaattactactaaatatttggtcttgtgattaatttatttaattaccgaataatctgaagagaagaaaacaaaattgaaataaagacagagaggttaaataaggcaaagcaaacggtcacacacaaagattcgtctccaaaaactctctattccctccggacaatgccatcttcttgttcttccttattgtctctttcttcacagatttcaataaaaatcctttgatccttcttctcttctgttttccctttcaataataaaagattctctctttttacttttttacaattctctctggttttggtttgcgtgtgtttctttatactctctaccactgttgctacttctttgggatgtgtttgttccaatttctaagaaacctcgtgaagacgaaccaacccatgtacgcaatttttaatctttgttaccaaaaaatttgaattggtgatgctcgtgctcacgcatttttgttgcggattttttgttgcttaggatctaaaaatgagatctttcactttggtgtgctgattacagcttctctgtgtgctaaataaaccattttttcttctcttttgatgggtttttggtttcgttgcttacacatttatcgacccacataagttgtttgtgtaaatgtctcagagagactagattcaatgggttttaggattgagattgatgttaaactctttttatttctttttttaaactgatttttttatctcgaactctgtgattgcttaatttgtaaacttctttaaaatattattgtctaaagtattatatatagtttgccttgtaggttgcttgtttggaagcaaaactggcagttggggaaattcctcttttgagagaaaagcattcttcttctttaagctctgtttcatggattgacaatagctcaaggaataatggattacttatctcaagaggaagatttgcagtttttcgatgctaacgaagagatgatggcattgaatccaagtggttttggatttgatgtatggaatgattcacctggaagtgttgtggagcggcggaggaagttcttggagtggatgggagttgaagaagaagggcgtgttgagacgaaggattcggtttctggaagtagtgtggagtcttgttttgatggaggtgaagagaattctgttgaagctgaggagagatctggagagtgcagcagttcttctagtgaggtttcattgtctggttcaagcgttgaagtttccgaggaattgtctttgagagtagacagaaatgtgggtggatgtgatgtgacgagaagacaaagctcttcaatggcgtcatgttctagttccagatattgccaagtgaaggaaaccgagaagcagaggaatatcgcagggctagtcacgagttttaagaagggatggttatcgaggcttcggtctatgggatgtaccgcggatacaaatatcgaatctggtggtagaatgagagcttcttctggttatggtgatgtgatttcaagagttaaggttaagcattgtaagaagcaggcaaaggagctttcagctctttatcagagtcaagacattaaagctcatgatggtgccatcttggcgatgaaatttagcaacgatgggaagtttcttgcaagctctggtgaagatgggattgtgagggtgtggaaagtcgttgaggataagaaatctagactacgaagggattgccttaacgagatagatccttcgtgtatgtactttgaggtaaatgatctttctcagttgaaaccagttttggtaaatgaggagaaaccaaagaagtctacagaaagtttcaggaaaacatctgattcagcctgtgttgtcttccctcctaaagtttttcggattatggaaaaaccattatatgaattccgtgggcacacgggtgaagtcttggacatctcaccgccaaacagataatgtaagcctccaaaatcttagaaattttaatatattaacttgcaaccattgctttaacggaagcgaaa

SEQ ID NO: 34058 - DNA, 1557 bp, Arabidopsis thaliana landsberg
tggtgggaaacttttggtcttttttgttttttcctttccaccacgacgttcttccttgggtttggggtatagtggttggatatccttttatcaaactttgcagaatcttatatttgcgcgggtcctctagactgatagttgttttcgatgaaacttgatccaccatgccaagattcctcaaagtcaaatttgtaaaaatgcgtgaacttgagcttaatctcacacatgcgtccagatctatgaatctagttgcttcgtgatcctagttgaccaacaaccttaccagatttcagcatggttcgaaccggagacgaagatggcagcgaaagggttaaccctgatccatctagccttctccatcctggatcccgtcactctctttaaatggtactgcagccaattgcccttgtttgctcttgtgccacagcctccgataatgtctctatcaactctaattatctgatcgccgatgccgagctaccacacagaaagcctcatcgacctagctagagttgataagtgtattgtgaagtaacccaccaaaaataaaaacatattttgcttggctaacccactaaaagagaaacaagactttaaaatctacaacgatttgtggagaaagaaaagttaggcatagagatgttttgacattttgactttatccaatacaagtgtctacatgatattacaacagcaacacaagatgaagagtcataaaaatataccgatatcaactttcaccgccgacaaacatcaaatctggtgaggaaaacatcaccaaaacatcccaattattttcctagtaattaaaatattcttcaacttcacaaaagaattgtcctcgtaggacgcaattccacgttgatttccgtatcactatcaaacatcttcaaacacttaagctcccattctttttcgttaagaaatggggacgaatctttgactttgaatccaacttcgagtctttcttttttttaactcttaaattttgatacagaatttatattaatgctatcaaaaatatttacaaatgtttagagtcccaaatctatccaaatgataatttcagcattatatcgttgggtttttagatttcaaaaaacaatttttttaaaaaaaactgaccaatatttatctttttaacaaagaaatattaggttatcggtaaatgtaaaaaatcgagtttaaaatttgaaagagaattgaaaaatagggaataggataattaagaacacataaatcatatcttgctatgaatttatgatcattaactaattgttgacatgtgctttatttatacagttataccacacatcttacatttacccgtagctaagtcttgtgacgaacggtctaatacatttaaaatgtggctgttaaccttctaaataataacatcaagaaaacaaaaaacaccttatatcatccactataagactgtataaggattcatataaaatcttttcttttaacaaaaagaaataaaaataactaaattccctaaaggtaagaagaaatgaaccaatcaaattattttgcaatctaaaaatctgcatg

SEQ ID NO: 34059 - DNA, 6272 bp, Arabidopsis thaliana landsberg
  unsure (1)..(6272): unsure at all n locations
ctctggaccacaacatcttgttgctgatttggaaacttgcttcctacatctgaaacatttagctgctgctgcaaaagatgcagttgccgaaggtggttctgttcctggttgtagggctagattatggcgcagaataagggagttcaatgcttgtatcccgtatacaggtgtgcccgctaatagtgaagtccctgaggtgactttgatggcattaattacaatgctaccatcaactccaaatctccctgtagacgcccctcctttgccacctccttcacccaaagcagcagcaactgtcattggctttgttacatgtttgcgtaggttattgtcatccaggagtgcagcatcccatataatgtcattccctgctgctgttaacaggataatgggtttacttaggaacggttctgaaggtgtagctgctgaagctgcggggcttattgcgtccctcataggcggttggtcagcagatctgagcactgcaccagattccagaggagaaaaacatgcaactatcatgcataccaagtctgttttgtttgctcaacagggttatgttactattctggtcaatcgattgaaacccatgtcagtctcacctctgttttccatggcgattgttgaagtctttgaggctatggtttgtgatccacacggagagactacccaatacactgtttttgtagaattgttacgacagatagctgccctacgacgtcgtttatttgcactctttgcacatcctgcagagagtgttagggaaaccattgctgttatcatgcgtacaatagctgaagaagatgcaattgctgcagagtcaatgcgtgatgctgctttgcgcgatggtgctttgttgagacatttattgaatgcattttcccttcctgccagtgagcggcgcgaggtaagtaggcagcttgtggcactctgggcagattcttaccaaccagctttggatctactgtctcgagttctgcctcctgggcttgttgcatatttgcatacacgtcccgatgatgttgtcgatgatacagatcaagaaggttcttcaacaaataggcggcagaaaagattacttcagcagagaagaggtcgcatagctaagggaatgggtgctcaagatattcctcttccccctggtaataatgttgaggctggcgatgcagcaaaacatatgagtgcaaatgctagtgtacccgataactttcaaaggcgggcagcagattcttcctctgaagcttccaatcctcaggcttctgcttttccaggtgttgacagtactattgcaggggtttcacaaaatggctattcagcatttgcttcagtcaccacaaatgcaaatgggcatgagcaacctgagactaatgcatccgatgtggttggttctgacccaaacttgtatggcatccagaattcagtgcttacagcacctgctcaagttattgtagaaagtacagctgtaggatccggaaagctacttctaaattggcgtgagttttggcgagcctttggccttgatcataatcgtgcagatctcatctggaatgagcgtacaaggcaagaattaatagaagctttgaaggctgaagtccacaacctagatgtcgagaaagagcgcacagaagatatttcccctggtgatgtcgaggccacaactggccaggagattatcccacgtatatcttggaactattctgaattctctgtcagctatcgtagcttatcaaaagaagtttgtgtgggccagtattacctacgcttattgcttgaaagtggcaacgctggcaaggcacaagatttccctctccgtgatccagttgcttttttcagggcactctatcatcgtttccagtgtgatgctgatatggggcttactattgatggtgctgttccagatgaattgggttcatcaggcgactggtgtgatatgagtaggcttgatggttttggtggagggggaggagcttctgttagggagctttgtgcaagagcaatggcgattgtctatgagcaacactacaacacaataggtccttttgaaggcactgcacatattacagcactgattgataggacgaatgatagagctttgaggcatcgcctactacttctcctaaaggtatcatttactattcaaaatattgctttcttgttctttttattctagttattcttgttcctccacttattctcagtaaattttgatgtatgcattacgtcgtcacatacaaaatcattttggagatattcttttcatgcttggttgcttactttttcctggtacatgcaggccctagttaaggtcttgttaaacgtcgaaggttgtgttgtggttggtggttgtgtcctagctgtagatctgctgactgttgttcatgaaaactcggagaggactcctattccattacagtccaatttaattgctgctactgcatttatggaaccacctaaggaatggatgtacatagacaaaggtggtgcagaagtgggacctgtagagaaggacgtcatccgaagtttatggtccaaaaaggatattgactggacgacaaagtgtcgggctttaggaatgtcagactggaagaaattgcgtgatatccgtgaacttagatgggcagtagctgttcgagttccagtcctcacaccaactcaggttaagctttatggtttattttatgtgtgtgactggctatggaaatttcattttatcatgcttaactttccagaagacatatgcttttcatgtccattacctttttcctctgttttattcttacatttttatgcaatactcattctaattgataaaatactacgcaggtaggggatgctgcattgtccatattacatagcatggtttcggcacattcagatttggatgacgctggagagattgtaactccaacaccaagagtaaaacgtatcttgtctagtacacgttgtcttcctcacattgctcaggtaatctctttctttctctccgtaattcttcttctagctgcatccatgatgtgtttggtaagtgttattaagctgagccaaggatcctagcttccctactatttaatggcattaggcacgcctgctgtctaagtgctagctttgagtattatctgagagatgagttgtaaaataatcaaagcgctagttttgagtattatctgagagatgagttgcaaaataatcaatcagtatttgaaatcttctcatttagttttccttcatcgaaaaactgggagttgtagtcttgagctgttttttttccttgaccgaaaacagtttattataaccctatgttaatctgatgtctttctataattttgaaaaggctttgctatctggcgaaccagttattgtggaggctggtgctgctcttttgaaagacgttgttaccagaaactctaaggcaatgatccgactgtacagtacaggggccttttactttgcccttgcttaccctggatctaatctttactcaatcgcacaactcttctcggtcacccatgtccatcaagctttccatggtggggaagaagctactgtttcctcctctctgcccctggctaaacgaagcgtattgggtggtcttctcccagagtccttactatatgtattagagcgcagtggaccagctgcgtttgcagctggcatggtttctgattccgatacgccggagattatatggacacataaaatgcgagcagaaaatcttatatgtcaggtatttacatattcgctactgagggctttaggtcattttcttgaaggctatctgtaaactatcactttcaattcttcagttttaatttctcgtttttatttcctcaggttttgcagcatcttggtgattatcctcagaaattgtcacagcactgccattctctctatgattatgctcccatgccacctgttacgtatccagaacttagagatgagatgtggtgtcaccgttattatctcagaaatttatgtgatgagattcaatttcctaattggccgattgttgaacatgttgagttcttacaatcattacttgtgatgtggcgtgaagagttgactaggaaacccatggatctttctgaaggagaagcttgcaaaattctagaaatatccctgaacaatgtatcaagtgatgacctaaaccggactgcttcagttgagttgaatgaggaaatatctaatatatccaaacaaattcaaaaccttgatgaagagaaactaaagcgccagtataggaagcttgcaatgaggtaccatcctgacaagaatccagaaggaagagaaaagttcctggctgttcaaaaagcttatgaatgcctacaggtacgtctacaaagttttgatcattatctgggatttgatgtttttttcaattatatgtttaccatctttgtgtgttattgtatcggtcttttagaacattggaccattggatggtcacgtaatatgttgaaaagtgcaatattcttggataccagcacaccaggacaccagcagttatttcatgttcaagttatttgataaatgctttatgtagaaattgaattccccttcattatgttgctgtgttcttattagtagagataacattggtcaactttttcctttttccatatgtttgcttgtcaaacaagtgtttgatcatagtatgtacatgatgttatcatttagttctgctaagaacatagtcgatttgtatctaagaattttatagtatactcctatctctgaagctattccactgtagattagtgttttaggtccatatatatgattgtgtttatatatacttctgtctctagatttcatatttatcatactatacatattcgctcttctgcttataggcaacaatgcaaggattgcaaggtcctcagccgtggaggttgctgcttttactgaaagcgcagtgcatcttatatcgccgttatggacatgtgttacgaccgttcaaatatgctggctatccgatgttacttgatgcagttacagtggacaaggatgacaacaactttctatctaatgatagatcccctcttcttgttgcagcatctgagcttgtttcgttaacgtacttatttctcttgctaaaactgtacaattctagttttatttatttctagtccttcaatgttatctattttactttcctgttatcttctgtgtagctgtgctgcctcgtcattgaatggtgaagaattagtgagagatggtggtgtgcagcttctatcaactcttctttcccgctgcatgtgtgtggttcagccaacaacttcacaacacgaaccagctgcgatcattgtcacaaatgtaatgcgtacactttcggtaataagtcagtttgagagtgcgagggctggatttctagagttacccagtctgattgaagacattgtgcactgtacggaattagaacgtgtgcctgcagccgttgatgctgctctccagtccattgccaaggtttctgtcttccccgaacttcagcatggtctgctaaaggctggtgccttatggtgagctatattcttattctctttgtcgctgttaatatgtgtttgttcaattacaagacagaatcttggtggctctgttgtccatgcataaaattccatgtataatgtctatctatataannnnnnnnnnnnnnnnnnnnnnnnnnnnnnnnnnnnnnnnnnnnnnnnntggactttgtatctttgttacactcatttggacctttgcttctgacaagtatgactaatggctgtgcttctttctatttgtatgtctgtttaatcaggtatattctcccattattactacagtatgactcaactgctgaggaatctaattctgtcgagtctcatggggttggagttagcattcaaattgccaagaatgagcatgccttacaagcatcacaagccctatcaaggcttactgggctgtgtgcagatgagagtttgacaccttacaatgctactgcggctgatgttctcaaagcattactgacgccaaaacttgctagtttgttgaaagatgaagttgccaaggatttgttatccaaactgaacacaaatttggagacaccagaggtaaacaatatcttttactgatttgtttgtctgagcagcttacgaatattgaaatgaatgactggtgcataaacatcttcagaattcacatcatacacgtatgtttggtcttgtgtttttgtatttctcataagaagatatgtttgatgtcattttattgcagaattctatttcttaagatacttcttctcatgc

SEQ ID NO: 34060 - DNA, 1023 bp, Arabidopsis thaliana landsberg
ggtttgtctttaacttttctggtttcttttggttgttttgttgactttttagatgtcgagagaagcagaggaaagagtcagctcgtcttcagacagtgaacaggaagctgagtgctatgaacaagcttttgatggaagagaatgatcgtttgcagaagcaagtctccaacttggtttatgagaatggattcatgaaacatcgaatccacactgtaagtccttgaatcccttttgctaaatgcattgttgagttgttatctttgatgcttgtatatgtatttgttctttaagagttctctgttgttagagagtgactggtgaaatctctgtgttgtgtcttaggcttctgggacgaccacagacaacagctgtgagtctgtggtcgtgagtggtcagcaacgtcagcagcaaaacccaacacatcagcatcctcagcgtgatgttaacaacccagctaagtaaggaaggctctttttttgtttgtgaatttctcattgtgacattatgagaagagactaaatggagtgtttttttggtagtcttctctcgattgcggaggagaccttggcggagttcctttgcaaggctacaggaactgctgtcgactgggtccagatgattgggatgaaggtagataagttgaagtattttaacgttttcatatgtggaaatgaagtggtttttagaaaatgttttaatatgtattttcatggttatgtatgtagcctggtccggattctattggtatcgtagctgtttcacgcaactgcagtggaatagcagcacgtgcctgtggcctcgtgagtttagaacccatgaaggtaatggtgttttcttttttctttaatcttgtgttgtaagaagcggaaattctacgaaggcaatctaaacttcaaatactgtgtaggtcgctgaaatcctcaaagatcgtccatcttggttccgtgactgtcgatgtgtcgagactctgaatgttatacccactggaaatggtggtactatcgagcttgtcaacactcaggc

SEQ ID NO: 34061 - DNA, 1007 bp, Arabidopsis thaliana landsberg
  unsure (1)..(1007): unsure at all n locations
aaattttgtcccccccccttgactttttttgttttccttacaagaaatacaatgtgacgaacaaaaagattaacttaagggggtacgttaaagacactgccccatcctttaccaattacaacgttcctaaaaaagttaggcatgaacatatttcattatatacatccattggcatttcgaatattgtcactcgtttattatattatcatttcacattcttggctgcatttgtttccattccaccaatcgtcgtaagaaatcccatcacctgttgatttcgtattaaggagagtgaagttagcaggagtagaaaaccattaactgctaattgcatggctatgtatattaatgtatagttacacatttctactattaatcattatatattaagacttgcctcggatggatcttgcaaagaatacgaagcatcagtatccttgggaaacttggagacaagaatgccaaagccttcgcctctggctcgtagcatctaaaatatacatggcaaaaatgtaaattaagaaatatgattagtatgttaattatatactctactgtatgaaacactagctagttatgatggaaaaaatagatataccttaaatgcatcttcgtcagttcgatcgtcaccaatataaaccgggaaaacattgttagtgttcccaaatcctatcgtgcaattaaagtttcaaatttcagtcttcaaaattgattatctaaatttaaaaggagaattgagccatactgatgatgaaaaatgatttagtcgaaaaaaggtactttctaantagaaagaaaagacangagaaaaaaaaatactttcaagagtgagtgagtgaaagatacttatagtgactctaacaacactcaagtgtttacaaaataaaataaaaattacaccactcgagtctcaccagtgatcttacaagactcagagccttncttatccattaatatggacggtttcgaaactgtgataatcaaaacaagtaataatttacatacgt

SEQ ID NO: 34062 - DNA, 4532 bp, Arabidopsis thaliana landsberg
ccacccttagtaaccgtcaacttctgatggctctttgtgacctctctcgcctactttttaacaaaacgaactctgtctctgcatgggtgattcatatcaaaaatgtccccgcagcgccatttccatgcccaccaaatagccatggcatagatcgtggaccatctactaccttccacctccctacaatcaccgagattctcataaagccattccagcaacgtgttagagaagaaagatcgccgctgacgcatcggaaaaattcgctgccatattccagccattgcaggacaatctctaagaatatgaaggattgtttcttgcccgctcttacaaacaggacatatatttgaatcacataagtgtcgtcgatgcctctccacattcgtcataagaacttggttcattgccaaccacataaacaatttcactcgttctagaactactgtcctccacaacctgttaaacaactctccgacttgctgtctaggtgcaggattgcgggtgaataaagcataagctgactgaaccgtaaacttcctagctgggtcacctccccaagacaatctatccttcgcacctgtcacatcatccaacacaaccgccgctaatctcagcctcatattgtcctctacataaggcataattcgtgtaagatcccagcccctcccatttcgccacatatctctagctttgatctctgcaaaacccatcggaagatcaactctagcgacttcagacaaagcccacgaatattccaccaggtcgtcccactgcccctgtttcgcctctcattcttttcccagaactcgacaagcccacgagtaggcctcacttgtttactctgttttgctctgaagcccaataactcattgggcctatttgtttcagcccgtttcgatttaaaccctgtactcgtctcccctgtgtttttgcgccaatcactcttacccggaacttgcctcaattgacatgtcttctttccaattcgagcctgattactcccaccttcattttctttattctcccccgtaatcatggcaccttcccttagattatcagcaactgaatcctcctccaatcctacaaatctgttaggtgtcatgatattctctgtatcagtaattggaatatctttaagattcctttccataaccgcactagctttttccgccgccttcccagctcgcctagtcggattctcaactctcttccccgaccgtctcaccggtgtaaacccatcctcatcctgggaactcccattctctcggggtgtcaccgtctctgttgttctaactgcaactgtagttggtgttaagttcactgtcctctctactgcaccacgtggacacgaatgaaccagatgaccatacagtccacaaaaagaacaaatgtttgacaaaccctcatacgccacaaaatacctctctccatttatcataattgtccccttcaacggtttggcgaggttgacctccacacatatcctggcaaaacgtgctctatcgaaatgcagcgtggttaaatcaaccttgatcggcttcccaagaccctttgcaatacccatcaaaactgatttataatacagatttagtggtatatttgttaacctcacccacaccggcgttgttacaatatcattcctcaagggatcaaaatccggagaccatgcttggaccataaggtagctaccaaaagccctccatggtcctcctgtcaaagccgctagatactcatcttcaaactcaaaccggatcatgaagaaatttcgaggaagatccaaaacatgcatcgccccctttggtttccacatctccctcagcctcctacttagcaccgcaatcgacaaactcctccccaacactttcacaatcatacaattcttccataaagtattcattacctccaaaacttcactgccaatggtaatcaccggttcaccgtcctccccattcgggaattccagtaccattctcgcagtcacaaacgcatcatccataatctccaccggattcaacctaccaccaggtccactccccaccactttcctgacccacacaccagccgcatctggagggtcccccggagggtcatctggcggacgactcttctcaccaacatccagcatagcttcatcttgcaaaagtctctcggaaaccctagaatcgccactcattttctctcgagaaatcgaatttaattgataagagtagattaaagtttggtaaaatatcattaaagctataataattttcgaatcaagtgattatagatatggttagttaggattgcatatcgaattttattaattaggaattaatcattaactagattgataacccatgctctgcccgggtcttatgtttttataaacaaatacaaaattttagatttttgaaagataatattatggtttagtaccatgaaattttaattgtattatcgagtaaatttgtttagtttgttaatattatggttttgtcaaatttttaataaaaatttattataatatatatgtgttgttaagttttatagcaaacaatttaaatgttagatttattgaatgtagtatttgagtatattttttggatgtgtatttattgattggatggaattttatattttaattttagatagtactatatattataatatatgtttgtcaagtggtagagataatattttgattacaaataattaattttatgttattcaaaaaaaatatatagttaattttactaataatgaaaaatatataattttactaataattatttaaatttgaaactgatttttttttttttctttgtgttataagtttacaactaaaaactcaatatgtattaaccaaaaaaaaagaagagaatgatatatcggttaagaggtttaaacatggacataaatgatacatgatatatgttttttagccattgtaacatggacataaatgatacatggatcttcagagctaacacccattctccgtagctgctattctgttttctttatgttcagcttatgagattcaagcgcttgttcgaatcttgctttgaataaagcctgcaaaacataaatacttattcatacaataccactacaaagcaattgttgaagcaagccacacttcaatgcttgataaatcctaaatcccaaggtcaccatgcaagttaccatcgagtagacaaaattagttcctagcatccaaaaattgcttaatgagggaaaaaaattaaagtgtaaaagagggagaaggttactttaggatgatactcagacacaatcatcatggggacattttgagtaacagctccaaaaaattgtacagcattaggatgacgcaccttctcgaatagtgtaagttcgtgtttgaaggcatttctgtgggtaaataataaaattcagatgctaagattgcagaactaagataatctatgaaaactaaacatggattaacacagatgaaatgagaattccagaagatattaccaaaaaagcacagttccaacatagaagattatataagaactatgattaataatgttacatctcatatcatcatcactatgaccataacaaagatgatttcaacgatctacagcttcactcaagaagaaattcaaactccttcttgacctgttagctaacatagacatattactcattgaagagaagagtaatcttacatagtgtcagaatccttgtagagatccttatcaagtatctttacagaaaccttagtcccattccatttagccacttgatatattccctggcaagtggaaaagtgatgtagtatcttgttaaaaatctataaatggaaactaagacattattacaggaaagtaaagcaaagagagatcttgcctttgagataccatcagctttccgaacttgaagttcctgcggatttaactcgtactcaggaacttcacgaggattcgccacaaccatgggtgtccttttggttttctaaaaccaagaagaaaatgtaactataaacatattaagatatgaaaagaacagagcttgaatcaatgaaaaatgcagcaacataccggaactttagctccacgggctttcaaaatgttgaaaacatccatgttaccataatacttagcatcagcagctgcctatccacacaacacaaacataatttcaaaaccaaaagcacaaaacctaaccaataagagacaacaattgaaatttatcacattaccgtgcttccccaacgatcacgagcatcaatattagccttcctagtaagaagaagcttgacaacatcgacatgaccttcacaagcagcgatatgaagagccgtacgaccatcaagatcgatactattaacatcaataccttcatcaagcagatcctgaacaccttcaacatcacctctacaagccacaaatagaagctgcatagtagcgtcgagattatccggtacagcaagctgcggaccgttagaaccatcaggactccgacgaatcggatctaaagacgattgtcgaccaaaactaaatcgcatattgttccggcga

SEQ ID NO: 34063 - DNA, 6217 bp, Arabidopsis thaliana landsberg
  unsure (1)..(6217): unsure at all n locations
gaaattgtttgtttccggctcacaagccggtagcgtgtttttcaaaaaatgacacatgatgctcggacactgcactttccaaatgaaaacgtttaaggcgttgatgactggcccacttaaggaaacgtcctcatccaaagttactcgcctcgctcgttgatatatcagatttaacatgaatatgatcgtggactcttgataagtgccaaccaagagtattctccgtagttgtcgctcccaagtgccgagcacttatttgtgaaacatcttctgggacaaaaagctcatttaataagtcaatcttccagaaatttgttcgagtgtcaataagactttgaacttttaggcatggatcaataactgagccattactttttgctggtctcgggaattgagttggaatccacggatcctcctaaactgaaatggacgccccaaaaccgactcttttaataagtcctttgttaaccagagatcgagcagaaacaatacttcttcatccataagatggagaatataatttaatattttccaacggattggatttcctaaaatgtctccctttaaaaacgtatgcaaaaagagagtccgagaataaaattagacaccataactgtttttctaataaagctgaattaaaatcatctacatccctaaaacctaagacaccttccgatttactactacacagtttattccaagccatctagtgcatacctctagattccccagttaaactccaccaaaatcttgcgaccgcacttgttagtttcgaagtaattttttacggaagcctaaagcaagacatcacataagttggttatgccaaggctaccaatttaatcatcacttttttccctcctttcgataagaatttaaccgaccacccatttaatctagtctataannnnnnnnnnnnnnnnnnnnnnnnntttgtcttagagccccctaaactctcaggtagcccaaaataggatcccatacctccgatattatgtatagccaaggttgattttatttctgcctttatagcttcgtctactttatgcctgctgaatcgatgatttcgcaaaatttatcatttgtcccgaaaccgcttcatattattttaggatacccaatattattccgcaacggtctttatcagctttacaaaagaaaagactatcatccgtaaataacaagtgagaaactgaaggaatcgatgttgctactttgatacttgtgatcaattttccttgttttgccttccggatgttcggtattagcacctctgtgcaaagtatgaataagtaaggagaaagcggatctccttgtcttaattcccgttatggtattattagtcctttaggttgtccattaagaaggactctatactgaactgaagtaagacaccacattatccatgatatccatttttcgcaaaaacccattttccttaataattccttaacaaagtttcattcaaccctatcatacgctttactcatatcggttttaatagccatgaattttcctttacaagatgggttagatcttaacccatgaaacatttcctgagcaataaggacgttatccgaaatcagacgtccttctacaaatgcagattgagtttccgaaacaagatttggtaggactgtctttaatctttggcaaagaatttttgaaataattttatacccaacattacaaagactaataggacgtaactccatcatccgagtcggtctctccgtttttggaatcaaacatatattagttgtattcaaccgtttatcaaaaactccattttgaaaaaaagagtttacaagaactaataaatccgtttttatagtattccaggctttttgaaagaataaagcggtcataccatcaggcctggtgccttcttcggatgcattataaataataccgcacgcacctcactttctgttgtgggtcccgtaagaaattcattggtttaatccgatatcaatgtttgaacctctgccaaggattcctcaaagtcctgaggcttagtcgtagtaaacaacttctcaaaatgagacaccgctatatgttgaatctctttatcctctacagaccacttaccattctcatcatgtaacccggtaatccgattcctagcctgtctctgcttggtcaaagcatgaaaatatttcgagttattatcccctaacgtcatccaaagactccgacttttttgataccagtattgttcttcatcttgataagcctcctttaaccgtaatgttaaatctgtaatctcctcccgtgttctcgagtcatccctttgtttgggggccccgcacttaattcagatttaatatcctctattgtcttccgtccgtaagggggtaattttttccgccattttgaaatagcccgtctgcaattagacaatttgtctacaaaatttctttctcctaaactagtatcaagattccagcctttagaaattgcctctagtaacccctctttaccaatccatcttttatcaaaccgaaaattccgcttcccacgtggtttcttttccgcaatcgtggctatcaccggtgcgtgatctgaagctaccattttgggttttaaaaagggttttcttcgatgaaagaattactaaataattcatgccaatcttcattagctaaagctctatccaaccgacaccttattggatttttatccctccatccccgctaagataaccaatccccgagatgaggaaattccaagagtccacaatcttctatcattaacttaaaaggtataaaagaagatgcatgtcttaatttaccacctcttttttcattgttttcttttaattcaataaaatcgcctatcaaaaaccaaggagtataccgcgatacaccaatccgcgttaaccgctcccaaacttgttctctgtttttttgaaccggatctccataaacaaagataagattaatggttttacctttgtaaatagcttcaatatcaattaaccgattgttttgaaaaataattgaaacattaaaatcattattataataaagagctaaaccaccactacaaccgataggatcaaccgttttcaaatttttataaccaaaatgaccaacaaatttttccatatataaagaagattgtttagtttccataagaaataaaaaatcgggccgatgttgtttccacaaatcccgaagataaccgattgttgccttatttccgagcccttgacagttccaggttaaaactttcatttaccaccgtttggttttggtggtttgttcccacccatacctcccttgaccgtgccatggtgtgttgggacatttccttcacttacttgctctccactcgtgataccaaacgttttccgaggtgatgaaaaaagaagagcataacgcttttttgagctaatccctagaagtagcgcagttcctttccctttgcgagccgcctctgtatctccaatcttaccggtatcagtttcctgcatcgccatttctctgcaccaacaccttcttgaagccttgtcgcatccattaatttttttgcaaacttttccacctcatcaaccggatcctcaggctgcagaggagaagagaccattgagtcatcttcgtccacctctttagttgacatgaacacttgttctccccgttcaagctcattagaaagcaccttgtccaaattttcctcacccgacacattactcaatggaatagaactctccatgttgtttactaccattgtagcttctgtaatttccccctcttcatggagaacttcctttgcagtttctacctcaattgacggcccatccgcatcaacacccatttgtgccaccattgactgatccgccgttgtaaatagcgcttttctaacctgttttggttgtgagacctccgtagacttgacttgtgtccctcctgattccttaacaaacaactcctcaaccacttgttgtttcctcttgcctccataaccacccacctttgagaaacgagagtcattgacttgggtataactagcaaattttcttggctgggaagaggatgcgccgttgtggttccgatcatccttacgggcctctgaaacagacttacactggaacccatttgcattctttccttcaaatgttgaaacctgcctagtgaccgcgcctctataactttgcagatggttcccgtctttcttctcttcaactagaacatggtgctcactgcccaaagccacattacatccgcaatgttttcatcatgacatagactatgacacagcttataaaagccataaagcctttcatcctgcaaaaaacattgtcgtctcttcaccatcgctatattagatctccgtttcgaagctcagtggtttgaaaccatcagccgtgacccgaactcttccagcatcaacatcaaccgcttggactgatcccaaagctgctcctatctcccggaaggtttgatcagcccagaactcaattgggaccccaaggacccgaatccagaaagttaaatccgaggaataattcggattcaacgaaggtgaccatcgcaccaaagagaccatcgcacctgccaccttgccttcaatttgccaaatacgccgaagcatatacaacagcgtcttcatatcttgcacccgtggattcatacaacgcccaataagggtcttagaataccccgcaatcagatctgagttgtcaaaatgcgacaactttatcctcttttttggtaccattgaaacagccttttgttcaccaacatttttacccacccaagaactctgagacgttgtcaaaacccagcagcagagagaaaactcacaccaatgagaaaaacttgaaatgacaaaatccctgaagcgagaagataagagaaaagtctgtaagaagttgtgtttttgtaagcattccaagcttctctttttatacaaaacctcgacccagcaaatctcacacctcattaataccaaaaatcgtgtaatctccactagacttgatgcccacaccaaatcgtgaagataaagagactgatcttttgctgtaattaccggagaacataaggaaaccatatcaacctgaatggtgaagcatatcgcaatcataatctggaaaatccccctttgattccaaaaaaaacatcttcctaaattttgacacaagaaaacaatattgcgaaaactatcttgaagataagatttattttgaacccaaaatcccaataaatcgccagatcgacatatcggtgaatcaccaatcacatcagaccaaatctattctccgtaaaaccatttgagagaaaatctcatcttcctgtggacagactccatacaatgagagcgtaaagattcccatctcgttgaaatcctcataacttaccacaatcgaaaatccatccattagccttattccacccaaacgatagatctgggttcctttccataaaactgaccatagatccattccttcaatcctcaataaactgaaattcttctcacgtgataaccaccacaacaagaagataaacagctcaaatcctctctccccaataagggcccaccatagcaaaccatgaacaataccaaaatcaaccgatacagaccaacacatgggttgggttcaaaaccctagaaacgtctctagaatcgccgtcgagagcataatttttttttgtgtcaggacagaattgttttatgttgtgacagataaatttatattaccataaatctgtcgtttgatgacaggtttaataaagaataaaataaattgttggaatgaccctaaaaatattttatgttatgccagatttgtaatttgaaatccttatggtgaccgatttatagttttctttttccatgattttttgtagtagaataatactaagtattgtaacagtttttttatttggaaaatcatattatgacagatttgatttttttgtcaattgtttttagaaattcttttaaataccactaaaataagtttttccaaaaaaaatactataatgaattttattttttaaaaataccacaaatctaaaattaaatttaatattcaaaactaatttctacatcctaaacactaaaccttacaactaaaaactattccgtaaatatacatagtcaacccaaatatataaaaagttctctaacttcaaaaatcaattatgtttttttttgcataataaaatgctataataatatttacagtggtgacagttttttttctgtgtaa

SEQ ID NO: 34064 - DNA, 1068 bp, Arabidopsis thaliana landsberg
cttctgggacgcgtatcacccaaccgaagctgcaaatctcattgttttcaaagcacttcttgatggtgaccaaactgtggctacacctttcaacatccgctatcttaacgatctttaattacaaaactaatatcggtgactcggtgtgattcattaccatataaatatattcaatcactcgctcaaaggctataattttcttaggaaacaccacaacaagatagagagactctactgatagattataaagcttagagaaacttgtacattacaaactgaaccaaactgaaatcaaaactaagactgaaataagcaggttataaaccttactaaggtcaccagctgaatgaatccttagtcttagcaatcttggttttgtatgaactctctatttcttcctgcagacattgcagtaacatattacaactctttccacaactacatcagaaccgttttactttttttggtatgatcaagcacagtttaaaaaccgtgggtaaaagtagagaaatgggatatttaccttgcatgattttagtaagggttctaggaatgaggatctgaagaactttattgatttcccaagtaaactactatctgaatctgcaagtgttaaataactcatattaactatgatagtaaactctaatccaaaacaattcaacactgattctatttgagaacataccatcatcatccacgtccattctgaggccaccggaattgatttcttctattagctgaaaatcattagaagatgaagtataagcttaaggaaacatatctctctgatgaaataattcagatccacactctagcgtatcacattatctattattaatttacctgtgaaagagttggaactgccaatggatcaaactcatcacagttattcgggtcaataggaacacagacacgacctgaaaaccagacaacattcatacattgaactaagtatgaatatgagagtaattaactggtaggatatattcaagaaacaatgaaagggacctgtttttggatggacgcagaagggtgccttaagcaaatggttcatttgttttgaaa

SEQ ID NO: 34065 - DNA, 1570 bp, Arabidopsis thaliana landsberg
aactcatgagtctctcgttgaccttgttgtgtgtgctccacaccttcaatttgaaatcacgtgcctttttgaaaggggggttgaggctgtccatgaaacacatgcatatgaggttcagttgagcaaataccacgataaatcgaactgtgagttattattattatttttacctcaagcacatgtcattgaaatgcaggcggcattcatcacacatgaagaagttgttgacgaaatcgcatattgtcgtgaatgcaaaatgactttctccatcctcaatcctcacggaaagtgaatgcatcaaaacccataatccgcagctgcagccaaaatattttgataagagttcaggagcttctgcttgaattatatgatatatgacaacagattaattttgcagaagactacctgaatcccctcgtttcgtttttgctgccacggcaaaacctctgccaaagtatgattacgtacagaaagcaggagaatcagatttctgtgtttaagcacacgaaaaaagaaagtggttggttgggtggcactcacgtagtatccacgcggaacatcctttccacatatatggaagtttcgaagggaatctttcgctccagattcctggtcatacgagcattcgcctgacgggcatatatcatcaaaattcacaagaatttcagcacttcccgtacggcacctatagaaattttcagcttttgattagcatgagagaaaagagtgagcagcagatcgtaaatggaaatatgaagatgagatactaccttcttgatggatgatgtgccactaaaagctgcagaaacctaataaacgaagcactggtttcagatgacttgattgcctgttgccatgaaaactattcataaacaaggctaaaagggatttggctgcttagaacaataaagcaaaaactcttctctaccttatgtgccaaaatgatatcaaaagcttcttcagttgcctcctcaatgtcaaatatggcctgagaaatctgcaataatcaacaaccagaactatttagtgcgttggaattaaaacaaatgcttccacaatgacaaagtgggggcagaacacactatgagagacctgttcctggtcagatatatttgacagaagatttcctaatttctgatcatctaagccgtaagagctgcacaacattaacaagaaaacagatttatattagtatacagtattacccaactgaataagttacaggggttttcatattagccaacataaagagaaacagattgctgaattctataaacatgacttttaacttaaatggtcgatatgacattccagtgcgtacatacctgcctatctgcttgttgatccagttcaacaaaagatcagcagtgcgccattcatcgactacgcttatctcatttttctcttgtttaggtccccagctgccaccaacgaaccttttaggaggagcccaaaagagcattggataatgattgatagagaacttgtcacaaagctttacattcatctgtgctgccagaaaagtcacaataacaattagaaagaaaaaaacttatacacaacctaataa

SEQ ID NO: 34066 - DNA, 4884 bp, Arabidopsis thaliana landsberg
aaaatatctacatatcatagtaattaaaaacacgaagttgaataattcaagtccaataaaaaccattaaaaaaaaaacaaagtaccaattcaaaaactcgaaagacaaatccttctcagctaacattcatttcctctttaattctcatctcatctcccttataaacacataatcagatcttaaggatacaagaagaatgggtgggatgagtatgtcatgttgtggtggtggtggcgatgatggttcgagtttactaacacatcttgtcataattattgtaatctgtctctccatcatggccgtttgcacctccaacgaacgccgtacagccgttcgtgtcgtccggtgccgttgacctactggtataagtcatctctataaatcagatcatatttctataaaagatttcttcggattctctttacacatgtatgttttggttcttgattagtgatgaattaccgatttgatgaaatgggttttaaaatatttaaacagaagcccaaatatattaaaatcgtatgtgtattgtgtgctccacacgtctgcacattcacgtccaaaatagttaaaagacactcatgaccgtgcctaagggtcatcatagattcatagacatagatactaagcgatttctttgtatttttgtaaagttagacaacacttcaaccatcatcaagtaattttggtaggcaacaacttattacttatataacaacatgcacgtcgacgtctattaattatatattgacgagagaatatgtctctcaagttaacattttcgaacaacactccaaaataacaacaattaaaatcatcaatttcaattattaaaaacacgaagttttgctgattcaagtccaacaaaaaccattttaaaaagcaaaagtaccaatcaaaaactcattaaagacagatccgtctcagctaacatttaattttctcttcataatcatctcacatctcccttaaaacttatcatcgggtcttaaggatcacaagaagaagaatgggtgggatgtgtatgtctgcttgtggtggtggtgacgatgaaggttcgagtttactaacacatcttgtcataattgttgtcatttgtctctccatcatggccgtttgtacctccaacgaacgccgtacatctgttcgttacgtccggtgccgttgacctacgactacaagtcatctctatatatcagatcacatctctacataagatttcttcggattctctttatactatgtatgtgttgattattgattagtgatatgatgaattacggtacaggtttttgtcttctttttttttaccaaatatatggatcagaatgataaaatcacataactcccaccgaatttcaccattgataaagtattggggtaaaaacgaaataacgtaaaatacttggtctgttttggaaattatattatctgtgttctgaggatgaagaagaagatcaaacgagttgctacaatggcctcacactaggatcttcactttctcgcactttccctctcattttcccgatcatagaaacagcattgtacagagatttcaaagaatgtcactttgctcttccttcaacgtattcgcttcctactcaccaaaacccaaaaccatcttcaaagattccaaattcatttcacaatttcaggtaaagtcgtctcctttagcttcaacattccacacaaatgaatcctcaacgagtcttaagtataagagagcgagactcaaaccattttcatctctagactcgggaatttcagaaatcgctacatcaccttcattcaggaacaaaagccctaaagatataaacgttttagtggttggttcaactgggtacataggtagatttgtagtgaaagagatgatcaaaagagggttcaatgtgattgctgttgcgagagagaagagtgggattagaggcaaaaacgacaaggaagagactttgaagcaattacaaggcgccaatgtgtgtttctctgatgttactgagttagatgttcttgagaaatctattgagaatctaggatttggtgttgatgttgttgtttcctgtctcgctagtcgtaatggagggattaaagattcgtggaagattgattatgaagctaccaaaaacagtcttgtagctgggaagaagtttggtgctaagcattttgttttgctctctgcgatttgtgtgcagaagcctttactggagtttcagagagcgaaactgaagttcgaagcagagttgatggatttggctgagcaacaagactctagctttacatacagcattgtgagaccaacggcttttttcaagagcttaggtggtcaagttgagattgtgaaagatgggaaaccttacgtgatgtttggagatggtaagctatgcgcttgtaaaccgatcagcgaacaagatttagcagcgtttatagcggattgcgtgttggaagagaacaagatcaatcaagttttgccaattggtggaccaggcaaggcattaacgccattagagcaaggagagattctgtttaagattcttgggagagagcctaagttcttgaaagtacctatcgagattatggattttgtgattggtgttctcgattctattgcaaagatctttccttcggttggagaggctgctgagtttgggaagattggaaggtattacgccgcagagagtatgttgattcttgatccagagactggagagtatagcgaggagaagacaccgagttacgggaaagacacgcttgaggatttctttgcgaaagtgatcagagaaggcatggcgggtcaagaactcggtgaacagttcttctagtatgaattgtttttgtgcgaaatgagtttgctgtgtagtttgtaactgatgagattataaatataaaacctgtgaatttgagagattcgttgattcaaacaacaacaaaaacacacattgcaaatatggtataacctatggatcttttgcagagagaagaaggagatgatgtaagaattgaactaccaaaaaatccctgaaaacatattatccaggtaacttttcctggatcaagaatatagagtatattatacataatcctcgcatttccaacacccaaacacaaatggaaaaatgtaacagtataagaacaacaacaaatcaaatgaagaagacaaatgtgtgttttgcttttgtgaccaatgatcaaattgatcatcaatctttttctttttctttctttgttatgatcatcaatctatgcctcagtttttttagcaacaaaaagttcttgcttgctttctggaggcaatacatgggaagatcttggttttgtcattgaggaagaacaggaggcgcaatcgctcgtgtgttgtatgatctgcaatgtccacatttctgtccgattatgtggaagtgcacttctgttgtgtcgttacaatcgttgcaaagtatccaaacctgtgatttccgcatcatcttgttagaaaggatacaactttgatgtatatctttactcttctttagttagcgctgaaacactatcgagcttaagtgacagagaaagaaacttatttaccttcttgtcacggtaatctgaaggcatagcagtggcttcgatctaaggaagttaatttaatattcttcagcaactaatttgaaagatctatcagacttaaaagattcaacaatgaattttgaactaacctcttcatcgagtctctgccatgttttagacatatcaatcactgacctcgagcaaattggacaacaaaacctactcaagattcacacattttcaaaaccatcacaatcaaccaaagaagaaaccaaactttctggttgaaacagagacataaccacaggaaaatggtaaattacttgtcacgtttgatcatctcgttgtagcattctacgtgcattgtgtgcccgcatttcatcacatttgtgtcctttagagagtcaaaaaggtactgcatttcacgtacacacaattagctaaaaccgcgataccttttgctgaatctttttcttgataagttttgccttaacacacatacctcgtaacaaatgggacagtgatgacgcattgaattctcaacgcagcgatggttgttgcgcagaccaaccgcataacaagatcctaaaagcaagtaatggataatttcacaagtcaacgacacatgattgtgttagtctgaaactgagcataagaaaactttgttgtttttccatttaccacagttctggcaatgaaagaatttgtcacgcccaccaactctgaaaaataataaaaccacaagattaagctacaaaaatatgattgttatgtagcacaagtagtcaaatatcagaaacaactcacctacaaattccacagtcatcacaatgaaactgttctttcgaaatctgcaaacataacaacggcgtgatactttcaggaacgaagaaagtgaaacataatctcgcatagagaaagaaaaccatatagaatgaaaggatcaaaaggctcacatcgtcgtcaaagaatttgcagatatcgcaaaagtattctcccatattgacgccacaattcgaggagactttagcaacctaaattgtttttaacagaaatgattacccaaaaatatgaaacataacttgcagataaagagtaactaaaaatgatcaacgtacctcttgctcagtttgacaaattgaacaaacaacctgaaaacatagagaatccaatttccttaaatacaaaccgtaagagttaagattgaaacacaggttttaagcaaacctgtttgacgttttggcggaccaaatcatgacgttctttaggatcaggaagagaattctgaaacaagaagaaagcagcaatgttgttttagacaagcaaagagagagagagcaagccagggga

SEQ ID NO: 34067 - DNA, 2775 bp, Arabidopsis thaliana landsberg
acatgacctctctgcctcttttctgtcttcatatagtcaagagaatgtgtgttttgttctcttcgtcatctctgctgggacttgggatttttttttgtctaattactggctacaactgttttattttacagaatccacacagctcacaagaagtaccaagttttgaccaattgggatataatgatcatttgtattccaaccatggattgtatggactttacgggaatgtaattgactctggtcatgcatatggaacttttggttatgattcctggaaacttgggcgaggatggtatcccgttgatggttatagaaagaccagaagcttcaatcatgggcgtggttacagtgatgagaaagcagataggcttaatgagctatgtcgaggaccaaggagtagtgatttcaagaatccacaagttcttaactcttcaatgctagatgcaatgaagcaagacgtttcagcagtagatctccagcgctacaatggggagaatttccctgaatcatttgtgaaagcaaaattctttgtgatcaagtcatacagcgaagatgatgttcataactgtattaagtatggtgcatggtcgagcacaccaactggcaacaagaagttgaatgctgcatattatgaagccaaagaaaactcccaagaatgccctgtgtatcttctgttctcggtcagtatgaggttacttcacgtcttgtgcaatatcctttcagatttacattaagtaactcactgtaatcggttttatctacaggtgaatgcaagtgggcaatttgttggtcttgcggagatggtaggccctgttgatttcaacaagacaatggagtattggcagcaagataaatggattggttgtttccctgtgaagtggcatatcatcaaagacataccaaacagtctcttaagacacattaccctggcgaataacgagaacaagcctgtcactaatagcagagacactcaagaggtccgttgaacttcccctaaaccctttcttggacatgtttgaagcctaattgaattctaataaataatgattatggctgttagtcaggcttttaaactgtacggtgatggttttggtacaggtgaatctggagcatgggaccaagatcataaagatcttcaaggagtatatgagcaagacatgtatacttgatgattacaagttctatgagacaaggcagaagatcatcagagacaagaagatcaagcaaaagaaacaggtacaataccttaaaccctgctgcatctaaagcacattaaccacccctcttgatacagtctctgggattgcttcattttgattgttttgttatattaggcccttgatggagcttcgggggaaacaattaacttgagttgaaagatggaatcaatgcaaggaaagaagaagatgacttaattaaaagaacttagttttgaattatgctttttcttcagggtttggatttctaaaaacctaatacacatctttaatctgtgtgttttcttcttatctaaacaaaactttacattgtctgttgttcctcttaaggggacgcacatctgataaaacaaaaactcaggctttccttcaaagttcatatcatgttattttcatcattaaagttatttctcttttagtccctaaactttcatataataagaatttcatccataaaggaaaaaatctaacattctggccgtaaatgttaaaacggcaccgtttagaaaaaaaaaattcgaagggaatggagtgttctctcttcgtccctaaatgttcatacaatacgaatttcacccctaaagatataagatctcactttttggcccccatccccttaaaggttaaaaacgacaccgtttgtgaactcccgttttaaaacctttcgaggtttctagggcaatctcggccacttttactcacagaaaagctttctctctaaactgcttcgaaaatctcacagagcttcttcttcttcgcttttagggtttttgattttttgttcgagtgacccaacatcaaagcttatagatcgttaccttaaaaaatggtgggtatgtcgatgcagccatatggtatccaatcgatgcttaaagaaggttacaggcatctctctggtctcgacgaagccgtcattaagaacattgaagcttgcaaggagctctccaccattactcgcacctctctcggtcccaatggttcgtaatgtttctctgattgggctttgatctaatactgaaatgatgaatctcgttttctctgtttcgtttcacttttactcgagtgttctaagtaggatctcgcttgtgtatagtttaagcaaacttgatctgttactataaaggtgaagtctttttctagggattcagattcggattagaactgagttcttttgtttctaatgttacaggaatgaataaaatggttatcaatcatttggacaaactgtttgtcacaaatgacgctgctactattgtgaatgagctcgagattcagcacccggctgctaaacttctggttttagccgctaaagctcagcaagaagaaatcggagatggagctaatctgacaatctcctttgctggtgaacttcttcaaaacgctgaggagcttatcaggatgggacttcatccgagtgagatcattagtggatatactaaagctgtcagcaaggttggtgaatacctgaattactgttttgtgcttttcaatttgtttgtcttgagtatttgacgaatgctattggattttgattatgcaggctgttgaaatactggaa

SEQ ID NO: 34068 - DNA, 653 bp, Arabidopsis thaliana landsberg
cgacggcgggtgtcactggcccgcgacatgtcagccccaagcggactgatgacgccagcaccctcgcaaaggacctgctgggcgttaccctcgtacccgagatgacggtgtgctccgcccccgacgcgacttcaccaccgtccaacgaccaagaggtaccgtccgttttccatcccgtaccttttcggttcagctttgatccacccagcgaccccgctacggtgagcgccttcgtaaaggcgtatccaaaccttctggggtaccacatgtggttgacctgggaccgactgacagccgtctcaaccttcggaccagcgggttcttaggaagacgacgcgcccgacttctgttgggatttctctggacttggcaaccccagtgccatgcgggactttatgaccgcatgcgactactgcctttccgactgttccgacggtagccgtagcctcggcgacgaggactgcggcccaagtcgcgaatgtttccacgtcgatctagggggtccctctgaaggcaaccatctcggtatgccggaggacggtgatcccctaggccggtgcctcgcgttgacatcccacgggagctagctgtggtccccgttccggtggggggtcacaaccacagctcgagcaaatccgcggggtgccggccag

SEQ ID NO: 34069 - DNA, 970 bp, Arabidopsis thaliana landsberg
tggaggagtatcgtgaataagagttcaagtccactcgatcctcactttagaagaaattctaaaattcttatatttactattattactcttcctagaaaacactaaacaatatttaaaaatttaaatgcagccataatttcgcgatcaacttttgcatcgttgtaatatgagaaacacaaatgttgagggggttaatcgtttggttcccatcatgacgccactataagggggtaattgaggcgtcataattttgtcaaataagatatccattatgccctctcagttagttggttaagttttaacgttggtcagtcgattaataatccaatttagacagttttttatttatagttataaattatagaggtcggaaaagaaatttttaaaatcaagataaaaaaggttatacaaaaatggatgcgagtctatagcatatacgagaaatgttagatatgaagcaaccaaagtgataagctttgaagaaaacaagacaaaatcatacacgtttacgccaaacatgacttgatggagaaattagatgtctacgggatcaaaatggatttccaaaatgagaattaacctctagagagcaaagaaatttgcatgcaccagaaacgatggatgttttcccgtaaacttttttacgttcgatttaacaacgaaatatgtttagttttatgaaaaatataattgtctttttgcatacgcttcgttaaacaaaaactggaaaggggtttgatcattcttgttcaacacattctcttatggccttagattgttcgtcaccgtggccaatatcactgaaatcgtaataagaagactccaactataatttccgttagtatattcaacgcattgcttttttttttactaaactcaattcttaatatctaatctctaacctttttgtaaatactctaactagatcctgaggtgaagagacacatttctaaactacaaatcttattcg

SEQ ID NO: 34070 - DNA, 1233 bp, Arabidopsis thaliana landsberg
  unsure (1)..(1233): unsure at all n locations
gatggtgcgaaccagctgtctctgttcgcaagttactgcctcctcctttgctttttcattatatacatcacacagcgcttcctcgtgattacgtgggtcacccattacggtttcgaccatgtaagctcgaattaccagggttgccttttccccctaaacccactttttcaaaggatggttgggtgcttgcgagaaaaagcgagtcctattatgctagtacacttgttcttaacccgtttacccgtgagagcttctacttacccccaaggagacacgatcacagatcccgtttgttagctttttcagccgctcctacatcacctagctgtatggtcatcttctacacccaactacgatcctgcggatctgttttgatcgattcttggcggcctggtgaaaccgaatggactacacactgctttgagaaccagtttccctttcgctattggtccaaatgtgtcttctccaatggcatgttcttttgtctcagcgaatgcggctatcttggggtgttcgacgcctctaaagcaacgtggaatattcttccagtgaaaccatgtccggccttttatcagtttgagtttgattacactcataacccagtgtttatgacggagcatgaaggagacatctttgttatttatacaccactgctacaacaacatcccaacncgtgtttaaactgaattctaaacacaaggaatggcaagagaagacagatctaggtggcttgacaatatatacaagttggccttcctcttttgtaagagctggtctctccactgagcacaggaacaaaatatattcatctcgtcttgatcaatttgagcggtatggcttgtactactccctcggtgatgctaaaggctccgatccccctcgagatcacctagcaacttaccacatcctttgggtggagccacctcacaacaactttcatttgtgactttcatttatcttttgtatcatcaccaactttatttatgcaaggttttatttgaactatatatttgcaagtctttcttttacgttgtatactctctattatgagttggacaagtttctatttatccaatgcctagtcttttttatcggttaacacaagtgtttcagtctgatactaagacgcttcctctactatntgtcggatgggcttaaacttgaatgggctatcgttgataggctactgtttaagcatacacagcaaggtatgtacaatatcaaatatgcgag

SEQ ID NO: 34071 - DNA, 1614 bp, Arabidopsis thaliana landsberg
aaaacaagttgtcctgatctgtccttgggaggtcgctgcttcgagttgtggtgccaaagaccgattcgccttttcttgatcgtttaccttcttttagagttgagccatcatgctccttaattctgctaggaccgcgggagcggtggcctcaggagcgtctgtctttttggagggatcgggattccctctgcgtcaactgtgttaccggggatctgattgttaaccattgtggattggttggttggttctgtgttctgggagtaagagaaatctcaaatcccctccttctagcgccaaatcccctccttctagcgtctgtctagtttggagtaccgctcaaggagccaggtttaacaccgagaatgatggacttggatcatttgcaccgatgtgagttcttagagtatgacatagttggcgacttccatcgctacaggttcgagcattcatcgattagaatcgccaacattcttctcccctgcattgacgctactaggattctcgagggaaggaacattgatttcaagcctgcgcttgaagatatctatttcgagggcagcccaccaactgaggagattagtcacaccgaaggagctacaacagaagatgttgatgagacagatgaaatagatgaggcggagtttgacacgagcatgtatcatttcagtgagcatatacctcctacgagggaaagcaagtgtttgagcgaagctcacaggaacaacagcaagctgcagaagtggtgcaagaaacaggacaagttactagccaagtgcttaagggctatcaagtttctgaaggacaagctcagctgctcctcttccactacagctattccgcaaggacatctccctcaggacatgccttcgaggagatatgacacgcccgagccaagtcgccgcaggcctgagcctagagagcaggagattccgcatgtccctgcgaggcattcatcattcgagcctcgtgaatctgggaggaagaggaggaccacactcactcgatctagcagtaggagcggacgacttctgcagtctcgtactttacgcgaccgcgatgctggccgcagtagaaggagagaggtcgagtttccgcagagcggtgctggccgccacagagctgatgaggtcgagtacccacctgctggagctgatacagaacaaggaggttcgtctatggcctgggagcaatcgcaggcagccattgacgagcaactacgttcattcttcgactgaggtaagcgcctcacttcaccattgtattataccgtatgttatgatttgtttctttattttttgtttctgtgattggatttgtcctgagtactctcttccaagtttgttcacacagtggactgtgtgatttaagtttgggggagggctcaggaagtgtgtgttgcattgtatatatttttgagtctgcagtcatctaaggcatagaaaaaccaaaaaaaattgaaaaatttcagaaaatgatttcataaaaaaagagtgttcatgtagttgcatcacatttaggatcgagtctaaagtgtttcatttaggattgctgcatatgcataggggataatgatgagatagccttgtaagcaatttgattcaccggataaactca

SEQ ID NO: 34072 - DNA, 607 bp, Arabidopsis thaliana landsberg
gcacccacaggtggggttgtgttcgcctttgctctaacattcacatacaccatgccatataataaccgctcgtttttcttgtgtaaggcggttcactcgggacacaaactcatgacttgatccgaatatcacttgagacgatacaaatacaccagacggtcccttaatatagatggacacgtgtgcctcaagagagacaagacaaatacttcctcgagtttgcggtttagtgttctttcagcccttcttatatatatgattacacttctttttcttactgatattaccttttctatttgtagaagacacaccattgggatcctttgatcacagggactgttcagttttacttcaacgagatctgtttaaggcaaatgaaaggcatggttagcactgcaagaactagtcgaaagaaacctaaatggatcggaaaaactctatggaaggaaatgattgcgtactgggacactgaagaagctcaggaaataagtcaaatctattcaaatgcccgtatgtctgaccgtaacgatctaggtcctcacatacatttctcagggtcgaagtcatatcatcaaatccgagacgaatggtaagtcttctctttgtg

SEQ ID NO: 34073 - DNA, 3021 bp, Arabidopsis thaliana landsberg
ttccagacatcattccacaagcttctttgaagcaggtttccatatatcagccagtgtcatccttgataagaaaatcggcctgagtgaagaataatttacttcttagctcaaatctctaatcaggtttagaaaaaataatgcaatgaattttgtgtttgattttatagttcaacgacatgctcaaacaagtgctacaaacacatttaggaactttcagacttgtttttagatttttactaaggaacatacaggttcgttcgggcaatcaaatccatgaaaaacatatctgatattgacatagagattcttcaccttcaacaaatagagactaaaacacaacggcaatgatgagtgagaaaaaggccacgcaccttaaataaggttcagatgaactactatcattagctagctgagatggtgtttcataatcacgagaaatgaaaccaatccatccaagcaactttctgaagagctttgcgcgaggaccaacaggtgtcagaagcccctcatatcgactgaccgccctttgtgctgctaactgcatggggaggacagaatctggaaggaagccatctttcaagaaattatcagaagtttggtcaagatatgattccttaaaaagggataggtccttgagccaaactttcattccctctgataaatcttgaatttcttgagtttgagaagcctcacttaacgcctgtttatcaaatttgaagaaaaaatgttattcagatgaacgagatagatttgattatccgagaatttgattgtctgtacgttacctttattacacttaactgcatgtatgcaatggtcatataacatagtatttgcctcactaaatagggatcataccttgtttatcaattttccaacttttctcaagggttttgcaatagtagagaagattacttgtagaactttagactggatatagtctagcttctccacaagtaacaaacccttctccttctcagttgcaaatccacgcctgtaaagaagatgaaattcgtaagcagattttccgtacagaactagatagcacattttagtagtgcatcaaaagatataaaaattacctgaaaacaatagcattggactctgacgccttcttccaatcaacatatacaggcaaagtaagaaggtaatccgtgttaagagccgaggtcaatgccaaatccctagctgaaagctcttcaaaaccggcattgtctaggagctgaatgaaagaacgctggaaccgggttgcagccattacactgcattagagtattgtcaagttatattcagattttcaaaacaccaatctcaaatcttctatcaatgaaagacttcagtgataggttctaatacctttcagcggaacgtttctttgcatgtttgccagaggaaattaaaaagttccaaatgtcgaaaccatcagccaaagggaatgataaaccttcgtatccattaacactcctaggttcagagttcttaagttcctcctctgagtcaatttctccatctgaagttgaactttcttcatcacccgatgaatcaccaccagtctttacctcctctagggactgagtagcgacgaaatcggctctcatctgctctaaaatcctcttatgctccgcgtgaaggatagagtctaagcacctaaagagttccaaaaacagctcaagagagactccaataaacaaattcacgttagtttaggagatttataattagcttacgaggaaaggaggaggaagatatcagcgtctcctccgtcttgagaatcgagaagcttcgttacaataccattaacgagatcagacttggagacattgatgtatttctcacgaggaacatgaatactcgaaatcccctcctcctcctccgaatcgtcatcttctactcctccttcacctccatcttccgccgagggaagctcatcttccaccttccagccaccgccgtttttaagctcagttaagctaccaaccgctctttccgattctccagaaactacatcaataggtgaaaaagttgccgcctccgtaagtcgacaacgaactaaccgacgacgcaaagacggcgacgacgacggcttagatcgagatggaagagcgacgaagctagtagtgaggtttcgaagagataacataatgaatctgaatctttagctgaaacgagagattcagtacacattcgcagaagattcgtgaccattgaagaagaagcaaaagaagaagccggagaattggattttgattagctccgcccagaaaataaaaaatcgaataaagacgaaattgtaaattaacggctcaaaacgacccacacgcgttgactttttcaggtgagaagaccttctagctcattcagaggattctgattctagttgtaactaacattttcataaatagctattttgatcaattttggattgggaagaaggaaaaacagaattaggccttctttttttgaacttccgggaaattgaaagattgtttgaaaacaataagccaaaacctaatttttttttttttgtgtttggttaatttatctattgaatttttgttttctctctggataatattgtccagacgagcgccaaatccttccttcaagtgacacatccatgacagagacatcatcatggtacttccttctatctccttgaggaatatccaacagatcatgaaactccatccctgccaaatatgttggttttattttcacattaaccggctgcttaaccgtactaaaccaatcattgattagttgttaaaactgtaccgttcttggtggcagcacgagagagaagctctgcaatgaggtattgagcaggatcgccttcaggaacgttttcgatgaaccaagtcacgtgagcaacaacctcttcgttgctgaagtattcatacaatccatccgaggataaaaccatgaaacgatcgcttgaagtcagtctgtgatggacggtacacggttcgcatgtgatgtacgggtctgttccaatgtactctacttggaacatctcaagca

SEQ ID NO: 34074 - DNA, 1569 bp, Arabidopsis thaliana landsberg
gaagcttccttctaccttaacaagtttgtcttcttcttgttttgcaggtgaacgttgcagttgattgggctttggttatgtcttgggcttccagactgcttttggtatgtcattgggccttgtcttctgatttggcccaaagctgggtttactcaatatgctgtcgtttggagttgagtccaaaggtcttttgtcagcttcttgagttagggttgtcgactgtacttcttcattctcagtcgaatcttcttccttctcagcttctccattgatacctctttcacggagagaccttcctcctttatggagagaccacttccatcttcctccttgttcaaggagagaccttccccctctatcctcttcttcatgaagagagttagtcaaagctcagcctttatggcatttagagcccaatttgtttgttcatctcctttggcatctgaacatgtcgatcatcttcaattcttctttgaagaatctcctggttattatctatggttttaaccttctatcttattgctttcaagctgtgtatttcaattgtgtttatgtttcgaacattcgacaagtgatctctttagcaaagagttttggattcgtttggatgttgtaaccgcaattcagtttctaatataattattgcttgacaaataaaaaggaatgatggaaaggtatattactttttttttaaagagattatccatgtctaaaatgtaaagatatttattctaattctttaattgatttacatgtgaaaaatcaaactcctttgacatgtcttggttggagatcaatcctaatatcatgtaattagagagtttgtctccacgtatgtaaatattaaaacagattgtaaatatgacagaactatcataagtattttctgttatataaacgtttatataggtggacaactctgcttcataatatcaatgtgtgattacataggtgtaaaaaaacccgtttacataggtacgatgtgtgatttatataaacgtacatttctgattctatattcatataaacatacatttctgattctatagttgaatcactataaatttcgtttaatttagtttatcaatatatgtaacataaattataaaaaagacaaaaatgtaaaattttaagtcattactttttaaaatttactaaatctgtttactgaatacagttggagatgtatgcaatttcattctaaagtgtgtttgtcaaagtttttatctttacgctagcaaaatatctatatcaaaataaatttcgaattggttaaaaccaaatatgaatcatacttacaaaacatacaagttctacatgggcaaatacagatcatatttttaatgatattagagttttctttttgttattattttttgcaattcacttctgtaagatattggatatactaaaaaaatattcatcaataaatttaaatgtttttaacatggtaacacaaattcatagtatatatatttaccactaccaaacaaaattattttatgtttttttaaaattcaacattaacaaattaacatgtgattcaccattggtaacacacatttgtat

SEQ ID NO: 34075 - DNA, 1334 bp, Arabidopsis thaliana landsberg
cacatagaagagacgatgaagtcatgaatcagtgttggactcttgggacttttaaactagctcttcttctacttttttatccttatgtaatataatcattgtgagtttgtaacgctattaaataaaataaaataaaatttgtcccatgttataaatttctctcgaactgtaaatgtgtctctgtttaacagtttaagactcctcttagattcgaatctcatatttcataattttggaagtgacatgtagcggcttattgattttcttgattcatatttttgactttagttatttcaaagtgtgataccttgtggataaagcaaaatccatatgaccatatgtacatgagacaaaagtgaaaccatctatgtttcagctctaagagaaaaacactttgttccaatttatacacttaagataaaactgccacaacttgtgcaatgttgttatgattaaagtttaaacacatgaactatagatggtttaatttgatttcaacccctcgatgcaaaccagatttggaggctcttgtcatagcgtcgatcatcagttgctctgatgaggatagatggcttgcttatcaatgaattttattagacgagccgctggttcggccctcttctccccatgccttctcccttttcgttcgcaccagattgtgtataatgtagcttggaaaaaataacgagcaataaagctctcgacttaatcatgccattgaccggagacggagataattagtgcctgcgagttcgttaagtatcttgttttgtagatgttgttgcatcaagggagacatcctacttttaatttcagcaatgttctctaattttaattagatccctctattattaaacttatgaagtcgcaagaagggctagtttaactatttcatactataatttataatgtagactttatcatttacacagttgacttgtatatatttttggaaattttgtgagagtcagaaaatggccggcatttgttattctttctttataattgatgttcgggtttctttaaataaattaaaaaagactttctttaccaaagaaagtaagcgcatgaaatataagcaaattacagtatattttttctgaatgatgtaaaattatcgcattaatatggtttgtattttataagaaagcttacaagcatttcttaaagatatattcctagaatagtgttatttaatggtaattcaatttggtcataaagaagctaattatcttaatgttttggaaataaaaagtcttcgtcatatagcaaacccttaaacaaaaatgtactcatataatagtcgcatatgtcaaaacattataacgaagact

SEQ ID NO: 34076 - DNA, 1496 bp, Arabidopsis thaliana landsberg
gtgtatacacacatattgcgtatataagatgacaggataaagaataaaacataacgatataaaaagcgtagcttgaggaaaagaactatgaaattaacagccatatggtagctaaacaaaatatcacctaccaaaaaaatgagatataagttgaaccgcaagatgttcctgccgacagtcatcaccgctcttcacaatgatctgcaaaagccagaaaagaattggaataataggtcaaacaacaaaattaacagtttcttagggttgttttaatatagtgtacagaaattcctagacaacaactttcaatgtcaacaagtataaaccaacttttacattcagcaggaaagaaattaaaaacagaagcttatcaaaagcagatccccacaatgagtttctaaagactcaaagcatatagccatatacaaaggaatgaatgtaaaaacacttcatgtattttcactgttgaaaatttttgaactttaagtagagatacgcaaccatttatctgacaagaagtaccattatgtattttatttattgctacacaagatgttcaagtggagaaatatactctacaaggaaaagccagcggaagataaggaggtttgctttatccagtacttacagaacgcaagtcccaaccaggtaactttccatatattgaatctttacgtattcttagtcgctttccctcccaaaattcacctgataaggcatcacctgctttcagcatgccaccattggcctagtaaacaaaacaaaacataaatacataaaaggttcaacatctaaaacaggaaaaagaagaagataacccatattctatgttaaacatgcatatacccttggttgtgcatccgaggaatcctgacccgcccctttagaagaaaggcctggaggtgcctctcccttcgctgcagcagcctgcacaggtgatttaattaaggattaatgacgggtcacaacgccaaacagaacacatacaatttcaatatcttgactttttgaacataaacgccttaataagaaaatgaagtgtatagcatgtcggaaggacaatagcaagcacaggcactaaaaacatcgactagttgagtataagaattattccaacaacttgaaagagacatgaagtatcggatatttttgtgaaaaaaacataaaattagttgcctcctaaaagttattgatcaagaaacactcaccctaacttcctccatggcaacagtacttggaacacgacgatgttcctttttacgtgggactgatggatcaggaatgctttccattctaagtcctgggtcagccgttacgaccacccttacccattcaagataattgttcagcccagtccttggggcttcccccagaacatcatcaattggatcgccaaatgattcaagagctgaagtacgatcctccactgagagacttacattgacaagtttcaccttcacctttgacttaggagtcatcgcttgatcaattgcttg

SEQ ID NO: 34077 - DNA, 765 bp, Arabidopsis thaliana landsberg
gtgtgctcattagttaaggtggcaatgccagacgaatgagccagagagaggagcacaagcttcctaaaataagtctgctccagtatgtgtcacaatgcctaccgtcgatatatcccgtaagtgagtgtgctctttaaccaggcgctgtatctatgacgaatgactattctcagtgtggttagtaaggatcatatttggttacctctatatgacccgttgttaatgtattgaatcatgtatgcgatctcaaaccttatatagcttcccatcagcaacaacttctgcttaattttgtgcaacggatcgtgccccttttagccacagttggtgaacgctcactagaagccatataagtatatgaccgtaaaaatttcaattattgggttatatgagacaggtccatgttttccagtagtctatagttttctgaggcttccaggttcaggagaagacaaaactaatgtacctatagtttattcttcttctgcatattgaagagcagcaacaaatctcaagtttttttgtgatgcatttctgttactctactccattggaccagaagatgttccctcctcttcaccatcgaattcttgctcaacacctctgacctgtgttttgcacaaacgcttcggtgagtaatgattagagaacaagagtcgactattaacaagatcatgattctccctcaacagcaaaagactaacagaactgataaatggttggacatctccttatcagctttacctcggaaacataatgcataag

SEQ ID NO: 34078 - DNA, 896 bp, Arabidopsis thaliana landsberg
gagtttcatcatatttggtaataccatatgtgtatataatatatatgtgtgtgtgtatgtgtgcttggcttgactttttccaagcttcagttttgatctgtttcattagactctgactctgcttctggatttccaatttcttatgctatatgttatttaccgagtgaacctgtgaatgtacattaccccatgtagaatctgttgtttcaatgtatcaaaaaagatattcttcagaccttttgttaatttgttgataagaggaggcacagaaacatatctaagtgggaaacgaccttgggaaacagcaaagcagaggaattagtcttataccagcaaacataaacatcaaataccaaaacaaacacaagtcaatttcaatatcacccgaccataaactagaaccggcgaactcaaatataaattatctaagaagaaagtctctgactcacgtttgcatattaaacagggatataatatgaactcaaacgtgcgttccattagtttctaaagattgtataaagatttggtctttactcttaacaaacaaaacatttcagtctgagaaaactcttaacgtttttttgtaatggcaacaccaccgttaacgccaagaatgatgactccaacaacaatgtcgcctctcgggagtccaaagttgaagaagtcaacggcgacggtacgaccggagatcacgttggagcaaccatctggaagaaacataacaaccggctgcaaatcgactaaactctttcgacgtgataagtctgtcttcagatcacttacgatcatgtctccgatgtgtaaatttcccgtaggaggaggatgaatactgcaccagatacaccacaattgaagaacacgtgtcacgggaacgttgttacgatacatcaaaacgc

SEQ ID NO: 34079 - DNA, 543 bp, Arabidopsis thaliana landsberg
tccgagatttctattgggtctttagattagaaacactcttgtcacttgtgctgattcaatttctcagtttcctaagaacaactcttaaagtttcgattttactactttttattctctactctcaatctatcttgactttgaaagattttttggtataacaacaacatatatgtagtcaagatctacaaatttctctaatcatttcatagcttcattctctctatgtatgtatggtagaagaaactgttgttacttgtaaccgacacttctaaacttgctatatttagagcatgttgtgcaatggcttaatttcttcttctaccttttcttaggaaagcttttggatttcacaggaaaacacttgtccataacccttacaaagacttgccttcaagaaaagaccgcaaaaaccgtgttgtggctgcaactacaacaccatcatcatccccaaaacctgctccaaaacatgtttcaactaaagcttcaacagtttcagagccacaaaagagatcatctacacaagatgtttcaccttctccatct

SEQ ID NO: 34080 - DNA, 993 bp, Arabidopsis thaliana landsberg
actgaaattaatatcaagcccaaaaatataattaatttttattttaaatgcttaaacatattttatatattattattattactatactgaaaattttaaaataaaataaattaaaatacgaaaaactgacaatgcatctgattgggtgaactgcggctgtggacaatagtctacctgcaaatataatctacagtcaaaaggacaatagtctacctgcaaatctaatctacagtcaaaaatatttacacaatctcaatatattagtgaaagaaaatctatcgatcagatttaagaaaaaatattgcataccttataattttgttgttcatggaagatagtagtcaaactataaatcatcatcggatttctgcaaattaacaagaaaaagaccataatccctatcaaaaaattcaatcagaattactcatcttataaatatagagaggtaaaaaaagtttaacatattactttgcgtaaaaggtttaattatctgattggattagtagtatttaagcatataattagaaagcaagacatactttaacaaaattatgtgtgcgtctacattttaatctcccacactacctgcataaatatttaaaaaacagatgtgagaaaaatatgaaaaatatttatggaaaaacatagagagtgagagaggatacctcgatatatcgtttttgaaacaacccgacccatttaaaaaaaaaaaaaatataattaaatattcccataaatatctaattaaaccaaccaataacataataattaaaccgcaagtcaaaaatactattttatgaataaataaataattcgaccaacaaaaccaagaataactgacaatcctaaccgggttccaataaccaaaaacaccaaaaataaaacaaacgagttcctagatcatcctctcttccttgccatgattccacgatcacactttatctttacctgcatcaacaacacaatgagatgcgtaagtattatcataaatac

SEQ ID NO: 34081 - DNA, 448 bp, Arabidopsis thaliana landsberg
acgaattcagataaataaaaaagaaaggttgattttctaatgccgacataacccccctcgggctaattttctaaaacctctctacctaatttaaacataaatatatcatggtcatttcacttttatttgatattattttgaataagtataaaatatttatataaaaaaacttacatgatgtggataactggatatagaccatctcatattgtcacaattttgtttctatctagcccacattaaaattagaaagtgttatacattcttgcgatagatataaataaattcttaaaattcaataatacagatatgaacatttaaatatcatactgtaaaaatattatatttttgggatattctatactaagattttgtagtttgttttcgggtaaatagttaatatagtcaattatatggctcatcgatatatttaatattcaatataccc

SEQ ID NO: 34082 - DNA, 920 bp, Arabidopsis thaliana landsberg
  unsure (1)..(920): unsure at all n locations
gaagagttccgtaccatcttctactctcttagacttgcaaaatccctttatgagagtattatatgtaactttttctgggaaacagtccttgctaaccatgagctcaaacatctgcttggccttgtctagacgatcatgcatacagaacccgttgatcaatgaattgtaagtgaaaatatcaggatctatagaccttttgatcatgtcatcgtacaatttctcagcctctacaaactttccttctttcacaaacgcatcgatcaatgcattgaacgtgactaaattagggttgattttcttctcaatcatatcactcagtagttgagaggcatcactccatcttccataactacaaaggcaacttatgagggagctgtaggtgataacattaggtctaatacctttgttatccatttcagtgaacagattgagtgcatcattcacgtctttgtacttgcaaagaccatcaatgattgtgctgtacatcacaacatcaacctctatttttgatgcttccatcttgttgagcagatttaaagccaaatcagtatcacctctcttacataaaccatttactaccactccataagtaaccagatttggttgacagcctctttgaaccattcgatcaactaacgccacagcttcagaagctttgttgtggagaaaaagcccatgaatcaaagctgtaaatgtgattgtgtcaggtctataccccatttccaccatttgatcaaccaaagctacagcatctgaaatcctcttaccgtgacagtatccattgagaagagaagaaagcgtgacaatgctgggctcatagccgagtttcatcatcttgccaagaagagctaaagcaagagagatttgatagcgtcggcagaaacagncgatcaaaatattgtaagtatatagattatgtg

SEQ ID NO: 34083 - DNA, 5836 bp, Arabidopsis thaliana landsberg
gaccttttccacttcatttgcattttagtctaacaatataaatccgcaaatatcttgtgtttatacttattgaaattagtcttccgacgtatataatctaggatctatttggattatttgggccatcagtctcattcgtttcattaacatctgagtctttgaactttgtttatctttcctagcttgatattttaatattagtttttttgcgcctctttgtttttgatcatttattctctcaattggatagtatagtgaagtaaataatgtagctatgactttacctgtagcatttacctgtagcatcttaaaaatatgaattaaaaatgatttagctaatttgggcttatgtttataagcatagaagtttatactacaagttcgtttagatttttccagtatcaactcaaacatagtttttactcaagcatagtttttactcaagcatagtttttactcacactaaaacccacatgtagtgtgcaaaagtaagtacccccccacctctgttcctcacggtttttctgcaaaggacccaccctccttgaacttcagcgtccatcacaatgtccccatcatcatcaaacctgtacaagccagtggcgatcctaacattgtagaagttgatagcatttttgcaagtggagggagcacttgtgtttctccacgtattgctgtcttgattaaagcggttgtcaactctgtaaagtccctctacttcaataggtatggtaaatgagtttgattctgggaataggttgtggttgttataaagaatgctccactcagcagcgttgagccagcgctgtgttgatgtttgaagcacagctgctacatctgtcaaaaatagcaaccaaacatatgagatttatatatatattataagcaactgttttattctgaaatttttaaatcttgccttaattgtacaaattccatagatctaggagactattctaagattccatagatctataacactgtgctacgatttctacactgttctaagattccatagatctgtaacactgtactacgatttctacactgttctaagattccatagatcataacttttctaagatttctacactgttaccaattccatagattgtagcctcgatttcccaaattcacagatctactctaattttaaatacacctcgatatctcaaattcacagatctactctaattttaaatacattcctccaattcccaaactcaccaatgtttcttgatactttcaatttcaatttctttattaccccaaattcgctacccctatatcttgcttctgagaatataatcgttttttattaccttcatttccttcaggtaggtccatatgctgaagatttatcgcaggagcgaccactacgggagccgccattggagattctctgtgagagagagagagagaaatagtttgagaatcaatcttctgtattttattgtgtagatcaagttatttagtatatgctagtacttatggttaaaatagactattattaaaattcaaaagtaataaagccaacgagtacactaaactcaaattatattttccaaaactattgctaaagaatatcaatacgtacactagatatagaaatcggaattaggtacgttgtgatccatttcagctactgttaggggtaagatttgggcttgcttggcccaaggcccaaatccaagtcaaaggcctaagcagaatgttaagtcaagagggtaggctcgtcaaaatcctggaggagtgtcctacacgcagaaggctataaatacggaatagcatgtcttgtcaaagggggattccgccggacacgcagagacacagagcagctcgtcagctcacccgtccgaagtatcccgccagccggtccgtctcaagcagctcgtcagctcacccgtctcaagcagctcgtcagctctcccctccgaagtatcccgccagccggtccgtatcaagcagctcgtcagctcacccgtctcaagcagctcgtcagctctcccctccgaagtatcccgccagccggtccgtctcaaacagctcgtcagctcacccgtctgaagcatctcgtcagccggtccgtctcaagtagcttatcagctcgcccgtctcaagcagctcgccagctcacccgtccgaagtatctcgccagccggcccgtctcaagtagcttatcagctcgcccgtctcaagcagctcgtcagctcactcgtccgaagtatctcgtcagctcacccgtctcaagcagatcgtcagctcgccagtctcaagcagctcgtcagctctcccctccgaagtatcccgccagccggtccgtctcaagcagctcgtcagctcacccgtctcaatcagctcgtcagctctcccctccgaagtatcccgccagccggtccgtctcaaacagctcgtcagctcacccgtccgaagtatcccgccagccggttcgtctcaagcagctcgtcagctcacccgtctcaagcagctcgtcagctcacccgtctcaagcagctcgtcagctcacccgtctcaagcagctcgtcagctcacccgtatcaagcagctcgtcagctcacccgtccaaagtacctcgtctgcccatccatcttgagtaactcgtttactcgtccgtccgaagtgtctcgccgacctgcccgcccaaaataactaacctactcgcacgtctcgagaagccatccagctcgtcgcacatctgccggctcgtcaattacctgccgaccttcctccaataatggcctagctcgtttatcacaatatgaactacgtgtggcttgatccctttctaagggtacgtaggcaaccttttacaaggttcagctataaaacgaataaactctattcttcctcggaagatcgtcttccggcctcaagctcgtctttcatctacaatcggctcgttcttactccatttatgctcgttgaagaaatcatcatttgtaatccgtccaatccgcctaagtcgcgggctcgtcattaatagaaagattcttcttccttccctagagatcccattttcgtacttgtgtgattcgtgcatcaacagctaccataaactattaattgtagtgagtaagtggactttagattcatatagagttatgcgattcggttgaacgtatcatacgaatctcagtgtctacctaattaatacacatataatgcaaaaagaacaaacgcatactatagatgataagacgtgattggacacattaaacacatagtttacggcattacataaaccgatacacataattaattacgtgttacttctgtggcgtgtagtagaaagactagctgcatatggcacctaattaatactcatatatggttcatgcgaaatgctgatatgtataaggtaatatataccaccactttggtaccacaatgcaacatctaaattcgattatgataagctatgataagctatcttctcaatatcaattaatcgcttctttattctaataccactccttaatatatgcctatcatatcattatttcacaacgcatgtttacttttgttatgaaatagttttgtttaaagggtggtaacgtaatttatgggttccattaggattgtgatttattttctctcctcatccttatgcatgtaagaatttgcatttttataaatatatactatgaattcagtccaaccttacagtgtgaacaatttaattaaacgaagcataatcctaaaagaaaataaaactaaaaaaaaatagttaagatggtataagataattttattaagttaagatgttgcacttttcactaagtaaatcaaacatttacatagtgatttgtcataatgtgcatattccattttttcgggtctttcatttccatattcctcagctctttcatatattgaagattgaagagaataacaaagacgctttttataggaaacgaattaaagagtgttgacttgccgtaaaagtaacttaaattgttcgtcgcctgagcatggatttatataaacgtgaagtactatacaaaaccctaaccaacatttgatcaaacgacaatgatgtcggaacttccagagcatttgttagaagagatactctaccgcgttccagctatgtctttgaaacagttagggtctacttgcaaaggatggaactgtttattcaaggataggagattcacaagaaaacacttggataaaggcccaaagcagtttttgattcacatgtctaaagggcttagggtacgctcgatgagtgtcgatctccatagacttccacatgtaaaagtcacagttgaatttaccctaatcaaccctaaatatcctagttgtctagatcaagatcaattcgagatatataaagtctctcactgcgacggcttattgttatgcgtctgcgtcaccaaggaggacaatacttggctcgcggtatggaacccgtgtactggtcaaacaaggtggattcaacccatgacttatatgacaactatactctcggatcctaccaaaataatagctacaatatattggcacacactggttttggctacgaccacgaattccaaatttatgaaattaactccaattcatggaggattattgatgccactttggacttcaaattagggtatattggtcgtggcgtgtctttgaagggaaaaacttactggattgctagtggtgaagaagagaaacggcttggcaaattcttaatcagttttgattatacgacagaaagatttgaacgtctatgtcttccgaataagtatccttgttatgcaactctggctctatccgttgttagagaagagaaactttccatgttatcgcaacgcggaattaaatcaaaggcagaaatatgggtgacaaataagattggtgagacacaagtggtgtcgtggagcatggtcttagctttggatttgcagcctaaacgttgtattggggaaagcggaagtttcttggtcgacgagaagaagagagtggtcgtgtgttgtgataatattagagaccaaggaaaaaccacggtacacatttttggagaggacaacaaagtgaaacaagtgggttttgaagtcggatcatctctgtaatgtatgttttattatgttccaagtttgactcaaatctaccaaggtatcacaggcaaaagaaaaagggacgaatgatcatagtgtttggtgtggatcttggagcaactatcagatttttcaattatgataagttttcttctcaatttcaattaatcgcttctttatgccataatttagaggcaattgctgtaatatttctaaattttttaggcattctttactttgtacttctccttttaattatataggtagatttgatgataattagaagattaagacttcaaaaatggagattatgtgaaattgagaaaagcatcacacaaagaaaatggtttttggtggaacaattgggatatttgcataacatgaattttgattccggtttactatacattatttgtttcttgattccggtttagtatatcctagtacttacttaaatcaataatccgggcatggttaaaattaatcagacgttgaatcaatgagactccccgtcaccgtcaaagccactaagccgtcgtttctcgtcatttggatccgatactcctccgccgcgtcgtcgccgacagtctccttgaatccagtaaacctctctcccgcacacgcttacatgtatatgcgactttattatccattggaatcattttgagtgtgttttttttgtcttggggttcaatactgtagagtggacgattacagcaaactctcgcaggatctgtggaagtgaaaggaaaatctctgca

SEQ ID NO: 34084 - DNA, 1414 bp, Arabidopsis thaliana landsberg
agatgtaccaacgtatatgtagtaccatgtgcatggttatatcaatattcgttttaggtttgttagaatgcaaattaatcgttgtagagccatgtccgcattgcattgaaaaatgtaagtctataacacagttttacatgacatgttaatgactagggtttgccaaaatatataaatacttgatttgattagttatatgtccgaatctgttttaaattatcatacgccaattacaaattgtttatcacaatatacaaactacaacaccatatttcattatagtaaaaccaaaatttaactacgaatctgaacgtagccctgctttatgataaatatttcccgaaaaaaaaaatcattagaattcctatgatgataaaaaacgctggttcttatggtaacaccatgtgaaaagtgatgactttttcatagcagtagaagtagtcaactacctcagataagtactgaaattaaataaactaattgcccaaaatgatacaactttgtcgcattaaattaaaagttaaaccttcactggatgcggtacgagttatggtcatataacaatacgtaatccaactcgctgtagctatcaatctctttatcacagccaaccaatattcaacaatgttgttttatttatttttcatatggtttatttaatcacctcgacttttttggcatcgatcacatctacaaataaattgttagttagcacgaccgttattattactttatgaagaattgttaatctgaaaaatatccttttgatatcagttggaaatatttttttaaataatttattatgtagagcttgcggctgagtcaaataaaaataaaattgaaaactaaaagcgtgattgacaaaatgactttaaaggctgatttgttttcgaaaaaaccaagttcttaagaacacatttgaaccaatcatcgaaatatatggtggaaatatatttctaccaaagatttgttttttaaccaaataattgaacacaacgctaaccgaatattttataaaactgatacagatttattattaattttgctaataaacattataaatttgcttttaccaattataggatgtattgtatctcttggactttaatatcgttgacgatcttgacaaataaaaagctggcgtttcattaaattggtatttacaatgagaaaaatgtgtgggatccaaaactggatataggattcgctttactgtatctggatccgaaactctaaaatatgatgtttcttatgatctggatttttccaaactataaatgatttctgaattttcgtgtatatcgtcaaccaatatttaataacagattacatttcttacatattttacagattttttgaaaaatattctgtaaattacaaatgcaaataaattatttgagaccgttaaggatca

SEQ ID NO: 34085 - DNA, 1912 bp, Arabidopsis thaliana landsberg
tctgttccccgatgctctcagtgtcccacatatttccaaagtccgggtatcaaattcattatgcacgttgtctctcccgcttgtcaagatcctatttccgttccgggacaatgatactgaggtcacagcagaagaatgtccagctacttcggacagaagtttcccagtttgaatatcccataacctaagattcccatccatgtggcctgagaataccgtaagcccatctatgctgaggcagattgcattgcagttgctggtaaagagtactgtgttagtgcagtaacctttatgcaaatcccaaagttttatggtacggtcatatgctgcactgacaacatgtcggctagagaatttgctcacatccacagcacaaaccttatccgtgtggcctgtgagtgtatggcgtaccctacccgagctaacatcccatacaaacaaattgtttgagctggttgctgcgatcacggatttattgtcgtgggttacggccatatcaagtatattcccaagggaaccgtataagcttttgattaaagttccgctattggtgtcccacatttttactgctcgatcttgcccaccagtaaacagagtaccagagttgtattcaaagactattgaaccacagccaccttcatgagcatggatacgattcgcacatgttgacggaatggttgactcaacaaagtgatcggttccatcttcattgcggcggacaataccatcaacttgctgccgagcaagagtttccaaaccatttgccttcagcttagctagcatttcttcatagagatcatttgcctacgtaagaagaaagaattaaggccatcctaaccaaatcgaagaaaggggacgaacaaactctaccattaaagactcatgaaaaataaaagtccctatgtacctcattaagacgttctgcatcctgcatcttctgcaacatccaccgatcaattaacattttattctcagtctctgctttttgcactctacttgtcatctcctccaactgagaccgtatttccaggttttcagcaataagtacatccaccgtcttggtcttttcctctaactcttttttgtaatcgtgtacaattcctccttacaaacaactctggttttaaatatcgcacaacataattccttacagtcactgtatttccattcttaccttctttgtgttaattccttctgcaagtcattaattaacaactccttctcttgtaaaatagcctttgaagttctggattcagctacttctatcaccagttgttcagatagtcgagattgagctttgtaacattgctgtaactctgtttccagcttttctgttttctccttccattctgaaccctgcatacagatactcaaaccagatcaagacatgtgtcaaatattccagagcataaaagtagaaagaaccaaatctacagagacgctgaaccaaaacaaaaggattcaatacaaactttgaggcatactatataattgaagcaagtataaacttaactaaactacatatactgttatacttctctgtgacacatgaactcacaaaatgcactgaacaaacatactgagagctacaattgtttttttttctgaaatccaatgaaacgcattacaagaatctacaaggattaaaagagcctttgttccatctaactacttattccatagtgcaaatctttcaatgtttactagcaatttgtatacttcgataacaaggtataaagttgaaactggtgaaatctgaagcaatgaagaaaggaacaaaacaagattacctgagagattaaaggcttagagagagcagaaatcgcaggagcatgagctccttcttccagaagatgacgcttccgcaaagctctcaaagcgtcatttattgcttccatagctttctcctcct

SEQ ID NO: 34086 - DNA, 1134 bp, Arabidopsis thaliana landsberg
gacttgcagggtttggcctggggggacaagccgtatgtccggaccacctggatcatagctccaaatactaggacacccgtcgcagagtggtggagcgtgtaggcttagggtacgggaccaggctaagtagatacacagctccagaccaccccaggagacgtgtgtccattctctagaaccggaacctaggttgtcggacccacaggactatagttccaaatactagggtgcccgttctagagcggtggagcgttcaggcttaggatacgggacaaagctaagcggctacacggctccggaccaccccaaggaacgagtgcccattatctagaactggtcctcaggctgccggacccccctgccttttgtagaggggtcctaagctacaagcctggcttactcaattcggacgtcattataccagcaagggtgggaactgtatgggtgggttagtgaaagctctcttgtgagttttggtgtttggatgacaactcaattaaaggactaacaagtgtactaagtgttgaacaggaaattcagtatgataacatacttgaatagtgcataatgatcagtgaacaaaggttcaccacaaggttaaataactaatgagactatgcaaatggatataatatgatctctatattgggttgaatatatggacaagacctgagaagtcactatgcataaatgaaagggaaataagcttacacttttttcctaattgattctggtggttgaattgcccaacacaaataattgaacttactagtttgctctagattatgagttctacaggtgccaaaggttcacaacaaaccaataaaatgaccgagaaaggattcaaatatagagagcaaaagtcagccgaagtgtgccctaggtctggcgcaccaggactcgtcggtgtgccaccggactgtgtctggtgcaccacggagcagtgtccggtgcaccagggacttcaactccgaactgctgcaccttcgggaattctggaggccgctctgttataattcaccggactgtccgatggcgcacggacagtgtccggtgtgccagcggagcaacgactacctcgcgccaatggtcgtctgcagcaggcattaaatgcgctacagtgccggtgcttca

SEQ ID NO: 34087 - DNA, 807 bp, Arabidopsis thaliana landsberg
ggatcacatctacagtcatcccttctgaggggcgcgtggcgactatgagagatattgcggtgattgatggagagaagaggaaggattgtccccatccccactcgtacatgtcggtgacgagatagtagaatgtgacaacgaactctgtaactttctcggcgggttcgacccctcttggacggcggaagaaagaccagtactgttagtagccgtcctggactttctcggcgaagattgagccaccagagagatctacggctcgtttgcctttacgctctgctggaccgagaacgcagaggaaccagtagataccgacggcgacgagtgcaccggtgaagaagagtgttaaagagtccattttcgttaagagtgaggaagaccaagagagagagagagagagttttaagtctcttttacttctttgcctgatttatgacaaaaagtttttaaagagtttttaatctgagagaatctatatttgactaattaaaatcccagttcaaaaactgacttttaataataataaatgcctagacaaagtaaatggaaattacaagccaaataaggaatattaaaaaaacattttaagtttttgtttctctttaaaggttttgcaaattgaataaaattaattacaatgattcttccatttgattatttattttttacgttgccaattggaattttgcttcttcttttgttaaatgtcatgacccaacagtaatgaaaatagccatggaaaaatttaaaaagatatttgtaaatgctaaattttgtaattcaaaataattatgagaagagggccag

SEQ ID NO: 34088 - DNA, 1030 bp, Arabidopsis thaliana landsberg
  unsure (1)..(1030): unsure at all n locations
aatttataggagatccggataaaattatggatatatgcacgctacttctttcatttttaattaggtaaatggttataactttattttatatatcaattaaatgattttggtatgagattactagtacactttctttgcaaatgttttaaacacgacaagacaaaaatattacaagcatattttggtaaaaaatatcataagctttcatatcaaaatcattagttatgatgttagattttttttttttttttttttaacactacaaaaagctctggtcttaatatgttagaaattttagtccaaaccagcctacagaggatttagctaaacaattcccaagcaccttttaagtgttaccgaaataacgtaatatgatgttaaaggttacataaaaaaaactaaagaattttcatatgaaaagttaacgtacggtgtcttagtgtaacctaattttagtcacagtatataaattcttaatgagatgatcgcaaaatcgctgtatacaatttcgtacttaattcgttagtcttgaaaagttgacctaatttagatcaaattaaggttaactacaataaaaatttaactaacgtaatgggattctttaaaattaaaaaatcgttgattagatagatattttatctttaagggagacacagagacaatttggacaaaaaaggtnnnnnnnnnnnnnnnnnnnaccacaatcgtggcgcgaaaggaacttcctccatcccctctgttgccttgtcattgggccacgtatatctctacctgatcgtgatgcttacgtggtccatttctagatactatagtgaccagatcaacggtcaagattgattctaatttagacgaaagaccaacacgtcacgtcgctagagtaaaagattttttgaaggcggagggagaaaaatcaaaagttaaaagtaatttgaaaacgaggaagagaaaaaggaattttaaaatgtttaatgaagcggtaggcagcatgggtatataaatgggcacgctttgtaacgtgtacgatgatagt

SEQ ID NO: 34089 - DNA, 1367 bp, Arabidopsis thaliana landsberg
gcctgcttctgatagcaaaacaggaactagagaatatttatagtttctttgaaaagattgaagatccgagtttgggggtaggttcaattggccttacaagggattttgatttctaaaatgtgtaaaggaaaaatatgatgctctgaatccaaatcatttagaacatattgcttgcttatttggtcagaaaattctactacttggatctatgtattcaattgttacaaaaatatttgctttcctttagacctgaactgaagtagtcaattacataacacaagctaactattactaaagagtatatgaatcacatgagagatctttcagtgacctgtaacagactctggacaaatcatcagcactgtctccttcgaatgttatgcgtgaccatctgtttgtttacaggacagatgttgcaagacagatgttgtaggacggctaaggaggaatattccaacaaacaatttgcagatcttctcagtactatctaaagaatatttccaatgaattcacgcaacattttagatctgcatcaaatctgtaactcagcagatacttcatttgctctttcacaagcatcggctaacactaatggatctctctgttccggaattctccaaactcttccttttgattcattaggtggcattgatatcaaaaacccttcactgtctcagttgtactaaattcaagaaatagtgccaataaccttaacttcaggtagatgattggtttatactttcccaaatggctggaccttcagggtggacattgacaaaatacttcacaaaccgggcatcaccgcaagtgagaatagtgcttggtgacagcattggcttggctgcatctctttccctcaaccataaatacattgagaatctgtgatgtatcctctgcatatcataacacagatatgccgggaaccttaccaatgattcaattggatagccaagaagttcggttaaggaatgtatctttttctctatgacatctttagacaggttaagtatcatcggagcatgcctgatgatctcagtaaccacattatagtttaaaccggctttcacaaggcaatcaaatctctcctgtagctgatctcccctccctcgaaactgttttagagccttcaccatctcatccgagttttctacataccctagcctcaacaaaaactctgtcttctctaagtatttcctcgagtcttccgaaagaggtttgctttttctcttcttcgttgtagaaacaaaacaaaacaatctcaaaggctctttctttaagatcttacatagctcgtcttgtttaacattcaaactaagacaagcagttctaggtgctggcagagagcatgaaccaataagctccatatg

SEQ ID NO: 34090 - DNA, 1061 bp, Arabidopsis thaliana landsberg
aaacgttttgcaatttggttttggtacgattgtttcattttccatttcaaaccttcatttttttttttttttgaataaaccttcattttctttttgtgtgtttcgtgattgagttcacaaagtctcaaattatccactactaatgaattggcacaatcattgagcacgattaatatagagtcttgaagtcatggaacatcagaaatgaacaaaactatgtgccaagaaaagttgattctttatttgcatgtaaagaagaacattatcatcacaactactgagaaaaggaacaaaatcaaccatatgttttcacgttaagtatattaataatcaagagtagaagaaaacttttggaatcaaattttcgtatttatagaggaaaaatgttaacaacttgatatcttgtatgacaaatatttttttataaaagcctaaaacaaaaataaacaaagacttaacacattcatggattctagcgtcggaggattttatgaggtggaaaaggatggtaaccttgttttggtataccatcatccgaaatattgccccataccccaaacacagaccgtaacctcctccagtgaccttcaacctcttttcttatgccctcgatcacgacgtcgaaaaatcaagtcgtattcagacacttatccgcttaattcttcccccgagtacgtcctttctacaacgacgacctctcatgatcatcatgtactccctttgttttggtgcaacaataaagaatttgatgctgatggtggatgctacatatgcgaaggctcaaattccggcaccgactattatttctgcaactattgtagcataaaattacacaaagaatgcattcaatctccacttataatcaaacatccttaccaccctgagcactatctccaacttttctttcatgatgataactttcgtaagattgagtgtttatgttgtggaagaaaagcacattggttgatttatcattgcaccacatgccaggcttttatgcatcccatatgtgcgatgaagccaataccttttcttatagacccaccaaaaaagcatatgca

SEQ ID NO: 34091 - DNA, 1105 bp, Arabidopsis thaliana landsberg
  unsure (1)..(1105): unsure at all n locations
ctgtttacacagaaaaaaaaaaacccaaaaaccaaatttcaacaatttattcagagctcttaaaacgcctgggggtaatgggatttgatactacaagggaattaaattactaaccaaatgcgtcccaacagccaactcattatttttcaaagtaacgagtaaaaattcctagaaggggataaattgccaaataattaatggttcatgtttagatgaaactatcgatgataggaggtaaatctccaaatggaagaattcacatggttcaacttcaagtcaagtttaacactagaccagtatacctaactgtccaaaaatattaatcaccgatttatttcatcaaattattataaagttatatttttagtatagacaaatatatgaggaattttcatgaaataccccttttgaatctttgatgtaccaattttcgaaaatactattattcaaaaagactactactctaccggaatatttttagttaatttgccatatttttcaggtttctttatttttaggatagatgaaaaatgaagttttgtcttcaacacctattaatttatttgtaagatagtttagcgaaaacaaaacaactttgataaataaacatgtaaattttattaaggggaaattggaaataaaagataaatatttaaaaaaatttccatctatacattttatgatcaagattggtgacatatgcgtttaatataatttaaatcccactatatctccagcttttttatgcttacaaaatacaaaacaaaaagtccaaaccaatttatttttacttggagcaaatcaatattcttttacttggagtcgtcgttcatcacttcttcgatattgtcttcctctattcttcacaaaaattaagctgttcactcctctcaaataactccaaaacaaaactcttttttttttttcaatttatctttctttatttccctcgcttcaatttctcttagaatcttaccatctctttctttaaatatttatcctttgtttccaattttcccatttattaaagactcgtaaacaaccctaagaggatatantacttacgattaaagaaatcaattagaaacaagtcttcattgatgaa

SEQ ID NO: 34092 - DNA, 2415 bp, Arabidopsis thaliana landsberg
  unsure (1)..(2415): unsure at all n locations
ttatgaattctttatctgttagtcttcactgaataacaagctcgcctacaaagcaaacatatgtatactgagtttgatgttctcatcattacacttatctagtggtataaggtagggtttaaatatcaaatgcatctgtaattgatagctataagttatgtggcttatagaacaaaaaaaaaaaaagggaacaaagacatctataaatggcgtgtgttttataaataaattgggtactaattacttacgcatgtttatgttccctacatatagccacctagtgtccgaactcacgagttcccgcctatctttccaagttattttggttatttcgcactccaaaaaagtctatttactaatgttttgtgacgcacggctattttcctaatttgtgtatctaatttgactagttactaatattaccctattttcaaacctttgttgtgagaaaatttgaggttctttttgagttattttatttttttgtaaatggtttgttgttgttgttaatgttatgtattattattgctgctgctgctgntgntaatattatattttgtctttcaagtgaatctaatggtttaagaatattgctatagattaatttatgcatacgaaaaccaaatgaataacgtataaaatgtcatcaaactacccattgaaacataatttcttgtggttctttataaaactagaaaaaatcaaatgtttgataagagacaagaatatataacaactaattatttttctagacttttacttgtttagactctctgtctttgcagctatttgttagattacatctaacaacaagctttcttttgaaacctaaatttattataaaagttttctagtctttttgcttttggtaagaatcaagcttagatatctaacaaaatttggggcagcaacggtctatttgagtttatttttaacgaatttcggcacggttttgaggaactttgatgaacaaaccatcaattcaattatatcatgatttattacagttttctgaatttggcatttggatcttattcacaagttttcagatttggactcttaaccattttttggcatttctatgttatgacacctttgtgtttgcaatatttgttagaatccattttagaggtgtcatgagatcttacatctagcgaaattttttttgaacccaaatccgttttcataaaatattttttttttacttatcaacagattttggttcgcaaattctattgattatattatgcaggtatctttaaagtgaaaactctattctgatttgatttgtcacaactttcacgcgcaaaactgtctattcgttattacaagtttttatttagatttagcatgagttgtttgtttaggtagtagttatttctttttagatgtgaacatctaagtttgaaatagagtaaggggaaatatattctttagaagaacaatatcttttgatcttaaaattttgggcttagtatgtaacaaacattatcgagcaaaccatacttgaatcacccaagttagttaaagaaaacgaaaaaaaataagtaaagggaagttactaacacaaaactaattcgtacaattcattcaactgtaatacaaaattaaaagctagccaataaagactatagttaccgattttaaacccagaagtaatgttctaaaaagcggtctaggcgctcgtctaggctccaactaggcgctaggggttcaaatgacgactagatgacagctttgactgcttaaaataggataaaactcattttaataaaaacgtcagtagaaacttattcatatttacaaactaaccatgttatatatgaaaataatttgaaattagacaatcagtattttgagtgaaggaaaaacttcagagaatataaaatttgtgaatataaacttcattggaatatataccacaaaaagttttatgtatgtactaatcctcattactacttgcactcatcattctataaattttaacttttgaaattcttacttcaacgtttcaaaagaatgttcaatttctccattaatcacttatatatatatatatatatatatcagattgtagggaactttttgtttggtctctagcgtatgtttgggggataggaaatgagatcatactaaagccttttctaaataaataataaatttgtgtttagatcgcaattgtgtttggaactatttgtgtgtagatcctaaaatctagcaaaaggttttttgaaaccaaatctgtttctccactggtttcacacacaaactctactctcaatttatgatgcaacgagaacttaattttgtgcacaaaattcagtttggatctttaactttgaaagttgaaacaaacaatcgtgggcaaaccctatattattttgcaatttttcataacttattagtataagagta

SEQ ID NO: 34093 - DNA, 691 bp, Arabidopsis thaliana landsberg
  unsure (1)..(691): unsure at all n locations
ttttgatatgttaaatggttaagtggggtaacccattaaaataagaattaattaataactaacattatatattattattagtcttcatcatcattatccatcatcatcattatccatcatcatcatcatcatcactatcaccatatcatatgtttttggcataaaatttcagaatcacgtttctagaggaaatttccaaatttggcgggaaaattaaggattcacgtttttgtggaaaaagtacgaaattttaatttttgtgaaaaaattgcggattcgcattttagaagaaaataatagattcgtgtttttgtaaaaaattacaatttttgtttttatagaaatattgcgaatttgtatttttagcgaaaaaagtgtggattcatattttttgctagaaaatcatagattcacttttttgtgaaaatttacagatttatttttntgcagaaaacttacagattctttttttgtcgaaaaaagtatgggatgttcaggtctaaattgacagattttctttctggacattgatggtcaaagcctaaataggaccaaacttcaaataagactatgattaaacttggctgtctgcgaagtccaaataatttgatttcttattttccgcaaaaactacataatcaaatttttcacctacccgcttaaaatattttgcccaccaaacctaaaacgc

SEQ ID NO: 34094 - DNA, 417 bp, Arabidopsis thaliana landsberg
gtgtctatttcagataatcatataaaataaccttagtggcgagggcatagtaattaccctgggaaattaatagtttaaattatatagacaccactacataacattatcacgggtgacaaatcatataaaatgaccttatttctgagggcataataattaccctcggaaattaaaaatttaaattatctaaagcaccactaaatgaactaaaacaaactaatttaattacataatcaaatttcgccatacaatcaaatttcggtcatcgtatataataagataaacaagatttaacatactaattatttaataacaacagtggaaactacaaaacaatattaatatatacacaataaaactaaaaatacttacttagacaatgcggggcgggacaatttacggcgcgggcggagatgt

SEQ ID NO: 34095 - DNA, 822 bp, Arabidopsis thaliana landsberg
  unsure (1)..(822): unsure at all n locations
ggcttccgtcggattcttggttcagtaaatctcatatgattcagtctcatttataaaaggaacataatatacactttacgagtttcacgtgattaaaaacccataatcacgaatgttactacttactcacgacgactagatatttcccttattggtactactatacatagattactaaaacacgcacaactagaaaagctaaagagtctcgatcgtcctcaaaaaggttctctagaatcccaatgagttctgtagcttcagaaagaaacccaactgatcattatgattcttaaaagcacagaaatctctctcttcttcatcatcttcttcttctattctcgatccgtttttgatgagattgacaatagaatcaactgaagacttgaaaccctctgagacatccaaagccttattaatattttcttccttgcgtgacacattgcatactttttcatcctctggttcttcacttcttaccaccggtctactgaggaactgcttgaaccagttaacggaatctttgggaatacgagtgagatcgttgtcgtagtcaacatagtacacgccaaatctagtagaatatccatgttcccactcgaaattgtctagtaaagaccacacgtaatatcctcggacgtcacacccatcctctctgttataacagtaaaaattactttagaaacaaaacaaaagtgtggtcttttaggaatgattattgatcagttcatagtttaaaatcttgtggttttatcngtaaagtgtggaccaggatttacattatagctttttggagttggtggagatggtcctcatggtagctta

SEQ ID NO: 34096 - DNA, 1993 bp, Arabidopsis thaliana landsberg
  unsure (1)..(1993): unsure at all n locations
gcttactctcttgtgttctgttgtggcggtttgttctttgttgtggcttgctacttgtgttctgttgtggtggcttgttctgttgtggtcgcttnnnnnnnnnnnnnnnnnnnnnnnnntcatgtctagcgtacttgtgttctgttgaggtggcttgctctcttgtgttctgttgaggcggtttgttctgttgtggtggcttgcttacttgtgttctgttgtggtggcttgttctgttgtggtcgctagctatatcttctgtgaacatagtggtcatgtctagcgtacttgtgttctgttgtggtggcttgctctcttgtgttatgttgtggtggcttgctctcttgtgttttgttgtggcggtttgttctgttgcggtggctttgcttacttgtgttctgttgtggtggcttgttctgttgtggtcgcttgctatatcttctgtgaacatagtggtcatgtctagcatacttgtgttctgttgtggtggcttgctattcgttatgttgagtagtttcactaatgtaacatgtttttatctttcattgtttcatgtgtttggaggtttactcgcgacaggggatcaaagttggttagaaagatcactcggatttttacacaaaaatttaatgctccctactataactggtcatgtgtgccattggataaaagagagaggttatttttctagagtttgcggtaagctgtcatgcatctctcttactttcttaactttccggcttaatcttttgaatttcactaactcaagctacaatgttttgtagaaactcacagttggatcccttaataacaggcactgtgcagtattacttcaatgaggtctgtaaacggcgcttgaaagacatggttagcaccgcgaggagaactagagagcagcctccatggattggtgaaactctgtgggctgttatgtgcgcttactgggacaccgaaccaacacaaaaacagagtcggacctattccaaagctcgtctctctgaccgtaacggtctcggtcctcacatccacttctctgggccaaagtcttttcaggaaatccaagacgaattggtaagttcttctgttacctctttcagttacctcacatgtatgtttttgaatatttgagctgtgttggtttcattgcaggaggagaaattgggaagaatggtcactattggtgaggtgtttgtagatactcatactaagtcggatggtacgtatgttgatcggaaggcggagatgattgctcaaacttatgagcaaaatcgtgaaagataggttgtccgaactagaggcagctgcttctgctgtctctgatggcttttcacgatctcgggatctcacaatagaggagtatacagtcatctctctcgaggtaagatgttgcagtctaagtcctagtctttgagtttatatattctatcactaatatcttcttctctatttcttttcagtccatagaaagtgattcaagaggcaatcattatggacttggaagtctgaaagacactttaggcagtgccaaccgcaagcaccctggagactcacccatcctttcaagctgtagaacggctgcaggaagcgcaatgcaaaattgaagagcaggctgcatataatgagaagcgagatgctgagattgctgctcgtgaagctgagtaagcccgagttgcggctgagcaaaaggactagctcgagcacttgtctttagtcgagagatatctgcgagaaacagatccgcaattcctaaacttcatgaccactcactcttctacatcgacaaagcctctagcagaaactcctccacataatgatccataggtttagattttccaacacttttcccttgaactttgaactaatctttcaagaagatgtttatgaacaagaataatgtgtgtttatgtatttgaattccaatgtttgatttccatttatgaatgtgttataatactttatagcatttcaaacaacaaacaagaacacaacccaa

SEQ ID NO: 34097 - DNA, 915 bp, Arabidopsis thaliana landsberg
gacacctattttgctgatggcctctaccgcgggtttaccgtagtttccgattcagaaacacgtcatcacctgcaaaggcgtggccatattatttaaacctgtgccgggtggttttactttattatatgaaactgcgccggggcgcgaaagaagcagggctgatgtgctgaaggaaaacctggtgctgggttttgttatcaataatgccgatcccggccttatgaattatacagaaggattgcctgcagatattgccgacactatattgtatttcagaaatgatgtacaggctgcggacaatggcttactacataagagcgactacttctctgaaggagaaacactacagaacaaaccgcccgatgcagcgaacccgcataaccgttccttttttgccaagccttttgcctggatggagataatcttacatccttcgctcgaagaagcgctgcatgtacaattcaagggaagggaaactgtgtggcggtatatactcagcagcccgcacctgcaggatctcgctgatcctgctgtcattcacaaagacacgaaggacccctttaaagggcctgtatatatagtgcttccgggaggagaaaagaagatggctttcgaatcggtgcagcggataccgctttcgagcagggcggaaaaggtgtttcagctggtggagaatttccagcccggttcatccaggtataaagtggtgatgagcatattgccaaacccggatatcagcgctatatcatcagtacaggatcccgagggtcgtgatgccgcttgtttttcggaaatattcatttaatcaccgatttattgatgatttattttgaataagatgactaaagatatatttaaccttccaaccaaaacacaactaacatggcctctaccttaaagaccccgggcgttaca

SEQ ID NO: 34098 - DNA, 1198 bp, Arabidopsis thaliana landsberg
tcaaacaaactataagactatgaaaaatataaaatcaaggcttaggccaaatataaacattgaagtatactaaataataaacaataaaggctatgaaagcttgtccaaaatagtttaataaaactctaaaacaagcttctcaataagggttcaatggggatttctgaaattcagaattctgaatttcagcccttgagctaaagaccaagcgtgttcaccttgatccctagctcaaatcctaatgagcccattgacaaaaattgtacctaactaatccctctgtcacatgccagaagatggcattgggacgcgagccctagacacgacaaaccccaggatttgccacgggctcgggcagggagacagaccagatttcagggctccaaatcttggaaaccagtaggcaaaatcctatgacccccacacaagattggtagcttatagggaggagaagaggttttgtgcactgaccaaggaaagagcaggctcggatgagcgaccacacgcgccagagcttgggcagaacgcacgggcacacgtgttcgaccctggtcggcacgccagagctcgcccaacccgcgcgcgcgctcgccccggcgtccggtcaagtccgccgcgcgcccacgccctcggccatgcccgcccgcgcctataaagcctccccgggcgcacctctcttcgccccgcactcaccctcaccggccagccaccgttccttagctccggcgagcgtatttccgcccgccattgccgccagagctacggccgccgtggccagcccactccagccgccctccagcccaacctgtgcttcggctacgtccgccagtagcccgtgaagctcgccaagccctcggacccgaccggacttcaccggaggcccgagatcaacctcaccggacttcggtcttccgccgccgcgcgtggaccgagctatccagtgagtctccgcccaattcctttcgctcatgtcttctctggcatcccgtggacctctctgacctattcaattgaactacctcgccgtgaccaggccggtctcctcgccgccgacgagcatccccgcctgcgcgcgtggaccgaccaactccggccatctccgttgacgttccgcacaccgttgtgatccccgcgacctccccttcatcctcgaccacttcaccggaacagtctcgccgccggtaaggtagagtcgacc

SEQ ID NO: 34099 - DNA, 829 bp, Arabidopsis thaliana landsberg
  unsure (1)..(829): unsure at all n locations
gttcccaccatggaagctttgtttcttgaaacatcgatcaaagggttatcgtttactgagtttatctcacgttcgatcatcttagtcgctgctcttatcacctcaatctgcggtccaagccattgcggagatgttcgcagagcgtaactgttaatttaaacacgaaactattagtcaatttaatcagaaagcaaatcaaaagggttacttaagttacaagaaactagttgcttgatacccaagaacataccgatcttgtttaggtttctgaagcggatcaatcttgtggagatgtagagcttcttttacataagagcttccgtctagaatatgctccatgatagcggcggcttcgatctgaccaggatggtgcttgagtttatgcgtaagatgatcggtaaactctggtttcccctgcataacctctgcaaacatggcggaagcaacttcggagaaaaccaccaaaatgttggcatcgtacagtaccgtagaggctaaagcagaccccaccgcagtcccattcacgagcgcaagcccttctttaggcctgagttcgaaaaaagacgatactccagcgagcttgtaggccttctaggcagtgtggatctcttctgagggagccctggctccaggcaacagtcggcctcggtgaggaattccaccgattttcggacaacttgaaagactgtccgtggaaagctgtaataggtgcctcaacagaggaaggagcggagtaattgttcagttcacgagtgctgtgaatggctgttaagatctcatatcggatatcccagcanccctgaaggagggtgtttacttcgatgagcat

SEQ ID NO: 34100 - DNA, 1769 bp, Arabidopsis thaliana landsberg
  unsure (1)..(1769): unsure at all n locations
attgagttaaggtggcattagttgctggaaatgcaatcattagacgatgaattattaaataaattatcattggatgttcagatctcatattgatacatgtaccgtgttcttacatgacaaactcgtcgtttccccataaaattcgaatattttaacacttatctggactttcgacgattgctttagattcgagaatctcaatgcttgtatattactagtaccaacttgaattattctcagttttccacacatttgaattattgtataaccatatagtattaagttattatcacagttacaatttaaaaagtcattatgtaaacatctgctagaaatccatgaaatattatatacttcctctgtagcataaaattgtacggtcggatataacaatattttccaattgggaatgacatcaagaacctaccatgaattcgagttaaaatagtagatttggcactgaaatgttttatgttttacattgcagtcatacttcaaagatttagtggttcttgttctcatcatgtccgagagcatacctatctaaattttggttattacttctcggttcgatccatttggttttccccacaaggtccaacccacgagcctagtgttgtctttagtgacacataacaatcctcgcagtaaaatatgctattgatatcacgacttgtaaaatatgatagatatcaagcctctattagtagatggatcaaatcatacatcataagttcataacctacgaaaacaacactacattcaagccagatcaataactaatagcccaatgcagtaaaaatgggcctaaaagcttgctcgttttgcgtttatttttgggtgagagaaaagcccataggatcacgaccggtccacagaaacaacaataaatcaagccagaccaatcaaaactacggtttgacattgttcccgttacagactaaaccgaaaataaacacgttgtgacgaatggtacgttagttattacgtggttgcgtggaaaagaagaagttccacgtggtgactaaagtttgcacgttgcctcttgacacttttgcttctaacgtaaccatttctaaattttgttttggattcaattaatttccacgatattgaacgtttatattcagaaactcatgtatacatgactttttcagtttccgaccaacaatttaggtctcatttgaattgatttggacatgaaaattgttagaaaagttattaaattgatgtattatttaccaaacttttgttgcattcgaccgaaagtcaattacaaaaacaggtgttgatattattgacttaagatcgtttagaagtaagaacagtatattgtcgtgattagtttgacgggtatgatcgaatcgcaagactcaaacaggaccgtcgattttatagggtaaacgattcccacaagtcacggaggctgagagccttgagcgtaggtgctgacctggcacacaaatgtaaaacttggccaccaattaagacacgtgtcttgttaagctccgtccccttaggccacgtggcaactgtttttctttggcagtgatggttcttctttgagagttcgtcggtgtccttatcggaaatgtaagaattcgtaaagaaataaaagttggcaattactataacttaggctgaaatgtctgtattgtccttaagcaataccatcaaaatttaataatnttgttaactaacaaaattattgagaacattaaagtgaaaaaaccattcgacatattccaattttttcacattctttgata

SEQ ID NO: 34101 - DNA, 3889 bp, Arabidopsis thaliana landsberg
gctatatcatcatattcccctatgcatatgcaacaatcctaatgaaacactctagactcgatcctaaatgtaatgcaactacatgaacactctatttttgtgaaatcattttctgaaatttttcaatttttttttgtttctctatgccttagatgaatgcagactcaagaatataaacaatggaacacagcacttcctgagccctccccccaaacttaaatcacatagtccactgtgtgaataaacttggaaaagagtattcaggacaaatccaatcacaaaaacaaaataaagaacaaatcgcaagagatgatataatacaatggtgaagtgaggcgcttacctcagtcgaagaatgaacggagttggtcgtcaatggttgcctgtcgttgctcacaggccatagacgagccgccatgttctgtatcagctccagcaggtgggtactcgatctcatcagctctgtggcggccagcaccgctatgaggatactcgacctctcttcttctgctgcggacagcaccgcggtcgcgtaaactacgagactgcagaagtcgtctgctcctgctgctagatcgagtgagtgtcgttctcctattcctcctagattcacgaggctcgaatgatgaatgcctcgcagggacatgcagaatcttctgctctctaggctcaggcctgcgccaacttggctcgggcgcgtcatatctcctcgaaggcatgtcctgagggagctgtcattgcggaatagttgtagtggaagaggagcagctgatcttgtccttcagaaacttgatagccctgaggcacttggcgagtaacttatcctgtttcttgcaccacttctgcagcttgctgttgttcctgtgagcttcactcaaactcttgctttccctcgctggaggtatatgctcactgaaatgatacatgctcgtgtcaaactccgcctcatctatgtcatctgtctcatcaacatcttctgttgtagctacttcggtgtgactaatctcctcagatggcggactgccctcgaaataaagatcttcaagcgcaaacttgaagtcaatgttcatgccctcgagaatcctagtagcgtcaatgtaggggagaagaatgttggcgattctaatcgatgaatgctcgaacctgtagcggtgaaagtcgccagccatgacaaactccaagaattcacatcggcgtaaatgatccaagtccatcatcatcggtgctaaccctggttccttgagcggtactccacaagcttccagaattggcgtcacaacgccacccacgcatagtgctcctctcaccttcttcttgccgttcgtcaacgcccacttcctatacccacacaggtggatcaacagagacattactggtggtgcgttgttgagatcgcctctcaagacattctttccctttgtacggtggagaatcccagtaagcgcgaaatctatcatctccacgaaatctccatgcttcttccctttgtacggtacctgtagactccctggagtaaaagacgttggcaacctagcgctgaaagtagcggatcacaggactccggatttggttgctcttggacgcgccgagtttagcggtagattgttcccaatagtggcccacaaatccttaagctcctctctgcaaatctgggtttgtttacctttccactagggaaaccaaacagttcttccaacttcttgatcgaaagctgataccgatgttcatccactgagaatgtcaaaaagcctaaccccatggtatccagctcaaagtgtgtgagtccctcatacatcttcacttgcgtcgtggaaagaaactcgattgtctttttctatgtagcagcgtaagggtaagacatgagtgtgttcagatgacactttttgatgcacgttctctagtaaccccagctgggctaaagtctaatagcacggatacctcgttccccagaagtcattcatctcaaagaatctgatatactcctccactggaacctcgacgggtttgttcagcagcttcctctccttacgccatgactctggctaacactcagtttcgatgtcctcataaatcagcctatatctactcgatatcaccctctttcctctagcgatttcagctcttctttgattacgtcaggcagcagagcgttcaaattcatccctgaagctctagtaaacatgttgctctctcggtctagtggaccaggactcagctccatccacattataatcaggatccattgatgattatccactgtagttactcatgatgaaacctgaaaacaaatgtaactcaaagataaacgttattacgttagtcctaacaaaaccaaaaacacaaaccaacagagtaaaccggtcgagtgaaccgagaattttttttttttttttttttacggtttggtggattagtagtcgagtgatttcttggtggcctggaggtggagcgatcgagtaatttctagagtgagtgaatggtgaacggtgagaagactgtggtgcttaaggtgctgcgatcgagtgaagtagaagaggtgatgattctttggctgcgaaagagagagacgagcggccgagtggttgctatagtgtagaggtcgagtggttttgagcttgatggtgatgagtgtccagcgggggagagatcgagtgaaggaaatggcgaggtcgagtggtagctcgagacggtggtgacgttaagtggtcaagtatgttgagctcgcggaagagaagaaaacggtggtgatgttgagtgatggctgggcttgagagaagagggaaagatggcagcttggtcgagtggctatgagcgagaggtggtgagaggcaaatgattcgtgaggtcgagtggtgtcggtttcttggtttgagagagagtgagcttggtaagtagagagaagggaatgttgcggtcgagtgttgagagtaatgagagtcgagtggtggaatttataagcgtggggagtgatggggatttcttggttgcatgtcaagtgttggtgagaggggaagaggatagggagtggtcgagtgatgagggaagaagcatggagatttcgttatcaccttgtggggagcgtgggagacatggctgcagcagtgggtccctcatctctctctttgttctgaatcattactctatcttcactaggaaaatctcaggaaatcccgcaatcttctgtaaccttgatgaactctctttaagactctgtagctcctgttggtcgagtaaaatgatgatttaaaatttttcgggttttttaaaaatcgctcatactcgacaaatgtactcgatctctaggccatcagtagagtaaaagttttgaatttttactctaccttcacgttattcctttcttcctgagaaccacaaacacaactaaaacaaatcaaaaataacaagatagtaaaaattatttacaaggatattcatgggacttcctcccaagtgagcttgtttaaagtctctagcttgactcctcacacttatcaagaagaaaatgaatgacagagagggtgtgcatagtcctctctgatatcatcatcatactcagcgtcctccctggagaggtcttcggcagaatactcaattttcctctcttcaaaataagcttctttctcttcttgagggtaatctgtctcttcagaccatcttgaagtaaacttttttctcgggatagtgttaatcccgcctttaggttgagcttccttctccatctgattcagcttactcctaagttcctcaacagagtgagctagcctctctatagtttcttcttgcgtatcagacctctttttaagctcttttattttctcagtctcatacccttcttctgagatcactctgtcatttccggaggtttttccatcttcttttgacccttgtg

SEQ ID NO: 34102 - DNA, 833 bp, Arabidopsis thaliana landsberg
tgaaactctaatcaaaacatctgttgtatccgtttattttacaaagatagttttggtacccaatagttgcttagttaactggcttatgccctaaatcttaatcaacaacaaaacgtaaaacccactcagtgaatcaaattatcaaccaattaacgtaaaacgcatgatatcatgttttataagatgtgttatgtgtaagaccaggtttgaaaaagtgtgaaataatataatattactcttcgattgatccttaattgcgatatatttcgtatgatttcaactatatatgacgcacttacaagttacaacgatattaattatattaatatcgttttctcatatattcatatatgcatatgatatgactgaattatttattattcgcctccacaagttacaggactataaattattcatctccagaagttgcgttgcaccactaaatatgaagagaagataaaaccgaacaggtaaaagagacgtttaccaaaatatcaacctaatcttcccctaaaccaaatttttccaattaagtttattcttaagcacaatcaactctctgttactttaaagtattctcgtgaccactgattgtttttcctggtgtataagtaagtaccacaaaatataagaacatgacataagactctataaaatatgtataactaaacatttttcatttgtagccagataaaagaaatctatgggccggaagtcgtattatttgacacggcacttttggttaacgtataaactatctgattttataagctgtcaaaacaaaaaaatggtaaatttaacattcataaaatatcatgatgttccacaggtca

SEQ ID NO: 34103 - DNA, 1358 bp, Arabidopsis thaliana landsberg
  unsure (1)..(1358): unsure at all n locations
ggctccagcatacccttcctcagatgatgtcccaatggcatcagatgggtcatatgacttaattctctgtttttcctttttactctgcatatagtttaacaggtccacctcgatgcggggagtatattgtttgagggctcttctcagagagttttgctcctcaaccgacaaactaagaatgtaatttagcagtcccgcagaatcataatgattgtaaacagatatgatgcaagtaatggaagcttctttcaacttggtatttttgtcgcgggttaatggcgtcaactttgccagccacaactttaagatgccactattacccgaaatttcagggttaccagcgtacctgttgaaggagttgatggcaaattcaatcacagctaatttagcctttggtgatctctgttcatccagtgaacgaagcaatgcaggtaaaagggaatccacactgtaggttttgctgacaatttccaaggttgaggagcaaggttgtctaactacttctttagggtcaattaggcgtgaaaacacatggggtaggactctttccatgtagctctcaaaaggctttcggcaagatggtataagatctgcaagtgtcgacagtgctgcttgtgcgaccttgtggtgaggatcatccaaatgccggagaaatagtttcattactttctcaaaactttgaattacttcttgagcaccttttgggccttgctgcagcagagtttggagaaaattaaaagctgcaactctggcacaccaatcagaacttgagttcagtccgtcgttaagggccttgttcagggaagctggaccatcaacaaaatttgatatgtcaccaatttgcagttggctattatcaaaactcctcctacggcctgcagacattcttccccctacattctttcttaaaagtggcctctggaaattgggaacatnnnnnnnnnnnnnnnnnnnnnnnntcaaatctttttaagcagtattcatttgttgtcggtcaaaatgaccagccataaaccggctaacctttttggcataatttgtttcctcaagagaacttttttaattttttttgagccccgtttagcggtcaaggatgaaaaagtaggatgttactcgtttaacagattgccacggtaagatgatcttcctgagtcctttgaagcttgaatttgggtgatgatatctgacaaaccaaggccaccattgcgattactgcctttgttgatactatgtgttgattcagcagctgcgcctacttgtgtgactattggatgctggagcaacaccatggaaaggaggatcacgagaccatggagggtcaacttctgcactatgggcaaaagaagacaatttaactg

SEQ ID NO: 34104 - DNA, 860 bp, Arabidopsis thaliana landsberg
accttctgcaacaacttggggctggaatgtttttttcttttttaggagtaggaagaatgtttccacgaatgggggaactcgaattttgttgttcttcagccattttgagtagttgtgggaagcttcaagcacaagatatctatttatagagagattaacagattaattaatgaatttaacaaaaacatattaaacaatgactgaataaaattaattttgtattgattattattgcgctctttcacccaactatatacatacttttgtatagagagatatttgcatagtcatattctttaatattttgcaccaaaaaagaaagtcattctttaatataaaacggcaacgtctatcacaaatttaacgacaggataagttggacaacgcattagggtaagctaaacaaattcaaagaaatatgaccagtgggctttcttgggcctattatattttctttcaactttttgtcaactgttcacctactgatagcagcctttgaattctgaaggaatttctgtctatgccatttatactaacgttaacgacgactatttagacttttgattttgtttctaattctgtgatttgaacaaagaaacatcgtttttttttctttttatctacttcgcatccatgtcagcaaaaattaacggtttcttaacaccgatcagtgtatgagtttgtcggaatcggaagtttatggaaaagatgatcttccgaaataaaagtaaggggttggggaaaaccctcaccctgttcttattaattacaggaaccccctttttttaggtatgaagaactatttttgggggggaatgggtgctaaaggaaaattatatacccccaaactccctattatt

SEQ ID NO: 34105 - DNA, 607 bp, Arabidopsis thaliana landsberg
gtccgcaaaaacacaaatgttcaaaatgccgaggtccaaataaaacaccttccctaagcttgttccgaaaaacgattaaaacctttgagcgtcggccagtccaccgctcagtcagtgtagacagtctcgcggttcgccttcttcccctgcaacactatataaacatacaggttggtgaggagttaccatagcattcactgccatcgcactgttgtgctgttaaaaattttaacgaaagccaaagctttctggattgcgctttccaagcaagctctttgccatccaaaattagcttcgtcttaaggaaccaaaacacttgaaatggcccgagtaagatccactactagggtgtcccatgagggagatgaggctaaagtgatagaaacagcgccaatatcggaagtgatgaggcgatcaggtctacttgtgcggaagaaactattgccaaaggtggaactgccaaagctgagcaggctgtagttgaggacacgagtgatgacgaaatcgaagaagacaacagtattctaagcccatcaaaacctagtcatattgaattagaaaaatctactataacagaagaggacctagttatgatgagaaaactagg

SEQ ID NO: 34106 - DNA, 3638 bp, Arabidopsis thaliana landsberg
  unsure (1)..(3638): unsure at all n locations
tgtacctttactcctgctcgcattatttgggagaccaaagcataactcgcgtgactccacttgttcccccaacacttctgtacccgatggacaaagcaattacccataccctcactatttccaactcgcttttctatcctttcaaaagaaaccaaagaccattctcctccacccattgaattcgacaaaccctcattgaaactctctgggtcatcatctcattttcgcaattctctatctctcacaaatctttgaagtcttcattccaaactctccctatcactcttcgagaattcgttctgcacttcaccatacctcaccaaagttactcgatcattcccaattccatcctcaaatctttaaccggtttttaagctcaaattccatcaccaaaaaccgaatcctttccactttgatacctcttggagagttgtttttgatcactntgttgaagctcaccaccaaactctatggattcaagaagaaagagttcatctcgggctagaagatcctctattgataacgaagaggttacagcaattgatatgagtggtatgactgatcgccaaattcaccaagctcgccgtgctcaaaggtctatctcgattaaagggtgaagttcaagtcgttcaaccatgcagagagaagaagtagcaagaggcaagaggattgttgaggctgaggaagaacaccatgaagaggtagtctttcaagaagcggtttctaaggaagaggttgagatcattggggatgatacaccagcccctgttgggaaaagaaaccggccaagaaggaagagagagccaatcccaagcgagtactatcaatacttgaaggaattgaagtttgagggaattaactagataccctcataaggaaacaatacaagagctttgtattcgtggggaggtggaatacttaatggagttggccaatcttgcaacgttcatgagctgccaatttgggggatttaaagaggagatctgccaactccttgcaaccctcaaagtccattttcatgttgacgattcggagaaagaagaaagaggaggtctcggttacattacctttaaggttaagggtgtcgagtatgcgctggatataagccaccttgatactatttttgggtttccaagcggagagagaatccaccaagactatgaccaagacgagctactctctctttggacaacaatcgctggtccaatgccctactcgcctgccaagagcaagagtttttaattcaaagtcccgtgattagatacctctaccaatgcatcgccaacaccctttttccaaagaagactaccagatttgttgatgaaggagagctatgcatgattgatcaagctttgttcttcattctgagagagaccaaggatgagaggaagatggcgggtgatagaggagacacttcgttggctgttgttcttttggaccacctattgagctatagagagtatgctgcaaccatccatcgctcagggattcgcggaagtctttgtgttggtggtatcttaacaccaatacttacgagctgcggggatacacttgggaacccctgacgtgtaccccaagttcctcgaccttgaccatctcaagagaaagaattatcttgacaagacgactccggcggatcactacctcttcaagttcaaccatccggagctcttaccttctttgttacccataccttgggagaagcgaacttcagttaagacaaggtgtaacatcaacttcatgccttctccttctaccatgaacatcgacatcggaggagctagagaagatgaaccagaatatactcaagctgactatgagcaacaagagtattttactcaagctgattatgagcaacacgtcgaattcgagcaacatagtgaacagacggagcaagagaccaacaaattcgagcaagctcaccaagaagaagatgctgatcaaggaggagatgagataactgaagttcacaagaagctcactgtgcttgaagagcttgggaaccttcacagcaaaacgatgaagggtttcaagaagaagatgagaacaatgaagaaatcactaaagagtatggctaatcaaatcaaagacttccagagcaagccaaggccaccgtctcccacccccgaagtaagaagaagcggttccacaagctcagctgcaaggagggctgaaaggattgatcaaccccgagcttcatcactcgagcctcgggaagtgatctccgagttgagagagccaaggagtaggcagagacgaggttctacacgctcgaccaactactcgaccagacagaacgagcaaaatcctcccgcatcaacatcagcccttgtttatactcaagagagtatggacgattacatttccatctacttcacttgaccgctgaggtaacaccacctcaaccattatacataccatagcatttttatttttctttgtgtgttttgtgttttggtcttgaattctctttcagatttttattacacaagggactgtgtaatttaagtttgggggagggttcaagacatgtttaacattgtgttctcttttcttatttcaaattttgcatcatctaaggcatagaaaaaaccataaaaatttgaaattttttgagaaaatgatttcacaaaaacagagtgtcatgtagattgcatatcattttaggattgtatattgggtgtttgcatttaggattgctcatttgcataggggataatgatgatttcaaaccattaagcatgttttgattcaatgaagtaaggtcaatgcccaggttgttagttctctgttgcataaccgattgtttctgtgaagtaaccccgcaccctgctttgaatttacaacttgactatactgctttgattcgaaactcgcttatctgatgccattctctatctaatagaacctgaactgaatttgcaattatcatgtctatgcattgtttgtgaactcatggctaccatatacatacttgcattatcttattcacttcaccaccctttgttaatccaagtagctggctctcatctttagagcagtttcccttaccctgaacttaaccttatttcaagccaaagatcatttgtgtgtgattgtgagttcttttccagagtgatcttggtataacgtgttaggtatgacccggcaagagtagtctttcatgtagacctagcccacgctttttgggttagctaggactaggtggagacttgtatttgggattgggattgtgtatggattgaatgggaaggagaatgagaatgaaaaaaaaaaaaaaaagagaataagagtttaaagttcttaaagggggatacaaaataaagtgttagtctagtaaagggtttggaatttaaagaagttaggcattatgattcaaggaataaaacgccctatacgctataagattagaagaaaagccttaagtttgtcaaagtttaaaaccaaatccgctagactcttgaatcgttttaaacaagaaccccttagaatttgaactaaaaagagaaagaatgagaaaaaggatagagttaggacatttatgggactgggatcatcttatgagctatcatattatatatcattgggtagatgggagtctgttcttgtaagtgtctgttggcttttaccgttagcct

SEQ ID NO: 34107 - DNA, 530 bp, Arabidopsis thaliana landsberg
gttattctttttttgttaactaaatcatttactctttattttggaattcacctcagttattcattaaggagagaaatataattgcacataaaaaagtgatactcagaataaaagatggtacgtcaaaattgtttttctaaaatagtggcagaatagaacatggcttacaatgacttcacgtatacatcttcaaattattatttttatacatcttcaaattattatttttatatacaaatcaggatggtggtaataatattacatgccttaatgcaaatttcccgttttaaaatgtgatttatactattttttattagtaagatttaaaatatgttcggttttcatttttacattgccttaactcgcatttgtaaaaagttatattactcgataattttttttttaaatgattattgttaaaaatatcaaaatattttttatgtggctatacaccataagctgcaccaaaaaatatcaaaaaactatgtagcttgttagagccaatggctaaaaccggtcatcaacaatca

SEQ ID NO: 34108 - DNA, 1510 bp, Arabidopsis thaliana landsberg
  unsure (1)..(1510): unsure at all n locations
gcttgatcccctggttcctcttgcctggcaaaagaaaaccgggattgattatcctcaactttactggaactggctagcttaagagacctggcctcttcgtcactttccccaaatggatttgcatagttatgaggtgaagttaagtattcatcaagatctaaagacattatatttgcaattatcctgtcatctatttcacttgggctttcatgggagtcaacgaaacaattttcaattggctgtgtgtcccttgctttgtctggaaccaaaatagaatggttaagactgccgtttaactgattgggctcactaagtggcatctcggtatatccatttgagatgggtgctatattacttcccctgctgtcagaataggaagatccaaacacagtcctggtttcatcatgctcagccttatactgggatgaacaaggctgcatacaatttgacgggcgtaggaaaccattggactgacagctaagaacttccggatccttgagtctttgtctatagaacaaagatatatcatcctcagcttcaagataatgacctgttcccaatggtgacatcaaagaagtacctctattaacttcttctctcgagacaccaacctcatttgcgttagttctaccagacttttgtaatggctgaacttctctaggttcatcgacacaacgctgtaaatagtcttgggacacctctgtaagagttggctttatggaagcatgatcaatatgtgatttgtcagatcttgttattccatgatagccatccacaacactatctgcatccactgacacaacattgctgcatccattctgtattcttctgttaatcattttgtttccattagacagagaagtatgttctggaaggtctgtgcaatctgatggctcactaatagctctactattatccacactggcagagactacgttcctactattactgatctgggtcttattagatgaggaaagctcaggaaaatcagttttcccatccaataggctgtgtggtttcaaaacatttccacctgcagcctctaatgctggcttccttaattcatcactacgagaagagatctgtgtaggatnnnnnnnnnnnnnnnnnnnnnntgtagcagatttgtctcttaagggttccctagaagacggtgtattcggtaccgaagaatgcattcccctgaaaaacaagttaagtttctcagacaaagcaattaaaaaaaacattatcataagaattcagtgtaccacatggctccagcaggaagagtaacagagtgactgttgctgtcatttggaggagaatttttcgcggcactatgtacattctgcaaaggaaaaaaaagggcgaataagaaagaagtcaaaagcagaatttatcacacataaacgcatctagtccttctcataaagtataacggcatgtgaatatcctgagaccagaaaaaattcaggaggctccaaaaagagatggcaacttacattcaaaacaacttttgaatattgtg

SEQ ID NO: 34109 - DNA, 1435 bp, Arabidopsis thaliana landsberg
  unsure (1)..(1435): unsure at all n locations
taccggtttaattaaaccgtactgtgtgtatgatccttgaataaccatgaaaccggagcactagtccagtcatgacagtgaagaatgtcctgtagatggtgagaccatgggttagagccgctagttagagcatactagtaagactttccactgagaattctccatttttctacaagagcaggacttgtaaacttactggatggaaacctccttggagaagaaattcaagagccgcatgacagaagaaaccgaatcttcctgcatcatctgcacaaccgtaaacacatcctcgctgaaacaatctgcaacagtcaagcaacgacaacaacttcttcatgccctcaagagatgatgaatgaaatgtggaaagagcttaaagagcaatatgcataaagctaacccattttgtggatctaagaagtaaaccgaaaggccttctacttttccatgccaaacttttatttcagttcctccccagtgatagcttctgttaaattgcaagtccttcacctattttcacaaagtttaagaacaaagagagagaagcagcaaaaaagggaaatgaaagcggaagatatgagaagatattgatcttacaaaattgtgctttatgcaatcatactttggaaaaactatatccacattatggtttaattcttgaacagcgcgagatagactagtgacaacatcacctaggccaccaacctgcatgtaatagatatacaaaaacttaggatatatttatacaatgcttttaaaggccaacctcacatcttacggttacctttgcgatgggtgccatttcaacagcaatatgaacaatgtgcaatggtggttcctttgaaataccttttacttttggaaaatggtaatccaaaccatttgtgttatcaaatattccgtcatcctctttctcagagaacacaaagtccatcatgtaagcatgcaatgggaccttagctggaaaaaagaagaagagaaacattagtcacatatcatgtaacagtctccagaatggaaacctgtacaactgaaatcgtacccgtagtcttcacatgtgagctttcatcatctgttgcttccattttctgaggtggcaaagggcccaagcggtgagtccaacgattaaaagagcctctaaaccaaacttcaggttttccattcaaaaccgtgtttgcaggattgtacaatacagtcacagggtttcctgcttgaatctctagaggctcggtgtaaaccacgtctttctgggatagcagaaactttttcagtgttctttccttagtttcagctttcaagcgagcntgttttttccatctgccaataaaaattgagggatgaagacatgtaaaccaatgtagtcaagaaaggagatttgacaggaatgcaaataataagaaaaagaggataagctgggatttttcttttacatgca

SEQ ID NO: 34110 - DNA, 669 bp, Arabidopsis thaliana landsberg
gaaagcaaaactttaaaccatgcgcagattttcccaacgtatccgcgcgcacatagttttttttcttaatgtgtgaatatgatttttactaatccagttttctactttccggaattggatatagatagagaaaacaaaaccaatgcttttatggtttattgatcccaaaaggctgcaaacaattacttcaaagtttcatatatagtaaccttcattagctaatcttgataaagtctccataaggtccaataatctgcttctgattaagctttaagtcgtgtcacagagactcacattcactctgcgttcaaaggttcgttacgtagtttatacagttacaggtagacgcgcactccaaaaataagcgttttcttatacaatagcatatccgatgctaatttgccaatattgcgaacaaattttaactcatatgttaaacaatcaaaaccaatttcacaccgctcagtaatggataatgccaacattgtattgtagtattatattatccttctagaagattttttgcgaggtaaacacaaacgtaactaaaaggatagtacagcattaaagtctaaccaaattcaactcagaaaattttcggttatgattaggttgatgcattatggagggtttaattagtaagccagacacgactgaaagagtcaagtc

SEQ ID NO: 34111 - DNA, 1368 bp, Arabidopsis thaliana landsberg
tctcgtatggtgtcataaacacacaacaaattacgattaaaagggttaaaatcgatatccaattagttaagtaatgaagaatgtgtggcgagtatcaatgtggaaacttatcccagcactacaataaaccatcaaaatcaactagataaaccttattccttaaagagaattacaaaagaaaagatctacaatacattttggatcaacataaagtacaatgtgttaaccaatttgaaccaaagatattcgattaatgttaccactaaccccaaataatctctcaacaaaactacttgaagtgcattgcaatattgaatataattaccaaatctcaaaattttaacaatctaaacatattgtttcttatatgaaaaaacgaagcttcaaagtgaacaacagatggaactagcaatagaaagattacttaaacaacatcaagaacgaatcaccacgtgtagaaaagtttcttgaatcacatgcaatattaaatttcgtcacaaatgaaggtaaaaagagagataaaaatgattttaaaatgaaaaaaaaaaacacgaaacgaacatcaagaacatatcttggccatcaaaatgtttagtcttaaattaggttaaagcttacgcatctgctatcttcatacagaaaacaaggagaaaatctcagttgatttgatggaatcaaaaagccctagatttgaagcttctatatggagaaagtaattaaacaaagtaaaaaagcacaaaaatcgagtgagacccagaaaaggaaaggatcttcttactctttaccggaggaagagtcatagagtgttccgggggcagatacgacgacaacagcgacggaggattcacagagaatcgaaagttgtcgagctttgtcgatgagaccattgcgtcgtttggagaaagtgacttgtcgactgcttttgttctcgattcgcttgatctcgatttttcttcttcccatggcttcaaatctccgataagggttatgccctaatttaatcctaatctccggagacgctcaatgctttttgctttttattcttttttcttggttttttttttcctccaactcgtttttttttttggttaaacgagatagagaaaataatagtattaagcgaaacgattgcgttttgaagccactaagaggcaaatttttaagcttgtcgttgttaaagactttttaatccagtcggttagaccggtccgagtccgatcatcatccccaccgaacagaaattggtttttaaggttttctctttttattctgcagggtttaaaagttattttatctcattggttttgatcggaaagtagtgcttatgaatcaggtaacggttaattcaaggatttcagttattattga

SEQ ID NO: 34112 - DNA, 1511 bp, Arabidopsis thaliana landsberg
acatctaagtttaaaaatttggcaaatttttaaattacatatatttttattcttttgttttttaaaatagggagtaatagttaatgtagttatagactatagagatgcattgtcaacaataaaacgccacgtcgcagcataattaaaatcttttgcacaaaaatgtggttggccttagccttggccctggaattaaaacattatccagaaaatcttacatttccaccaatccttcacttcctttcacgatccaaaacaaaacacaagaaaatgcaacaaaatcttctccatctctgaactcaaaaactcattcactgagaaaaatggagacccttctctcccctcgtgcgctctctcctcctctcaatcccaaacctttgtcccttcaccagaccaaacccacttcacattcattgtctctctcaaaacccaccaccttttccggtcctaaacacctctccgcgcgggttcaataaaccgcaatcaagaaattggttaattgatgcaaagcaggggactagctgctttagcttttatctctaaactctcacttttctcaccctgttggccactggcttttagccctctggggttcaattatccgccaccaactggtccaccctaaacacactctacgtagtcgattccgcctggtgttcttactcgagtgacacagtcagatcttaacaagcttttgtctgatcttgaatacagaaagaaactgagactcaatttcatcactgtccgaaagctcaccgttagttttttgttttcttatgaaaattgattgtttttgtttaaccggaaattgatccggaaccggtttggtaaaacttggcacagtaaagcacatgcgtttgagtatgcagaccaggttttggaaaaatggtatccttctattgaagaaggtaacaataagggtattgttgttttgataacaagtcagaaggaaggagctattactggtggtcctgcttttattgaagctgttggtgaaaacattcttcatgctaccgtctccaaaaatcttcccggtatggttctattactctagtttagtgtatatatagtgtacttttggaattttgatgcatcatctagtgcccaagacaaaaacaaaactagaggtttggttttgattaggatttttcggtttataaacaatagtaaccaaagtagaacctattctagtgtccatcgtttggaatggtttcggttttggtttggtttcggtctaattttcaagtagaattttgggactggctgtttctaatttctctttgtttttttttttgtatatagagaaaatgaatccattaaattttaacattttcttttatatccaatctttattttgcatactaagttgaaaacatattttttaacaaatttagttttaacttttaagaaggagaatattgtaccaacataagttttcacctgccatgttagaaatcaactatgttaagtataagtaagtattgattagtttttgaatgtatgatggtgca

SEQ ID NO: 34113 - DNA, 916 bp, Arabidopsis thaliana landsberg
tttgagccttagaagctcttccaggtaacctcactctcctcccttggttataggtgtttcttctctgtaatccacaaagccaaaacaaaaaacagacaatttaccaaaactcttaatgaaatgttaagtaacgatcatataagagttgcaaaacttgacaatgtaactattagccaacccaaccagatcaaaaaacaaaactttctatatgaaacttcaagctagagactttccagcacaaagacctaaacccacttagaatgaaacctcatttagaggtcaaccaaaaatccaaactttaccaatcaaaatataatcagaaacagaagagagattgtaccctccggttaatggcaacctttttgttgtcttcaccagatggctttatagcaatcacaaaatcgtcagactgattagtattcctcttgtaagaagggaaaaactccttagcttcaggattgagtttcttgaacatggcaacaagcttcttcatttgatcatattccggtttggatttgggattgaggtcatccgattcgatttccggtttagaatccgtgctcttctcaattccgtctccagttccaccatcgttgattacgtcatttgaatcagtggccatctcagtgatcgcagccattaattagatcagaaaattccaaataaatataaaacaacaaaaaggatcacaattcaacaaaaaacaagagacagaggaaagaaaaagttgcgaacttttccttctctcttcagtcgaatttcgtaaaaaagatgcaaaatttgatgagattaatcgagttttattgaacacccatttcagaatacgagaatgcttaatcgtagacaatatataaatctagtgcggtggtttcagaaggtggcgatggctgagaagaagaagaagaaggaatgatgg

SEQ ID NO: 34114 - DNA, 1967 bp, Arabidopsis thaliana landsberg
atgtataatgttgttattgatgcatttaaggactttgctacttcaaattctccacttcatcaccttggtttccgtgacaaagcatggaacgtcaataagcttgccaggatagctaggaaacaagggctttatgatgtttgtgttcagattcttgaaaaaatgtatggacactcaacaatggaagtacaggtacatttctccaaaatctttaattgcagcactctacacaagagctgtatatttttgctttttttttggtttcatatctcatcaagtttttttaatagttggtttcatttgtttttaaagcttgtgatactgttatttatgaaagtatcttccacatcttctgtctttgggtgtgtgagtgcaggaagcttttgttaaaattagagagcaagcaaaagcttatctggaaatgaagggagagcgtgctagtggtcttaatctgatcaatagcacaaatttggagtattttccagataagatcaaagcagagatatttcgtctgaagggggactttcatttgaaattaaatgacactgaaagtgctaatatcgcatattccaatgcaatcaccctgttcaagaatttacccaaaggatggataagctggggaagctattgtgacatggtatttcttgtgactgtgttctgtctcttatatggctcctaacattcctctaaaatttgtattccgtgtacttatattttactcgcttttgtaggcataccaagaaacacaagaagaaatttggcttgaatatgctgtcagttgctttcttcagggaataagatttggtgtttctaattctagaagtcacatagctcgtgttctttatcttcttagttttgatacagcgaatgagcctgttggcagggtctttgataaacacttagaccaagttcctcactgggtgtggctttcttggatcccacagctgttactttccctgcaaagaacagaagcacctcattgcaaattggttttattgaaaattgctgcagttttcccacaggtaatttacctttagcgtttatgactaattcgtgcattatgattattttatctgagtatgtggcgattttctgtttcaggctctctattactggttgcgcacatacttgctggaacgacgtgatgcagtaaataaatccgaacttggcagattagttttggctcaaagaatgcagcaaaatgccactggtgcaggtcatggtggaagcaatttaccatcagaaaatcaaatccatcaaggttctcaaactagtggggctgttggagcgccatgggggtggtaatttacatgtgcaagaaagtgaacgtgccactatgataaacaatgtgcattcggggaatgatcagcctatgaatcaaagcagttcaatggcaatctctgctgctgatgcttttgatgctgcaaaggatgttatggaagctcttaggagtaaacataacaacttagccagtgaacttgaggtagtattctgttggtgaatatacttgatttctttatattctctccatacaaaaaagagagtatagaaaacgactgtctggtacaagtagcttggattcagattttgactcacttgcacgtttcctgcttctttacttggataatctaatgatctataattcctctcaggttcttctcacagaaataggttcgaggtttgttactttaccagaagagagacttcttgcagatgtgaatgctttgttgcatcgatgttacaaatatccaactgccaccactgatgaagttccccaaccactcaagaaagaactctcgggcgtatgcagagcttgtttttctgcagatgccgggaccaagcatgtagcattgtgtgagagaatacaaacaggatgttgagcgtgaccttgaaccacaaagcaattcattccctgtcacactcgcagatctgacaaagaaactgaaagactggacaaacattcttcagag

SEQ ID NO: 34115 - DNA, 1081 bp, Arabidopsis thaliana landsberg
attatccaaattctattaatagaagatacagatagacagataaaaagccacatacagtatagatccttggccatttggactttgattaccttaacagcatcccaaagaatacttgcatgaaacatcaggaaacgaataacactaactaactctttcccatattccaaaacaaggaaccttaattatttgaaaacacatatagtactacaaccgattattataattgtaccgatagactctccatgcaagttattctttcttcctcccttaaaaagccagtctcacttcaagatcagaaaataacattacatttgatcctaaaatattttctagtaaagatgccaattcgtttcggtttgtcaccaaggatcttgttactctttctcaccatattatcaggtaaaataattcaaacattatagtattttcgatcgtaattaaacgtctttccttgtctaggtattaattaattagggtttggataacgattagaactcctgtgaattactccacaggaacaaaatggtcagaatcagctcgagtattcacgatcataaactcatgtgaccaaacgatctggccggcgataactccaggagaaaacttcaacggaggaggattcgagctcaaaccgggccaatccatcgtattccacgcaccagtaggctggtcaggcagaatttggggacgaaccggttgtaaattcgactcaaccggaaccggaacatgcgaaaccggttcatgcggatcaactctaaaatgttcagcctccggaaaaccaccagcttcactagctgaattcacattagccgcattggatttctacgacgtgagcctcgtcgacggattcaatctcccgatgtcggtgactccgatgaacggaaaaggaaactgcagcgtcgccggttgcgtagctgatttgaggccacattgtccgcaggagctcgcagtgaaatcaaacgggaaagtcatatcgtgtaggagtgcttgtgatgtgtttgatagagatgagtattgttgtagaggagtttatgggaacccagttgtgtgtcaaccaacttattactcaaagatctttaaa

SEQ ID NO: 34116 - DNA, 887 bp, Arabidopsis thaliana landsberg
tatggctcggattgtgtgtttacatggagtgccaaagaagattgtgtctgatcgaggttcacagtttacctcaagattttggagaagctttcatgagaatatgaatacgaagttgaatttcagtacagcttatcaccctcagactgatggacagactgaaaggactaatcaagtattggaggatatgttgagagcatgtgcccttcagcatggaggaagttgggataagagtctaccttatgctgagttctcatataataatagttactaggccagtatcaagatgtcaccttttgaagccttgtatggaaggaggtgccagacccctctgatgtggtctaatgtaggggaaaagaccctagaagggtctgccttcatcaaggaggcagaagagaaagttgccctgatccgcaagagactactcgaagattagagtcggcaaaagagttacgcagccaacagaaggagggaactcagtttcgaggaagggatttttctacctcaatgtctccccaatgcgtggagtcaaaagattcaaagcaaaagggaagctagctccgcgattcgtcggcccctatcctatcatcggcagaataggaccagcagcttaccgccttcagttaccagagtccatgttagatatccacaatgtatttcatgtatctcagctctgaaaatgcttaaaagtaccagagagtcacatcacagaggtgttagtttagattcagaaggatctgcagtaccgagaaaagctagtgaagattctcgattcagccatccgaaaaactcaaaacttagaagtaaggctctatataattccagtggagcaaagaaggagaagaggaggctacatgggagagtgaggcatcattgaggagggaatacct

SEQ ID NO: 34117 - DNA, 1071 bp, Arabidopsis thaliana landsberg
gtggcttgctatagatacccattttaaaaaaagggtaagaacattagattcttgatagtatgtaaaatgcacttcaaatgggcttagagaacgtatggcccatgtctagaacacaaaactcatttcgtctttaagagaccaacatgtgagtgagatgtgtccattttataagagtcccacatcgcttagacctgaaagagtgattaaggaagcaaagactaagagaagatgtggaccgtcgaagagaatcacttacctggacggggtcgacttgcgaccaagaagacgagtggcctaagctagtgacctacattgcacataaaagaacggtgcttagcttaatccttaaggtctcctcaactgtgagagcatgcgttattatttgtggcagaggggtcatccgttagcgcggtcactaccattaatggctttagtttgttttttccatgtttgcatttctaagtttaagtgataagggtattgactaagttcttctttttggaatgccaagttttgaatatgttaaagttattgttatggtatacagtcctacatcggaaaaatgcatcaagtaggtcgcttttgttttgatataaataaagaggtttgtgttgaaagaaacttatcgttgcgcttgggacaatgacacatctaatgaggttctaaccgagatgcgtctatgctggttgaaaactatttctaaaccccctcctaaccctaagtttgtcttgggccttggagaatttttgtatttccctttggggtaaagcccttgagttttcaaatgtatatttttctcaagttatggcattgagtcttcttatgacctaagggatcaagaatttatggaagacggtttgtagctaagacatgaataaaagtccttattgtggttatgttataagggatcaatataaaactctcaagtttacaaacaaaaaaaaaacaaaaaaacggactaacgtatttgtttttacttattttgctgtcaccatttaaatggactaacttatacgtgtacaagggtgtgttgtgtctgtttgtacccccgtatatgtgtgtaactttacg

SEQ ID NO: 34118 - DNA, 1867 bp, Arabidopsis thaliana landsberg
  unsure (1)..(1867): unsure at all n locations
atctatctgacatcacaggacacattgttgaattcaggcaagtttttatcttttctttcagaagtctcgtctcgtcttaggtttcttcccaattatatgataacaaacttgagtaaaatcttgtttcctttcagtgcggatcaacatgggagccgatttattcagcaaaagcttgagaattgtaaaccagaagaaaaagcagctgtctttagggaaattcttcctcatgcttgcaaactcatgacagatgtgtttggaaattatgtcattcagaaggtctgttcctacttgatcctgtttcttacagtgtcttgtccatcacagtctatcccttttattgattatttgtgttgtctgtttcagttttttgaatatggaaactcaacacagagaaaggaactcgctgatcaactcatgggacaaatagtaccacttagtctgcagatgtatggttgtcgcgtgatacaaaaggtacaaaggtcaatacattttgtttggacttgaacttttaaaacaattgactcatgagtgaaacgttgttgtgtaggctcttgatgtcatanaacctgatcagagagttcgtttagcacgtgaactagacgggcaggtcatgagatgtgttcgggaccaaaatggaaaccatgtgatccagaaatgcatcgagaacattcccgcagacaaagttggtttcatgttatatgcattccgtggtcaagtttcctcgctctctatgcatccttatggctgccgtgtcatacaggtactgagaagttaatgctttttttttggcaacacatagaacttaatcaaaccattgttttttccttctcaatttcttggtttctttcattgttactcaatgcggcctcacattttcctttcctttctgtagaggcttttggagcgttgttcacatgaccatcaatgtaggttcattaccgaggagagactggaatcagtttgcgtcctttccaaggaccaatatggtaattatgtcacacaggtatgtcatgccatttaaaacttacaaatcatttacaactgaagtcaaaataaacggactaaccagtaataaccgatgttggtatttggcagcatgtcttggagaaagggacatctgaagaaagggagaggattgggagaaaactctcagggcacatcgtgcaacttagcctccacaaatttgcgtcaaatgtaatacaaaagtgtctggagtatggtggtcgagttgagcgggatctcatcatcaaagagattgcagggcctgacgagagctataatagtctattggtgagaccttatggaccaaacaagatacattttctgcttgaactgattagattggaaattaactgtgatccacctttaacagatgatgatgaaggaccagtatggaaactatgtggtgcagaagatattcgagacatgtacggctgatcagcgtttaacattgttcagccgagtgagaatgcatgcatctgcattgaagaaatacacatatgggaaacatattgttagtcgtttggaacagccctctattgaaggtatgaaattccccaatgtaagtcaagttcaaaagtgaggtgaataatcacaatctttaggaacaaaagggcttttctgttataccatataagctgaaacagggcgaagtacacaatcaaatatattttctatgctaaaaaatggtcggtgaatcgctcaagaatgacatgtcacatgtgcatatagaaatgtgtggtagcacaagactgaatagaataagatgggattggtagcacaagactgaatagaataagatgaggattggtatatggatcaggaagagttacacattgtgtttgttgtttctgcagaaaaccaacaa

SEQ ID NO: 34119 - DNA, 4165 bp, Arabidopsis thaliana landsberg
actgaacaaaataaataatcacacgtattgataagtttttctatattaacaaaaagaacaatctctcaacaatcttatctactttttccttctagctccaatatcattctagtttatatcttctttcccaactaatatttaccaagatttgacatgaacttgtttagtaaaacaccccatcttataagcaaatttagtcttgtttctatatatctttttcttaatggtgcttaatatatcgttactggtgtgatttggaatgatcaaccaaatcatgatacatggacaaaacaccaattatctacgaggaggctgacaaatgatatggcttcccaaacaattacgatgtgataggatctaacgtcctaattcccaaaagtagtttttctctatttttctttccgatttcttggttattttgattcgagcgtcaaattttgaccatggtactattcaaggcctccatagctatgcttggagacaaactgagctagaccacgacatgtaagaactaagaagcgatgttaagtttgcctccagtaacaacattcaataaacaaccaaatcctttcgaggtaaaataataattttaaagcgaaatatataaaacttacatctgaaaaattagttccgaccaaaagagttagcacctcttggttttgtacctgcatgctaacatatcaggttgaacaatatgcattaattgaaagtcaatctgaaaaaagaaaagaaatattatataatgggtgtattatcataataactatagaaatagttgtttttttctttttatgttacaacatgtgagatgttacaccttttattaattactaataaaaatacatatattccccatttatgttatacttatatgcagacaaaatggtatttattaccaaaattatgtatcatcagttaacaatatggattattttctatttaagctatgccattgcacccaagccagtgacactgtgacagtgtatcagcataactcacggttaaaaatgggacccacttattctcattaaattcaccaattttaaccattcatggttttttaaccgcggttaaacctgtaaaatcccgtttcaataaattctcacactcttcttcttctttccctggcgctcacttcttttcaagtctctctcttttctctcgagcctcgcgtctgtgtaaagagacaaaacatattctctaaagcggcgacgtttaagaacattcggtcaacgacttacggcggcgttggaatcaaaactccgacaatgacggttttctccggcagacaagtcgttccgatggattacgaagccgaggtatcacaacggcttctagaagccatcctcgacggagatttcaaaacggcatcggattgcgtctccgatccactcgtcgacgttaatttcgtcggcgccgtcagcttaaaaacaaggaggagcgaagtcgtcctccgtgatgagtctcccagcgaagtccgcgtcgagtacgaagaattcaaaaccgatgtaacggcgttattcctcgccgttaatttcggaaacgtagctctcgtgaaggaattactggtaattatttttcttaatccgagtttagccgtttctttaacgttttttgctttaagattttgaaaccgataaacaaaatttgcattgatttaaatctgtgcaattaattatacaattcaacgttatttattaagcaaatcggtttctaataataatgcttttgatttgaacaatatttgtaatttaatttttgtgctttgtttgaaacttttgcgttacgttccattaatggaagacgcaatctatggagaattggtttcctcgtgatttccattttgcgtttgtttttgcgcgtttctgcttagtggtgtgattcgtggtacctttttgtctcttgaattaaagaccccaaatatatgttctgtctgaagcttactttactttttcctctttttcgaaattcaaatttcgaacgaacgctgattattacttctctctgccttttctatgaaagaaattattcctgtaaaattttggtaaatttcaataaaattttcgatctaatgataattaatcagaatgagctaattcagtggcgtttactagcacttgtctatacttagctctagtcattttttgttttttaaaaaacgtggatcggattccgtgagagtttttaaaaattcataatctgttgactaactttaatcttaactggtggagtgttaggatccttccaagctgccaaaaatgttatactaataaattacatcttttagcgagtcaaatttgcatgtcaggcggggattattttccaattttgaagtcagtcacacaactttttcttttgcttgcatcgtcacagatttacttttattgagattctcattagcctttgctagaccatatatgctaatgatggatttgcgattagatttgaaatcaacagcgttagttatattaggctaagatctgggaaaaaaacatgtgcatttggattggtcttcgttgagggatattttgagacacaacagtgccaaaatgtcactattggtttgcagtgataattgaatgatttgatttgattctctcttgttttcctgaaaggaacttatgaatatttagtacgacaagaagtgttgatataacaccatgtaacttgtttgtgaaacagaacctgaggccccgccccattaggtgttgtcacttgtcattggctgcatctatagtagacgaatactatatttgcatacttccatctttccttttaagccatgctcctctgtgtcagggttgttccctaatgttcatgtagatccattttcaattattcactttgcattattgtacaactttactattatacacagtttcttttgtcttcttctgcctctggattttcacctcacgtggtgtccttcgcacttagcagtgtagtagcttaagaaaatattttctaattttataacactgatctgacctttcctgtaatatcatctcacagaacattggagctgatgtgaaccagaagctcttcaggggatttgcaacaactgttgctgtaagggaaggtcatttcgatgtctttgagattctactcaaagctggtgcttctcagcccgcttgtgaagaagctctagtaggggcgagctgtcacggacgctcgaggttcgttgagctgcttatgggaactgatcttattcggcctcaggttgctgtgcatgctctcgccactgcttgttgcaggggttttgtggacgtcgtagggaccttgctcaaagtaagttcttcatttcttgtggttttaaaagtgaccggttagaattgttcaatagccatcttacagtagataattcttcatgtttttgcttcattacagtgtggtgtagatgctaattcaaccgataggcttcttcttcaatcttcgaaaccttctctttacacaaatgtagactgtacagctcttgttgctgccattgtcaataggcaagtctctgctgtccgcgtcctactacaggtaattttggctcatgcaaaattgaaagcttgttccctgcaagtagagagtatgtatctaagacatcaaagcttttctttcaatgatatgcacaggctggcgtcaagacagatatcatggtgaggcttggagcatggtcatgggatactaacactggagaagagtttcgggtgggagctggagtggctgagccctatcctttaacctggtgtgctgtagaatactttgaaactagtggcgacattttgcgtttgttgctcaaactccagtctccaaacgctcttcacaacggtcggactcttctacaccatgctgtcctctgtggcaacaaggcagccgtcagtgtcctccttgactgtggcgccgatccagaagctcctatcaaaacttcacgaggcattgaactcagaccgattcatattgctgcacgtgacggatcagtggagatcatacaacaactcgttggctttggctgcgatataaactcgaagaatgatgtagggaacacagccctgttgatctcaataaaacacaaacatccagagtgcgtcaaggttctcgcccttgatggtgctgatttcggtttagtgaacaagtttggtcattctgctgtttcgatcgctgagtcacacaagtggtc

SEQ ID NO: 34120 - DNA, 1356 bp, Arabidopsis thaliana landsberg
ggtgtaagagtagattctcgtagtggatgtagtatgtgcatcccctgtggagtcagtttcctcttcacccagatggtcttctatctagacatacagctcacaagtggtgcactagtaaacgccaggttctcttttcaatctcttctttcaccttggctcggtgtgaagaggtgattcagtttcttacaacgagctcaaattcttgtgattcacgtgttgtttctaggttgatattttgaatttgcgttatcaaaactgaacacagagtcacatagaagttctcattatatactgtctagctattgttgatatatatggaatatggttacatgcacaattgatggctcagatgatatatattagagatgggcttatttacttgtacattaggtcaagcctaatatttaaagttttagaagaagattattaagaacacaaaaatttaagaataactctcttattagttttggatactaactcaaaactaaagctctcttagactctctttgatctctctaaaactcataagttatgtcacatattgacatttccttatatagatgaaaggtgaagtataatgattaataacaaatttatatggtatgttagatatcaaatgttagatatcaaatctaataggtttattgtgactggtcatttttttctaaaattaataagggtgatttgcatgaataacactttttgagagaaaaattaagaatatagcactatatatgtaattattaagtaagtaacttaagggtaggtaaaatgatctaaggtggtggtggtggtggttccagcgaagatggcggtggtggttccggcgacggcggcgatggtgattccggcgacggcggcggtagtgattccggcggtggtgattccggtagaggtggttgtccggcgatggtggttatggtggtagttccggcggcggcggttatccggcgacggcgacggtggttgggcagggatggttgtccagcgatggtgacagtggttgtccggcgacggtggttgtctggttgtccggcgatggtgacggtggttgtccggcggtggcggcggcggttttccggcatcggcggtggttgccggcgatggtcgttatggtggtgcttccggcggcgtcggttttccggcgtcggtggttgtggttgtccgtcgtcggaggtggttgtccggcggtgtaggtggtcgtccgccgccggaggtggttggccgccggcggtggcttatcccgcgtcggtggttgtcctggtggttagtgccgttcgtggtatggataaaattgtcattctatttatttcgtatgttctgtcgttcgggtgctttgcttgttacgtttatttt

SEQ ID NO: 34121 - DNA, 2249 bp, Arabidopsis thaliana landsberg
  unsure (1)..(2249): unsure at all n locations
agctgaagaagattgattggaatttggcctgtaagtgaagtttgagagaggtcaagtctttctaggcctgtggggttatcaaactcagctggtattggcgaattgttgaaattgttgttagcgaggtttagatcacggagatgacgcagtttaaaaagactactgttggatttgagctggccatagaggaagatagaactaaggtctagcccgatcatgtttcccgacttagcatcacacgtgataccatcccacgaacaacaatcacttttgttcacccatgattttgaatcaaccatcccaaactcattcttgaaatcaagaagagcatccttttggtcggaatgacacaagtgttgcgtagctgaaacaaacgtgattagaaaactaggaatgaggataaggaaacagatggaacgaataaggaagctcattttctcactaaatatgaaaacttttatatttgtgaaaaaacaaagttttccgaataataatagtaaattagtgttttggatctttttatgaagtagtcttcccgactacatatataaagaaaacataaagttccatagactttgataaattgaagtcttttgatggaaagttaaaagagcaatttatttagaattatagaaaaatcattatcaataagcaaaggaaaattggagtttcgtgaggaaaagtaaaaaaatataagtgccgtgtagcatttttttccatgaaatgctttccaagtcgtcctctagccaatttcaaacctaaaaccaacgtcaatattgacttttcaaaatttgcattgcttcccacaatgtacgttataaagaaaattaatttctttatgagccaagattaaatatatgtagacagaaaaagaaagattaatatgtgtagtttcaacatcttttaaaagataaagacaaaaacgaaacaaaacttgtagacttggcgaggttgaaaactcaatattgacgctgcccgtcggctaatatcacaaaacgttacgttctatctatcacaaaagctctttttctctcaacgaagcttacctaacgactattataatcaaggacgctattaacccatttactatagagtgattttgatgatcgacctgtagtctccatggatgaggattgcaaaatgccaccgttcacaataattttgaagatctgaataatcagatttcatggcaatgtagtctggatgtaggtacggttgatctaatattgttgcttgggatccaaggaacaaccaagacaatatggccgtgactcgtctcattgaacctgatataatctcctcgataagtccatgtttgcacattgcacatctactcctcttgttacttacatgtttatcaaacgacacatgcatgttaatgctgatgttttcttattaaattaatcaagaatgtaatattgcattcactaaacaataactttaaaaaaaaaaaaaaaaaacttttctattattcagcaacaatgtggaaaatggaaaaccgaaaacatattaaaacctatgaactaactttttattgtaagtctttggtttcctgatagttcaaaacatgatattttattatacataaaacttgatttcatcaaatacaacaaattatttattatttgaagtacaacaaattatttatgaacataacaacaatgcgttaaggaaggacgatgatcgatgagtgacttaacgagttctggtgctctgttgcttgttgcggccaaaattattcatgaaccactcatgcttgtatgaagccatatccagtccaaatacaactccaggtgcaaagcctaaacctgctgctacccaactcagtgattcttcttcttcattagtctccagcggttcaggttgcggtggtgttgacgctttccaaggaccactcttcatcacgtccaggtctctcaaatatttttttgggattcaataataacttcaccggagagatacctcagtcaatatgtggactcaactctctatacgccctagatctattagacaacaatctccacggctcaattcctcagtgtttagagactctgatgatgagttctcttttgtatcgtcccatgactttagcctctcacaaatttagttggcatctggatcatnnnnnnnnnnnnnnnnnnnnnctttagaagcgggttggcaggtttggggtagacattaatattgtaaactccagatctcaacatttgttttttggactaatatttaaatgatttttgtattcttat

SEQ ID NO: 34122 - DNA, 876 bp, Arabidopsis thaliana landsberg
caaaggcattttagcagcttccatatctggctttgatcgcatttcacctgtccaaccacatgtttgtcaatttgtatttgttagtaaatttaagggaagtcaagtcgtttacaggccatgagagaaatcatttataaaataattataaactgaaaaaataaaatatataaagggtttattttctcaaaacccatttataaactgttttcagggatgttattatggaaatgcgggcctaaacgggcctttagcaattcaaatattagcccatagaatgtacaacttttattttttatttttcttaatcataaacgacgcagttcttgtgtcgatcttcgctcatctcttctaccacgagcagactgtagccacggcgaccaaaaggggaacaaggatacgattacgacggaatactccgccggaaagttatttctcgtccttaacggtgccggagtagtgtagaacaggtcaatagttaatttccacgttttagtttggtgatttgagggattttaggctcttgattggttttggaaaatctgattcagggattgaacaatatgggtaagcaccggaagagagattctgattcgggagacgatactccatcgtcagcaacatcgtcctcctcgtcatacagctcagacgaatctgattcatcttctagaaagcggcggaagaagcaaaaggagcggcggaaaagtgacggatgaagttatgagagagagatacggaggaagagagagaaggagaggaagaggaagaagattgagaggtaggagagaaagaggatggatttgagtacgagaagaagactagaggcgtgatatgagtctgatctgagtctactctggtctgaattttcttgaacagaga

SEQ ID NO: 34123 - DNA, 1358 bp, Arabidopsis thaliana landsberg
atttgcaatatctggaatctgaacttatgaagatggttacctcaatactgaatcccatgtcgaaaatctcatgctgctgcaccaattgctgaacttaggatttctggcttctgcacaagggccagtagttagtcttaggaagagtttagataatgagttaatccgttcgtatcacttgcaagatttgttgcactcctaacataattgatgacactgtcatttctactcgttggcagcatccgtagtgagtaacgaccagagatacgagttccttgcaggtacttaataacctctgaagtattcgttttatgagttccatgtggtttacgaacagcattttaatacctgtaatatcttgaatgcagatagtgttcccgagaaacttaaagcagaggccgcgttggaggaatgggaaagaggcatgacagatgcaggctgaaataaatccggttggaatcgaactgaaccatttggattcaaatttgtgtccctgtcctggtttatacttcataggttccatccgcccgatcttcacctttcttattaaccactactgagattgcacatatttgatttctagaatgtatacattttttttcttgtttcaagttaaaatttgtaagagttgtcggaattctaatatctttctttagtatctatatatacatttttgcagtcattttgtgaaataaattttgtagttggacttatttacaatggctgtcactggattttgatgtttgtttttgataattagaaagaaaatcttcgaattaaatatttgacatttaacaatctttccaaaatctctccacattaactacacagagatataatttgatagcatttatttactacaaaattacaaaatatttagacaatgatttataaacatatcataaataagatcaacattaataaaataaatggttttttttactggacgggtttgacagaacgttacttaataataattgtaaactataaaataaaaatattttatagttagatacaatttgtaaacttttatatatactaacattaaaaaataaattgtttccgcggtgtaccgcgagttaaaatctagttataattataggacaattggtcagaaaatatttagaaaatatttttaccataattattcttactaatcaaattataatattagtaaaacaagccaattatcaaaaaaaggtttttaaaatcattcttctagaccaatttgaaaaaactttccacattttcttttctttttacacattttataattctgttataaaataaataatccaaaataagagtttgggggtaaaactaaaaattcaataatatgatgggtatgaataaaaattagg

SEQ ID NO: 34124 - DNA, 2898 bp, Arabidopsis thaliana landsberg
ctaattcaacatttaaccaacattttatcatcctgatactttttgaggcaaagaaagcagtgagttttatttttatttgaaagagggaaaaagctggaagtagcatctgatgggtactgtacgaacgagcacagattctgaaagtttgatatatttggccactccaatgacaaaacacaaagctcctttcttttgcttaattactcaaaaaaaaaaaaaaagcgaacgcaaactcatgataataagttcagaccagtttctttacttcttttgtcttaaccgtaatttattacaatttgtgggttacttctctatacttgggatcaaatcagaaaatgagataacaactagaagctataccggtaaatacaaatgtttttagttattaaattagttactaataaaataactcttttgacatcatagacattgagaagcagcagagtttaaagaggctgaattaaagatctataactaaagaagcaaaagtaaggggtagtcataattatagttgtacgaaaaccagaaaaactataagaaagacaaattaatcagtccagagtcacgagtcttgaaggtgatagatatatagtcaaacaccttttgctatgtcatcatatctcatttggactaagcaagagaggatttgagttcagttctggtcgacgaaatcagctggcaagttcaaatccaataaagtgactttgttgtttaagaaacttccttcttttttgggacgtttctgtgaagatgagcaaatggtgtcttccgagctccttgatcctgaagcttgctcaggcctcgatgtcactcctgtataaaaatatttatcactcattaggattttgattcattgattcgttactagaatacaatgatcatcgttcaccgagagttgattaccgcttgtaccactatccaaaggttggaatttgtcagcatctttggaattccaggaagcataaaactgagctgcttgttcgattcccttcgatctgtaaggtgagatgttgtggatgccaagttggagagatccgagtaagtcattctcaatgcactcgtacattttcttgcagagtgtatcgacggcgacagacaaattgatgatttgaatccttatcgccataactttatcattactaaattcatcaaagggctcctcaaggaactgcgaaagtttctccacattactttcaagttgttgctgctgatcctcaaacaaattcttctttatctctctctcctcaggggtcatctcatctttaaacatctcttcaccaaacatataatatgcaaaagcatacgaatatgaaagaactcgccttgatctgaataaccggtcgagtccattggtgacccagctgaagtctttaagcttcaactccctcttttctgatttcgacactttctcatggatagtatccctaagtttatcttctagctttgatgaatctgtatgagctttgtatcggtgatgataatgcgtatacctgtttaaatctctcttcgctctttccatctgcttctctttgtcatcttggtaccgaccacaactgtgaccagcgatactcctataagtgtgatcacttccagtagctccaccacatagccaactgtacattttaataaccaaacatgagagacacttccaccatttgacatttgatcgtctcaaagcatagaaaaaacaaatgcaaaataggaaaaaaaagcattgaggaaacaaggctcgagttcttaccaaaaacactgcccacaaatacacctcacgagattgcatccaccattcttttccacaggtttgtaacatttgggacacagctttgtgtgaacggttatccagttgattgtctcagactcatctcgacacttctttctccataactcccacatcaaacaagagcaaggggagtgggcttgacacagacaactgaaacagaactgaagaccacaagaacattcaacttcgcacaacttgtcatcctcagctcgtatagcattcccacaatgcggagtgctaggacaccacttgaccattctgttatcttcgatgtacgactcaagaaggtaacgatcaaacttcgcagctagatctggacgctttttactgactagactcctgacaatatcttcatcacaaatagcattacattgatgagccatgcatctaatccttttgctctgaccttcatttatctgcacagtaaaatgctccgtccaacctaaaacgaaacaagaactgtgttacatcatatgtcaacctttgcaacaaattacagcaagagggtactcacaattattgcaaaagcaatggccacagtccattcttgtcatgtgatcacctggtaaatcctccatgcaaacatcacaactcatagtgaagactgaggaaaggggagttgccatattgataatcgaagacagtgacaccagctccagaaaacaagctatcttttcctttctcaacaaacacagcaaacaacttctccacatcccactggtaatgaataagaagagtccgtgcatggtgctcctttattgataacaattccatcacccttagcaaatcttctctctgcatcagaaaaccaataactcaaaccaaactaaagcttaaaattaaacccgagagtaaaatcatctctgctgattttacctgtgctgctagaagcgattcctgagtgatgacctgcaaaattgtagaataactgttaacaaaccctaatttcaaacagagaagaacagaacagaacaattctgcaataaattagaatcctaaacactgtgaaaaatgagaaattcagatgaacaatgatgccggaaccagattttcaatctcacaattgcaatgaaaatcaaattgaaaaggttcaaaattttcacgaaatatcaacaacc

SEQ ID NO: 34125 - DNA, 445 bp, Arabidopsis thaliana landsberg
gcaatctccggtggtatcaagaagagatatggctactcagatgagtccagaagagacgagtcctaataacaataaccagtctccaccattggttgtttctgtgattgagccacctccttgtagaggtgaagtgagagaagtgaaaatggataaaggagcaagaatgattaagcgttcaaagagacgagtcatgtcttctaggattattaggagagagcaacctgaggttgaagacaattctgaagcttctgcttcttcttcttcttgggatatctcagaaccagccatgactctttctaagtaatcaaagttgttgtatcagttttttataacgctttcttcttggtcagccattaatgtgagtatttgcaggttgcaaagagaggaagcgaagattgcagcttgggaaaatctgcagaaggcgaaacatgaagccgctattaga

SEQ ID NO: 34126 - DNA, 1329 bp, Arabidopsis thaliana landsberg
  unsure (1)..(1329): unsure at all n locations
aattccattcacgtttttgcctccatgggctttttggttggttggttcttcaggtggtctcgtttgtttttcgggtcttgatggtctaactttcagaactttagtatgcaatcctctgatgcagagttggaggactctaccgagtatgcactataaccaacaaaggcaattgattatggtcgtggatcgctcagacaaatcgttcaaagtcatagccacaagtgatatatacggggataagtcacttcctactgaagtttatgattccaaaactgacaaatggtccttacatcagataatgcctgcggtgaacttatgctcctcgaaaatggcttattgtgattcccggttatatctagaaactctttcgcctcttggtttgatgatgtatcggcttgattcagggcaatgggaacacattccagctaaattcccgagatctttgttggatggttacttagttgctggaactcagaagagatntgttctcgtgggaaggattggcctctacagtactctccaaagcatgagaatatgggggctggatcacacaaaggtctcttgggtagagataagtagaatgccaccaaagtacttccgagcacttctgagactttcggctgagaggttcgagtgttttggacaagataatttgatctgctttacgtcttggaatcaaggaaaaggtcttctatacaatgtggataagaaaatttggtcttggatttccggttgtgctcttcagtcatgcaacagccaagtgtgcttttatgagccaagatttgatgcatctgtcctctgaacaataagttatcgtctgtctcacatcattcttgaaaacttacaagttcgccagcaaaacatgtcagaaatatgaaatcaaagagggtttgatgtgtaccttcagtgttaatgaagacctggtcagcaatgatatgcttcaccaatggttaacaatatcgaggagaaaaactgtaagataaacttgtttctagctttctgtaaattagcattcactcgatatgaaaactttctcaatatcccctgtctcgtccgcgtgaaatatatatacacttaattttagtttcctgtgctgaattttccttttctatatcgtaaatttaagcttctctttgcaaatagtgactgctagttcaagaatatcttgttggctaacacttatgagaatgagaaagttttaagttataacattggaatatagatgtgatcttaaacatttgggcaattggtacatacaaatcccatacttaatgtcttctaactagaaactagaaaaccgaggagactcttgaaatggggaggtaatct

SEQ ID NO: 34127 - DNA, 792 bp, Arabidopsis thaliana landsberg
ctccagagcttgatgataggtttacaaaaaaaaagaaaagaaaaaaaagagagtttgatgataatggtcttcttcatcttttctttttctggttttcatcatctttctctactctttttcttgtaacttgattttaaattaattaatgaactacatctaactattataaatttaaaaaccctttaaccaaataaacccaaaaaaaaaaaaaaaaactatatgggtcatagtgtcagcgaggtcacgagactatagtgagaaaataatagtaagaatttttattttatttttttgcgtcatcaaacgccatttgtaaactatatatacatatattgaatttgggtgcattcgataggaagactatatacctttgctttttctatacatttttaatgaaattttgtaaacacatctttaactacaaagttgagataccaaaattatatatgaaattttgagagaaaaaaaaaacaaattggagcccaaaagtaggaaattgtttactcagctttcaccattagccagcagaacaaaacaaaagcaaaaaaaattaagcaaacgatagaaaatatcaaatattcctcctcctcacattcacacacacatgaacctcaagaacaatccataaaataaccaagaaaactacaaaccctagatctttaatttgaatcacaagcatggatcaatccatacatatatataaagcattgatattatcatcaacaagcacaacctgagggaggaacatagttagttttccggggatcggaggtgttcccgaaaagttggctt

SEQ ID NO: 34128 - DNA, 1266 bp, Arabidopsis thaliana landsberg
aactcatatcgtaattattttgaaagtaagatatcattttcttaacatatttttctattaaagtattaagatatcatatcgtaaatgagaggcatatcgtaattactgttgtttgtaagtttgtaactgtaattatacgaggataagatatcatatcgtaaatgagaggcttatcctaaggactggagatcttaaatggtgcttcttctgtccaagaaaaaagttcggcaacaatagtaaggcgagaagatcgactgattgagtcatgcatgaatacagacttgaaaacaaagtactagcgcaaaagactattcctaaaaaggttaatgaattttggttagaaaagctttgtaaacttttttattttatttctggcaagtttattaaatatgttgtagtgccctaatgtgctttgcgttcttttgaagaaaaatggacttggagcaagacatgcaactgaactcgatatggagctccatataagaaagagtatttgagtgatgaggaagaagataacgagaatcttgtagcgatttcttatgcagaaaacgtcgatcatggtccgagcaaagaaaccagtctagttgttacaatctcacagctgcatgctcgtaaggatcttttagaaatgatagctaactataaaattgtttcaaaaacaagaacattatattttgaaacgcatagaaataattactatggcgttgtataaaagaattctgagcataaattagtagccaaagtaatgtatcaatgacataaaattctctatttcagtaatcttattaactttgaagttgaacttctttttatgtgaagtcgcagaagaagactgagcggcaaagtcgtgtttgtgaaattggcgggtttcgaacctcggagctcagaaccctaaccagcaacagtggagaaaggtttttgagtttgttgttgatgttgatcgcagacatgagatgcttcagatgcttctacactcgagcccactctcttctcctcctccgatcttccaatccggtcacggttcctatatctccggtccggttccgtcttcgtctccgtcgtttctcatcatctcccgtcgcctgcgttttcgaccttcattcctccgatcaggacgcgaattcgaacagagaagacaaagacaccaaaattggctgctccgatgataaatcgcgaaaatcacgctcaaatcctctaggatggaatccaggggaagtaattaccaacagatccttaattgggggatcgttccctgctagtcctcgt

SEQ ID NO: 34129 - DNA, 567 bp, Arabidopsis thaliana landsberg
catccaaaatctaaaaccaaatcccggcaaaacataaacacagacgcagaaattggcgttataaaacagccgcaatgaagaatatggttcatatataccttgctgaaatacagagccggtttgagcaaacaaatcaatgcttcattgagaagagaagacttagatacaccctaatgaccaaattaaaccacaagattttcattagagaatatcaaaacattagtatatacaagaagtgagttgttgttatatttatgttaccccaagaagatcagagcctttgatttcgttaaagtgtttgtagagatgttggagatgaagtttgcttcttgtggtcaaaatcctaacaacctcatccttctccacggcttcttcgcctgaagaagccactgcttcggctagaatcttagcatcggatttggcagaatcatccttcaccttatttccttcgtatctataagcactcacgagccccacaagcaactgcacaaaaaacagagacaatgagtgagataaaagaagtttgaaagagaccaacacactagagtatataaaaatattgacctt

SEQ ID NO: 34130 - DNA, 1819 bp, Arabidopsis thaliana landsberg
  unsure (1)..(1819): unsure at all n locations
aaaagaaagttcgcaggtttctttctaagaaaactgaaacgcatacgatattttggtctgttaaagtgttttgaaagctcctttcaatggtttaaagatgagtttatcagtattagtttctcgaacatcgacaatggtagctccattcaatgctttagagaagatggagacatcattggagctgtactcacaagttgtaatcacagggaaattcattnnnnnnnnnnnnnnnnnnnnagtgtcacattcagagaaccttttagcggttagaatccccgagttggtggaaaactcgacagtgtcagaagaaccaaccaaactgtttgagaagatactgtgagctgatgctaatgttgcatgaccacatatatccatctacaaaatcaaataaaccgaacattgtataaaaatggaacggagggagtaatgaaatcaaaaaatgtttgcaagatggacctcggctacagccgtgaaccacctcagaaggaaacgtggtggttcggagccggggatgggaataagaaaacatgtcaatggaaggtcaaactcagaggccatagactgaagccacacgtcgtctctctcatgatcctcttcaagagaaaacacactgcagcttggttccccttgaaggctgactcagtgaatgcatcaacctgtgtttagcaatactcgttcataaagaataagaagatcacattatcagagcaaaaacaaagaaaagaatatacaattaccacgaagtacttgacaggaaaattcctatccattgacgtttttggttctgtttttgccattgatgttttcgttagaccaaagctaaacttttataccattttggaggcttttaatttacaatgccacttcatcttttaagagaaacagacaatctttgtagggcaaaatcttattgaaacaaatctcggcttttaatcttttttgttttgtttatatgctaacagttgaattgtactcaaatcattatgaaatctgcagctttgcaaaattttatattcagcaaaggacagatctaatcaagtggaagcaagcactcataaagcaaaaaaaaaaacgcacttattgacaaaacaaatatggtacagtatgttccattattcgtatgctaagcatgtgatgagttgtgttgcatagcttactagtcgttaaaaatcaaacaaaaattggttagtcaaaaaggaacactcaaacaataataactgattgatagtacatgggaagatttggtataggtattcttaaaatctcctaaaaatggacaggtaacactttgggaagcttacaaggaaaataacatttctaaaagaagtactcagagcaatgaagaaaggaaggaagttatactagtacattgccagaaacaaaaaccaaagaagacgaagaagaagatacaattaccataaagtacttcacaggtttcttcacgagcatggccatagctcctcttcttcctattgaaatctacttatctggaaacaatgtgctccacgttctatttaagaatgatagagtccccagaccagaaacaaacatttcttgatagtaaaatctgggaagatttggtagggagcgtgaaaaactttcaaaaatgggcaaaactttggaaatccatcaacaaaaaatgtattgtctgtgagtgaaagagaactgttggatcatatgagtcattcattggtttatgccgtaaaaatgcagctactcttttacctcatcaacttctatggtatgatccagtaatgtgataatgcacaatgttgcatggccacatgatccacctacaaaaagaagtgagaatggtcga

SEQ ID NO: 34131 - DNA, 103 bp, Arabidopsis thaliana landsberg
ccttcacggcatgagggtggggtttgtttgagcttgaaaccaccagactcgttgctctggctgtctgctgaagaggcactaaatatggcggccgcccgtaatc

SEQ ID NO: 34132 - DNA, 755 bp, Arabidopsis thaliana landsberg
agagtatcagtcttcttaggtatacctaaagtgcagtgttagcgagcgagacagatattttctttgcttctagagagattttttcccattttaagagtcttcattcttttctttttttgacttcatattcttggtagaaagagattgttttgatattttgttgacctttttttttgccattttgagggtttaagatttgaaactgaaatggggttctcagatcttttgtgcaatgaatttttttctcaacacgcacaccgcgtgtagagctcgcctttctaactcaaaaatgttagacaatatagtaaagagatgatttttatgtttatacataaccaagaaagaatacagtttcttttcttttgtcaatgataagtctaccatttaagtgttaaaactattttatataattaacagtacaaagaacaaagacacctacaataccaagctatatatatgtatagttgttagaccccaatctcttaccatatcactgactttgcttcccatgttagaggtaatgaagaaggtaaaagctatttctttgtgctaagtatgtccagagcgtaagactggaaagaaagtccaactgtttcttggactgtgatcaccttttccggcgaccttctcattcgcccaccactccgatcgaactttctctatcatctcttcattggtggatcaaacttgattctttgtagagcctgtagaaacgtcttagcttctgactcagtcgctctctgtttcccgacgtt

SEQ ID NO: 34133 - DNA, 1130 bp, Arabidopsis thaliana landsberg
agaacattttatcctaaaacaaaaggatataccttcttctcagcacctcacaggaccttctcctttattgaccatataattggtcacaaaacaggtctcatcagatacaaaaatattgaaattgtcccatgtatcctatcagaccaccatggcctaagactgatctttaataacaacataaataatggaaagccaacattcacatggaaactgaacaacactcttctcaatgataccttggtcaaggaaggaataaagaaagaaattaaggactttttggagtttaatgaaaatgaagccacaacatacccaaacttatatgacacaatgaaagcatttctaagaggaaaactcgtagctctgagtgcctccaaaaagaaactagagagggcacacattagtagcttgacaacacacctaaaagctctagaacaaaatgaagcaaattcaccaaagaaaagtagaaggcagaaaatgatcaaactcaggggtgaaatcaaccaagtggaaacaagaactattcaaagaatcaaccaatcgaggagctggtgctttgagaaaatcaacaagatagataaacccttagctagactcactagagggcacagggaaagcatcctaattaacaaaatcagaaatgaaaagggaaacataacaacatatcctgaagaaatccaaaacatcatcagctcctactacaaaagtctatactcaacaaaactggaaaacttggatgaaatggacaagtttctagacagataccaggtaccaaagctaaatcaagatcaggataatgatctaaacagtcctatatcccctaaagaaatagaagcagtcattcatagtctcccaaccaaaaaaagcccaggaccagaagggtttagtgcagagttctatcagaccttcaaagaagacctaattccagttcttctcaaactattccaaaaaatagaaatggaaggtactctacccaactcattctatgaagccacaattactctgatacgtaaaccacaaaaagacccaacaaagatagagaacttcaggccactttcccttatgaatttctatgcaaaaatacccaataaaatactcacaaactttatccatgaacacatcaaaatgatcat

SEQ ID NO: 34134 - DNA, 580 bp, Arabidopsis thaliana landsberg
ataatacatactcaaagtaaattatgaagcaaaaaatatatatttattttagttaatttatctgtttggtacaatgttgaattatgagtggcactcatattgctttctttctttttagaaaataatatctttgaatgtgaggtaagaaattaaaagtcacttcaaaagtagatattcatgtaaataaatgattaggtgcaacatttaatgatatgcataattatttagttgaattaaaaacttttctattacttctttttaaaataattcttggttttcacaaattcggttctcaattttcaatactccaggacaattccagatatctgaatttactatttcatttcttcgtatatttattttattattatgattttttttcttatacaaaattttgggccttacaacgtttgacaagaaaattgcaataggctttagaaatgagtgtttttgtgcgagaagacatgtttaccattagtttcggtgtttatatgtttattgtgaataacaagtcatatataattattttttgccaatataaaatctcaaatgtaacattgtctcaagaatcatcgaaatc

SEQ ID NO: 34135 - DNA, 2713 bp, Arabidopsis thaliana landsberg
cctcctacaaacatcaagctatcagagacgtaacatcgaggctcttatccttatttaaggaaacttcttcatcagaacattctacttatgggctaggtaatattgttctctctggaaaccaggctcgaatggggattaaagagaatgatgttcttctcgatgtgtttcttgatgagcgcattggaatactcacaagcctgttttcacctacttctggatggaagcatagattagagtcactgattagctttcttgagaacacagaggccaagtacgagcattacgtccacttattgaaagaagttgaaaggatgagtgaagaagctgaaaaaaagaagaaagaatctgaaaggaagaaagaaggagctgataagaagccgaaagcaataaagattcttacatttggagagtttgtaaagaagacttttgatggcttcagtgaagagttggagaaagatatggttgacttgtggactcatcttccaaagtctttcattacgtctgaacaagtgaagagtatggtcaaagctcgtcaagctcttcagcgcgtaagatatttcttgcaagagaatttttctagagatgattttaagaagggaagcttcacatttgattgcttcaacaaatttgtctgtgttgattgccttcggactctacgtttgctatcaaaacgttttgagattccagccttgttgatgaaggaggatataaggacattctgcctacaaaatgcacacataatcttttgcactgcctcgggtgctgcagaaatgaccgcggaacgggcagggtccatagccatgcttgtagttgacgaggcggctcaacttaaagaatgtgaatcagttgctgcattgcaacttcagggtttgcaccatgctgttcttataggagatgagcttcagctaccagcaatggtgcaaagcgaggaatgcgataaggcgaaattcggaagaagcttgtttgagagattggttttgattggtcatagcaaacatttgcttaatgttcagtatcgaatgcatccttccattagtcgtttccctaataaggagttttatggtgggagaatcactgatgctgcaaatgttcaagaaagcatttacgagaagaggtttcttcaaggaaacatgtttggtactttctcatttatcaatgtgggacgtgggaaagaagagtttggtgatggacatagtcccaaaaacatggttgaagttgctgtcatttccaaaatcatatccaatcttttcaaaggtataatcttttattgattgattagtgagtatcttaatctataatctgttttttcattaattattcttctgactaatttgcttattttttgaaacagtttcaagtgaaagaagaataaagatgagcgttggagtggtttcaccatataaaggtcaggtcagagcaatccaagagagaaccacaaataagtacagctccttatcaggtcttttcactttgaatgttcggtcagtagatgggtttcaaggtggtgaagaagacattatcatcatctctaccgttagaagtaatggtaacgggaaagtgggatttcttaacaaccgtcaaagagctaacgtggcactgactcgagcaagacactgtttatgggtgattggtaacgagacaactttggctctaagtggttcgagttgggcaaaactgataagtgagtctaggacacttggatgtttctacgatgctgctgatgagaagaatctaagagatgccatgaatgaggctttgctcgaggatgtatcttcgagttttggttctctttctattaggaatggctatgggaaaagaaatgcttggtagtgttttgtttatcttgttttatgtttttgtatgttttcctatcaaactatctatggtatttttatgatattttatggtatttatggttttcaatttacttaattatgaaattcgattcacttttcatgagattagaaattttctaaactcttcttttttattttatttattaagttgtcaaaaataagttttgagttttaacttgggtcattaagtcctcaaaatggagtcgttttgaaccatttgttcccggaaaaatacatgatgcccgctaacttgtctaacactcccaatacgaatgtcggctaaaggccccaaatttatctaagtatgtgctgatcagcctacaatcacaccaccgtggcaaccgctccttgcggttattactggcataacctcccccgcattttctccatagaaaccctctctttctgtggtggataatttcaattacttgaggagcaaataatatatttctagaagatgctaaaagatttacaaaaaagaaataaaaaagaggaaatacaaataagtcaagttagataagtttgtaaattttcttttaataatagaattaagggtagctaatatctatataaataaggacttatagagacttattccataagactcaagaaagacataagagagaatcgagagaggtttaagagagttgttctaaagacctagagatttagttttgattagtttctaaatcataataaagaaatgttgctctttattctcttttgttcttgaatcacatctcgaatcattcagagactaagtcagagcaagtcggttttgatttgagttggtatcagagcttaagttgaagaactctaggcagacatgtagtacgtgactttcgtaagcaagatgg

SEQ ID NO: 34136 - DNA, 7514 bp, Arabidopsis thaliana landsberg
  unsure (1)..(7514): unsure at all n locations
tctttttggggtgatctcttgctataactagaacagaggtgaatcattgagcgcctatttatgcttgttaatcgtttgctgctttgggtgtagctcaaggagcttgttaaccatggaaaactagttcctgatgaattcataataagtttgttatcaaagcgtctccaagctggcaaagacaagggtgaatctggatacattcttgatggttttccacgcaccgtgactcaagcggtgagcaatttattgcttgtgtagatttcaggctaatggaggactctttcgtttgacagctctgtttctttttttgtcttctaggaaatactggagggagtaactaatatcnnnnnnnnnnnnnnnnnnnnnnnnnnnnnnnnnnnnnngcttgcgaaatgtttaggaagaagaatttgcagcgagtgtggtggaaactataacgttgcctgcattgatatcaaaggtgatgatgatactcccagaatgtatatgcctcctcttcttcctccgccaaactgtgaatcgaagcttataagccgagctgatgacactgaagaagttgtcaaggaaagactcaggatttacaacaaaatggtaaaaatacttcttcgatctttttccatgattcaaattctcgtagaattaacaatgtttatatgtttttcctcgttcacagactcaaccagtggaggaattctacaagaaacgcgggaagctgttggaatttgaattgcccggtggaatcccagagtcatgggcaaggctccttagggcattacaccttgaagacgataaacagtctgcaatagcctaatctctctctgcattttatgattgaatcaaacaacttgtactacattctttgctcgagtaatcctcctcgtgcatatatgcttaagatagtcaataaaagagatacatgtcccactatggttatttgatgcatatattatatagtgaagtttctttgtggcttctggtccactatagatagttgaaaactctttgtcatacaaacagaggtttgacttacaacgaattgtttatatatgcttaccaaagaaattatgtaattcaatatatctactagttatctcgacaatctaatcggcaatttgtataattatataccttacggagtgtgtcttagagcttcgtgttcttctgctatgaagtttgtgtttgtccttctgttgatgacttctcgtcgttaacttgctccttaggtctttcatatgtagtcttctgcaatcgcagatcagagagaccttgttaatgctcagcaccagattcagatgtaatattcacaattggttttgaaaagaaactccaattgttacatgcactgaactcttgactatactgtatatgagagtgagagaaagaagaagactgacttggataagattctagggactgaccatgaccggcaaatcttgcttcagttgcctgaaaagtttcagaaaaataatggtgacttaatgcacccaatggaaaatctagttttctacaccaagttcacttgatatatgccaaagaaacagaccgtggtgaaggttgtgctttaacttggccagattgatactgaaaagtcgcctccaacatggactctgccataactgccctctcctccatctccgcgagagctgcaacagcctcttcatacttttcctacaccattagcattatcatactgaggataactttttgtgtcgcctcgaataagtgtatactgagacaaagaaactctaacaagatgacatcctcataatataaacatgccacaaggtatcatactaaagaagaaccagtaagctccaaatttctaggaaggaatcaataggcataactatttctgtagcaagtagataagtcagtcgataaattagacacttagttgaccacacacacaaaatagaggttaaacagataggcaacacactttcatcaatagttgtagtcattagtcaatgcaaactttctaacctgaagcacttcagcagcatatctctgcgttgctgcatcctgctcagcaagtctccgtgcatcttctgttactttatgttcttgctccatccgcatcaagaccttcataaatttcaagtggtcttagaattaccttactttgaattccaatagaagagtgcaaatgcaaccctgtatcatagcactttcttgctccctcttatcagaaacaagtcttcgaagctctgtcaccccttgctctaactgctcaatctacccaaaaactttgttcagtagcataaaacaagtcaggctatctcaaaggagcaagcatcatccttattcatgatagcatagatcaagaaacaactgaacgtacacccacatgctaaattaggaaacagagtttcaaataacaaatgggaataccttagccttaagttgacgccgattgtcttgtttgaccatctccatgagagctacctccaactcttcagctctataataacacagggagtgatggagggatcataaggagatatataaaaaagttcaccagtgatttcaatatccaaagtcatatactaagatacgagattaaccttagtaaagcagatcttttctcctgaagcaacttgtggagttcacccttcaaccagagaacctggagtcgttgtgggcaaatgttgttattataagttgacattgcaattactggcactaatgcgtaattatattcatagtagtggtattagttggtccagataaatttcatgtaagaaactttcttaattgttactacccatcatatttatctttcaagttcctaggggcaacatctccaacccaacagaaaggatgacacaaattacctgtccttgaagatcttgaaaactatctatctcacaatccccagtcaggctaataaagatgtcgtctgcataactggatcccgattcagaacgagataaactcccatttgacaatgaggctttgctagctaaaacagaatttgggtcttgcttggaattatgtaatttggttgcagtgtcttttgaatccctccaagcttgaagaccctttaatctttcctcaaatgcagctattactgctggcctgtgtttgcttcttagttcctgcaatttactttcatgtacattttggtaacccatgcaagcagtgaaaacgagctggctgctatcaaatgttgaaccagtcattgattgtagcaaagtaacagcatctccagtgtccttggttgtaaccaatgcaggacctgatatggcaagcataaaaagtttagagcaattccattgattattacttaaatcatatggatacttaggttcaaccgagtaccataaaattccatcaatgcgagtgctgttctgaaaagcataacacgatttccttcaaatagaagcacatcccacactctgagaactgttataccaaagaagatatttgagactgacattcagaaaacgtaagagtatataaacaattttcctctaaaagtaaagtttaaaattccaatttctaaaaacctgaccactttcccatggaagcatattaatgaagatggtaagaaaccatggccctgtaacgcaagccacctgcactccaagataatctagatgatgaactgcagatggacagaaatcacaagtagtgttagcaccaactccaaatttttggtaagatgaaacaagactgtgaaaaaactaacccaatttaggaaatctctctcgaagtaactcctccagaactcgttggtcaacctggggaaagtaaaatgttttatgatgagattactagtcggccataaaggataggaaaatactgtaacaaaaagattactattttacctgggactcgagcatctcttctgaataataatcatggaagtagtcatcaatgattcctgtaagcgaccttaaaatccgaagtaatatttagttaacttacatgtttgttaagaagagatttgaggaatgggctaacagtagttaatattcaaccaaaagaaaaggaagtcatagatacacgaacttcacacagaaccaaagagttggattttcattgacaaacaataatacaatattaggagttagagagtagtttccgaacataccaaaaagcattctcttcgggcatcagaagtaataaaagtgcagcgaagaaattcattgcctgcacatgatttattgatacaagataacaaatacctgagatgttcatttttgtgagcatgtaaccatactaggacacagaagtgacagtattaaataaccgaatacctgacagtatccaacagagggattatgcctggcataagcagttagcaatcgcctcagagcatttctgaaatcatcatctagggcaggatgacctggaaaccgtccggggtaaatcctgtaattgaaataagcaaaagctaagaaaaatgaccaagatcaacaggagtccagtactgcaccattagttagaaaatgctggatgccaagtaatgtacagttgctaaccttttctatctgacctttccatttttccacaacagagagggggtctgtacttgaacctttctcatctgtatgctgcatgagctcctgctctatgtcgtttcctagactatctgcagctaatagattttggtaataattcttgacccgacgtttcttgactcccgcaaatgcttgccagagctgaatatttgtatatatattttcagattattgagcagaaaataaggataataagaactaactatcaatagcaggagaatgctagaaaagagaatgacaggatgtattacctcacccctcagagccataggtgcaccgccatgaataagaacttcaagttcgtctttccaggggcatgcagatactagggaagctgcatcagcagcagcagacatgctggagacacttgtgccatctgaagaaccatcctgaattggatctgatctctccgcatcatagaactcgttttccgaatcattctcacatactccctttgaagactcggtctcatcagttgaggctaaggaattcaatttctgagcttcttgctcgccatttgtggaatcccccttcattttgacacggacactcatcaagtcctcaattgcttgaagagatggcctgatctcagcccataactgaactttgtgcacattcttctctctattgggaacttcatcttcctctctcgcattcccaggagttaaatcagaacctggcttgtcagcattcagatcttttctttcagcacccttgtttaattccttttcttttttcttgtcactttcacttggattgacatgagtatattcagacgatccattcgtaggtgacacgccagattctgcatgaaattccaggaaattgctccaccttgccgacctctccacttcttcctcctgcagtttatcagtaaaaaacagcattagaatgttaaggtgaaacatcgagtgacagtgactgcgtcaaccatataagaaccaaaaaatgacttatgatatatgaagcctttcgatattgattaaaccaagaccactaagtaaacttctaagttaagtccacttctgaaatctttcacacagctgtaacaaagctactttaatggatcaccaaattttagacaaaccttccttttttcctaagaatgccagtgtgcactcaatcatgtaaaagaattttccgagtagaaaataaaagttatggagatagaaagaaccttgtagatattaacatattctcggtatctttgcacatgctgaggcctcacagaaaatccatatgcatccctgttcataaaaccaacctcattcacttccctaagtactaagaatatagaaaaaatcaagatcaatgatcactagattctcaactagtgatctaaaaagacaacattttgctcagcaaatcgagagcagagagattaactgagaaaccgcaatttcaaaaaacaaattccatcaaatgtagtaaataaaaaccaaaaacacaccgagataagcattgtagcaatggagaagctcgaaaggcgatacctttggtggccagacttagaaacggcgtcggcgatcataattccttagtcggagaacgagatctctccgaatagaggcggtgatagttgaaagagatggctgagcgcataagaagaagatccggtggagcaagaagcaatactactaattgaacatcattacaacacgcgactgaagttgaaaaaaaagatgaaaagttgctacagtgttggagagagagacgaacaataaggtccgagattgtcgaggacgttattgcatgctttacttaatttatatacttatcatcaaatactccaaacctttgtccttcttttgaaataaacttatactggaaattaataattttgggcctaaatcaactagagcccatttgtttcatgtttgattaaaagggatttatataccctattgagtccacgtcacaccgtcgtcgttaatcgtggattaatttgttttgggcctaactgaactataaatccacttgtttagtttttacggtgaaaagtcacttttgccctttagaatccaccaaagtcgccactgtctttcccaatttctttgaacttttcaggtacccttaaacttcatcttcttcgatttttaccatttttttcaatttgcaatcagaaatcgaagcgatccaaattagtaagctcgcttatgcttatatccggtctggcttcgttaatcgtcgatgtcaatttgcggcgcacgttacgtccatccccaaccttttcttttccggcgcatcttagccgttgcattatcacttcccgttactcctcccgtacatctctaaggtttccgattcaaatatctcgccaccaacaccgtctatcctacttttcttcatcctcttcgtcggagcaaagcagaccaacttcctcttcccgaaacagtttcagtggtcacggtcagcttgatagtgatgannnnnnnnnnnnnnnnnnnnnnnnnnnntcttccaaagttcttacattgcctaccgtattaacacttggtcgtgtcgccgccgtcccgcttctcgtcgcaagtacgttactttgttacctccaattgttttggattcgaatgtgtcacagtatttgaactaataagttatcatgatccattctgggtttcctgagctcaactttttggttttgcttgaaaacaacattaaacacagatacacttaatctttggctaatgtggattctaagcttttctgttcgttttatcgaacgtctagtttccattactttaagttctaatctagtttttttggattgtatcttatgtaaaattgttcattcgtttgtttttgctcatagccttttacgttgatagttggtggggaacaactgctacaacaagcattttcattgcagcagccattacagactggcttgacggctatcttgcccgcaaggttctttatttttaccatcatctgtgtcttcgaccgcatttcacattgcaatcttaacgggtctgatcatgtacaaattga

SEQ ID NO: 34137 - DNA, 1692 bp, Arabidopsis thaliana landsberg
tatttataattaatctctctttctgccttaaaaataaatcatagtctcgctcgcgtctttcctcaaacctctctgtctcttcttcttcctcgcctcgtctacgcaatactactactcttatatcacaaaatctccacgaaaggtttgtacagagatgctataacatagcacacatctcctttcaataattcgctttttcctctctctcttctttttcatgttttcttgttcctgatctctctccattacttttttgcccatctctttgtcttcctcagcgctactcgaagatctgtcttttcaggtatgatgggtttggttcaatcaacacacatcaacacaaatcaacgatgagcggacctatcgatcctacataggacaagagacaggtatatacatattaaacactcatgcgaagagagtgtaacacttctaaaaatctgcagcaaagaaaacctgcttcaagtggacagcacgttatcctttgcaggtatacagccgggtttcaaactcctcctcctccggttttttaaatccagacgcaacaccaccctctagtggtataatgcaaggcttgaagtaagacaagaatttgtcagattcatgaccttgaatttcacgatattggacagctcggcctccaagagctgcatcaagttcaactgtcttgacagctgctgttccagcttcatcctggaattatcaatcgcagattagtaataatgacgattcatattacacaaagttagaacgtaatatatgctatcatgcccaaaaataaatacctggcttgtatctttaccaatccaaaaatgtatatcaaatagataagcgccacccttattctgtgtggtctgcacatatgaaagctaatcatgataaatgtgaaagataataaaggagcatatattttatacatatgatcagacaagaaagcatgttgtcctgttctgtaagctaatatcttattatctattcttgataagagtctataaaaaggggagaagaagagtgaaaaaaatcaaaacctgcaagacaatgtaggtatctcccatatagaactttccatgttcagactttggtactgggactggctcaaaattttcgattctccagatttcagtacctctaagaaatgttaaagttcaacatctcagacagcagtaaaacatttaacattaccagcaaactggtgcatacaaaagagatagcaacaacaaatagcatcttcctctctgtaggaaacaattatattgcttcccttgagatctaatactttttgaaaggatacggtttctgccccactccttgaaacgcaggatccaatacttttgttgacccagacattttgtattagtggctaatctcttccttcaagagaaaatacataaacgacctgccaaaaacatagagcaagcataaaaaataagaaggtaagagattgttttataagaagaaactggcgcttggataggagcctaaaaaacactaaagagcaacacaaaggtctagcttttataattgaatttctaaatggcaatcatatatgagagaatatacagtattacgtagaagcatgtttgagcaatatattaactctgcaacaatctgagtactcagttctctcccacaattcattattatatggaaatcattcataataatggttcctcagggaaagtaattcaaggg

SEQ ID NO: 34138 - DNA, 6015 bp, Arabidopsis thaliana landsberg
  unsure (1)..(6015): unsure at all n locations
aaagataaattgatcggcttccagaacaatctcatgagaagaataccaattagaataatacctgtgcaagatgcattatatattcactagttataattacagatttacattattatacaatgaattaaaaacaaattaaagttgagaattattgaacaactttagcctttaggtttctttactatattctcttgaatctaattcccttatcttgcccgtttccttggttgggtggggacttttagtatgagtgggcacttaacattagtgatgtttttgcaatattattttgtcttctaggccttatttcctggtgagtttgggacacctaaaggcacattttgtctaaataatatactgtgttaaataaacttttatatgcccatacttttcattttgtttataaattttatcattcttatcacttattactcaaagagcctactacaccatcaatttcacaaactttggtcgaataatattctagttaaagaagattgttacaagaacacgcgagtgagaaatattatatccgatccagatcaaaagattactcaaagagccaacataactatctttatccaaatttgcaataacaatatgtagcttaatgggacatttgcattgcccaaactttgaatgccataaactaatataatattaccaattatatgttgtattaattttatataaatcatctccagatatatttttcccaataaaattgttcgtgtatataatcaagcctattattatatgatatatggaattcgaatgttatgtgttgtatattattttctatgtttggttttgcacattatctaatgttgtaatccgtcatatgatggtatgtatagataatagacccaaccaaaagaatctacgatttaacaacaacaaaaaaagtaaaaaactatatataaactaatttatattcttatattgacaaaaataaacgcctatgttttgcatataaatgtacattcacatatgcaatttagtatcccgcttagcattgcatctatattaggttacattcactcacacaattcatatatacttcacatcttttctttcacactttccctgaaaggtctagcaaatgagtttgaagcgttcttcttcttctttctttatctttctcttttccttcttcttcctctcttctcatgtctcctcacaagcctgccaaaaaacatgcggccaaatacccatcaagtacccgctcggaaccgggtcaggttgcggggacccacgtttcacacgttacatcacgtgtgaccctgaccaacagactttgacgctcaccacccacacaggcagttaccctatcacttctgtcgactacgccaaacaagagatctacgtcactgatccgtccatgtctacgtgtgcatgtacccgacccagccatggattcgggttggattgggacgctccgttttctttccatgacgacaccgtttttacgctccttgactgttccgtagacgaatcccctgtattcacaccgttaagtaacggtagcggacgtgtttccctctgtgatcgtcaaagctcctccatttgcaccttcttgtactcaaattgcaggtaacccaaaattcaaattcaaatcgaaataaattaaaccggctactattctatctaaaccgaaataataaccgtatcaatttctcatttgttctggtgatcacattttaatatttccacacaaaaatttgaaatgggtgaaaaatgtaaatatcatctttcggaaagagttataaagttggtgtaacaagaccaatctgaattatatggaaccggtttacttttggatttgtgtcatctaaagctttacttaattaatccggttataatttccggtttggcagggccataagcctcataaacctccaagtatcaacgtgttgcgtctacgtgcctctagacctcggaccatcgttcgaaatggatttgaacaaactcaagtgctcgtcatactccggcttctacaacctcggtccaggccaagaatcccacccggagaattggaactacggaatcgcactcaagtacaagttcaacgtttttgatgagtaccctggcgtctgcggtagctgcgagcgtagtaacggtgcttgtggcttcaacacacagtcaagctcgttcgtttgtaactgtcccggtgggattaacacgacatcggattgcttcttcctttataactctgcttctattcttgttccttggttctcaagtaagcaccactctcacacttctactatatctagtcaaattattaatttatattgaacaccacactgtctcatagataatcttgtctcagctataacttattacttctcaattgaattttcagacaaaaaacttttacattttttattagtatttaacagtatatagatttgtcttacagagagtggttttttttataagcaggagaatgggtaatgtaccctttgtcatggtttgttgtttggatggtgatggttctgcgttaaaggagcatcaaaggatggagtggttcaaagaggaagcttaatagatcgaatctttgcttcttctttttataactttgtgatatcacagtatgagattcttcgatattgcttctctctttgcaatattattcaaatcaccatttatcttatttgcttttcctccactttccagctcataaggaatcaccatactatattaatgctaaacacttgcaaagaatcataatgatgatgatggtattagtcaactcgctgagactatatacttcaatatctatataacatgaaactaaaaattacgtacctatggattgcaaatacaataacaaagctttaccgtttttgagatagtgtaaaatttatcaaacagggatcttaacctataatatatttcactcgtcttgttaaaatttggacccaaaaattgcaaaatatattatttactgtaaactatagactatacactatagtattagtattgccatgagctcatggattagaagattttacttaagaggttcagtccggtttacaattgtacaatcatccaaaaaatcaattggtgtcatcttatcacaagaaaaattgattgtcattgcatttttaaaatcactatttattaataatatcaatcaataaaaattactaaaagtaaagaaaaaacctagaaaatcaatttttgtggaacaaacaaaaaacctaaaacaccaatttttttaggaacaaatacaaacggagtaataaataggaattagggtttgtaacaaagggtgagaaatgaacttaccttcgttttgcatacccattgctgtgttctcgttgttgatgccattttgcatccccatgaactaacaactagaactgatttgctttaaaaaagaatccaataataaaagattaccaagtagtgattgttcttaaataaatgtggcccagagaggcccagtaatggcaaggacgtggaagcaatttcccagagtcaaggagtctatatctctctcgctggccttgctgtacccaaatttgccgccttgtccttcgcattttccaacctcctctgttttcatcattcaatttctctattgctttctggatctggaattttttttgaaaatggaagcgagagaaagaggatcaatgtcgtctagcatcggcaattccgctgaactcgaagggaatctgacacttagtgatcgtcttaaggttttcaaaggctcaactttcgatcccgacgcttatgtcacctccaaatgtcaacgtatgaacgaaaaggtcttcttcctcctcctcatctccgcattattatcatgtgtttgtacattgtgtcatcttgttgaatcagctcgatattgttgttggtgtgttttcgtttacaggagacaaggcatttgtcttcttacctcgttgaattgaagaaagcttctgcagaggagatgcgtaagagcgtctacgcaaactacgctgcctttatacggtgtgtgtgtgtgtgttatctttttaattatcgttatttgttgttagttagtttcttcatgcatgttacttgttgttgatgatgtgcatgcagaacatctaaggagatttcagctcttgaaggacaacttctttctatgagaaaccttctctctgctcaagcagctcttgttcacggtttagctgatggtgttcacattagttccttatgcgctgatgacgctgacgacttaagagacgaagacttgtacgatatggataacaaacagctgtcgaatattgagaattgggttgtggagtttttcgatagacttgaagttctcttagctgagaagagagttgaggaatccatggctgcgttagaagaagggcgtcgtgtggccgtagaagcacatgagaaacggactctcagtcccaccactcttctttctctgaacaatgcaatcaaagaaaagagacaagagttggctgatcaattggcagaagctattagccaaccttctacaagaggaggtgagcttagatcagctgttttgtctctcaagaaactcggggacggttctcgcgcacacacattgcttcttaggtcttacgagcggaggctacaagccaacattcaaagccttagagcttctaacacttcttatggggtagcatttgccgctgcgctctctcagcttgttttctcaacgattgctcaagctgcgagcgactctcaagcagttgttggagaggatccagcctatacatcagagcttgtgacatgggctgttaaacaagcagagtcgtttgctcttttgctgaaaagacatactttggcttcatctgctgctgcaggaagcttaagggtaaccgcagagtgtgtccaactctgcgcatcacactgctcttcattggagtctcgcggtttagctctttcccctgttttgttgaaacactttaggccgggcgtggaacaagcactgactggaaatctcaagaggattgaacaaagcagtgcggctttagctgcttcggatgattggtcactctcttatacaccaacaggatcacgcgcctcatcaactactcccactgcaccacatctcaagctttctataagcgctcaaagattcaattccatggttcaggtaatcaacatttctcacacaatcatatttgctacttgagtttatatttttccttgctataagtttattgtttctgtggaactttaggaatttctagaggatgctggaccgctggatgaagcattacagttagacgggattgcactagacggtgttttgcaagtttttaactcatacgttgatctcttgatcaacgcattgcctggttcagctgaaaacgaagagaatccagttcatagaatagttaaagtagctgaaactgagtcacagcaaacggctttgttagtcaatgtacttcttttagcagacgagctaattccacgttcnnnnnnnnnnnnnnnnnnnnnnnnnnnnnnnnnnnncactccaagaagaggttcctcagataggcagaaccgaccagagcaaagagaatggaagaagaagcttcaaagatcagtggatcgactaagagatagcttctgcagacaacatgcacttgaactcatcttcactgaagaaggagaagtccgtctcagctctgagatttatatcctcatggacgaaaccactgaagagcctgaatggttcccttcaccaattttccaggaactgtttgcgaaattgacgaggatagccatgattgtgagcgatatgtttgtggggagagagagattcgcgacgatattgctgatgagactgacggagacagtgattctttggatatctgatgatcagagtttctgggaagagatggagacaggagataaaccattaggtccacttggtcttcaacagttttacctggacatggagttcgtgatgatctttgcctcgcaaggaaggtacttgtcgagaaaccttcatcaagtgatcaagaacataatagctcgagccgtcgaagcagtttcagccactggactgac

SEQ ID NO: 34139 - DNA, 1121 bp, Arabidopsis thaliana landsberg
actcgacacgatccccgatggatctgatcggaaaacaattgggaagcctttgcctaattatctgaaacctacaatcagctcgagaccggacccggtcaagttcttgagaaagaacaacgccgtcgaagaaaatcagaagcttcttcgtagacgatcctttgatcatcctccttcgtctttgacttctccatcaacttcatcagcccatagatctctcaatacctctcctgcccacccacacctgcgagacaaacccgcggttccaagggagaagcctgtcactggtctgcgttctacatctttccatggaagcagcaggggaggtctcagaggaagcagtacggtgaaatcacctcctgtggcttcaagaggatcttcaggggtaaagaagagcggtctaagcggtagcagttcttccaagagcaaaaaggaaggttctgggaatgttcccaagaagtcttcgggtaaagagatttccccggattcttctcctcttgcgtctgctcacgaagacgaagaagagattgtcaaggttgagaccgatgtacacatttctgaccacggagaggaaccgaaagaggaagataaagatcaggttgcacaaccggatgaatccggtgaagagaaggagaccagtccagtggctgcctccacagaagaacaaaaaggagaactgatcgatgaggataaaagcacagagcaaatagaggagccgaaagaaccagagaacaccgaagaaaacaacagtgaagaagaggaagaagtcaaaaagaaatctgatgatgaggaaaatagcgagacagttgctactactacagatatgaatgaagctgtgaatgtcgaagaaagtaaggaagaggaaaaggaagaagcagaagttaaagaagaggagggcgaaagcagcgccgcgaaagaagaaacaaccgaaacaatggctcaagtagaagaattaccagaggaaggaacaaagaatgaagtagtgaaagggaagaaggaatctccatcagcttacaacgatgtaatagcaagttagatgcatgagaacccgaggtagaacaaagttttggctcttgctggagcttttcaaaccgctattgactatgaaactgctgcatctaagt

SEQ ID NO: 34140 - DNA, 5584 bp, Arabidopsis thaliana landsberg
aaaagataacaataaataatttaacgaaaagattcaataaaaagttacaaccgtaaatattttaacaaaaaattgcgataagaagacgcacgcaaccatttatatgcgaaaagatactattgtagtcgaacaaaataacattcagaaaatatcataaatattttaacgaaaaatgtgacaaaaaaaacagccataaaaacataaacgtatatattttaacgaaaattaggataaaaagacgcaaccgtttcggaagtgcaaaagatatttgttcaaattggtattattattaattacggtaattaaattacctattttcgatttacgttagagaaggtttttcttcatttctgatattgtttccaaaatgacggatctttagaaatggtccaagtgatcctcgtcagtcctatgcgtactactacaatgtagattttggaaagaactatctacgtgtgtgtactattatggtcatacgtacatctgtacgtgttttcgacaaaaaaaaaaaaaaaaaaaaaaaacgtccatctgtacgtgtacggtgtcaaaatccttctgaataagttttataaatccatcaattgcaataacttatcaaccggaaacaagttgaattatataggcactttacatttcaattaacgtggctttgaccagaatcaaagaaatggttttggccatactattgaatagtttgattttttcagcgtacgaaacaaagatttacaataataaaaccaaatgcttcacctattgtctattgaggcaatttactcagcagagcagaaatgttcttatggactttagttggaataaattcaatcccgggccttggatttcatttgtgaaacctgaggtacagttgatcttgtgagtcagtcatcaaatgagcaactgggccaaagtaaagataaacccagctcatgtccagttaccaatctaagcccacacactaaatcccagaacacgacaaaggcaaaaccctctaaagcttgtgtacctgcaaaagatgttgaggtgaagaagacgacgctcctccattcaaatccgtttcaagccttatcctctttagctgatgactagtcaagcttacagctgtccaagttgataaggattctagattgttctctaagagtctataaagtgaagtgtataacgttctatcagggtattgagaaacagagtaataagattcaaagtttcatattttctaaatttcttcagatctcaaacaaggaaatctcagctaaagtagcacaagaaggagtttactggcatctccaacctttgccttcccctcacactttatataagatagtaagaaaagacatggctagaactagaagctggatggatctcaagtttgagatcggttgtcttggttcctatacaagtgaaatgatccttgatgagttagttgaagagatcatcatgagttgcagagacacggttcaagttgaaccgatgcaggaacccaccagcgacaacctgtgatgaggctctttgttttaaccttttgtctatcctgtacagtttcattgccactgccatggtcaaatctcttgacattcttgtgcagtggcacaaccacagcttttttaacataaacaaagacttcagaatctcttatattgtttctttcacttccatactctgtttttgctttccagtggcatctgtagttttactcggccaagagagttgtgcatgagttataactatagagtggtataacatgaggcttgaacttaaataagacaaagatgatgtttttttaccaagcaccatgttccaatagaactacaattatgcgttttagctcttatccaacaatcaaaacaaatacaaggccatgactttttactatatagtacatcacaaactctaatgaggagtacttgtatttttctttttcttaccaaatgcttggcttttgctttctgattcatcatcatcctcactgtcatcaccggcattcttactagaaccagcagattctgcaaccaatcttgcattttttcttttcactgcagcaaacttggcttctagtttctgatcgagagggtcgtctgaaggtctacgctttgtttgtcgtgacacttgagcaccaagtccaagcctaacgtaggggtcacaacgatacttatattcagcttcagtttctcaaacaaaatgcaaattaacatgtaaaaagatatttgcgttcacctgtgtggccgttcttcttgtgcagtctcaataggatcatcctctgtgggcctagtcatattggcaacccacttctcagcctccaaaacgcacaaactcaaagcagtgagattgaaaccaaattatatgaacgcaagttagcaacttacaaatatatctcattgctaaaaaagaatatctagattttagttttgattcaaggatttttgtgcttcaaggaggaaaaaatcttacaagtttagttgccttgtctgttttaagaatctgtggaggtcccttcttcttttccgtttccgttgtcattgctactagagtatcaccacctcccaatttcctatagtcccagaagtgatatgcttacttcactttactgcagtaagacaagttcacaagcgattttttcggtaggctcttgttaaatcttagtcacattggccaatcactagttgaatgcaacaagttaacctaaggagttctctttcaccaaacctttcgaattggtccctaaacggtttaggctaattagcaatcatcaatgcattcagaacaaggtaagaaacttgttaaagcacatcaaaactaacatcctttcaagcattcctaacaagttagttcatagactgcaacttaaattactcagttagtcagtctcttatgtatgttatataatgttccaaaggtgattagctattaaatgttttagatctatgtatatataaaaaattctgcatgacttcattcacaatcacaatcaacttaaaccttatataataataatatgaattgtaacacttatgttaccacggagacgtctaaccttttaactaatcaatcatgcaacttgaccccagaaccaatgaaagatagacatctactctctgcggtcattcaaatgatgagaataaggatcaattagatttttcaacaatagtcttagaagtgacttgtgggaactatattctgtgacctataagcaatgtgaccacaagatatacgcataaggtcagcaatatagagtcttgacatatagactgattcaaagctgactctgcaaagatagacatctacactctgtataaatcaaaagatgagaattttcacagaccttaagaatcttggtggtcctgaattgccctagtttgcatcctagttaagcctaaaacaagaagctattctctgatataaaggagagaacaagcacacacatgaaacgagctcaattttcattaactacacttctcgtcacattcacatattccagtcaaagtaataatctcgaaacgtgtctcagatacttaagattctaattctctagctattcctaaatcaggttagaaccaaacaactaatctatgaaacaacaatgcttaaatcacagataaaagcacacataaagcaaaaatctcaaaaccccagaaacaaaacagagaaaattgccttgaggttgaaattaaccagattgaggaggcgggcttcgtgcagctgcagggagagcacatcaagagtgggatgatgaagatcgtttgtattaatatagactcgcaggaagaaaacagctaatttcaacggaattgtctgacggaatttttgaattgaaacggagaagaagacggatttttcgggatctcagatgagattccttcaatcgtacagacaacaaatttcaggaagataaggttttttccgtttgggccaaatgattaacttttgtgcatttttggcctacttccagcccaaaaaagagtatcatttataatcaaaacaaaaaatatgggatgtgttattattgggcttaagataactaatttgttttgggtttaagatcacttatttgtttctttttaaacacatatcttctctaaattttaaagaaaatatattgaactatattttttactaaagtttttagtctgccaaatatttaaaatttagccactatttacaaaaacattcttacaacattcgaaaattcaatataaaacacgttaacttatattttataagaatatcataaaggcgacatatataacttgctattcaacattccaatttcgtctacattccaagtagaaagaaaattgtattctacaaaatacagattatatatattttaaaaataaaatataaatttcaaccgtaattccacgtaacatattaaaaacatatattatacaattaaacccagtaacaaaatctattattcaactatacaaaatactctcaatatttaaatttgtaaaaaaaactagcactacaagaaaacatgcgatttgcgagggaaatttgcgatggaaaacatcactcaaattactacagagttgcgagaggattgtgagggaacaggaccaagtcgatattctgtcgcaaactttgtgacgaatattttcctcacaaatttgtgagacaattgcgaggaaactgcgtggaagtcatgattccccgcaaaaacgtcgcaaattagcgagggctttgcgggaaactgagttccctcgcaaattgagttccacaatatcatgtccactaaatcaaggaatgcaaattatttctctacacttctatgtgtccaacaagtgaaatccatgtaaatgatatcaaaagatacaagttttatcaaaatataaacatatagatggacagataatgatggataacacatgatgaaaacaatgacagcttttttcaagccagtttggtttgtaggaagagcgatgatgaagcaaatagtttagattttttttttttcgacaacaagaaaacaggcgatttgcgagagaaatttgcgatggaaaacatccctcgcaaattgttacagagttgcgagaggtttgcgagggaacaggaccacctcgctattccgtcgcaaacattgcgacgaatatttccctcgcaaatttgcaagacaattgcaaggaaactgcgtggaagtcatgattccccgcaaaaacgtcgcaaatttgcaagggatttgcgtgaaactgagttcccacgcaaattgcgatgcacttgcgacgaaaacttattttgtagcaatttttgcgacggagttgcgagtcttcgcgggttagggtttagggttgcgagccttattataaatatttgaagtttatataaaactaagacaaaataatgtttaatttcataggacggggttatatggtcagaatgatttgggtcgatattaataggggatgatattctacatgtgaaatcttagatatgacaatcaaaagggagatttgcaaaagtgccctatttctaataaccttttgcaacaatgccctttcctgatggtcatttttaaaactgccccttctaatgtggtaaataacggtgttacccttactgaaaaattaaggtttcagtttcattttga

SEQ ID NO: 34141 - DNA, 821 bp, Arabidopsis thaliana landsberg
gttctacgggctcgagctcaaccacatcgcccgacgctacaacgagactgcggacgagctggctaagatagcctcggggcgaacaacggttcccccggacgtcttctcccgagacctgcatcaaccctccgtcaagaacgacgacacgcccgagcccgagagggcctcggcccagcccgaggcaccctcggcccagcccgaggcaccctcggcccctgaaggtgaggcactgcgcgttgaggaggagcggagcggggtcacgcctaatcgaaactggcagaccccgtacctgcaatatctccaccgaggagagctacccctcgaccgagccgaagctcggcggttgacgcgacgcgccaagtcgttcgtcttgctaggggacgggaaggagctctaccaccacagcccctggggcatcctccagcgatgcatttccatcgccgaaggtcaggagctcttacaagagatacactcgggggcttgcggccatcacgcagcacctcgaacccttgttggaaacgccttccgacaaggtttctactggctaacggcggtgcccgacgccactagaattgtccacacctgcgaagggtgtcagttctacacaaggcagacccatctgcccgctcaggctctgcagaccatacccatcacctggccctttgctgtgtggggtctggacctcgtcggccccttgcagaaggcgcccgggggctacacgcacctgctggttgccatcgacaaattctccaagtggatcgaggcccgacccctaaacaacatcaggtccgaacagagagtggcgttcttcaccaaaatca

SEQ ID NO: 34142 - DNA, 415 bp, Arabidopsis thaliana landsberg
aaaggcagagtaatagcggtactggagatttggtacagttaccagtggattccgacagtaccgctaattatcataaaattttctttctgttggttgctcgatgggagcccaatattcagtgcaggaggaacaccatcaccaaaattctttcttattcagtgcaggaggaacacccgcatggtcattgatctaggagcatcaaccttttaaaagtaaatgctgcaaaaataattctagcaccacacagatccgctaaattataaggcaaattatccactggtaactataccaaatctgttgagatagttgattaactgtatactgtcagaatccaaaaaaacagagtaatagcggtactggagatacattcgaagttagtgttaaacctgtgcggaaatctcctcagctgcgaact

SEQ ID NO: 34143 - DNA, 2513 bp, Arabidopsis thaliana landsberg
atctgacttcttcttcggtgttgttgattcatcttcttccatgtttgatttcaatctcttactgtttcgttcctccagatttgaagatttgggttgaaaaaagttgagacctttctgtttttttttttgtttcttcactaaagttttttttttctttcccgggaaaattgttgagggaaacagaaaatgtcaagtgaattggtgcgaaaataagggagagatcatgtgtggtagggtttatggtaggtacactgtcttattggaccgttttaattgggtttgaaacttgttataagcccaataataaataatgttttcgttgaattaattaaattcttaggcgttgtattaaattaacatggtcatttcagtgaaatttcattagttcaagttgggctttaatggactttttcattggatctggattatgttttcattgggcttttgaagatatagagtatatcgaaatttttgggtttttttctttttttttctatatttcgatacaaacggattttattttttgggtaaatgattaaggtagtcaacaaagaggcaagttttaaaattatgaccttttttagcataattttaaacaaatttatgtatacagttatagacttacagtaaatgtagaattgtagataatgataatttgcttagcttcttagcaaaaaaagactatttgcttagctgtatattggccaagtttacagattccaaggtcatacttttctatatatgcaaatgcaacttttagaaaatatagaaatccagaagtagacatatattgattgatttgactatcttagatacattggaccactaaaaaacaagaaacataagatataaatattcataaataggatttttaccatttaaagtgcattaataaaaataaataatagaaatttacactcttagtagtaacaaaattatagatatgaacacgcaatatatataaataggaaaacaattaaaagagataaatcatacctgatattcttacaaatatgaaacttatgaccaattttaatacttattaccaagttttgttattcaagaataatttaattttattatcagaaatatcattttggtcaaaattttaaaatatttttgactatgcaatgtatagaaagatatttcaacaaatagaacaataacggtcaacgatatttcaaaattttaaaatatcattaccatattaattacagtctatatttttattagaaacatagtatagtatctttttaactgagtaaaataaaaaattctgaaaactaaagcaatttcgtatagatatatattttgaaaagtaacaccctaacggtatttggtgcgaaataagcggtaattcaaaaaattaatagaagtaaaaactgagagtcaatctaatcacaaacatctgaaatagatacatgttaattggtgtgtaagactagatttcttgcattaattcccttcaacaaactattaaatcactctttaatcttttctcacatattcagtataaaaacatattgtgtccctctccaaaacttttatcacaaaactatcatatctaagtctaaaacaccaaaccacctctctgtctctctctctcttgtctccatcgccagagccttcacggttaacattgttcgtcatcatgtcatccggagaaagagctttacaccttacaacacccgacgatgaagctataagaacgtgccatttacttctacggtttggagattttaggggagttcgagacatcatcaacacgaacaaggttgtaatcagtgaacggctagatacgtttgagaaagcggcagctatctcggatgttctctcggccgcagagaccccgcttcccaacggggcgactgattggtacgggatgattcgaatgaaacagccgggaccgattgtatcggaggacttcgagaagttgatgaatctcttgaactcgagtaacaatcctttcccattttgccaggaagctcgtgttaaagcctcgttagcttggtcgtttctgtccgatccaaccaataaggcgaagtacgataagtctttttccagcgtggacaaccttgttatcgaagaagaccaaagcggtgacataaccgatggtggtcgtgtttgcggagagggtagcgaaggtgaagtggacacaagaaaacgaaaggcggagagtctcattttctctgatttgccagcattagagaacttgaaagagtttcaggaaacggaagagagtcccttgccggtggaggagaaaaacaatgaagttccatcgaaagacacttcgtttgtcccggagaaacgtaacgttggtccgggacctgacgatgaggttgttgtgatttctgatgacgaggatgaggaatacgtgggccgagatattatctcaatggctagaacagcgaaagtgcgcatagttgatggaaggaaagtgaaatttgtcccattgaggaagaagcaaaaatagggacaagaatgttataccaaaaaaaaaaaaaaaaaaaaat

SEQ ID NO: 34144 - DNA, 1730 bp, Arabidopsis thaliana landsberg
  unsure (1)..(1730): unsure at all n locations
aaaaagcctatcgacagtcggtcaaatttttggaatattgatctcttaaaagagcttttttatccggaagatgtaccgctgataagtgccctgcctattggtaatccaaatatggaagatactttaggatggcattttactaaagccggaaattatacagtcaaatctggatatcatacggctcggttagatttgaacgagggtacaactctcataggtcccgatcttacaacgttaaaagcgtatatttggaaagtgcagtgtccacctaagttacgccattttttatggcaaatattatcgggttgtgtaccggtatcggagaatttacgaaagagaggtatactttgtgataagggttgtgttagttgtggtgctccagaggaatcaattaatcatactctttttcaatgccaccctgcaaggcagatttgggcactatcacaaattcctacggccccagggatttttccctcgaattcaatttttacgaatttggatcatttgttttggagaattccttcangcgtcgatgcggctccttacccatggataatttggtatatttggaaagcaagaaatgaaaaagttttcgaaaatctggataaagatcctttagaggtcttatgtttggcggaaatggaagcaaaatcttggcagttagctcaagtcgaacttcatgctgaaaaccaaggtttctcaaacttgtaaactcggattcgagtacgggattttttacatgataccagtttttctggatacctttgttatgtggatggctcatggaaaggaagtgaaaaaaattcgaggttaggatggtactgtatatcatcaagtggagagatgccaaccatgggagctgccaatattaggaagaatctgtctccccttcatgccgaggtggaagctcttatgtgggagatgaactgtatgattggtgccgacaaccaagaagtagtcttctttacagactgttcagacttggtgaagatggtgtcttcctcaaccgaatggccggcgttttcagtgtatttggaggagttgcagagtgatagggaagaattcacaaatttctctttatctttaatttctcgtagtgcaaatgtaaaagcggataagttggcacgaaagattcgtaccgtaccgcatcatgtcacgtatgtaaacaatatccctcgggattagctcttttgagttttaatttatatcggttgacaaaaaaaaaaaaaaaaaagatagcgcacctgagaaaaaaaggtaaagagatggcgcatctgaaaaaccttccatgggagttgattgaagagatactctctcgtgtcccacctaaatctctcgttcgcttcagaaccgtatcgaaacaatggaacgctcttttcgacgacaagacgttcatcaacaaccacaagatgacgtttcgtttcatcttagcaaccaaatccaagatttattcggtaagcatcgatcccgtgatagtggtacgtgagttacccttaggtactccaggtttagaatctttgggacttaataacttggttgattgcaatgagttgttggtatgtggtaagaacaatggagcggttgtttggaacccttggttgggacagagtagatggatccagccgagtttaaaccattctcctatggtattcgacggcattgtatacgacaataagaagtacaagatggttgctttttctggcgtgtggaaaataaaagacttttccgcg

SEQ ID NO: 34145 - DNA, 1274 bp, Arabidopsis thaliana landsberg
agacccaacaaacccttgtatcaacctttacgggttttgattatcggcaaactgattattattttaaaaatcatgataaaacaaagtaattgtacgtacgatcaaaccctcgaaagtagaatagaaagcatcaggagcaaaccagatggaaacacttcgagactcaaagctgtcaatggagaaatcattacaaattctcaggagcatcactttactggtgttctactcaatacaggaaaaacatggcgccgaggtggagaagatgagaaccgatcttgatattgaaacgggcacaaacaaaagtatccaggcaatggatgatcacacaaaaaggctatgcacggcacttcatgagattggagctcaaactgaagttgcaaaacgcgagcacatgcatcatctacggctccaatctcatgaagtcccgctgttagcactcggatttgttctcaattgtagcatctaagactatttctttgccttttactgcgtttttagactatcagtttcatttgaatcgtttagatgaactatacgttttatgagttaaggcttgaattcccatcttatgatgttgtatatatgaagaatttgccaaattcagcttccatatagccacacatcaaccaagcctgatgtcataagaaactattaaaacattgaaaatatgacaacttcattataatttctaacaccttacattagtcatatttagattaagaagtgtttggttagaacttagaatccctaacttcttgtatatattctgacaagttttttacattcatatgtaataccccgtaactttttcttttgagtataatttaaaatcatattcaaaaacataaaaaagaagtgtttggttgtttgtagtgatggtgttttgcatagtcggaggattgtacatgacaacgactgtgtgcttggtttgagaaagaaaattttaggtttagagatcgagttcctttgataccacccgatgatatgaatgtttatgtaattgataatctttattgtatagcaagatgacagagagtagctagagtattgtagagaagttaattacaatattatactttacataaaagagagagtaagaagaatacataattaggagacatgattgatcaaatcatttactctaattgatccttaatattacgttacatatataatccaaaataagcaatacagaatttagaaagtgaatataagaaacaatcaaaattaacctttgtttgaacggtagcggttttagttactaggtttggttt

SEQ ID NO: 34146 - DNA, 987 bp, Arabidopsis thaliana landsberg
catcaaggttgagtgagcttatggcactagctgaggcaggattacgtgctcaagaggaagagtatgagtttatgtctcaggccgacgaagaggtagaggcggcttattacaagaagaagtctgatgaggctgaggctgaggatgagctattctcccaagctgcagatgaagcagaagccaattattacaagagaactggtgacaagtgtgatgcaggacaatgcagcaagtggaatgaggttgtcgttgaggattgcgcgacggatgactgcgaagatgagttactcatagattgtgattcagacagaagaaacttgtagcctgttatgtagtattttcggatcaaaaataatttagaactctgaagatgcgttacttattgctcgttatgttttttccaatccacaaaaaaaattcgcaagagttttccatgttttattaacaaccacaattgaaataatcacatattataagatatcaccacatttcagcatataagacatcacaaataacacagaatagcacaaagtccaggataaattaggccttaatacaaggtccacataacatagtccagatcacaaagttgacatcacgaggtccagattacaaagttggcatcataaggtccacatagccatgttgcatcggctccttttcctagtaccacatttgtcccagcgatgcgctggatcagcactgtatatcggaccggtgtacgttggccactgtgactcgtcaagaaatggctcaaaacgagggctccaagtacgtactaagctctgcacactgaactccgaagggatcacgccctcaaatggaaagttacgatgacgtgcggcggcaacataatgagaacatggaaagtggtactgtctaggggtccacaaccacacgaaaatgcatcaaggtacacaacatgtgtcctcgaaggccgcactcaccggcggaagttgtgccaccatcgttcttactcgtatttcccaa

SEQ ID NO: 34147 - DNA, 574 bp, Arabidopsis thaliana landsberg
atacttatagctgatagagacagggatagctatttagctaaaaatttttacatgaagttaatttaaattagaacatattcaattaataatatatgagacatatttataaggaatgatgattttaaggcgggttttaaaaactcatgtgtttgcgggtatgggtagtggaagaacaaacccatgctcacgtacccgttggattttcatttgaacccattaacaaaccaatgggtagagaaattgacccaaactcataccctaataaagcaaaacacaccggattttgggtagcgggtacccattgccatctataactgggtcgtggatcgtggctcatggtaaacgtggatgtggaggtggacgctcacgcgtacagtatctaatacgcattttcgtccaaccttctgcattcacaaagagagtgagagagcatgcctatcaaattacaaagagagtgggagagcaagcctacaaaaataccgcgtacatctgcttacatgagaaatactgttgtttacggctaatgtgagtagcgatacacacatgcatatacatgttgtcacatacaacacac

SEQ ID NO: 34148 - DNA, 1003 bp, Arabidopsis thaliana landsberg
  unsure (1)..(1003): unsure at all n locations
ggccatgaccgtttccgccggaccacccttattgcgcccaggctaggccccgagcctctagtgccccgccgtggccggccttctcgtctccagcgagttatcaccgcgggaccgagcgccgccgtcgcgcccatgcccacccttggtcttagatcccggccgttcgtccgagatcggacaacttagatttaacccgagcaggtctaatcctagccctccgatctgaatccaactgcctctctctcttcccccttccgcgtgtctctgcctctaggcccagctggtcggtccgccctggctcgctgatggactagccccgcttgtcagccacggccgcgcgcccgcccgtgcgatctaatctgggccgctgatctttgatttgatggctgagattaccctgtaccctttcgcgtgtaagttntgcttaagaaccccctggttttaggaaatcaacccgccatcctctattttagcgcataggcccctggtttctagcccttggacttttatttaattacagatttagccttaatttcatatttcaaacttcaaaacttgtttatttcatatctttttcatatgaactccaaatttagtggttcaaattgcaaaatgttcacaagattattctctgttcaaataaaatatgatcaaatgtaatctgtatactttaatttttacacttggaatatatgattaaagtatatgttgatttatttatttaatttcaataaataaaaggagaattctaagaataaagtacattcaatcttgtgaggttagtgttatgcatcacttggatttatttttggacttaacctttaggccttaataacattaacaaaattaggaatgtaattatggataatacctaaaaggtagtcaaatttctaaatgagaatagtttatattataattctgactttactttgttttaatcactacttaacctttttgaactatgtcccaaacatttagagagtaatcaattccccaattagga

SEQ ID NO: 34149 - DNA, 675 bp, Arabidopsis thaliana landsberg
gactctagaggatcccccgattcttcgggccttctcgactgcgtcggtgacagaaccctatggacgagtaagagtgcgcgtaaggctaaggctgaccgagccgagggattcctacgcctccgggatacgaatacatcactcatcaccttccatgaaaagtaactctcgctcgcacaaacaatttctgttaccgacaaataagtccagatactcgaaacaaggggaaaagaaacgcaactttacaacacgacgatggtgtgtttgggcctcggcagtcgcagaaaacacacactacaagataatccgatcctgcaggctcggatcttgacaattgaagggagcagcagcaccctcggcgtcaactacaccttcggcgaggtccgacctagcctcggacggcgacacggtcggaggatctccgctccgaaggacgacgtcatcaccacgcccgggcaatcgctgccatggtcttctccgagaatccggcccaagcaggcggctcggcttgtcacccctggggcctcggccaaccatcttccaagggcgccagcccggtccgaggcctcggcagatcaactccggcgtcggtcccgctgacggacaactcgactaggctccggccaaccaggtttcattttcgagccgactccgcctctgttcatactgatatcgcta

SEQ ID NO: 34150 - DNA, 588 bp, Arabidopsis thaliana landsberg
gtgacgcgaaagtgaatgccaagtcagcgtgaacagtacgggaatattgttcacctatttataggcacgggtcgcagcccatgcaaaattacatccaggccctttgcttttggcaataactctatagtaatctatctaggtctagatagtcttttcctctttaagtcggtttcctcttttctgccatcatgccgaagctcccttgcgcacagcttcggctctgttccatccttcgtattctttccgtgcttcttcataccgtgggttctagtccgaagatccctgtccacacattatactccagagacattgttaaatcatatttttgaggaccttcggaagccgcaggtacccaacagtagcccctcgcaatattaatttgttagaatgataaattcagattgcgacatggacgaaggcctcaagccgaaggtctgaataaacaccttccctttgctagaatagcaacagtcattgacaagcgggaccctccagttttaacgcactaggcgtataaataagagctaccacgagttcatttggcacgctttcttgccatctgctcttgctcaccgaatttttagccct

SEQ ID NO: 34151 - DNA, 525 bp, Arabidopsis thaliana landsberg
ctacatggcgacttccacaactctgcacataaggacagggtatcagtgaaatctgtagctctctgatgttgagagaaagctcggctaagacacggatctaaaggggcgaggcaactccagcgccaacatggttcaaaggaaccacaacaagggcaaaggaaagccaaaatctaacaagcccaacaaaactaccaacttcaagaagaagaagaacaaggctgaattgacatgtttcgcatgtggcgaggcggtcattttgccaaggattgtcccgatcgagcggatcgccgtggcaaaaagggcaatgtcaacacagtggtcgctagcaatgaggaagacaaagggtatggtaatttaccttttatcttctcagtatttcaatcacctagctggtggcttgatactggtgctaatgttcatgtgtgttctgacattaacttgttctcttcttatcagggcgcccgggattcttctgtgctaatggggaatgggtcacatgcttctgttcatggcactggcacggtg

SEQ ID NO: 34152 - DNA, 923 bp, Arabidopsis thaliana landsberg
cacattagttgtctgtattacacacgtgataagacagagcaagaggcacatataagggtaaaggttttttcatcaacacattttttgatggaagttaacgtctgaatctagaactgaaaactacacatttcgacagaatgtaaaagccattactactactagttcttacaaagaaacaaccctccctacaagaattagtctaagacctgcgcaagttaaggggaaacgcacttggatcgagctcaacatagcctctaagagctccatctctctctccagttaagcggaatgcaggaacataatgtgagaatctcaacaattcataccttgggatcttctttttcacatcgatgcctccttccaatttttccttgaatactgaaataaacccatcaacctgttccaacagcataacctcgatgtgactgtcattgtcatcaagaacctcaacaacctcatattcacacctcttcaagcttgtggccttgattgtttcactccagttcttgtacattgcccaaatttcgccagtcttggggacaacaatgtactcgtttatcctgaaatgcttttctgccttaatctgatgtgaaaaatcagtcactttagtgagtgtctcgtcccggccttccttcaaagtgaaatttccgcaactgactggcattcttttgtcatgccactgtataacgttctcaagcaatgattttggctctagccggtttatctgcaacttgaataccggcctccatactatctgctgaatctttgcgtaacacttgggcaagccatcctctttgctgttcaatgaccatatctgaccaggtgcaaactttccctccaatctttcagcgctgaagttgttgaactggaaattaggaatgacgatacagtctggctccatgaaggtggagagtatgattgac

SEQ ID NO: 34153 - DNA, 1734 bp, Arabidopsis thaliana landsberg
  unsure (1)..(1734): unsure at all n locations
atagtatagaactcaaatctttttattaattgaattcagaactttgtgctcacatatgtcttgacaagccaaaattttccaagaaaaagagtgaaacgcatggaccaatatatgtcttcctattttcgtcgcttttcacacgaagtccaaatttgcttcttgcgccttggtggcacgactgtgagggtccaagtaaagcaaaaattaattagtcattacaaaataattgcccaaaatatcaaaatataaagtatttaagacatcaggggtgatgtcatcnggcccatccaatcttctccgaaattctaaacatttatacatcctgagaatggtcacaaattctctacctctctctctctctctctctggtagagaaaatggagatatcagttgcatcggtaacagtttctgtagctgtagttgttgtgtcatggtgggtatggagaactttacagtgggtttggcttaaaccaaagatgcttgagagttacctgagaagacaaggtcttgccggaactccttacacgcctcttgtcggtgatttgaagagaaattttagcatgctggctgaggcaagatccaaacccatcaacctaacagatgatatcacaccacgtatcgtgccttatccgttgcaaatgctcaagactcatggtatgcttcccggttggcatcttgattcctctttgtttagaactattttgtagagtatctagaaaaagtttcaactttcgtatctctatgtggttgaaacagggaggactttctttacatggtttggacccataccaacaatcaccataatggatcctgagcaaatcacagaagtgctcaacaaagtttatgatttccagaaggcacatacgtttcctctgggcagattaatagccactggagtccttagttatgatggtgataaatgggcgaaacaccgaagaatcatcaacccggctttccaccttgagaagatcaaggtttaaaggctttatcttccatagtccccaatcagattagattgctttatgtatgtatgttcatttggctctgaaccaaattgtgccttctgcttctatgtatagaatannnnnnnnnnnnnnnnnnnnnnnnnnagcgagattgttggcaaatgggacaagttagtgtcggataaagagtcatcatgtgaggtagatgtttggcccgggcttgtgagtatgactgcagatgtgatctcccgtactgcttttggcagcagctgcgtagaagggcagaggatatttgagctccaagcagaactagcacagctcatcattcaaacggttaggaaagctttcatccctggatataggtaatgaaaaactcaacttatctgatttaatataggtccttctgagcttgactcttgatcttaaagtgtcgcaatctattccttaaagatatgaatcgtgttaacattatctttctgccaatctttttctgtagttatctcccaacaaaaggtaacagaaggatgaaagcaaaagcaagagaaatccaagttatactgagagggatcgttaacaaaaggttaagggccagagaagctggtgaagcaccaaacgacgatttactgggaatacttcttgaatcgaatttggggcaaacgaaaggaaacggaatgagtaccgaggatctgatggaggagtgcaagttgttctatttcgtcgggcaagagacaacatcagtacttctggtttggacaatggttctgtaagt

SEQ ID NO: 34154 - DNA, 1040 bp, Arabidopsis thaliana landsberg
catgcgatctacatctgcatacatacatacatacatacatattacacatgaatgcataacatacatatactgtatatccatataccacataatatatttatgcatgcatgcatataaaaatatgtataggagtttcattgaatgtagccacatggttgaatttagaaagagtagcgactcgtaaacttaaacattgttctatcgtaagatgcttggtaaaatcggtgttgtacatgttccttcgttgatatcctctcctcaacactacaaaaaccctctctagctactacattaattatcatctcaaatcccaatagagcagtatattatttcctcgtatatatttagatttagttttaaaattgatcaaatggttatatactccagttgtgtgtttgtttttttgttttggccaaaaattggtaagatctcaaaaactggtataatcacttgagaaattatatgatcaccaaatgacaagttgttgtcactagcactggggcttgatatatatcatattctgatgaagatacaaactcaacaataatggaatcaatatgagttttctcaggttgcatcaactaatgaaacaaatttaaagttggaaaaaaaaacaaaatcagttgaagtctaaaataaagttgagaacgtttgattaatttcgaacatcgagatttaacagtggttgggtaaatattatgaaagtgaaggaataacaaaaaaaaacatgtagaagttgatagaggaggaggatattttggaaatgaaagagatgggagaggaggagtggtgacaactgaagataaggaaaaaggggaaaaggacaaaaggatgaccacacacacagacacatgtgaacaaagacagacgcacctgcctgctcttccttcttctttctaatattattcattttcatttgtaaagaaacgactttttcaaaaggtgttaggtagatgcaatagaagcttctatcagattttcttctttcttttttttatgtgataagttgtgagtcttgtgactctttctggctttccctt

SEQ ID NO: 34155 - DNA, 4147 bp, Arabidopsis thaliana landsberg
cagataattatagtttcccgccattataagaccaataataaaactaaatatattttttaacgttttttttctttaaaaactttttttcttacaggtattatttgtcttgtgtttgtgttgtgaatgaattttgtgtacgtgaaattttcattatataggaaattttagagtgactaaaacacgactaaatagtgtagtcgactaaatagtgtagtcgttaactagcgactaaaacaggtacaacaacttacaaaatgaaatacatgtgcttttttaatcgataattacgtctattttgcgactatatttaatgacacgccggagtagtcatacaatagtcgctagttaacgactattacggcgtgtcgtatattagtcgcaaaattgtgactaatttacgactaattttggcgactaattacagcgtgtcatataataaacgccctaaacccttaaacctaaacactaaacctcaaaaccatagaccccaaacttgaaaacctaaatcctacttaagcttcaggaatccggttgcggttctagttcttatgctcaacgatacacaaagcatctagtcatatttggctataaatccgctaaccaagccacttcttgattctcaaagctttgatggtaaagtcaatgatcttatgagtttttggtcttgaatcgtataacaaggaaacactactttacttttcgagatctcgttgaggttctagttttatatattcaatcatacacatgacatctagtcatatttcactacagagcactaattaagcttctctagcttctcaaagctttgatggtgtagcagaagttcgtatgagtcggtcgctttgtatcttccaacaaggaaacactacttaagcttttaaaatccatttgcggttctagttcttatattaaatgatacacatgacatctgtgagagtcgaaactcgcacaagagaaattgtactaagggtttcttcaaagaacggatctttgtgagtttctcaaagaacaacagaattgttgattaccgcggacggtgctcttagttatattattaaaataatgaggatttgatcgtacaagtgtttagaaatatgaaaataattgtttttgctttcaaaatcagagcgtttttgatagcctgaggttgagagcatttttgtgcgtgtcccttttacttgtcccttgaggcgctttatataaggctttgagccacccctcgcgatattcttgggagattcattattatctttgaggcagcggtgatagatctttatcttctgaagatctttgcgggattttctctttattgctaatatccttaaagatttccaaatatcatttccaggtttttcggacatggtatcttgaccatgcgtcgggtctaagtctttcccttaggtttgagatgttttggccttagtgtgaagtttcttccgagccgggtacctcttgtcggtttatagttgaacggctcgtttcacgcgagttagatcgtttacccgaagcgtttccgaggttcgcctcggggcggtatcctgaaagcacccgaggccttgctaaggttggctccgaagattacttgcagggtccccgaggtgttttcaaggctggctcgggatgattccttgatgcgatttccgaggtacttgtcatcggcctggagtgtgtgtcctggaacgattcccgagccaaagtatccgacagatatgtttccgaggcgttctcggagcttatttagttggctcggttcttacgaaaccaaatccgaccccaacagtttgccccccagcttgttgtctttgtttatgagcggcgagtttcatgcagttacataaccgagccggcggtatgttttctcagttcatgatctctggcgcttcgaattcccggacggtcaaacttccatttatgcgcggtcgccttctttcttgagaagtggaaacgtctcgcttattctcgaggtttgcgcgcgtattttctcctaccgagctcacgcgctgttgaggtgttttaatttctccttcggacccgacgcgcctttatgcctctatatatattgagctgctccttaggactcatttatctgaagttgccgaagaaaaaatttgaggtttgcttctttttctcttatcttgatttctttgcatcgtttttctttttccggtagtattccgccattgtttgttagcattttgatttttccggctagaaattttccaaatcctcatttcgtcagttgactcagagccgaagatgagttttccacgaaacagcgtttctcccttggtttccaacaggctcgccgactccagcgattccaatcaccgagatgatcttcccccgatttacaagcgtcgaatggtttggacttcatctgagggctctgaggctgatgcagcgtcgtcttcgaatgcatccgaggcaactccctttgtggctcgggaggacgctactgctgatattgctcgcgagctagatttgcccgaagattccgagtcgtcccttgttcgtaagctccgtgtcccagctgctgatgaggccggtgcttcgaattggcaggacgtgaccgagccgttttatcccgaagttaagatcaaagagcatctgtttttcgggcctgatgagacggagaaccttgttcgagcgttcgagtagaccgcttttgagaaagccgagaaaaagaagaggaagaaaaacaaaaaggtggttcggccgaaccctcccgactcatctttatccaccgagtagtcgttgtctgacttaagggctcggttcagttttggcaacgtcacccttcgcgttcctagcccaaatgagcgagccgacgatcctccagagggctttctcactctgtacgaaggatttttctacctttgttttctctggctgccctttccgaggctgattctggattacgtgacctcgtatcaaatagccctctcttaaattaccgctcgatcgctaagaaatctcatcgggattcgtgtgcgtggttatgaaaccgagagtgaggtcacgcttgctcacctccgaaattatttggagatccggcgagttctgaagtccgaggcagatagatactatatttctcctgctaagaacagaagattatcgaggattttccgagcaaggatgatgcctacactgattacttcttcttcgtggctttggaggacgctgtccttaaagatctcgtcgggaaagttctgacgaaatggggaatttttggtagtttagacattccgtgaattgacttgtctgtgcccgaggtgattactgtaatttatgctgacattattttgttgatctgtttccacagatcgcccaatcaggtttctcgagccgtgtcatgacgatctcatatcctgtcatcgagagctatcggcccacaagtgtcactggacgaagcacttctgtgagaccccgtcccggacgtctcggcgtccggcgacgttggactcaagttcgcgcctcttcctggccgaacctcttaatttttttgcgattcaacatagaattgcctttacgaggcttaattctataattgctctcttattacacagcgaaagtctttctaaccttggtttaattccaaccaactcttgtaccggtttcatcgtctttgtcccttagacttagatcgatcctttacgcggtcaagacatgcatatgttcgctaaccattctaagccaaacaatcgcatattcctttatcctactttcagtgtcaattaccaaacgtctatcttaactaataagctagatcgttacataccttggccaatatgcggatttgattccttagcccgtttgtcgccttactccattcgttcaacgactcatatccgatcgtgaattgatgaaccaatccctatcgttacttagccatacaaccaaccaaccccactggtctaagtacaacgatagagattgggatcgtacgattcccttggttcacgatggccgaatcaagctcttggcttattggtccattcgttctccaaacgtacgcccctccggctacatggtggacgattgagccctcggcttataaaaccatccatgtttccgtttcggtcgtttaacactatgaccgcccacggtttactaaccgtttacccgtccggtccatggtggtcgataa

SEQ ID NO: 34156 - DNA, 846 bp, Arabidopsis thaliana landsberg
cacataaagggagatggaacccacaagaaccagtaagatctaaagggacacaagaaaaggtcaaacgattaaggaggaaaaacgaaactacaaatcagggttctggcacgtgaattgcacacttccaccccttcctatccacgacgagctctttatcaatattccactccttcaggtccctcttcacagcctctgtccatgtcaaggttggtcgacctctacctctcttcacattctcgggacgcctaattattccgatatgcactggtgcctcttcaggtcttcgttggatatgtccaaaccatctcaaacgatgttgcataagcttctcctcaattggcgccactcctactctctcgtatatcatcattccggacatgatctctccttgtgtggctctctcgtatatcatcattccggacatgatctctccttgtgtgcccacatatccagcgcaacatacgcatctctgtgacacttagttgttggatatgtcgtctcttagtaggccaacactcagccccatataacatagcaagcctaatcgttgtcctgtagaacttgcctttcaacttctttggcactctcttgtcgcataggactcccgttgcttgacgccatttcatccaccccgcattgattctatggctaacatcttcatcaatatcaccatctctctgtagcatcgatcccaaataacggaaggtgtcctttggtactatctggcctcccaaacttacatctccctcctcactaattgtagtatcaaagtcacatctcatatactcggttttggtccgctaattctaaatccttttgactctagggtctgacgtcataactcta

SEQ ID NO: 34157 - DNA, 759 bp, Arabidopsis thaliana landsberg
ttttgcttttcatactaattcagattgtttactcggtggcagggaagtatatggaaaatgaaaacgtgttaaaaggggacttgagctggcacaatgaattctgtccatataaaggcttttcttttctaaattctaggatctcttgtatattataaattctacttgagactttaatattttcttttcatataatgtatcacgtggtcacaagatgcacacaaaaatgaaaaccagcatgatgcataatttagtggcatatctcttattaattatttgtttttaagtatggtgttcacatgtgatggtacataaaggccaaactcacataaagagaaattgtttctctatttattttatctctaacaaattacaaatcaggtattacagctgacaggcggcccccgctgtcatcctctttcgcccgcgcgctctctccctcccgctgcccagtgggcagtcctgtcggtgtcgttcctctcgcacgctcgtcggctctccctctctctgtcctgcggaccccacccgtcagtccgtccccaacctcccgcccatgtccctcgccatggacgcgcccacgaccgcgcgttctccgaccacgttctcgagtccgtgcccctttagaaaccgcacgctgctcgcccacttcccctcgctcacttgcgccctccgcagaactctctcgcgccctctcttgcactgcgcaccgaccagacaaactctgctgcagctcacggagactgcgtccgttctatgaacccg

SEQ ID NO: 34158 - DNA, 616 bp, Arabidopsis thaliana landsberg
aacggaggtagcggtaatctccatcaccaccatcacagccacaacaataaccatcagaggtatgaataattttccgccgacgaaagtttttagatcgtctccttctccggcgccggtatcacctcttgtctcgacgtggaaagccgccgacgagatgatcggtgtttcggttcctagaaaagctcggtcaggtagagaggtggaaatttacatttgtaaacatatctctcgctgatctatctcgattgacagttcttctaatctcttcttcgatttttgtagcgtgtacgaagagacctcatgaatcatgggcgtcaagtactaccggaggtggtgtttttgcttccggtgaacaaatccatcggcaaatatcatcaacgtctccagctaatagagttagtccggcttcgattttagcatctccgtctcctcctgctcctacgtctccttcttcatcaagcatttccgtcaggaaaaaattggttagtctctcaaaatttacactcaaatctctccatctccatcttcttctttgactaatatattttttgcttctagccgtcggggacgaaacagaagccgtttccgccgaagtcttcatcgagtaagttatcat

SEQ ID NO: 34159 - DNA, 5249 bp, Arabidopsis thaliana landsberg
  unsure (1)..(5249): unsure at all n locations
cgatatttaatctaaatctaaatatgttttcctctggaccattgacttctcatcttcaagctgcttatcgagtgttacgatacataaaaggcagcgttggtcaaggtttattctattctgcatctgcagacctcactcttaaaggctttgcagattcagattgggcttcatgtccaaacagtaggagatctacaactggtttcagcatttttgttggtgattcgttgatatcttggcgttccaagaaacaacatgtggtttccagatcttttgtagaggctgagtaccgtgcattggcattggctacgtgtgaactggtttggcttcacactttgctcatgtctttaaaagctagctacttggttcctgtgttatattcagatagcacagctgctatttacatagccacaaatcctgtgttccatgaaagaacaaagcacatagagctggattgtcacacagtttgggagagactggacaatggcgagctgaattactccatgtgcgtatagaagaccaagtagcagagtaaattcatttctgttgataaacgaagaaagacttagtctttgggtaagtttagcttttgtattagcatctataagttatattttcttgtttgtaatcccacttctcttgatgttttcttattgcagttacatggaacattacttgcacatattcgcagtttctagcacgaaaaactccgtcttgttgtggatctcactctcatccttctacaatgaaactatagtaccatgcccaacttgttcttgtggatgtcaaaatagttctcaagcaggtacatgtgttgagtaagttcctatactcttagaaactccatcttggttttgttttcttgtttcttttttgattcatttcttgtgacagtccgaaaataacttcggtagtacctgtagtgacccgcatacgggcatcgggcacagccaaaggacccaatgagaaaattttgcctaaatgcaaagccaattaaccgcgtgtgtccaaacggtgccaaaacattaaagggcaagaatgggcacaaatgggcaaagatgggaaaagttgggcgtgccgcggtgaagtttgccccgcccgcggaaccgacatgagtagggcacctcactcgcggtgccttgcggctcaagtcaccaaccttggagccgaagtcagctgagccttggagacgaagttgatggggcggtggagtgacacccgtcgccacctgtcaccacgccgtcgtccgagacacctatcgcttgtgggggcggcagctgtccgcacatgtggcagcgggcggtgctgcatggctgaccttgggcggattataaatagagctctctccgcccaatttcatttttgaaggcaaaagagagagactgaaaggctctccgattaaaaactcgacagaaactaagaaaaacttgcccgaatcgataannnnnnnnnnnnnnnnnnnnnnnnnnngtctgagactagagaatcgttgcttgtggccaagaaaacctgactgtgagtaagggatcacgaccgtgcttgagaagttctgcccgagacccagaaaactttcctaactaccgaatttgtgagttgtgatcgaattgtgtgtttgtttgcatattttctagagctagtctttaaattatatgcatgcttactcagttagacttaactaatcggaattcggcttaagttagaacatgaatcttaaagtgaatatgggcatttgaagaacttgataatactatcactaaggaatggaacagactggtgcatgactaggctaaatgaatatggacttaactaagtttacttgatgaattgagatatgattcgagggcttacttgccttgtgagattgttatacttatatgagatatgctatgaggttgtgaataaatccttgctatattatgtatatatatatatatatatatatataaatacgtgatttggtacttgattttgttatacttgcttggggcatgttaaactactgatatatagtactgcatgaggttattgtgtctaagtggtattcagggtttaccggatatcatcatgctttaagtaagctgttaccttcctttttgtgttgtgattgtgtcagtaagtcttgatcctgagtggtcacttacatgatggcacaagtctcgtagcgtatgtcgggtaatgcatgacgatgcattaaagtgatgttccagttataagctcgggtgttcatagttgtgtacgtacgtgtggtgtgggtgtggacgtacatgtgtgtgatagcatacatgtggagaaaatgtatacacgtatgcgggagtttgtgctgatgttgtggtgcacctttttggtaaggtttgcagtattttgggccaaaggttcattcatgtgtctagttcggctgcatattctggtattattataagtatttgataatacgtttattaggtactctatgatctctgatggataagtttacctattaagttgattaaaccctagaaatttatttgtgcatagacccagctcactaagtaatcttagattactcatgattctacttgtcttacatgtaaccatagtgggatgaccatagtgggatgaccatagcgggaagacaaacactaggaaatgctggaaataggatgttttacgttgcctctgcaaaattacttgttattatgtaaattttaacaaggatccgatataaagatatatttttgggtaactctttgccaagtataagctttatactatgcatacagtgttttcttaaaggcagccgagtgtttaatgatataagacctagtccgggtcgctcaacaccagaatatcacgagggttggcagacctaagtggtgttcctagtgggaggagggtcgattataatttggtttaggaaccggattcatctggaacctctactaagttgtgatcgatcatcttcactgtagcgtaaatgggtcgcccgtggcttgtccggccataggacgattcgggggcgttacaatttttggtattcttgtggacacttgggttttcaatgattttatcgagtaaatttgagtcacagaatgcaacattagattccggttgttcgtcttttagatgactaagtggaggataggtttacctcgttttgcaaatgttttctagcaaaggaagcaacactttcagttcgttgcacggtcttaatgtgcccaaccccgaaaactttgctccgccgagcagtacggacgatgacagtttgtctgtggccatgaatgatcaaattatggccgaagatagtaaatctactaagtccgatatgtcaattgaatctgatccgtctgaatgttcggagaatgatgatgatcatgatgacccgttatctagtgaagaagcgaaccatgttgagtggatgatcaccgatgatggcaatttatttcgggctatcaataaaccaattttcaccgattttatctatgttttaggtataagattttgagtctttatgttatttctcgagtctttttagtctcttttcaagtattctatgcaatgggacaacaatggagataaggagatattttggagcaagagctaaggaaaaggaagctaaggacgattttggattcatgatcagcgaggagtgtcgagcgacacactcttggtgttgatcgacaccagtttcggcccagcaaaagtcctagacgctttcgagtttatagaagaggaaatttgccccagaagacttccctatttgcattattagtccctagacattttagggtttatatacattgtttagacctaagttttcattatctagtttttatcatcaagttttctgcaaaccctgttactaagagacataagctattcatcgattgtttttagagattcatacagttcttaatacagtgaagagatcccttcttttcccatctatatatgttgtgtttatgctttcatactcaaatatgttgtttgtttcaatcaatatgtctgagtaatccacttgttaggaatagggtttctcattagggattcatatggtttagtagattgcccccttttgctaggttatctgtagaattcttcatctttgattatacataatgctagatctaaagtaattaactagatcttgaatccaaataatagatatgcccaccataggtatctgtagttagatctattatttgatgagcatggtttataggtgtgtaataagaatcggcctgtctactaagatgaacaattgaactcgtttagaatgcatgtttaggttaaatatctctcggcttctccggttattcttagctataggcatagggagtttcgcggaacgcacccggttattccataattagagtttgagtttgagaatggttcgataacaacctagctttcattagatctactaaccaatagtttcctgagaattctctattcctagctctttctttcatcgtttacaaccaatcaatctgctgtctttttactttgttctcttttattttcagtcattccctgctagcttaatcttgacatttaattcattgtgtgaacaaaagaactttgtggaaattcgcacaaaagaactttggggaaattcgacccttaaatactacaaccgatctcttatttgagagagtaggtttaaggcaatttgagccatatcaaatttggcgtcgttgccaaagttcttgggaatcaccattgagttttgtttagaaatttcgtctagtttttatttttcttttctagtcactcgtttcttgttttcttcttttctgtgtttcaggtgtatgccaaggcaaacaaggagcacaaaatagaaggagcttatcaacttgtctgttctagacttgggaaaacttgaacgcaccaaacgaaaaactcagaaattagcaatgactgacagagtcatcagagctgatgtagaaggagttttgagagttgaggatgggcaagcctacaatgaggctggtcagagattggatgatcatggactcatcctacctgaggacgccaatgaggatcaagcgcgcctcaatgcgcaaatagctgccagagacgcagtagggctcgctgtcgatcgacataacagaggtgtcgatcgacaccatcgggagcagcacgacgacgcgattggtgtcgaacgacacaatagaggtgtcgatcgacaccaacaccagattcctgcagctattcctccagttgcggaaccacgtcgtactcttggggattttaacaggcctaacctgttcaat

SEQ ID NO: 34160 - DNA, 706 bp, Arabidopsis thaliana landsberg
aacgcggttgattcaggagcgtccattagaaaaatctcgatccatggaaaacggaatgtggaagtcactactcactaccaacgaactactccaagtactaaaagctaagcaaactcacgagatcgtgtctttttaaattaattattaatctaaacataaaagtttataactttctgagattttgagagaagcatcatcatcaaccaattgggtttaaatcagaagagaagcaatgatctccggcgacacattatcagctaaaaaacctaaatcagttccacaagaagaagaccaagacccaccaagccaatcaatcgcacttctcgacaatcacacagattcctccggttctgattcttccactagaagcatctcaagctgcttcatcttcacatctctacttctcgtcacctgcatcgctctatccgccgcttcagctttcgccttcctcttcttctcttctcaaaaacctgtcctttccttaaaccaaatctcaaagtcaccagctttcgacagatccgtagctcgtccgctcaagaaactcgacaagcctgttgttcttttgatttcatcagatgggtttcgtttcgggtaccagttcaagaccaaactaccgagcatccacagattaatagccaacggaaccgaagctgagactggtctaatccctgtttttccgacactaacttttccctaaccattactc

SEQ ID NO: 34161 - DNA, 2517 bp, Arabidopsis thaliana landsberg
  unsure (1)..(2517): unsure at all n locations
accaaatttgaatgaaatattcttcagtttgagatatggacaaccaaggctaggattatctctggtttactctccaatccgacaatttctctagacgctatttcgatttggtattttttcacttacttatcaaaataccgatgaatctcaatggtttcttgactagttgagtcattttgcagcatgtattacttgaattgggatatgcagttcatgcttggtctaagtgcagcaatcaggtattaacaaaatgatccatttaaatcttcagtcgaaatgatccatttggaagcatcataccgtttttgtgtttttggtcagtgtgcgagtgagcaatgagctaggagcgggaaatccacgagtggctatgttatcagtagtggttgtcaacatcacgactgttctcatcagctcagttctctgtgtcatcgtgcttgtgttccgcgttggccttagcaaagccttcaccagcgatgcagaagttatagcagccgtctctgacctctttcctcttctcgccgtttccattttcttaaacggaatccagccaattctctctggtaaaatcacaaaagagaccctcttgtgaatgcttgattgatgctttggtctttgtggattgatttgttttgttgaattggtaaaaaggggttgctattgggagtgggtggcaagcagtggtggcttatgtgaatcttgttacgtactatgtcattggtcttcctattggctgtgtccttggcttcaaaaccagtcttggagttgctgtataatctctttctctctttctctctttctttgtatttatatgtattgtattatacataacacttgggagatttttctttacaggggatctggtgggggatgattgcaggagtcatacttcaaaccctaactttgattgttcttacacttaaaactaattggacttccgaggtaagacagtgacaaacctctctctctctgtagtccaaagttcttacctttgctctgcatctgttgtaggtagaaaatgcagctcagagagtaaagacttcggcaactgagaatcaagagatggctaacgcaggtgtttaagataacagcaacagtgactctgttttttttcccctcttttggtgaaaagagatataagatgaaataagtaaccttttgattcttatgaagttatttgaggattcgttaactacagagaaaaataatggacgacctacttagttctcttctgcaaaatcttatcctgcgactttagatgattacaaaaacaagacttttcgcaattttcataaccccacaagttcttccgtctgtaagctaccataacccaaagacccttcttgtggtttatcatacaacacagtttctcttgcatcatcatcatcgtcatctccttcatcctcatcgtcactagattcactacttatatcttctaccccctcttcatcatcatcagatccataaactctagcaataatggttgctgtctcatttctgataccagtaagttccttagcttcctctagctcatcttgagttgaagccaatgataaaagcacattcttagctttctgatcaggtggtaccccacagctctccatctctttataccaaccaagagcacttccgaaattcttgcacctcccagacgcatccatgatagttgttaagatggtttgattagctttgattccacttaacctcattttctcatatacctccatcatcttctcaacatcgttcgctttcgcatacccttttatcagtgtcccgtaggtgactatatnnnnnnnnnnnnnnnnnnnntttatcctcttgaagaatttctcagcaccctccatgtcagatgcattcacatatgctgataacatagttgtgtacgaccagaggtccgggaaaattctgcgagggaaacatgttaattgcttatcaattttcaaacaagcaaacaagatggaagtattatttacctgtcccgccgcatgctcttaaagacagtctttgcttgctccaccatcccagaaatagcaaatgcatccagcattattttataagctttatgtgttggcctgaaagataaaaagacaaataactgtaaacacttcagctaaaacagcaaaagaatagacgtttggaagccaaaatacaaaatccaaaaaactaaccttacaccagcatcaagcatctcttcaaaaacagatagagcttcttcctctcttctggctcttccatatgctttgataagtaaagcataacttacaacgtcgggttgaatatcagatctttgcatctgaaaagttaaacattttagttaaaagggttagatcactactattacaggccaatacataccctaatggtaattctagtatatactaattacttaaaagaaaggaatcattcagatcacctggtcatagatcttagaaacttctttataactagtttcgaaagacataaggctattgtaagtgactgtaaactggggaactcctttcccaaccattgaagaaaata

SEQ ID NO: 34162 - DNA, 653 bp, Arabidopsis thaliana landsberg
aaacttatgattatggagaatgctactgattgtaaagtcactcttttggaaaagaaggtacccatggagttggtgtatgtagatgaaattataacggtgggatcatctcatggatgggtagcttctttgaaggacgacggaatattgcgtctccaagacgatctaaatccatatgcatcgtatacagaccctaaacgcatctctctgcctccttttgtaactttgcctcgttgccaaacccaaattgttaccaacgtggccatgtcctcctcttgtcctgaggatgagaactgtgttgtggctgtcaaattcttgggtcctcaactcagcttttgcagaccggcacaaagtaactctgagtggaccaacatcaagatcgcaagccctagcttcttctcgtccgatgtcatgtattccaagaaagatgacatgtttcgtattcccggatctggaggccacctcatcggatcatggggatccccgcacaaaagatcacaatcccaagattcagaggctgcgattccgaaacctttccgagctacctagggccaagcgggagcttctggattcctgttacaggagtgaacactggtgggagtcaagaaacaccggtgaaaactttcttggtaaagccggtccaaaaaggcccccac

SEQ ID NO: 34163 - DNA, 3285 bp, Arabidopsis thaliana landsberg
tccgtttatcagctcactactatttggtcgaatctcagaaaactcagtaaactaaaaatccaccattttcaatggaagacaaaatccagtcagatgatttcacttcccataaaaacccaactcttcctcaagtcattgaagagctaaaagagctctgggctatggttttaccaatcacagcaatgaactgtcttgtctacgtgcgcgccgtcgtgtctgttctcttcctcggccgtctcggtagcctcgagttagccggaggagctctctccatcggattcaccaacatcacaggatactctgttatggttggactcgcctcgggtctcgagccagtgtgtagccaagcctacggtagcaaaaactgggatctcctcacgctctctcttcaccgtatggtcgtgattctcttaatggcctctctgcccataagcctcctttggatcaaccttggacccatcatgcttttcatgggtcaaaacccggagataaccgctacagcggctgaatattgtctctacgcgcttcctgatcttttgaccaatactctccttcagccgttacgtgtttatctaaggtcgcagcgagtgacgaaaccgatgatgtggtgtacgctagcagcagtggcgttccatgtgccattgaattattggcttgtgatggtgaagcattggggtgttcctggtgtggctattgcgtctgttgtgacgaatttgatcatggttgtgcttttggttggttatgtttgggttagtgggatgttgcagaagagagtgagtggtgatggtgatggtgggtctactacgatggtggcggtggtggctcagtcgtcgtctgtgatggagttggttggagggttgggaccgttgatgagagtggcggttccgagttgtttggggatatgtttggaatggtggtggtatgagattgtgattgtgatgggtggttacttggagaatcctaagcttgctgtggctgccactgggattttgattcagactactagtcttatgtatacggttcctatggctttagctggatgcgtctctgctcgggtatgtatctttatactttctgttatgtgaatgtaactggtcaaaattatagttaaattaaagatgattaagtggtcaaaatttgagtcaaagctacaaagttgatttgagtcatgattagactaatgattagtgattaagtggtgaagatttaagtctagaaaactatttgactaagttgatttgggttttgcatttgaaggttcaaaatcatgaaacgtttgaatattaatttcgtttttttttaaaatgaattatgtggtgtttataattgatattggaaagagtggaagtaattatattaaattaaagactaaaaagacaaaagtcttggaacttgaaggtaccaaaacatttcagtagatgcaagaatgttttattcaagaaagatatgaacttttgttcttgtaattgacataagttcttttttctgtgtgtgtttttcgaggaccttattatgtgtttagaaggttctctgtttcctagtgattcgtattttgttcgagaaaattttgaattttgttcttgtatctaattatggatttactcaagggaagttcttagaaggctctttgtttcctagttgctgtttttttctttataagtttcttaacgctttttcgaaaagaagaaaagagatgataaaaacgtgcaatgtaatgggaaaatgttacatcaacttccattaataggtcactccgtggtatgtgattggacgttaacatacctaaaaataaaaatatataaaaaagtggttgaaaagagagtagtcaagtgtggtctattttattgttgccaatctcatgatactgttcaacctcattgatgtccttatctttcctttacacgtgacaaaagtttggcttcaataacttttttaagatttggtttcattgattttctcaggttgggaacgagctcggtgcaggtagaccttacaaggccagactagccgcgaacgtggctctagcttgcgcgtttgtagtaggagcattgaatgtggcttggacggttattctaaaagagcgttgggctggactattcactggctatgagccactcaaggtcttggttgcttcggttatgccaattgtcgggctatgcgagctagggaattgtccacagaccacgggctgcgggattcttagagggacaggtcggcctgcggttggggcacatgtgaatctcgggtcgttttatttcgttgggactcccgtggcagttggactagcgttttggttgaaaattgggtttagtgggttgtggtttgggttgctttcagctcaatcggcttgcgtggtttcgatattgtatgcggttttggcgaggacggattgggaaggggaagccgtgaaggcaatgagactgacgagtttggagatgaggaaagttggacaagatgaagagtcttcattgttattgttggatgatgagaagttgggtgatgttttgtaataaaattggataattgtggggtcaaaaacatgagagacgacttattcttattatgtgaagggttattttagtttttgtcttcattagtgatgagtgttgacctcgtttgttcaatgttttgtttgtatccgtttcgttttttttttaagtgaatttttctaattgaaacaaatcttggatgctcaatcatttttagtccttgaaaataagattaaaaaatagttaaattatcggatttggctttttgctagaaatggtgaaaaagaggactgtaataaaagcttgtaagagaacttttttgactatattattaagccaaacacaattgagcgcatgcatatagtcatttattccactttctagtgtggttttcataatcagcaagtaatttttagaagatcttatttgtgtaaattatgttaagttgggtcaaaaaagatgatgaggaaagggtacattattgtagagtacattctttttttttgcatttaaaatcgcaatgatttaaagcccgacatagacacatatgttcccaaaaaactttaggacatgcctttgccagattttcccatacaaaggactctttttttgtcgggcacttcaagtctcaactatggaattataaaaatttgtctcacacggacctatccgattcatacctttatctgtaatgaccggtttagatatccacttgttgtaaaccaagtgtcatgagctacaaattcagatcaatcttggaactaggtgaataacacagtgacaaagaatggtaagt

SEQ ID NO: 34164 - DNA, 742 bp, Arabidopsis thaliana landsberg
tgttgtttatagagcgatgatatggcctacgtccagtattattaaatgcaaagcctgtttacaggtcttgttggcataacaggtggctcatgttagatccagagtcactccgttacgatgtactgcagcatgttatcctcgttagtccggtatattaaacttgggatctcgaggtaccgtcgggtgcttgttcgacctttaagcaacaatggaaaacaacaacacttagaatagtcgatctgatagtcttcgaaatggttcatcaatctatcaacaagaaaccagaaattcaggagtttctatttaccttttgggaatgaatggtcgatcaaagtatggcattggttgtgccttagggaccaactctttcctcagccttcgtatctcttcttcttctgctagctgaagaatccatacaagtctgtcatttattcctactagtttacataagaagcaaaaagagttccctctaatctatttaccttttgttggcgttctctttctgttttgtattgctcgactaggtttattttctcagtaacctgatacaatgagacaatgctggattttatcatacaagatccacaaaaaagactctgcttgtgtagattcaaagttgaggtcataacgagaaactgaaacatacataaatctcaattatgtgcaagatttgtctcaaattctgacctggtaatcaaattctgcacgttctactgctcgaatgtcggaatggagctttaag

SEQ ID NO: 34165 - DNA, 1230 bp, Arabidopsis thaliana landsberg
tgcattcctaataagtctagtggcaaatacatcgaaactaacgtgtagtggctgtttgcttctgcagttgatggatgagaccaaatggtataattttgatgacagccgtgtttcagctgtaaatgaatccgagatcaagacttcggctgcttacgttttgttctatcaaagagtgaaaagtgattcagagacatcggatatgaaaatggattagtcggaacaggcccaacatttttcaggattcatgacaaagtttactcaagatccattcattgacctaatatttttattctaaagctgattgagtaaatagcgtttagattctaaagactgtatcgttagatttttttacttctttttttccagtgagggaaaaaatttgggcagtgaaaaacatattattgattgggaatatagaagtgaattaaatgtgtgatcctcaattcctcatactacataaggtgcaaaatgaatttctaacataaagattataggagtaataaaaacgaaaaatagccgtgaaaatagctcaagtaaaaaaaatatctggaatttagaagaatgcaaatggcttcaggacaactttaacttctagtaagttaaactcgagtttcgtgtaatcaaagtaagtgtctcgccagtaacatgctcaccaccaatgacaatattgcccctttcccttttctttttcccctgcaataaggaaacaaaattcattttgttgcaaatacttatattgaaacgaaccaattctctaagaaaaatattgatttttttattcttaaaaatgggataacattttagtgcaaaacaaagttttagacataaggttgaaaagcggaatctaatgctttacttaaaaaaaagatatcgtctttaacgaaaaagaaaattcgaaaaatcttaccgttaccgaagaagccgaaattgctaaataaccagtgaacgcactatccggggccaccggagaaaccggaaacaccggtgacttatcccttcctccaccgctactactattcccaccaccggtaccaccaccactagcacctctcacgacatcgtttaaagcaaacccaagtgaataagcctgagtcccatcaggtttaaacaagccataattcctctccgacgtcggaccaggtttcaaattctcattaaaaagggcaaaaacgtaaatacttagatcattattaggcttcaagggcgttttagtctttttaccactcatca

SEQ ID NO: 34166 - DNA, 1522 bp, Arabidopsis thaliana landsberg
gattgagtctccggcgattagtttcttctggttaacgaaagtgctccaaccggtggttaggagatgacggcgaggtgttcctctgtaaatatgccggaatttccaagtctcgccgtggatgtctttagcaatcacggtttgaaccggtggctccgccgagtaatcaagccgcgggaaaatcgtctcggcgcaataacgtggaacggagaaaccaccgccgttattagcgtcagactgcgttaacgttttagcgaaagacgccggtttctctttaccgttaccgttaccgtcagaagaaggaggagttagacccaaaacggcgtcgttttctagatccaagtcgtttcccggaagtggcaaaagcgtaattttagcaaaaacttcgtctgtttcagcgtcggcgaggaacttcacggagacgacacgacagaggataagaggtggaacgcgcggcgcgtgaaaatcaggaggcgcgtgagcgtgctctgtgtggccttgagcgaagtaaaaaacctttgaattcagtgaagggatttgaaccgtggatgctgcacaagcatgccatagttgtggatccaagcttttctcttgctccatctagacgaagttgtgtaacccccaaattctttacttaaaaggaaagatcaatactttgttaagtttcaagacatgaacatcaagttcttgtcttgagcagagaagaagagagagagagagagagagagagagacaagaacggtttcaggggaaatagagaaagcgaagtgaaagagatagagagagagagagagattagagtttaaatttgcagaggaaacagtaaagtttcgacttttatgattttgtttcacttcaaaagaggtataatagtgaagggggaaaaagctttaatggctgatcagatcgtagaagaagaagagagagatagagagagatgctataatcaggtacggacaagaccatcgtaataaataaacatcttgtttttctctttagtaatgatgtatacagaaccaagaaccaaacaaaccagagagattatctcaaacacaaactttataactctttttatttttcatttttttaatataaataatatataataaattgttttcaagataaataaattttgtttttttgtttgattaaaaaaaactgcaactaacttgtttgtttcatttgttgcttcactaataataataaaattagcaatttatcgtatcacgagccgcgataatttgacatgtaccaacaaatttttgattttttactcgaaaaatcagaaaccatgcttgaccagatacaaacctaaccatggttaaatcttttttatctttttttttttactttctgcttttcactttgactcttttttttgcccgttagtgaaagatgggttccattacacgattgtggtaaaacaagaaataggttaaacccatggtaaattatatgatgttgaaattaaatgccaaataaacagtccttttttgtactacactggggtaaaagctatgatatt

SEQ ID NO: 34167 - DNA, 1242 bp, Arabidopsis thaliana landsberg
cttatagtttagtcatcaaggaagggtggggctcgtgtgggcaaagcccgaccctccctcaggggctaaaaggggggaaccccctctgcgtcgaattttttcctcgaaaaaagatcctttctgccagaatgtctttcgtgctttttgactacttcgaaagcggatcctgaaaacgacggagtacacgtaagcagccaaggctgaccgagccgagggactcctacgcctccgggatacggatacctcactcatcaccttctgcgataagtaactcgcgttcggataagtgattccgcggaccaaacaagtcttcacgttcggaagctcttctgctgaagcggtccttcaagccttctcaactgaatcggtgacagggcctcatggactggtgaaagtacgcgtaagcggcaaggccgaccgagccgagggactcctacgcctccaggatacggatacctcactcgtcaccttccgtgaaaagtaactctcgctcggacaagcaattctgttaccgacaaataagtccagatactcgaaacaacaggaaaaggaacgcaaccttacaacacgactacagtatgtttgggcctcggcggtcgcagaaaacatacgcacactacaagataacccgatcctgcaggctcacatcttgacagttgaagggagcagtagcaccctcggcgtcaactacaccttcggcgaggttcggcctagcctcggacggcgacgcggtcggaggatctccactccgaaggacgacatcagcaccacgcccgggccatcgccgccagggtcttctctaggaatccggctcgagcaaacggctcgaccggccaccccgaagcctcattcagctgtcccccgaggacatcagcccggctcatggcctcggcaacccgactccggcatcggtcccaccagtggacggcccggccaggctccggccgacgaagcttcttttcgagccaactctgcctctgttcatgctgacaccgctgcctccggctccggctcatcgcagagtggccgagggttcctttaactaagcaagagatgcctcgggcggcaaggccgaccgagccgagggactcctacgcctccggatacggatacctcactcgtcaccttcgcatgaggcaactcacacttggttaagcggttcggttagccgacagacgagtcctagtgctcgaaatgaggaagaaacatggcttcacgccaaaatacataaatgttcaggcc

SEQ ID NO: 34168 - DNA, 2708 bp, Arabidopsis thaliana landsberg
tcggcaaaatgatcgatttgtctctttcttctttcaatattaaaaatgaagatgatgtagagaggaagggtagaagtagaaccaacatttatcaatacagaatgattttttttggtaaaggatatcaatacagaatataataccgttcatatatggggaacgtccatgcctattttacgattattaattcatatttctaatttgatggtaccttttttctttttttttttggatgaatggaaaatttaatcattaaaaaaacccatgggtacctgccatatatgcttttctgagccaaattttaaaaattaaaaccggagaattagtttaaggatcgaaaatgccaaccgaccttatgccctcgtcctaaaccattcacgcaggcaatcattgaacttgccctgacgttgtaacgttgataggcgattccaaacagtactgtcaatgtccttagatggtagctaaaattagatctttatctgtattctgcttttaaactacgtggagaaataattgaatgaaatcgttgaaacatttgttttgattatacgaatttttaatgtgatttttgttttgaaatctgataactcgaaaatatgagttagatagttctactgctacatgatttcagaatgtaaactcatagtccgaatggtgacggcgtatttgaaaagtggtttgatagtgcggtatggtccaactgcggtacatgtgggaaaaatatatttgcgggacaaatacggtttgtacaaaataagcggtacaaaataatgtttgattggtgaaaaaaactacttgcggtgcggattatagattatatatatatatattaatatatattaataattataaatccgaatatattagatttttttagtaatttatatacatttaaatatatttgagataaaagtaaccaatgttatagttttctttttaggtaaatttagtattttggttacatttggttatatttgggtaaaaagtaaccaatatatttatgggtaatcaggtattttggatagattttggtatatatgagtaaaaaaaccgaaccgacccaaacctgaaaatattttgagtatttttggttacttttgcatttatactaaaataaccgaaccgatccgaactcgaatcgaaaccgaaccaaatttttagaatacctgaatggttcttaacatcatacctgaatagagccgatacccaaaagaaaaataaaactaaatgggtacagatactcgaatgtccacgcctaaaaaatatgatataaaaagagagatagaaaaatatgtatttagatacaaaaattatatatatacatatatttttaatagctaaagaaaaagaaatgaatatcattcatcgcgtattttacttgtaccacatggtaatgagatgtttcagttataaaaggcggtccatgtacttttacgctgtatatgaaaaacgcagtatacattttaagaaaaatataaaaaacgtaaatttgtaatgataaatgatgattggtgttctaagtgcggttctcaaaattctttcgtgaattccgcaaattatatgttaccattcacacccttagtgttttgttccctatttatagtatgagattgtcccgaaccccttttcgcttagttgtaagttaatatatagcatgtttcttcaatatgaattataataattcatgttgaacccatacattttctcaaattaattggcaaacatataataacatgtagaacagaacatataagaacagaacaaaaaaaacatgtagaacaagaaaacgcttttattgctatatcgcagtagctaacaaatgcttccaaagaaaataatttgggatagaactcagcatcgttagatgtaaactgagtccgtaaacattcaatctagtttgctataaaagttcgaaaataaattattatgccaagaaaaaaaaaaggaaaacaaaaaggaaaactagaaaacagaatatagttgtaaataaataacataccaaaaccacaaaagaagccagactaatgaaatcaaacttgtaatgctgcttttttagtttgacttcagaggtattgagaccaaactggggaaaaagctacaatgcaaaggccagggaccaaccacagaatctatttgaattttactgatcaacttattttctccgaaaacatagatccaagcccgaccagtttcgttgcacgagcacacgacgagccttttatcttcaataaagtaacttggctgagagtcgaatccatctactaaatccggcaagttaggacttgaaacttccatgaactttatccattccacatctctatcaagattattattaatcttgtacttgctcacccaaatctcaatcttctttgttgcatggcattgctttaacaatgaaaatcgacctccctcgaaaaccctaaggacgaaagcatccttaagaaagttcgacgtcccacatggtagatcacaaaacttcacgacgctttcgctcgaagaattgatttcaattaggtggtacacgagatcagtcgtttcaaaataagtaaccaaatacaaatttccattcaatgatacaccactaattttagtgtatatgttatgaacaatttgttttccctgactattcccaataggctcgcggtctttccacgcatcaaaaacagagtcatggattgtcaacaatctctgggtgtggttttccttcc

SEQ ID NO: 34169 - DNA, 930 bp, Arabidopsis thaliana landsberg
gagttcactttacgctagttgatggattttgatggttcacatgcttttagttttgtaaaaatggaatggtgaaaggtctatatctaacccatccccattccgtctaaaatattaaaatgttgtgatctctagatcgagtgaacatacagtataggtcataacctttcagttacagaaggtgatcctcttaggaaaacgaagccatgtctcgagaagatggctcggtgtggtgatgaaagacataattagacagaaactactagaaaaatcttaacccttttgtcccatattttggctttatggaaaagaccgcggcatatgtcatacaacctttgttttcttctttttctatgtgtgtgtatgtcgtatttatacacgtatatctacgccaataatttttatgttgactctttttctaatatttataaatcgttgaataggattccattaatttgatgacatattcacatatctacctttagtttataacctaatctatctatatttttaatcataatcaacagcatgctaataaatatgaatgttgtctatttgattcattttacaacgcatgaatattacacagtaacaaacaaactggtgagagtccaagtttaacggctacaaaagggatttttctattacaactattctaacgaaaagttgaacatataaaaagcatataaaagtttaagaagattttaacagacatattgtctacagacacagaatttggtgttaagttgaaaagaaaaaaaatatatataagaaaagcagtttagttcaactgataagcggtgaacctcaaccgttcggtaaagagattattcgatttccatcatatagtctaatggtttttttttttttttttgggacaaactaatatcgttgttatgttattatatagattgaatgaccaaaaagaagcgt

SEQ ID NO: 34170 - DNA, 642 bp, Arabidopsis thaliana landsberg
tgagttttaattattattttatgcttatccttaaatgatttttatcataattaaattcaatttaaatgaattttatacacattaaatagttggacacatgttaataagttaatcttttatttgctctcacataataagatgtcaaatccttaaagaactcccttcatcttttatataatgggcagatttggacagatttctcagttatggaactttaattgtgtaattaagagagatccttgtttaataaatgagagtgccaagtagttcaaaaaggtaagagaaaaactaaacttttaaacatataattataacaacatttagtgtaaatcttaataacaagtttaccaaacaagatcattaacaaatcattgcacaacataattattctttacttgcttatatttagtgttcctctgcttcctctgttctctgtcatggctcgttcagtcgacacagaagcaatgaccactcgcgatccaagcagcaagcgcggtggctggaaaacgtttccattcatgatcggttagtgtattttatgactgtttggtttatgtttttgaacacaaaacatagactaatgatagtgattgaaaggctctatatggtgcatgctacattgttaggactttccatagcttc

SEQ ID NO: 34171 - DNA, 2354 bp, Arabidopsis thaliana landsberg
  unsure (1)..(2354): unsure at all n locations
aacaacaccagaacctataattatggtacgtactaacctcgtattttcgttttttaatggtagatttgaattcggtgtttgggtattagatatcataaagtatcatcagtctagaaataataacatgttcctgtatcaccaacattataaacagtatcacatgctttcgtatcctcaccatcttcttgacctatcctccaaatagatcatatattagaactataaccctagtacctcagtagcccttactctttttacttctctcccaagaaaacaattcttgatgtctcaaacctttgctgtcatcttgttactactcatcttcttaacacacttagtttcatctctaattcaagacttctccttcattggcttcaaaaaagcctcaccaaatttaacgttaaacggagttgcagagatcgcccccactggagcaatcaggctcacaacagagacacagcgcgtgattggtcatgctttctactccttaccaatacggttcaagccaatcggtgtaaaccgagctctgtctttctccacgtcttttgcaatcgccatggttccagagtttgttactcttggtggccacggacttgccttcgccatcactccaactccagatctcagaggttctctttctagccagtacttaggcctgttgaattcaagcagagttaacttctctagccacttcttcgctgtggaattcgatactgtcagggatttggagtttgaggacattaatgataaccatgtaggaatcgatataaacagtatggaatcgagtatttcgactcctgctggctatttactcgctaactcaaccaaagaggagcttttccttgatggtggagagtgattcaagcttggattgattacgattcaaacaagacaagggtagatgttaaactttctccattctcagagaaaccaaagttgtctcttctctcttacgatgttgacctatcctctgtttttggagatgaaatgtatgttggattctctgcttccaccggtttgctagctagttcacattacatcttaggttggaactttaacatgagtggagaagcattttctctgtctttgccatctcttcctcggattcctagttcaatcaagaagaggaagaagaagagacagagtttgattcttggagtatctctcttgtgttcccttttgatcttcgcggttcttgtcgctgcatcgttgttcgtggtaagaaaggcgaaagatgaagacagagttgaagaatgggagcttgattttggtccgcatagattttcttacagagagctcaagaaagctactaatggttttggggacaaggagcttctcgggtctggcgggtttggtaaagtatacaaaggaaagctcccgggttcagacgaatttgtagccgtcaagagaatctctcatgagtcaagacaaggtgtacgagaatttatgtctgaggtctcaagcattggtcacctccggcataggaatcttgttcagttgctcggttggtgtcgaaggcgggatgatttgcttcttgtctatgatttcatgcctaatggaagcttagacatgtacttgttcgacgaaaaccctgaagttatcttgacttggaagcaaagattcaaaatcataaaaggggttgcttccggtttactctacctacacgaaggatgggaacaaacggttattcaccgcgatattaaagctgcaaacgttttgttggacagcgaaatgaacggacgggtaggagatttcggtcttgctaagttatatgagcatggatcggatccgggggatacaagagtggttggcacatttgggtacttagcaccagaactcacaaaatccggaaaactgacatcaagcaccgatgtttatgcgtttggagcggttttattggaagtagcttgcggaagaagacctatcgaaacaagtgcgttaccagaggagcttgtaatggttgattgggtttggtcaaggtggcaaagcggagacattagagatgttgtggacaggagattgaacggtgagtttgacgaagaggaagtggttatggtgatcaaattagggcttctatgctcaaataattcacccgaggttcgacctacaatgagacaagtagttatgtatctcgaaaagcagtttcnnnnnnnnnnnnnnnnnnnnnnnncggattttctagatgcaaatgatagtatgtgtcttgatgagcgcagcggtagtgcaggcgagtttgaagattttgtggattcagctaggttctatagcgccccgaatgaaactgctacttcgtaaatattttcaatctccggtaaaacaagaactgatccaagataattggggcttttacccgt

SEQ ID NO: 34172 - DNA, 1656 bp, Arabidopsis thaliana landsberg
tggaaacacaccaccactctcgtgggagctcaggttccgaattgcagccgaagttgcgacgggtctgctcttcctacaccagacgaaacccgagcctatagtgcaccgtgatcttaaacccggaaacattttgattgaccagaactacgtaagcaaaataggggacgttggattagccaaactagtgcctgcagttgctgaaaacgtcacgcagtgccacgtgtcatcaaccgctgggactttctgttacattgaccctgagtaccaacaaactggaatgctaggtgtgaaatctgatgtctactcttttggtatcttgcttctcgaacatgctcacagcgaaaaggccgacgggtttggcttataccgttgagcaagcaatggagcaagggaaattcaaggatatgttagacccagcagtgactaactggccggcggaagaagctattgttttggcagagattgctcttaaatgtgcacagctgagaaggaaatgaccgccagacctcggaaaagaggttttaccagagctcaataaattgagagctcgtgcagatacgaatatggaatggatgatgttcaacttaagtagaggtcgtctaacaccaaatcatagccaagtgtccttgccaccagttgtaagtaatgaaaaagctctttgcaattctagtctttaagttaaaatctttgaaatgctttggttgcaggatgaactaagtgtatgctcggataagtcttatacacattcaagcactgtatccgacacagagaagaactcaggtgcattagagaaccatattttttccatcttctttaacatttttacaatgtgtttgatccatcaaatcttacagtttactctgtttcttttccagaccaaaacgaagaggattagcatattttgtgtgttgaaggaaatggagtgagaccattgttaaagcttatgtaattgtgaatattgttgtatgtatgtatgtatataattcgtaaaggaagaaaataactgaaggaaaaagttgagtaggtttgttataatatctctgcaaagacgcaaactctttttttgatatgtaagacaaaatatatagaccacataattcgcaccctaattctaagaaacttctaaattgagaaattggttcatcgatttcagtggaaagtggtacttagctaaattgagaaaggtgcctcaatttcagtagaacctgacgcaaaatttcgcgatcatgcatgactcaaattggtttattcacttcaataaaaaagttgtttccctatctagttgaagttctcaattcaaacgcaacttcttactttttctttttatttatactggaatgaatttttcgtcaatgctagacctcaatatttggtgattaagtccaaaaaattatagcaatattcattagttaaatcataataatatttgttatttctgctaaatatattagttttaaattggtaaatatatcagtcatcatactttatatatgtgcacaagaaaaagaggaaaaaaaactaacttttaataaattgaacgctatcctctatatctcgtcctggtcccaatgtaaacttcaaaaacccttttgttttaatggtgaatggtttaaaaaatttcaccaacccttttatcattcttttattcccccaaaa

SEQ ID NO: 34173 - DNA, 872 bp, Arabidopsis thaliana landsberg
  unsure (1)..(872): unsure at all n locations
ttcatatatacactaggtgccaaacttggtcacgtgtttggcccttcacgttcttgattcttagatccttgtttcttatggattcttgaatcttaaatcttgaatccctgagttttgttggttcttgattttgattctcgattctttagtcattgattattcgatctttgttggtttttgattagagatttaattagcatatttatgtactaataattgaataaatgggaacaggggagatatgatacttacaagaagaaaagtggacagattcctcggtttggagaatgggaagaagcaaatgagatgccaataacacaatactttgagaatccaagacaagctggtctgattcgtcaccaatacacaacaacttcttctgcttcttccactaccacttcatcttcatcttcttcttcttcttctgcagaagccttaaagcttgcttctcaccatccccgtccacgtcacctccacgctcaaagacaggttcattcatctaatcactacttaattttcttaattatataacatttatttaactcgataaacgtaattaattatctaaagaagaacgcgttgtttgtttgattaatgacttggcgtagacggcggggacgaaggagaaaagaggaccacaaggcgtgtgcgtgacgtcagtgcacagtcggacaagtattacattgacgtcaacggtgttaagcagttcaaaacgacgttgctctgacttgtaagccacctaagcccgttgatgaagatctctacaagattcctcctgagtttatccattcttcaacangggtaagagctccttctcacacaccaactnatttactgcattttataacaaagtttatatattttaatcaact

SEQ ID NO: 34174 - DNA, 562 bp, Arabidopsis thaliana landsberg
gtcttagcttgcaccgatgggttggtccttatttacacagaaactagctatggaactccaatgcattacgttggtaatcctctgtttcaagaatggtgtccaataccctctcccttcttacttctatttgcaaagtgttgagagaatacgtaatcaccagcgtttcaacgacagtgcattggttataaagatgcagagtggtgccgttgtgagttacaaggttgtgtggttgttccctcgcaatagtacaaccatcgactttttgatttactcatctgatactggcatgtgggaagctcgaattgcgacttgtcttcattcttccttctggtttagtcatcacaagccgattgctttgaatgggattcttcattggctttgcaatttcagcacttcttttgtagcttacgatttctatggaggtcatgatgattatgcatgtcatatcatatctctccctgattgtgaaaaagatgatgatcagttacggcgttttaggagaacattgtcgacctcggatgggtctattgtctacttcaacgagtttggtgagaacggaaac

SEQ ID NO: 34175 - DNA, 701 bp, Arabidopsis thaliana landsberg
agaggattgactcagtcagcatcgatcaggccagttcaattttacgtgaggcacctcatggatagaagggtggccttaccgctgctaggaggactggtcgtctcaaaggcaaaggtcaagatgtcgttttaaccgtcaagggcgacacagggtactaaaacataaccttctttcctatttttttaaaggttttaactagactatccatagtagctcaagaaagagagatagaaacatggaacttttgtaaattgtagtcccaaatatcttttattttaatatttgtcttttatccaaaatatgaatttgtaattctctgttaggaaattgatttgcagtcatataatttacatgaattttttaattatatgttacgaaatatacattttttctgtatgtgttgcacacaattttttttaaaatatatgaatcctttaattttgttgatatataagcgatgttatgaatcaccagaattaaaaatattggatccaccatttagacatattgtaataattcatttagaaacaaaatcgaatcccagactgactgtaagaaaataaacatttgatcaactattaaactaaatgattttcataatcattacatagatttaaaacagtaaagagtaacaaatatttggtgacaaattggtaacaaatagtctattcatttgtgttaatgttattgttgtaacataa

SEQ ID NO: 34176 - DNA, 395 bp, Arabidopsis thaliana landsberg
accaaatagaggggcgtaacgagaaaaacaggatcttcacatacgcatttcactgaacacctagaaggcagaaaccaacatcttaagagcctgtctattgggacactagtcgaattcgcgacctgcattcctcagtgtgttcgaagtaagactcaaacagataccaactccacagggacaactcttttccggaaaatcttgttcaccggcgacgcctcctcctccggtggtaacagcgacgctgcgagatttagaggcgggatttaatggactttgctgccattgttcacttttgcttccttttagagccgccatgtatggtccttccggtatagaagaaatcctagggcgtttcgctgctgcttcagcttcaattgcggcgagttgtagtagga

SEQ ID NO: 34177 - DNA, 760 bp, Arabidopsis thaliana landsberg
ctagctaaggtccttctaatgctttgtttatcctcttttctgccgttttcccccatgagctcaaactacttgccgttagttggtttgtgatcacatctagaaatgaaaaaaatgaatattaacatgaattttgacccaaaaaaaaaagaaaattactaatgaaattaggatatggttagtaaattgtagattaatgattgggttttgtatattattgatgttggtcatctagatataaaaataaagacttacttagtccatagcttctatcgcggctgaggatgtcataccatctcattctttcgcaatatttcttgtatacatggtcatcttcaactccttgtgtttgaatattctctatcgtaaccgaatcttggagcgctgaatccaagcttgcaatagataaaggcgagggatgatctctttcgctagaaactagaaaagatagatcattctccacgtctgagtttacaatttcttcttcttcgtcatcgttggttaaagaagcttcatcttcttgatgtattggcatagtttgaatttcgaactcaagattcttctccatgtttacaccatcaaaaatgtcaacgtcgtgttcctcctcaacctccttagcatcaagaagctcaacaacatcttcttgatcaaattcatagaaaaaatcatccacatcttcttcttcttcaagaatcttgcctttttgcatagatatacgaacttttaaatgactatccacttgatatttaaacgaaaatgagag

SEQ ID NO: 34178 - DNA, 1454 bp, Arabidopsis thaliana landsberg
cagagagccaatagacctaagggcacaaaagtctcgacaaatcgaagaatctgtgaccaaggggaatgctttctctactgttagcaccaacaatgattcaaaatctgggcagattctttctggcgaaccgatagctccaaaactcggcatagactatccatttcctcctcacctgcagtaagtttttactgctcatactttttagatttgttccatttcatatcacttatccaaaaaaacataggtcaaacacaatgtgacaacataacaccattctttaatcattttctcgacttcagatgtttctatgtttgatcgggttcattttgcagatatgcttacccaccacccgatgcaaatatattagccaacattactaatgcccttatcgctgtcccaccgttatacacccaggctagctttgctgtcactgtatatgtcctgtggatagaagttctttctccctatttttttttttcattaataatctgtagatatcggcaatcatggagtgcagaaaaaaactagcaatgtagttttagaccatttgctcataggtggtgcatctgatgaacaaaatgaatcttcctcctccttttcgcctggccctgcccacacctcctctacctggagcaggcccccaacaaactgacttggagcatcaatctagtagcgagtcagagatggaatctgatgaggtatgactcgtcatgccatttctgcattttatgataatagtaaaatggcttcatgctgagctccttatgtttgtttagaattacatttcgtagttgtcatcttgctttgttctctttgaacttagtaaactacctatgtgataatcgacacatataaatgcttagaatttattcttattttctctactctttatattctttgatattgagtactttgcgtaagaattgtgatggtattacgtttaggatataggtacgtcaaaatcaggaaggaagcgtgctagacatggatttcttgttggtcttggtatggacaaggatgtgccacatgagactgttggagtgaaaccttcgtctttgaccccaaaagagatccctcgaataagaaagaataaacacgttatgcaggtccataattacctttcaataacaatatgctgcgtacttgtgctgatatttttaagatctatatgtcgatagatcaagatcacctctaaagttactcaagacgaatataaagaggaaagtgagaatgaagaccctgcagacgagcccaaagaaaaagattcaaatttgaaaccctttgcaagtttagaggaattggagaaaggaaggttacctccacaggatattctttcactccctatgttcaaggtatggaaactaggattaagttacataatacttatgtttgtattgagtagaacttttctaatgaacgatgtgactatgtgagcctgataatcaaactcgaag

SEQ ID NO: 34179 - DNA, 1499 bp, Arabidopsis thaliana landsberg
  unsure (1)..(1499): unsure at all n locations
ccaaatgcaaagatgttggcggacactacactcagatggtggctaatcaatcgttaattctccgatgtggctcgttcaggtgtcatgagaatgagttgatttatattgtatgtaactattatcctatgccagtgggtgatgagaatacccgtccttattgattatattgatgcaaagaaatgatccatatggtaatgtgatttgacaattattaatatgttaagttactgatcaatatatatgtataagaatataaaaccaagtttatgatatacattggtttgtataagttgctgctgtgaaatgattcagaataaaatgtgatgttcaattggttaaacaaattgtgattacatatatttgatataataatatatgaactttttgttatagatgatttataatattttcgtaaattatattcggagttattttcctttgtatttagtccgttggtatctagagcaattgtgaaaagaagtagctaagacatgaaaaattgtgcttcctgtaaatttcattacgagcatttagataatgatggtttatgtttctttttgaagtagctaagacatgaaaattttacaaatagacacagctctactgctctagcagaaaatatggagcaaatttctgtcttggggagctttatgttgcggttaaagcggctatgagactctaagcatcctatatataatagagtagataacaaattctatagagtatgtaacgtgtgaacatccaacatttctttaactttaaaatgattaaaagttgtctactgggtcggtttaatagtttatcatcttccttatgatgcgtatgctttaacttttcaagaaacacaatgatgcatagtgttacgttgagttttggggaatcatttcatctgacatatatgggagaggacatgtttagtttgtattacgaaacacggaagaagtatggctaacagggaataatggatattacaaaaccttatcagaacacagaagacattgcaaatgtccaagaagcatatatcaagacactgtaagcgcacctctgaaaatgtcattgttgatcaaaaataaaatatattatgtggcaactggcaagtcatacaatcacatttgatcgtactagtgagttatagcttcaatgaccaaggagttccatgcgatacacaatgcaccaaatttggtgtgaagaagtaaacgtaacttatcaattgttcgaatttctgtggattttatgcaatcagtattcgtaaagtaacttggttttataagtctgttctnnnnnnnnnnnnnnnnnnnnnnnaacgtttagtctgtttacttcgttatctcataatccaaattcagcggccacgatcagctagactactgtaaatcaggtggtcgtgacagcacaagatcaacgatcccagttctcccttcttcgctcatatgctaaattctgattaaaacatctgacgaattcgttcttcccctttctaattggattctcctggaaca

SEQ ID NO: 34180 - DNA, 3418 bp, Arabidopsis thaliana landsberg
tttacttgatactaactcttctcctgcataacaaagtttaattaattaaatacaaccaatgatatttatacaatgcgcatgctagcaatcattgataccttcgttgaagttcttcgcggtacttagcatccatttctttattaggaggatacttaggtaatgtcgatggatcgcaagcgtaaggctgtgtgttaaagtactgaagaacaacaacaaaccacagagaaaacaaaagagtttcagcttatttgattagagtacatgctagggtttcgtttaggaagttttttcacctctgacataagagcagaagaagcagttcctcgtttctcaggatcaatagacaatagattctccaatagattaatcgcggttttcggaaactcatcaaatctttctctcaaacaaccttcatattgatgttgtggtctaaacatcttagtttgaggatgaagcttgttcttttcccagaattcttcatctggtgatccagagagtttataaatcttgtgaagttgttcaatctacagagaatttcacaaaaacaaaacattcagaaacataatcttttctccggaatcggtttggtccctaattcctcacctctgttcttcctttaagaagtggtcttccggtaagaatctcggcgaagacacaaccaacactccaaagatcgaccgatacgctataacttgttgaacccattagaagttctggtgcacggtaccataatgtcacgacccgactggtcaactgattcttgtttcttggtgttacaatgttggctaatccaaaatcagctagctttaaaactcctttgttattcaccagaatgtttgcggcttttatgtctctgtgcataatccctcgtagatgacaatgttctactccccatagcagttgcttcatgtaacatttgatctggaaacgaaattagggttgtcagagtaaagaaagaaacagagtcacttgcagaagagattagggttttgtgtgtgcgtgtctctctcttgcctgtgcctcggtgaatttgatgtcgggagatgaacataagccttcgaggtcgtgttccatataatcaaacacaaagtacatgctgtttgaattccttgatgcgatgatcccttcgagtttcataatgttgggatgatctaatcttctcaagatcatgatttctctcgcaatgaatcttatattttctgtttcaaaattttggacccgtattttctttaaagccataactcgtcccgtcgatacctcacaagcccggaacacgttgctatacgtcccttgcccgatctaagatttttagagaaaattattcgttgaaatcattgatagggttgtttcttgtcttgcaagaaaatgtaataatctatgcctctatggataggattattttaccttctctcttttctcgaagtcctcggcgcgtaatggaacccacccatgaacggcctcgggagcggcagagctgagccaggagggccaaccagccgccacctgctcagcctctacattgctgtgcggcaatcccgatcttaggctaacaccagtcgtcctcgattttggagcatcgtcgtcattgttgcgatgttttttcggagatgagttgacgacacggcggtgagatggtggaccgggaagaacatggcggttatgggaatcttgggtatgacttcggtggacgttggtgtccaagcgacggcggacagggcgtggaggacccgccggagaagaatgcttggagttgaagcaacccataataaattaattgtcagaggagagtttccgggtggcggcgtgagtatcgacccgggtcgggtaaacgggtccaacgcagggagggcaatccccgcattagaccatagagaaacgaaaataaaggagaaaaaaaaacaaaaaattgaaggaaaatagtttttgttgtaaaatagagaagagaaccgaatcgagagagtgagataatcacggacaattcgacaatcctccttaaactttggacgacaaaagagacaagaaagcaaatctttaatctctctcttttgtaatttaaaatagatttatcttacaccctaacaaaaaaatgaagatatttttttactaaatttttgaagggaaaaaactgtaatgaaaaaaataatctatatgttacatcaaacaatgattaggtacaaaataataaattcataatttatgaagaaaaagaaaaaaacaaaacaaatttctttcgtttagtcaaaagcatgcactcaattcacatcacacatgttgttatacaagtcatcaataagtagtagcccggttcagaatcaatcaccaagcggctaaaccaatcctaaatatcaatctcgaaatctttggttcttaaaagtcaaattgtgattttctcttctttcaacctcaaaacaaccggagattggcctgtgttattattgttaccgaaactcatatgttgttgcatattgttccccgacattgatctcatacgatggtggtcagacggccccaccgcagctgcggttgctgccgcggtaccgtttctagcggcagggacatcgtgattgtgtttaccttcgtaagttgtaatcacagccttagcatccgtggaagctctctctacatgtttacggaccgtacaatttggcgttgtacatttataatagctcctaataataccaaaataaaacgagtatttaaacaaaatgaatgtgaaataatgtatacaataatcaaattatttctatatagattcaataagcacaaccctaagtattagtaccttggatggggatttcctttgacaactttttgtccgtacttacgccacctatagccatcgtcgagaagatcgacttcactttttgtctgaacgataatcttaggctcggtcaccgtccggtgagtcgtcgacacaccgtctattcttctataatcccgatatatattaactaattaattggcaatgccatgaccattatactaatactatgtatgataatcagatgcacttctactataccttatctttgaagccggaagatcttcatcatcttcatcatcatcatcatcatcatcatcatgatccttacgataaccactatcatcactagattccatcatttgccctgcaccaccaacctcagtggaatctctgcctccaccgccacggcgattctgaggcctctcgtgatcatgttgacctttgtaaatgatctgagtgatctgtccatccgatgaccgttcgactttcttcttcaccggacatttcgggtgtgtgcatttgtaataactccttggacactcacttcctttaacttgcttctgtccgtatttccttcagttgtatccatccacagaagatctatccccagtagatgtctctgattccgtaaaagatggaactttctggactaga

SEQ ID NO: 34181 - DNA, 632 bp, Arabidopsis thaliana landsberg
tatcagaaaaaaataatcttacgacaaagagttgtttaataattcgaaaaaaaaaattaatttttgatatgattcgaagaattctcataattttattgtgtattgttgtcatttcaatttgaatattattatatctaagtcaaatgattttattgtatcacttataatttcattgtaccacttatttagtaacaaaacgacaaaaagttgtttggtaatttgttgttattggaagaaaaaaaatatcttacatagttctcaaaaattcgttttcaattttcgatttgattttagcaaaaaaaattagagaagaggataagaaatgtgtcggatgaagaggacatgttggaacagatttggaataacgtttaaagactttataggggcaaaaacatttatgtttctttgctaaatttggaagcaattccatatcctcctaaacaaaatcgacctctcatttatcctttgttctttcttttttgcacttttcttttctttcatataaatgtattttctcttttaaatttttataaatttgacaattgtttatcaaacttatagttcaatcaaacaattgacatggtcaatatatttgagtggtggcgatattacatgttgattgaatatagaga
